United States Patent Application Publication US 2005/0255487 A1 - sequence listing, part 37

SEQ ID NO: 1008398 - RNA, 19 nt, Homo sapiens
  misc_RNA (1)...(19): siRNA sense strand
ggauuuaaugcccacaaag

SEQ ID NO: 1008399 - RNA, 19 nt, Homo sapiens
  misc_RNA (1)...(19): siRNA sense strand
gaucauaugugugcuagug

SEQ ID NO: 1008400 - RNA, 19 nt, Homo sapiens
  misc_RNA (1)...(19): siRNA sense strand
ggacgacggugguaucauc

SEQ ID NO: 1008401 - RNA, 19 nt, Homo sapiens
  misc_RNA (1)...(19): siRNA sense strand
gacaggaaguacagacaga

SEQ ID NO: 1008402 - RNA, 19 nt, Homo sapiens
  misc_RNA (1)...(19): siRNA sense strand
gagcguggcaagcacagua

SEQ ID NO: 1008403 - RNA, 19 nt, Homo sapiens
  misc_RNA (1)...(19): siRNA sense strand
ggcagacccucuucuucaa

SEQ ID NO: 1008404 - RNA, 19 nt, Homo sapiens
  misc_RNA (1)...(19): siRNA sense strand
gauaacggcaccuacacuu

SEQ ID NO: 1008405 - RNA, 19 nt, Homo sapiens
  misc_RNA (1)...(19): siRNA sense strand
ggaugagcguuuccagcuu

SEQ ID NO: 1008406 - RNA, 19 nt, Homo sapiens
  misc_RNA (1)...(19): siRNA sense strand
gcugguguuucugaucaua

SEQ ID NO: 1008407 - RNA, 19 nt, Homo sapiens
  misc_RNA (1)...(19): siRNA sense strand
ccauaguugucauccagaa

SEQ ID NO: 1008408 - RNA, 19 nt, Homo sapiens
  misc_RNA (1)...(19): siRNA sense strand
gcaagcagacgcaguacgu

SEQ ID NO: 1008409 - RNA, 19 nt, Homo sapiens
  misc_RNA (1)...(19): siRNA sense strand
ggcaagcacaguacgguuu

SEQ ID NO: 1008410 - RNA, 19 nt, Homo sapiens
  misc_RNA (1)...(19): siRNA sense strand
cagacccucuucuucaaug

SEQ ID NO: 1008411 - RNA, 19 nt, Homo sapiens
  misc_RNA (1)...(19): siRNA sense strand
agacgucgguucccuaugc

SEQ ID NO: 1008412 - RNA, 19 nt, Homo sapiens
  misc_RNA (1)...(19): siRNA sense strand
acagcaagcagacgcagua

SEQ ID NO: 1008413 - RNA, 19 nt, Homo sapiens
  misc_RNA (1)...(19): siRNA sense strand
cggcagacccucuucuuca

SEQ ID NO: 1008414 - RNA, 19 nt, Homo sapiens
  misc_RNA (1)...(19): siRNA sense strand
gcaagcacaguacgguuuc

SEQ ID NO: 1008415 - RNA, 19 nt, Homo sapiens
  misc_RNA (1)...(19): siRNA sense strand
guuuccagcuugaggaguu

SEQ ID NO: 1008416 - RNA, 19 nt, Homo sapiens
  misc_RNA (1)...(19): siRNA sense strand
cgacggugguaucaucauc

SEQ ID NO: 1008417 - RNA, 19 nt, Homo sapiens
  misc_RNA (1)...(19): siRNA sense strand
cgagggcgcucuacguacu

SEQ ID NO: 1008418 - RNA, 19 nt, Homo sapiens
  misc_RNA (1)...(19): siRNA sense strand
gugguaucaucaucuguga

SEQ ID NO: 1008419 - RNA, 19 nt, Homo sapiens
  misc_RNA (1)...(19): siRNA sense strand
agacagagaacgugacagu

SEQ ID NO: 1008420 - RNA, 19 nt, Homo sapiens
  misc_RNA (1)...(19): siRNA sense strand
gaacagggagaagcaagag

SEQ ID NO: 1008421 - RNA, 19 nt, Homo sapiens
  misc_RNA (1)...(19): siRNA sense strand
caagaggaaagaggaauuc

SEQ ID NO: 1008422 - RNA, 19 nt, Homo sapiens
  misc_RNA (1)...(19): siRNA sense strand
agaggaauucuucaucuga

SEQ ID NO: 1008423 - RNA, 19 nt, Homo sapiens
  misc_RNA (1)...(19): siRNA sense strand
gguuucguguggaccguaa

SEQ ID NO: 1008424 - RNA, 19 nt, Homo sapiens
  misc_RNA (1)...(19): siRNA sense strand
gcagacccucuucuucaau

SEQ ID NO: 1008425 - RNA, 19 nt, Homo sapiens
  misc_RNA (1)...(19): siRNA sense strand
cgcaguacgugcuggaugu

SEQ ID NO: 1008426 - RNA, 19 nt, Homo sapiens
  misc_RNA (1)...(19): siRNA sense strand
gugagcagcagccaggaaa

SEQ ID NO: 1008427 - RNA, 19 nt, Homo sapiens
  misc_RNA (1)...(19): siRNA sense strand
gcgcugcugguguuucuga

SEQ ID NO: 1008428 - RNA, 19 nt, Homo sapiens
  misc_RNA (1)...(19): siRNA sense strand
ccaguggcuuggaugaaca

SEQ ID NO: 1008429 - RNA, 19 nt, Homo sapiens
  misc_RNA (1)...(19): siRNA sense strand
ggaaguacagacagagaac

SEQ ID NO: 1008430 - RNA, 19 nt, Homo sapiens
  misc_RNA (1)...(19): siRNA sense strand
acagggagaagcaagagaa

SEQ ID NO: 1008431 - RNA, 19 nt, Homo sapiens
  misc_RNA (1)...(19): siRNA sense strand
gcggauaacggcaccuaca

SEQ ID NO: 1008432 - RNA, 19 nt, Homo sapiens
  misc_RNA (1)...(19): siRNA sense strand
acaagaggaaagaggaauu

SEQ ID NO: 1008433 - RNA, 19 nt, Homo sapiens
  misc_RNA (1)...(19): siRNA sense strand
ggcagaaggguuccuaucu

SEQ ID NO: 1008434 - RNA, 19 nt, Homo sapiens
  misc_RNA (1)...(19): siRNA sense strand
cugcugguguuucugauca

SEQ ID NO: 1008435 - RNA, 19 nt, Homo sapiens
  misc_RNA (1)...(19): siRNA sense strand
cuugcgaggcguccaauaa

SEQ ID NO: 1008436 - RNA, 19 nt, Homo sapiens
  misc_RNA (1)...(19): siRNA sense strand
agacacccaccaccagauu

SEQ ID NO: 1008437 - RNA, 19 nt, Homo sapiens
  misc_RNA (1)...(19): siRNA sense strand
ggaugaacagggagaagca

SEQ ID NO: 1008438 - RNA, 19 nt, Homo sapiens
  misc_RNA (1)...(19): siRNA sense strand
gggcaggacaggaaguaca

SEQ ID NO: 1008439 - RNA, 19 nt, Homo sapiens
  misc_RNA (1)...(19): siRNA sense strand
ccugccgucugcaccagua

SEQ ID NO: 1008440 - RNA, 19 nt, Homo sapiens
  misc_RNA (1)...(19): siRNA sense strand
guaaggacgacggugguau

SEQ ID NO: 1008441 - RNA, 19 nt, Homo sapiens
  misc_RNA (1)...(19): siRNA sense strand
cuacguacuuguggucuac

SEQ ID NO: 1008442 - RNA, 19 nt, Homo sapiens
  misc_RNA (1)...(19): siRNA sense strand
uaaggacgacggugguauc

SEQ ID NO: 1008443 - RNA, 19 nt, Homo sapiens
  misc_RNA (1)...(19): siRNA sense strand
ggaccgcaaggagcugaaa

SEQ ID NO: 1008444 - RNA, 19 nt, Homo sapiens
  misc_RNA (1)...(19): siRNA sense strand
cgacggacacaagaggaaa

SEQ ID NO: 1008445 - RNA, 19 nt, Homo sapiens
  misc_RNA (1)...(19): siRNA sense strand
gcgacggacacaagaggaa

SEQ ID NO: 1008446 - RNA, 19 nt, Homo sapiens
  misc_RNA (1)...(19): siRNA sense strand
ugaacagggagaagcaaga

SEQ ID NO: 1008447 - RNA, 19 nt, Homo sapiens
  misc_RNA (1)...(19): siRNA sense strand
gcgaggcguccaauaagca

SEQ ID NO: 1008448 - RNA, 19 nt, Homo sapiens
  misc_RNA (1)...(19): siRNA sense strand
ucuacguacuuguggucua

SEQ ID NO: 1008449 - RNA, 19 nt, Homo sapiens
  misc_RNA (1)...(19): siRNA sense strand
gagaagugcugcaaauuca

SEQ ID NO: 1008450 - RNA, 19 nt, Homo sapiens
  misc_RNA (1)...(19): siRNA sense strand
ggaggaagaugaugaugau

SEQ ID NO: 1008451 - RNA, 19 nt, Homo sapiens
  misc_RNA (1)...(19): siRNA sense strand
gaucagugcucagaaauuc

SEQ ID NO: 1008452 - RNA, 19 nt, Homo sapiens
  misc_RNA (1)...(19): siRNA sense strand
gaacuuagggcucauaaag

SEQ ID NO: 1008453 - RNA, 19 nt, Homo sapiens
  misc_RNA (1)...(19): siRNA sense strand
guagaucagugcucagaaa

SEQ ID NO: 1008454 - RNA, 19 nt, Homo sapiens
  misc_RNA (1)...(19): siRNA sense strand
gaagugaacugggagaagu

SEQ ID NO: 1008455 - RNA, 19 nt, Homo sapiens
  misc_RNA (1)...(19): siRNA sense strand
ggaaaguucugugaugugu

SEQ ID NO: 1008456 - RNA, 19 nt, Homo sapiens
  misc_RNA (1)...(19): siRNA sense strand
gagggaaaguucugugaug

SEQ ID NO: 1008457 - RNA, 19 nt, Homo sapiens
  misc_RNA (1)...(19): siRNA sense strand
ggaaaccaguggaucuuca

SEQ ID NO: 1008458 - RNA, 19 nt, Homo sapiens
  misc_RNA (1)...(19): siRNA sense strand
cccaaaaucuucuacauua

SEQ ID NO: 1008459 - RNA, 19 nt, Homo sapiens
  misc_RNA (1)...(19): siRNA sense strand
ggagaagugcugcaaauuc

SEQ ID NO: 1008460 - RNA, 19 nt, Homo sapiens
  misc_RNA (1)...(19): siRNA sense strand
gggaagcgguuugcaguga

SEQ ID NO: 1008461 - RNA, 19 nt, Homo sapiens
  misc_RNA (1)...(19): siRNA sense strand
guacaguccucugcuucua

SEQ ID NO: 1008462 - RNA, 19 nt, Homo sapiens
  misc_RNA (1)...(19): siRNA sense strand
ggaagaugaugaugaugag

SEQ ID NO: 1008463 - RNA, 19 nt, Homo sapiens
  misc_RNA (1)...(19): siRNA sense strand
gagcaaaggaggaaaccaa

SEQ ID NO: 1008464 - RNA, 19 nt, Homo sapiens
  misc_RNA (1)...(19): siRNA sense strand
ggaagcgguuugcagugaa

SEQ ID NO: 1008465 - RNA, 19 nt, Homo sapiens
  misc_RNA (1)...(19): siRNA sense strand
ggacaauccagaucgaguu

SEQ ID NO: 1008466 - RNA, 19 nt, Homo sapiens
  misc_RNA (1)...(19): siRNA sense strand
ccaguggccuucaaaugug

SEQ ID NO: 1008467 - RNA, 19 nt, Homo sapiens
  misc_RNA (1)...(19): siRNA sense strand
ggagcuaggguucuuguug

SEQ ID NO: 1008468 - RNA, 19 nt, Homo sapiens
  misc_RNA (1)...(19): siRNA sense strand
aaauucagguggaagaaga

SEQ ID NO: 1008469 - RNA, 19 nt, Homo sapiens
  misc_RNA (1)...(19): siRNA sense strand
acaggaggcuggugcauuc

SEQ ID NO: 1008470 - RNA, 19 nt, Homo sapiens
  misc_RNA (1)...(19): siRNA sense strand
gcaugggccugugaagcua

SEQ ID NO: 1008471 - RNA, 19 nt, Homo sapiens
  misc_RNA (1)...(19): siRNA sense strand
caaaggaggaaaccaaagu

SEQ ID NO: 1008472 - RNA, 19 nt, Homo sapiens
  misc_RNA (1)...(19): siRNA sense strand
ccacugcccacuggacuua

SEQ ID NO: 1008473 - RNA, 19 nt, Homo sapiens
  misc_RNA (1)...(19): siRNA sense strand
ugacagagcacaugaagac

SEQ ID NO: 1008474 - RNA, 19 nt, Homo sapiens
  misc_RNA (1)...(19): siRNA sense strand
gaagcgguuugcagugaag

SEQ ID NO: 1008475 - RNA, 19 nt, Homo sapiens
  misc_RNA (1)...(19): siRNA sense strand
gccacaggcuagagggaaa

SEQ ID NO: 1008476 - RNA, 19 nt, Homo sapiens
  misc_RNA (1)...(19): siRNA sense strand
ccaguacaguccucugcuu

SEQ ID NO: 1008477 - RNA, 19 nt, Homo sapiens
  misc_RNA (1)...(19): siRNA sense strand
ugggagaagugcugcaaau

SEQ ID NO: 1008478 - RNA, 19 nt, Homo sapiens
  misc_RNA (1)...(19): siRNA sense strand
ccacugcccaugacugcua

SEQ ID NO: 1008479 - RNA, 19 nt, Homo sapiens
  misc_RNA (1)...(19): siRNA sense strand
ucaaauguggcagguagua

SEQ ID NO: 1008480 - RNA, 19 nt, Homo sapiens
  misc_RNA (1)...(19): siRNA sense strand
gcaaauucagguggaagaa

SEQ ID NO: 1008481 - RNA, 19 nt, Homo sapiens
  misc_RNA (1)...(19): siRNA sense strand
uagcugcugccucuccuua

SEQ ID NO: 1008482 - RNA, 19 nt, Homo sapiens
  misc_RNA (1)...(19): siRNA sense strand
gggagaagugcugcaaauu

SEQ ID NO: 1008483 - RNA, 19 nt, Homo sapiens
  misc_RNA (1)...(19): siRNA sense strand
ggaggaggaagaugaugau

SEQ ID NO: 1008484 - RNA, 19 nt, Homo sapiens
  misc_RNA (1)...(19): siRNA sense strand
gcaaaggaggaaaccaaag

SEQ ID NO: 1008485 - RNA, 19 nt, Homo sapiens
  misc_RNA (1)...(19): siRNA sense strand
ggaacuuagggcucauaaa

SEQ ID NO: 1008486 - RNA, 19 nt, Homo sapiens
  misc_RNA (1)...(19): siRNA sense strand
ggaggaggaggaagaugau

SEQ ID NO: 1008487 - RNA, 19 nt, Homo sapiens
  misc_RNA (1)...(19): siRNA sense strand
acuuagggcucauaaagca

SEQ ID NO: 1008488 - RNA, 19 nt, Homo sapiens
  misc_RNA (1)...(19): siRNA sense strand
aggaagaugaugaugauga

SEQ ID NO: 1008489 - RNA, 19 nt, Homo sapiens
  misc_RNA (1)...(19): siRNA sense strand
gcuguggcaucugcaacaa

SEQ ID NO: 1008490 - RNA, 19 nt, Homo sapiens
  misc_RNA (1)...(19): siRNA sense strand
gaaaccaguggaucuucau

SEQ ID NO: 1008491 - RNA, 19 nt, Homo sapiens
  misc_RNA (1)...(19): siRNA sense strand
ggaugcgccucgucucacu

SEQ ID NO: 1008492 - RNA, 19 nt, Homo sapiens
  misc_RNA (1)...(19): siRNA sense strand
gggaacuuagggcucauaa

SEQ ID NO: 1008493 - RNA, 19 nt, Homo sapiens
  misc_RNA (1)...(19): siRNA sense strand
gggaaaguucugugaugug

SEQ ID NO: 1008494 - RNA, 19 nt, Homo sapiens
  misc_RNA (1)...(19): siRNA sense strand
gcuggugcauucgcucuuc

SEQ ID NO: 1008495 - RNA, 19 nt, Homo sapiens
  misc_RNA (1)...(19): siRNA sense strand
ggucagccacacucucuca

SEQ ID NO: 1008496 - RNA, 19 nt, Homo sapiens
  misc_RNA (1)...(19): siRNA sense strand
ggaagugaacugggagaag

SEQ ID NO: 1008497 - RNA, 19 nt, Homo sapiens
  misc_RNA (1)...(19): siRNA sense strand
guccucugcuucuacugaa

SEQ ID NO: 1008498 - RNA, 19 nt, Homo sapiens
  misc_RNA (1)...(19): siRNA sense strand
gcucauaaagcaguguuag

SEQ ID NO: 1008499 - RNA, 19 nt, Homo sapiens
  misc_RNA (1)...(19): siRNA sense strand
gcugcaaauucagguggaa

SEQ ID NO: 1008500 - RNA, 19 nt, Homo sapiens
  misc_RNA (1)...(19): siRNA sense strand
gcccuucuuuccacuacau

SEQ ID NO: 1008501 - RNA, 19 nt, Homo sapiens
  misc_RNA (1)...(19): siRNA sense strand
aacuucaggugguggaauu

SEQ ID NO: 1008502 - RNA, 19 nt, Homo sapiens
  misc_RNA (1)...(19): siRNA sense strand
ugcuccagcucauuuauuc

SEQ ID NO: 1008503 - RNA, 19 nt, Homo sapiens
  misc_RNA (1)...(19): siRNA sense strand
aagaggaggaggaggaaga

SEQ ID NO: 1008504 - RNA, 19 nt, Homo sapiens
  misc_RNA (1)...(19): siRNA sense strand
gacaauccagaucgaguuc

SEQ ID NO: 1008505 - RNA, 19 nt, Homo sapiens
  misc_RNA (1)...(19): siRNA sense strand
uagagggaaaguucuguga

SEQ ID NO: 1008506 - RNA, 19 nt, Homo sapiens
  misc_RNA (1)...(19): siRNA sense strand
aaauguggcagguaguaga

SEQ ID NO: 1008507 - RNA, 19 nt, Homo sapiens
  misc_RNA (1)...(19): siRNA sense strand
uguggcagguaguagauca

SEQ ID NO: 1008508 - RNA, 19 nt, Homo sapiens
  misc_RNA (1)...(19): siRNA sense strand
aggaggaggaggaagauga

SEQ ID NO: 1008509 - RNA, 19 nt, Homo sapiens
  misc_RNA (1)...(19): siRNA sense strand
agggaaaguucugugaugu

SEQ ID NO: 1008510 - RNA, 19 nt, Homo sapiens
  misc_RNA (1)...(19): siRNA sense strand
gcugcugccucuccuuacu

SEQ ID NO: 1008511 - RNA, 19 nt, Homo sapiens
  misc_RNA (1)...(19): siRNA sense strand
gaacaucucagaauucaua

SEQ ID NO: 1008512 - RNA, 19 nt, Homo sapiens
  misc_RNA (1)...(19): siRNA sense strand
cagaaagccuuccgacuaa

SEQ ID NO: 1008513 - RNA, 19 nt, Homo sapiens
  misc_RNA (1)...(19): siRNA sense strand
ugucagaguuccagucuua

SEQ ID NO: 1008514 - RNA, 19 nt, Homo sapiens
  misc_RNA (1)...(19): siRNA sense strand
agagaaaccuuaucuaugu

SEQ ID NO: 1008515 - RNA, 19 nt, Homo sapiens
  misc_RNA (1)...(19): siRNA sense strand
ccaaagagaagauugagua

SEQ ID NO: 1008516 - RNA, 19 nt, Homo sapiens
  misc_RNA (1)...(19): siRNA sense strand
ucagagauaucaccacaaa

SEQ ID NO: 1008517 - RNA, 19 nt, Homo sapiens
  misc_RNA (1)...(19): siRNA sense strand
ggagagaaaccuuaucuau

SEQ ID NO: 1008518 - RNA, 19 nt, Homo sapiens
  misc_RNA (1)...(19): siRNA sense strand
uuacaaagccugagaaaga

SEQ ID NO: 1008519 - RNA, 19 nt, Homo sapiens
  misc_RNA (1)...(19): siRNA sense strand
gagaaaccuuaucuaugua

SEQ ID NO: 1008520 - RNA, 19 nt, Homo sapiens
  misc_RNA (1)...(19): siRNA sense strand
ccagaaagccuuccgacua

SEQ ID NO: 1008521 - RNA, 19 nt, Homo sapiens
  misc_RNA (1)...(19): siRNA sense strand
guaacagacucuuguggaa

SEQ ID NO: 1008522 - RNA, 19 nt, Homo sapiens
  misc_RNA (1)...(19): siRNA sense strand
gcgcagcucucaccuuaau

SEQ ID NO: 1008523 - RNA, 19 nt, Homo sapiens
  misc_RNA (1)...(19): siRNA sense strand
agagaaaggucaucagugu

SEQ ID NO: 1008524 - RNA, 19 nt, Homo sapiens
  misc_RNA (1)...(19): siRNA sense strand
gagagaaaccuuaucuaug

SEQ ID NO: 1008525 - RNA, 19 nt, Homo sapiens
  misc_RNA (1)...(19): siRNA sense strand
agacaaggauugagaaugg

SEQ ID NO: 1008526 - RNA, 19 nt, Homo sapiens
  misc_RNA (1)...(19): siRNA sense strand
aggcgcagcucucaccuua

SEQ ID NO: 1008527 - RNA, 19 nt, Homo sapiens
  misc_RNA (1)...(19): siRNA sense strand
cgacaccacagaauucaua

SEQ ID NO: 1008528 - RNA, 19 nt, Homo sapiens
  misc_RNA (1)...(19): siRNA sense strand
cggcaugagugugaaguua

SEQ ID NO: 1008529 - RNA, 19 nt, Homo sapiens
  misc_RNA (1)...(19): siRNA sense strand
gagaaugggaagcuuauug

SEQ ID NO: 1008530 - RNA, 19 nt, Homo sapiens
  misc_RNA (1)...(19): siRNA sense strand
gaacaugcgaguacacaca

SEQ ID NO: 1008531 - RNA, 19 nt, Homo sapiens
  misc_RNA (1)...(19): siRNA sense strand
gaaugggaagcuuauugua

SEQ ID NO: 1008532 - RNA, 19 nt, Homo sapiens
  misc_RNA (1)...(19): siRNA sense strand
guucacaccucgucagaca

SEQ ID NO: 1008533 - RNA, 19 nt, Homo sapiens
  misc_RNA (1)...(19): siRNA sense strand
gaguauaaaugcucagaac

SEQ ID NO: 1008534 - RNA, 19 nt, Homo sapiens
  misc_RNA (1)...(19): siRNA sense strand
agagauaucaccacaaaga

SEQ ID NO: 1008535 - RNA, 19 nt, Homo sapiens
  misc_RNA (1)...(19): siRNA sense strand
gaagauugaguauaaaugc

SEQ ID NO: 1008536 - RNA, 19 nt, Homo sapiens
  misc_RNA (1)...(19): siRNA sense strand
guaagaauccacaaugaag

SEQ ID NO: 1008537 - RNA, 19 nt, Homo sapiens
  misc_RNA (1)...(19): siRNA sense strand
uaagaaaguccucucuaga

SEQ ID NO: 1008538 - RNA, 19 nt, Homo sapiens
  misc_RNA (1)...(19): siRNA sense strand
gaacgugagcagagauuca

SEQ ID NO: 1008539 - RNA, 19 nt, Homo sapiens
  misc_RNA (1)...(19): siRNA sense strand
gaagcuuauuguaguaaca

SEQ ID NO: 1008540 - RNA, 19 nt, Homo sapiens
  misc_RNA (1)...(19): siRNA sense strand
gaaguuacaaagccugaga

SEQ ID NO: 1008541 - RNA, 19 nt, Homo sapiens
  misc_RNA (1)...(19): siRNA sense strand
gcaugagugugaaguuaca

SEQ ID NO: 1008542 - RNA, 19 nt, Homo sapiens
  misc_RNA (1)...(19): siRNA sense strand
gcacuuggaccugauugaa

SEQ ID NO: 1008543 - RNA, 19 nt, Homo sapiens
  misc_RNA (1)...(19): siRNA sense strand
auaagaaaguccucucuag

SEQ ID NO: 1008544 - RNA, 19 nt, Homo sapiens
  misc_RNA (1)...(19): siRNA sense strand
gaggagacaaggauugaga

SEQ ID NO: 1008545 - RNA, 19 nt, Homo sapiens
  misc_RNA (1)...(19): siRNA sense strand
gauaucaccacaaagacaa

SEQ ID NO: 1008546 - RNA, 19 nt, Homo sapiens
  misc_RNA (1)...(19): siRNA sense strand
ugagggcucuaacuuggaa

SEQ ID NO: 1008547 - RNA, 19 nt, Homo sapiens
  misc_RNA (1)...(19): siRNA sense strand
ugaaaggaguacaggaaca

SEQ ID NO: 1008548 - RNA, 19 nt, Homo sapiens
  misc_RNA (1)...(19): siRNA sense strand
gaaaccuuaucuauguauc

SEQ ID NO: 1008549 - RNA, 19 nt, Homo sapiens
  misc_RNA (1)...(19): siRNA sense strand
guacacacacgggaaagaa

SEQ ID NO: 1008550 - RNA, 19 nt, Homo sapiens
  misc_RNA (1)...(19): siRNA sense strand
caucagagaauccauaguc

SEQ ID NO: 1008551 - RNA, 19 nt, Homo sapiens
  misc_RNA (1)...(19): siRNA sense strand
cauaagaaaguccucucua

SEQ ID NO: 1008552 - RNA, 19 nt, Homo sapiens
  misc_RNA (1)...(19): siRNA sense strand
uaaucgacaucagagaauu

SEQ ID NO: 1008553 - RNA, 19 nt, Homo sapiens
  misc_RNA (1)...(19): siRNA sense strand
uggaacaucucagaauuca

SEQ ID NO: 1008554 - RNA, 19 nt, Homo sapiens
  misc_RNA (1)...(19): siRNA sense strand
uaaugagggcucuaacuug

SEQ ID NO: 1008555 - RNA, 19 nt, Homo sapiens
  misc_RNA (1)...(19): siRNA sense strand
cagaauucauacuggagaa

SEQ ID NO: 1008556 - RNA, 19 nt, Homo sapiens
  misc_RNA (1)...(19): siRNA sense strand
caaugaguguggcaaaguc

SEQ ID NO: 1008557 - RNA, 19 nt, Homo sapiens
  misc_RNA (1)...(19): siRNA sense strand
caaagagaagauugaguau

SEQ ID NO: 1008558 - RNA, 19 nt, Homo sapiens
  misc_RNA (1)...(19): siRNA sense strand
uaagaauccacaaugaaga

SEQ ID NO: 1008559 - RNA, 19 nt, Homo sapiens
  misc_RNA (1)...(19): siRNA sense strand
uuuggaacaucucagaauu

SEQ ID NO: 1008560 - RNA, 19 nt, Homo sapiens
  misc_RNA (1)...(19): siRNA sense strand
ccaaaagccaucaauguaa

SEQ ID NO: 1008561 - RNA, 19 nt, Homo sapiens
  misc_RNA (1)...(19): siRNA sense strand
ccuuaucuauguauccauu

SEQ ID NO: 1008562 - RNA, 19 nt, Homo sapiens
  misc_RNA (1)...(19): siRNA sense strand
agaaaggucaucaguguca

SEQ ID NO: 1008563 - RNA, 19 nt, Homo sapiens
  misc_RNA (1)...(19): siRNA sense strand
gcaaugaguguggcaaagu

SEQ ID NO: 1008564 - RNA, 19 nt, Homo sapiens
  misc_RNA (1)...(19): siRNA sense strand
ugggaagcuuauuguagua

SEQ ID NO: 1008565 - RNA, 19 nt, Homo sapiens
  misc_RNA (1)...(19): siRNA sense strand
cauguaagaauccacaaug

SEQ ID NO: 1008566 - RNA, 19 nt, Homo sapiens
  misc_RNA (1)...(19): siRNA sense strand
uguaacauaugccagaaag

SEQ ID NO: 1008567 - RNA, 19 nt, Homo sapiens
  misc_RNA (1)...(19): siRNA sense strand
aguuugaccucagaccuua

SEQ ID NO: 1008568 - RNA, 19 nt, Homo sapiens
  misc_RNA (1)...(19): siRNA sense strand
gaauucauacuggagagaa

SEQ ID NO: 1008569 - RNA, 19 nt, Homo sapiens
  misc_RNA (1)...(19): siRNA sense strand
uuacaggacauaagaaagu

SEQ ID NO: 1008570 - RNA, 19 nt, Homo sapiens
  misc_RNA (1)...(19): siRNA sense strand
caauguaacgaguguggaa

SEQ ID NO: 1008571 - RNA, 19 nt, Homo sapiens
  misc_RNA (1)...(19): siRNA sense strand
ggugagaagccuuaucagu

SEQ ID NO: 1008572 - RNA, 19 nt, Homo sapiens
  misc_RNA (1)...(19): siRNA sense strand
ggagacaaggauugagaau

SEQ ID NO: 1008573 - RNA, 19 nt, Homo sapiens
  misc_RNA (1)...(19): siRNA sense strand
gaacccauggaggcucaua

SEQ ID NO: 1008574 - RNA, 19 nt, Homo sapiens
  misc_RNA (1)...(19): siRNA sense strand
ccuuucaaguguaacauau

SEQ ID NO: 1008575 - RNA, 19 nt, Homo sapiens
  misc_RNA (1)...(19): siRNA sense strand
gaaaggucaucagugucau

SEQ ID NO: 1008576 - RNA, 19 nt, Homo sapiens
  misc_RNA (1)...(19): siRNA sense strand
cugcgagucugaugugugu

SEQ ID NO: 1008577 - RNA, 19 nt, Homo sapiens
  misc_RNA (1)...(19): siRNA sense strand
agagucaucugggaaaaua

SEQ ID NO: 1008578 - RNA, 19 nt, Homo sapiens
  misc_RNA (1)...(19): siRNA sense strand
agaaagccuuccgacuaaa

SEQ ID NO: 1008579 - RNA, 19 nt, Homo sapiens
  misc_RNA (1)...(19): siRNA sense strand
cgacaucagagaauucaca

SEQ ID NO: 1008580 - RNA, 19 nt, Homo sapiens
  misc_RNA (1)...(19): siRNA sense strand
ggaagcuuauuguaguaac

SEQ ID NO: 1008581 - RNA, 19 nt, Homo sapiens
  misc_RNA (1)...(19): siRNA sense strand
gagacaaggauugagaaug

SEQ ID NO: 1008582 - RNA, 19 nt, Homo sapiens
  misc_RNA (1)...(19): siRNA sense strand
guauaaaugcucagaacgu

SEQ ID NO: 1008583 - RNA, 19 nt, Homo sapiens
  misc_RNA (1)...(19): siRNA sense strand
uguaagaauccacaaugaa

SEQ ID NO: 1008584 - RNA, 19 nt, Homo sapiens
  misc_RNA (1)...(19): siRNA sense strand
gaaagccuuccgacuaaac

SEQ ID NO: 1008585 - RNA, 19 nt, Homo sapiens
  misc_RNA (1)...(19): siRNA sense strand
gggaagcuuauuguaguaa

SEQ ID NO: 1008586 - RNA, 19 nt, Homo sapiens
  misc_RNA (1)...(19): siRNA sense strand
caccaucagagaauccaua

SEQ ID NO: 1008587 - RNA, 19 nt, Homo sapiens
  misc_RNA (1)...(19): siRNA sense strand
gaaaggaguacaggaacag

SEQ ID NO: 1008588 - RNA, 19 nt, Homo sapiens
  misc_RNA (1)...(19): siRNA sense strand
caaagccugagaaagagaa

SEQ ID NO: 1008589 - RNA, 19 nt, Homo sapiens
  misc_RNA (1)...(19): siRNA sense strand
auaaugagggcucuaacuu

SEQ ID NO: 1008590 - RNA, 19 nt, Homo sapiens
  misc_RNA (1)...(19): siRNA sense strand
ggugaggagacaaggauug

SEQ ID NO: 1008591 - RNA, 19 nt, Homo sapiens
  misc_RNA (1)...(19): siRNA sense strand
cgaguacacacacgggaaa

SEQ ID NO: 1008592 - RNA, 19 nt, Homo sapiens
  misc_RNA (1)...(19): siRNA sense strand
auacuggagagaaaccuua

SEQ ID NO: 1008593 - RNA, 19 nt, Homo sapiens
  misc_RNA (1)...(19): siRNA sense strand
aagaauccacaaugaagaa

SEQ ID NO: 1008594 - RNA, 19 nt, Homo sapiens
  misc_RNA (1)...(19): siRNA sense strand
gaccucagaccuuauucga

SEQ ID NO: 1008595 - RNA, 19 nt, Homo sapiens
  misc_RNA (1)...(19): siRNA sense strand
ccaucaauguaacgagugu

SEQ ID NO: 1008596 - RNA, 19 nt, Homo sapiens
  misc_RNA (1)...(19): siRNA sense strand
agagauucauccagcacuu

SEQ ID NO: 1008597 - RNA, 19 nt, Homo sapiens
  misc_RNA (1)...(19): siRNA sense strand
agagaagggugaggagaca

SEQ ID NO: 1008598 - RNA, 19 nt, Homo sapiens
  misc_RNA (1)...(19): siRNA sense strand
auguaagaauccacaauga

SEQ ID NO: 1008599 - RNA, 19 nt, Homo sapiens
  misc_RNA (1)...(19): siRNA sense strand
gcauguaagaauccacaau

SEQ ID NO: 1008600 - RNA, 19 nt, Homo sapiens
  misc_RNA (1)...(19): siRNA sense strand
aaauccaucuuggugagaa

SEQ ID NO: 1008601 - RNA, 19 nt, Homo sapiens
  misc_RNA (1)...(19): siRNA sense strand
uacaaagccugagaaagag

SEQ ID NO: 1008602 - RNA, 19 nt, Homo sapiens
  misc_RNA (1)...(19): siRNA sense strand
gauugaacaugcgaguaca

SEQ ID NO: 1008603 - RNA, 19 nt, Homo sapiens
  misc_RNA (1)...(19): siRNA sense strand
gagauucauccagcacuug

SEQ ID NO: 1008604 - RNA, 19 nt, Homo sapiens
  misc_RNA (1)...(19): siRNA sense strand
caaagacaaacuggcuuga

SEQ ID NO: 1008605 - RNA, 19 nt, Homo sapiens
  misc_RNA (1)...(19): siRNA sense strand
ucugaaaggaguacaggaa

SEQ ID NO: 1008606 - RNA, 19 nt, Homo sapiens
  misc_RNA (1)...(19): siRNA sense strand
agaaugggaagcuuauugu

SEQ ID NO: 1008607 - RNA, 19 nt, Homo sapiens
  misc_RNA (1)...(19): siRNA sense strand
caucucagaauucauacug

SEQ ID NO: 1008608 - RNA, 19 nt, Homo sapiens
  misc_RNA (1)...(19): siRNA sense strand
gugaggagacaaggauuga

SEQ ID NO: 1008609 - RNA, 19 nt, Homo sapiens
  misc_RNA (1)...(19): siRNA sense strand
guggaagaguagagucauc

SEQ ID NO: 1008610 - RNA, 19 nt, Homo sapiens
  misc_RNA (1)...(19): siRNA sense strand
gauugagaaugggaagcuu

SEQ ID NO: 1008611 - RNA, 19 nt, Homo sapiens
  misc_RNA (1)...(19): siRNA sense strand
gcagaaaggccaacgugaa

SEQ ID NO: 1008612 - RNA, 19 nt, Homo sapiens
  misc_RNA (1)...(19): siRNA sense strand
gaaccuggcauacuuagga

SEQ ID NO: 1008613 - RNA, 19 nt, Homo sapiens
  misc_RNA (1)...(19): siRNA sense strand
cgggauaccugcccacuau

SEQ ID NO: 1008614 - RNA, 19 nt, Homo sapiens
  misc_RNA (1)...(19): siRNA sense strand
agacagaccgaaugcaaua

SEQ ID NO: 1008615 - RNA, 19 nt, Homo sapiens
  misc_RNA (1)...(19): siRNA sense strand
gcagacagaccgaaugcaa

SEQ ID NO: 1008616 - RNA, 19 nt, Homo sapiens
  misc_RNA (1)...(19): siRNA sense strand
cgaaagggccugcaaggau

SEQ ID NO: 1008617 - RNA, 19 nt, Homo sapiens
  misc_RNA (1)...(19): siRNA sense strand
gagcugcauacgcacaaua

SEQ ID NO: 1008618 - RNA, 19 nt, Homo sapiens
  misc_RNA (1)...(19): siRNA sense strand
caacuucauccagcccuua

SEQ ID NO: 1008619 - RNA, 19 nt, Homo sapiens
  misc_RNA (1)...(19): siRNA sense strand
cauccagcccuuauacaaa

SEQ ID NO: 1008620 - RNA, 19 nt, Homo sapiens
  misc_RNA (1)...(19): siRNA sense strand
ggauaccugcccacuaugu

SEQ ID NO: 1008621 - RNA, 19 nt, Homo sapiens
  misc_RNA (1)...(19): siRNA sense strand
acgugaaccuggcauacuu

SEQ ID NO: 1008622 - RNA, 19 nt, Homo sapiens
  misc_RNA (1)...(19): siRNA sense strand
cgugaaccuggcauacuua

SEQ ID NO: 1008623 - RNA, 19 nt, Homo sapiens
  misc_RNA (1)...(19): siRNA sense strand
cagaaaggccaacgugaac

SEQ ID NO: 1008624 - RNA, 19 nt, Homo sapiens
  misc_RNA (1)...(19): siRNA sense strand
ucauccagcccuuauacaa

SEQ ID NO: 1008625 - RNA, 19 nt, Homo sapiens
  misc_RNA (1)...(19): siRNA sense strand
ccaacgugaaccuggcaua

SEQ ID NO: 1008626 - RNA, 19 nt, Homo sapiens
  misc_RNA (1)...(19): siRNA sense strand
gcaguccagcagccaauca

SEQ ID NO: 1008627 - RNA, 19 nt, Homo sapiens
  misc_RNA (1)...(19): siRNA sense strand
gaaaggccaacgugaaccu

SEQ ID NO: 1008628 - RNA, 19 nt, Homo sapiens
  misc_RNA (1)...(19): siRNA sense strand
ggagcugcauacgcacaau

SEQ ID NO: 1008629 - RNA, 19 nt, Homo sapiens
  misc_RNA (1)...(19): siRNA sense strand
uggcauacuuaggagcaaa

SEQ ID NO: 1008630 - RNA, 19 nt, Homo sapiens
  misc_RNA (1)...(19): siRNA sense strand
cugcagcauuuggccagua

SEQ ID NO: 1008631 - RNA, 19 nt, Homo sapiens
  misc_RNA (1)...(19): siRNA sense strand
gcccuuauacaaagaccuu

SEQ ID NO: 1008632 - RNA, 19 nt, Homo sapiens
  misc_RNA (1)...(19): siRNA sense strand
ccaaagugcuggaguguug

SEQ ID NO: 1008633 - RNA, 19 nt, Homo sapiens
  misc_RNA (1)...(19): siRNA sense strand
caacauccuuguaaacuug

SEQ ID NO: 1008634 - RNA, 19 nt, Homo sapiens
  misc_RNA (1)...(19): siRNA sense strand
ccaaaugccucuacaagau

SEQ ID NO: 1008635 - RNA, 19 nt, Homo sapiens
  misc_RNA (1)...(19): siRNA sense strand
gcacgucccugcuguuuca

SEQ ID NO: 1008636 - RNA, 19 nt, Homo sapiens
  misc_RNA (1)...(19): siRNA sense strand
gugcuggaguguugucaua

SEQ ID NO: 1008637 - RNA, 19 nt, Homo sapiens
  misc_RNA (1)...(19): siRNA sense strand
guauggcaccuccuucuua

SEQ ID NO: 1008638 - RNA, 19 nt, Homo sapiens
  misc_RNA (1)...(19): siRNA sense strand
agacgugccugccagauga

SEQ ID NO: 1008639 - RNA, 19 nt, Homo sapiens
  misc_RNA (1)...(19): siRNA sense strand
uacaaucgauacaaucuga

SEQ ID NO: 1008640 - RNA, 19 nt, Homo sapiens
  misc_RNA (1)...(19): siRNA sense strand
agaagugccugccagagaa

SEQ ID NO: 1008641 - RNA, 19 nt, Homo sapiens
  misc_RNA (1)...(19): siRNA sense strand
uauggcaccuccuucuuaa

SEQ ID NO: 1008642 - RNA, 19 nt, Homo sapiens
  misc_RNA (1)...(19): siRNA sense strand
cugaugagcuggagugcaa

SEQ ID NO: 1008643 - RNA, 19 nt, Homo sapiens
  misc_RNA (1)...(19): siRNA sense strand
ucauggaggugcagagaga

SEQ ID NO: 1008644 - RNA, 19 nt, Homo sapiens
  misc_RNA (1)...(19): siRNA sense strand
uuaguagccugcccgauga

SEQ ID NO: 1008645 - RNA, 19 nt, Homo sapiens
  misc_RNA (1)...(19): siRNA sense strand
cuucagcuccuuacccuua

SEQ ID NO: 1008646 - RNA, 19 nt, Homo sapiens
  misc_RNA (1)...(19): siRNA sense strand
gagccucguuauucuuaug

SEQ ID NO: 1008647 - RNA, 19 nt, Homo sapiens
  misc_RNA (1)...(19): siRNA sense strand
gccaaaugccucuacaaga

SEQ ID NO: 1008648 - RNA, 19 nt, Homo sapiens
  misc_RNA (1)...(19): siRNA sense strand
ucuacuuacuggugucuaa

SEQ ID NO: 1008649 - RNA, 19 nt, Homo sapiens
  misc_RNA (1)...(19): siRNA sense strand
guguguuugucaugaauuu

SEQ ID NO: 1008650 - RNA, 19 nt, Homo sapiens
  misc_RNA (1)...(19): siRNA sense strand
cuuguaaacuugacuugug

SEQ ID NO: 1008651 - RNA, 19 nt, Homo sapiens
  misc_RNA (1)...(19): siRNA sense strand
ccaguguguuugucaugaa

SEQ ID NO: 1008652 - RNA, 19 nt, Homo sapiens
  misc_RNA (1)...(19): siRNA sense strand
caaaaucuguuacaaucga

SEQ ID NO: 1008653 - RNA, 19 nt, Homo sapiens
  misc_RNA (1)...(19): siRNA sense strand
ucaugaauuucuagacugu

SEQ ID NO: 1008654 - RNA, 19 nt, Homo sapiens
  misc_RNA (1)...(19): siRNA sense strand
ccagucaaccuccugaaga

SEQ ID NO: 1008655 - RNA, 19 nt, Homo sapiens
  misc_RNA (1)...(19): siRNA sense strand
cuacaagaucauagacuuu

SEQ ID NO: 1008656 - RNA, 19 nt, Homo sapiens
  misc_RNA (1)...(19): siRNA sense strand
gccaguguguuugucauga

SEQ ID NO: 1008657 - RNA, 19 nt, Homo sapiens
  misc_RNA (1)...(19): siRNA sense strand
uuuauaggccugcgaguuu

SEQ ID NO: 1008658 - RNA, 19 nt, Homo sapiens
  misc_RNA (1)...(19): siRNA sense strand
gaaacagaggaaacccaaa

SEQ ID NO: 1008659 - RNA, 19 nt, Homo sapiens
  misc_RNA (1)...(19): siRNA sense strand
ccaacugccuggucauaac

SEQ ID NO: 1008660 - RNA, 19 nt, Homo sapiens
  misc_RNA (1)...(19): siRNA sense strand
ccugccagaugaugaaguu

SEQ ID NO: 1008661 - RNA, 19 nt, Homo sapiens
  misc_RNA (1)...(19): siRNA sense strand
uuacuggugucuaagaaag

SEQ ID NO: 1008662 - RNA, 19 nt, Homo sapiens
  misc_RNA (1)...(19): siRNA sense strand
caaucgauacaaucugaaa

SEQ ID NO: 1008663 - RNA, 19 nt, Homo sapiens
  misc_RNA (1)...(19): siRNA sense strand
gcucuacuucagcuccuua

SEQ ID NO: 1008664 - RNA, 19 nt, Homo sapiens
  misc_RNA (1)...(19): siRNA sense strand
gucauugucuguccuuucu

SEQ ID NO: 1008665 - RNA, 19 nt, Homo sapiens
  misc_RNA (1)...(19): siRNA sense strand
aaacagaggaaacccaaag

SEQ ID NO: 1008666 - RNA, 19 nt, Homo sapiens
  misc_RNA (1)...(19): siRNA sense strand
caaaugccucuacaagauc

SEQ ID NO: 1008667 - RNA, 19 nt, Homo sapiens
  misc_RNA (1)...(19): siRNA sense strand
gccagaugaugaaguuagu

SEQ ID NO: 1008668 - RNA, 19 nt, Homo sapiens
  misc_RNA (1)...(19): siRNA sense strand
gagacgugccugccagaug

SEQ ID NO: 1008669 - RNA, 19 nt, Homo sapiens
  misc_RNA (1)...(19): siRNA sense strand
uagugugguugcuagguuu

SEQ ID NO: 1008670 - RNA, 19 nt, Homo sapiens
  misc_RNA (1)...(19): siRNA sense strand
uuagugugguugcuagguu

SEQ ID NO: 1008671 - RNA, 19 nt, Homo sapiens
  misc_RNA (1)...(19): siRNA sense strand
aaaugccucuacaagauca

SEQ ID NO: 1008672 - RNA, 19 nt, Homo sapiens
  misc_RNA (1)...(19): siRNA sense strand
ugucaugaauuucuagacu

SEQ ID NO: 1008673 - RNA, 19 nt, Homo sapiens
  misc_RNA (1)...(19): siRNA sense strand
aagaagugccugccagaga

SEQ ID NO: 1008674 - RNA, 19 nt, Homo sapiens
  misc_RNA (1)...(19): siRNA sense strand
agacauccauccggguguu

SEQ ID NO: 1008675 - RNA, 19 nt, Homo sapiens
  misc_RNA (1)...(19): siRNA sense strand
gaauuucuagacuguaugg

SEQ ID NO: 1008676 - RNA, 19 nt, Homo sapiens
  misc_RNA (1)...(19): siRNA sense strand
acccuuaggaaucuacuua

SEQ ID NO: 1008677 - RNA, 19 nt, Homo sapiens
  misc_RNA (1)...(19): siRNA sense strand
gcuggaguguugucauagg

SEQ ID NO: 1008678 - RNA, 19 nt, Homo sapiens
  misc_RNA (1)...(19): siRNA sense strand
ucguuauucuuauggugua

SEQ ID NO: 1008679 - RNA, 19 nt, Homo sapiens
  misc_RNA (1)...(19): siRNA sense strand
ugccagagaacccuacuga

SEQ ID NO: 1008680 - RNA, 19 nt, Homo sapiens
  misc_RNA (1)...(19): siRNA sense strand
gagcuggagugcaaaaucu

SEQ ID NO: 1008681 - RNA, 19 nt, Homo sapiens
  misc_RNA (1)...(19): siRNA sense strand
uacaagaucauagacuuug

SEQ ID NO: 1008682 - RNA, 19 nt, Homo sapiens
  misc_RNA (1)...(19): siRNA sense strand
acaacuggacuguguggaa

SEQ ID NO: 1008683 - RNA, 19 nt, Homo sapiens
  misc_RNA (1)...(19): siRNA sense strand
ggaggcaaagggaagaagu

SEQ ID NO: 1008684 - RNA, 19 nt, Homo sapiens
  misc_RNA (1)...(19): siRNA sense strand
gaggcaaagggaagaagug

SEQ ID NO: 1008685 - RNA, 19 nt, Homo sapiens
  misc_RNA (1)...(19): siRNA sense strand
ugcaaaaucuguuacaauc

SEQ ID NO: 1008686 - RNA, 19 nt, Homo sapiens
  misc_RNA (1)...(19): siRNA sense strand
cagaugaugaaguuaguag

SEQ ID NO: 1008687 - RNA, 19 nt, Homo sapiens
  misc_RNA (1)...(19): siRNA sense strand
caguguguuugucaugaau

SEQ ID NO: 1008688 - RNA, 19 nt, Homo sapiens
  misc_RNA (1)...(19): siRNA sense strand
uguccuuucugcagguuug

SEQ ID NO: 1008689 - RNA, 19 nt, Homo sapiens
  misc_RNA (1)...(19): siRNA sense strand
gacauccauccggguguua

SEQ ID NO: 1008690 - RNA, 19 nt, Homo sapiens
  misc_RNA (1)...(19): siRNA sense strand
caucauggaggugcagaga

SEQ ID NO: 1008691 - RNA, 19 nt, Homo sapiens
  misc_RNA (1)...(19): siRNA sense strand
caaugagagugaccaaaua

SEQ ID NO: 1008692 - RNA, 19 nt, Homo sapiens
  misc_RNA (1)...(19): siRNA sense strand
ugagagugaccaaauauua

SEQ ID NO: 1008693 - RNA, 19 nt, Homo sapiens
  misc_RNA (1)...(19): siRNA sense strand
agagcuagauggaaccuua

SEQ ID NO: 1008694 - RNA, 19 nt, Homo sapiens
  misc_RNA (1)...(19): siRNA sense strand
ggccacaccuccaaaguga

SEQ ID NO: 1008695 - RNA, 19 nt, Homo sapiens
  misc_RNA (1)...(19): siRNA sense strand
uaacuggguuucccuacuu

SEQ ID NO: 1008696 - RNA, 19 nt, Homo sapiens
  misc_RNA (1)...(19): siRNA sense strand
gaaacaggaaguucauuca

SEQ ID NO: 1008697 - RNA, 19 nt, Homo sapiens
  misc_RNA (1)...(19): siRNA sense strand
caaagacacauggaccuua

SEQ ID NO: 1008698 - RNA, 19 nt, Homo sapiens
  misc_RNA (1)...(19): siRNA sense strand
gaagagacaaagacacaug

SEQ ID NO: 1008699 - RNA, 19 nt, Homo sapiens
  misc_RNA (1)...(19): siRNA sense strand
aaagacacauggaccuuau

SEQ ID NO: 1008700 - RNA, 19 nt, Homo sapiens
  misc_RNA (1)...(19): siRNA sense strand
gagagugaccaaauauuag

SEQ ID NO: 1008701 - RNA, 19 nt, Homo sapiens
  misc_RNA (1)...(19): siRNA sense strand
ggauucgagugaugaaaca

SEQ ID NO: 1008702 - RNA, 19 nt, Homo sapiens
  misc_RNA (1)...(19): siRNA sense strand
cauggaccuuauguaauua

SEQ ID NO: 1008703 - RNA, 19 nt, Homo sapiens
  misc_RNA (1)...(19): siRNA sense strand
ucaaugagagugaccaaau

SEQ ID NO: 1008704 - RNA, 19 nt, Homo sapiens
  misc_RNA (1)...(19): siRNA sense strand
gauggaaccuuagugaaaa

SEQ ID NO: 1008705 - RNA, 19 nt, Homo sapiens
  misc_RNA (1)...(19): siRNA sense strand
agauggaaccuuagugaaa

SEQ ID NO: 1008706 - RNA, 19 nt, Homo sapiens
  misc_RNA (1)...(19): siRNA sense strand
aacaggaaguucauucaug

SEQ ID NO: 1008707 - RNA, 19 nt, Homo sapiens
  misc_RNA (1)...(19): siRNA sense strand
cuagauggaaccuuaguga

SEQ ID NO: 1008708 - RNA, 19 nt, Homo sapiens
  misc_RNA (1)...(19): siRNA sense strand
ugccacccauuucaaguuu

SEQ ID NO: 1008709 - RNA, 19 nt, Homo sapiens
  misc_RNA (1)...(19): siRNA sense strand
gugacgacuuagccagaaa

SEQ ID NO: 1008710 - RNA, 19 nt, Homo sapiens
  misc_RNA (1)...(19): siRNA sense strand
cuacuucucuuuuaucauc

SEQ ID NO: 1008711 - RNA, 19 nt, Homo sapiens
  misc_RNA (1)...(19): siRNA sense strand
aauauuagagcuagaugga

SEQ ID NO: 1008712 - RNA, 19 nt, Homo sapiens
  misc_RNA (1)...(19): siRNA sense strand
ccaaauauuagagcuagau

SEQ ID NO: 1008713 - RNA, 19 nt, Homo sapiens
  misc_RNA (1)...(19): siRNA sense strand
agagugaccaaauauuaga

SEQ ID NO: 1008714 - RNA, 19 nt, Homo sapiens
  misc_RNA (1)...(19): siRNA sense strand
ugaccaaauauuagagcua

SEQ ID NO: 1008715 - RNA, 19 nt, Homo sapiens
  misc_RNA (1)...(19): siRNA sense strand
aaugagagugaccaaauau

SEQ ID NO: 1008716 - RNA, 19 nt, Homo sapiens
  misc_RNA (1)...(19): siRNA sense strand
caaauauuagagcuagaug

SEQ ID NO: 1008717 - RNA, 19 nt, Homo sapiens
  misc_RNA (1)...(19): siRNA sense strand
aaacaggaaguucauucau

SEQ ID NO: 1008718 - RNA, 19 nt, Homo sapiens
  misc_RNA (1)...(19): siRNA sense strand
ggguuucccuacuucucuu

SEQ ID NO: 1008719 - RNA, 19 nt, Homo sapiens
  misc_RNA (1)...(19): siRNA sense strand
uagauggaaccuuagugaa

SEQ ID NO: 1008720 - RNA, 19 nt, Homo sapiens
  misc_RNA (1)...(19): siRNA sense strand
gaacaacacucauggcuaa

SEQ ID NO: 1008721 - RNA, 19 nt, Homo sapiens
  misc_RNA (1)...(19): siRNA sense strand
gaagaagggcucauuauua

SEQ ID NO: 1008722 - RNA, 19 nt, Homo sapiens
  misc_RNA (1)...(19): siRNA sense strand
aaacauggcuauccacuua

SEQ ID NO: 1008723 - RNA, 19 nt, Homo sapiens
  misc_RNA (1)...(19): siRNA sense strand
gcaaagggcuacucaaaga

SEQ ID NO: 1008724 - RNA, 19 nt, Homo sapiens
  misc_RNA (1)...(19): siRNA sense strand
gcaaagaucugcaacaaca

SEQ ID NO: 1008725 - RNA, 19 nt, Homo sapiens
  misc_RNA (1)...(19): siRNA sense strand
aagaagggcucauuauuaa

SEQ ID NO: 1008726 - RNA, 19 nt, Homo sapiens
  misc_RNA (1)...(19): siRNA sense strand
ucaaugcaauagaagcuua

SEQ ID NO: 1008727 - RNA, 19 nt, Homo sapiens
  misc_RNA (1)...(19): siRNA sense strand
gcuguuagcuauuaguaug

SEQ ID NO: 1008728 - RNA, 19 nt, Homo sapiens
  misc_RNA (1)...(19): siRNA sense strand
gggaggaguugaagaugaa

SEQ ID NO: 1008729 - RNA, 19 nt, Homo sapiens
  misc_RNA (1)...(19): siRNA sense strand
gguuagggcuugacccaaa

SEQ ID NO: 1008730 - RNA, 19 nt, Homo sapiens
  misc_RNA (1)...(19): siRNA sense strand
gagcaaaugggauucuaaa

SEQ ID NO: 1008731 - RNA, 19 nt, Homo sapiens
  misc_RNA (1)...(19): siRNA sense strand
gcacaagacucugcuacca

SEQ ID NO: 1008732 - RNA, 19 nt, Homo sapiens
  misc_RNA (1)...(19): siRNA sense strand
caaaagaauuggccaaaga

SEQ ID NO: 1008733 - RNA, 19 nt, Homo sapiens
  misc_RNA (1)...(19): siRNA sense strand
ccaaagaaguugagaaaau

SEQ ID NO: 1008734 - RNA, 19 nt, Homo sapiens
  misc_RNA (1)...(19): siRNA sense strand
ggacgguguuggucaagug

SEQ ID NO: 1008735 - RNA, 19 nt, Homo sapiens
  misc_RNA (1)...(19): siRNA sense strand
gugaacagguaguaucuuc

SEQ ID NO: 1008736 - RNA, 19 nt, Homo sapiens
  misc_RNA (1)...(19): siRNA sense strand
ggccaaagaaguugagaaa

SEQ ID NO: 1008737 - RNA, 19 nt, Homo sapiens
  misc_RNA (1)...(19): siRNA sense strand
ugaagaagggcucauuauu

SEQ ID NO: 1008738 - RNA, 19 nt, Homo sapiens
  misc_RNA (1)...(19): siRNA sense strand
caguaucaaugcaauagaa

SEQ ID NO: 1008739 - RNA, 19 nt, Homo sapiens
  misc_RNA (1)...(19): siRNA sense strand
cggcaaagaucugcaacaa

SEQ ID NO: 1008740 - RNA, 19 nt, Homo sapiens
  misc_RNA (1)...(19): siRNA sense strand
caacacucauggcuaagga

SEQ ID NO: 1008741 - RNA, 19 nt, Homo sapiens
  misc_RNA (1)...(19): siRNA sense strand
ggcguucccucggcuaaua

SEQ ID NO: 1008742 - RNA, 19 nt, Homo sapiens
  misc_RNA (1)...(19): siRNA sense strand
gugcaaagggcuacucaaa

SEQ ID NO: 1008743 - RNA, 19 nt, Homo sapiens
  misc_RNA (1)...(19): siRNA sense strand
caaagaguuucaagaugca

SEQ ID NO: 1008744 - RNA, 19 nt, Homo sapiens
  misc_RNA (1)...(19): siRNA sense strand
uguaggagcugcacgaucu

SEQ ID NO: 1008745 - RNA, 19 nt, Homo sapiens
  misc_RNA (1)...(19): siRNA sense strand
agaauuggccaaagaaguu

SEQ ID NO: 1008746 - RNA, 19 nt, Homo sapiens
  misc_RNA (1)...(19): siRNA sense strand
agaugcaggugaacaggua

SEQ ID NO: 1008747 - RNA, 19 nt, Homo sapiens
  misc_RNA (1)...(19): siRNA sense strand
gauuggaacugcugaagcu

SEQ ID NO: 1008748 - RNA, 19 nt, Homo sapiens
  misc_RNA (1)...(19): siRNA sense strand
gcuauuaguaugauuggaa

SEQ ID NO: 1008749 - RNA, 19 nt, Homo sapiens
  misc_RNA (1)...(19): siRNA sense strand
caaagaaguugagaaaaug

SEQ ID NO: 1008750 - RNA, 19 nt, Homo sapiens
  misc_RNA (1)...(19): siRNA sense strand
ggagcaaaugggauucuaa

SEQ ID NO: 1008751 - RNA, 19 nt, Homo sapiens
  misc_RNA (1)...(19): siRNA sense strand
cuaggucaguggcuucaaa

SEQ ID NO: 1008752 - RNA, 19 nt, Homo sapiens
  misc_RNA (1)...(19): siRNA sense strand
gaacugcugaagcuaugaa

SEQ ID NO: 1008753 - RNA, 19 nt, Homo sapiens
  misc_RNA (1)...(19): siRNA sense strand
gcugacagaauuauuacaa

SEQ ID NO: 1008754 - RNA, 19 nt, Homo sapiens
  misc_RNA (1)...(19): siRNA sense strand
gaaacauggcuauccacuu

SEQ ID NO: 1008755 - RNA, 19 nt, Homo sapiens
  misc_RNA (1)...(19): siRNA sense strand
gaucugggauuggcacaag

SEQ ID NO: 1008756 - RNA, 19 nt, Homo sapiens
  misc_RNA (1)...(19): siRNA sense strand
uuaauagauuccagcacua

SEQ ID NO: 1008757 - RNA, 19 nt, Homo sapiens
  misc_RNA (1)...(19): siRNA sense strand
caaaacuacuggcuaaaau

SEQ ID NO: 1008758 - RNA, 19 nt, Homo sapiens
  misc_RNA (1)...(19): siRNA sense strand
cugggaaccucacguuuau

SEQ ID NO: 1008759 - RNA, 19 nt, Homo sapiens
  misc_RNA (1)...(19): siRNA sense strand
ggcuauccacuuauuauuu

SEQ ID NO: 1008760 - RNA, 19 nt, Homo sapiens
  misc_RNA (1)...(19): siRNA sense strand
ucugggaaccucacguuua

SEQ ID NO: 1008761 - RNA, 19 nt, Homo sapiens
  misc_RNA (1)...(19): siRNA sense strand
uaugauguguucccugaug

SEQ ID NO: 1008762 - RNA, 19 nt, Homo sapiens
  misc_RNA (1)...(19): siRNA sense strand
gcuccaacgugguguacug

SEQ ID NO: 1008763 - RNA, 19 nt, Homo sapiens
  misc_RNA (1)...(19): siRNA sense strand
gaagcuaugaaucuuggaa

SEQ ID NO: 1008764 - RNA, 19 nt, Homo sapiens
  misc_RNA (1)...(19): siRNA sense strand
ccaccaguaucaaugcaau

SEQ ID NO: 1008765 - RNA, 19 nt, Homo sapiens
  misc_RNA (1)...(19): siRNA sense strand
ucucauccguguuccaguu

SEQ ID NO: 1008766 - RNA, 19 nt, Homo sapiens
  misc_RNA (1)...(19): siRNA sense strand
ugggaggaguugaagauga

SEQ ID NO: 1008767 - RNA, 19 nt, Homo sapiens
  misc_RNA (1)...(19): siRNA sense strand
gaucugggaaccucacguu

SEQ ID NO: 1008768 - RNA, 19 nt, Homo sapiens
  misc_RNA (1)...(19): siRNA sense strand
gugaagaagggcucauuau

SEQ ID NO: 1008769 - RNA, 19 nt, Homo sapiens
  misc_RNA (1)...(19): siRNA sense strand
gcagcgguguguucuaggu

SEQ ID NO: 1008770 - RNA, 19 nt, Homo sapiens
  misc_RNA (1)...(19): siRNA sense strand
aaagggcuacucaaagaaa

SEQ ID NO: 1008771 - RNA, 19 nt, Homo sapiens
  misc_RNA (1)...(19): siRNA sense strand
caaagggcuacucaaagaa

SEQ ID NO: 1008772 - RNA, 19 nt, Homo sapiens
  misc_RNA (1)...(19): siRNA sense strand
uaacuaucaggguggauuu

SEQ ID NO: 1008773 - RNA, 19 nt, Homo sapiens
  misc_RNA (1)...(19): siRNA sense strand
ccugaugccugcaaagagu

SEQ ID NO: 1008774 - RNA, 19 nt, Homo sapiens
  misc_RNA (1)...(19): siRNA sense strand
acauggcuauccacuuauu

SEQ ID NO: 1008775 - RNA, 19 nt, Homo sapiens
  misc_RNA (1)...(19): siRNA sense strand
ggauuuggaacaacacuca

SEQ ID NO: 1008776 - RNA, 19 nt, Homo sapiens
  misc_RNA (1)...(19): siRNA sense strand
gguguacuguggagcuguu

SEQ ID NO: 1008777 - RNA, 19 nt, Homo sapiens
  misc_RNA (1)...(19): siRNA sense strand
gcacaaagagcccaauccu

SEQ ID NO: 1008778 - RNA, 19 nt, Homo sapiens
  misc_RNA (1)...(19): siRNA sense strand
ugcaaagaguuucaagaug

SEQ ID NO: 1008779 - RNA, 19 nt, Homo sapiens
  misc_RNA (1)...(19): siRNA sense strand
gaaucuuggaaucagguua

SEQ ID NO: 1008780 - RNA, 19 nt, Homo sapiens
  misc_RNA (1)...(19): siRNA sense strand
ucaggacgguguuggucaa

SEQ ID NO: 1008781 - RNA, 19 nt, Homo sapiens
  misc_RNA (1)...(19): siRNA sense strand
gucaguggcuucaaagacu

SEQ ID NO: 1008782 - RNA, 19 nt, Homo sapiens
  misc_RNA (1)...(19): siRNA sense strand
caggguggauuuggaacaa

SEQ ID NO: 1008783 - RNA, 19 nt, Homo sapiens
  misc_RNA (1)...(19): siRNA sense strand
acaaugcugcccaccagua

SEQ ID NO: 1008784 - RNA, 19 nt, Homo sapiens
  misc_RNA (1)...(19): siRNA sense strand
gagaggaggagaccuucug

SEQ ID NO: 1008785 - RNA, 19 nt, Homo sapiens
  misc_RNA (1)...(19): siRNA sense strand
ggcuaaggaucugggauug

SEQ ID NO: 1008786 - RNA, 19 nt, Homo sapiens
  misc_RNA (1)...(19): siRNA sense strand
gcuaugaaucuuggaauca

SEQ ID NO: 1008787 - RNA, 19 nt, Homo sapiens
  misc_RNA (1)...(19): siRNA sense strand
gaauuggccaaagaaguug

SEQ ID NO: 1008788 - RNA, 19 nt, Homo sapiens
  misc_RNA (1)...(19): siRNA sense strand
gggauuggcacaagacucu

SEQ ID NO: 1008789 - RNA, 19 nt, Homo sapiens
  misc_RNA (1)...(19): siRNA sense strand
uggaacugcugaagcuaug

SEQ ID NO: 1008790 - RNA, 19 nt, Homo sapiens
  misc_RNA (1)...(19): siRNA sense strand
ggugggaggaguugaagau

SEQ ID NO: 1008791 - RNA, 19 nt, Homo sapiens
  misc_RNA (1)...(19): siRNA sense strand
cugcaaagaguuucaagau

SEQ ID NO: 1008792 - RNA, 19 nt, Homo sapiens
  misc_RNA (1)...(19): siRNA sense strand
gggaaccucacguuuaugg

SEQ ID NO: 1008793 - RNA, 19 nt, Homo sapiens
  misc_RNA (1)...(19): siRNA sense strand
ggguggauuuggaacaaca

SEQ ID NO: 1008794 - RNA, 19 nt, Homo sapiens
  misc_RNA (1)...(19): siRNA sense strand
gaaucagguuagggcuuga

SEQ ID NO: 1008795 - RNA, 19 nt, Homo sapiens
  misc_RNA (1)...(19): siRNA sense strand
aaagaucugcaacaacaug

SEQ ID NO: 1008796 - RNA, 19 nt, Homo sapiens
  misc_RNA (1)...(19): siRNA sense strand
cggagcaaaugggauucua

SEQ ID NO: 1008797 - RNA, 19 nt, Homo sapiens
  misc_RNA (1)...(19): siRNA sense strand
cccaucagaucuacaggau

SEQ ID NO: 1008798 - RNA, 19 nt, Homo sapiens
  misc_RNA (1)...(19): siRNA sense strand
caaagagcccaauccuucu

SEQ ID NO: 1008799 - RNA, 19 nt, Homo sapiens
  misc_RNA (1)...(19): siRNA sense strand
ucccucggcuaauaacuau

SEQ ID NO: 1008800 - RNA, 19 nt, Homo sapiens
  misc_RNA (1)...(19): siRNA sense strand
cacuauugauccugcaguu

SEQ ID NO: 1008801 - RNA, 19 nt, Homo sapiens
  misc_RNA (1)...(19): siRNA sense strand
agacuucucauccguguuc

SEQ ID NO: 1008802 - RNA, 19 nt, Homo sapiens
  misc_RNA (1)...(19): siRNA sense strand
gcugaagcuaugaaucuug

SEQ ID NO: 1008803 - RNA, 19 nt, Homo sapiens
  misc_RNA (1)...(19): siRNA sense strand
agugaagaagggcucauua

SEQ ID NO: 1008804 - RNA, 19 nt, Homo sapiens
  misc_RNA (1)...(19): siRNA sense strand
caaugcugcccaccaguau

SEQ ID NO: 1008805 - RNA, 19 nt, Homo sapiens
  misc_RNA (1)...(19): siRNA sense strand
cuauugauccugcaguuuc

SEQ ID NO: 1008806 - RNA, 19 nt, Homo sapiens
  misc_RNA (1)...(19): siRNA sense strand
uagauuccagcacuauuga

SEQ ID NO: 1008807 - RNA, 19 nt, Homo sapiens
  misc_RNA (1)...(19): siRNA sense strand
uauugauccugcaguuuca

SEQ ID NO: 1008808 - RNA, 19 nt, Homo sapiens
  misc_RNA (1)...(19): siRNA sense strand
cauggcuauccacuuauua

SEQ ID NO: 1008809 - RNA, 19 nt, Homo sapiens
  misc_RNA (1)...(19): siRNA sense strand
uaucaggguggauuuggaa

SEQ ID NO: 1008810 - RNA, 19 nt, Homo sapiens
  misc_RNA (1)...(19): siRNA sense strand
ggaguugaagaugaauuug

SEQ ID NO: 1008811 - RNA, 19 nt, Homo sapiens
  misc_RNA (1)...(19): siRNA sense strand
gagaaaaugggagcaguuu

SEQ ID NO: 1008812 - RNA, 19 nt, Homo sapiens
  misc_RNA (1)...(19): siRNA sense strand
gacagaauuauuacaaugc

SEQ ID NO: 1008813 - RNA, 19 nt, Homo sapiens
  misc_RNA (1)...(19): siRNA sense strand
gcaggugaacagguaguau

SEQ ID NO: 1008814 - RNA, 19 nt, Homo sapiens
  misc_RNA (1)...(19): siRNA sense strand
gaggaguugaagaugaauu

SEQ ID NO: 1008815 - RNA, 19 nt, Homo sapiens
  misc_RNA (1)...(19): siRNA sense strand
aggaguugaagaugaauuu

SEQ ID NO: 1008816 - RNA, 19 nt, Homo sapiens
  misc_RNA (1)...(19): siRNA sense strand
acaggaugaugugugcaaa

SEQ ID NO: 1008817 - RNA, 19 nt, Homo sapiens
  misc_RNA (1)...(19): siRNA sense strand
uggcuaaggaucugggauu

SEQ ID NO: 1008818 - RNA, 19 nt, Homo sapiens
  misc_RNA (1)...(19): siRNA sense strand
gauuccagcacuauugauc

SEQ ID NO: 1008819 - RNA, 19 nt, Homo sapiens
  misc_RNA (1)...(19): siRNA sense strand
uccuguaccuggagugaug

SEQ ID NO: 1008820 - RNA, 19 nt, Homo sapiens
  misc_RNA (1)...(19): siRNA sense strand
ggauauagcuuaaaccuaa

SEQ ID NO: 1008821 - RNA, 19 nt, Homo sapiens
  misc_RNA (1)...(19): siRNA sense strand
gcaaaggucacccggaguu

SEQ ID NO: 1008822 - RNA, 19 nt, Homo sapiens
  misc_RNA (1)...(19): siRNA sense strand
ggacagcaguaugcagaug

SEQ ID NO: 1008823 - RNA, 19 nt, Homo sapiens
  misc_RNA (1)...(19): siRNA sense strand
cauauucaauggccuguuc

SEQ ID NO: 1008824 - RNA, 19 nt, Homo sapiens
  misc_RNA (1)...(19): siRNA sense strand
ggacagcggcuccuuucug

SEQ ID NO: 1008825 - RNA, 19 nt, Homo sapiens
  misc_RNA (1)...(19): siRNA sense strand
gaagaucucggaggguuug

SEQ ID NO: 1008826 - RNA, 19 nt, Homo sapiens
  misc_RNA (1)...(19): siRNA sense strand
gcugcgaccucuccugcuu

SEQ ID NO: 1008827 - RNA, 19 nt, Homo sapiens
  misc_RNA (1)...(19): siRNA sense strand
ccagcacgcccucauauuc

SEQ ID NO: 1008828 - RNA, 19 nt, Homo sapiens
  misc_RNA (1)...(19): siRNA sense strand
gaguacaccugcuguucca

SEQ ID NO: 1008829 - RNA, 19 nt, Homo sapiens
  misc_RNA (1)...(19): siRNA sense strand
caaaccauccucauucucu

SEQ ID NO: 1008830 - RNA, 19 nt, Homo sapiens
  misc_RNA (1)...(19): siRNA sense strand
gcaggacgcggaugaggau

SEQ ID NO: 1008831 - RNA, 19 nt, Homo sapiens
  misc_RNA (1)...(19): siRNA sense strand
ccuggagacuggaagaaau

SEQ ID NO: 1008832 - RNA, 19 nt, Homo sapiens
  misc_RNA (1)...(19): siRNA sense strand
gaugacacccuggcggauu

SEQ ID NO: 1008833 - RNA, 19 nt, Homo sapiens
  misc_RNA (1)...(19): siRNA sense strand
ucucggaggguuugaugua

SEQ ID NO: 1008834 - RNA, 19 nt, Homo sapiens
  misc_RNA (1)...(19): siRNA sense strand
cagcggcuccuuucugguu

SEQ ID NO: 1008835 - RNA, 19 nt, Homo sapiens
  misc_RNA (1)...(19): siRNA sense strand
ugauguaccugcaggaaaa

SEQ ID NO: 1008836 - RNA, 19 nt, Homo sapiens
  misc_RNA (1)...(19): siRNA sense strand
uuaaggugccggugucuga

SEQ ID NO: 1008837 - RNA, 19 nt, Homo sapiens
  misc_RNA (1)...(19): siRNA sense strand
gggauauagcuuaaaccua

SEQ ID NO: 1008838 - RNA, 19 nt, Homo sapiens
  misc_RNA (1)...(19): siRNA sense strand
cagcacgcccucauauuca

SEQ ID NO: 1008839 - RNA, 19 nt, Homo sapiens
  misc_RNA (1)...(19): siRNA sense strand
gacagcaguaugcagauga

SEQ ID NO: 1008840 - RNA, 19 nt, Homo sapiens
  misc_RNA (1)...(19): siRNA sense strand
gaucucggaggguuugaug

SEQ ID NO: 1008841 - RNA, 19 nt, Homo sapiens
  misc_RNA (1)...(19): siRNA sense strand
gcccagcacgcccucauau

SEQ ID NO: 1008842 - RNA, 19 nt, Homo sapiens
  misc_RNA (1)...(19): siRNA sense strand
gggcaacuaucuggauggu

SEQ ID NO: 1008843 - RNA, 19 nt, Homo sapiens
  misc_RNA (1)...(19): siRNA sense strand
gguguccgcccagguguuu

SEQ ID NO: 1008844 - RNA, 19 nt, Homo sapiens
  misc_RNA (1)...(19): siRNA sense strand
augacacccuggcggauuu

SEQ ID NO: 1008845 - RNA, 19 nt, Homo sapiens
  misc_RNA (1)...(19): siRNA sense strand
cgccuccgccugcagauaa

SEQ ID NO: 1008846 - RNA, 19 nt, Homo sapiens
  misc_RNA (1)...(19): siRNA sense strand
cacccaaaccauccucauu

SEQ ID NO: 1008847 - RNA, 19 nt, Homo sapiens
  misc_RNA (1)...(19): siRNA sense strand
gcagugcccgcuacaacca

SEQ ID NO: 1008848 - RNA, 19 nt, Homo sapiens
  misc_RNA (1)...(19): siRNA sense strand
cccaaaccauccucauucu

SEQ ID NO: 1008849 - RNA, 19 nt, Homo sapiens
  misc_RNA (1)...(19): siRNA sense strand
gcugacggccgaguccauu

SEQ ID NO: 1008850 - RNA, 19 nt, Homo sapiens
  misc_RNA (1)...(19): siRNA sense strand
cggccgagcaggucaacaa

SEQ ID NO: 1008851 - RNA, 19 nt, Homo sapiens
  misc_RNA (1)...(19): siRNA sense strand
gcacagaaaauuugaugag

SEQ ID NO: 1008852 - RNA, 19 nt, Homo sapiens
  misc_RNA (1)...(19): siRNA sense strand
caaaggucacccggaguug

SEQ ID NO: 1008853 - RNA, 19 nt, Homo sapiens
  misc_RNA (1)...(19): siRNA sense strand
ugaaagauguguaugauga

SEQ ID NO: 1008854 - RNA, 19 nt, Homo sapiens
  misc_RNA (1)...(19): siRNA sense strand
gaacacaguuucagagaca

SEQ ID NO: 1008855 - RNA, 19 nt, Homo sapiens
  misc_RNA (1)...(19): siRNA sense strand
ggaccaagauggagagaga

SEQ ID NO: 1008856 - RNA, 19 nt, Homo sapiens
  misc_RNA (1)...(19): siRNA sense strand
gaugacaccuucuacuuug

SEQ ID NO: 1008857 - RNA, 19 nt, Homo sapiens
  misc_RNA (1)...(19): siRNA sense strand
ggaggaggaugugaaguuu

SEQ ID NO: 1008858 - RNA, 19 nt, Homo sapiens
  misc_RNA (1)...(19): siRNA sense strand
gagaaugggcuccucauga

SEQ ID NO: 1008859 - RNA, 19 nt, Homo sapiens
  misc_RNA (1)...(19): siRNA sense strand
ggcaggauauacuccauuu

SEQ ID NO: 1008860 - RNA, 19 nt, Homo sapiens
  misc_RNA (1)...(19): siRNA sense strand
gaaggcaacgcugaaagua

SEQ ID NO: 1008861 - RNA, 19 nt, Homo sapiens
  misc_RNA (1)...(19): siRNA sense strand
gaucggcagugggaaguuu

SEQ ID NO: 1008862 - RNA, 19 nt, Homo sapiens
  misc_RNA (1)...(19): siRNA sense strand
ggaaauuggaacacaguuu

SEQ ID NO: 1008863 - RNA, 19 nt, Homo sapiens
  misc_RNA (1)...(19): siRNA sense strand
cuaugaaggugcugaagaa

SEQ ID NO: 1008864 - RNA, 19 nt, Homo sapiens
  misc_RNA (1)...(19): siRNA sense strand
gaagaaggcaacgcugaaa

SEQ ID NO: 1008865 - RNA, 19 nt, Homo sapiens
  misc_RNA (1)...(19): siRNA sense strand
caagcgggauccuucagaa

SEQ ID NO: 1008866 - RNA, 19 nt, Homo sapiens
  misc_RNA (1)...(19): siRNA sense strand
caucaucacucugaaagau

SEQ ID NO: 1008867 - RNA, 19 nt, Homo sapiens
  misc_RNA (1)...(19): siRNA sense strand
ggcaagcucuaucucauuc

SEQ ID NO: 1008868 - RNA, 19 nt, Homo sapiens
  misc_RNA (1)...(19): siRNA sense strand
gcaccuguaugcuaugaag

SEQ ID NO: 1008869 - RNA, 19 nt, Homo sapiens
  misc_RNA (1)...(19): siRNA sense strand
ggaaggagaccaugacacu

SEQ ID NO: 1008870 - RNA, 19 nt, Homo sapiens
  misc_RNA (1)...(19): siRNA sense strand
acaccaugcuggcaggaua

SEQ ID NO: 1008871 - RNA, 19 nt, Homo sapiens
  misc_RNA (1)...(19): siRNA sense strand
caugacaccuugcuacaca

SEQ ID NO: 1008872 - RNA, 19 nt, Homo sapiens
  misc_RNA (1)...(19): siRNA sense strand
ccacaaggccaccaacaug

SEQ ID NO: 1008873 - RNA, 19 nt, Homo sapiens
  misc_RNA (1)...(19): siRNA sense strand
ccaccggccugauggaaga

SEQ ID NO: 1008874 - RNA, 19 nt, Homo sapiens
  misc_RNA (1)...(19): siRNA sense strand
gaaaucaagcggcaugucu

SEQ ID NO: 1008875 - RNA, 19 nt, Homo sapiens
  misc_RNA (1)...(19): siRNA sense strand
caacaucaucacucugaaa

SEQ ID NO: 1008876 - RNA, 19 nt, Homo sapiens
  misc_RNA (1)...(19): siRNA sense strand
gcacagccuggguaucauu

SEQ ID NO: 1008877 - RNA, 19 nt, Homo sapiens
  misc_RNA (1)...(19): siRNA sense strand
gcaaaacuguggaguaucu

SEQ ID NO: 1008878 - RNA, 19 nt, Homo sapiens
  misc_RNA (1)...(19): siRNA sense strand
ccaugacacugauucugaa

SEQ ID NO: 1008879 - RNA, 19 nt, Homo sapiens
  misc_RNA (1)...(19): siRNA sense strand
caucaaacucacugacuuu

SEQ ID NO: 1008880 - RNA, 19 nt, Homo sapiens
  misc_RNA (1)...(19): siRNA sense strand
gcuauaccgucgugagauc

SEQ ID NO: 1008881 - RNA, 19 nt, Homo sapiens
  misc_RNA (1)...(19): siRNA sense strand
ccaccaacauggaguaugc

SEQ ID NO: 1008882 - RNA, 19 nt, Homo sapiens
  misc_RNA (1)...(19): siRNA sense strand
ugaugacaccuucuacuuu

SEQ ID NO: 1008883 - RNA, 19 nt, Homo sapiens
  misc_RNA (1)...(19): siRNA sense strand
gggagcugcuggacaagau

SEQ ID NO: 1008884 - RNA, 19 nt, Homo sapiens
  misc_RNA (1)...(19): siRNA sense strand
gcgcaucugugacuuuggu

SEQ ID NO: 1008885 - RNA, 19 nt, Homo sapiens
  misc_RNA (1)...(19): siRNA sense strand
caccagcgccucacagcua

SEQ ID NO: 1008886 - RNA, 19 nt, Homo sapiens
  misc_RNA (1)...(19): siRNA sense strand
gugggcaccuguaugcuau

SEQ ID NO: 1008887 - RNA, 19 nt, Homo sapiens
  misc_RNA (1)...(19): siRNA sense strand
ccucacagcuaagcagguu

SEQ ID NO: 1008888 - RNA, 19 nt, Homo sapiens
  misc_RNA (1)...(19): siRNA sense strand
gggcaagcucuaucucauu

SEQ ID NO: 1008889 - RNA, 19 nt, Homo sapiens
  misc_RNA (1)...(19): siRNA sense strand
gggcaccuguaugcuauga

SEQ ID NO: 1008890 - RNA, 19 nt, Homo sapiens
  misc_RNA (1)...(19): siRNA sense strand
gaaagauguguaugaugau

SEQ ID NO: 1008891 - RNA, 19 nt, Homo sapiens
  misc_RNA (1)...(19): siRNA sense strand
ccauugaccacgagaagaa

SEQ ID NO: 1008892 - RNA, 19 nt, Homo sapiens
  misc_RNA (1)...(19): siRNA sense strand
gcuaugaaggugcugaaga

SEQ ID NO: 1008893 - RNA, 19 nt, Homo sapiens
  misc_RNA (1)...(19): siRNA sense strand
gcaagcgggauccuucaga

SEQ ID NO: 1008894 - RNA, 19 nt, Homo sapiens
  misc_RNA (1)...(19): siRNA sense strand
aaagauguguaugaugaug

SEQ ID NO: 1008895 - RNA, 19 nt, Homo sapiens
  misc_RNA (1)...(19): siRNA sense strand
agaaugggcuccucaugac

SEQ ID NO: 1008896 - RNA, 19 nt, Homo sapiens
  misc_RNA (1)...(19): siRNA sense strand
caagcucuaucucauucug

SEQ ID NO: 1008897 - RNA, 19 nt, Homo sapiens
  misc_RNA (1)...(19): siRNA sense strand
acaucaaacucacugacuu

SEQ ID NO: 1008898 - RNA, 19 nt, Homo sapiens
  misc_RNA (1)...(19): siRNA sense strand
ugaggagggccacaucaaa

SEQ ID NO: 1008899 - RNA, 19 nt, Homo sapiens
  misc_RNA (1)...(19): siRNA sense strand
aggaggaugugaaguuuua

SEQ ID NO: 1008900 - RNA, 19 nt, Homo sapiens
  misc_RNA (1)...(19): siRNA sense strand
gcauucugcuguacaccau

SEQ ID NO: 1008901 - RNA, 19 nt, Homo sapiens
  misc_RNA (1)...(19): siRNA sense strand
ucugaaagauguguaugau

SEQ ID NO: 1008902 - RNA, 19 nt, Homo sapiens
  misc_RNA (1)...(19): siRNA sense strand
ucaagcggcaugucuucua

SEQ ID NO: 1008903 - RNA, 19 nt, Homo sapiens
  misc_RNA (1)...(19): siRNA sense strand
aaggagaccaugacacuga

SEQ ID NO: 1008904 - RNA, 19 nt, Homo sapiens
  misc_RNA (1)...(19): siRNA sense strand
gagcaaagaggccauugac

SEQ ID NO: 1008905 - RNA, 19 nt, Homo sapiens
  misc_RNA (1)...(19): siRNA sense strand
ugaagaaggcaacgcugaa

SEQ ID NO: 1008906 - RNA, 19 nt, Homo sapiens
  misc_RNA (1)...(19): siRNA sense strand
caauuggugugggcuccua

SEQ ID NO: 1008907 - RNA, 19 nt, Homo sapiens
  misc_RNA (1)...(19): siRNA sense strand
caagcggcaugucuucuac

SEQ ID NO: 1008908 - RNA, 19 nt, Homo sapiens
  misc_RNA (1)...(19): siRNA sense strand
cggaggaggaugugaaguu

SEQ ID NO: 1008909 - RNA, 19 nt, Homo sapiens
  misc_RNA (1)...(19): siRNA sense strand
gcugauccaucccauuucg

SEQ ID NO: 1008910 - RNA, 19 nt, Homo sapiens
  misc_RNA (1)...(19): siRNA sense strand
ggaccuacagcuugugaag

SEQ ID NO: 1008911 - RNA, 19 nt, Homo sapiens
  misc_RNA (1)...(19): siRNA sense strand
ccaacaucaucacucugaa

SEQ ID NO: 1008912 - RNA, 19 nt, Homo sapiens
  misc_RNA (1)...(19): siRNA sense strand
uggugaagcugcacuaugc

SEQ ID NO: 1008913 - RNA, 19 nt, Homo sapiens
  misc_RNA (1)...(19): siRNA sense strand
aggcugauccaucccauuu

SEQ ID NO: 1008914 - RNA, 19 nt, Homo sapiens
  misc_RNA (1)...(19): siRNA sense strand
gagggcaagcucuaucuca

SEQ ID NO: 1008915 - RNA, 19 nt, Homo sapiens
  misc_RNA (1)...(19): siRNA sense strand
gaggagggccacaucaaac

SEQ ID NO: 1008916 - RNA, 19 nt, Homo sapiens
  misc_RNA (1)...(19): siRNA sense strand
ugaagcccaucgagucauc

SEQ ID NO: 1008917 - RNA, 19 nt, Homo sapiens
  misc_RNA (1)...(19): siRNA sense strand
gacuucagccguccaagga

SEQ ID NO: 1008918 - RNA, 19 nt, Homo sapiens
  misc_RNA (1)...(19): siRNA sense strand
gcgggacaguggaguacau

SEQ ID NO: 1008919 - RNA, 19 nt, Homo sapiens
  misc_RNA (1)...(19): siRNA sense strand
gcugaagcccaucgaguca

SEQ ID NO: 1008920 - RNA, 19 nt, Homo sapiens
  misc_RNA (1)...(19): siRNA sense strand
gaccugaagcccagcaaca

SEQ ID NO: 1008921 - RNA, 19 nt, Homo sapiens
  misc_RNA (1)...(19): siRNA sense strand
gagcaagcgggauccuuca

SEQ ID NO: 1008922 - RNA, 19 nt, Homo sapiens
  misc_RNA (1)...(19): siRNA sense strand
cauggaguaugcugucaag

SEQ ID NO: 1008923 - RNA, 19 nt, Homo sapiens
  misc_RNA (1)...(19): siRNA sense strand
ugacuggaauaagcuauac

SEQ ID NO: 1008924 - RNA, 19 nt, Homo sapiens
  misc_RNA (1)...(19): siRNA sense strand
gugaggaaguugccaucca

SEQ ID NO: 1008925 - RNA, 19 nt, Homo sapiens
  misc_RNA (1)...(19): siRNA sense strand
uguguaugaugauggcaaa

SEQ ID NO: 1008926 - RNA, 19 nt, Homo sapiens
  misc_RNA (1)...(19): siRNA sense strand
cccaacaucaucacucuga

SEQ ID NO: 1008927 - RNA, 19 nt, Homo sapiens
  misc_RNA (1)...(19): siRNA sense strand
gcaacuccaugggaagaac

SEQ ID NO: 1008928 - RNA, 19 nt, Homo sapiens
  misc_RNA (1)...(19): siRNA sense strand
gaccggaaggagaccauga

SEQ ID NO: 1008929 - RNA, 19 nt, Homo sapiens
  misc_RNA (1)...(19): siRNA sense strand
acguguaccuggugacaga

SEQ ID NO: 1008930 - RNA, 19 nt, Homo sapiens
  misc_RNA (1)...(19): siRNA sense strand
ggguguugauguuugagau

SEQ ID NO: 1008931 - RNA, 19 nt, Homo sapiens
  misc_RNA (1)...(19): siRNA sense strand
ugacacaccagaggaaauc

SEQ ID NO: 1008932 - RNA, 19 nt, Homo sapiens
  misc_RNA (1)...(19): siRNA sense strand
gcaucugugacuuugguuu

SEQ ID NO: 1008933 - RNA, 19 nt, Homo sapiens
  misc_RNA (1)...(19): siRNA sense strand
cagccuggguaucauuuac

SEQ ID NO: 1008934 - RNA, 19 nt, Homo sapiens
  misc_RNA (1)...(19): siRNA sense strand
gcgccagggcuacgaugaa

SEQ ID NO: 1008935 - RNA, 19 nt, Homo sapiens
  misc_RNA (1)...(19): siRNA sense strand
ucacccggcucucaaaaga

SEQ ID NO: 1008936 - RNA, 19 nt, Homo sapiens
  misc_RNA (1)...(19): siRNA sense strand
ccaccaggaccuacagcuu

SEQ ID NO: 1008937 - RNA, 19 nt, Homo sapiens
  misc_RNA (1)...(19): siRNA sense strand
caggauauacuccauuugc

SEQ ID NO: 1008938 - RNA, 19 nt, Homo sapiens
  misc_RNA (1)...(19): siRNA sense strand
gcaggauauacuccauuug

SEQ ID NO: 1008939 - RNA, 19 nt, Homo sapiens
  misc_RNA (1)...(19): siRNA sense strand
gccugggcauucugcugua

SEQ ID NO: 1008940 - RNA, 19 nt, Homo sapiens
  misc_RNA (1)...(19): siRNA sense strand
gugguaaaggagacaauug

SEQ ID NO: 1008941 - RNA, 19 nt, Homo sapiens
  misc_RNA (1)...(19): siRNA sense strand
gagaccaugacacugauuc

SEQ ID NO: 1008942 - RNA, 19 nt, Homo sapiens
  misc_RNA (1)...(19): siRNA sense strand
gagggccacaucaaacuca

SEQ ID NO: 1008943 - RNA, 19 nt, Homo sapiens
  misc_RNA (1)...(19): siRNA sense strand
gaaugggcuccucaugaca

SEQ ID NO: 1008944 - RNA, 19 nt, Homo sapiens
  misc_RNA (1)...(19): siRNA sense strand
gcccagcaacauccuguau

SEQ ID NO: 1008945 - RNA, 19 nt, Homo sapiens
  misc_RNA (1)...(19): siRNA sense strand
uggcaaaacuguggaguau

SEQ ID NO: 1008946 - RNA, 19 nt, Homo sapiens
  misc_RNA (1)...(19): siRNA sense strand
gcacucggugguacagcaa

SEQ ID NO: 1008947 - RNA, 19 nt, Homo sapiens
  misc_RNA (1)...(19): siRNA sense strand
acgagaagaaggccuauuc

SEQ ID NO: 1008948 - RNA, 19 nt, Homo sapiens
  misc_RNA (1)...(19): siRNA sense strand
cugcacagccuggguauca

SEQ ID NO: 1008949 - RNA, 19 nt, Homo sapiens
  misc_RNA (1)...(19): siRNA sense strand
cugcgcaucugugacuuug

SEQ ID NO: 1008950 - RNA, 19 nt, Homo sapiens
  misc_RNA (1)...(19): siRNA sense strand
ggaaaucaagcggcauguc

SEQ ID NO: 1008951 - RNA, 19 nt, Homo sapiens
  misc_RNA (1)...(19): siRNA sense strand
ggagaccaugacacugauu

SEQ ID NO: 1008952 - RNA, 19 nt, Homo sapiens
  misc_RNA (1)...(19): siRNA sense strand
caacggucccagugacaca

SEQ ID NO: 1008953 - RNA, 19 nt, Homo sapiens
  misc_RNA (1)...(19): siRNA sense strand
guucaaagcuagcauauua

SEQ ID NO: 1008954 - RNA, 19 nt, Homo sapiens
  misc_RNA (1)...(19): siRNA sense strand
ggaagcagauguuaauauu

SEQ ID NO: 1008955 - RNA, 19 nt, Homo sapiens
  misc_RNA (1)...(19): siRNA sense strand
gaagagguauugaaugcua

SEQ ID NO: 1008956 - RNA, 19 nt, Homo sapiens
  misc_RNA (1)...(19): siRNA sense strand
gaaguuggaugacaaugaa

SEQ ID NO: 1008957 - RNA, 19 nt, Homo sapiens
  misc_RNA (1)...(19): siRNA sense strand
gaagaccuguuuaauaugu

SEQ ID NO: 1008958 - RNA, 19 nt, Homo sapiens
  misc_RNA (1)...(19): siRNA sense strand
uggaagaccuguuuaauau

SEQ ID NO: 1008959 - RNA, 19 nt, Homo sapiens
  misc_RNA (1)...(19): siRNA sense strand
gaaaugaacaggagucaau

SEQ ID NO: 1008960 - RNA, 19 nt, Homo sapiens
  misc_RNA (1)...(19): siRNA sense strand
uauggaagcuauacagaaa

SEQ ID NO: 1008961 - RNA, 19 nt, Homo sapiens
  misc_RNA (1)...(19): siRNA sense strand
uggcaaggcuaaagaaauu

SEQ ID NO: 1008962 - RNA, 19 nt, Homo sapiens
  misc_RNA (1)...(19): siRNA sense strand
gaaggaguagagaaauuua

SEQ ID NO: 1008963 - RNA, 19 nt, Homo sapiens
  misc_RNA (1)...(19): siRNA sense strand
gcaagaggaucggguguau

SEQ ID NO: 1008964 - RNA, 19 nt, Homo sapiens
  misc_RNA (1)...(19): siRNA sense strand
ucaaguugcuaaugcuaua

SEQ ID NO: 1008965 - RNA, 19 nt, Homo sapiens
  misc_RNA (1)...(19): siRNA sense strand
agauguagccucaguaaua

SEQ ID NO: 1008966 - RNA, 19 nt, Homo sapiens
  misc_RNA (1)...(19): siRNA sense strand
agacauguaugagcaauuu

SEQ ID NO: 1008967 - RNA, 19 nt, Homo sapiens
  misc_RNA (1)...(19): siRNA sense strand
uagcagaccuuggaagaaa

SEQ ID NO: 1008968 - RNA, 19 nt, Homo sapiens
  misc_RNA (1)...(19): siRNA sense strand
gguauugaaugcuaugcua

SEQ ID NO: 1008969 - RNA, 19 nt, Homo sapiens
  misc_RNA (1)...(19): siRNA sense strand
gaugggagguaucaaagga

SEQ ID NO: 1008970 - RNA, 19 nt, Homo sapiens
  misc_RNA (1)...(19): siRNA sense strand
gacacaauauaccaaguuu

SEQ ID NO: 1008971 - RNA, 19 nt, Homo sapiens
  misc_RNA (1)...(19): siRNA sense strand
ggaagaauccaaagaguag

SEQ ID NO: 1008972 - RNA, 19 nt, Homo sapiens
  misc_RNA (1)...(19): siRNA sense strand
uugaaggacugauagauaa

SEQ ID NO: 1008973 - RNA, 19 nt, Homo sapiens
  misc_RNA (1)...(19): siRNA sense strand
ugaaaggcaugaugggauu

SEQ ID NO: 1008974 - RNA, 19 nt, Homo sapiens
  misc_RNA (1)...(19): siRNA sense strand
gauuauguuuguuggauug

SEQ ID NO: 1008975 - RNA, 19 nt, Homo sapiens
  misc_RNA (1)...(19): siRNA sense strand
uagauaaagucaacgaguu

SEQ ID NO: 1008976 - RNA, 19 nt, Homo sapiens
  misc_RNA (1)...(19): siRNA sense strand
uuaaagaacuugugaagcu

SEQ ID NO: 1008977 - RNA, 19 nt, Homo sapiens
  misc_RNA (1)...(19): siRNA sense strand
agaaauggauccugucauc

SEQ ID NO: 1008978 - RNA, 19 nt, Homo sapiens
  misc_RNA (1)...(19): siRNA sense strand
uagaugacuuugaaccuuu

SEQ ID NO: 1008979 - RNA, 19 nt, Homo sapiens
  misc_RNA (1)...(19): siRNA sense strand
gauguagccucaguaauag

SEQ ID NO: 1008980 - RNA, 19 nt, Homo sapiens
  misc_RNA (1)...(19): siRNA sense strand
gaacauauagaugacuuug

SEQ ID NO: 1008981 - RNA, 19 nt, Homo sapiens
  misc_RNA (1)...(19): siRNA sense strand
gcaaggcuaaagaaauuaa

SEQ ID NO: 1008982 - RNA, 19 nt, Homo sapiens
  misc_RNA (1)...(19): siRNA sense strand
cgacauugaaggacugaua

SEQ ID NO: 1008983 - RNA, 19 nt, Homo sapiens
  misc_RNA (1)...(19): siRNA sense strand
gaucaagaacuagacagua

SEQ ID NO: 1008984 - RNA, 19 nt, Homo sapiens
  misc_RNA (1)...(19): siRNA sense strand
ggacacccacuaaaggaaa

SEQ ID NO: 1008985 - RNA, 19 nt, Homo sapiens
  misc_RNA (1)...(19): siRNA sense strand
auagagaaguugaaacaug

SEQ ID NO: 1008986 - RNA, 19 nt, Homo sapiens
  misc_RNA (1)...(19): siRNA sense strand
ugacaaugaagcacuuaua

SEQ ID NO: 1008987 - RNA, 19 nt, Homo sapiens
  misc_RNA (1)...(19): siRNA sense strand
guagauguagccucaguaa

SEQ ID NO: 1008988 - RNA, 19 nt, Homo sapiens
  misc_RNA (1)...(19): siRNA sense strand
ggacagauuuuaugagcaa

SEQ ID NO: 1008989 - RNA, 19 nt, Homo sapiens
  misc_RNA (1)...(19): siRNA sense strand
gggaacauauagaugacuu

SEQ ID NO: 1008990 - RNA, 19 nt, Homo sapiens
  misc_RNA (1)...(19): siRNA sense strand
ggaugacaaugaagcacuu

SEQ ID NO: 1008991 - RNA, 19 nt, Homo sapiens
  misc_RNA (1)...(19): siRNA sense strand
caaagcaagaauuccauuu

SEQ ID NO: 1008992 - RNA, 19 nt, Homo sapiens
  misc_RNA (1)...(19): siRNA sense strand
uuagcaaacuucuugguau

SEQ ID NO: 1008993 - RNA, 19 nt, Homo sapiens
  misc_RNA (1)...(19): siRNA sense strand
uuucaaagguggcgacaug

SEQ ID NO: 1008994 - RNA, 19 nt, Homo sapiens
  misc_RNA (1)...(19): siRNA sense strand
uagcaaacuucuugguaug

SEQ ID NO: 1008995 - RNA, 19 nt, Homo sapiens
  misc_RNA (1)...(19): siRNA sense strand
uaaagaacuugugaagcuu

SEQ ID NO: 1008996 - RNA, 19 nt, Homo sapiens
  misc_RNA (1)...(19): siRNA sense strand
ggcaugaugggauucaaua

SEQ ID NO: 1008997 - RNA, 19 nt, Homo sapiens
  misc_RNA (1)...(19): siRNA sense strand
ugaaggaguagagaaauuu

SEQ ID NO: 1008998 - RNA, 19 nt, Homo sapiens
  misc_RNA (1)...(19): siRNA sense strand
caacaaauggccaaaauga

SEQ ID NO: 1008999 - RNA, 19 nt, Homo sapiens
  misc_RNA (1)...(19): siRNA sense strand
aaagaugggagguaucaaa

SEQ ID NO: 1009000 - RNA, 19 nt, Homo sapiens
  misc_RNA (1)...(19): siRNA sense strand
gugaagcaacuaagagaaa

SEQ ID NO: 1009001 - RNA, 19 nt, Homo sapiens
  misc_RNA (1)...(19): siRNA sense strand
caaugaagcacuuauagag

SEQ ID NO: 1009002 - RNA, 19 nt, Homo sapiens
  misc_RNA (1)...(19): siRNA sense strand
uuggaagaccuguuuaaua

SEQ ID NO: 1009003 - RNA, 19 nt, Homo sapiens
  misc_RNA (1)...(19): siRNA sense strand
aauguuaagucugcuauug

SEQ ID NO: 1009004 - RNA, 19 nt, Homo sapiens
  misc_RNA (1)...(19): siRNA sense strand
ggcgacaugucuaagaaug

SEQ ID NO: 1009005 - RNA, 19 nt, Homo sapiens
  misc_RNA (1)...(19): siRNA sense strand
augaagcacuuauagagaa

SEQ ID NO: 1009006 - RNA, 19 nt, Homo sapiens
  misc_RNA (1)...(19): siRNA sense strand
cugaaggaguagagaaauu

SEQ ID NO: 1009007 - RNA, 19 nt, Homo sapiens
  misc_RNA (1)...(19): siRNA sense strand
gaagcuauacagaaaugga

SEQ ID NO: 1009008 - RNA, 19 nt, Homo sapiens
  misc_RNA (1)...(19): siRNA sense strand
gaacuugugaagcuuguag

SEQ ID NO: 1009009 - RNA, 19 nt, Homo sapiens
  misc_RNA (1)...(19): siRNA sense strand
guggcgacaugucuaagaa

SEQ ID NO: 1009010 - RNA, 19 nt, Homo sapiens
  misc_RNA (1)...(19): siRNA sense strand
gaucggguguaucaacaag

SEQ ID NO: 1009011 - RNA, 19 nt, Homo sapiens
  misc_RNA (1)...(19): siRNA sense strand
gacaaugaagcacuuauag

SEQ ID NO: 1009012 - RNA, 19 nt, Homo sapiens
  misc_RNA (1)...(19): siRNA sense strand
uggaagcuauacagaaaug

SEQ ID NO: 1009013 - RNA, 19 nt, Homo sapiens
  misc_RNA (1)...(19): siRNA sense strand
ggcaucuggucuuaacaaa

SEQ ID NO: 1009014 - RNA, 19 nt, Homo sapiens
  misc_RNA (1)...(19): siRNA sense strand
ggaagaccuguuuaauaug

SEQ ID NO: 1009015 - RNA, 19 nt, Homo sapiens
  misc_RNA (1)...(19): siRNA sense strand
gcaagggagugguaaaaca

SEQ ID NO: 1009016 - RNA, 19 nt, Homo sapiens
  misc_RNA (1)...(19): siRNA sense strand
gcaugaugggauucaauaa

SEQ ID NO: 1009017 - RNA, 19 nt, Homo sapiens
  misc_RNA (1)...(19): siRNA sense strand
caggaagaauccaaagagu

SEQ ID NO: 1009018 - RNA, 19 nt, Homo sapiens
  misc_RNA (1)...(19): siRNA sense strand
caaccaggaagaauccaaa

SEQ ID NO: 1009019 - RNA, 19 nt, Homo sapiens
  misc_RNA (1)...(19): siRNA sense strand
uaaacaaccaggaagaauc

SEQ ID NO: 1009020 - RNA, 19 nt, Homo sapiens
  misc_RNA (1)...(19): siRNA sense strand
uggauaguaugaaugauca

SEQ ID NO: 1009021 - RNA, 19 nt, Homo sapiens
  misc_RNA (1)...(19): siRNA sense strand
gaaauggauccugucauca

SEQ ID NO: 1009022 - RNA, 19 nt, Homo sapiens
  misc_RNA (1)...(19): siRNA sense strand
uaagucugcuauugaucuu

SEQ ID NO: 1009023 - RNA, 19 nt, Homo sapiens
  misc_RNA (1)...(19): siRNA sense strand
guaaacaaccaggaagaau

SEQ ID NO: 1009024 - RNA, 19 nt, Homo sapiens
  misc_RNA (1)...(19): siRNA sense strand
ugaaguuggaugacaauga

SEQ ID NO: 1009025 - RNA, 19 nt, Homo sapiens
  misc_RNA (1)...(19): siRNA sense strand
gcauggacacccacuaaag

SEQ ID NO: 1009026 - RNA, 19 nt, Homo sapiens
  misc_RNA (1)...(19): siRNA sense strand
guuggaagcagauguuaau

SEQ ID NO: 1009027 - RNA, 19 nt, Homo sapiens
  misc_RNA (1)...(19): siRNA sense strand
ccucaguaauagugacaaa

SEQ ID NO: 1009028 - RNA, 19 nt, Homo sapiens
  misc_RNA (1)...(19): siRNA sense strand
gaaaugcuucaaguugcua

SEQ ID NO: 1009029 - RNA, 19 nt, Homo sapiens
  misc_RNA (1)...(19): siRNA sense strand
ccacaaacaagaagacucu

SEQ ID NO: 1009030 - RNA, 19 nt, Homo sapiens
  misc_RNA (1)...(19): siRNA sense strand
gugauuauguuuguuggau

SEQ ID NO: 1009031 - RNA, 19 nt, Homo sapiens
  misc_RNA (1)...(19): siRNA sense strand
gagcaaaggaaaugaacag

SEQ ID NO: 1009032 - RNA, 19 nt, Homo sapiens
  misc_RNA (1)...(19): siRNA sense strand
gauccuaggguucuucauc

SEQ ID NO: 1009033 - RNA, 19 nt, Homo sapiens
  misc_RNA (1)...(19): siRNA sense strand
caaguuugcacagauggua

SEQ ID NO: 1009034 - RNA, 19 nt, Homo sapiens
  misc_RNA (1)...(19): siRNA sense strand
guacggauggugccaaagu

SEQ ID NO: 1009035 - RNA, 19 nt, Homo sapiens
  misc_RNA (1)...(19): siRNA sense strand
ugaaugcuaugcuaaaaga

SEQ ID NO: 1009036 - RNA, 19 nt, Homo sapiens
  misc_RNA (1)...(19): siRNA sense strand
ugacacaauauaccaaguu

SEQ ID NO: 1009037 - RNA, 19 nt, Homo sapiens
  misc_RNA (1)...(19): siRNA sense strand
ugaaugaucaagaacuaga

SEQ ID NO: 1009038 - RNA, 19 nt, Homo sapiens
  misc_RNA (1)...(19): siRNA sense strand
gacaauaauggauaguaug

SEQ ID NO: 1009039 - RNA, 19 nt, Homo sapiens
  misc_RNA (1)...(19): siRNA sense strand
aaacacagccuuuuauuag

SEQ ID NO: 1009040 - RNA, 19 nt, Homo sapiens
  misc_RNA (1)...(19): siRNA sense strand
ggauugcaagggaguggua

SEQ ID NO: 1009041 - RNA, 19 nt, Homo sapiens
  misc_RNA (1)...(19): siRNA sense strand
gaguugaaguuggaugaca

SEQ ID NO: 1009042 - RNA, 19 nt, Homo sapiens
  misc_RNA (1)...(19): siRNA sense strand
ggaacauauagaugacuuu

SEQ ID NO: 1009043 - RNA, 19 nt, Homo sapiens
  misc_RNA (1)...(19): siRNA sense strand
gguuggaagaccuguuuaa

SEQ ID NO: 1009044 - RNA, 19 nt, Homo sapiens
  misc_RNA (1)...(19): siRNA sense strand
gaugggauucaauaauaug

SEQ ID NO: 1009045 - RNA, 19 nt, Homo sapiens
  misc_RNA (1)...(19): siRNA sense strand
guauugaaugcuaugcuaa

SEQ ID NO: 1009046 - RNA, 19 nt, Homo sapiens
  misc_RNA (1)...(19): siRNA sense strand
caguacggauggugccaaa

SEQ ID NO: 1009047 - RNA, 19 nt, Homo sapiens
  misc_RNA (1)...(19): siRNA sense strand
acaaugaagcacuuauaga

SEQ ID NO: 1009048 - RNA, 19 nt, Homo sapiens
  misc_RNA (1)...(19): siRNA sense strand
agaagucuguaccgcuuug

SEQ ID NO: 1009049 - RNA, 19 nt, Homo sapiens
  misc_RNA (1)...(19): siRNA sense strand
ccaaagcaagaauuccauu

SEQ ID NO: 1009050 - RNA, 19 nt, Homo sapiens
  misc_RNA (1)...(19): siRNA sense strand
aggaagaauccaaagagua

SEQ ID NO: 1009051 - RNA, 19 nt, Homo sapiens
  misc_RNA (1)...(19): siRNA sense strand
agucugcuauugaucuuga

SEQ ID NO: 1009052 - RNA, 19 nt, Homo sapiens
  misc_RNA (1)...(19): siRNA sense strand
aagaggaucggguguauca

SEQ ID NO: 1009053 - RNA, 19 nt, Homo sapiens
  misc_RNA (1)...(19): siRNA sense strand
ugaaacaaguggagaaaua

SEQ ID NO: 1009054 - RNA, 19 nt, Homo sapiens
  misc_RNA (1)...(19): siRNA sense strand
gcaccaagcuuaucaugga

SEQ ID NO: 1009055 - RNA, 19 nt, Homo sapiens
  misc_RNA (1)...(19): siRNA sense strand
guaagacucuggacugcua

SEQ ID NO: 1009056 - RNA, 19 nt, Homo sapiens
  misc_RNA (1)...(19): siRNA sense strand
gagaacagguggacgauca

SEQ ID NO: 1009057 - RNA, 19 nt, Homo sapiens
  misc_RNA (1)...(19): siRNA sense strand
gacgagcgcaccaagcuua

SEQ ID NO: 1009058 - RNA, 19 nt, Homo sapiens
  misc_RNA (1)...(19): siRNA sense strand
ccaaggaugucugggugua

SEQ ID NO: 1009059 - RNA, 19 nt, Homo sapiens
  misc_RNA (1)...(19): siRNA sense strand
gcagccagaucuucaucau

SEQ ID NO: 1009060 - RNA, 19 nt, Homo sapiens
  misc_RNA (1)...(19): siRNA sense strand
ggagaacugccucuaugug

SEQ ID NO: 1009061 - RNA, 19 nt, Homo sapiens
  misc_RNA (1)...(19): siRNA sense strand
ccgaguuccuggagaagaa

SEQ ID NO: 1009062 - RNA, 19 nt, Homo sapiens
  misc_RNA (1)...(19): siRNA sense strand
uguccaagguccagugcua

SEQ ID NO: 1009063 - RNA, 19 nt, Homo sapiens
  misc_RNA (1)...(19): siRNA sense strand
gaaacaaguggagaaauac

SEQ ID NO: 1009064 - RNA, 19 nt, Homo sapiens
  misc_RNA (1)...(19): siRNA sense strand
gccagaccuucauguguga

SEQ ID NO: 1009065 - RNA, 19 nt, Homo sapiens
  misc_RNA (1)...(19): siRNA sense strand
cuggagaacugccucuaug

SEQ ID NO: 1009066 - RNA, 19 nt, Homo sapiens
  misc_RNA (1)...(19): siRNA sense strand
cgcaagcacugcauguuca

SEQ ID NO: 1009067 - RNA, 19 nt, Homo sapiens
  misc_RNA (1)...(19): siRNA sense strand
gagcgcaccaagcuuauca

SEQ ID NO: 1009068 - RNA, 19 nt, Homo sapiens
  misc_RNA (1)...(19): siRNA sense strand
caggcgacaugcugcaguu

SEQ ID NO: 1009069 - RNA, 19 nt, Homo sapiens
  misc_RNA (1)...(19): siRNA sense strand
ccacuucagauacauggaa

SEQ ID NO: 1009070 - RNA, 19 nt, Homo sapiens
  misc_RNA (1)...(19): siRNA sense strand
cuucaugugugacaagauc

SEQ ID NO: 1009071 - RNA, 19 nt, Homo sapiens
  misc_RNA (1)...(19): siRNA sense strand
ccaugaacgucacccucuu

SEQ ID NO: 1009072 - RNA, 19 nt, Homo sapiens
  misc_RNA (1)...(19): siRNA sense strand
ccgccgaguuccuggagaa

SEQ ID NO: 1009073 - RNA, 19 nt, Homo sapiens
  misc_RNA (1)...(19): siRNA sense strand
gcagagcgaggacuucaac

SEQ ID NO: 1009074 - RNA, 19 nt, Homo sapiens
  misc_RNA (1)...(19): siRNA sense strand
ccacaaggccaaggagauc

SEQ ID NO: 1009075 - RNA, 19 nt, Homo sapiens
  misc_RNA (1)...(19): siRNA sense strand
ggaggugacacggaauuca

SEQ ID NO: 1009076 - RNA, 19 nt, Homo sapiens
  misc_RNA (1)...(19): siRNA sense strand
gggccagaccuucaugugu

SEQ ID NO: 1009077 - RNA, 19 nt, Homo sapiens
  misc_RNA (1)...(19): siRNA sense strand
gcuggagaacugccucuau

SEQ ID NO: 1009078 - RNA, 19 nt, Homo sapiens
  misc_RNA (1)...(19): siRNA sense strand
caccguacaugaggaaugg

SEQ ID NO: 1009079 - RNA, 19 nt, Homo sapiens
  misc_RNA (1)...(19): siRNA sense strand
cgacaccguacaugaggaa

SEQ ID NO: 1009080 - RNA, 19 nt, Homo sapiens
  misc_RNA (1)...(19): siRNA sense strand
ccaagguccagugcuauga

SEQ ID NO: 1009081 - RNA, 19 nt, Homo sapiens
  misc_RNA (1)...(19): siRNA sense strand
ccucacgcaucgccaucaa

SEQ ID NO: 1009082 - RNA, 19 nt, Homo sapiens
  misc_RNA (1)...(19): siRNA sense strand
gcuaugaccccacuucaga

SEQ ID NO: 1009083 - RNA, 19 nt, Homo sapiens
  misc_RNA (1)...(19): siRNA sense strand
gaacagguggacgaucaag

SEQ ID NO: 1009084 - RNA, 19 nt, Homo sapiens
  misc_RNA (1)...(19): siRNA sense strand
caugcugauugcccgcuuu

SEQ ID NO: 1009085 - RNA, 19 nt, Homo sapiens
  misc_RNA (1)...(19): siRNA sense strand
gaguucuccuggcgcaugu

SEQ ID NO: 1009086 - RNA, 19 nt, Homo sapiens
  misc_RNA (1)...(19): siRNA sense strand
gcgacaugcugcaguucca

SEQ ID NO: 1009087 - RNA, 19 nt, Homo sapiens
  misc_RNA (1)...(19): siRNA sense strand
gagcugcugcuggacuuug

SEQ ID NO: 1009088 - RNA, 19 nt, Homo sapiens
  misc_RNA (1)...(19): siRNA sense strand
cgggauggcgucagcaaug

SEQ ID NO: 1009089 - RNA, 19 nt, Homo sapiens
  misc_RNA (1)...(19): siRNA sense strand
acacacugcuggaccucau

SEQ ID NO: 1009090 - RNA, 19 nt, Homo sapiens
  misc_RNA (1)...(19): siRNA sense strand
cgaggagaacgcugaguca

SEQ ID NO: 1009091 - RNA, 19 nt, Homo sapiens
  misc_RNA (1)...(19): siRNA sense strand
gcgcaccaagcuuaucaug

SEQ ID NO: 1009092 - RNA, 19 nt, Homo sapiens
  misc_RNA (1)...(19): siRNA sense strand
gggauggcgucagcaaugc

SEQ ID NO: 1009093 - RNA, 19 nt, Homo sapiens
  misc_RNA (1)...(19): siRNA sense strand
gcuaugaccccucggagaa

SEQ ID NO: 1009094 - RNA, 19 nt, Homo sapiens
  misc_RNA (1)...(19): siRNA sense strand
ugacaagacugacuacaug

SEQ ID NO: 1009095 - RNA, 19 nt, Homo sapiens
  misc_RNA (1)...(19): siRNA sense strand
gacgagagccugcgaaagu

SEQ ID NO: 1009096 - RNA, 19 nt, Homo sapiens
  misc_RNA (1)...(19): siRNA sense strand
caggaaaggcgucaagauu

SEQ ID NO: 1009097 - RNA, 19 nt, Homo sapiens
  misc_RNA (1)...(19): siRNA sense strand
ugaaguacauccagcauac

SEQ ID NO: 1009098 - RNA, 19 nt, Homo sapiens
  misc_RNA (1)...(19): siRNA sense strand
gagauaguguccggcauga

SEQ ID NO: 1009099 - RNA, 19 nt, Homo sapiens
  misc_RNA (1)...(19): siRNA sense strand
ucaagaagcagucguuugu

SEQ ID NO: 1009100 - RNA, 19 nt, Homo sapiens
  misc_RNA (1)...(19): siRNA sense strand
gaaggaggguguggaguac

SEQ ID NO: 1009101 - RNA, 19 nt, Homo sapiens
  misc_RNA (1)...(19): siRNA sense strand
ugaaggaggguguggagua

SEQ ID NO: 1009102 - RNA, 19 nt, Homo sapiens
  misc_RNA (1)...(19): siRNA sense strand
gguguggaguaccggauaa

SEQ ID NO: 1009103 - RNA, 19 nt, Homo sapiens
  misc_RNA (1)...(19): siRNA sense strand
caagacugacuacauggua

SEQ ID NO: 1009104 - RNA, 19 nt, Homo sapiens
  misc_RNA (1)...(19): siRNA sense strand
cagcauacguacaggaaag

SEQ ID NO: 1009105 - RNA, 19 nt, Homo sapiens
  misc_RNA (1)...(19): siRNA sense strand
gauaguguccggcaugaag

SEQ ID NO: 1009106 - RNA, 19 nt, Homo sapiens
  misc_RNA (1)...(19): siRNA sense strand
ggaaucucaccaucaagaa

SEQ ID NO: 1009107 - RNA, 19 nt, Homo sapiens
  misc_RNA (1)...(19): siRNA sense strand
acgagagccugcgaaagua

SEQ ID NO: 1009108 - RNA, 19 nt, Homo sapiens
  misc_RNA (1)...(19): siRNA sense strand
gaugagcacucggucaacu

SEQ ID NO: 1009109 - RNA, 19 nt, Homo sapiens
  misc_RNA (1)...(19): siRNA sense strand
caucaagucccgcuucaca

SEQ ID NO: 1009110 - RNA, 19 nt, Homo sapiens
  misc_RNA (1)...(19): siRNA sense strand
aguggaaucucaccaucaa

SEQ ID NO: 1009111 - RNA, 19 nt, Homo sapiens
  misc_RNA (1)...(19): siRNA sense strand
aggaaaggcgucaagauug

SEQ ID NO: 1009112 - RNA, 19 nt, Homo sapiens
  misc_RNA (1)...(19): siRNA sense strand
agaagagcauccaggagau

SEQ ID NO: 1009113 - RNA, 19 nt, Homo sapiens
  misc_RNA (1)...(19): siRNA sense strand
ucaagucccgcuucacaga

SEQ ID NO: 1009114 - RNA, 19 nt, Homo sapiens
  misc_RNA (1)...(19): siRNA sense strand
guacaggaaaggcgucaag

SEQ ID NO: 1009115 - RNA, 19 nt, Homo sapiens
  misc_RNA (1)...(19): siRNA sense strand
ucaagaaggacuggaagga

SEQ ID NO: 1009116 - RNA, 19 nt, Homo sapiens
  misc_RNA (1)...(19): siRNA sense strand
gaagagcauccaggagauc

SEQ ID NO: 1009117 - RNA, 19 nt, Homo sapiens
  misc_RNA (1)...(19): siRNA sense strand
gcagcuacagcaucaaguc

SEQ ID NO: 1009118 - RNA, 19 nt, Homo sapiens
  misc_RNA (1)...(19): siRNA sense strand
gaaucucaccaucaagaag

SEQ ID NO: 1009119 - RNA, 19 nt, Homo sapiens
  misc_RNA (1)...(19): siRNA sense strand
uggaaucucaccaucaaga

SEQ ID NO: 1009120 - RNA, 19 nt, Homo sapiens
  misc_RNA (1)...(19): siRNA sense strand
gggccgaggaguacgaguu

SEQ ID NO: 1009121 - RNA, 19 nt, Homo sapiens
  misc_RNA (1)...(19): siRNA sense strand
gaaggacuggaaggacuga

SEQ ID NO: 1009122 - RNA, 19 nt, Homo sapiens
  misc_RNA (1)...(19): siRNA sense strand
gaguggaaucucaccauca

SEQ ID NO: 1009123 - RNA, 19 nt, Homo sapiens
  misc_RNA (1)...(19): siRNA sense strand
ggguguggaguaccggaua

SEQ ID NO: 1009124 - RNA, 19 nt, Homo sapiens
  misc_RNA (1)...(19): siRNA sense strand
cggagaacgaggaggauga

SEQ ID NO: 1009125 - RNA, 19 nt, Homo sapiens
  misc_RNA (1)...(19): siRNA sense strand
gaccuggagagcuucaaga

SEQ ID NO: 1009126 - RNA, 19 nt, Homo sapiens
  misc_RNA (1)...(19): siRNA sense strand
ccaucaagaaggacuggaa

SEQ ID NO: 1009127 - RNA, 19 nt, Homo sapiens
  misc_RNA (1)...(19): siRNA sense strand
gaaggacaaucccuacuuu

SEQ ID NO: 1009128 - RNA, 19 nt, Homo sapiens
  misc_RNA (1)...(19): siRNA sense strand
gaacauguccuucgagcua

SEQ ID NO: 1009129 - RNA, 19 nt, Homo sapiens
  misc_RNA (1)...(19): siRNA sense strand
gaguggaccugaaggagua

SEQ ID NO: 1009130 - RNA, 19 nt, Homo sapiens
  misc_RNA (1)...(19): siRNA sense strand
ccacuaaguuugaauuugu

SEQ ID NO: 1009131 - RNA, 19 nt, Homo sapiens
  misc_RNA (1)...(19): siRNA sense strand
ggaaauggauucggguaga

SEQ ID NO: 1009132 - RNA, 19 nt, Homo sapiens
  misc_RNA (1)...(19): siRNA sense strand
gaaauggauucggguagaa

SEQ ID NO: 1009133 - RNA, 19 nt, Homo sapiens
  misc_RNA (1)...(19): siRNA sense strand
ucagagacguccaggaauu

SEQ ID NO: 1009134 - RNA, 19 nt, Homo sapiens
  misc_RNA (1)...(19): siRNA sense strand
gcuggacccugcccugaua

SEQ ID NO: 1009135 - RNA, 19 nt, Homo sapiens
  misc_RNA (1)...(19): siRNA sense strand
ggaaagagcaguuuuauca

SEQ ID NO: 1009136 - RNA, 19 nt, Homo sapiens
  misc_RNA (1)...(19): siRNA sense strand
agacguggcuaccugcuuu

SEQ ID NO: 1009137 - RNA, 19 nt, Homo sapiens
  misc_RNA (1)...(19): siRNA sense strand
gcuacuucaugcuguauaa

SEQ ID NO: 1009138 - RNA, 19 nt, Homo sapiens
  misc_RNA (1)...(19): siRNA sense strand
cuucguaccuucagcauga

SEQ ID NO: 1009139 - RNA, 19 nt, Homo sapiens
  misc_RNA (1)...(19): siRNA sense strand
guccaggaauucaucgaua

SEQ ID NO: 1009140 - RNA, 19 nt, Homo sapiens
  misc_RNA (1)...(19): siRNA sense strand
gcaggcaccuuccuuagcu

SEQ ID NO: 1009141 - RNA, 19 nt, Homo sapiens
  misc_RNA (1)...(19): siRNA sense strand
gaacuuugcagaacauguc

SEQ ID NO: 1009142 - RNA, 19 nt, Homo sapiens
  misc_RNA (1)...(19): siRNA sense strand
gcaugagaguggccgcauu

SEQ ID NO: 1009143 - RNA, 19 nt, Homo sapiens
  misc_RNA (1)...(19): siRNA sense strand
gcauuuccacuaaguuuga

SEQ ID NO: 1009144 - RNA, 19 nt, Homo sapiens
  misc_RNA (1)...(19): siRNA sense strand
guacucagcaccucagugu

SEQ ID NO: 1009145 - RNA, 19 nt, Homo sapiens
  misc_RNA (1)...(19): siRNA sense strand
uuccuuagcugagaacuuu

SEQ ID NO: 1009146 - RNA, 19 nt, Homo sapiens
  misc_RNA (1)...(19): siRNA sense strand
gagagaugcagaugauaga

SEQ ID NO: 1009147 - RNA, 19 nt, Homo sapiens
  misc_RNA (1)...(19): siRNA sense strand
gcaccuuccuuagcugaga

SEQ ID NO: 1009148 - RNA, 19 nt, Homo sapiens
  misc_RNA (1)...(19): siRNA sense strand
ggagaacccaguaaaguac

SEQ ID NO: 1009149 - RNA, 19 nt, Homo sapiens
  misc_RNA (1)...(19): siRNA sense strand
ggaagaccgugauguacac

SEQ ID NO: 1009150 - RNA, 19 nt, Homo sapiens
  misc_RNA (1)...(19): siRNA sense strand
agaacgaagucgagagaug

SEQ ID NO: 1009151 - RNA, 19 nt, Homo sapiens
  misc_RNA (1)...(19): siRNA sense strand
gcugagaacuuugcagaac

SEQ ID NO: 1009152 - RNA, 19 nt, Homo sapiens
  misc_RNA (1)...(19): siRNA sense strand
uggagaacccaguaaagua

SEQ ID NO: 1009153 - RNA, 19 nt, Homo sapiens
  misc_RNA (1)...(19): siRNA sense strand
guagaacgaagucgagaga

SEQ ID NO: 1009154 - RNA, 19 nt, Homo sapiens
  misc_RNA (1)...(19): siRNA sense strand
uccaggaauucaucgauaa

SEQ ID NO: 1009155 - RNA, 19 nt, Homo sapiens
  misc_RNA (1)...(19): siRNA sense strand
gucgagagaugcagaugau

SEQ ID NO: 1009156 - RNA, 19 nt, Homo sapiens
  misc_RNA (1)...(19): siRNA sense strand
ugaauucugugguucuaca

SEQ ID NO: 1009157 - RNA, 19 nt, Homo sapiens
  misc_RNA (1)...(19): siRNA sense strand
caugagaguggccgcauuu

SEQ ID NO: 1009158 - RNA, 19 nt, Homo sapiens
  misc_RNA (1)...(19): siRNA sense strand
guggcuaccugcuuuaugg

SEQ ID NO: 1009159 - RNA, 19 nt, Homo sapiens
  misc_RNA (1)...(19): siRNA sense strand
ggcgaccacugaauucugu

SEQ ID NO: 1009160 - RNA, 19 nt, Homo sapiens
  misc_RNA (1)...(19): siRNA sense strand
ggauguggaugcugcuuuu

SEQ ID NO: 1009161 - RNA, 19 nt, Homo sapiens
  misc_RNA (1)...(19): siRNA sense strand
cagaggcauuccuuacaga

SEQ ID NO: 1009162 - RNA, 19 nt, Homo sapiens
  misc_RNA (1)...(19): siRNA sense strand
gccauuacaugaucacacu

SEQ ID NO: 1009163 - RNA, 19 nt, Homo sapiens
  misc_RNA (1)...(19): siRNA sense strand
ugucagagacguccaggaa

SEQ ID NO: 1009164 - RNA, 19 nt, Homo sapiens
  misc_RNA (1)...(19): siRNA sense strand
gggaagaccgugauguaca

SEQ ID NO: 1009165 - RNA, 19 nt, Homo sapiens
  misc_RNA (1)...(19): siRNA sense strand
gcaccucagugucgagacu

SEQ ID NO: 1009166 - RNA, 19 nt, Homo sapiens
  misc_RNA (1)...(19): siRNA sense strand
aagggaagaccgugaugua

SEQ ID NO: 1009167 - RNA, 19 nt, Homo sapiens
  misc_RNA (1)...(19): siRNA sense strand
ugagaacuuugcagaacau

SEQ ID NO: 1009168 - RNA, 19 nt, Homo sapiens
  misc_RNA (1)...(19): siRNA sense strand
gaacuggagcacagcaucu

SEQ ID NO: 1009169 - RNA, 19 nt, Homo sapiens
  misc_RNA (1)...(19): siRNA sense strand
gagaguggccgcauuucca

SEQ ID NO: 1009170 - RNA, 19 nt, Homo sapiens
  misc_RNA (1)...(19): siRNA sense strand
gacagaggcauuccuuaca

SEQ ID NO: 1009171 - RNA, 19 nt, Homo sapiens
  misc_RNA (1)...(19): siRNA sense strand
agcuaugccugguugcuua

SEQ ID NO: 1009172 - RNA, 19 nt, Homo sapiens
  misc_RNA (1)...(19): siRNA sense strand
cgagagaugcagaugauag

SEQ ID NO: 1009173 - RNA, 19 nt, Homo sapiens
  misc_RNA (1)...(19): siRNA sense strand
agaugcagaugauagacuu

SEQ ID NO: 1009174 - RNA, 19 nt, Homo sapiens
  misc_RNA (1)...(19): siRNA sense strand
ugaaggacaaucccuacuu

SEQ ID NO: 1009175 - RNA, 19 nt, Homo sapiens
  misc_RNA (1)...(19): siRNA sense strand
gaagggaagaccgugaugu

SEQ ID NO: 1009176 - RNA, 19 nt, Homo sapiens
  misc_RNA (1)...(19): siRNA sense strand
ccgcauuuccacuaaguuu

SEQ ID NO: 1009177 - RNA, 19 nt, Homo sapiens
  misc_RNA (1)...(19): siRNA sense strand
ccggaaggguguccaacug

SEQ ID NO: 1009178 - RNA, 19 nt, Homo sapiens
  misc_RNA (1)...(19): siRNA sense strand
acuccagccucucugauga

SEQ ID NO: 1009179 - RNA, 19 nt, Homo sapiens
  misc_RNA (1)...(19): siRNA sense strand
gcacugaccgaaagguuuu

SEQ ID NO: 1009180 - RNA, 19 nt, Homo sapiens
  misc_RNA (1)...(19): siRNA sense strand
ugacagaggcauuccuuac

SEQ ID NO: 1009181 - RNA, 19 nt, Homo sapiens
  misc_RNA (1)...(19): siRNA sense strand
ggcacugaccgaaagguuu

SEQ ID NO: 1009182 - RNA, 19 nt, Homo sapiens
  misc_RNA (1)...(19): siRNA sense strand
gcccgcaucguguucauga

SEQ ID NO: 1009183 - RNA, 19 nt, Homo sapiens
  misc_RNA (1)...(19): siRNA sense strand
agacuuggcuguggagaac

SEQ ID NO: 1009184 - RNA, 19 nt, Homo sapiens
  misc_RNA (1)...(19): siRNA sense strand
ggaagggaagaccgugaug

SEQ ID NO: 1009185 - RNA, 19 nt, Homo sapiens
  misc_RNA (1)...(19): siRNA sense strand
ggccgcauuuccacuaagu

SEQ ID NO: 1009186 - RNA, 19 nt, Homo sapiens
  misc_RNA (1)...(19): siRNA sense strand
gagacuuggcuguggagaa

SEQ ID NO: 1009187 - RNA, 19 nt, Homo sapiens
  misc_RNA (1)...(19): siRNA sense strand
gggaaucugucaccuucac

SEQ ID NO: 1009188 - RNA, 19 nt, Homo sapiens
  misc_RNA (1)...(19): siRNA sense strand
gagcuaugccugguugcuu

SEQ ID NO: 1009189 - RNA, 19 nt, Homo sapiens
  misc_RNA (1)...(19): siRNA sense strand
guggagaacccaguaaagu

SEQ ID NO: 1009190 - RNA, 19 nt, Homo sapiens
  misc_RNA (1)...(19): siRNA sense strand
acagaggcauuccuuacag

SEQ ID NO: 1009191 - RNA, 19 nt, Homo sapiens
  misc_RNA (1)...(19): siRNA sense strand
guacacugacagaggcauu

SEQ ID NO: 1009192 - RNA, 19 nt, Homo sapiens
  misc_RNA (1)...(19): siRNA sense strand
gcagcugacccagauguuc

SEQ ID NO: 1009193 - RNA, 19 nt, Homo sapiens
  misc_RNA (1)...(19): siRNA sense strand
gaagucgagagaugcagau

SEQ ID NO: 1009194 - RNA, 19 nt, Homo sapiens
  misc_RNA (1)...(19): siRNA sense strand
gcaauucacaaugcugagu

SEQ ID NO: 1009195 - RNA, 19 nt, Homo sapiens
  misc_RNA (1)...(19): siRNA sense strand
cugagaacuuugcagaaca

SEQ ID NO: 1009196 - RNA, 19 nt, Homo sapiens
  misc_RNA (1)...(19): siRNA sense strand
gggcaggcaccuuccuuag

SEQ ID NO: 1009197 - RNA, 19 nt, Homo sapiens
  misc_RNA (1)...(19): siRNA sense strand
gggcacugaccgaaagguu

SEQ ID NO: 1009198 - RNA, 19 nt, Homo sapiens
  misc_RNA (1)...(19): siRNA sense strand
ccugggcacugaccgaaag

SEQ ID NO: 1009199 - RNA, 19 nt, Homo sapiens
  misc_RNA (1)...(19): siRNA sense strand
uccacuaaguuugaauuug

SEQ ID NO: 1009200 - RNA, 19 nt, Homo sapiens
  misc_RNA (1)...(19): siRNA sense strand
aaagagcaguuuuaucaca

SEQ ID NO: 1009201 - RNA, 19 nt, Homo sapiens
  misc_RNA (1)...(19): siRNA sense strand
ugucgagacuucguaccuu

SEQ ID NO: 1009202 - RNA, 19 nt, Homo sapiens
  misc_RNA (1)...(19): siRNA sense strand
gacguggcuaccugcuuua

SEQ ID NO: 1009203 - RNA, 19 nt, Homo sapiens
  misc_RNA (1)...(19): siRNA sense strand
guaaaucacugcguuauug

SEQ ID NO: 1009204 - RNA, 19 nt, Homo sapiens
  misc_RNA (1)...(19): siRNA sense strand
guacaggaguuaaauuuga

SEQ ID NO: 1009205 - RNA, 19 nt, Homo sapiens
  misc_RNA (1)...(19): siRNA sense strand
gggauuccauaccaaauua

SEQ ID NO: 1009206 - RNA, 19 nt, Homo sapiens
  misc_RNA (1)...(19): siRNA sense strand
caaguggacugucauuuga

SEQ ID NO: 1009207 - RNA, 19 nt, Homo sapiens
  misc_RNA (1)...(19): siRNA sense strand
gcaaggagcagaguugaua

SEQ ID NO: 1009208 - RNA, 19 nt, Homo sapiens
  misc_RNA (1)...(19): siRNA sense strand
ugaauuggguaacuguuua

SEQ ID NO: 1009209 - RNA, 19 nt, Homo sapiens
  misc_RNA (1)...(19): siRNA sense strand
uuaagucucuccaaucuuu

SEQ ID NO: 1009210 - RNA, 19 nt, Homo sapiens
  misc_RNA (1)...(19): siRNA sense strand
ccaaagggaugcgccauuu

SEQ ID NO: 1009211 - RNA, 19 nt, Homo sapiens
  misc_RNA (1)...(19): siRNA sense strand
gcucaaugcuauccaaaga

SEQ ID NO: 1009212 - RNA, 19 nt, Homo sapiens
  misc_RNA (1)...(19): siRNA sense strand
uaacugauccuuuccuuga

SEQ ID NO: 1009213 - RNA, 19 nt, Homo sapiens
  misc_RNA (1)...(19): siRNA sense strand
ucaaugcuauccaaagauu

SEQ ID NO: 1009214 - RNA, 19 nt, Homo sapiens
  misc_RNA (1)...(19): siRNA sense strand
gaagugaacaugcauucuu

SEQ ID NO: 1009215 - RNA, 19 nt, Homo sapiens
  misc_RNA (1)...(19): siRNA sense strand
ucacugcguuauugcuuua

SEQ ID NO: 1009216 - RNA, 19 nt, Homo sapiens
  misc_RNA (1)...(19): siRNA sense strand
uuaaaugacugccauaaag

SEQ ID NO: 1009217 - RNA, 19 nt, Homo sapiens
  misc_RNA (1)...(19): siRNA sense strand
acacucaccucugguauuu

SEQ ID NO: 1009218 - RNA, 19 nt, Homo sapiens
  misc_RNA (1)...(19): siRNA sense strand
ugacaagacuggaagaagu

SEQ ID NO: 1009219 - RNA, 19 nt, Homo sapiens
  misc_RNA (1)...(19): siRNA sense strand
acaauagccuugauagaau

SEQ ID NO: 1009220 - RNA, 19 nt, Homo sapiens
  misc_RNA (1)...(19): siRNA sense strand
ggaagaauuugcagaagac

SEQ ID NO: 1009221 - RNA, 19 nt, Homo sapiens
  misc_RNA (1)...(19): siRNA sense strand
ugacugccauaaaguauau

SEQ ID NO: 1009222 - RNA, 19 nt, Homo sapiens
  misc_RNA (1)...(19): siRNA sense strand
gaagcgauguggccaagca

SEQ ID NO: 1009223 - RNA, 19 nt, Homo sapiens
  misc_RNA (1)...(19): siRNA sense strand
gaacauguacaggaguuaa

SEQ ID NO: 1009224 - RNA, 19 nt, Homo sapiens
  misc_RNA (1)...(19): siRNA sense strand
gcuauaugcuuaggucuau

SEQ ID NO: 1009225 - RNA, 19 nt, Homo sapiens
  misc_RNA (1)...(19): siRNA sense strand
ccugauaacugauccuuuc

SEQ ID NO: 1009226 - RNA, 19 nt, Homo sapiens
  misc_RNA (1)...(19): siRNA sense strand
ugacuacacucugcauuug

SEQ ID NO: 1009227 - RNA, 19 nt, Homo sapiens
  misc_RNA (1)...(19): siRNA sense strand
gauaacugauccuuuccuu

SEQ ID NO: 1009228 - RNA, 19 nt, Homo sapiens
  misc_RNA (1)...(19): siRNA sense strand
gcagcaaguuuaagucucu

SEQ ID NO: 1009229 - RNA, 19 nt, Homo sapiens
  misc_RNA (1)...(19): siRNA sense strand
gacaagacuggaagaagua

SEQ ID NO: 1009230 - RNA, 19 nt, Homo sapiens
  misc_RNA (1)...(19): siRNA sense strand
gauggacccagacaugaua

SEQ ID NO: 1009231 - RNA, 19 nt, Homo sapiens
  misc_RNA (1)...(19): siRNA sense strand
gaucugagaaugaaaucuu

SEQ ID NO: 1009232 - RNA, 19 nt, Homo sapiens
  misc_RNA (1)...(19): siRNA sense strand
ccagcauacucuauuacua

SEQ ID NO: 1009233 - RNA, 19 nt, Homo sapiens
  misc_RNA (1)...(19): siRNA sense strand
ggaagaaguaaauagagaa

SEQ ID NO: 1009234 - RNA, 19 nt, Homo sapiens
  misc_RNA (1)...(19): siRNA sense strand
agaaguaaauagagaagug

SEQ ID NO: 1009235 - RNA, 19 nt, Homo sapiens
  misc_RNA (1)...(19): siRNA sense strand
gaaaagggacgcacaguga

SEQ ID NO: 1009236 - RNA, 19 nt, Homo sapiens
  misc_RNA (1)...(19): siRNA sense strand
uggcuaugcugauuauuga

SEQ ID NO: 1009237 - RNA, 19 nt, Homo sapiens
  misc_RNA (1)...(19): siRNA sense strand
ggaagcagcaaguuuaagu

SEQ ID NO: 1009238 - RNA, 19 nt, Homo sapiens
  misc_RNA (1)...(19): siRNA sense strand
cguuauugcuuuagucauu

SEQ ID NO: 1009239 - RNA, 19 nt, Homo sapiens
  misc_RNA (1)...(19): siRNA sense strand
gcuucaaacuugucaaauc

SEQ ID NO: 1009240 - RNA, 19 nt, Homo sapiens
  misc_RNA (1)...(19): siRNA sense strand
gcacuggauguuacacuuu

SEQ ID NO: 1009241 - RNA, 19 nt, Homo sapiens
  misc_RNA (1)...(19): siRNA sense strand
gcacagugaaagcaguaua

SEQ ID NO: 1009242 - RNA, 19 nt, Homo sapiens
  misc_RNA (1)...(19): siRNA sense strand
aagacuggguagaauauaa

SEQ ID NO: 1009243 - RNA, 19 nt, Homo sapiens
  misc_RNA (1)...(19): siRNA sense strand
gcgguaucuuggcuauuua

SEQ ID NO: 1009244 - RNA, 19 nt, Homo sapiens
  misc_RNA (1)...(19): siRNA sense strand
gaguuaaauuugaggucua

SEQ ID NO: 1009245 - RNA, 19 nt, Homo sapiens
  misc_RNA (1)...(19): siRNA sense strand
gagcaguugguguucuuua

SEQ ID NO: 1009246 - RNA, 19 nt, Homo sapiens
  misc_RNA (1)...(19): siRNA sense strand
uacaauagccuugauagaa

SEQ ID NO: 1009247 - RNA, 19 nt, Homo sapiens
  misc_RNA (1)...(19): siRNA sense strand
aauggaagcagcaaguuua

SEQ ID NO: 1009248 - RNA, 19 nt, Homo sapiens
  misc_RNA (1)...(19): siRNA sense strand
augcuuaggucuauacgua

SEQ ID NO: 1009249 - RNA, 19 nt, Homo sapiens
  misc_RNA (1)...(19): siRNA sense strand
uggaagaaguaaauagaga

SEQ ID NO: 1009250 - RNA, 19 nt, Homo sapiens
  misc_RNA (1)...(19): siRNA sense strand
gagauacacuacgccuuga

SEQ ID NO: 1009251 - RNA, 19 nt, Homo sapiens
  misc_RNA (1)...(19): siRNA sense strand
cagcauacucuauuacuau

SEQ ID NO: 1009252 - RNA, 19 nt, Homo sapiens
  misc_RNA (1)...(19): siRNA sense strand
gaaguaaauagagaaguga

SEQ ID NO: 1009253 - RNA, 19 nt, Homo sapiens
  misc_RNA (1)...(19): siRNA sense strand
cagaacauguacaggaguu

SEQ ID NO: 1009254 - RNA, 19 nt, Homo sapiens
  misc_RNA (1)...(19): siRNA sense strand
uggaagaauuugcagaaga

SEQ ID NO: 1009255 - RNA, 19 nt, Homo sapiens
  misc_RNA (1)...(19): siRNA sense strand
agaauuugcagaagacuuu

SEQ ID NO: 1009256 - RNA, 19 nt, Homo sapiens
  misc_RNA (1)...(19): siRNA sense strand
aacugcaacuccuguaaua

SEQ ID NO: 1009257 - RNA, 19 nt, Homo sapiens
  misc_RNA (1)...(19): siRNA sense strand
ucgccagcauacucuauua

SEQ ID NO: 1009258 - RNA, 19 nt, Homo sapiens
  misc_RNA (1)...(19): siRNA sense strand
uggauaugcuauugugauu

SEQ ID NO: 1009259 - RNA, 19 nt, Homo sapiens
  misc_RNA (1)...(19): siRNA sense strand
gagcauguuccuaaucguu

SEQ ID NO: 1009260 - RNA, 19 nt, Homo sapiens
  misc_RNA (1)...(19): siRNA sense strand
caauagccuugauagaauc

SEQ ID NO: 1009261 - RNA, 19 nt, Homo sapiens
  misc_RNA (1)...(19): siRNA sense strand
caauggaagcagcaaguuu

SEQ ID NO: 1009262 - RNA, 19 nt, Homo sapiens
  misc_RNA (1)...(19): siRNA sense strand
caacuccuguaauaacauc

SEQ ID NO: 1009263 - RNA, 19 nt, Homo sapiens
  misc_RNA (1)...(19): siRNA sense strand
ccagacaugauacguauau

SEQ ID NO: 1009264 - RNA, 19 nt, Homo sapiens
  misc_RNA (1)...(19): siRNA sense strand
ggaauuuucuugagcaugu

SEQ ID NO: 1009265 - RNA, 19 nt, Homo sapiens
  misc_RNA (1)...(19): siRNA sense strand
gauuauugaucugagaaug

SEQ ID NO: 1009266 - RNA, 19 nt, Homo sapiens
  misc_RNA (1)...(19): siRNA sense strand
uaaccacaguugaauuucu

SEQ ID NO: 1009267 - RNA, 19 nt, Homo sapiens
  misc_RNA (1)...(19): siRNA sense strand
caucggcccacuuuacuaa

SEQ ID NO: 1009268 - RNA, 19 nt, Homo sapiens
  misc_RNA (1)...(19): siRNA sense strand
guuuaagucucuccaaucu

SEQ ID NO: 1009269 - RNA, 19 nt, Homo sapiens
  misc_RNA (1)...(19): siRNA sense strand
gagacacucaccucuggua

SEQ ID NO: 1009270 - RNA, 19 nt, Homo sapiens
  misc_RNA (1)...(19): siRNA sense strand
gccaagcacuggauguuac

SEQ ID NO: 1009271 - RNA, 19 nt, Homo sapiens
  misc_RNA (1)...(19): siRNA sense strand
auagaaugguggagagaaa

SEQ ID NO: 1009272 - RNA, 19 nt, Homo sapiens
  misc_RNA (1)...(19): siRNA sense strand
ugcgguaucuuggcuauuu

SEQ ID NO: 1009273 - RNA, 19 nt, Homo sapiens
  misc_RNA (1)...(19): siRNA sense strand
acaaguggacugucauuug

SEQ ID NO: 1009274 - RNA, 19 nt, Homo sapiens
  misc_RNA (1)...(19): siRNA sense strand
ucacaggacagauuacaau

SEQ ID NO: 1009275 - RNA, 19 nt, Homo sapiens
  misc_RNA (1)...(19): siRNA sense strand
gagaagugaacaugcauuc

SEQ ID NO: 1009276 - RNA, 19 nt, Homo sapiens
  misc_RNA (1)...(19): siRNA sense strand
ugacacacuuauagaaugg

SEQ ID NO: 1009277 - RNA, 19 nt, Homo sapiens
  misc_RNA (1)...(19): siRNA sense strand
gauaugcuauugugauucc

SEQ ID NO: 1009278 - RNA, 19 nt, Homo sapiens
  misc_RNA (1)...(19): siRNA sense strand
uuacucacaggacagauua

SEQ ID NO: 1009279 - RNA, 19 nt, Homo sapiens
  misc_RNA (1)...(19): siRNA sense strand
gaagaaguaaauagagaag

SEQ ID NO: 1009280 - RNA, 19 nt, Homo sapiens
  misc_RNA (1)...(19): siRNA sense strand
aaaaugaguugguuucuuc

SEQ ID NO: 1009281 - RNA, 19 nt, Homo sapiens
  misc_RNA (1)...(19): siRNA sense strand
ccacagcuaggugacuuua

SEQ ID NO: 1009282 - RNA, 19 nt, Homo sapiens
  misc_RNA (1)...(19): siRNA sense strand
acuaaaagcuuuccucgaa

SEQ ID NO: 1009283 - RNA, 19 nt, Homo sapiens
  misc_RNA (1)...(19): siRNA sense strand
aguggacugucauuugaua

SEQ ID NO: 1009284 - RNA, 19 nt, Homo sapiens
  misc_RNA (1)...(19): siRNA sense strand
gauuacaauagccuugaua

SEQ ID NO: 1009285 - RNA, 19 nt, Homo sapiens
  misc_RNA (1)...(19): siRNA sense strand
aaaugacugccauaaagua

SEQ ID NO: 1009286 - RNA, 19 nt, Homo sapiens
  misc_RNA (1)...(19): siRNA sense strand
gcucuggcuaugcugauua

SEQ ID NO: 1009287 - RNA, 19 nt, Homo sapiens
  misc_RNA (1)...(19): siRNA sense strand
cuucuaacauccauagugu

SEQ ID NO: 1009288 - RNA, 19 nt, Homo sapiens
  misc_RNA (1)...(19): siRNA sense strand
gcugauuauugaucugaga

SEQ ID NO: 1009289 - RNA, 19 nt, Homo sapiens
  misc_RNA (1)...(19): siRNA sense strand
cuucaaacuugucaaaucu

SEQ ID NO: 1009290 - RNA, 19 nt, Homo sapiens
  misc_RNA (1)...(19): siRNA sense strand
acacuuuccucguauuaca

SEQ ID NO: 1009291 - RNA, 19 nt, Homo sapiens
  misc_RNA (1)...(19): siRNA sense strand
ggccaagcacuggauguua

SEQ ID NO: 1009292 - RNA, 19 nt, Homo sapiens
  misc_RNA (1)...(19): siRNA sense strand
gugacuacacucugcauuu

SEQ ID NO: 1009293 - RNA, 19 nt, Homo sapiens
  misc_RNA (1)...(19): siRNA sense strand
caaaagacuggguagaaua

SEQ ID NO: 1009294 - RNA, 19 nt, Homo sapiens
  misc_RNA (1)...(19): siRNA sense strand
ccacuuuacuaaccacagu

SEQ ID NO: 1009295 - RNA, 19 nt, Homo sapiens
  misc_RNA (1)...(19): siRNA sense strand
acagcuaggugacuuuaca

SEQ ID NO: 1009296 - RNA, 19 nt, Homo sapiens
  misc_RNA (1)...(19): siRNA sense strand
cagagcaguugguguucuu

SEQ ID NO: 1009297 - RNA, 19 nt, Homo sapiens
  misc_RNA (1)...(19): siRNA sense strand
gaagugaggaaaauuaaug

SEQ ID NO: 1009298 - RNA, 19 nt, Homo sapiens
  misc_RNA (1)...(19): siRNA sense strand
guaaauagagaagugaaca

SEQ ID NO: 1009299 - RNA, 19 nt, Homo sapiens
  misc_RNA (1)...(19): siRNA sense strand
gauccuuuccuugacauuu

SEQ ID NO: 1009300 - RNA, 19 nt, Homo sapiens
  misc_RNA (1)...(19): siRNA sense strand
caaggagcagaguugauaa

SEQ ID NO: 1009301 - RNA, 19 nt, Homo sapiens
  misc_RNA (1)...(19): siRNA sense strand
acucugcauuccaaacuaa

SEQ ID NO: 1009302 - RNA, 19 nt, Homo sapiens
  misc_RNA (1)...(19): siRNA sense strand
uaaaugacugccauaaagu

SEQ ID NO: 1009303 - RNA, 19 nt, Homo sapiens
  misc_RNA (1)...(19): siRNA sense strand
gaaagcagcuguuauaauu

SEQ ID NO: 1009304 - RNA, 19 nt, Homo sapiens
  misc_RNA (1)...(19): siRNA sense strand
gaagaaagcagcuguuaua

SEQ ID NO: 1009305 - RNA, 19 nt, Homo sapiens
  misc_RNA (1)...(19): siRNA sense strand
acacaaagcuucuaucgua

SEQ ID NO: 1009306 - RNA, 19 nt, Homo sapiens
  misc_RNA (1)...(19): siRNA sense strand
gaaacgagcugcagccauu

SEQ ID NO: 1009307 - RNA, 19 nt, Homo sapiens
  misc_RNA (1)...(19): siRNA sense strand
gaagauggaugauaaggaa

SEQ ID NO: 1009308 - RNA, 19 nt, Homo sapiens
  misc_RNA (1)...(19): siRNA sense strand
gaagagaacagaaucauuu

SEQ ID NO: 1009309 - RNA, 19 nt, Homo sapiens
  misc_RNA (1)...(19): siRNA sense strand
gaaaggcucggcaguauua

SEQ ID NO: 1009310 - RNA, 19 nt, Homo sapiens
  misc_RNA (1)...(19): siRNA sense strand
gaaacaugcuucaauucua

SEQ ID NO: 1009311 - RNA, 19 nt, Homo sapiens
  misc_RNA (1)...(19): siRNA sense strand
gaacagggcuucacuuggu

SEQ ID NO: 1009312 - RNA, 19 nt, Homo sapiens
  misc_RNA (1)...(19): siRNA sense strand
uaacaugucuuucaucaga

SEQ ID NO: 1009313 - RNA, 19 nt, Homo sapiens
  misc_RNA (1)...(19): siRNA sense strand
gcacagggcugcuacuuuc

SEQ ID NO: 1009314 - RNA, 19 nt, Homo sapiens
  misc_RNA (1)...(19): siRNA sense strand
agagaaagcugcaagaauu

SEQ ID NO: 1009315 - RNA, 19 nt, Homo sapiens
  misc_RNA (1)...(19): siRNA sense strand
gagaagagauaacauggaa

SEQ ID NO: 1009316 - RNA, 19 nt, Homo sapiens
  misc_RNA (1)...(19): siRNA sense strand
gaggauaccuuguccgaaa

SEQ ID NO: 1009317 - RNA, 19 nt, Homo sapiens
  misc_RNA (1)...(19): siRNA sense strand
gcaccaggcugccauuauu

SEQ ID NO: 1009318 - RNA, 19 nt, Homo sapiens
  misc_RNA (1)...(19): siRNA sense strand
gaugaacgcuggaaggaaa

SEQ ID NO: 1009319 - RNA, 19 nt, Homo sapiens
  misc_RNA (1)...(19): siRNA sense strand
cgaaguagguccaaaguug

SEQ ID NO: 1009320 - RNA, 19 nt, Homo sapiens
  misc_RNA (1)...(19): siRNA sense strand
gaagacauuugaagaguau

SEQ ID NO: 1009321 - RNA, 19 nt, Homo sapiens
  misc_RNA (1)...(19): siRNA sense strand
caaauacaauuccagauga

SEQ ID NO: 1009322 - RNA, 19 nt, Homo sapiens
  misc_RNA (1)...(19): siRNA sense strand
gaaacaccaagcuauauua

SEQ ID NO: 1009323 - RNA, 19 nt, Homo sapiens
  misc_RNA (1)...(19): siRNA sense strand
caugaacacuucuuaauga

SEQ ID NO: 1009324 - RNA, 19 nt, Homo sapiens
  misc_RNA (1)...(19): siRNA sense strand
ugagaaagcuguaacugaa

SEQ ID NO: 1009325 - RNA, 19 nt, Homo sapiens
  misc_RNA (1)...(19): siRNA sense strand
gaagacugaugguaaagaa

SEQ ID NO: 1009326 - RNA, 19 nt, Homo sapiens
  misc_RNA (1)...(19): siRNA sense strand
ugaaaguucuagcaucuua

SEQ ID NO: 1009327 - RNA, 19 nt, Homo sapiens
  misc_RNA (1)...(19): siRNA sense strand
gcauuggcgugcuuauuua

SEQ ID NO: 1009328 - RNA, 19 nt, Homo sapiens
  misc_RNA (1)...(19): siRNA sense strand
gagaagauauuccacuaga

SEQ ID NO: 1009329 - RNA, 19 nt, Homo sapiens
  misc_RNA (1)...(19): siRNA sense strand
cagaugagguuacaaagaa

SEQ ID NO: 1009330 - RNA, 19 nt, Homo sapiens
  misc_RNA (1)...(19): siRNA sense strand
gcaugaaggucaagaaugu

SEQ ID NO: 1009331 - RNA, 19 nt, Homo sapiens
  misc_RNA (1)...(19): siRNA sense strand
ggagagaauaguaaacuua

SEQ ID NO: 1009332 - RNA, 19 nt, Homo sapiens
  misc_RNA (1)...(19): siRNA sense strand
gaagaagacagcaauuaaa

SEQ ID NO: 1009333 - RNA, 19 nt, Homo sapiens
  misc_RNA (1)...(19): siRNA sense strand
caacaacgacagaaauaua

SEQ ID NO: 1009334 - RNA, 19 nt, Homo sapiens
  misc_RNA (1)...(19): siRNA sense strand
ugaauuggcuguuguccua

SEQ ID NO: 1009335 - RNA, 19 nt, Homo sapiens
  misc_RNA (1)...(19): siRNA sense strand
gagauaacauggaagaaau

SEQ ID NO: 1009336 - RNA, 19 nt, Homo sapiens
  misc_RNA (1)...(19): siRNA sense strand
ucaaagagccuauaaacuu

SEQ ID NO: 1009337 - RNA, 19 nt, Homo sapiens
  misc_RNA (1)...(19): siRNA sense strand
gcgggaaucuuguaucaaa

SEQ ID NO: 1009338 - RNA, 19 nt, Homo sapiens
  misc_RNA (1)...(19): siRNA sense strand
guauagagauggucaugaa

SEQ ID NO: 1009339 - RNA, 19 nt, Homo sapiens
  misc_RNA (1)...(19): siRNA sense strand
guauggaagucaucagaua

SEQ ID NO: 1009340 - RNA, 19 nt, Homo sapiens
  misc_RNA (1)...(19): siRNA sense strand
aaauagggcugcaucagua

SEQ ID NO: 1009341 - RNA, 19 nt, Homo sapiens
  misc_RNA (1)...(19): siRNA sense strand
caaagcuucuaucguaaua

SEQ ID NO: 1009342 - RNA, 19 nt, Homo sapiens
  misc_RNA (1)...(19): siRNA sense strand
gagaaaggcucggcaguau

SEQ ID NO: 1009343 - RNA, 19 nt, Homo sapiens
  misc_RNA (1)...(19): siRNA sense strand
aagagcagcugcacuauuu

SEQ ID NO: 1009344 - RNA, 19 nt, Homo sapiens
  misc_RNA (1)...(19): siRNA sense strand
gaugacaguucucuggaua

SEQ ID NO: 1009345 - RNA, 19 nt, Homo sapiens
  misc_RNA (1)...(19): siRNA sense strand
gcaauaagucgucuucaaa

SEQ ID NO: 1009346 - RNA, 19 nt, Homo sapiens
  misc_RNA (1)...(19): siRNA sense strand
gaagcuaggcgguuaauug

SEQ ID NO: 1009347 - RNA, 19 nt, Homo sapiens
  misc_RNA (1)...(19): siRNA sense strand
gcaauuaucauucagagaa

SEQ ID NO: 1009348 - RNA, 19 nt, Homo sapiens
  misc_RNA (1)...(19): siRNA sense strand
ggagagcacacaaagaaua

SEQ ID NO: 1009349 - RNA, 19 nt, Homo sapiens
  misc_RNA (1)...(19): siRNA sense strand
gauauagagccaagaaaua

SEQ ID NO: 1009350 - RNA, 19 nt, Homo sapiens
  misc_RNA (1)...(19): siRNA sense strand
gaagauuuguucagcagaa

SEQ ID NO: 1009351 - RNA, 19 nt, Homo sapiens
  misc_RNA (1)...(19): siRNA sense strand
cgacagaaauauaagaaga

SEQ ID NO: 1009352 - RNA, 19 nt, Homo sapiens
  misc_RNA (1)...(19): siRNA sense strand
gauaauugcuguuacaucu

SEQ ID NO: 1009353 - RNA, 19 nt, Homo sapiens
  misc_RNA (1)...(19): siRNA sense strand
ggauauuucccuuaacuua

SEQ ID NO: 1009354 - RNA, 19 nt, Homo sapiens
  misc_RNA (1)...(19): siRNA sense strand
caggauauuucuagucaua

SEQ ID NO: 1009355 - RNA, 19 nt, Homo sapiens
  misc_RNA (1)...(19): siRNA sense strand
guaauaaaguugcagacaa

SEQ ID NO: 1009356 - RNA, 19 nt, Homo sapiens
  misc_RNA (1)...(19): siRNA sense strand
gaaaucugcugcuuugauc

SEQ ID NO: 1009357 - RNA, 19 nt, Homo sapiens
  misc_RNA (1)...(19): siRNA sense strand
acaccaagcuauauuacua

SEQ ID NO: 1009358 - RNA, 19 nt, Homo sapiens
  misc_RNA (1)...(19): siRNA sense strand
guaaggaccagaauaguuu

SEQ ID NO: 1009359 - RNA, 19 nt, Homo sapiens
  misc_RNA (1)...(19): siRNA sense strand
gaagcaguguuaucauuau

SEQ ID NO: 1009360 - RNA, 19 nt, Homo sapiens
  misc_RNA (1)...(19): siRNA sense strand
gagcauuucugucugcaaa

SEQ ID NO: 1009361 - RNA, 19 nt, Homo sapiens
  misc_RNA (1)...(19): siRNA sense strand
uuacagaggcuuuaaagua

SEQ ID NO: 1009362 - RNA, 19 nt, Homo sapiens
  misc_RNA (1)...(19): siRNA sense strand
gcacagaacauauauuaca

SEQ ID NO: 1009363 - RNA, 19 nt, Homo sapiens
  misc_RNA (1)...(19): siRNA sense strand
gcaaagggcugcaguucuc

SEQ ID NO: 1009364 - RNA, 19 nt, Homo sapiens
  misc_RNA (1)...(19): siRNA sense strand
aagcauaucugaaaggaaa

SEQ ID NO: 1009365 - RNA, 19 nt, Homo sapiens
  misc_RNA (1)...(19): siRNA sense strand
uggaauaccugcuaugauu

SEQ ID NO: 1009366 - RNA, 19 nt, Homo sapiens
  misc_RNA (1)...(19): siRNA sense strand
gaagcuuuguccaaguuua

SEQ ID NO: 1009367 - RNA, 19 nt, Homo sapiens
  misc_RNA (1)...(19): siRNA sense strand
uaagagacguccaauacuu

SEQ ID NO: 1009368 - RNA, 19 nt, Homo sapiens
  misc_RNA (1)...(19): siRNA sense strand
caaagaaggccgaguaaga

SEQ ID NO: 1009369 - RNA, 19 nt, Homo sapiens
  misc_RNA (1)...(19): siRNA sense strand
gaaaagagcugcuaucacu

SEQ ID NO: 1009370 - RNA, 19 nt, Homo sapiens
  misc_RNA (1)...(19): siRNA sense strand
caaagcaccuacagaaugu

SEQ ID NO: 1009371 - RNA, 19 nt, Homo sapiens
  misc_RNA (1)...(19): siRNA sense strand
uacagaagauggaugauaa

SEQ ID NO: 1009372 - RNA, 19 nt, Homo sapiens
  misc_RNA (1)...(19): siRNA sense strand
gaagacauauucaacacau

SEQ ID NO: 1009373 - RNA, 19 nt, Homo sapiens
  misc_RNA (1)...(19): siRNA sense strand
gaaacaaacacguaaacaa

SEQ ID NO: 1009374 - RNA, 19 nt, Homo sapiens
  misc_RNA (1)...(19): siRNA sense strand
cuacaaagcauaucugaaa

SEQ ID NO: 1009375 - RNA, 19 nt, Homo sapiens
  misc_RNA (1)...(19): siRNA sense strand
acagaaggguuucaaauau

SEQ ID NO: 1009376 - RNA, 19 nt, Homo sapiens
  misc_RNA (1)...(19): siRNA sense strand
cgagcaagauuacaagaaa

SEQ ID NO: 1009377 - RNA, 19 nt, Homo sapiens
  misc_RNA (1)...(19): siRNA sense strand
guagaauggucacaagaaa

SEQ ID NO: 1009378 - RNA, 19 nt, Homo sapiens
  misc_RNA (1)...(19): siRNA sense strand
gggccaaaguugauuauga

SEQ ID NO: 1009379 - RNA, 19 nt, Homo sapiens
  misc_RNA (1)...(19): siRNA sense strand
gaagucaaauuacuacagu

SEQ ID NO: 1009380 - RNA, 19 nt, Homo sapiens
  misc_RNA (1)...(19): siRNA sense strand
caacuguucuucaacuuug

SEQ ID NO: 1009381 - RNA, 19 nt, Homo sapiens
  misc_RNA (1)...(19): siRNA sense strand
gaaagagacuuguguucag

SEQ ID NO: 1009382 - RNA, 19 nt, Homo sapiens
  misc_RNA (1)...(19): siRNA sense strand
caaagacacucugcuguga

SEQ ID NO: 1009383 - RNA, 19 nt, Homo sapiens
  misc_RNA (1)...(19): siRNA sense strand
caaagcagcagucacuaua

SEQ ID NO: 1009384 - RNA, 19 nt, Homo sapiens
  misc_RNA (1)...(19): siRNA sense strand
gguauagaaugcauaaaga

SEQ ID NO: 1009385 - RNA, 19 nt, Homo sapiens
  misc_RNA (1)...(19): siRNA sense strand
gagaaagcugcaagaauua

SEQ ID NO: 1009386 - RNA, 19 nt, Homo sapiens
  misc_RNA (1)...(19): siRNA sense strand
cagaaggguuucaaauauu

SEQ ID NO: 1009387 - RNA, 19 nt, Homo sapiens
  misc_RNA (1)...(19): siRNA sense strand
gaagagauaacauggaaga

SEQ ID NO: 1009388 - RNA, 19 nt, Homo sapiens
  misc_RNA (1)...(19): siRNA sense strand
gaguaucauucucaaagua

SEQ ID NO: 1009389 - RNA, 19 nt, Homo sapiens
  misc_RNA (1)...(19): siRNA sense strand
gagcaacaguaguuucuau

SEQ ID NO: 1009390 - RNA, 19 nt, Homo sapiens
  misc_RNA (1)...(19): siRNA sense strand
gaagauuccucucucucaa

SEQ ID NO: 1009391 - RNA, 19 nt, Homo sapiens
  misc_RNA (1)...(19): siRNA sense strand
gaaagcagaugagguuaca

SEQ ID NO: 1009392 - RNA, 19 nt, Homo sapiens
  misc_RNA (1)...(19): siRNA sense strand
cuucagagcuauacaaaga

SEQ ID NO: 1009393 - RNA, 19 nt, Homo sapiens
  misc_RNA (1)...(19): siRNA sense strand
acacaaagccaaauacauu

SEQ ID NO: 1009394 - RNA, 19 nt, Homo sapiens
  misc_RNA (1)...(19): siRNA sense strand
ggccaaaguugauuaugaa

SEQ ID NO: 1009395 - RNA, 19 nt, Homo sapiens
  misc_RNA (1)...(19): siRNA sense strand
caacaguaguuucuauuca

SEQ ID NO: 1009396 - RNA, 19 nt, Homo sapiens
  misc_RNA (1)...(19): siRNA sense strand
gaacauauagagcugcaaa

SEQ ID NO: 1009397 - RNA, 19 nt, Homo sapiens
  misc_RNA (1)...(19): siRNA sense strand
guacaaagcaucacuuaca

SEQ ID NO: 1009398 - RNA, 19 nt, Homo sapiens
  misc_RNA (1)...(19): siRNA sense strand
guuugugccuucuauaaua

SEQ ID NO: 1009399 - RNA, 19 nt, Homo sapiens
  misc_RNA (1)...(19): siRNA sense strand
uuacaaaucuugccguaga

SEQ ID NO: 1009400 - RNA, 19 nt, Homo sapiens
  misc_RNA (1)...(19): siRNA sense strand
aaacagauauucccagaca

SEQ ID NO: 1009401 - RNA, 19 nt, Homo sapiens
  misc_RNA (1)...(19): siRNA sense strand
cagaagcaguguuaucauu

SEQ ID NO: 1009402 - RNA, 19 nt, Homo sapiens
  misc_RNA (1)...(19): siRNA sense strand
cagaauaguuucaagacuu

SEQ ID NO: 1009403 - RNA, 19 nt, Homo sapiens
  misc_RNA (1)...(19): siRNA sense strand
ggaauaaaguccaggaguu

SEQ ID NO: 1009404 - RNA, 19 nt, Homo sapiens
  misc_RNA (1)...(19): siRNA sense strand
cgacaggccuuaaaugaga

SEQ ID NO: 1009405 - RNA, 19 nt, Homo sapiens
  misc_RNA (1)...(19): siRNA sense strand
ggaggaagcugaugagaac

SEQ ID NO: 1009406 - RNA, 19 nt, Homo sapiens
  misc_RNA (1)...(19): siRNA sense strand
gaauaaaguccaggaguug

SEQ ID NO: 1009407 - RNA, 19 nt, Homo sapiens
  misc_RNA (1)...(19): siRNA sense strand
ggaagcugaugagaacuau

SEQ ID NO: 1009408 - RNA, 19 nt, Homo sapiens
  misc_RNA (1)...(19): siRNA sense strand
caacaagugcaauucaaug

SEQ ID NO: 1009409 - RNA, 19 nt, Homo sapiens
  misc_RNA (1)...(19): siRNA sense strand
ggaggcagcugaagaucac

SEQ ID NO: 1009410 - RNA, 19 nt, Homo sapiens
  misc_RNA (1)...(19): siRNA sense strand
aagcugaugagaacuauaa

SEQ ID NO: 1009411 - RNA, 19 nt, Homo sapiens
  misc_RNA (1)...(19): siRNA sense strand
ccgaauaccgggagaagaa

SEQ ID NO: 1009412 - RNA, 19 nt, Homo sapiens
  misc_RNA (1)...(19): siRNA sense strand
ucguggagcucaucaacaa

SEQ ID NO: 1009413 - RNA, 19 nt, Homo sapiens
  misc_RNA (1)...(19): siRNA sense strand
cacaagguccggacaauuc

SEQ ID NO: 1009414 - RNA, 19 nt, Homo sapiens
  misc_RNA (1)...(19): siRNA sense strand
gaaccugcgcgaugagauc

SEQ ID NO: 1009415 - RNA, 19 nt, Homo sapiens
  misc_RNA (1)...(19): siRNA sense strand
ccuccuagcagucaucauu

SEQ ID NO: 1009416 - RNA, 19 nt, Homo sapiens
  misc_RNA (1)...(19): siRNA sense strand
gaagaacguggagcggauu

SEQ ID NO: 1009417 - RNA, 19 nt, Homo sapiens
  misc_RNA (1)...(19): siRNA sense strand
ccacaagguccggacaauu

SEQ ID NO: 1009418 - RNA, 19 nt, Homo sapiens
  misc_RNA (1)...(19): siRNA sense strand
ucaagacggcccuggagaa

SEQ ID NO: 1009419 - RNA, 19 nt, Homo sapiens
  misc_RNA (1)...(19): siRNA sense strand
gaacuauaacuccgucaac

SEQ ID NO: 1009420 - RNA, 19 nt, Homo sapiens
  misc_RNA (1)...(19): siRNA sense strand
cagcuugaacgcaguauuc

SEQ ID NO: 1009421 - RNA, 19 nt, Homo sapiens
  misc_RNA (1)...(19): siRNA sense strand
cgucacagugguuggauaa

SEQ ID NO: 1009422 - RNA, 19 nt, Homo sapiens
  misc_RNA (1)...(19): siRNA sense strand
gcgucacagugguuggaua

SEQ ID NO: 1009423 - RNA, 19 nt, Homo sapiens
  misc_RNA (1)...(19): siRNA sense strand
gagcugcacgacauauuca

SEQ ID NO: 1009424 - RNA, 19 nt, Homo sapiens
  misc_RNA (1)...(19): siRNA sense strand
agaaggaggaagcugauga

SEQ ID NO: 1009425 - RNA, 19 nt, Homo sapiens
  misc_RNA (1)...(19): siRNA sense strand
gcgagguguuuguguccaa

SEQ ID NO: 1009426 - RNA, 19 nt, Homo sapiens
  misc_RNA (1)...(19): siRNA sense strand
gaaggaggaagcugaugag

SEQ ID NO: 1009427 - RNA, 19 nt, Homo sapiens
  misc_RNA (1)...(19): siRNA sense strand
gaagcugaugagaacuaua

SEQ ID NO: 1009428 - RNA, 19 nt, Homo sapiens
  misc_RNA (1)...(19): siRNA sense strand
caucaacaagugcaauuca

SEQ ID NO: 1009429 - RNA, 19 nt, Homo sapiens
  misc_RNA (1)...(19): siRNA sense strand
ugcacgacauauucacuuu

SEQ ID NO: 1009430 - RNA, 19 nt, Homo sapiens
  misc_RNA (1)...(19): siRNA sense strand
agacggcccuggagaacca

SEQ ID NO: 1009431 - RNA, 19 nt, Homo sapiens
  misc_RNA (1)...(19): siRNA sense strand
acgaggaguucuuccacaa

SEQ ID NO: 1009432 - RNA, 19 nt, Homo sapiens
  misc_RNA (1)...(19): siRNA sense strand
cagcugaagaucaccaaug

SEQ ID NO: 1009433 - RNA, 19 nt, Homo sapiens
  misc_RNA (1)...(19): siRNA sense strand
ugacucgacaggccuuaaa

SEQ ID NO: 1009434 - RNA, 19 nt, Homo sapiens
  misc_RNA (1)...(19): siRNA sense strand
augcugggauggugucuga

SEQ ID NO: 1009435 - RNA, 19 nt, Homo sapiens
  misc_RNA (1)...(19): siRNA sense strand
ucaacaagugcaauucaau

SEQ ID NO: 1009436 - RNA, 19 nt, Homo sapiens
  misc_RNA (1)...(19): siRNA sense strand
cuaccgaaguggagaugca

SEQ ID NO: 1009437 - RNA, 19 nt, Homo sapiens
  misc_RNA (1)...(19): siRNA sense strand
agaaacagcaggucaccau

SEQ ID NO: 1009438 - RNA, 19 nt, Homo sapiens
  misc_RNA (1)...(19): siRNA sense strand
ugacagcucggacgaagag

SEQ ID NO: 1009439 - RNA, 19 nt, Homo sapiens
  misc_RNA (1)...(19): siRNA sense strand
gacaggccuuaaaugagau

SEQ ID NO: 1009440 - RNA, 19 nt, Homo sapiens
  misc_RNA (1)...(19): siRNA sense strand
gagguguuuguguccaaua

SEQ ID NO: 1009441 - RNA, 19 nt, Homo sapiens
  misc_RNA (1)...(19): siRNA sense strand
cgucaacacaagaaugaga

SEQ ID NO: 1009442 - RNA, 19 nt, Homo sapiens
  misc_RNA (1)...(19): siRNA sense strand
caucaccgucguccuccua

SEQ ID NO: 1009443 - RNA, 19 nt, Homo sapiens
  misc_RNA (1)...(19): siRNA sense strand
ccauagagccccagaagga

SEQ ID NO: 1009444 - RNA, 19 nt, Homo sapiens
  misc_RNA (1)...(19): siRNA sense strand
ggugucugaugaggaguug

SEQ ID NO: 1009445 - RNA, 19 nt, Homo sapiens
  misc_RNA (1)...(19): siRNA sense strand
gcugggauggugucugaug

SEQ ID NO: 1009446 - RNA, 19 nt, Homo sapiens
  misc_RNA (1)...(19): siRNA sense strand
uaacuccgucaacacaaga

SEQ ID NO: 1009447 - RNA, 19 nt, Homo sapiens
  misc_RNA (1)...(19): siRNA sense strand
cuauaacuccgucaacaca

SEQ ID NO: 1009448 - RNA, 19 nt, Homo sapiens
  misc_RNA (1)...(19): siRNA sense strand
gguccugucccagcaauuc

SEQ ID NO: 1009449 - RNA, 19 nt, Homo sapiens
  misc_RNA (1)...(19): siRNA sense strand
gcagcuugaacgcaguauu

SEQ ID NO: 1009450 - RNA, 19 nt, Homo sapiens
  misc_RNA (1)...(19): siRNA sense strand
cucgacaggccuuaaauga

SEQ ID NO: 1009451 - RNA, 19 nt, Homo sapiens
  misc_RNA (1)...(19): siRNA sense strand
cugggauggugucugauga

SEQ ID NO: 1009452 - RNA, 19 nt, Homo sapiens
  misc_RNA (1)...(19): siRNA sense strand
gcaauucguggagcucauc

SEQ ID NO: 1009453 - RNA, 19 nt, Homo sapiens
  misc_RNA (1)...(19): siRNA sense strand
ccuaaaagcuguucacauu

SEQ ID NO: 1009454 - RNA, 19 nt, Homo sapiens
  misc_RNA (1)...(19): siRNA sense strand
guugcuggguguauuauuu

SEQ ID NO: 1009455 - RNA, 19 nt, Homo sapiens
  misc_RNA (1)...(19): siRNA sense strand
gcaguugcuggguguauua

SEQ ID NO: 1009456 - RNA, 19 nt, Homo sapiens
  misc_RNA (1)...(19): siRNA sense strand
ggaaaacuauuaccaaaca

SEQ ID NO: 1009457 - RNA, 19 nt, Homo sapiens
  misc_RNA (1)...(19): siRNA sense strand
guacccagcgcucgauuaa

SEQ ID NO: 1009458 - RNA, 19 nt, Homo sapiens
  misc_RNA (1)...(19): siRNA sense strand
ucacauuguucaguucauu

SEQ ID NO: 1009459 - RNA, 19 nt, Homo sapiens
  misc_RNA (1)...(19): siRNA sense strand
uaaaagcuguucacauugu

SEQ ID NO: 1009460 - RNA, 19 nt, Homo sapiens
  misc_RNA (1)...(19): siRNA sense strand
uuauuucacucuugugguu

SEQ ID NO: 1009461 - RNA, 19 nt, Homo sapiens
  misc_RNA (1)...(19): siRNA sense strand
acccagcgcucgauuaaca

SEQ ID NO: 1009462 - RNA, 19 nt, Homo sapiens
  misc_RNA (1)...(19): siRNA sense strand
guguuacuauguuucacua

SEQ ID NO: 1009463 - RNA, 19 nt, Homo sapiens
  misc_RNA (1)...(19): siRNA sense strand
gguguauuauuucacucuu

SEQ ID NO: 1009464 - RNA, 19 nt, Homo sapiens
  misc_RNA (1)...(19): siRNA sense strand
guguauuauuucacucuug

SEQ ID NO: 1009465 - RNA, 19 nt, Homo sapiens
  misc_RNA (1)...(19): siRNA sense strand
cauaugaucuccuaaaagc

SEQ ID NO: 1009466 - RNA, 19 nt, Homo sapiens
  misc_RNA (1)...(19): siRNA sense strand
gcgcucgauuaacaaaaua

SEQ ID NO: 1009467 - RNA, 19 nt, Homo sapiens
  misc_RNA (1)...(19): siRNA sense strand
ugggaaaacuauuaccaaa

SEQ ID NO: 1009468 - RNA, 19 nt, Homo sapiens
  misc_RNA (1)...(19): siRNA sense strand
cacauuguucaguucauuu

SEQ ID NO: 1009469 - RNA, 19 nt, Homo sapiens
  misc_RNA (1)...(19): siRNA sense strand
ccuaaaagcuguucacauu

SEQ ID NO: 1009470 - RNA, 19 nt, Homo sapiens
  misc_RNA (1)...(19): siRNA sense strand
ggaaaacuauuaccaaaca

SEQ ID NO: 1009471 - RNA, 19 nt, Homo sapiens
  misc_RNA (1)...(19): siRNA sense strand
guacccagcgcucgauuaa

SEQ ID NO: 1009472 - RNA, 19 nt, Homo sapiens
  misc_RNA (1)...(19): siRNA sense strand
ucacauuguucaguucauu

SEQ ID NO: 1009473 - RNA, 19 nt, Homo sapiens
  misc_RNA (1)...(19): siRNA sense strand
uaaaagcuguucacauugu

SEQ ID NO: 1009474 - RNA, 19 nt, Homo sapiens
  misc_RNA (1)...(19): siRNA sense strand
acccagcgcucgauuaaca

SEQ ID NO: 1009475 - RNA, 19 nt, Homo sapiens
  misc_RNA (1)...(19): siRNA sense strand
guguuacuauguuucacua

SEQ ID NO: 1009476 - RNA, 19 nt, Homo sapiens
  misc_RNA (1)...(19): siRNA sense strand
cauaugaucuccuaaaagc

SEQ ID NO: 1009477 - RNA, 19 nt, Homo sapiens
  misc_RNA (1)...(19): siRNA sense strand
gcgcucgauuaacaaaaua

SEQ ID NO: 1009478 - RNA, 19 nt, Homo sapiens
  misc_RNA (1)...(19): siRNA sense strand
ugggaaaacuauuaccaaa

SEQ ID NO: 1009479 - RNA, 19 nt, Homo sapiens
  misc_RNA (1)...(19): siRNA sense strand
cacauuguucaguucauuu

SEQ ID NO: 1009480 - RNA, 19 nt, Homo sapiens
  misc_RNA (1)...(19): siRNA sense strand
caacagagccuauucuaaa

SEQ ID NO: 1009481 - RNA, 19 nt, Homo sapiens
  misc_RNA (1)...(19): siRNA sense strand
caagauaccucuaaauaca

SEQ ID NO: 1009482 - RNA, 19 nt, Homo sapiens
  misc_RNA (1)...(19): siRNA sense strand
ggaaagagaggaccagaaa

SEQ ID NO: 1009483 - RNA, 19 nt, Homo sapiens
  misc_RNA (1)...(19): siRNA sense strand
gcaacaaacccaugucaaa

SEQ ID NO: 1009484 - RNA, 19 nt, Homo sapiens
  misc_RNA (1)...(19): siRNA sense strand
guaggaaccuguggaauug

SEQ ID NO: 1009485 - RNA, 19 nt, Homo sapiens
  misc_RNA (1)...(19): siRNA sense strand
ggagauagaugaagaaaau

SEQ ID NO: 1009486 - RNA, 19 nt, Homo sapiens
  misc_RNA (1)...(19): siRNA sense strand
gaaaguaggagacaagugu

SEQ ID NO: 1009487 - RNA, 19 nt, Homo sapiens
  misc_RNA (1)...(19): siRNA sense strand
ccaaagaccuucugucaac

SEQ ID NO: 1009488 - RNA, 19 nt, Homo sapiens
  misc_RNA (1)...(19): siRNA sense strand
gcaaguugaagcugcauua

SEQ ID NO: 1009489 - RNA, 19 nt, Homo sapiens
  misc_RNA (1)...(19): siRNA sense strand
ggaggacaguggcaacaaa

SEQ ID NO: 1009490 - RNA, 19 nt, Homo sapiens
  misc_RNA (1)...(19): siRNA sense strand
gaagcugcauuaucuggaa

SEQ ID NO: 1009491 - RNA, 19 nt, Homo sapiens
  misc_RNA (1)...(19): siRNA sense strand
ccucaagccuguagaagaa

SEQ ID NO: 1009492 - RNA, 19 nt, Homo sapiens
  misc_RNA (1)...(19): siRNA sense strand
gagugugacugguaaaguu

SEQ ID NO: 1009493 - RNA, 19 nt, Homo sapiens
  misc_RNA (1)...(19): siRNA sense strand
gaagauggacaguguuaug

SEQ ID NO: 1009494 - RNA, 19 nt, Homo sapiens
  misc_RNA (1)...(19): siRNA sense strand
gagugaagauggacagugu

SEQ ID NO: 1009495 - RNA, 19 nt, Homo sapiens
  misc_RNA (1)...(19): siRNA sense strand
aaagugaaauggcaacaau

SEQ ID NO: 1009496 - RNA, 19 nt, Homo sapiens
  misc_RNA (1)...(19): siRNA sense strand
gugaagauggacaguguua

SEQ ID NO: 1009497 - RNA, 19 nt, Homo sapiens
  misc_RNA (1)...(19): siRNA sense strand
gaaccucaagccuguagaa

SEQ ID NO: 1009498 - RNA, 19 nt, Homo sapiens
  misc_RNA (1)...(19): siRNA sense strand
caaucaccuuugcugguua

SEQ ID NO: 1009499 - RNA, 19 nt, Homo sapiens
  misc_RNA (1)...(19): siRNA sense strand
gagaggaccagaaagugaa

SEQ ID NO: 1009500 - RNA, 19 nt, Homo sapiens
  misc_RNA (1)...(19): siRNA sense strand
ccagcagcgugaauauaaa

SEQ ID NO: 1009501 - RNA, 19 nt, Homo sapiens
  misc_RNA (1)...(19): siRNA sense strand
ccuguggaauugcugauaa

SEQ ID NO: 1009502 - RNA, 19 nt, Homo sapiens
  misc_RNA (1)...(19): siRNA sense strand
gauggacaguguuaugaag

SEQ ID NO: 1009503 - RNA, 19 nt, Homo sapiens
  misc_RNA (1)...(19): siRNA sense strand
cagguaaagaggaguauuu

SEQ ID NO: 1009504 - RNA, 19 nt, Homo sapiens
  misc_RNA (1)...(19): siRNA sense strand
cugagacgcuugcaaguuc

SEQ ID NO: 1009505 - RNA, 19 nt, Homo sapiens
  misc_RNA (1)...(19): siRNA sense strand
gcucagcuccagcaaguug

SEQ ID NO: 1009506 - RNA, 19 nt, Homo sapiens
  misc_RNA (1)...(19): siRNA sense strand
guuaugaagcggagauuga

SEQ ID NO: 1009507 - RNA, 19 nt, Homo sapiens
  misc_RNA (1)...(19): siRNA sense strand
gaaagugaaauggcaacaa

SEQ ID NO: 1009508 - RNA, 19 nt, Homo sapiens
  misc_RNA (1)...(19): siRNA sense strand
aagcggagauugaggagau

SEQ ID NO: 1009509 - RNA, 19 nt, Homo sapiens
  misc_RNA (1)...(19): siRNA sense strand
ggaguaggaaccuguggaa

SEQ ID NO: 1009510 - RNA, 19 nt, Homo sapiens
  misc_RNA (1)...(19): siRNA sense strand
cccagcagcgugaauauaa

SEQ ID NO: 1009511 - RNA, 19 nt, Homo sapiens
  misc_RNA (1)...(19): siRNA sense strand
aaagagaggaccagaaagu

SEQ ID NO: 1009512 - RNA, 19 nt, Homo sapiens
  misc_RNA (1)...(19): siRNA sense strand
cuacucaaccuacucauuc

SEQ ID NO: 1009513 - RNA, 19 nt, Homo sapiens
  misc_RNA (1)...(19): siRNA sense strand
gcaacaauucaacaacaga

SEQ ID NO: 1009514 - RNA, 19 nt, Homo sapiens
  misc_RNA (1)...(19): siRNA sense strand
gaaauggcaacaauucaac

SEQ ID NO: 1009515 - RNA, 19 nt, Homo sapiens
  misc_RNA (1)...(19): siRNA sense strand
gaauugcugauaaaccuau

SEQ ID NO: 1009516 - RNA, 19 nt, Homo sapiens
  misc_RNA (1)...(19): siRNA sense strand
ugauaaaccuaugacacaa

SEQ ID NO: 1009517 - RNA, 19 nt, Homo sapiens
  misc_RNA (1)...(19): siRNA sense strand
uggcaacaauucaacaaca

SEQ ID NO: 1009518 - RNA, 19 nt, Homo sapiens
  misc_RNA (1)...(19): siRNA sense strand
gauaaaccuaugacacaau

SEQ ID NO: 1009519 - RNA, 19 nt, Homo sapiens
  misc_RNA (1)...(19): siRNA sense strand
aguugaagcugcauuaucu

SEQ ID NO: 1009520 - RNA, 19 nt, Homo sapiens
  misc_RNA (1)...(19): siRNA sense strand
uugaggagauagaugaaga

SEQ ID NO: 1009521 - RNA, 19 nt, Homo sapiens
  misc_RNA (1)...(19): siRNA sense strand
aguaggaaccuguggaauu

SEQ ID NO: 1009522 - RNA, 19 nt, Homo sapiens
  misc_RNA (1)...(19): siRNA sense strand
cugagagugugacugguaa

SEQ ID NO: 1009523 - RNA, 19 nt, Homo sapiens
  misc_RNA (1)...(19): siRNA sense strand
ggaauugcugauaaaccua

SEQ ID NO: 1009524 - RNA, 19 nt, Homo sapiens
  misc_RNA (1)...(19): siRNA sense strand
ugguaaaguuggaguagga

SEQ ID NO: 1009525 - RNA, 19 nt, Homo sapiens
  misc_RNA (1)...(19): siRNA sense strand
caacaacagagccuauucu

SEQ ID NO: 1009526 - RNA, 19 nt, Homo sapiens
  misc_RNA (1)...(19): siRNA sense strand
ucaagauaccucuaaauac

SEQ ID NO: 1009527 - RNA, 19 nt, Homo sapiens
  misc_RNA (1)...(19): siRNA sense strand
gaccuucugucaacucaac

SEQ ID NO: 1009528 - RNA, 19 nt, Homo sapiens
  misc_RNA (1)...(19): siRNA sense strand
gucagaggauuuagcaaag

SEQ ID NO: 1009529 - RNA, 19 nt, Homo sapiens
  misc_RNA (1)...(19): siRNA sense strand
acaacagagccuauucuaa

SEQ ID NO: 1009530 - RNA, 19 nt, Homo sapiens
  misc_RNA (1)...(19): siRNA sense strand
guauggcagucuggaguga

SEQ ID NO: 1009531 - RNA, 19 nt, Homo sapiens
  misc_RNA (1)...(19): siRNA sense strand
agagaggaccagaaaguga

SEQ ID NO: 1009532 - RNA, 19 nt, Homo sapiens
  misc_RNA (1)...(19): siRNA sense strand
aaccaaagaccuucuguca

SEQ ID NO: 1009533 - RNA, 19 nt, Homo sapiens
  misc_RNA (1)...(19): siRNA sense strand
caacaaacccaugucaaaa

SEQ ID NO: 1009534 - RNA, 19 nt, Homo sapiens
  misc_RNA (1)...(19): siRNA sense strand
gaggagauagaugaagaaa

SEQ ID NO: 1009535 - RNA, 19 nt, Homo sapiens
  misc_RNA (1)...(19): siRNA sense strand
cagaggauuuagcaaagca

SEQ ID NO: 1009536 - RNA, 19 nt, Homo sapiens
  misc_RNA (1)...(19): siRNA sense strand
gaaagagaggaccagaaag

SEQ ID NO: 1009537 - RNA, 19 nt, Homo sapiens
  misc_RNA (1)...(19): siRNA sense strand
gcccagcagcgugaauaua

SEQ ID NO: 1009538 - RNA, 19 nt, Homo sapiens
  misc_RNA (1)...(19): siRNA sense strand
ggaaaguaggagacaagug

SEQ ID NO: 1009539 - RNA, 19 nt, Homo sapiens
  misc_RNA (1)...(19): siRNA sense strand
agauugaggagauagauga

SEQ ID NO: 1009540 - RNA, 19 nt, Homo sapiens
  misc_RNA (1)...(19): siRNA sense strand
ccugagagugugacuggua

SEQ ID NO: 1009541 - RNA, 19 nt, Homo sapiens
  misc_RNA (1)...(19): siRNA sense strand
uggcaaugcugaagugacu

SEQ ID NO: 1009542 - RNA, 19 nt, Homo sapiens
  misc_RNA (1)...(19): siRNA sense strand
ggcaacaauucaacaacag

SEQ ID NO: 1009543 - RNA, 19 nt, Homo sapiens
  misc_RNA (1)...(19): siRNA sense strand
gagauugaggagauagaug

SEQ ID NO: 1009544 - RNA, 19 nt, Homo sapiens
  misc_RNA (1)...(19): siRNA sense strand
cugauaaaccuaugacaca

SEQ ID NO: 1009545 - RNA, 19 nt, Homo sapiens
  misc_RNA (1)...(19): siRNA sense strand
uggaauugcugauaaaccu

SEQ ID NO: 1009546 - RNA, 19 nt, Homo sapiens
  misc_RNA (1)...(19): siRNA sense strand
ggagauugaggagauagau

SEQ ID NO: 1009547 - RNA, 19 nt, Homo sapiens
  misc_RNA (1)...(19): siRNA sense strand
gaacuugagcaggaaagag

SEQ ID NO: 1009548 - RNA, 19 nt, Homo sapiens
  misc_RNA (1)...(19): siRNA sense strand
gaaaauggcaccgcugcaa

SEQ ID NO: 1009549 - RNA, 19 nt, Homo sapiens
  misc_RNA (1)...(19): siRNA sense strand
caaagaccuucugucaacu

SEQ ID NO: 1009550 - RNA, 19 nt, Homo sapiens
  misc_RNA (1)...(19): siRNA sense strand
gaaggaaggaaggcaaagg

SEQ ID NO: 1009551 - RNA, 19 nt, Homo sapiens
  misc_RNA (1)...(19): siRNA sense strand
gcuugcaaguucagacagu

SEQ ID NO: 1009552 - RNA, 19 nt, Homo sapiens
  misc_RNA (1)...(19): siRNA sense strand
aaaguaggagacaagugua

SEQ ID NO: 1009553 - RNA, 19 nt, Homo sapiens
  misc_RNA (1)...(19): siRNA sense strand
acucauucauggaaaguag

SEQ ID NO: 1009554 - RNA, 19 nt, Homo sapiens
  misc_RNA (1)...(19): siRNA sense strand
aaaccuaugacacaauauc

SEQ ID NO: 1009555 - RNA, 19 nt, Homo sapiens
  misc_RNA (1)...(19): siRNA sense strand
ugacuccacuguugaaccu

SEQ ID NO: 1009556 - RNA, 19 nt, Homo sapiens
  misc_RNA (1)...(19): siRNA sense strand
aaucaccuuugcugguuau

SEQ ID NO: 1009557 - RNA, 19 nt, Homo sapiens
  misc_RNA (1)...(19): siRNA sense strand
agaacuaaccaaagaccuu

SEQ ID NO: 1009558 - RNA, 19 nt, Homo sapiens
  misc_RNA (1)...(19): siRNA sense strand
caaccuacucauucaugga

SEQ ID NO: 1009559 - RNA, 19 nt, Homo sapiens
  misc_RNA (1)...(19): siRNA sense strand
ugucaacucaaccuucuga

SEQ ID NO: 1009560 - RNA, 19 nt, Homo sapiens
  misc_RNA (1)...(19): siRNA sense strand
uuauggcaaugcugaagug

SEQ ID NO: 1009561 - RNA, 19 nt, Homo sapiens
  misc_RNA (1)...(19): siRNA sense strand
caaguugaagcugcauuau

SEQ ID NO: 1009562 - RNA, 19 nt, Homo sapiens
  misc_RNA (1)...(19): siRNA sense strand
guaggagacaaguguaugg

SEQ ID NO: 1009563 - RNA, 19 nt, Homo sapiens
  misc_RNA (1)...(19): siRNA sense strand
cuguggaauugcugauaaa

SEQ ID NO: 1009564 - RNA, 19 nt, Homo sapiens
  misc_RNA (1)...(19): siRNA sense strand
aacaacagagccuauucua

SEQ ID NO: 1009565 - RNA, 19 nt, Homo sapiens
  misc_RNA (1)...(19): siRNA sense strand
ugagacgcuugcaaguuca

SEQ ID NO: 1009566 - RNA, 19 nt, Homo sapiens
  misc_RNA (1)...(19): siRNA sense strand
aagauggacaguguuauga

SEQ ID NO: 1009567 - RNA, 19 nt, Homo sapiens
  misc_RNA (1)...(19): siRNA sense strand
gauugaggagauagaugaa

SEQ ID NO: 1009568 - RNA, 19 nt, Homo sapiens
  misc_RNA (1)...(19): siRNA sense strand
ggccagguaaagaggagua

SEQ ID NO: 1009569 - RNA, 19 nt, Homo sapiens
  misc_RNA (1)...(19): siRNA sense strand
gaaauggagaaaaugaaga

SEQ ID NO: 1009570 - RNA, 19 nt, Homo sapiens
  misc_RNA (1)...(19): siRNA sense strand
cauggaaaguaggagacaa

SEQ ID NO: 1009571 - RNA, 19 nt, Homo sapiens
  misc_RNA (1)...(19): siRNA sense strand
ucaacaacagagccuauuc

SEQ ID NO: 1009572 - RNA, 19 nt, Homo sapiens
  misc_RNA (1)...(19): siRNA sense strand
aagcugcauuaucuggaaa

SEQ ID NO: 1009573 - RNA, 19 nt, Homo sapiens
  misc_RNA (1)...(19): siRNA sense strand
agugaaauggcaacaauuc

SEQ ID NO: 1009574 - RNA, 19 nt, Homo sapiens
  misc_RNA (1)...(19): siRNA sense strand
agucaaagcugcaggaaua

SEQ ID NO: 1009575 - RNA, 19 nt, Homo sapiens
  misc_RNA (1)...(19): siRNA sense strand
caaauuggcuggguagaaa

SEQ ID NO: 1009576 - RNA, 19 nt, Homo sapiens
  misc_RNA (1)...(19): siRNA sense strand
cuuaagagcuguugaacuu

SEQ ID NO: 1009577 - RNA, 19 nt, Homo sapiens
  misc_RNA (1)...(19): siRNA sense strand
gaacuugacugaggugcaa

SEQ ID NO: 1009578 - RNA, 19 nt, Homo sapiens
  misc_RNA (1)...(19): siRNA sense strand
gaagauauuucacaguucu

SEQ ID NO: 1009579 - RNA, 19 nt, Homo sapiens
  misc_RNA (1)...(19): siRNA sense strand
ucaauuuguugccguaaua

SEQ ID NO: 1009580 - RNA, 19 nt, Homo sapiens
  misc_RNA (1)...(19): siRNA sense strand
gauaccugguuguuauaua

SEQ ID NO: 1009581 - RNA, 19 nt, Homo sapiens
  misc_RNA (1)...(19): siRNA sense strand
accaauaguugccuuguua

SEQ ID NO: 1009582 - RNA, 19 nt, Homo sapiens
  misc_RNA (1)...(19): siRNA sense strand
caacacagagagcaacuuu

SEQ ID NO: 1009583 - RNA, 19 nt, Homo sapiens
  misc_RNA (1)...(19): siRNA sense strand
gauauuuggugugccuaua

SEQ ID NO: 1009584 - RNA, 19 nt, Homo sapiens
  misc_RNA (1)...(19): siRNA sense strand
ggaauacagaugaaucaaa

SEQ ID NO: 1009585 - RNA, 19 nt, Homo sapiens
  misc_RNA (1)...(19): siRNA sense strand
caacccagcagacuucuuu

SEQ ID NO: 1009586 - RNA, 19 nt, Homo sapiens
  misc_RNA (1)...(19): siRNA sense strand
agaaauugauccugauguu

SEQ ID NO: 1009587 - RNA, 19 nt, Homo sapiens
  misc_RNA (1)...(19): siRNA sense strand
gaagaaaauugcugcuuug

SEQ ID NO: 1009588 - RNA, 19 nt, Homo sapiens
  misc_RNA (1)...(19): siRNA sense strand
aaaggcaguugaagaagaa

SEQ ID NO: 1009589 - RNA, 19 nt, Homo sapiens
  misc_RNA (1)...(19): siRNA sense strand
gcagacuucuuugagauug

SEQ ID NO: 1009590 - RNA, 19 nt, Homo sapiens
  misc_RNA (1)...(19): siRNA sense strand
uguuaaaggucccuggaua

SEQ ID NO: 1009591 - RNA, 19 nt, Homo sapiens
  misc_RNA (1)...(19): siRNA sense strand
gagccaguauucuaucaug

SEQ ID NO: 1009592 - RNA, 19 nt, Homo sapiens
  misc_RNA (1)...(19): siRNA sense strand
uaagagcuguugaacuugu

SEQ ID NO: 1009593 - RNA, 19 nt, Homo sapiens
  misc_RNA (1)...(19): siRNA sense strand
gcaaaaggcaguugaagaa

SEQ ID NO: 1009594 - RNA, 19 nt, Homo sapiens
  misc_RNA (1)...(19): siRNA sense strand
cacaaaagguucuguauau

SEQ ID NO: 1009595 - RNA, 19 nt, Homo sapiens
  misc_RNA (1)...(19): siRNA sense strand
ccagcagacuucuuugaga

SEQ ID NO: 1009596 - RNA, 19 nt, Homo sapiens
  misc_RNA (1)...(19): siRNA sense strand
gaugugggcaguucuguga

SEQ ID NO: 1009597 - RNA, 19 nt, Homo sapiens
  misc_RNA (1)...(19): siRNA sense strand
gauguucuuuggauucaau

SEQ ID NO: 1009598 - RNA, 19 nt, Homo sapiens
  misc_RNA (1)...(19): siRNA sense strand
gauaccacuuucucuccua

SEQ ID NO: 1009599 - RNA, 19 nt, Homo sapiens
  misc_RNA (1)...(19): siRNA sense strand
cagcagacuucuuugagau

SEQ ID NO: 1009600 - RNA, 19 nt, Homo sapiens
  misc_RNA (1)...(19): siRNA sense strand
gaaucaaauuguuggucuu

SEQ ID NO: 1009601 - RNA, 19 nt, Homo sapiens
  misc_RNA (1)...(19): siRNA sense strand
ggacacaagccacaauuuu

SEQ ID NO: 1009602 - RNA, 19 nt, Homo sapiens
  misc_RNA (1)...(19): siRNA sense strand
ccauugagccaguauucua

SEQ ID NO: 1009603 - RNA, 19 nt, Homo sapiens
  misc_RNA (1)...(19): siRNA sense strand
ccaguauucuaucauggaa

SEQ ID NO: 1009604 - RNA, 19 nt, Homo sapiens
  misc_RNA (1)...(19): siRNA sense strand
gguagaaauugauccugau

SEQ ID NO: 1009605 - RNA, 19 nt, Homo sapiens
  misc_RNA (1)...(19): siRNA sense strand
gggaugauuaccucucuaa

SEQ ID NO: 1009606 - RNA, 19 nt, Homo sapiens
  misc_RNA (1)...(19): siRNA sense strand
cagccaguuuguucacuuu

SEQ ID NO: 1009607 - RNA, 19 nt, Homo sapiens
  misc_RNA (1)...(19): siRNA sense strand
gaaauugauccugauguuc

SEQ ID NO: 1009608 - RNA, 19 nt, Homo sapiens
  misc_RNA (1)...(19): siRNA sense strand
acacagagagcaacuuuua

SEQ ID NO: 1009609 - RNA, 19 nt, Homo sapiens
  misc_RNA (1)...(19): siRNA sense strand
gcaggaauacagaugaauc

SEQ ID NO: 1009610 - RNA, 19 nt, Homo sapiens
  misc_RNA (1)...(19): siRNA sense strand
uaaaggucccuggauauga

SEQ ID NO: 1009611 - RNA, 19 nt, Homo sapiens
  misc_RNA (1)...(19): siRNA sense strand
uaauuucgauaccacuuuc

SEQ ID NO: 1009612 - RNA, 19 nt, Homo sapiens
  misc_RNA (1)...(19): siRNA sense strand
auugauaccugguuguuau

SEQ ID NO: 1009613 - RNA, 19 nt, Homo sapiens
  misc_RNA (1)...(19): siRNA sense strand
uuuauuacguggaacaaga

SEQ ID NO: 1009614 - RNA, 19 nt, Homo sapiens
  misc_RNA (1)...(19): siRNA sense strand
agaagaaaauugcugcuuu

SEQ ID NO: 1009615 - RNA, 19 nt, Homo sapiens
  misc_RNA (1)...(19): siRNA sense strand
uauauaagcucacaaaagg

SEQ ID NO: 1009616 - RNA, 19 nt, Homo sapiens
  misc_RNA (1)...(19): siRNA sense strand
caauaguugccuuguuaaa

SEQ ID NO: 1009617 - RNA, 19 nt, Homo sapiens
  misc_RNA (1)...(19): siRNA sense strand
ucacaacccagcagacuuc

SEQ ID NO: 1009618 - RNA, 19 nt, Homo sapiens
  misc_RNA (1)...(19): siRNA sense strand
guuaaaggucccuggauau

SEQ ID NO: 1009619 - RNA, 19 nt, Homo sapiens
  misc_RNA (1)...(19): siRNA sense strand
gcuaguacaacuggacuuu

SEQ ID NO: 1009620 - RNA, 19 nt, Homo sapiens
  misc_RNA (1)...(19): siRNA sense strand
aucaguggaugaagagaua

SEQ ID NO: 1009621 - RNA, 19 nt, Homo sapiens
  misc_RNA (1)...(19): siRNA sense strand
gggacacaagccacaauuu

SEQ ID NO: 1009622 - RNA, 19 nt, Homo sapiens
  misc_RNA (1)...(19): siRNA sense strand
gaccauugagccaguauuc

SEQ ID NO: 1009623 - RNA, 19 nt, Homo sapiens
  misc_RNA (1)...(19): siRNA sense strand
cagaugaaucaaauuguug

SEQ ID NO: 1009624 - RNA, 19 nt, Homo sapiens
  misc_RNA (1)...(19): siRNA sense strand
ggacuauugauaccugguu

SEQ ID NO: 1009625 - RNA, 19 nt, Homo sapiens
  misc_RNA (1)...(19): siRNA sense strand
ccaauaguugccuuguuaa

SEQ ID NO: 1009626 - RNA, 19 nt, Homo sapiens
  misc_RNA (1)...(19): siRNA sense strand
caacuuuuauuacguggaa

SEQ ID NO: 1009627 - RNA, 19 nt, Homo sapiens
  misc_RNA (1)...(19): siRNA sense strand
gccaguuuguucacuuuca

SEQ ID NO: 1009628 - RNA, 19 nt, Homo sapiens
  misc_RNA (1)...(19): siRNA sense strand
agacuuaagagcuguugaa

SEQ ID NO: 1009629 - RNA, 19 nt, Homo sapiens
  misc_RNA (1)...(19): siRNA sense strand
gaucaguggaugaagagau

SEQ ID NO: 1009630 - RNA, 19 nt, Homo sapiens
  misc_RNA (1)...(19): siRNA sense strand
ucaaauuggcuggguagaa

SEQ ID NO: 1009631 - RNA, 19 nt, Homo sapiens
  misc_RNA (1)...(19): siRNA sense strand
guagaaauugauccugaug

SEQ ID NO: 1009632 - RNA, 19 nt, Homo sapiens
  misc_RNA (1)...(19): siRNA sense strand
aaaggucccuggauaugac

SEQ ID NO: 1009633 - RNA, 19 nt, Homo sapiens
  misc_RNA (1)...(19): siRNA sense strand
uaccaauaguugccuuguu

SEQ ID NO: 1009634 - RNA, 19 nt, Homo sapiens
  misc_RNA (1)...(19): siRNA sense strand
gauccgcugccacgucuau

SEQ ID NO: 1009635 - RNA, 19 nt, Homo sapiens
  misc_RNA (1)...(19): siRNA sense strand
ucacaaaagguucuguaua

SEQ ID NO: 1009636 - RNA, 19 nt, Homo sapiens
  misc_RNA (1)...(19): siRNA sense strand
cugcaggaauacagaugaa

SEQ ID NO: 1009637 - RNA, 19 nt, Homo sapiens
  misc_RNA (1)...(19): siRNA sense strand
uuaccucucuaauuucgau

SEQ ID NO: 1009638 - RNA, 19 nt, Homo sapiens
  misc_RNA (1)...(19): siRNA sense strand
ccauauaagauguguugga

SEQ ID NO: 1009639 - RNA, 19 nt, Homo sapiens
  misc_RNA (1)...(19): siRNA sense strand
aaaaggcaguugaagaaga

SEQ ID NO: 1009640 - RNA, 19 nt, Homo sapiens
  misc_RNA (1)...(19): siRNA sense strand
caggaauacagaugaauca

SEQ ID NO: 1009641 - RNA, 19 nt, Homo sapiens
  misc_RNA (1)...(19): siRNA sense strand
cagagagcaacuuuuauua

SEQ ID NO: 1009642 - RNA, 19 nt, Homo sapiens
  misc_RNA (1)...(19): siRNA sense strand
cuaauuucgauaccacuuu

SEQ ID NO: 1009643 - RNA, 19 nt, Homo sapiens
  misc_RNA (1)...(19): siRNA sense strand
gagauuggucuggauuuua

SEQ ID NO: 1009644 - RNA, 19 nt, Homo sapiens
  misc_RNA (1)...(19): siRNA sense strand
aagagcuguugaacuugua

SEQ ID NO: 1009645 - RNA, 19 nt, Homo sapiens
  misc_RNA (1)...(19): siRNA sense strand
guucuuuggauucaauuug

SEQ ID NO: 1009646 - RNA, 19 nt, Homo sapiens
  misc_RNA (1)...(19): siRNA sense strand
uuaaaggucccuggauaug

SEQ ID NO: 1009647 - RNA, 19 nt, Homo sapiens
  misc_RNA (1)...(19): siRNA sense strand
caauuuguugccguaauaa

SEQ ID NO: 1009648 - RNA, 19 nt, Homo sapiens
  misc_RNA (1)...(19): siRNA sense strand
aaauugauccugauguucu

SEQ ID NO: 1009649 - RNA, 19 nt, Homo sapiens
  misc_RNA (1)...(19): siRNA sense strand
gaacaagaaaacaggaaau

SEQ ID NO: 1009650 - RNA, 19 nt, Homo sapiens
  misc_RNA (1)...(19): siRNA sense strand
aguauucuaucauggaagu

SEQ ID NO: 1009651 - RNA, 19 nt, Homo sapiens
  misc_RNA (1)...(19): siRNA sense strand
gcuccagcgugcagaaggu

SEQ ID NO: 1009652 - RNA, 19 nt, Homo sapiens
  misc_RNA (1)...(19): siRNA sense strand
ggaugaagagauauuuggu

SEQ ID NO: 1009653 - RNA, 19 nt, Homo sapiens
  misc_RNA (1)...(19): siRNA sense strand
gcugcaggaauacagauga

SEQ ID NO: 1009654 - RNA, 19 nt, Homo sapiens
  misc_RNA (1)...(19): siRNA sense strand
uuggaucaguggaugaaga

SEQ ID NO: 1009655 - RNA, 19 nt, Homo sapiens
  misc_RNA (1)...(19): siRNA sense strand
uguuggagugggaugauua

SEQ ID NO: 1009656 - RNA, 19 nt, Homo sapiens
  misc_RNA (1)...(19): siRNA sense strand
gagagcaacuuuuauuacg

SEQ ID NO: 1009657 - RNA, 19 nt, Homo sapiens
  misc_RNA (1)...(19): siRNA sense strand
gccaguauucuaucaugga

SEQ ID NO: 1009658 - RNA, 19 nt, Homo sapiens
  misc_RNA (1)...(19): siRNA sense strand
ggucuuggcauuucaacac

SEQ ID NO: 1009659 - RNA, 19 nt, Homo sapiens
  misc_RNA (1)...(19): siRNA sense strand
gacacaagccacaauuuug

SEQ ID NO: 1009660 - RNA, 19 nt, Homo sapiens
  misc_RNA (1)...(19): siRNA sense strand
guuguuauauaagcucaca

SEQ ID NO: 1009661 - RNA, 19 nt, Homo sapiens
  misc_RNA (1)...(19): siRNA sense strand
acagccaguuuguucacuu

SEQ ID NO: 1009662 - RNA, 19 nt, Homo sapiens
  misc_RNA (1)...(19): siRNA sense strand
uuuauaaguuggcaagacu

SEQ ID NO: 1009663 - RNA, 19 nt, Homo sapiens
  misc_RNA (1)...(19): siRNA sense strand
cauugagccaguauucuau

SEQ ID NO: 1009664 - RNA, 19 nt, Homo sapiens
  misc_RNA (1)...(19): siRNA sense strand
ggaccauugagccaguauu

SEQ ID NO: 1009665 - RNA, 19 nt, Homo sapiens
  misc_RNA (1)...(19): siRNA sense strand
uauugauaccugguuguua

SEQ ID NO: 1009666 - RNA, 19 nt, Homo sapiens
  misc_RNA (1)...(19): siRNA sense strand
ugagauuggucuggauuuu

SEQ ID NO: 1009667 - RNA, 19 nt, Homo sapiens
  misc_RNA (1)...(19): siRNA sense strand
gcaagacuuaagagcuguu

SEQ ID NO: 1009668 - RNA, 19 nt, Homo sapiens
  misc_RNA (1)...(19): siRNA sense strand
agaagaagcucaagagaga

SEQ ID NO: 1009669 - RNA, 19 nt, Homo sapiens
  misc_RNA (1)...(19): siRNA sense strand
ugugucagcugcagaagaa

SEQ ID NO: 1009670 - RNA, 19 nt, Homo sapiens
  misc_RNA (1)...(19): siRNA sense strand
ucuaccagcuccaggcuaa

SEQ ID NO: 1009671 - RNA, 19 nt, Homo sapiens
  misc_RNA (1)...(19): siRNA sense strand
gcagaagaagcucaagaga

SEQ ID NO: 1009672 - RNA, 19 nt, Homo sapiens
  misc_RNA (1)...(19): siRNA sense strand
ggaccacagggcucucaua

SEQ ID NO: 1009673 - RNA, 19 nt, Homo sapiens
  misc_RNA (1)...(19): siRNA sense strand
agagagaagucgagaagca

SEQ ID NO: 1009674 - RNA, 19 nt, Homo sapiens
  misc_RNA (1)...(19): siRNA sense strand
caagagagaagucgagaag

SEQ ID NO: 1009675 - RNA, 19 nt, Homo sapiens
  misc_RNA (1)...(19): siRNA sense strand
aagacuaucugauuaaggu

SEQ ID NO: 1009676 - RNA, 19 nt, Homo sapiens
  misc_RNA (1)...(19): siRNA sense strand
ugaagacuaucugauuaag

SEQ ID NO: 1009677 - RNA, 19 nt, Homo sapiens
  misc_RNA (1)...(19): siRNA sense strand
gaccacagggcucucauag

SEQ ID NO: 1009678 - RNA, 19 nt, Homo sapiens
  misc_RNA (1)...(19): siRNA sense strand
gaagaagcucaagagagaa

SEQ ID NO: 1009679 - RNA, 19 nt, Homo sapiens
  misc_RNA (1)...(19): siRNA sense strand
aagcaauccuggugacaag

SEQ ID NO: 1009680 - RNA, 19 nt, Homo sapiens
  misc_RNA (1)...(19): siRNA sense strand
caagcaauccuggugacaa

SEQ ID NO: 1009681 - RNA, 19 nt, Homo sapiens
  misc_RNA (1)...(19): siRNA sense strand
gaagacuaucugauuaagg

SEQ ID NO: 1009682 - RNA, 19 nt, Homo sapiens
  misc_RNA (1)...(19): siRNA sense strand
gcuccaggcuaagcagaag

SEQ ID NO: 1009683 - RNA, 19 nt, Homo sapiens
  misc_RNA (1)...(19): siRNA sense strand
gagaagucgagaagcacaa

SEQ ID NO: 1009684 - RNA, 19 nt, Homo sapiens
  misc_RNA (1)...(19): siRNA sense strand
aggccacggugaagcacua

SEQ ID NO: 1009685 - RNA, 19 nt, Homo sapiens
  misc_RNA (1)...(19): siRNA sense strand
gcucucauagccucaagau

SEQ ID NO: 1009686 - RNA, 19 nt, Homo sapiens
  misc_RNA (1)...(19): siRNA sense strand
gggaagauuugcacaauaa

SEQ ID NO: 1009687 - RNA, 19 nt, Homo sapiens
  misc_RNA (1)...(19): siRNA sense strand
aaugguagcuucaccuaua

SEQ ID NO: 1009688 - RNA, 19 nt, Homo sapiens
  misc_RNA (1)...(19): siRNA sense strand
aagcaugugucaagcauua

SEQ ID NO: 1009689 - RNA, 19 nt, Homo sapiens
  misc_RNA (1)...(19): siRNA sense strand
uauccagucugcaaucuua

SEQ ID NO: 1009690 - RNA, 19 nt, Homo sapiens
  misc_RNA (1)...(19): siRNA sense strand
ccaacugccucuaugcaua

SEQ ID NO: 1009691 - RNA, 19 nt, Homo sapiens
  misc_RNA (1)...(19): siRNA sense strand
ggaaauguagcaguuguua

SEQ ID NO: 1009692 - RNA, 19 nt, Homo sapiens
  misc_RNA (1)...(19): siRNA sense strand
ggccaucaauguucuguuu

SEQ ID NO: 1009693 - RNA, 19 nt, Homo sapiens
  misc_RNA (1)...(19): siRNA sense strand
ggaagacaguguaaaagua

SEQ ID NO: 1009694 - RNA, 19 nt, Homo sapiens
  misc_RNA (1)...(19): siRNA sense strand
uacaucagcugugcuaaua

SEQ ID NO: 1009695 - RNA, 19 nt, Homo sapiens
  misc_RNA (1)...(19): siRNA sense strand
cgauggagaucuauuagga

SEQ ID NO: 1009696 - RNA, 19 nt, Homo sapiens
  misc_RNA (1)...(19): siRNA sense strand
caagcuguguuauauaaug

SEQ ID NO: 1009697 - RNA, 19 nt, Homo sapiens
  misc_RNA (1)...(19): siRNA sense strand
caucauuacuccauuaaca

SEQ ID NO: 1009698 - RNA, 19 nt, Homo sapiens
  misc_RNA (1)...(19): siRNA sense strand
gugauuaaacugcagauaa

SEQ ID NO: 1009699 - RNA, 19 nt, Homo sapiens
  misc_RNA (1)...(19): siRNA sense strand
ccugguguguggaauaaua

SEQ ID NO: 1009700 - RNA, 19 nt, Homo sapiens
  misc_RNA (1)...(19): siRNA sense strand
guuguuagaucauauacug

SEQ ID NO: 1009701 - RNA, 19 nt, Homo sapiens
  misc_RNA (1)...(19): siRNA sense strand
agacugaagagcauuauaa

SEQ ID NO: 1009702 - RNA, 19 nt, Homo sapiens
  misc_RNA (1)...(19): siRNA sense strand
ggaguuaaguugcuuucca

SEQ ID NO: 1009703 - RNA, 19 nt, Homo sapiens
  misc_RNA (1)...(19): siRNA sense strand
gguugaagccguuguuauu

SEQ ID NO: 1009704 - RNA, 19 nt, Homo sapiens
  misc_RNA (1)...(19): siRNA sense strand
gaagaagcaaguacagaug

SEQ ID NO: 1009705 - RNA, 19 nt, Homo sapiens
  misc_RNA (1)...(19): siRNA sense strand
gcugguugcucguggauug

SEQ ID NO: 1009706 - RNA, 19 nt, Homo sapiens
  misc_RNA (1)...(19): siRNA sense strand
caucccagcuucucauaau

SEQ ID NO: 1009707 - RNA, 19 nt, Homo sapiens
  misc_RNA (1)...(19): siRNA sense strand
gcuggguuauugcuucaua

SEQ ID NO: 1009708 - RNA, 19 nt, Homo sapiens
  misc_RNA (1)...(19): siRNA sense strand
aauggaagaugacaaugaa

SEQ ID NO: 1009709 - RNA, 19 nt, Homo sapiens
  misc_RNA (1)...(19): siRNA sense strand
gaguuaaguugcuuuccaa

SEQ ID NO: 1009710 - RNA, 19 nt, Homo sapiens
  misc_RNA (1)...(19): siRNA sense strand
cgacagcugauacaaguuu

SEQ ID NO: 1009711 - RNA, 19 nt, Homo sapiens
  misc_RNA (1)...(19): siRNA sense strand
ggaagaugacaaugaaaga

SEQ ID NO: 1009712 - RNA, 19 nt, Homo sapiens
  misc_RNA (1)...(19): siRNA sense strand
uauaagagccgauggagau

SEQ ID NO: 1009713 - RNA, 19 nt, Homo sapiens
  misc_RNA (1)...(19): siRNA sense strand
acucauugcucuuucugua

SEQ ID NO: 1009714 - RNA, 19 nt, Homo sapiens
  misc_RNA (1)...(19): siRNA sense strand
gcaaucuuauguccuauac

SEQ ID NO: 1009715 - RNA, 19 nt, Homo sapiens
  misc_RNA (1)...(19): siRNA sense strand
gcaguuguuagaucauaua

SEQ ID NO: 1009716 - RNA, 19 nt, Homo sapiens
  misc_RNA (1)...(19): siRNA sense strand
cuauuuaucuuugcccuuu

SEQ ID NO: 1009717 - RNA, 19 nt, Homo sapiens
  misc_RNA (1)...(19): siRNA sense strand
gguuauugcuucauauagu

SEQ ID NO: 1009718 - RNA, 19 nt, Homo sapiens
  misc_RNA (1)...(19): siRNA sense strand
ggagaucuauuaggauuuu

SEQ ID NO: 1009719 - RNA, 19 nt, Homo sapiens
  misc_RNA (1)...(19): siRNA sense strand
ggaccacgaugggcauuca

SEQ ID NO: 1009720 - RNA, 19 nt, Homo sapiens
  misc_RNA (1)...(19): siRNA sense strand
caauggaagaugacaauga

SEQ ID NO: 1009721 - RNA, 19 nt, Homo sapiens
  misc_RNA (1)...(19): siRNA sense strand
caaguuccauggcaaacau

SEQ ID NO: 1009722 - RNA, 19 nt, Homo sapiens
  misc_RNA (1)...(19): siRNA sense strand
uagcaguuguuagaucaua

SEQ ID NO: 1009723 - RNA, 19 nt, Homo sapiens
  misc_RNA (1)...(19): siRNA sense strand
cagcugugcuaauaggauu

SEQ ID NO: 1009724 - RNA, 19 nt, Homo sapiens
  misc_RNA (1)...(19): siRNA sense strand
uguauggguuggcuucuuu

SEQ ID NO: 1009725 - RNA, 19 nt, Homo sapiens
  misc_RNA (1)...(19): siRNA sense strand
cauaauacuugcugcucuu

SEQ ID NO: 1009726 - RNA, 19 nt, Homo sapiens
  misc_RNA (1)...(19): siRNA sense strand
ucucagcaguguaggguuu

SEQ ID NO: 1009727 - RNA, 19 nt, Homo sapiens
  misc_RNA (1)...(19): siRNA sense strand
gaauaauagugcucaccau

SEQ ID NO: 1009728 - RNA, 19 nt, Homo sapiens
  misc_RNA (1)...(19): siRNA sense strand
cauauagucuuggccaaau

SEQ ID NO: 1009729 - RNA, 19 nt, Homo sapiens
  misc_RNA (1)...(19): siRNA sense strand
ugggaagauuugcacaaua

SEQ ID NO: 1009730 - RNA, 19 nt, Homo sapiens
  misc_RNA (1)...(19): siRNA sense strand
uggcuucuuuaucuuguua

SEQ ID NO: 1009731 - RNA, 19 nt, Homo sapiens
  misc_RNA (1)...(19): siRNA sense strand
aaccaucauuacuccauua

SEQ ID NO: 1009732 - RNA, 19 nt, Homo sapiens
  misc_RNA (1)...(19): siRNA sense strand
ggaauuggagcaggaaaug

SEQ ID NO: 1009733 - RNA, 19 nt, Homo sapiens
  misc_RNA (1)...(19): siRNA sense strand
cuuauugucuccaucuuga

SEQ ID NO: 1009734 - RNA, 19 nt, Homo sapiens
  misc_RNA (1)...(19): siRNA sense strand
caaaugguagcuucaccua

SEQ ID NO: 1009735 - RNA, 19 nt, Homo sapiens
  misc_RNA (1)...(19): siRNA sense strand
ggaaguggagcccggauuc

SEQ ID NO: 1009736 - RNA, 19 nt, Homo sapiens
  misc_RNA (1)...(19): siRNA sense strand
ucugcaaucuuauguccua

SEQ ID NO: 1009737 - RNA, 19 nt, Homo sapiens
  misc_RNA (1)...(19): siRNA sense strand
aaauguagcaguuguuaga

SEQ ID NO: 1009738 - RNA, 19 nt, Homo sapiens
  misc_RNA (1)...(19): siRNA sense strand
guagugaugauguccauau

SEQ ID NO: 1009739 - RNA, 19 nt, Homo sapiens
  misc_RNA (1)...(19): siRNA sense strand
caacugccucuaugcauau

SEQ ID NO: 1009740 - RNA, 19 nt, Homo sapiens
  misc_RNA (1)...(19): siRNA sense strand
caugggaugugauuaaacu

SEQ ID NO: 1009741 - RNA, 19 nt, Homo sapiens
  misc_RNA (1)...(19): siRNA sense strand
uguaagauaugggaggauu

SEQ ID NO: 1009742 - RNA, 19 nt, Homo sapiens
  misc_RNA (1)...(19): siRNA sense strand
gaaaccaucauuacuccau

SEQ ID NO: 1009743 - RNA, 19 nt, Homo sapiens
  misc_RNA (1)...(19): siRNA sense strand
gugacucuauuuaucuuug

SEQ ID NO: 1009744 - RNA, 19 nt, Homo sapiens
  misc_RNA (1)...(19): siRNA sense strand
gauccuugccauacuaaga

SEQ ID NO: 1009745 - RNA, 19 nt, Homo sapiens
  misc_RNA (1)...(19): siRNA sense strand
uggguuggcuucuuuaucu

SEQ ID NO: 1009746 - RNA, 19 nt, Homo sapiens
  misc_RNA (1)...(19): siRNA sense strand
gguagcuucaccuauauuu

SEQ ID NO: 1009747 - RNA, 19 nt, Homo sapiens
  misc_RNA (1)...(19): siRNA sense strand
agaagcaaguacagaugaa

SEQ ID NO: 1009748 - RNA, 19 nt, Homo sapiens
  misc_RNA (1)...(19): siRNA sense strand
caggaaauguagcaguugu

SEQ ID NO: 1009749 - RNA, 19 nt, Homo sapiens
  misc_RNA (1)...(19): siRNA sense strand
gcagauaaacauguauaca

SEQ ID NO: 1009750 - RNA, 19 nt, Homo sapiens
  misc_RNA (1)...(19): siRNA sense strand
aaucuuauguccuauacuc

SEQ ID NO: 1009751 - RNA, 19 nt, Homo sapiens
  misc_RNA (1)...(19): siRNA sense strand
gugggaagauuugcacaau

SEQ ID NO: 1009752 - RNA, 19 nt, Homo sapiens
  misc_RNA (1)...(19): siRNA sense strand
aaaccaucauuacuccauu

SEQ ID NO: 1009753 - RNA, 19 nt, Homo sapiens
  misc_RNA (1)...(19): siRNA sense strand
ugaagaagcaaguacagau

SEQ ID NO: 1009754 - RNA, 19 nt, Homo sapiens
  misc_RNA (1)...(19): siRNA sense strand
guucaucagccaaguguau

SEQ ID NO: 1009755 - RNA, 19 nt, Homo sapiens
  misc_RNA (1)...(19): siRNA sense strand
caucagcugugcuaauagg

SEQ ID NO: 1009756 - RNA, 19 nt, Homo sapiens
  misc_RNA (1)...(19): siRNA sense strand
guugaagccguuguuauuu

SEQ ID NO: 1009757 - RNA, 19 nt, Homo sapiens
  misc_RNA (1)...(19): siRNA sense strand
uguagcaguuguuagauca

SEQ ID NO: 1009758 - RNA, 19 nt, Homo sapiens
  misc_RNA (1)...(19): siRNA sense strand
gagacugaagagcauuaua

SEQ ID NO: 1009759 - RNA, 19 nt, Homo sapiens
  misc_RNA (1)...(19): siRNA sense strand
aagagaacaucguguggau

SEQ ID NO: 1009760 - RNA, 19 nt, Homo sapiens
  misc_RNA (1)...(19): siRNA sense strand
guuauugcuucauauaguc

SEQ ID NO: 1009761 - RNA, 19 nt, Homo sapiens
  misc_RNA (1)...(19): siRNA sense strand
guuaacagcaucuggaagu

SEQ ID NO: 1009762 - RNA, 19 nt, Homo sapiens
  misc_RNA (1)...(19): siRNA sense strand
ggaggacucaucguuguau

SEQ ID NO: 1009763 - RNA, 19 nt, Homo sapiens
  misc_RNA (1)...(19): siRNA sense strand
ucugauccuugccauacua

SEQ ID NO: 1009764 - RNA, 19 nt, Homo sapiens
  misc_RNA (1)...(19): siRNA sense strand
guauacaacaccaguuuua

SEQ ID NO: 1009765 - RNA, 19 nt, Homo sapiens
  misc_RNA (1)...(19): siRNA sense strand
aagagccgauggagaucua

SEQ ID NO: 1009766 - RNA, 19 nt, Homo sapiens
  misc_RNA (1)...(19): siRNA sense strand
gaaauguagcaguuguuag

SEQ ID NO: 1009767 - RNA, 19 nt, Homo sapiens
  misc_RNA (1)...(19): siRNA sense strand
auggagaucuauuaggauu

SEQ ID NO: 1009768 - RNA, 19 nt, Homo sapiens
  misc_RNA (1)...(19): siRNA sense strand
gaagacaguguaaaaguau

SEQ ID NO: 1009769 - RNA, 19 nt, Homo sapiens
  misc_RNA (1)...(19): siRNA sense strand
aauuggagcaggaaaugua

SEQ ID NO: 1009770 - RNA, 19 nt, Homo sapiens
  misc_RNA (1)...(19): siRNA sense strand
gggagugguuuacaaaaga

SEQ ID NO: 1009771 - RNA, 19 nt, Homo sapiens
  misc_RNA (1)...(19): siRNA sense strand
guauacaugggcugguuaa

SEQ ID NO: 1009772 - RNA, 19 nt, Homo sapiens
  misc_RNA (1)...(19): siRNA sense strand
uaacaauggauauguaugc

SEQ ID NO: 1009773 - RNA, 19 nt, Homo sapiens
  misc_RNA (1)...(19): siRNA sense strand
cugaagagcauuauaagag

SEQ ID NO: 1009774 - RNA, 19 nt, Homo sapiens
  misc_RNA (1)...(19): siRNA sense strand
gggcuggguuauugcuuca

SEQ ID NO: 1009775 - RNA, 19 nt, Homo sapiens
  misc_RNA (1)...(19): siRNA sense strand
uacaugggcugguuaacag

SEQ ID NO: 1009776 - RNA, 19 nt, Homo sapiens
  misc_RNA (1)...(19): siRNA sense strand
gaggacucaucguuguaug

SEQ ID NO: 1009777 - RNA, 19 nt, Homo sapiens
  misc_RNA (1)...(19): siRNA sense strand
gggaggacucaucguugua

SEQ ID NO: 1009778 - RNA, 19 nt, Homo sapiens
  misc_RNA (1)...(19): siRNA sense strand
ugccuggacucaagaacaa

SEQ ID NO: 1009779 - RNA, 19 nt, Homo sapiens
  misc_RNA (1)...(19): siRNA sense strand
cuucaccuauauuugguuu

SEQ ID NO: 1009780 - RNA, 19 nt, Homo sapiens
  misc_RNA (1)...(19): siRNA sense strand
ucauugcucuuucuguaag

SEQ ID NO: 1009781 - RNA, 19 nt, Homo sapiens
  misc_RNA (1)...(19): siRNA sense strand
uagagacugaagagcauua

SEQ ID NO: 1009782 - RNA, 19 nt, Homo sapiens
  misc_RNA (1)...(19): siRNA sense strand
uccgacagcugauacaagu

SEQ ID NO: 1009783 - RNA, 19 nt, Homo sapiens
  misc_RNA (1)...(19): siRNA sense strand
uggcgagcgugcuauucua

SEQ ID NO: 1009784 - RNA, 19 nt, Homo sapiens
  misc_RNA (1)...(19): siRNA sense strand
gcaggaaauguagcaguug

SEQ ID NO: 1009785 - RNA, 19 nt, Homo sapiens
  misc_RNA (1)...(19): siRNA sense strand
uaagauaugggaggauuca

SEQ ID NO: 1009786 - RNA, 19 nt, Homo sapiens
  misc_RNA (1)...(19): siRNA sense strand
gaagagaaauguguaaaga

SEQ ID NO: 1009787 - RNA, 19 nt, Homo sapiens
  misc_RNA (1)...(19): siRNA sense strand
cauaaugacuguuuggaua

SEQ ID NO: 1009788 - RNA, 19 nt, Homo sapiens
  misc_RNA (1)...(19): siRNA sense strand
aaauaugccuccuuacgua

SEQ ID NO: 1009789 - RNA, 19 nt, Homo sapiens
  misc_RNA (1)...(19): siRNA sense strand
uugcaaauaugccuccuua

SEQ ID NO: 1009790 - RNA, 19 nt, Homo sapiens
  misc_RNA (1)...(19): siRNA sense strand
cuacggaccugcaggaaau

SEQ ID NO: 1009791 - RNA, 19 nt, Homo sapiens
  misc_RNA (1)...(19): siRNA sense strand
cauagaagcccacaacgaa

SEQ ID NO: 1009792 - RNA, 19 nt, Homo sapiens
  misc_RNA (1)...(19): siRNA sense strand
gaucuugggucuguguuug

SEQ ID NO: 1009793 - RNA, 19 nt, Homo sapiens
  misc_RNA (1)...(19): siRNA sense strand
caacugcaauauuuguaug

SEQ ID NO: 1009794 - RNA, 19 nt, Homo sapiens
  misc_RNA (1)...(19): siRNA sense strand
gagcuucaacugcaauauu

SEQ ID NO: 1009795 - RNA, 19 nt, Homo sapiens
  misc_RNA (1)...(19): siRNA sense strand
guaaagaaccucugcaaaa

SEQ ID NO: 1009796 - RNA, 19 nt, Homo sapiens
  misc_RNA (1)...(19): siRNA sense strand
gggcaaaccagugcaaauu

SEQ ID NO: 1009797 - RNA, 19 nt, Homo sapiens
  misc_RNA (1)...(19): siRNA sense strand
gcagacagccuuuaaucca

SEQ ID NO: 1009798 - RNA, 19 nt, Homo sapiens
  misc_RNA (1)...(19): siRNA sense strand
gcaaagauggcuaaagcau

SEQ ID NO: 1009799 - RNA, 19 nt, Homo sapiens
  misc_RNA (1)...(19): siRNA sense strand
agacagccuuuaauccauu

SEQ ID NO: 1009800 - RNA, 19 nt, Homo sapiens
  misc_RNA (1)...(19): siRNA sense strand
gacccacacuuuauagaca

SEQ ID NO: 1009801 - RNA, 19 nt, Homo sapiens
  misc_RNA (1)...(19): siRNA sense strand
ucacugacccacacuuuau

SEQ ID NO: 1009802 - RNA, 19 nt, Homo sapiens
  misc_RNA (1)...(19): siRNA sense strand
ggcaaaccagugcaaauuu

SEQ ID NO: 1009803 - RNA, 19 nt, Homo sapiens
  misc_RNA (1)...(19): siRNA sense strand
caacgaauggcguggcaaa

SEQ ID NO: 1009804 - RNA, 19 nt, Homo sapiens
  misc_RNA (1)...(19): siRNA sense strand
agagaaauguguaaagaac

SEQ ID NO: 1009805 - RNA, 19 nt, Homo sapiens
  misc_RNA (1)...(19): siRNA sense strand
gcaaauaugccuccuuacg

SEQ ID NO: 1009806 - RNA, 19 nt, Homo sapiens
  misc_RNA (1)...(19): siRNA sense strand
gagagcaccucagcagaca

SEQ ID NO: 1009807 - RNA, 19 nt, Homo sapiens
  misc_RNA (1)...(19): siRNA sense strand
gcauagaagcccacaacga

SEQ ID NO: 1009808 - RNA, 19 nt, Homo sapiens
  misc_RNA (1)...(19): siRNA sense strand
cgaauggcguggcaaaguc

SEQ ID NO: 1009809 - RNA, 19 nt, Homo sapiens
  misc_RNA (1)...(19): siRNA sense strand
uaaaugcuaugcagcuuuu

SEQ ID NO: 1009810 - RNA, 19 nt, Homo sapiens
  misc_RNA (1)...(19): siRNA sense strand
cagugcaaauuugaacaua

SEQ ID NO: 1009811 - RNA, 19 nt, Homo sapiens
  misc_RNA (1)...(19): siRNA sense strand
gguauaaugaaacccaauu

SEQ ID NO: 1009812 - RNA, 19 nt, Homo sapiens
  misc_RNA (1)...(19): siRNA sense strand
auagacaacugcauagaag

SEQ ID NO: 1009813 - RNA, 19 nt, Homo sapiens
  misc_RNA (1)...(19): siRNA sense strand
caaauaugccuccuuacgu

SEQ ID NO: 1009814 - RNA, 19 nt, Homo sapiens
  misc_RNA (1)...(19): siRNA sense strand
gcaguugcaauguguccua

SEQ ID NO: 1009815 - RNA, 19 nt, Homo sapiens
  misc_RNA (1)...(19): siRNA sense strand
cugguuagguggaauaaag

SEQ ID NO: 1009816 - RNA, 19 nt, Homo sapiens
  misc_RNA (1)...(19): siRNA sense strand
ccauuacggcuugguauaa

SEQ ID NO: 1009817 - RNA, 19 nt, Homo sapiens
  misc_RNA (1)...(19): siRNA sense strand
uauagacaacugcauagaa

SEQ ID NO: 1009818 - RNA, 19 nt, Homo sapiens
  misc_RNA (1)...(19): siRNA sense strand
cagcagacagccuuuaauc

SEQ ID NO: 1009819 - RNA, 19 nt, Homo sapiens
  misc_RNA (1)...(19): siRNA sense strand
agcuucaacugcaauauuu

SEQ ID NO: 1009820 - RNA, 19 nt, Homo sapiens
  misc_RNA (1)...(19): siRNA sense strand
gccauuacggcuugguaua

SEQ ID NO: 1009821 - RNA, 19 nt, Homo sapiens
  misc_RNA (1)...(19): siRNA sense strand
acaccaagacaugccauua

SEQ ID NO: 1009822 - RNA, 19 nt, Homo sapiens
  misc_RNA (1)...(19): siRNA sense strand
uagguggaauaaagucauu

SEQ ID NO: 1009823 - RNA, 19 nt, Homo sapiens
  misc_RNA (1)...(19): siRNA sense strand
cuaugcagcuuuugaauau

SEQ ID NO: 1009824 - RNA, 19 nt, Homo sapiens
  misc_RNA (1)...(19): siRNA sense strand
caucacugacccacacuuu

SEQ ID NO: 1009825 - RNA, 19 nt, Homo sapiens
  misc_RNA (1)...(19): siRNA sense strand
uauaaaugcuaugcagcuu

SEQ ID NO: 1009826 - RNA, 19 nt, Homo sapiens
  misc_RNA (1)...(19): siRNA sense strand
cagcuuagguuuucuucuu

SEQ ID NO: 1009827 - RNA, 19 nt, Homo sapiens
  misc_RNA (1)...(19): siRNA sense strand
cagacagccuuuaauccau

SEQ ID NO: 1009828 - RNA, 19 nt, Homo sapiens
  misc_RNA (1)...(19): siRNA sense strand
uuaugucgguugugcaguu

SEQ ID NO: 1009829 - RNA, 19 nt, Homo sapiens
  misc_RNA (1)...(19): siRNA sense strand
auaaagucauucacaccaa

SEQ ID NO: 1009830 - RNA, 19 nt, Homo sapiens
  misc_RNA (1)...(19): siRNA sense strand
uagaagcccacaacgaaug

SEQ ID NO: 1009831 - RNA, 19 nt, Homo sapiens
  misc_RNA (1)...(19): siRNA sense strand
caaaagaagagaaaugugu

SEQ ID NO: 1009832 - RNA, 19 nt, Homo sapiens
  misc_RNA (1)...(19): siRNA sense strand
gaauggcguggcaaaguca

SEQ ID NO: 1009833 - RNA, 19 nt, Homo sapiens
  misc_RNA (1)...(19): siRNA sense strand
uggccauuauacacaguua

SEQ ID NO: 1009834 - RNA, 19 nt, Homo sapiens
  misc_RNA (1)...(19): siRNA sense strand
ugauuugggauaaagguuu

SEQ ID NO: 1009835 - RNA, 19 nt, Homo sapiens
  misc_RNA (1)...(19): siRNA sense strand
uggagaaaauaucugguua

SEQ ID NO: 1009836 - RNA, 19 nt, Homo sapiens
  misc_RNA (1)...(19): siRNA sense strand
cggccgacaugaaauacau

SEQ ID NO: 1009837 - RNA, 19 nt, Homo sapiens
  misc_RNA (1)...(19): siRNA sense strand
cuuuauagacaacugcaua

SEQ ID NO: 1009838 - RNA, 19 nt, Homo sapiens
  misc_RNA (1)...(19): siRNA sense strand
uuuaauccauucagcuuag

SEQ ID NO: 1009839 - RNA, 19 nt, Homo sapiens
  misc_RNA (1)...(19): siRNA sense strand
uguaaagaaccucugcaaa

SEQ ID NO: 1009840 - RNA, 19 nt, Homo sapiens
  misc_RNA (1)...(19): siRNA sense strand
uuauggaucuugggucugu

SEQ ID NO: 1009841 - RNA, 19 nt, Homo sapiens
  misc_RNA (1)...(19): siRNA sense strand
gcuaugcagcuuuugaaua

SEQ ID NO: 1009842 - RNA, 19 nt, Homo sapiens
  misc_RNA (1)...(19): siRNA sense strand
ggaucuugggucuguguuu

SEQ ID NO: 1009843 - RNA, 19 nt, Homo sapiens
  misc_RNA (1)...(19): siRNA sense strand
uaucugguuagguggaaua

SEQ ID NO: 1009844 - RNA, 19 nt, Homo sapiens
  misc_RNA (1)...(19): siRNA sense strand
gacagccuuuaauccauuc

SEQ ID NO: 1009845 - RNA, 19 nt, Homo sapiens
  misc_RNA (1)...(19): siRNA sense strand
ugcaauguguccuaaccuu

SEQ ID NO: 1009846 - RNA, 19 nt, Homo sapiens
  misc_RNA (1)...(19): siRNA sense strand
caguugcaauguguccuaa

SEQ ID NO: 1009847 - RNA, 19 nt, Homo sapiens
  misc_RNA (1)...(19): siRNA sense strand
gagaaaauaucugguuagg

SEQ ID NO: 1009848 - RNA, 19 nt, Homo sapiens
  misc_RNA (1)...(19): siRNA sense strand
agaaauguguaaagaaccu

SEQ ID NO: 1009849 - RNA, 19 nt, Homo sapiens
  misc_RNA (1)...(19): siRNA sense strand
gccacuacaucuuccaaaa

SEQ ID NO: 1009850 - RNA, 19 nt, Homo sapiens
  misc_RNA (1)...(19): siRNA sense strand
uuacggcuugguauaauga

SEQ ID NO: 1009851 - RNA, 19 nt, Homo sapiens
  misc_RNA (1)...(19): siRNA sense strand
aaaccagugcaaauuugaa

SEQ ID NO: 1009852 - RNA, 19 nt, Homo sapiens
  misc_RNA (1)...(19): siRNA sense strand
gggagcuucaacugcaaua

SEQ ID NO: 1009853 - RNA, 19 nt, Homo sapiens
  misc_RNA (1)...(19): siRNA sense strand
uacaugauuugggauaaag

SEQ ID NO: 1009854 - RNA, 19 nt, Homo sapiens
  misc_RNA (1)...(19): siRNA sense strand
cacugacccacacuuuaua

SEQ ID NO: 1009855 - RNA, 19 nt, Homo sapiens
  misc_RNA (1)...(19): siRNA sense strand
guguaaagaaccucugcaa

SEQ ID NO: 1009856 - RNA, 19 nt, Homo sapiens
  misc_RNA (1)...(19): siRNA sense strand
agaagagaaauguguaaag

SEQ ID NO: 1009857 - RNA, 19 nt, Homo sapiens
  misc_RNA (1)...(19): siRNA sense strand
uuacguaagaggagaaucu

SEQ ID NO: 1009858 - RNA, 19 nt, Homo sapiens
  misc_RNA (1)...(19): siRNA sense strand
ggagguagcugaacagaug

SEQ ID NO: 1009859 - RNA, 19 nt, Homo sapiens
  misc_RNA (1)...(19): siRNA sense strand
aaagagagcugcuguggaa

SEQ ID NO: 1009860 - RNA, 19 nt, Homo sapiens
  misc_RNA (1)...(19): siRNA sense strand
gaaagaagcagcagaaaca

SEQ ID NO: 1009861 - RNA, 19 nt, Homo sapiens
  misc_RNA (1)...(19): siRNA sense strand
gaaagaagagaauagauga

SEQ ID NO: 1009862 - RNA, 19 nt, Homo sapiens
  misc_RNA (1)...(19): siRNA sense strand
caaauagccuggaugauuc

SEQ ID NO: 1009863 - RNA, 19 nt, Homo sapiens
  misc_RNA (1)...(19): siRNA sense strand
gcgaagaucuuggcugaaa

SEQ ID NO: 1009864 - RNA, 19 nt, Homo sapiens
  misc_RNA (1)...(19): siRNA sense strand
ggagagagaggaauugaaa

SEQ ID NO: 1009865 - RNA, 19 nt, Homo sapiens
  misc_RNA (1)...(19): siRNA sense strand
uaacaguccuggccaagaa

SEQ ID NO: 1009866 - RNA, 19 nt, Homo sapiens
  misc_RNA (1)...(19): siRNA sense strand
ugacaaacuuucaacauca

SEQ ID NO: 1009867 - RNA, 19 nt, Homo sapiens
  misc_RNA (1)...(19): siRNA sense strand
ucaaauagccuggaugauu

SEQ ID NO: 1009868 - RNA, 19 nt, Homo sapiens
  misc_RNA (1)...(19): siRNA sense strand
gagaagagcaacaaggaaa

SEQ ID NO: 1009869 - RNA, 19 nt, Homo sapiens
  misc_RNA (1)...(19): siRNA sense strand
gaaaucaaauagccuggau

SEQ ID NO: 1009870 - RNA, 19 nt, Homo sapiens
  misc_RNA (1)...(19): siRNA sense strand
gagaaagccaugauugaaa

SEQ ID NO: 1009871 - RNA, 19 nt, Homo sapiens
  misc_RNA (1)...(19): siRNA sense strand
gcagaaagaagcagcagaa

SEQ ID NO: 1009872 - RNA, 19 nt, Homo sapiens
  misc_RNA (1)...(19): siRNA sense strand
gagauuggccaaagaaaga

SEQ ID NO: 1009873 - RNA, 19 nt, Homo sapiens
  misc_RNA (1)...(19): siRNA sense strand
cccaagagauccagugaaa

SEQ ID NO: 1009874 - RNA, 19 nt, Homo sapiens
  misc_RNA (1)...(19): siRNA sense strand
gagcuguuguugaaagaaa

SEQ ID NO: 1009875 - RNA, 19 nt, Homo sapiens
  misc_RNA (1)...(19): siRNA sense strand
ggaaagcggagaaagagaa

SEQ ID NO: 1009876 - RNA, 19 nt, Homo sapiens
  misc_RNA (1)...(19): siRNA sense strand
gaagagaauagaugaaauc

SEQ ID NO: 1009877 - RNA, 19 nt, Homo sapiens
  misc_RNA (1)...(19): siRNA sense strand
ccaagaaacuccucucaac

SEQ ID NO: 1009878 - RNA, 19 nt, Homo sapiens
  misc_RNA (1)...(19): siRNA sense strand
caaagaaagacgagaagaa

SEQ ID NO: 1009879 - RNA, 19 nt, Homo sapiens
  misc_RNA (1)...(19): siRNA sense strand
gagcugcuguggaagagaa

SEQ ID NO: 1009880 - RNA, 19 nt, Homo sapiens
  misc_RNA (1)...(19): siRNA sense strand
caagagaaagccaugauug

SEQ ID NO: 1009881 - RNA, 19 nt, Homo sapiens
  misc_RNA (1)...(19): siRNA sense strand
ccaugucuguccucguuua

SEQ ID NO: 1009882 - RNA, 19 nt, Homo sapiens
  misc_RNA (1)...(19): siRNA sense strand
aggaggagcuguuguugaa

SEQ ID NO: 1009883 - RNA, 19 nt, Homo sapiens
  misc_RNA (1)...(19): siRNA sense strand
gagaaggaagaacaagaua

SEQ ID NO: 1009884 - RNA, 19 nt, Homo sapiens
  misc_RNA (1)...(19): siRNA sense strand
aagauaggcuggagagaga

SEQ ID NO: 1009885 - RNA, 19 nt, Homo sapiens
  misc_RNA (1)...(19): siRNA sense strand
aaagaaagacgagaagaaa

SEQ ID NO: 1009886 - RNA, 19 nt, Homo sapiens
  misc_RNA (1)...(19): siRNA sense strand
ggagagaaagaagagaaua

SEQ ID NO: 1009887 - RNA, 19 nt, Homo sapiens
  misc_RNA (1)...(19): siRNA sense strand
gugacaaacuuucaacauc

SEQ ID NO: 1009888 - RNA, 19 nt, Homo sapiens
  misc_RNA (1)...(19): siRNA sense strand
gcagagauuggccaaagaa

SEQ ID NO: 1009889 - RNA, 19 nt, Homo sapiens
  misc_RNA (1)...(19): siRNA sense strand
ggaaguuaaugguguggau

SEQ ID NO: 1009890 - RNA, 19 nt, Homo sapiens
  misc_RNA (1)...(19): siRNA sense strand
gacaaacuuucaacaucaa

SEQ ID NO: 1009891 - RNA, 19 nt, Homo sapiens
  misc_RNA (1)...(19): siRNA sense strand
gagcaccacuggccauugg

SEQ ID NO: 1009892 - RNA, 19 nt, Homo sapiens
  misc_RNA (1)...(19): siRNA sense strand
ggaugugaguccuguuuca

SEQ ID NO: 1009893 - RNA, 19 nt, Homo sapiens
  misc_RNA (1)...(19): siRNA sense strand
gaggagcuguuguugaaag

SEQ ID NO: 1009894 - RNA, 19 nt, Homo sapiens
  misc_RNA (1)...(19): siRNA sense strand
ggagaaggaagaacaagau

SEQ ID NO: 1009895 - RNA, 19 nt, Homo sapiens
  misc_RNA (1)...(19): siRNA sense strand
gagaggaagcccuagagaa

SEQ ID NO: 1009896 - RNA, 19 nt, Homo sapiens
  misc_RNA (1)...(19): siRNA sense strand
gaaaucaugaagagaacaa

SEQ ID NO: 1009897 - RNA, 19 nt, Homo sapiens
  misc_RNA (1)...(19): siRNA sense strand
caggagauguugggaaaga

SEQ ID NO: 1009898 - RNA, 19 nt, Homo sapiens
  misc_RNA (1)...(19): siRNA sense strand
gaaagaagaccccaaagug

SEQ ID NO: 1009899 - RNA, 19 nt, Homo sapiens
  misc_RNA (1)...(19): siRNA sense strand
gaaggaagaacaagauagg

SEQ ID NO: 1009900 - RNA, 19 nt, Homo sapiens
  misc_RNA (1)...(19): siRNA sense strand
aaacuccucucaacaccuu

SEQ ID NO: 1009901 - RNA, 19 nt, Homo sapiens
  misc_RNA (1)...(19): siRNA sense strand
ggaccucucagcccaacua

SEQ ID NO: 1009902 - RNA, 19 nt, Homo sapiens
  misc_RNA (1)...(19): siRNA sense strand
gagaggaauugaaaagaaa

SEQ ID NO: 1009903 - RNA, 19 nt, Homo sapiens
  misc_RNA (1)...(19): siRNA sense strand
cagauuaugcugcagauug

SEQ ID NO: 1009904 - RNA, 19 nt, Homo sapiens
  misc_RNA (1)...(19): siRNA sense strand
ugaauaaacgccugucuuc

SEQ ID NO: 1009905 - RNA, 19 nt, Homo sapiens
  misc_RNA (1)...(19): siRNA sense strand
agaaagacgagaagaaaga

SEQ ID NO: 1009906 - RNA, 19 nt, Homo sapiens
  misc_RNA (1)...(19): siRNA sense strand
agauuaugcugcagauuga

SEQ ID NO: 1009907 - RNA, 19 nt, Homo sapiens
  misc_RNA (1)...(19): siRNA sense strand
aaagcuacaucuacgucua

SEQ ID NO: 1009908 - RNA, 19 nt, Homo sapiens
  misc_RNA (1)...(19): siRNA sense strand
gaaacauugagaagaagaa

SEQ ID NO: 1009909 - RNA, 19 nt, Homo sapiens
  misc_RNA (1)...(19): siRNA sense strand
gccaagacaugcccaagag

SEQ ID NO: 1009910 - RNA, 19 nt, Homo sapiens
  misc_RNA (1)...(19): siRNA sense strand
gaagaagaaagcuacaucu

SEQ ID NO: 1009911 - RNA, 19 nt, Homo sapiens
  misc_RNA (1)...(19): siRNA sense strand
cagaugagaggcagagauu

SEQ ID NO: 1009912 - RNA, 19 nt, Homo sapiens
  misc_RNA (1)...(19): siRNA sense strand
gaagaaagaagaccccaaa

SEQ ID NO: 1009913 - RNA, 19 nt, Homo sapiens
  misc_RNA (1)...(19): siRNA sense strand
aaaggaagcggcaggaaga

SEQ ID NO: 1009914 - RNA, 19 nt, Homo sapiens
  misc_RNA (1)...(19): siRNA sense strand
caacagauccuggagaaac

SEQ ID NO: 1009915 - RNA, 19 nt, Homo sapiens
  misc_RNA (1)...(19): siRNA sense strand
aggagagacuggagagaaa

SEQ ID NO: 1009916 - RNA, 19 nt, Homo sapiens
  misc_RNA (1)...(19): siRNA sense strand
gaaagcaggaagaagaaag

SEQ ID NO: 1009917 - RNA, 19 nt, Homo sapiens
  misc_RNA (1)...(19): siRNA sense strand
gagagaaagaagagaauag

SEQ ID NO: 1009918 - RNA, 19 nt, Homo sapiens
  misc_RNA (1)...(19): siRNA sense strand
agaaagaagagaauagaug

SEQ ID NO: 1009919 - RNA, 19 nt, Homo sapiens
  misc_RNA (1)...(19): siRNA sense strand
gaauaaacgccugucuuca

SEQ ID NO: 1009920 - RNA, 19 nt, Homo sapiens
  misc_RNA (1)...(19): siRNA sense strand
caagaaacuccucucaaca

SEQ ID NO: 1009921 - RNA, 19 nt, Homo sapiens
  misc_RNA (1)...(19): siRNA sense strand
gaagaaguucagucuaugg

SEQ ID NO: 1009922 - RNA, 19 nt, Homo sapiens
  misc_RNA (1)...(19): siRNA sense strand
gaaagaaaagcaagaacaa

SEQ ID NO: 1009923 - RNA, 19 nt, Homo sapiens
  misc_RNA (1)...(19): siRNA sense strand
ugcaggagauguugggaaa

SEQ ID NO: 1009924 - RNA, 19 nt, Homo sapiens
  misc_RNA (1)...(19): siRNA sense strand
cucgaaacauugagaagaa

SEQ ID NO: 1009925 - RNA, 19 nt, Homo sapiens
  misc_RNA (1)...(19): siRNA sense strand
gaggaggagcuguuguuga

SEQ ID NO: 1009926 - RNA, 19 nt, Homo sapiens
  misc_RNA (1)...(19): siRNA sense strand
ccgcuuaccugcccuuucu

SEQ ID NO: 1009927 - RNA, 19 nt, Homo sapiens
  misc_RNA (1)...(19): siRNA sense strand
gaccgaguauuccaugucu

SEQ ID NO: 1009928 - RNA, 19 nt, Homo sapiens
  misc_RNA (1)...(19): siRNA sense strand
ggagaggaagcccuagaga

SEQ ID NO: 1009929 - RNA, 19 nt, Homo sapiens
  misc_RNA (1)...(19): siRNA sense strand
uauccacagucuccaaaga

SEQ ID NO: 1009930 - RNA, 19 nt, Homo sapiens
  misc_RNA (1)...(19): siRNA sense strand
uauccaagacagcuacuaa

SEQ ID NO: 1009931 - RNA, 19 nt, Homo sapiens
  misc_RNA (1)...(19): siRNA sense strand
gaagagaaaaggaaacaga

SEQ ID NO: 1009932 - RNA, 19 nt, Homo sapiens
  misc_RNA (1)...(19): siRNA sense strand
gaugagaggcagagauugg

SEQ ID NO: 1009933 - RNA, 19 nt, Homo sapiens
  misc_RNA (1)...(19): siRNA sense strand
aaucaaauagccuggauga

SEQ ID NO: 1009934 - RNA, 19 nt, Homo sapiens
  misc_RNA (1)...(19): siRNA sense strand
gaaaggcagaggaggaaag

SEQ ID NO: 1009935 - RNA, 19 nt, Homo sapiens
  misc_RNA (1)...(19): siRNA sense strand
ggcagagauuggccaaaga

SEQ ID NO: 1009936 - RNA, 19 nt, Homo sapiens
  misc_RNA (1)...(19): siRNA sense strand
auaaacgccugucuucauc

SEQ ID NO: 1009937 - RNA, 19 nt, Homo sapiens
  misc_RNA (1)...(19): siRNA sense strand
gagaaagaagagaauagau

SEQ ID NO: 1009938 - RNA, 19 nt, Homo sapiens
  misc_RNA (1)...(19): siRNA sense strand
agaaagccaugauugaaaa

SEQ ID NO: 1009939 - RNA, 19 nt, Homo sapiens
  misc_RNA (1)...(19): siRNA sense strand
aagagaaagccaugauuga

SEQ ID NO: 1009940 - RNA, 19 nt, Homo sapiens
  misc_RNA (1)...(19): siRNA sense strand
gaggaaagcggagaaagag

SEQ ID NO: 1009941 - RNA, 19 nt, Homo sapiens
  misc_RNA (1)...(19): siRNA sense strand
ugaugcaugugacaaacuu

SEQ ID NO: 1009942 - RNA, 19 nt, Homo sapiens
  misc_RNA (1)...(19): siRNA sense strand
cccaagacauuuucucuaa

SEQ ID NO: 1009943 - RNA, 19 nt, Homo sapiens
  misc_RNA (1)...(19): siRNA sense strand
agagaaagccaugauugaa

SEQ ID NO: 1009944 - RNA, 19 nt, Homo sapiens
  misc_RNA (1)...(19): siRNA sense strand
gaaaagcaagaacaagaaa

SEQ ID NO: 1009945 - RNA, 19 nt, Homo sapiens
  misc_RNA (1)...(19): siRNA sense strand
caggagaggcugcgaagau

SEQ ID NO: 1009946 - RNA, 19 nt, Homo sapiens
  misc_RNA (1)...(19): siRNA sense strand
ccacagcaggcaccacuga

SEQ ID NO: 1009947 - RNA, 19 nt, Homo sapiens
  misc_RNA (1)...(19): siRNA sense strand
aagaagaaagcuacaucua

SEQ ID NO: 1009948 - RNA, 19 nt, Homo sapiens
  misc_RNA (1)...(19): siRNA sense strand
gcaacgaacagcaacuucu

SEQ ID NO: 1009949 - RNA, 19 nt, Homo sapiens
  misc_RNA (1)...(19): siRNA sense strand
cuccacaagugaagaaaga

SEQ ID NO: 1009950 - RNA, 19 nt, Homo sapiens
  misc_RNA (1)...(19): siRNA sense strand
cgagagagaacagauuaug

SEQ ID NO: 1009951 - RNA, 19 nt, Homo sapiens
  misc_RNA (1)...(19): siRNA sense strand
gcaggaagaggaaaagaaa

SEQ ID NO: 1009952 - RNA, 19 nt, Homo sapiens
  misc_RNA (1)...(19): siRNA sense strand
gaaagagaagagcaacaag

SEQ ID NO: 1009953 - RNA, 19 nt, Homo sapiens
  misc_RNA (1)...(19): siRNA sense strand
ccucuuaacccuucuuaca

SEQ ID NO: 1009954 - RNA, 19 nt, Homo sapiens
  misc_RNA (1)...(19): siRNA sense strand
caagagauccagugaaaau

SEQ ID NO: 1009955 - RNA, 19 nt, Homo sapiens
  misc_RNA (1)...(19): siRNA sense strand
agaaagagaagagcaacaa

SEQ ID NO: 1009956 - RNA, 19 nt, Homo sapiens
  misc_RNA (1)...(19): siRNA sense strand
ggccaaagaaagacgagaa

SEQ ID NO: 1009957 - RNA, 19 nt, Homo sapiens
  misc_RNA (1)...(19): siRNA sense strand
gguaaugcccgagcacuuc

SEQ ID NO: 1009958 - RNA, 19 nt, Homo sapiens
  misc_RNA (1)...(19): siRNA sense strand
gaagaagagucuacaagaa

SEQ ID NO: 1009959 - RNA, 19 nt, Homo sapiens
  misc_RNA (1)...(19): siRNA sense strand
uagaggaacucacauuuaa

SEQ ID NO: 1009960 - RNA, 19 nt, Homo sapiens
  misc_RNA (1)...(19): siRNA sense strand
caacugauaucucugaugu

SEQ ID NO: 1009961 - RNA, 19 nt, Homo sapiens
  misc_RNA (1)...(19): siRNA sense strand
ggaggaagacgcauaauga

SEQ ID NO: 1009962 - RNA, 19 nt, Homo sapiens
  misc_RNA (1)...(19): siRNA sense strand
gauccgggcucucaucaaa

SEQ ID NO: 1009963 - RNA, 19 nt, Homo sapiens
  misc_RNA (1)...(19): siRNA sense strand
ugagcaagcugacuauaaa

SEQ ID NO: 1009964 - RNA, 19 nt, Homo sapiens
  misc_RNA (1)...(19): siRNA sense strand
ccacaagguuccagaaaga

SEQ ID NO: 1009965 - RNA, 19 nt, Homo sapiens
  misc_RNA (1)...(19): siRNA sense strand
ucaaacggcugaaggagaa

SEQ ID NO: 1009966 - RNA, 19 nt, Homo sapiens
  misc_RNA (1)...(19): siRNA sense strand
ccagaagaguuaacuauuc

SEQ ID NO: 1009967 - RNA, 19 nt, Homo sapiens
  misc_RNA (1)...(19): siRNA sense strand
caagaaaccugagaucuac

SEQ ID NO: 1009968 - RNA, 19 nt, Homo sapiens
  misc_RNA (1)...(19): siRNA sense strand
caaaguccaucaccaaagu

SEQ ID NO: 1009969 - RNA, 19 nt, Homo sapiens
  misc_RNA (1)...(19): siRNA sense strand
gagaagauguugaggaaaa

SEQ ID NO: 1009970 - RNA, 19 nt, Homo sapiens
  misc_RNA (1)...(19): siRNA sense strand
uugcugaaauugccaaaua

SEQ ID NO: 1009971 - RNA, 19 nt, Homo sapiens
  misc_RNA (1)...(19): siRNA sense strand
gcagcaacaugguccaaga

SEQ ID NO: 1009972 - RNA, 19 nt, Homo sapiens
  misc_RNA (1)...(19): siRNA sense strand
cagaagaguuaacuauuca

SEQ ID NO: 1009973 - RNA, 19 nt, Homo sapiens
  misc_RNA (1)...(19): siRNA sense strand
ucaagaaaccugagaucua

SEQ ID NO: 1009974 - RNA, 19 nt, Homo sapiens
  misc_RNA (1)...(19): siRNA sense strand
ugagaacccagaagaguua

SEQ ID NO: 1009975 - RNA, 19 nt, Homo sapiens
  misc_RNA (1)...(19): siRNA sense strand
gcaacaugguccaagaguu

SEQ ID NO: 1009976 - RNA, 19 nt, Homo sapiens
  misc_RNA (1)...(19): siRNA sense strand
gggcugcugucucuaaaga

SEQ ID NO: 1009977 - RNA, 19 nt, Homo sapiens
  misc_RNA (1)...(19): siRNA sense strand
ucaaagagguacaucaaac

SEQ ID NO: 1009978 - RNA, 19 nt, Homo sapiens
  misc_RNA (1)...(19): siRNA sense strand
cuagaggaacucacauuua

SEQ ID NO: 1009979 - RNA, 19 nt, Homo sapiens
  misc_RNA (1)...(19): siRNA sense strand
guacugcuacuucaagaaa

SEQ ID NO: 1009980 - RNA, 19 nt, Homo sapiens
  misc_RNA (1)...(19): siRNA sense strand
cagagaaagugaaguacga

SEQ ID NO: 1009981 - RNA, 19 nt, Homo sapiens
  misc_RNA (1)...(19): siRNA sense strand
caacaugguccaagaguuc

SEQ ID NO: 1009982 - RNA, 19 nt, Homo sapiens
  misc_RNA (1)...(19): siRNA sense strand
uacagacacugaucaagaa

SEQ ID NO: 1009983 - RNA, 19 nt, Homo sapiens
  misc_RNA (1)...(19): siRNA sense strand
ccaaugagcaagcugacua

SEQ ID NO: 1009984 - RNA, 19 nt, Homo sapiens
  misc_RNA (1)...(19): siRNA sense strand
gcaccuaagaccaauguga

SEQ ID NO: 1009985 - RNA, 19 nt, Homo sapiens
  misc_RNA (1)...(19): siRNA sense strand
gcuaccagaugccaaagga

SEQ ID NO: 1009986 - RNA, 19 nt, Homo sapiens
  misc_RNA (1)...(19): siRNA sense strand
gcuagaggaacucacauuu

SEQ ID NO: 1009987 - RNA, 19 nt, Homo sapiens
  misc_RNA (1)...(19): siRNA sense strand
cugagaagauguugaggaa

SEQ ID NO: 1009988 - RNA, 19 nt, Homo sapiens
  misc_RNA (1)...(19): siRNA sense strand
ggcacgaccuguaugauca

SEQ ID NO: 1009989 - RNA, 19 nt, Homo sapiens
  misc_RNA (1)...(19): siRNA sense strand
gcacuggcacgaccuguau

SEQ ID NO: 1009990 - RNA, 19 nt, Homo sapiens
  misc_RNA (1)...(19): siRNA sense strand
aggaagcagucaucucuuu

SEQ ID NO: 1009991 - RNA, 19 nt, Homo sapiens
  misc_RNA (1)...(19): siRNA sense strand
acgcaucagugacaaguuu

SEQ ID NO: 1009992 - RNA, 19 nt, Homo sapiens
  misc_RNA (1)...(19): siRNA sense strand
cuacagacacugaucaaga

SEQ ID NO: 1009993 - RNA, 19 nt, Homo sapiens
  misc_RNA (1)...(19): siRNA sense strand
gagucuacaagaaacauua

SEQ ID NO: 1009994 - RNA, 19 nt, Homo sapiens
  misc_RNA (1)...(19): siRNA sense strand
aagaagagucuacaagaaa

SEQ ID NO: 1009995 - RNA, 19 nt, Homo sapiens
  misc_RNA (1)...(19): siRNA sense strand
ugaagaagagucuacaaga

SEQ ID NO: 1009996 - RNA, 19 nt, Homo sapiens
  misc_RNA (1)...(19): siRNA sense strand
ggacuuacuagaugcagaa

SEQ ID NO: 1009997 - RNA, 19 nt, Homo sapiens
  misc_RNA (1)...(19): siRNA sense strand
gaggaagacgcauaaugaa

SEQ ID NO: 1009998 - RNA, 19 nt, Homo sapiens
  misc_RNA (1)...(19): siRNA sense strand
ucaagaagucguccaguga

SEQ ID NO: 1009999 - RNA, 19 nt, Homo sapiens
  misc_RNA (1)...(19): siRNA sense strand
caaaguaggccaaaagaaa

SEQ ID NO: 1010000 - RNA, 19 nt, Homo sapiens
  misc_RNA (1)...(19): siRNA sense strand
gagaggaugagcaguucua

SEQ ID NO: 1010001 - RNA, 19 nt, Homo sapiens
  misc_RNA (1)...(19): siRNA sense strand
ggaaagggaggcugagaag

SEQ ID NO: 1010002 - RNA, 19 nt, Homo sapiens
  misc_RNA (1)...(19): siRNA sense strand
gauccgcaguccacaagug

SEQ ID NO: 1010003 - RNA, 19 nt, Homo sapiens
  misc_RNA (1)...(19): siRNA sense strand
ccauugggcuggaacagau

SEQ ID NO: 1010004 - RNA, 19 nt, Homo sapiens
  misc_RNA (1)...(19): siRNA sense strand
caucaaagagguacaucaa

SEQ ID NO: 1010005 - RNA, 19 nt, Homo sapiens
  misc_RNA (1)...(19): siRNA sense strand
ccagagaggaugagcaguu

SEQ ID NO: 1010006 - RNA, 19 nt, Homo sapiens
  misc_RNA (1)...(19): siRNA sense strand
guacaucaaacccacauca

SEQ ID NO: 1010007 - RNA, 19 nt, Homo sapiens
  misc_RNA (1)...(19): siRNA sense strand
ggaagcagucaucucuuug

SEQ ID NO: 1010008 - RNA, 19 nt, Homo sapiens
  misc_RNA (1)...(19): siRNA sense strand
caagaagucguccagugaa

SEQ ID NO: 1010009 - RNA, 19 nt, Homo sapiens
  misc_RNA (1)...(19): siRNA sense strand
guccagagaaagugaagua

SEQ ID NO: 1010010 - RNA, 19 nt, Homo sapiens
  misc_RNA (1)...(19): siRNA sense strand
gggcuacgaauggcucuua

SEQ ID NO: 1010011 - RNA, 19 nt, Homo sapiens
  misc_RNA (1)...(19): siRNA sense strand
ggaggcagcauccgagcaa

SEQ ID NO: 1010012 - RNA, 19 nt, Homo sapiens
  misc_RNA (1)...(19): siRNA sense strand
gcaaaguccaucaccaaag

SEQ ID NO: 1010013 - RNA, 19 nt, Homo sapiens
  misc_RNA (1)...(19): siRNA sense strand
aaagggaggcugagaagau

SEQ ID NO: 1010014 - RNA, 19 nt, Homo sapiens
  misc_RNA (1)...(19): siRNA sense strand
ccugaaguggcaaagauua

SEQ ID NO: 1010015 - RNA, 19 nt, Homo sapiens
  misc_RNA (1)...(19): siRNA sense strand
agaguuaacuauucaagac

SEQ ID NO: 1010016 - RNA, 19 nt, Homo sapiens
  misc_RNA (1)...(19): siRNA sense strand
gaagaguuaacuauucaag

SEQ ID NO: 1010017 - RNA, 19 nt, Homo sapiens
  misc_RNA (1)...(19): siRNA sense strand
aggcagagcccacaagguu

SEQ ID NO: 1010018 - RNA, 19 nt, Homo sapiens
  misc_RNA (1)...(19): siRNA sense strand
cauccuggguugccugaau

SEQ ID NO: 1010019 - RNA, 19 nt, Homo sapiens
  misc_RNA (1)...(19): siRNA sense strand
cagagaggaugagcaguuc

SEQ ID NO: 1010020 - RNA, 19 nt, Homo sapiens
  misc_RNA (1)...(19): siRNA sense strand
gaaagggaggcugagaaga

SEQ ID NO: 1010021 - RNA, 19 nt, Homo sapiens
  misc_RNA (1)...(19): siRNA sense strand
ccaccaggcugugaagaag

SEQ ID NO: 1010022 - RNA, 19 nt, Homo sapiens
  misc_RNA (1)...(19): siRNA sense strand
caacugaugaacccagaug

SEQ ID NO: 1010023 - RNA, 19 nt, Homo sapiens
  misc_RNA (1)...(19): siRNA sense strand
ucaggaggaagacgcauaa

SEQ ID NO: 1010024 - RNA, 19 nt, Homo sapiens
  misc_RNA (1)...(19): siRNA sense strand
gauuaagggaacucacaaa

SEQ ID NO: 1010025 - RNA, 19 nt, Homo sapiens
  misc_RNA (1)...(19): siRNA sense strand
ccacuugcuccuggacuua

SEQ ID NO: 1010026 - RNA, 19 nt, Homo sapiens
  misc_RNA (1)...(19): siRNA sense strand
ccaggaagcagucaucucu

SEQ ID NO: 1010027 - RNA, 19 nt, Homo sapiens
  misc_RNA (1)...(19): siRNA sense strand
uagaccagcuguguucuuc

SEQ ID NO: 1010028 - RNA, 19 nt, Homo sapiens
  misc_RNA (1)...(19): siRNA sense strand
guacuacagacacugauca

SEQ ID NO: 1010029 - RNA, 19 nt, Homo sapiens
  misc_RNA (1)...(19): siRNA sense strand
gaagagucuacaagaaaca

SEQ ID NO: 1010030 - RNA, 19 nt, Homo sapiens
  misc_RNA (1)...(19): siRNA sense strand
gaagcagucaucucuuugg

SEQ ID NO: 1010031 - RNA, 19 nt, Homo sapiens
  misc_RNA (1)...(19): siRNA sense strand
gaccagcuguguucuucca

SEQ ID NO: 1010032 - RNA, 19 nt, Homo sapiens
  misc_RNA (1)...(19): siRNA sense strand
agacacugaucaagaaguc

SEQ ID NO: 1010033 - RNA, 19 nt, Homo sapiens
  misc_RNA (1)...(19): siRNA sense strand
gaccaaagaacucagaaaa

SEQ ID NO: 1010034 - RNA, 19 nt, Homo sapiens
  misc_RNA (1)...(19): siRNA sense strand
ugcugaaauugccaaauaa

SEQ ID NO: 1010035 - RNA, 19 nt, Homo sapiens
  misc_RNA (1)...(19): siRNA sense strand
agccaaggaucaagaaaca

SEQ ID NO: 1010036 - RNA, 19 nt, Homo sapiens
  misc_RNA (1)...(19): siRNA sense strand
caccuaagaccaaugugaa

SEQ ID NO: 1010037 - RNA, 19 nt, Homo sapiens
  misc_RNA (1)...(19): siRNA sense strand
guauaugaggcaccuaaga

SEQ ID NO: 1010038 - RNA, 19 nt, Homo sapiens
  misc_RNA (1)...(19): siRNA sense strand
agaagagucuacaagaaac

SEQ ID NO: 1010039 - RNA, 19 nt, Homo sapiens
  misc_RNA (1)...(19): siRNA sense strand
ggaugaaggcacuuaggau

SEQ ID NO: 1010040 - RNA, 19 nt, Homo sapiens
  misc_RNA (1)...(19): siRNA sense strand
gaugcgauccaggcccuua

SEQ ID NO: 1010041 - RNA, 19 nt, Homo sapiens
  misc_RNA (1)...(19): siRNA sense strand
gaaaaugagagaugacugu

SEQ ID NO: 1010042 - RNA, 19 nt, Homo sapiens
  misc_RNA (1)...(19): siRNA sense strand
gaagucguccagugaagca

SEQ ID NO: 1010043 - RNA, 19 nt, Homo sapiens
  misc_RNA (1)...(19): siRNA sense strand
gaugccaaaggaagaguuu

SEQ ID NO: 1010044 - RNA, 19 nt, Homo sapiens
  misc_RNA (1)...(19): siRNA sense strand
ugagagaugacuguaggua

SEQ ID NO: 1010045 - RNA, 19 nt, Homo sapiens
  misc_RNA (1)...(19): siRNA sense strand
gaaacauuaauccuuugug

SEQ ID NO: 1010046 - RNA, 19 nt, Homo sapiens
  misc_RNA (1)...(19): siRNA sense strand
gguggaggcacaacugaug

SEQ ID NO: 1010047 - RNA, 19 nt, Homo sapiens
  misc_RNA (1)...(19): siRNA sense strand
ggucaaaggauggagacuu

SEQ ID NO: 1010048 - RNA, 19 nt, Homo sapiens
  misc_RNA (1)...(19): siRNA sense strand
acaucaaacccacaucaaa

SEQ ID NO: 1010049 - RNA, 19 nt, Homo sapiens
  misc_RNA (1)...(19): siRNA sense strand
ccggguccuugcugaaauu

SEQ ID NO: 1010050 - RNA, 19 nt, Homo sapiens
  misc_RNA (1)...(19): siRNA sense strand
caagaccaaagaacucaga

SEQ ID NO: 1010051 - RNA, 19 nt, Homo sapiens
  misc_RNA (1)...(19): siRNA sense strand
gaacccuuccuugcuguga

SEQ ID NO: 1010052 - RNA, 19 nt, Homo sapiens
  misc_RNA (1)...(19): siRNA sense strand
ggcuacgaauggcucuuaa

SEQ ID NO: 1010053 - RNA, 19 nt, Homo sapiens
  misc_RNA (1)...(19): siRNA sense strand
gacaagaccaaagaacuca

SEQ ID NO: 1010054 - RNA, 19 nt, Homo sapiens
  misc_RNA (1)...(19): siRNA sense strand
caagaccauugggcuggaa

SEQ ID NO: 1010055 - RNA, 19 nt, Homo sapiens
  misc_RNA (1)...(19): siRNA sense strand
gcuccuggacuuacuagau

SEQ ID NO: 1010056 - RNA, 19 nt, Homo sapiens
  misc_RNA (1)...(19): siRNA sense strand
gaacuugguggaggcacaa

SEQ ID NO: 1010057 - RNA, 19 nt, Homo sapiens
  misc_RNA (1)...(19): siRNA sense strand
guugaagccuacgaugaug

SEQ ID NO: 1010058 - RNA, 19 nt, Homo sapiens
  misc_RNA (1)...(19): siRNA sense strand
gaugacaacuuuacuguuu

SEQ ID NO: 1010059 - RNA, 19 nt, Homo sapiens
  misc_RNA (1)...(19): siRNA sense strand
guaccgauauggccaauua

SEQ ID NO: 1010060 - RNA, 19 nt, Homo sapiens
  misc_RNA (1)...(19): siRNA sense strand
gacauaaaccugaguguua

SEQ ID NO: 1010061 - RNA, 19 nt, Homo sapiens
  misc_RNA (1)...(19): siRNA sense strand
ggacagggcugacaucaag

SEQ ID NO: 1010062 - RNA, 19 nt, Homo sapiens
  misc_RNA (1)...(19): siRNA sense strand
uaaccaagauguuucagaa

SEQ ID NO: 1010063 - RNA, 19 nt, Homo sapiens
  misc_RNA (1)...(19): siRNA sense strand
caacagacauaauauugug

SEQ ID NO: 1010064 - RNA, 19 nt, Homo sapiens
  misc_RNA (1)...(19): siRNA sense strand
gggcugacaucaagcagua

SEQ ID NO: 1010065 - RNA, 19 nt, Homo sapiens
  misc_RNA (1)...(19): siRNA sense strand
gaaaguggcaagcugguaa

SEQ ID NO: 1010066 - RNA, 19 nt, Homo sapiens
  misc_RNA (1)...(19): siRNA sense strand
gcaaaucacuggguucuac

SEQ ID NO: 1010067 - RNA, 19 nt, Homo sapiens
  misc_RNA (1)...(19): siRNA sense strand
aaaucuaccucucuuguuu

SEQ ID NO: 1010068 - RNA, 19 nt, Homo sapiens
  misc_RNA (1)...(19): siRNA sense strand
gaaagcuacucaacagaca

SEQ ID NO: 1010069 - RNA, 19 nt, Homo sapiens
  misc_RNA (1)...(19): siRNA sense strand
gcuugcagcuuacaucuga

SEQ ID NO: 1010070 - RNA, 19 nt, Homo sapiens
  misc_RNA (1)...(19): siRNA sense strand
uggaagaacugaugaagug

SEQ ID NO: 1010071 - RNA, 19 nt, Homo sapiens
  misc_RNA (1)...(19): siRNA sense strand
gcaaagaaagaagacauaa

SEQ ID NO: 1010072 - RNA, 19 nt, Homo sapiens
  misc_RNA (1)...(19): siRNA sense strand
cuacucaacagacauaaua

SEQ ID NO: 1010073 - RNA, 19 nt, Homo sapiens
  misc_RNA (1)...(19): siRNA sense strand
gacauaauauuguguuugg

SEQ ID NO: 1010074 - RNA, 19 nt, Homo sapiens
  misc_RNA (1)...(19): siRNA sense strand
guaaagcguuagcccagaa

SEQ ID NO: 1010075 - RNA, 19 nt, Homo sapiens
  misc_RNA (1)...(19): siRNA sense strand
ugaagugucagaucauaua

SEQ ID NO: 1010076 - RNA, 19 nt, Homo sapiens
  misc_RNA (1)...(19): siRNA sense strand
caagauguuucagaagauu

SEQ ID NO: 1010077 - RNA, 19 nt, Homo sapiens
  misc_RNA (1)...(19): siRNA sense strand
gaagauucaggauuugauu

SEQ ID NO: 1010078 - RNA, 19 nt, Homo sapiens
  misc_RNA (1)...(19): siRNA sense strand
gacccaaauugaucagauu

SEQ ID NO: 1010079 - RNA, 19 nt, Homo sapiens
  misc_RNA (1)...(19): siRNA sense strand
gaaaacaacgugucaaaau

SEQ ID NO: 1010080 - RNA, 19 nt, Homo sapiens
  misc_RNA (1)...(19): siRNA sense strand
acacauggacugaguuuga

SEQ ID NO: 1010081 - RNA, 19 nt, Homo sapiens
  misc_RNA (1)...(19): siRNA sense strand
uucagaagauucaggauuu

SEQ ID NO: 1010082 - RNA, 19 nt, Homo sapiens
  misc_RNA (1)...(19): siRNA sense strand
acaagaacgucaacagcaa

SEQ ID NO: 1010083 - RNA, 19 nt, Homo sapiens
  misc_RNA (1)...(19): siRNA sense strand
cuaccucucuuguuuggaa

SEQ ID NO: 1010084 - RNA, 19 nt, Homo sapiens
  misc_RNA (1)...(19): siRNA sense strand
gacaagcaguuugaagaga

SEQ ID NO: 1010085 - RNA, 19 nt, Homo sapiens
  misc_RNA (1)...(19): siRNA sense strand
gcacugcaaagaaagaaga

SEQ ID NO: 1010086 - RNA, 19 nt, Homo sapiens
  misc_RNA (1)...(19): siRNA sense strand
ucaagcagguaccgauaug

SEQ ID NO: 1010087 - RNA, 19 nt, Homo sapiens
  misc_RNA (1)...(19): siRNA sense strand
ggaagagacagaaaacaua

SEQ ID NO: 1010088 - RNA, 19 nt, Homo sapiens
  misc_RNA (1)...(19): siRNA sense strand
uuagaaagcuacucaacag

SEQ ID NO: 1010089 - RNA, 19 nt, Homo sapiens
  misc_RNA (1)...(19): siRNA sense strand
acucacagcccaucgauuu

SEQ ID NO: 1010090 - RNA, 19 nt, Homo sapiens
  misc_RNA (1)...(19): siRNA sense strand
ccaagauguuucagaagau

SEQ ID NO: 1010091 - RNA, 19 nt, Homo sapiens
  misc_RNA (1)...(19): siRNA sense strand
gugaaaaucuggaggaaga

SEQ ID NO: 1010092 - RNA, 19 nt, Homo sapiens
  misc_RNA (1)...(19): siRNA sense strand
gaagagacagaaaacauaa

SEQ ID NO: 1010093 - RNA, 19 nt, Homo sapiens
  misc_RNA (1)...(19): siRNA sense strand
gauuacacauggacugagu

SEQ ID NO: 1010094 - RNA, 19 nt, Homo sapiens
  misc_RNA (1)...(19): siRNA sense strand
acaauuagacuuucaagca

SEQ ID NO: 1010095 - RNA, 19 nt, Homo sapiens
  misc_RNA (1)...(19): siRNA sense strand
caaaucccaucuccucgau

SEQ ID NO: 1010096 - RNA, 19 nt, Homo sapiens
  misc_RNA (1)...(19): siRNA sense strand
gaccagaaaugugcagucu

SEQ ID NO: 1010097 - RNA, 19 nt, Homo sapiens
  misc_RNA (1)...(19): siRNA sense strand
aaacagccacagccucuuu

SEQ ID NO: 1010098 - RNA, 19 nt, Homo sapiens
  misc_RNA (1)...(19): siRNA sense strand
caacuuuacuguuuucaga

SEQ ID NO: 1010099 - RNA, 19 nt, Homo sapiens
  misc_RNA (1)...(19): siRNA sense strand
aaacaucccuguguaaagc

SEQ ID NO: 1010100 - RNA, 19 nt, Homo sapiens
  misc_RNA (1)...(19): siRNA sense strand
ggacaagcaguuugaagag

SEQ ID NO: 1010101 - RNA, 19 nt, Homo sapiens
  misc_RNA (1)...(19): siRNA sense strand
gguauacgauguggaaguc

SEQ ID NO: 1010102 - RNA, 19 nt, Homo sapiens
  misc_RNA (1)...(19): siRNA sense strand
caagcaguuugaagagaga

SEQ ID NO: 1010103 - RNA, 19 nt, Homo sapiens
  misc_RNA (1)...(19): siRNA sense strand
uaaagacgcccugguguuc

SEQ ID NO: 1010104 - RNA, 19 nt, Homo sapiens
  misc_RNA (1)...(19): siRNA sense strand
ggaaaguggcaagcuggua

SEQ ID NO: 1010105 - RNA, 19 nt, Homo sapiens
  misc_RNA (1)...(19): siRNA sense strand
accaagauguuucagaaga

SEQ ID NO: 1010106 - RNA, 19 nt, Homo sapiens
  misc_RNA (1)...(19): siRNA sense strand
uaacaucaccgagaagauc

SEQ ID NO: 1010107 - RNA, 19 nt, Homo sapiens
  misc_RNA (1)...(19): siRNA sense strand
ucagaagauucaggauuug

SEQ ID NO: 1010108 - RNA, 19 nt, Homo sapiens
  misc_RNA (1)...(19): siRNA sense strand
cagucugugucuauuauug

SEQ ID NO: 1010109 - RNA, 19 nt, Homo sapiens
  misc_RNA (1)...(19): siRNA sense strand
aaaccugaguguuagaaag

SEQ ID NO: 1010110 - RNA, 19 nt, Homo sapiens
  misc_RNA (1)...(19): siRNA sense strand
gcaaccucaucaccuggaa

SEQ ID NO: 1010111 - RNA, 19 nt, Homo sapiens
  misc_RNA (1)...(19): siRNA sense strand
gguucuaccugcagcugaa

SEQ ID NO: 1010112 - RNA, 19 nt, Homo sapiens
  misc_RNA (1)...(19): siRNA sense strand
acauaaaccugaguguuag

SEQ ID NO: 1010113 - RNA, 19 nt, Homo sapiens
  misc_RNA (1)...(19): siRNA sense strand
gugcagucugugucuauua

SEQ ID NO: 1010114 - RNA, 19 nt, Homo sapiens
  misc_RNA (1)...(19): siRNA sense strand
ugacccaaauugaucagau

SEQ ID NO: 1010115 - RNA, 19 nt, Homo sapiens
  misc_RNA (1)...(19): siRNA sense strand
ccgauauggccaauuaauu

SEQ ID NO: 1010116 - RNA, 19 nt, Homo sapiens
  misc_RNA (1)...(19): siRNA sense strand
cguggucaaugcugucuug

SEQ ID NO: 1010117 - RNA, 19 nt, Homo sapiens
  misc_RNA (1)...(19): siRNA sense strand
ucacagcccaucgauuuga

SEQ ID NO: 1010118 - RNA, 19 nt, Homo sapiens
  misc_RNA (1)...(19): siRNA sense strand
gcaguggacaagcaguuug

SEQ ID NO: 1010119 - RNA, 19 nt, Homo sapiens
  misc_RNA (1)...(19): siRNA sense strand
aagaacugaugaaguguca

SEQ ID NO: 1010120 - RNA, 19 nt, Homo sapiens
  misc_RNA (1)...(19): siRNA sense strand
ucuccucgauuaugugaug

SEQ ID NO: 1010121 - RNA, 19 nt, Homo sapiens
  misc_RNA (1)...(19): siRNA sense strand
ggacagcuugguauacgau

SEQ ID NO: 1010122 - RNA, 19 nt, Homo sapiens
  misc_RNA (1)...(19): siRNA sense strand
uauacgauguggaagucaa

SEQ ID NO: 1010123 - RNA, 19 nt, Homo sapiens
  misc_RNA (1)...(19): siRNA sense strand
gacaucaagcaguacauug

SEQ ID NO: 1010124 - RNA, 19 nt, Homo sapiens
  misc_RNA (1)...(19): siRNA sense strand
gauuaugugaugacaacuu

SEQ ID NO: 1010125 - RNA, 19 nt, Homo sapiens
  misc_RNA (1)...(19): siRNA sense strand
gcagccaucuucaaaaucu

SEQ ID NO: 1010126 - RNA, 19 nt, Homo sapiens
  misc_RNA (1)...(19): siRNA sense strand
guuagaaagcuacucaaca

SEQ ID NO: 1010127 - RNA, 19 nt, Homo sapiens
  misc_RNA (1)...(19): siRNA sense strand
ucgauuaugugaugacaac

SEQ ID NO: 1010128 - RNA, 19 nt, Homo sapiens
  misc_RNA (1)...(19): siRNA sense strand
aaauugagccuucuuuuga

SEQ ID NO: 1010129 - RNA, 19 nt, Homo sapiens
  misc_RNA (1)...(19): siRNA sense strand
uccgagagcuagagaugau

SEQ ID NO: 1010130 - RNA, 19 nt, Homo sapiens
  misc_RNA (1)...(19): siRNA sense strand
aaugcugucuugacccaaa

SEQ ID NO: 1010131 - RNA, 19 nt, Homo sapiens
  misc_RNA (1)...(19): siRNA sense strand
ugcagucugugucuauuau

SEQ ID NO: 1010132 - RNA, 19 nt, Homo sapiens
  misc_RNA (1)...(19): siRNA sense strand
cagcagccaucuucaaaau

SEQ ID NO: 1010133 - RNA, 19 nt, Homo sapiens
  misc_RNA (1)...(19): siRNA sense strand
aagcuacucaacagacaua

SEQ ID NO: 1010134 - RNA, 19 nt, Homo sapiens
  misc_RNA (1)...(19): siRNA sense strand
guaaccaagauguuucaga

SEQ ID NO: 1010135 - RNA, 19 nt, Homo sapiens
  misc_RNA (1)...(19): siRNA sense strand
uuacacauggacugaguuu

SEQ ID NO: 1010136 - RNA, 19 nt, Homo sapiens
  misc_RNA (1)...(19): siRNA sense strand
ugacaucaagcaguacauu

SEQ ID NO: 1010137 - RNA, 19 nt, Homo sapiens
  misc_RNA (1)...(19): siRNA sense strand
ucugaccacuucuaacauc

SEQ ID NO: 1010138 - RNA, 19 nt, Homo sapiens
  misc_RNA (1)...(19): siRNA sense strand
uucaggauuugauugauga

SEQ ID NO: 1010139 - RNA, 19 nt, Homo sapiens
  misc_RNA (1)...(19): siRNA sense strand
gccacagccucuuuucuaa

SEQ ID NO: 1010140 - RNA, 19 nt, Homo sapiens
  misc_RNA (1)...(19): siRNA sense strand
cucaacagacauaauauug

SEQ ID NO: 1010141 - RNA, 19 nt, Homo sapiens
  misc_RNA (1)...(19): siRNA sense strand
uggacaagcaguuugaaga

SEQ ID NO: 1010142 - RNA, 19 nt, Homo sapiens
  misc_RNA (1)...(19): siRNA sense strand
agacauaaaccugaguguu

SEQ ID NO: 1010143 - RNA, 19 nt, Homo sapiens
  misc_RNA (1)...(19): siRNA sense strand
uugaugagguggagagucu

SEQ ID NO: 1010144 - RNA, 19 nt, Homo sapiens
  misc_RNA (1)...(19): siRNA sense strand
ugcaaagaaagaagacaua

SEQ ID NO: 1010145 - RNA, 19 nt, Homo sapiens
  misc_RNA (1)...(19): siRNA sense strand
gugaugacaacuuuacugu

SEQ ID NO: 1010146 - RNA, 19 nt, Homo sapiens
  misc_RNA (1)...(19): siRNA sense strand
gauucaggauuugauugau

SEQ ID NO: 1010147 - RNA, 19 nt, Homo sapiens
  misc_RNA (1)...(19): siRNA sense strand
cgagagcuagagaugauug

SEQ ID NO: 1010148 - RNA, 19 nt, Homo sapiens
  misc_RNA (1)...(19): siRNA sense strand
ugaauuccaugggcuuugg

SEQ ID NO: 1010149 - RNA, 19 nt, Homo sapiens
  misc_RNA (1)...(19): siRNA sense strand
gcagucugugucuauuauu

SEQ ID NO: 1010150 - RNA, 19 nt, Homo sapiens
  misc_RNA (1)...(19): siRNA sense strand
cagaagauucaggauuuga

SEQ ID NO: 1010151 - RNA, 19 nt, Homo sapiens
  misc_RNA (1)...(19): siRNA sense strand
cacauggacugaguuugau

SEQ ID NO: 1010152 - RNA, 19 nt, Homo sapiens
  misc_RNA (1)...(19): siRNA sense strand
gggacagcuugguauacga

SEQ ID NO: 1010153 - RNA, 19 nt, Homo sapiens
  misc_RNA (1)...(19): siRNA sense strand
gcguuagcccagaaauuga

SEQ ID NO: 1010154 - RNA, 19 nt, Homo sapiens
  misc_RNA (1)...(19): siRNA sense strand
aaacaacgugucaaaauug

SEQ ID NO: 1010155 - RNA, 19 nt, Homo sapiens
  misc_RNA (1)...(19): siRNA sense strand
gaagugucagaucauauac

SEQ ID NO: 1010156 - RNA, 19 nt, Homo sapiens
  misc_RNA (1)...(19): siRNA sense strand
auaaagacgcccugguguu

SEQ ID NO: 1010157 - RNA, 19 nt, Homo sapiens
  misc_RNA (1)...(19): siRNA sense strand
ugaguuugaugaaccuuuu

SEQ ID NO: 1010158 - RNA, 19 nt, Homo sapiens
  misc_RNA (1)...(19): siRNA sense strand
ggaagaggauucuaauuac

SEQ ID NO: 1010159 - RNA, 19 nt, Homo sapiens
  misc_RNA (1)...(19): siRNA sense strand
gcaacaaguucacccagaa

SEQ ID NO: 1010160 - RNA, 19 nt, Homo sapiens
  misc_RNA (1)...(19): siRNA sense strand
ggaggagccuuucaacgaa

SEQ ID NO: 1010161 - RNA, 19 nt, Homo sapiens
  misc_RNA (1)...(19): siRNA sense strand
ugaagacccugaaccagua

SEQ ID NO: 1010162 - RNA, 19 nt, Homo sapiens
  misc_RNA (1)...(19): siRNA sense strand
gagaacuacugaugaaaug

SEQ ID NO: 1010163 - RNA, 19 nt, Homo sapiens
  misc_RNA (1)...(19): siRNA sense strand
uggaagaggauucuaauua

SEQ ID NO: 1010164 - RNA, 19 nt, Homo sapiens
  misc_RNA (1)...(19): siRNA sense strand
caagcuaccugaaauugga

SEQ ID NO: 1010165 - RNA, 19 nt, Homo sapiens
  misc_RNA (1)...(19): siRNA sense strand
gcaccaagaucaucaaacg

SEQ ID NO: 1010166 - RNA, 19 nt, Homo sapiens
  misc_RNA (1)...(19): siRNA sense strand
aaacgcagcuguacgaagu

SEQ ID NO: 1010167 - RNA, 19 nt, Homo sapiens
  misc_RNA (1)...(19): siRNA sense strand
ggauggugcuggccacuug

SEQ ID NO: 1010168 - RNA, 19 nt, Homo sapiens
  misc_RNA (1)...(19): siRNA sense strand
ggaagcggcucaugauggu

SEQ ID NO: 1010169 - RNA, 19 nt, Homo sapiens
  misc_RNA (1)...(19): siRNA sense strand
ccaacgaccugaagcacuu

SEQ ID NO: 1010170 - RNA, 19 nt, Homo sapiens
  misc_RNA (1)...(19): siRNA sense strand
caacaucuccuuccacaag

SEQ ID NO: 1010171 - RNA, 19 nt, Homo sapiens
  misc_RNA (1)...(19): siRNA sense strand
gggaggagccuuucaacga

SEQ ID NO: 1010172 - RNA, 19 nt, Homo sapiens
  misc_RNA (1)...(19): siRNA sense strand
caucuucuauuuccaaagu

SEQ ID NO: 1010173 - RNA, 19 nt, Homo sapiens
  misc_RNA (1)...(19): siRNA sense strand
gaaaugaccacagaauucu

SEQ ID NO: 1010174 - RNA, 19 nt, Homo sapiens
  misc_RNA (1)...(19): siRNA sense strand
ugaaaugaccacagaauuc

SEQ ID NO: 1010175 - RNA, 19 nt, Homo sapiens
  misc_RNA (1)...(19): siRNA sense strand
gaagaggauucuaauuacg

SEQ ID NO: 1010176 - RNA, 19 nt, Homo sapiens
  misc_RNA (1)...(19): siRNA sense strand
gaagugaugaggaugaaca

SEQ ID NO: 1010177 - RNA, 19 nt, Homo sapiens
  misc_RNA (1)...(19): siRNA sense strand
gugccaagcuaccugaaau

SEQ ID NO: 1010178 - RNA, 19 nt, Homo sapiens
  misc_RNA (1)...(19): siRNA sense strand
uacgagaacuacugaugaa

SEQ ID NO: 1010179 - RNA, 19 nt, Homo sapiens
  misc_RNA (1)...(19): siRNA sense strand
cuacaugaaguuccuguuu

SEQ ID NO: 1010180 - RNA, 19 nt, Homo sapiens
  misc_RNA (1)...(19): siRNA sense strand
gaugaaaugaccacagaau

SEQ ID NO: 1010181 - RNA, 19 nt, Homo sapiens
  misc_RNA (1)...(19): siRNA sense strand
uacaugaaguuccuguuug

SEQ ID NO: 1010182 - RNA, 19 nt, Homo sapiens
  misc_RNA (1)...(19): siRNA sense strand
gcaaagucuacgagaacua

SEQ ID NO: 1010183 - RNA, 19 nt, Homo sapiens
  misc_RNA (1)...(19): siRNA sense strand
ugaugaggaugaacagaau

SEQ ID NO: 1010184 - RNA, 19 nt, Homo sapiens
  misc_RNA (1)...(19): siRNA sense strand
cugaugaaaugaccacaga

SEQ ID NO: 1010185 - RNA, 19 nt, Homo sapiens
  misc_RNA (1)...(19): siRNA sense strand
gggacgaugucaaauucga

SEQ ID NO: 1010186 - RNA, 19 nt, Homo sapiens
  misc_RNA (1)...(19): siRNA sense strand
guacgaagucuacaaacuc

SEQ ID NO: 1010187 - RNA, 19 nt, Homo sapiens
  misc_RNA (1)...(19): siRNA sense strand
guacagcaucccagaaauc

SEQ ID NO: 1010188 - RNA, 19 nt, Homo sapiens
  misc_RNA (1)...(19): siRNA sense strand
cgagaacuacugaugaaau

SEQ ID NO: 1010189 - RNA, 19 nt, Homo sapiens
  misc_RNA (1)...(19): siRNA sense strand
uaugcaaagucuacgagaa

SEQ ID NO: 1010190 - RNA, 19 nt, Homo sapiens
  misc_RNA (1)...(19): siRNA sense strand
gugaugaggaugaacagaa

SEQ ID NO: 1010191 - RNA, 19 nt, Homo sapiens
  misc_RNA (1)...(19): siRNA sense strand
cuacgagaacuacugauga

SEQ ID NO: 1010192 - RNA, 19 nt, Homo sapiens
  misc_RNA (1)...(19): siRNA sense strand
acaugaaguuccuguuugu

SEQ ID NO: 1010193 - RNA, 19 nt, Homo sapiens
  misc_RNA (1)...(19): siRNA sense strand
caguacagcaucccagaaa

SEQ ID NO: 1010194 - RNA, 19 nt, Homo sapiens
  misc_RNA (1)...(19): siRNA sense strand
ggucaucuucuauuuccaa

SEQ ID NO: 1010195 - RNA, 19 nt, Homo sapiens
  misc_RNA (1)...(19): siRNA sense strand
gaacuacugaugaaaugac

SEQ ID NO: 1010196 - RNA, 19 nt, Homo sapiens
  misc_RNA (1)...(19): siRNA sense strand
caaaccgucuacucacucu

SEQ ID NO: 1010197 - RNA, 19 nt, Homo sapiens
  misc_RNA (1)...(19): siRNA sense strand
acaaguucacccagaagua

SEQ ID NO: 1010198 - RNA, 19 nt, Homo sapiens
  misc_RNA (1)...(19): siRNA sense strand
caaaggggacgaugucaaa

SEQ ID NO: 1010199 - RNA, 19 nt, Homo sapiens
  misc_RNA (1)...(19): siRNA sense strand
gccaagcuaccugaaauug

SEQ ID NO: 1010200 - RNA, 19 nt, Homo sapiens
  misc_RNA (1)...(19): siRNA sense strand
ccugccacauccacuauga

SEQ ID NO: 1010201 - RNA, 19 nt, Homo sapiens
  misc_RNA (1)...(19): siRNA sense strand
gcggaggaaucccuuuggu

SEQ ID NO: 1010202 - RNA, 19 nt, Homo sapiens
  misc_RNA (1)...(19): siRNA sense strand
ggcaaaccgucuacucacu

SEQ ID NO: 1010203 - RNA, 19 nt, Homo sapiens
  misc_RNA (1)...(19): siRNA sense strand
caaguacgagacacuggaa

SEQ ID NO: 1010204 - RNA, 19 nt, Homo sapiens
  misc_RNA (1)...(19): siRNA sense strand
gugggcagcuaccugaagu

SEQ ID NO: 1010205 - RNA, 19 nt, Homo sapiens
  misc_RNA (1)...(19): siRNA sense strand
gaagucuacaaacucgauu

SEQ ID NO: 1010206 - RNA, 19 nt, Homo sapiens
  misc_RNA (1)...(19): siRNA sense strand
ggaccacgagcucaucuac

SEQ ID NO: 1010207 - RNA, 19 nt, Homo sapiens
  misc_RNA (1)...(19): siRNA sense strand
ugucaaauucgaggaguuu

SEQ ID NO: 1010208 - RNA, 19 nt, Homo sapiens
  misc_RNA (1)...(19): siRNA sense strand
ggaacucuacaacccaauc

SEQ ID NO: 1010209 - RNA, 19 nt, Homo sapiens
  misc_RNA (1)...(19): siRNA sense strand
gcaccaaacgcagcuguac

SEQ ID NO: 1010210 - RNA, 19 nt, Homo sapiens
  misc_RNA (1)...(19): siRNA sense strand
uggaagugaugaggaugaa

SEQ ID NO: 1010211 - RNA, 19 nt, Homo sapiens
  misc_RNA (1)...(19): siRNA sense strand
accacgagcucaucuacug

SEQ ID NO: 1010212 - RNA, 19 nt, Homo sapiens
  misc_RNA (1)...(19): siRNA sense strand
caacaaguucacccagaag

SEQ ID NO: 1010213 - RNA, 19 nt, Homo sapiens
  misc_RNA (1)...(19): siRNA sense strand
caaagucuacgagaacuac

SEQ ID NO: 1010214 - RNA, 19 nt, Homo sapiens
  misc_RNA (1)...(19): siRNA sense strand
agaaguacaacaucuccuu

SEQ ID NO: 1010215 - RNA, 19 nt, Homo sapiens
  misc_RNA (1)...(19): siRNA sense strand
caaguucacccagaaguac

SEQ ID NO: 1010216 - RNA, 19 nt, Homo sapiens
  misc_RNA (1)...(19): siRNA sense strand
ccacuugcuugggauccuu

SEQ ID NO: 1010217 - RNA, 19 nt, Homo sapiens
  misc_RNA (1)...(19): siRNA sense strand
ccgccuaccgcaacaaguu

SEQ ID NO: 1010218 - RNA, 19 nt, Homo sapiens
  misc_RNA (1)...(19): siRNA sense strand
cuaccugaaauuggaauaa

SEQ ID NO: 1010219 - RNA, 19 nt, Homo sapiens
  misc_RNA (1)...(19): siRNA sense strand
gggcagcuaccugaaguuc

SEQ ID NO: 1010220 - RNA, 19 nt, Homo sapiens
  misc_RNA (1)...(19): siRNA sense strand
gucaucuucuauuuccaaa

SEQ ID NO: 1010221 - RNA, 19 nt, Homo sapiens
  misc_RNA (1)...(19): siRNA sense strand
gcagcuguacgaagucuac

SEQ ID NO: 1010222 - RNA, 19 nt, Homo sapiens
  misc_RNA (1)...(19): siRNA sense strand
cagcaucccagaaaucaac

SEQ ID NO: 1010223 - RNA, 19 nt, Homo sapiens
  misc_RNA (1)...(19): siRNA sense strand
cgaagucuacaaacucgau

SEQ ID NO: 1010224 - RNA, 19 nt, Homo sapiens
  misc_RNA (1)...(19): siRNA sense strand
uggcaggagugggcagcua

SEQ ID NO: 1010225 - RNA, 19 nt, Homo sapiens
  misc_RNA (1)...(19): siRNA sense strand
ucaaacgccagcggaagaa

SEQ ID NO: 1010226 - RNA, 19 nt, Homo sapiens
  misc_RNA (1)...(19): siRNA sense strand
gaaaagcuacaugaaguuc

SEQ ID NO: 1010227 - RNA, 19 nt, Homo sapiens
  misc_RNA (1)...(19): siRNA sense strand
ggcaagaccuaaaggauua

SEQ ID NO: 1010228 - RNA, 19 nt, Homo sapiens
  misc_RNA (1)...(19): siRNA sense strand
ggauggaacugaagucaau

SEQ ID NO: 1010229 - RNA, 19 nt, Homo sapiens
  misc_RNA (1)...(19): siRNA sense strand
gaaguggccgagauaaaua

SEQ ID NO: 1010230 - RNA, 19 nt, Homo sapiens
  misc_RNA (1)...(19): siRNA sense strand
ggauaugguuauagaagaa

SEQ ID NO: 1010231 - RNA, 19 nt, Homo sapiens
  misc_RNA (1)...(19): siRNA sense strand
gcaagaagaagaagaagga

SEQ ID NO: 1010232 - RNA, 19 nt, Homo sapiens
  misc_RNA (1)...(19): siRNA sense strand
gaaucacgcuccagaucaa

SEQ ID NO: 1010233 - RNA, 19 nt, Homo sapiens
  misc_RNA (1)...(19): siRNA sense strand
gagcaaagaccaagcugaa

SEQ ID NO: 1010234 - RNA, 19 nt, Homo sapiens
  misc_RNA (1)...(19): siRNA sense strand
gaucaaagucagcuucaaa

SEQ ID NO: 1010235 - RNA, 19 nt, Homo sapiens
  misc_RNA (1)...(19): siRNA sense strand
gcaaagaccaagcugaaga

SEQ ID NO: 1010236 - RNA, 19 nt, Homo sapiens
  misc_RNA (1)...(19): siRNA sense strand
cagaugaugcuguuuauga

SEQ ID NO: 1010237 - RNA, 19 nt, Homo sapiens
  misc_RNA (1)...(19): siRNA sense strand
aaccaaaccuuccaucaga

SEQ ID NO: 1010238 - RNA, 19 nt, Homo sapiens
  misc_RNA (1)...(19): siRNA sense strand
gaacggauaugguuuugug

SEQ ID NO: 1010239 - RNA, 19 nt, Homo sapiens
  misc_RNA (1)...(19): siRNA sense strand
ggcaagagccgcagcaaga

SEQ ID NO: 1010240 - RNA, 19 nt, Homo sapiens
  misc_RNA (1)...(19): siRNA sense strand
gcagcaagaagaagaagaa

SEQ ID NO: 1010241 - RNA, 19 nt, Homo sapiens
  misc_RNA (1)...(19): siRNA sense strand
agaccaagcugaagagaag

SEQ ID NO: 1010242 - RNA, 19 nt, Homo sapiens
  misc_RNA (1)...(19): siRNA sense strand
gagaagcgagggaguguga

SEQ ID NO: 1010243 - RNA, 19 nt, Homo sapiens
  misc_RNA (1)...(19): siRNA sense strand
gaagaaguggccgagauaa

SEQ ID NO: 1010244 - RNA, 19 nt, Homo sapiens
  misc_RNA (1)...(19): siRNA sense strand
gaaaccaaaccuuccauca

SEQ ID NO: 1010245 - RNA, 19 nt, Homo sapiens
  misc_RNA (1)...(19): siRNA sense strand
gaagcagacauucccguaa

SEQ ID NO: 1010246 - RNA, 19 nt, Homo sapiens
  misc_RNA (1)...(19): siRNA sense strand
cagauuaguugaagacaag

SEQ ID NO: 1010247 - RNA, 19 nt, Homo sapiens
  misc_RNA (1)...(19): siRNA sense strand
gauguggagcgcuucuuua

SEQ ID NO: 1010248 - RNA, 19 nt, Homo sapiens
  misc_RNA (1)...(19): siRNA sense strand
gacuuauuguggagaauuu

SEQ ID NO: 1010249 - RNA, 19 nt, Homo sapiens
  misc_RNA (1)...(19): siRNA sense strand
guggagcgcuucuuuaagg

SEQ ID NO: 1010250 - RNA, 19 nt, Homo sapiens
  misc_RNA (1)...(19): siRNA sense strand
uagaagaaguggccgagau

SEQ ID NO: 1010251 - RNA, 19 nt, Homo sapiens
  misc_RNA (1)...(19): siRNA sense strand
ugagaaugcuggcaccaau

SEQ ID NO: 1010252 - RNA, 19 nt, Homo sapiens
  misc_RNA (1)...(19): siRNA sense strand
gcacagaguacagacuuau

SEQ ID NO: 1010253 - RNA, 19 nt, Homo sapiens
  misc_RNA (1)...(19): siRNA sense strand
caguggauaugguuauaga

SEQ ID NO: 1010254 - RNA, 19 nt, Homo sapiens
  misc_RNA (1)...(19): siRNA sense strand
agaagaaguggccgagaua

SEQ ID NO: 1010255 - RNA, 19 nt, Homo sapiens
  misc_RNA (1)...(19): siRNA sense strand
agaugaugcuguuuaugaa

SEQ ID NO: 1010256 - RNA, 19 nt, Homo sapiens
  misc_RNA (1)...(19): siRNA sense strand
gagauccaauuccaaaucg

SEQ ID NO: 1010257 - RNA, 19 nt, Homo sapiens
  misc_RNA (1)...(19): siRNA sense strand
gaagaacggauaugguuuu

SEQ ID NO: 1010258 - RNA, 19 nt, Homo sapiens
  misc_RNA (1)...(19): siRNA sense strand
cccaagagccggaguccua

SEQ ID NO: 1010259 - RNA, 19 nt, Homo sapiens
  misc_RNA (1)...(19): siRNA sense strand
gcaaaagcagucauucuaa

SEQ ID NO: 1010260 - RNA, 19 nt, Homo sapiens
  misc_RNA (1)...(19): siRNA sense strand
ggugagcgaguaauuguug

SEQ ID NO: 1010261 - RNA, 19 nt, Homo sapiens
  misc_RNA (1)...(19): siRNA sense strand
ggacgcaguggauaugguu

SEQ ID NO: 1010262 - RNA, 19 nt, Homo sapiens
  misc_RNA (1)...(19): siRNA sense strand
agaagaagaagaaggaaga

SEQ ID NO: 1010263 - RNA, 19 nt, Homo sapiens
  misc_RNA (1)...(19): siRNA sense strand
gcgaguaauuguugagcau

SEQ ID NO: 1010264 - RNA, 19 nt, Homo sapiens
  misc_RNA (1)...(19): siRNA sense strand
gauccaauuccaaaucgaa

SEQ ID NO: 1010265 - RNA, 19 nt, Homo sapiens
  misc_RNA (1)...(19): siRNA sense strand
gaggagagagugagaaugc

SEQ ID NO: 1010266 - RNA, 19 nt, Homo sapiens
  misc_RNA (1)...(19): siRNA sense strand
ucagauuaguugaagacaa

SEQ ID NO: 1010267 - RNA, 19 nt, Homo sapiens
  misc_RNA (1)...(19): siRNA sense strand
guggagaauuugucaaguc

SEQ ID NO: 1010268 - RNA, 19 nt, Homo sapiens
  misc_RNA (1)...(19): siRNA sense strand
uggauaugguuauagaaga

SEQ ID NO: 1010269 - RNA, 19 nt, Homo sapiens
  misc_RNA (1)...(19): siRNA sense strand
gcagaaagcgaggcagcaa

SEQ ID NO: 1010270 - RNA, 19 nt, Homo sapiens
  misc_RNA (1)...(19): siRNA sense strand
ggagguggaucugaagaac

SEQ ID NO: 1010271 - RNA, 19 nt, Homo sapiens
  misc_RNA (1)...(19): siRNA sense strand
gagaagauccaaaacaaug

SEQ ID NO: 1010272 - RNA, 19 nt, Homo sapiens
  misc_RNA (1)...(19): siRNA sense strand
ugaugcagaugaugcuguu

SEQ ID NO: 1010273 - RNA, 19 nt, Homo sapiens
  misc_RNA (1)...(19): siRNA sense strand
gaagaagaaggaagacacu

SEQ ID NO: 1010274 - RNA, 19 nt, Homo sapiens
  misc_RNA (1)...(19): siRNA sense strand
gcagcaagagcaaggacaa

SEQ ID NO: 1010275 - RNA, 19 nt, Homo sapiens
  misc_RNA (1)...(19): siRNA sense strand
agaaguggccgagauaaau

SEQ ID NO: 1010276 - RNA, 19 nt, Homo sapiens
  misc_RNA (1)...(19): siRNA sense strand
agaagaaggaagacacuga

SEQ ID NO: 1010277 - RNA, 19 nt, Homo sapiens
  misc_RNA (1)...(19): siRNA sense strand
ggagaguggaggaggagaa

SEQ ID NO: 1010278 - RNA, 19 nt, Homo sapiens
  misc_RNA (1)...(19): siRNA sense strand
gaagagaagauccaaaaca

SEQ ID NO: 1010279 - RNA, 19 nt, Homo sapiens
  misc_RNA (1)...(19): siRNA sense strand
gcagucauucuaagaguag

SEQ ID NO: 1010280 - RNA, 19 nt, Homo sapiens
  misc_RNA (1)...(19): siRNA sense strand
uccagaagccggagucauu

SEQ ID NO: 1010281 - RNA, 19 nt, Homo sapiens
  misc_RNA (1)...(19): siRNA sense strand
ugaagaacggauaugguuu

SEQ ID NO: 1010282 - RNA, 19 nt, Homo sapiens
  misc_RNA (1)...(19): siRNA sense strand
uggcaagaccuaaaggauu

SEQ ID NO: 1010283 - RNA, 19 nt, Homo sapiens
  misc_RNA (1)...(19): siRNA sense strand
gcagcaagcgagacagcaa

SEQ ID NO: 1010284 - RNA, 19 nt, Homo sapiens
  misc_RNA (1)...(19): siRNA sense strand
aagcagacauucccguaag

SEQ ID NO: 1010285 - RNA, 19 nt, Homo sapiens
  misc_RNA (1)...(19): siRNA sense strand
acagaguacagacuuauug

SEQ ID NO: 1010286 - RNA, 19 nt, Homo sapiens
  misc_RNA (1)...(19): siRNA sense strand
cgcaguggauaugguuaua

SEQ ID NO: 1010287 - RNA, 19 nt, Homo sapiens
  misc_RNA (1)...(19): siRNA sense strand
cugaagaacggauaugguu

SEQ ID NO: 1010288 - RNA, 19 nt, Homo sapiens
  misc_RNA (1)...(19): siRNA sense strand
gcagcagcaagaagaagaa

SEQ ID NO: 1010289 - RNA, 19 nt, Homo sapiens
  misc_RNA (1)...(19): siRNA sense strand
gaagagccuccgccagagu

SEQ ID NO: 1010290 - RNA, 19 nt, Homo sapiens
  misc_RNA (1)...(19): siRNA sense strand
gcagcuggcaagaccuaaa

SEQ ID NO: 1010291 - RNA, 19 nt, Homo sapiens
  misc_RNA (1)...(19): siRNA sense strand
cgcacagaguacagacuua

SEQ ID NO: 1010292 - RNA, 19 nt, Homo sapiens
  misc_RNA (1)...(19): siRNA sense strand
caaaagcagucauucuaag

SEQ ID NO: 1010293 - RNA, 19 nt, Homo sapiens
  misc_RNA (1)...(19): siRNA sense strand
cgaucucgguccaagucua

SEQ ID NO: 1010294 - RNA, 19 nt, Homo sapiens
  misc_RNA (1)...(19): siRNA sense strand
aagagaagauccaaaacaa

SEQ ID NO: 1010295 - RNA, 19 nt, Homo sapiens
  misc_RNA (1)...(19): siRNA sense strand
cgauguggagcgcuucuuu

SEQ ID NO: 1010296 - RNA, 19 nt, Homo sapiens
  misc_RNA (1)...(19): siRNA sense strand
cgagauccaauuccaaauc

SEQ ID NO: 1010297 - RNA, 19 nt, Homo sapiens
  misc_RNA (1)...(19): siRNA sense strand
gcaagagcaaggacaagag

SEQ ID NO: 1010298 - RNA, 19 nt, Homo sapiens
  misc_RNA (1)...(19): siRNA sense strand
gcaggaagagaagcagaga

SEQ ID NO: 1010299 - RNA, 19 nt, Homo sapiens
  misc_RNA (1)...(19): siRNA sense strand
gaucuaggucccacucaag

SEQ ID NO: 1010300 - RNA, 19 nt, Homo sapiens
  misc_RNA (1)...(19): siRNA sense strand
gcgggcagcagcaagaaga

SEQ ID NO: 1010301 - RNA, 19 nt, Homo sapiens
  misc_RNA (1)...(19): siRNA sense strand
gauaugguuuuguggaguu

SEQ ID NO: 1010302 - RNA, 19 nt, Homo sapiens
  misc_RNA (1)...(19): siRNA sense strand
cagaaucacgcuccagauc

SEQ ID NO: 1010303 - RNA, 19 nt, Homo sapiens
  misc_RNA (1)...(19): siRNA sense strand
gucgagauccaauuccaaa

SEQ ID NO: 1010304 - RNA, 19 nt, Homo sapiens
  misc_RNA (1)...(19): siRNA sense strand
agucggagccggagcaaga

SEQ ID NO: 1010305 - RNA, 19 nt, Homo sapiens
  misc_RNA (1)...(19): siRNA sense strand
acagacuuauuguggagaa

SEQ ID NO: 1010306 - RNA, 19 nt, Homo sapiens
  misc_RNA (1)...(19): siRNA sense strand
aaauauggcccuccuacuc

SEQ ID NO: 1010307 - RNA, 19 nt, Homo sapiens
  misc_RNA (1)...(19): siRNA sense strand
gauaaauauggcccuccua

SEQ ID NO: 1010308 - RNA, 19 nt, Homo sapiens
  misc_RNA (1)...(19): siRNA sense strand
aagaaguggccgagauaaa

SEQ ID NO: 1010309 - RNA, 19 nt, Homo sapiens
  misc_RNA (1)...(19): siRNA sense strand
caagaccuaaaggauuaua

SEQ ID NO: 1010310 - RNA, 19 nt, Homo sapiens
  misc_RNA (1)...(19): siRNA sense strand
gcaggagccaggagaagag

SEQ ID NO: 1010311 - RNA, 19 nt, Homo sapiens
  misc_RNA (1)...(19): siRNA sense strand
gcauaaaaguaagagcaaa

SEQ ID NO: 1010312 - RNA, 19 nt, Homo sapiens
  misc_RNA (1)...(19): siRNA sense strand
augcagaugaugcuguuua

SEQ ID NO: 1010313 - RNA, 19 nt, Homo sapiens
  misc_RNA (1)...(19): siRNA sense strand
gugagcgaguaauuguuga

SEQ ID NO: 1010314 - RNA, 19 nt, Homo sapiens
  misc_RNA (1)...(19): siRNA sense strand
gaucucgguccaagucuag

SEQ ID NO: 1010315 - RNA, 19 nt, Homo sapiens
  misc_RNA (1)...(19): siRNA sense strand
ugcagaugaugcuguuuau

SEQ ID NO: 1010316 - RNA, 19 nt, Homo sapiens
  misc_RNA (1)...(19): siRNA sense strand
caaagaccaagcugaagag

SEQ ID NO: 1010317 - RNA, 19 nt, Homo sapiens
  misc_RNA (1)...(19): siRNA sense strand
ggagccggagcaagaaaga

SEQ ID NO: 1010318 - RNA, 19 nt, Homo sapiens
  misc_RNA (1)...(19): siRNA sense strand
ggugauugaauuuguaucu

SEQ ID NO: 1010319 - RNA, 19 nt, Homo sapiens
  misc_RNA (1)...(19): siRNA sense strand
ccaaaccuuccaucagaau

SEQ ID NO: 1010320 - RNA, 19 nt, Homo sapiens
  misc_RNA (1)...(19): siRNA sense strand
caaaucgaaaccaaaccuu

SEQ ID NO: 1010321 - RNA, 19 nt, Homo sapiens
  misc_RNA (1)...(19): siRNA sense strand
ugaacugaauggcaaagac

SEQ ID NO: 1010322 - RNA, 19 nt, Homo sapiens
  misc_RNA (1)...(19): siRNA sense strand
uuuaagggcuacgggaaga

SEQ ID NO: 1010323 - RNA, 19 nt, Homo sapiens
  misc_RNA (1)...(19): siRNA sense strand
aagcagucauucuaagagu

SEQ ID NO: 1010324 - RNA, 19 nt, Homo sapiens
  misc_RNA (1)...(19): siRNA sense strand
agaccuaaaggauuauaug

SEQ ID NO: 1010325 - RNA, 19 nt, Homo sapiens
  misc_RNA (1)...(19): siRNA sense strand
gaugcuguuuaugaacuga

SEQ ID NO: 1010326 - RNA, 19 nt, Homo sapiens
  misc_RNA (1)...(19): siRNA sense strand
agaaucacgcuccagauca

SEQ ID NO: 1010327 - RNA, 19 nt, Homo sapiens
  misc_RNA (1)...(19): siRNA sense strand
caaccaaacucauuacuga

SEQ ID NO: 1010328 - RNA, 19 nt, Homo sapiens
  misc_RNA (1)...(19): siRNA sense strand
gggaggagauggccagauu

SEQ ID NO: 1010329 - RNA, 19 nt, Homo sapiens
  misc_RNA (1)...(19): siRNA sense strand
uaagagagguucuaaacuc

SEQ ID NO: 1010330 - RNA, 19 nt, Homo sapiens
  misc_RNA (1)...(19): siRNA sense strand
gcugaaagccucauaagga

SEQ ID NO: 1010331 - RNA, 19 nt, Homo sapiens
  misc_RNA (1)...(19): siRNA sense strand
aaacggaguugacuuaaca

SEQ ID NO: 1010332 - RNA, 19 nt, Homo sapiens
  misc_RNA (1)...(19): siRNA sense strand
aguccaaccugucuuauaa

SEQ ID NO: 1010333 - RNA, 19 nt, Homo sapiens
  misc_RNA (1)...(19): siRNA sense strand
aaugggacauggccaaaua

SEQ ID NO: 1010334 - RNA, 19 nt, Homo sapiens
  misc_RNA (1)...(19): siRNA sense strand
ccaaauauccugucaagca

SEQ ID NO: 1010335 - RNA, 19 nt, Homo sapiens
  misc_RNA (1)...(19): siRNA sense strand
gaccuuggauucccugguu

SEQ ID NO: 1010336 - RNA, 19 nt, Homo sapiens
  misc_RNA (1)...(19): siRNA sense strand
aaaccaaacuacucacaau

SEQ ID NO: 1010337 - RNA, 19 nt, Homo sapiens
  misc_RNA (1)...(19): siRNA sense strand
gacuuaacauccuuuguga

SEQ ID NO: 1010338 - RNA, 19 nt, Homo sapiens
  misc_RNA (1)...(19): siRNA sense strand
gaaagccucauaaggagaa

SEQ ID NO: 1010339 - RNA, 19 nt, Homo sapiens
  misc_RNA (1)...(19): siRNA sense strand
gaauaucucgucacacuuc

SEQ ID NO: 1010340 - RNA, 19 nt, Homo sapiens
  misc_RNA (1)...(19): siRNA sense strand
ggcaaacggaguugacuua

SEQ ID NO: 1010341 - RNA, 19 nt, Homo sapiens
  misc_RNA (1)...(19): siRNA sense strand
gagaggaugaauacuguaa

SEQ ID NO: 1010342 - RNA, 19 nt, Homo sapiens
  misc_RNA (1)...(19): siRNA sense strand
ccaaguccaaccugucuua

SEQ ID NO: 1010343 - RNA, 19 nt, Homo sapiens
  misc_RNA (1)...(19): siRNA sense strand
uccaaccugucuuauaaua

SEQ ID NO: 1010344 - RNA, 19 nt, Homo sapiens
  misc_RNA (1)...(19): siRNA sense strand
ugagugauauugugagcaa

SEQ ID NO: 1010345 - RNA, 19 nt, Homo sapiens
  misc_RNA (1)...(19): siRNA sense strand
ccaagcaacuggcgcagau

SEQ ID NO: 1010346 - RNA, 19 nt, Homo sapiens
  misc_RNA (1)...(19): siRNA sense strand
ggccaaauauccugucaag

SEQ ID NO: 1010347 - RNA, 19 nt, Homo sapiens
  misc_RNA (1)...(19): siRNA sense strand
gaugagaaggaaauugaaa

SEQ ID NO: 1010348 - RNA, 19 nt, Homo sapiens
  misc_RNA (1)...(19): siRNA sense strand
ccaccaagcguuuaagaga

SEQ ID NO: 1010349 - RNA, 19 nt, Homo sapiens
  misc_RNA (1)...(19): siRNA sense strand
gauaagaagcaacaguaug

SEQ ID NO: 1010350 - RNA, 19 nt, Homo sapiens
  misc_RNA (1)...(19): siRNA sense strand
gcaaacggaguugacuuaa

SEQ ID NO: 1010351 - RNA, 19 nt, Homo sapiens
  misc_RNA (1)...(19): siRNA sense strand
agacaaaccuggagaaccu

SEQ ID NO: 1010352 - RNA, 19 nt, Homo sapiens
  misc_RNA (1)...(19): siRNA sense strand
ggaguugacuuaacauccu

SEQ ID NO: 1010353 - RNA, 19 nt, Homo sapiens
  misc_RNA (1)...(19): siRNA sense strand
cauauugaccuuagucuuc

SEQ ID NO: 1010354 - RNA, 19 nt, Homo sapiens
  misc_RNA (1)...(19): siRNA sense strand
ugacuuaacauccuuugug

SEQ ID NO: 1010355 - RNA, 19 nt, Homo sapiens
  misc_RNA (1)...(19): siRNA sense strand
cgaucaaccaaacucauua

SEQ ID NO: 1010356 - RNA, 19 nt, Homo sapiens
  misc_RNA (1)...(19): siRNA sense strand
uggagaggaugaauacugu

SEQ ID NO: 1010357 - RNA, 19 nt, Homo sapiens
  misc_RNA (1)...(19): siRNA sense strand
ggagaucccgggacugcaa

SEQ ID NO: 1010358 - RNA, 19 nt, Homo sapiens
  misc_RNA (1)...(19): siRNA sense strand
cugaauaucucgucacacu

SEQ ID NO: 1010359 - RNA, 19 nt, Homo sapiens
  misc_RNA (1)...(19): siRNA sense strand
caaacggaguugacuuaac

SEQ ID NO: 1010360 - RNA, 19 nt, Homo sapiens
  misc_RNA (1)...(19): siRNA sense strand
ugaauacuguaaccuccaa

SEQ ID NO: 1010361 - RNA, 19 nt, Homo sapiens
  misc_RNA (1)...(19): siRNA sense strand
caaccugucuuauaauacc

SEQ ID NO: 1010362 - RNA, 19 nt, Homo sapiens
  misc_RNA (1)...(19): siRNA sense strand
ggacauggccaaauauccu

SEQ ID NO: 1010363 - RNA, 19 nt, Homo sapiens
  misc_RNA (1)...(19): siRNA sense strand
gcaacucaauaaccaagac

SEQ ID NO: 1010364 - RNA, 19 nt, Homo sapiens
  misc_RNA (1)...(19): siRNA sense strand
uggccucucugaugaguug

SEQ ID NO: 1010365 - RNA, 19 nt, Homo sapiens
  misc_RNA (1)...(19): siRNA sense strand
uggaguccgugcucaggua

SEQ ID NO: 1010366 - RNA, 19 nt, Homo sapiens
  misc_RNA (1)...(19): siRNA sense strand
ucaaggcccugagaguguu

SEQ ID NO: 1010367 - RNA, 19 nt, Homo sapiens
  misc_RNA (1)...(19): siRNA sense strand
acgacacucugaagacaaa

SEQ ID NO: 1010368 - RNA, 19 nt, Homo sapiens
  misc_RNA (1)...(19): siRNA sense strand
ggacacaauagccaagcaa

SEQ ID NO: 1010369 - RNA, 19 nt, Homo sapiens
  misc_RNA (1)...(19): siRNA sense strand
caaaccaaacuacucacaa

SEQ ID NO: 1010370 - RNA, 19 nt, Homo sapiens
  misc_RNA (1)...(19): siRNA sense strand
cugauaagaagcaacagua

SEQ ID NO: 1010371 - RNA, 19 nt, Homo sapiens
  misc_RNA (1)...(19): siRNA sense strand
cuacgacacucugaagaca

SEQ ID NO: 1010372 - RNA, 19 nt, Homo sapiens
  misc_RNA (1)...(19): siRNA sense strand
cuacuuccauauugaccuu

SEQ ID NO: 1010373 - RNA, 19 nt, Homo sapiens
  misc_RNA (1)...(19): siRNA sense strand
gaguugacuuaacauccuu

SEQ ID NO: 1010374 - RNA, 19 nt, Homo sapiens
  misc_RNA (1)...(19): siRNA sense strand
gggaaacucgacaccuuug

SEQ ID NO: 1010375 - RNA, 19 nt, Homo sapiens
  misc_RNA (1)...(19): siRNA sense strand
gacugcaacucaauaacca

SEQ ID NO: 1010376 - RNA, 19 nt, Homo sapiens
  misc_RNA (1)...(19): siRNA sense strand
ccacaucaaggcccugaga

SEQ ID NO: 1010377 - RNA, 19 nt, Homo sapiens
  misc_RNA (1)...(19): siRNA sense strand
uggagaaccuggaaaagaa

SEQ ID NO: 1010378 - RNA, 19 nt, Homo sapiens
  misc_RNA (1)...(19): siRNA sense strand
ggagaggaugaauacugua

SEQ ID NO: 1010379 - RNA, 19 nt, Homo sapiens
  misc_RNA (1)...(19): siRNA sense strand
uuacuaugaugagaaggaa

SEQ ID NO: 1010380 - RNA, 19 nt, Homo sapiens
  misc_RNA (1)...(19): siRNA sense strand
ccaagacuauuuuccuuau

SEQ ID NO: 1010381 - RNA, 19 nt, Homo sapiens
  misc_RNA (1)...(19): siRNA sense strand
acgaaucucucucagacau

SEQ ID NO: 1010382 - RNA, 19 nt, Homo sapiens
  misc_RNA (1)...(19): siRNA sense strand
ugguuggccucucugauga

SEQ ID NO: 1010383 - RNA, 19 nt, Homo sapiens
  misc_RNA (1)...(19): siRNA sense strand
gugauauugugagcaaaga

SEQ ID NO: 1010384 - RNA, 19 nt, Homo sapiens
  misc_RNA (1)...(19): siRNA sense strand
gaagacaaaccuggagaac

SEQ ID NO: 1010385 - RNA, 19 nt, Homo sapiens
  misc_RNA (1)...(19): siRNA sense strand
gagcgugguggaagucaug

SEQ ID NO: 1010386 - RNA, 19 nt, Homo sapiens
  misc_RNA (1)...(19): siRNA sense strand
ggaggagauggccagauug

SEQ ID NO: 1010387 - RNA, 19 nt, Homo sapiens
  misc_RNA (1)...(19): siRNA sense strand
gaggaugaauacuguaacc

SEQ ID NO: 1010388 - RNA, 19 nt, Homo sapiens
  misc_RNA (1)...(19): siRNA sense strand
agaucgagauggaccugaa

SEQ ID NO: 1010389 - RNA, 19 nt, Homo sapiens
  misc_RNA (1)...(19): siRNA sense strand
uggcgcagaucgagaugga

SEQ ID NO: 1010390 - RNA, 19 nt, Homo sapiens
  misc_RNA (1)...(19): siRNA sense strand
auaagaagcaacaguaugg

SEQ ID NO: 1010391 - RNA, 19 nt, Homo sapiens
  misc_RNA (1)...(19): siRNA sense strand
gaaugggacauggccaaau

SEQ ID NO: 1010392 - RNA, 19 nt, Homo sapiens
  misc_RNA (1)...(19): siRNA sense strand
ggacugcaacucaauaacc

SEQ ID NO: 1010393 - RNA, 19 nt, Homo sapiens
  misc_RNA (1)...(19): siRNA sense strand
gaucaaccaaacucauuac

SEQ ID NO: 1010394 - RNA, 19 nt, Homo sapiens
  misc_RNA (1)...(19): siRNA sense strand
ugaagacaaaccuggagaa

SEQ ID NO: 1010395 - RNA, 19 nt, Homo sapiens
  misc_RNA (1)...(19): siRNA sense strand
ucgaucaaccaaacucauu

SEQ ID NO: 1010396 - RNA, 19 nt, Homo sapiens
  misc_RNA (1)...(19): siRNA sense strand
cacaauagccaagcaacug

SEQ ID NO: 1010397 - RNA, 19 nt, Homo sapiens
  misc_RNA (1)...(19): siRNA sense strand
ugauaagaagcaacaguau

SEQ ID NO: 1010398 - RNA, 19 nt, Homo sapiens
  misc_RNA (1)...(19): siRNA sense strand
agauugcugucugauaaga

SEQ ID NO: 1010399 - RNA, 19 nt, Homo sapiens
  misc_RNA (1)...(19): siRNA sense strand
aaaccaaggccaaagaaaa

SEQ ID NO: 1010400 - RNA, 19 nt, Homo sapiens
  misc_RNA (1)...(19): siRNA sense strand
cugugacucuguuucgaaa

SEQ ID NO: 1010401 - RNA, 19 nt, Homo sapiens
  misc_RNA (1)...(19): siRNA sense strand
gaaacucgacaccuuugcu

SEQ ID NO: 1010402 - RNA, 19 nt, Homo sapiens
  misc_RNA (1)...(19): siRNA sense strand
ucacacuucuggucaucgu

SEQ ID NO: 1010403 - RNA, 19 nt, Homo sapiens
  misc_RNA (1)...(19): siRNA sense strand
cucgacaccuuugcugaaa

SEQ ID NO: 1010404 - RNA, 19 nt, Homo sapiens
  misc_RNA (1)...(19): siRNA sense strand
agucauccaccaagcguuu

SEQ ID NO: 1010405 - RNA, 19 nt, Homo sapiens
  misc_RNA (1)...(19): siRNA sense strand
gaggagauggccagauugc

SEQ ID NO: 1010406 - RNA, 19 nt, Homo sapiens
  misc_RNA (1)...(19): siRNA sense strand
augaugagaaggaaauuga

SEQ ID NO: 1010407 - RNA, 19 nt, Homo sapiens
  misc_RNA (1)...(19): siRNA sense strand
ccaaaccaaacuacucaca

SEQ ID NO: 1010408 - RNA, 19 nt, Homo sapiens
  misc_RNA (1)...(19): siRNA sense strand
gaggacuucgugcuggauu

SEQ ID NO: 1010409 - RNA, 19 nt, Homo sapiens
  misc_RNA (1)...(19): siRNA sense strand
acaagaagauucagaguua

SEQ ID NO: 1010410 - RNA, 19 nt, Homo sapiens
  misc_RNA (1)...(19): siRNA sense strand
ggacguacaucuucaccuu

SEQ ID NO: 1010411 - RNA, 19 nt, Homo sapiens
  misc_RNA (1)...(19): siRNA sense strand
ccagacagauccaugaguu

SEQ ID NO: 1010412 - RNA, 19 nt, Homo sapiens
  misc_RNA (1)...(19): siRNA sense strand
gaacuucaacuccaugaug

SEQ ID NO: 1010413 - RNA, 19 nt, Homo sapiens
  misc_RNA (1)...(19): siRNA sense strand
aggccaagcugaagucuuu

SEQ ID NO: 1010414 - RNA, 19 nt, Homo sapiens
  misc_RNA (1)...(19): siRNA sense strand
ggucaagacagccaaguuu

SEQ ID NO: 1010415 - RNA, 19 nt, Homo sapiens
  misc_RNA (1)...(19): siRNA sense strand
gauaggacguacaucuuca

SEQ ID NO: 1010416 - RNA, 19 nt, Homo sapiens
  misc_RNA (1)...(19): siRNA sense strand
caacgggcacauuaacuuu

SEQ ID NO: 1010417 - RNA, 19 nt, Homo sapiens
  misc_RNA (1)...(19): siRNA sense strand
ggaccacccuucugaacag

SEQ ID NO: 1010418 - RNA, 19 nt, Homo sapiens
  misc_RNA (1)...(19): siRNA sense strand
gagaauggcacagugaaga

SEQ ID NO: 1010419 - RNA, 19 nt, Homo sapiens
  misc_RNA (1)...(19): siRNA sense strand
gcauuuacccugaggacuu

SEQ ID NO: 1010420 - RNA, 19 nt, Homo sapiens
  misc_RNA (1)...(19): siRNA sense strand
ccuaugacuuccaggauga

SEQ ID NO: 1010421 - RNA, 19 nt, Homo sapiens
  misc_RNA (1)...(19): siRNA sense strand
gacaagaagauucagaguu

SEQ ID NO: 1010422 - RNA, 19 nt, Homo sapiens
  misc_RNA (1)...(19): siRNA sense strand
gaaggccauugcccagaug

SEQ ID NO: 1010423 - RNA, 19 nt, Homo sapiens
  misc_RNA (1)...(19): siRNA sense strand
ggacccgcauguuggaguu

SEQ ID NO: 1010424 - RNA, 19 nt, Homo sapiens
  misc_RNA (1)...(19): siRNA sense strand
gagaaggacaagaagauuc

SEQ ID NO: 1010425 - RNA, 19 nt, Homo sapiens
  misc_RNA (1)...(19): siRNA sense strand
ggacagggucagcagcauu

SEQ ID NO: 1010426 - RNA, 19 nt, Homo sapiens
  misc_RNA (1)...(19): siRNA sense strand
gccaacagcagccgugaaa

SEQ ID NO: 1010427 - RNA, 19 nt, Homo sapiens
  misc_RNA (1)...(19): siRNA sense strand
gacagggucagcagcauuu

SEQ ID NO: 1010428 - RNA, 19 nt, Homo sapiens
  misc_RNA (1)...(19): siRNA sense strand
gaggagaauggcacaguga

SEQ ID NO: 1010429 - RNA, 19 nt, Homo sapiens
  misc_RNA (1)...(19): siRNA sense strand
gcaugcugguggccacuga

SEQ ID NO: 1010430 - RNA, 19 nt, Homo sapiens
  misc_RNA (1)...(19): siRNA sense strand
ucagccacauggacucauu

SEQ ID NO: 1010431 - RNA, 19 nt, Homo sapiens
  misc_RNA (1)...(19): siRNA sense strand
ccaacgggcacauuaacuu

SEQ ID NO: 1010432 - RNA, 19 nt, Homo sapiens
  misc_RNA (1)...(19): siRNA sense strand
uguucaaccucuucguuaa

SEQ ID NO: 1010433 - RNA, 19 nt, Homo sapiens
  misc_RNA (1)...(19): siRNA sense strand
guguucaaccucuucguua

SEQ ID NO: 1010434 - RNA, 19 nt, Homo sapiens
  misc_RNA (1)...(19): siRNA sense strand
uaugacaacugguucaacu

SEQ ID NO: 1010435 - RNA, 19 nt, Homo sapiens
  misc_RNA (1)...(19): siRNA sense strand
gcagaucgucagccacaug

SEQ ID NO: 1010436 - RNA, 19 nt, Homo sapiens
  misc_RNA (1)...(19): siRNA sense strand
uguuggaguucuucauuga

SEQ ID NO: 1010437 - RNA, 19 nt, Homo sapiens
  misc_RNA (1)...(19): siRNA sense strand
cagccaaguuugaugucuu

SEQ ID NO: 1010438 - RNA, 19 nt, Homo sapiens
  misc_RNA (1)...(19): siRNA sense strand
ggacaagaagauucagagu

SEQ ID NO: 1010439 - RNA, 19 nt, Homo sapiens
  misc_RNA (1)...(19): siRNA sense strand
uagaguguccuuucgagaa

SEQ ID NO: 1010440 - RNA, 19 nt, Homo sapiens
  misc_RNA (1)...(19): siRNA sense strand
ccagcaacuucugcaacua

SEQ ID NO: 1010441 - RNA, 19 nt, Homo sapiens
  misc_RNA (1)...(19): siRNA sense strand
gccggguggugaagaagaa

SEQ ID NO: 1010442 - RNA, 19 nt, Homo sapiens
  misc_RNA (1)...(19): siRNA sense strand
aaagugagggucccgagaa

SEQ ID NO: 1010443 - RNA, 19 nt, Homo sapiens
  misc_RNA (1)...(19): siRNA sense strand
caagacagccaaguuugau

SEQ ID NO: 1010444 - RNA, 19 nt, Homo sapiens
  misc_RNA (1)...(19): siRNA sense strand
cauuuacccugaggacuug

SEQ ID NO: 1010445 - RNA, 19 nt, Homo sapiens
  misc_RNA (1)...(19): siRNA sense strand
cauguuggaguucuucauu

SEQ ID NO: 1010446 - RNA, 19 nt, Homo sapiens
  misc_RNA (1)...(19): siRNA sense strand
ugacauggacacagguaga

SEQ ID NO: 1010447 - RNA, 19 nt, Homo sapiens
  misc_RNA (1)...(19): siRNA sense strand
cgagaaggacaagaagauu

SEQ ID NO: 1010448 - RNA, 19 nt, Homo sapiens
  misc_RNA (1)...(19): siRNA sense strand
agaaggccauugcccagau

SEQ ID NO: 1010449 - RNA, 19 nt, Homo sapiens
  misc_RNA (1)...(19): siRNA sense strand
caagaagauucagaguuac

SEQ ID NO: 1010450 - RNA, 19 nt, Homo sapiens
  misc_RNA (1)...(19): siRNA sense strand
cgauaggacguacaucuuc

SEQ ID NO: 1010451 - RNA, 19 nt, Homo sapiens
  misc_RNA (1)...(19): siRNA sense strand
gaucgucaucccuguguuc

SEQ ID NO: 1010452 - RNA, 19 nt, Homo sapiens
  misc_RNA (1)...(19): siRNA sense strand
agaaggacaagaagauuca

SEQ ID NO: 1010453 - RNA, 19 nt, Homo sapiens
  misc_RNA (1)...(19): siRNA sense strand
ccagugugaugaggagaau

SEQ ID NO: 1010454 - RNA, 19 nt, Homo sapiens
  misc_RNA (1)...(19): siRNA sense strand
caacaucgggaacuucaac

SEQ ID NO: 1010455 - RNA, 19 nt, Homo sapiens
  misc_RNA (1)...(19): siRNA sense strand
ggagaauggcacagugaag

SEQ ID NO: 1010456 - RNA, 19 nt, Homo sapiens
  misc_RNA (1)...(19): siRNA sense strand
ggucccagauggccaacag

SEQ ID NO: 1010457 - RNA, 19 nt, Homo sapiens
  misc_RNA (1)...(19): siRNA sense strand
uccaggaacugcgagagaa

SEQ ID NO: 1010458 - RNA, 19 nt, Homo sapiens
  misc_RNA (1)...(19): siRNA sense strand
uuggaguucuucauugaug

SEQ ID NO: 1010459 - RNA, 19 nt, Homo sapiens
  misc_RNA (1)...(19): siRNA sense strand
cuucgucgccuccuuugaa

SEQ ID NO: 1010460 - RNA, 19 nt, Homo sapiens
  misc_RNA (1)...(19): siRNA sense strand
gacguacaucuucaccuuu

SEQ ID NO: 1010461 - RNA, 19 nt, Homo sapiens
  misc_RNA (1)...(19): siRNA sense strand
agaauggcacagugaagaa

SEQ ID NO: 1010462 - RNA, 19 nt, Homo sapiens
  misc_RNA (1)...(19): siRNA sense strand
agaguguccuuucgagaag

SEQ ID NO: 1010463 - RNA, 19 nt, Homo sapiens
  misc_RNA (1)...(19): siRNA sense strand
agacagauccaugaguuca

SEQ ID NO: 1010464 - RNA, 19 nt, Homo sapiens
  misc_RNA (1)...(19): siRNA sense strand
gccaccggcuguagacaag

SEQ ID NO: 1010465 - RNA, 19 nt, Homo sapiens
  misc_RNA (1)...(19): siRNA sense strand
acaccggacccgcauguug

SEQ ID NO: 1010466 - RNA, 19 nt, Homo sapiens
  misc_RNA (1)...(19): siRNA sense strand
cgucaucccuguguucaac

SEQ ID NO: 1010467 - RNA, 19 nt, Homo sapiens
  misc_RNA (1)...(19): siRNA sense strand
agacagccaaguuugaugu

SEQ ID NO: 1010468 - RNA, 19 nt, Homo sapiens
  misc_RNA (1)...(19): siRNA sense strand
gucaagacagccaaguuug

SEQ ID NO: 1010469 - RNA, 19 nt, Homo sapiens
  misc_RNA (1)...(19): siRNA sense strand
acguacaucuucaccuuuc

SEQ ID NO: 1010470 - RNA, 19 nt, Homo sapiens
  misc_RNA (1)...(19): siRNA sense strand
aaacaccggacccgcaugu

SEQ ID NO: 1010471 - RNA, 19 nt, Homo sapiens
  misc_RNA (1)...(19): siRNA sense strand
ucgagaaggacaagaagau

SEQ ID NO: 1010472 - RNA, 19 nt, Homo sapiens
  misc_RNA (1)...(19): siRNA sense strand
aacgggcacauuaacuuua

SEQ ID NO: 1010473 - RNA, 19 nt, Homo sapiens
  misc_RNA (1)...(19): siRNA sense strand
caagcugaagucuuucuca

SEQ ID NO: 1010474 - RNA, 19 nt, Homo sapiens
  misc_RNA (1)...(19): siRNA sense strand
ggaguucuucauugaugug

SEQ ID NO: 1010475 - RNA, 19 nt, Homo sapiens
  misc_RNA (1)...(19): siRNA sense strand
ggcccauccucaagaccaa

SEQ ID NO: 1010476 - RNA, 19 nt, Homo sapiens
  misc_RNA (1)...(19): siRNA sense strand
ccgauaggacguacaucuu

SEQ ID NO: 1010477 - RNA, 19 nt, Homo sapiens
  misc_RNA (1)...(19): siRNA sense strand
acagguagaguguccuuuc

SEQ ID NO: 1010478 - RNA, 19 nt, Homo sapiens
  misc_RNA (1)...(19): siRNA sense strand
gaaaaggccaagcugaagu

SEQ ID NO: 1010479 - RNA, 19 nt, Homo sapiens
  misc_RNA (1)...(19): siRNA sense strand
ccugagcucccgggucuuu

SEQ ID NO: 1010480 - RNA, 19 nt, Homo sapiens
  misc_RNA (1)...(19): siRNA sense strand
gggaacuucaacuccauga

SEQ ID NO: 1010481 - RNA, 19 nt, Homo sapiens
  misc_RNA (1)...(19): siRNA sense strand
gcuucaacaucgggaacuu

SEQ ID NO: 1010482 - RNA, 19 nt, Homo sapiens
  misc_RNA (1)...(19): siRNA sense strand
gaauggcacagugaagaag

SEQ ID NO: 1010483 - RNA, 19 nt, Homo sapiens
  misc_RNA (1)...(19): siRNA sense strand
gaagaaaggagagaaauga

SEQ ID NO: 1010484 - RNA, 19 nt, Homo sapiens
  misc_RNA (1)...(19): siRNA sense strand
ucaaugagcucacagaagu

SEQ ID NO: 1010485 - RNA, 19 nt, Homo sapiens
  misc_RNA (1)...(19): siRNA sense strand
gaaaggcagccaagaugua

SEQ ID NO: 1010486 - RNA, 19 nt, Homo sapiens
  misc_RNA (1)...(19): siRNA sense strand
gaagaagaaaggagagaaa

SEQ ID NO: 1010487 - RNA, 19 nt, Homo sapiens
  misc_RNA (1)...(19): siRNA sense strand
cagacaagcuggagacugu

SEQ ID NO: 1010488 - RNA, 19 nt, Homo sapiens
  misc_RNA (1)...(19): siRNA sense strand
cagccaagauguacacaga

SEQ ID NO: 1010489 - RNA, 19 nt, Homo sapiens
  misc_RNA (1)...(19): siRNA sense strand
ggacacaguggccaucaaa

SEQ ID NO: 1010490 - RNA, 19 nt, Homo sapiens
  misc_RNA (1)...(19): siRNA sense strand
gagaggauaagaagaagaa

SEQ ID NO: 1010491 - RNA, 19 nt, Homo sapiens
  misc_RNA (1)...(19): siRNA sense strand
agaaugaggccaagaagaa

SEQ ID NO: 1010492 - RNA, 19 nt, Homo sapiens
  misc_RNA (1)...(19): siRNA sense strand
gcacguggugggcaucuuu

SEQ ID NO: 1010493 - RNA, 19 nt, Homo sapiens
  misc_RNA (1)...(19): siRNA sense strand
gauaagaagaagaagaaga

SEQ ID NO: 1010494 - RNA, 19 nt, Homo sapiens
  misc_RNA (1)...(19): siRNA sense strand
agaagaagaagaagaagaa

SEQ ID NO: 1010495 - RNA, 19 nt, Homo sapiens
  misc_RNA (1)...(19): siRNA sense strand
agaagaagaagaagaagaa

SEQ ID NO: 1010496 - RNA, 19 nt, Homo sapiens
  misc_RNA (1)...(19): siRNA sense strand
gcgaaaggcagccaagaug

SEQ ID NO: 1010497 - RNA, 19 nt, Homo sapiens
  misc_RNA (1)...(19): siRNA sense strand
caggagaggauaagaagaa

SEQ ID NO: 1010498 - RNA, 19 nt, Homo sapiens
  misc_RNA (1)...(19): siRNA sense strand
cacaguggccaucaaagua

SEQ ID NO: 1010499 - RNA, 19 nt, Homo sapiens
  misc_RNA (1)...(19): siRNA sense strand
gccaagauguacacagaca

SEQ ID NO: 1010500 - RNA, 19 nt, Homo sapiens
  misc_RNA (1)...(19): siRNA sense strand
agaagaagaagaagaagga

SEQ ID NO: 1010501 - RNA, 19 nt, Homo sapiens
  misc_RNA (1)...(19): siRNA sense strand
gaggauaagaagaagaaga

SEQ ID NO: 1010502 - RNA, 19 nt, Homo sapiens
  misc_RNA (1)...(19): siRNA sense strand
uagaggaggaugagaagaa

SEQ ID NO: 1010503 - RNA, 19 nt, Homo sapiens
  misc_RNA (1)...(19): siRNA sense strand
gaagaaugaggccaagaag

SEQ ID NO: 1010504 - RNA, 19 nt, Homo sapiens
  misc_RNA (1)...(19): siRNA sense strand
ccaaggagacagugguguu

SEQ ID NO: 1010505 - RNA, 19 nt, Homo sapiens
  misc_RNA (1)...(19): siRNA sense strand
agaagaaugaggccaagaa

SEQ ID NO: 1010506 - RNA, 19 nt, Homo sapiens
  misc_RNA (1)...(19): siRNA sense strand
agaagaagaaggacagugu

SEQ ID NO: 1010507 - RNA, 19 nt, Homo sapiens
  misc_RNA (1)...(19): siRNA sense strand
cccgguaccugcagcgaaa

SEQ ID NO: 1010508 - RNA, 19 nt, Homo sapiens
  misc_RNA (1)...(19): siRNA sense strand
aggauaagaagaagaagaa

SEQ ID NO: 1010509 - RNA, 19 nt, Homo sapiens
  misc_RNA (1)...(19): siRNA sense strand
cgaaaggcagccaagaugu

SEQ ID NO: 1010510 - RNA, 19 nt, Homo sapiens
  misc_RNA (1)...(19): siRNA sense strand
agaggaggaugagaagaau

SEQ ID NO: 1010511 - RNA, 19 nt, Homo sapiens
  misc_RNA (1)...(19): siRNA sense strand
caagauguacacagacaag

SEQ ID NO: 1010512 - RNA, 19 nt, Homo sapiens
  misc_RNA (1)...(19): siRNA sense strand
agaagaaaggagagaaaug

SEQ ID NO: 1010513 - RNA, 19 nt, Homo sapiens
  misc_RNA (1)...(19): siRNA sense strand
gaaugaggccaagaagaag

SEQ ID NO: 1010514 - RNA, 19 nt, Homo sapiens
  misc_RNA (1)...(19): siRNA sense strand
ucaaaguagaggaggauga

SEQ ID NO: 1010515 - RNA, 19 nt, Homo sapiens
  misc_RNA (1)...(19): siRNA sense strand
ggagaggauaagaagaaga

SEQ ID NO: 1010516 - RNA, 19 nt, Homo sapiens
  misc_RNA (1)...(19): siRNA sense strand
gaagucccaggagaggaua

SEQ ID NO: 1010517 - RNA, 19 nt, Homo sapiens
  misc_RNA (1)...(19): siRNA sense strand
gcugugcugugucuucaac

SEQ ID NO: 1010518 - RNA, 19 nt, Homo sapiens
  misc_RNA (1)...(19): siRNA sense strand
caaaguagaggaggaugag

SEQ ID NO: 1010519 - RNA, 19 nt, Homo sapiens
  misc_RNA (1)...(19): siRNA sense strand
acacaguggccaucaaagu

SEQ ID NO: 1010520 - RNA, 19 nt, Homo sapiens
  misc_RNA (1)...(19): siRNA sense strand
gaagaagaagaagaagaag

SEQ ID NO: 1010521 - RNA, 19 nt, Homo sapiens
  misc_RNA (1)...(19): siRNA sense strand
aggaggaugagaagaauga

SEQ ID NO: 1010522 - RNA, 19 nt, Homo sapiens
  misc_RNA (1)...(19): siRNA sense strand
gaagaagaagaagaagaag

SEQ ID NO: 1010523 - RNA, 19 nt, Homo sapiens
  misc_RNA (1)...(19): siRNA sense strand
aagaagaagaagaagaaga

SEQ ID NO: 1010524 - RNA, 19 nt, Homo sapiens
  misc_RNA (1)...(19): siRNA sense strand
aagaagaagaagaagaaga

SEQ ID NO: 1010525 - RNA, 19 nt, Homo sapiens
  misc_RNA (1)...(19): siRNA sense strand
caguggccaucaaaguaga

SEQ ID NO: 1010526 - RNA, 19 nt, Homo sapiens
  misc_RNA (1)...(19): siRNA sense strand
caaggagacagugguguuc

SEQ ID NO: 1010527 - RNA, 19 nt, Homo sapiens
  misc_RNA (1)...(19): siRNA sense strand
gaagaagaagaaggacagu

SEQ ID NO: 1010528 - RNA, 19 nt, Homo sapiens
  misc_RNA (1)...(19): siRNA sense strand
ucaucacgcugugcugugu

SEQ ID NO: 1010529 - RNA, 19 nt, Homo sapiens
  misc_RNA (1)...(19): siRNA sense strand
gagaagaaugaggccaaga

SEQ ID NO: 1010530 - RNA, 19 nt, Homo sapiens
  misc_RNA (1)...(19): siRNA sense strand
ugaaagaacugauugagaa

SEQ ID NO: 1010531 - RNA, 19 nt, Homo sapiens
  misc_RNA (1)...(19): siRNA sense strand
ccaaguaucugguggugaa

SEQ ID NO: 1010532 - RNA, 19 nt, Homo sapiens
  misc_RNA (1)...(19): siRNA sense strand
aaguggagcuucaugaaua

SEQ ID NO: 1010533 - RNA, 19 nt, Homo sapiens
  misc_RNA (1)...(19): siRNA sense strand
gauagaaggccauacgauu

SEQ ID NO: 1010534 - RNA, 19 nt, Homo sapiens
  misc_RNA (1)...(19): siRNA sense strand
gcugaaagguucccugagu

SEQ ID NO: 1010535 - RNA, 19 nt, Homo sapiens
  misc_RNA (1)...(19): siRNA sense strand
cgaggugacugguacaaga

SEQ ID NO: 1010536 - RNA, 19 nt, Homo sapiens
  misc_RNA (1)...(19): siRNA sense strand
caacucaggcaccaaacua

SEQ ID NO: 1010537 - RNA, 19 nt, Homo sapiens
  misc_RNA (1)...(19): siRNA sense strand
gcaaggaccgggagaucuu

SEQ ID NO: 1010538 - RNA, 19 nt, Homo sapiens
  misc_RNA (1)...(19): siRNA sense strand
acaaggugauggcacguuu

SEQ ID NO: 1010539 - RNA, 19 nt, Homo sapiens
  misc_RNA (1)...(19): siRNA sense strand
gguguggacuggaugaaca

SEQ ID NO: 1010540 - RNA, 19 nt, Homo sapiens
  misc_RNA (1)...(19): siRNA sense strand
ggagaucagcaagcagaua

SEQ ID NO: 1010541 - RNA, 19 nt, Homo sapiens
  misc_RNA (1)...(19): siRNA sense strand
cgagagcuguggccagugu

SEQ ID NO: 1010542 - RNA, 19 nt, Homo sapiens
  misc_RNA (1)...(19): siRNA sense strand
ucauugaguucuauaagca

SEQ ID NO: 1010543 - RNA, 19 nt, Homo sapiens
  misc_RNA (1)...(19): siRNA sense strand
auagaaggccauacgauuu

SEQ ID NO: 1010544 - RNA, 19 nt, Homo sapiens
  misc_RNA (1)...(19): siRNA sense strand
gaggggaauucuacaauga

SEQ ID NO: 1010545 - RNA, 19 nt, Homo sapiens
  misc_RNA (1)...(19): siRNA sense strand
agacggugcugauggacuu

SEQ ID NO: 1010546 - RNA, 19 nt, Homo sapiens
  misc_RNA (1)...(19): siRNA sense strand
gaaggaugaagaccggauu

SEQ ID NO: 1010547 - RNA, 19 nt, Homo sapiens
  misc_RNA (1)...(19): siRNA sense strand
gagaucagcaagcagauag

SEQ ID NO: 1010548 - RNA, 19 nt, Homo sapiens
  misc_RNA (1)...(19): siRNA sense strand
gcggguaucugugcguuuc

SEQ ID NO: 1010549 - RNA, 19 nt, Homo sapiens
  misc_RNA (1)...(19): siRNA sense strand
uagaaggccauacgauuug

SEQ ID NO: 1010550 - RNA, 19 nt, Homo sapiens
  misc_RNA (1)...(19): siRNA sense strand
gugagacggugcugaugga

SEQ ID NO: 1010551 - RNA, 19 nt, Homo sapiens
  misc_RNA (1)...(19): siRNA sense strand
gaaagaacugauugagaag

SEQ ID NO: 1010552 - RNA, 19 nt, Homo sapiens
  misc_RNA (1)...(19): siRNA sense strand
gaucaagacaucggguuug

SEQ ID NO: 1010553 - RNA, 19 nt, Homo sapiens
  misc_RNA (1)...(19): siRNA sense strand
gaucagcaagcagauagaa

SEQ ID NO: 1010554 - RNA, 19 nt, Homo sapiens
  misc_RNA (1)...(19): siRNA sense strand
acaaugaggccuccaaucu

SEQ ID NO: 1010555 - RNA, 19 nt, Homo sapiens
  misc_RNA (1)...(19): siRNA sense strand
caaguggagcuucaugaau

SEQ ID NO: 1010556 - RNA, 19 nt, Homo sapiens
  misc_RNA (1)...(19): siRNA sense strand
caaggaccgggagaucuua

SEQ ID NO: 1010557 - RNA, 19 nt, Homo sapiens
  misc_RNA (1)...(19): siRNA sense strand
caaccuccuugcugugauc

SEQ ID NO: 1010558 - RNA, 19 nt, Homo sapiens
  misc_RNA (1)...(19): siRNA sense strand
ucaaguggagcuucaugaa

SEQ ID NO: 1010559 - RNA, 19 nt, Homo sapiens
  misc_RNA (1)...(19): siRNA sense strand
aguggagcuucaugaauaa

SEQ ID NO: 1010560 - RNA, 19 nt, Homo sapiens
  misc_RNA (1)...(19): siRNA sense strand
gcagauagaaggccauacg

SEQ ID NO: 1010561 - RNA, 19 nt, Homo sapiens
  misc_RNA (1)...(19): siRNA sense strand
gagcggaugcagcgguuug

SEQ ID NO: 1010562 - RNA, 19 nt, Homo sapiens
  misc_RNA (1)...(19): siRNA sense strand
cacgacagcacccaagaaa

SEQ ID NO: 1010563 - RNA, 19 nt, Homo sapiens
  misc_RNA (1)...(19): siRNA sense strand
gacaaccuccuugcuguga

SEQ ID NO: 1010564 - RNA, 19 nt, Homo sapiens
  misc_RNA (1)...(19): siRNA sense strand
cagauggcaggcccaagua

SEQ ID NO: 1010565 - RNA, 19 nt, Homo sapiens
  misc_RNA (1)...(19): siRNA sense strand
ccguggagguaccugguuu

SEQ ID NO: 1010566 - RNA, 19 nt, Homo sapiens
  misc_RNA (1)...(19): siRNA sense strand
caaugaggccuccaaucug

SEQ ID NO: 1010567 - RNA, 19 nt, Homo sapiens
  misc_RNA (1)...(19): siRNA sense strand
gacuggaggcugaaagguu

SEQ ID NO: 1010568 - RNA, 19 nt, Homo sapiens
  misc_RNA (1)...(19): siRNA sense strand
ggccucaaguggagcuuca

SEQ ID NO: 1010569 - RNA, 19 nt, Homo sapiens
  misc_RNA (1)...(19): siRNA sense strand
gcuuguggcucuggcuaug

SEQ ID NO: 1010570 - RNA, 19 nt, Homo sapiens
  misc_RNA (1)...(19): siRNA sense strand
gcgcucaucgaguccauug

SEQ ID NO: 1010571 - RNA, 19 nt, Homo sapiens
  misc_RNA (1)...(19): siRNA sense strand
ggucugauuggcaagaaug

SEQ ID NO: 1010572 - RNA, 19 nt, Homo sapiens
  misc_RNA (1)...(19): siRNA sense strand
gcacagcugcggugaucgu

SEQ ID NO: 1010573 - RNA, 19 nt, Homo sapiens
  misc_RNA (1)...(19): siRNA sense strand
uuggcucgcugaaggauga

SEQ ID NO: 1010574 - RNA, 19 nt, Homo sapiens
  misc_RNA (1)...(19): siRNA sense strand
ugucugugcccuugaaaga

SEQ ID NO: 1010575 - RNA, 19 nt, Homo sapiens
  misc_RNA (1)...(19): siRNA sense strand
uaccugguuugcuggcuuu

SEQ ID NO: 1010576 - RNA, 19 nt, Homo sapiens
  misc_RNA (1)...(19): siRNA sense strand
uggcagagaacgcaacuca

SEQ ID NO: 1010577 - RNA, 19 nt, Homo sapiens
  misc_RNA (1)...(19): siRNA sense strand
gugaggguguggacuggau

SEQ ID NO: 1010578 - RNA, 19 nt, Homo sapiens
  misc_RNA (1)...(19): siRNA sense strand
aagaacugauugagaagca

SEQ ID NO: 1010579 - RNA, 19 nt, Homo sapiens
  misc_RNA (1)...(19): siRNA sense strand
gguacaagacaaaggagau

SEQ ID NO: 1010580 - RNA, 19 nt, Homo sapiens
  misc_RNA (1)...(19): siRNA sense strand
ucagauggcaggcccaagu

SEQ ID NO: 1010581 - RNA, 19 nt, Homo sapiens
  misc_RNA (1)...(19): siRNA sense strand
cagcugcggugaucgucau

SEQ ID NO: 1010582 - RNA, 19 nt, Homo sapiens
  misc_RNA (1)...(19): siRNA sense strand
agaugucugugcccuugaa

SEQ ID NO: 1010583 - RNA, 19 nt, Homo sapiens
  misc_RNA (1)...(19): siRNA sense strand
cuaugaggcaggucugauu

SEQ ID NO: 1010584 - RNA, 19 nt, Homo sapiens
  misc_RNA (1)...(19): siRNA sense strand
gcacuguggaggaggagau

SEQ ID NO: 1010585 - RNA, 19 nt, Homo sapiens
  misc_RNA (1)...(19): siRNA sense strand
ggugacugguacaagacaa

SEQ ID NO: 1010586 - RNA, 19 nt, Homo sapiens
  misc_RNA (1)...(19): siRNA sense strand
gcccuugaaagaacugauu

SEQ ID NO: 1010587 - RNA, 19 nt, Homo sapiens
  misc_RNA (1)...(19): siRNA sense strand
gauggcaggcccaaguauc

SEQ ID NO: 1010588 - RNA, 19 nt, Homo sapiens
  misc_RNA (1)...(19): siRNA sense strand
guacaagacaaaggagauc

SEQ ID NO: 1010589 - RNA, 19 nt, Homo sapiens
  misc_RNA (1)...(19): siRNA sense strand
gcuaugauuuugacguguu

SEQ ID NO: 1010590 - RNA, 19 nt, Homo sapiens
  misc_RNA (1)...(19): siRNA sense strand
gccaugauccucacaagcu

SEQ ID NO: 1010591 - RNA, 19 nt, Homo sapiens
  misc_RNA (1)...(19): siRNA sense strand
ggagaucuuacgccaugau

SEQ ID NO: 1010592 - RNA, 19 nt, Homo sapiens
  misc_RNA (1)...(19): siRNA sense strand
ugggcgagaucaagacauc

SEQ ID NO: 1010593 - RNA, 19 nt, Homo sapiens
  misc_RNA (1)...(19): siRNA sense strand
gcucgacggacaucgugaa

SEQ ID NO: 1010594 - RNA, 19 nt, Homo sapiens
  misc_RNA (1)...(19): siRNA sense strand
gagaggagacagcgcucau

SEQ ID NO: 1010595 - RNA, 19 nt, Homo sapiens
  misc_RNA (1)...(19): siRNA sense strand
uggacuggaugaacaaggu

SEQ ID NO: 1010596 - RNA, 19 nt, Homo sapiens
  misc_RNA (1)...(19): siRNA sense strand
ggacgagaauggaaacuug

SEQ ID NO: 1010597 - RNA, 19 nt, Homo sapiens
  misc_RNA (1)...(19): siRNA sense strand
ggacggagaucggagcuuu

SEQ ID NO: 1010598 - RNA, 19 nt, Homo sapiens
  misc_RNA (1)...(19): siRNA sense strand
ggagaggaauaauugagaa

SEQ ID NO: 1010599 - RNA, 19 nt, Homo sapiens
  misc_RNA (1)...(19): siRNA sense strand
gagcaucauugaaggacua

SEQ ID NO: 1010600 - RNA, 19 nt, Homo sapiens
  misc_RNA (1)...(19): siRNA sense strand
gacgagaccggaucaauaa

SEQ ID NO: 1010601 - RNA, 19 nt, Homo sapiens
  misc_RNA (1)...(19): siRNA sense strand
gaccguggaucaccugaaa

SEQ ID NO: 1010602 - RNA, 19 nt, Homo sapiens
  misc_RNA (1)...(19): siRNA sense strand
uggcagaaguugcgcguua

SEQ ID NO: 1010603 - RNA, 19 nt, Homo sapiens
  misc_RNA (1)...(19): siRNA sense strand
cgacgagaccggaucaaua

SEQ ID NO: 1010604 - RNA, 19 nt, Homo sapiens
  misc_RNA (1)...(19): siRNA sense strand
gaaguugcgcguuaucuga

SEQ ID NO: 1010605 - RNA, 19 nt, Homo sapiens
  misc_RNA (1)...(19): siRNA sense strand
gcuauggacuaucggaguu

SEQ ID NO: 1010606 - RNA, 19 nt, Homo sapiens
  misc_RNA (1)...(19): siRNA sense strand
agacggagaggaauaauug

SEQ ID NO: 1010607 - RNA, 19 nt, Homo sapiens
  misc_RNA (1)...(19): siRNA sense strand
ucaauaacaguuugucuga

SEQ ID NO: 1010608 - RNA, 19 nt, Homo sapiens
  misc_RNA (1)...(19): siRNA sense strand
gccgagauccugcagauga

SEQ ID NO: 1010609 - RNA, 19 nt, Homo sapiens
  misc_RNA (1)...(19): siRNA sense strand
uuucgcaucucaacaacua

SEQ ID NO: 1010610 - RNA, 19 nt, Homo sapiens
  misc_RNA (1)...(19): siRNA sense strand
cgacugguuucgcaucuca

SEQ ID NO: 1010611 - RNA, 19 nt, Homo sapiens
  misc_RNA (1)...(19): siRNA sense strand
ggagagugcggacgagaau

SEQ ID NO: 1010612 - RNA, 19 nt, Homo sapiens
  misc_RNA (1)...(19): siRNA sense strand
ggcaagcccuauagaccuu

SEQ ID NO: 1010613 - RNA, 19 nt, Homo sapiens
  misc_RNA (1)...(19): siRNA sense strand
ccaucgagguggagaagga

SEQ ID NO: 1010614 - RNA, 19 nt, Homo sapiens
  misc_RNA (1)...(19): siRNA sense strand
gcauacggcaggagggaaa

SEQ ID NO: 1010615 - RNA, 19 nt, Homo sapiens
  misc_RNA (1)...(19): siRNA sense strand
gaccggaucaauaacaguu

SEQ ID NO: 1010616 - RNA, 19 nt, Homo sapiens
  misc_RNA (1)...(19): siRNA sense strand
uaucugagcaucauugaag

SEQ ID NO: 1010617 - RNA, 19 nt, Homo sapiens
  misc_RNA (1)...(19): siRNA sense strand
uaucggaguuugggauuuc

SEQ ID NO: 1010618 - RNA, 19 nt, Homo sapiens
  misc_RNA (1)...(19): siRNA sense strand
uuucggcuccuuccacuua

SEQ ID NO: 1010619 - RNA, 19 nt, Homo sapiens
  misc_RNA (1)...(19): siRNA sense strand
ggucaccuccgccuccaaa

SEQ ID NO: 1010620 - RNA, 19 nt, Homo sapiens
  misc_RNA (1)...(19): siRNA sense strand
gggaucugcuaagcuagaa

SEQ ID NO: 1010621 - RNA, 19 nt, Homo sapiens
  misc_RNA (1)...(19): siRNA sense strand
gagaccggaucaauaacag

SEQ ID NO: 1010622 - RNA, 19 nt, Homo sapiens
  misc_RNA (1)...(19): siRNA sense strand
ggcagaaguugcgcguuau

SEQ ID NO: 1010623 - RNA, 19 nt, Homo sapiens
  misc_RNA (1)...(19): siRNA sense strand
ccggaucaauaacaguuug

SEQ ID NO: 1010624 - RNA, 19 nt, Homo sapiens
  misc_RNA (1)...(19): siRNA sense strand
cggcaggagggaaagguua

SEQ ID NO: 1010625 - RNA, 19 nt, Homo sapiens
  misc_RNA (1)...(19): siRNA sense strand
aagccgagauccugcagau

SEQ ID NO: 1010626 - RNA, 19 nt, Homo sapiens
  misc_RNA (1)...(19): siRNA sense strand
gacgagaauggaaacuuga

SEQ ID NO: 1010627 - RNA, 19 nt, Homo sapiens
  misc_RNA (1)...(19): siRNA sense strand
caguuugucugagcugaga

SEQ ID NO: 1010628 - RNA, 19 nt, Homo sapiens
  misc_RNA (1)...(19): siRNA sense strand
cgagaccggaucaauaaca

SEQ ID NO: 1010629 - RNA, 19 nt, Homo sapiens
  misc_RNA (1)...(19): siRNA sense strand
caucauugaaggacuagau

SEQ ID NO: 1010630 - RNA, 19 nt, Homo sapiens
  misc_RNA (1)...(19): siRNA sense strand
gaucaauaacaguuugucu

SEQ ID NO: 1010631 - RNA, 19 nt, Homo sapiens
  misc_RNA (1)...(19): siRNA sense strand
gcagaaguugcgcguuauc

SEQ ID NO: 1010632 - RNA, 19 nt, Homo sapiens
  misc_RNA (1)...(19): siRNA sense strand
cggagaggaauaauugaga

SEQ ID NO: 1010633 - RNA, 19 nt, Homo sapiens
  misc_RNA (1)...(19): siRNA sense strand
gugcggacgagaauggaaa

SEQ ID NO: 1010634 - RNA, 19 nt, Homo sapiens
  misc_RNA (1)...(19): siRNA sense strand
gagaggaauaauugagaag

SEQ ID NO: 1010635 - RNA, 19 nt, Homo sapiens
  misc_RNA (1)...(19): siRNA sense strand
ccacuuacugucucccaau

SEQ ID NO: 1010636 - RNA, 19 nt, Homo sapiens
  misc_RNA (1)...(19): siRNA sense strand
uauggacuaucggaguuug

SEQ ID NO: 1010637 - RNA, 19 nt, Homo sapiens
  misc_RNA (1)...(19): siRNA sense strand
caacagagccagaauguga

SEQ ID NO: 1010638 - RNA, 19 nt, Homo sapiens
  misc_RNA (1)...(19): siRNA sense strand
gaacccagauuuauguaau

SEQ ID NO: 1010639 - RNA, 19 nt, Homo sapiens
  misc_RNA (1)...(19): siRNA sense strand
gaaccucacuauccaagga

SEQ ID NO: 1010640 - RNA, 19 nt, Homo sapiens
  misc_RNA (1)...(19): siRNA sense strand
ccucacagcuguuucuuug

SEQ ID NO: 1010641 - RNA, 19 nt, Homo sapiens
  misc_RNA (1)...(19): siRNA sense strand
gcaacggaacccagauuua

SEQ ID NO: 1010642 - RNA, 19 nt, Homo sapiens
  misc_RNA (1)...(19): siRNA sense strand
gaguugaccuuccuagaug

SEQ ID NO: 1010643 - RNA, 19 nt, Homo sapiens
  misc_RNA (1)...(19): siRNA sense strand
gcacaaggcucagcugaac

SEQ ID NO: 1010644 - RNA, 19 nt, Homo sapiens
  misc_RNA (1)...(19): siRNA sense strand
gcccugcacucuccuguuu

SEQ ID NO: 1010645 - RNA, 19 nt, Homo sapiens
  misc_RNA (1)...(19): siRNA sense strand
caacggaacccagauuuau

SEQ ID NO: 1010646 - RNA, 19 nt, Homo sapiens
  misc_RNA (1)...(19): siRNA sense strand
ccagaaccgugcccagauu

SEQ ID NO: 1010647 - RNA, 19 nt, Homo sapiens
  misc_RNA (1)...(19): siRNA sense strand
guaugcaucuccaggcaaa

SEQ ID NO: 1010648 - RNA, 19 nt, Homo sapiens
  misc_RNA (1)...(19): siRNA sense strand
gcaaaaugcuaaagaaaag

SEQ ID NO: 1010649 - RNA, 19 nt, Homo sapiens
  misc_RNA (1)...(19): siRNA sense strand
gcaagguggagcucaugua

SEQ ID NO: 1010650 - RNA, 19 nt, Homo sapiens
  misc_RNA (1)...(19): siRNA sense strand
caacaggggucuaugugaa

SEQ ID NO: 1010651 - RNA, 19 nt, Homo sapiens
  misc_RNA (1)...(19): siRNA sense strand
ggaacccagauuuauguaa

SEQ ID NO: 1010652 - RNA, 19 nt, Homo sapiens
  misc_RNA (1)...(19): siRNA sense strand
ucacagcuguuucuuugag

SEQ ID NO: 1010653 - RNA, 19 nt, Homo sapiens
  misc_RNA (1)...(19): siRNA sense strand
aaaagcaauuucagccuua

SEQ ID NO: 1010654 - RNA, 19 nt, Homo sapiens
  misc_RNA (1)...(19): siRNA sense strand
ggacacgggacucuacauc

SEQ ID NO: 1010655 - RNA, 19 nt, Homo sapiens
  misc_RNA (1)...(19): siRNA sense strand
acacgggacucuacaucug

SEQ ID NO: 1010656 - RNA, 19 nt, Homo sapiens
  misc_RNA (1)...(19): siRNA sense strand
ugaguugaccuuccuagau

SEQ ID NO: 1010657 - RNA, 19 nt, Homo sapiens
  misc_RNA (1)...(19): siRNA sense strand
ggcaacggaacccagauuu

SEQ ID NO: 1010658 - RNA, 19 nt, Homo sapiens
  misc_RNA (1)...(19): siRNA sense strand
ugaccuuccuagaugauuc

SEQ ID NO: 1010659 - RNA, 19 nt, Homo sapiens
  misc_RNA (1)...(19): siRNA sense strand
ucauguacccaccgccaua

SEQ ID NO: 1010660 - RNA, 19 nt, Homo sapiens
  misc_RNA (1)...(19): siRNA sense strand
caagguggagcucauguac

SEQ ID NO: 1010661 - RNA, 19 nt, Homo sapiens
  misc_RNA (1)...(19): siRNA sense strand
aaagcaauuucagccuuau

SEQ ID NO: 1010662 - RNA, 19 nt, Homo sapiens
  misc_RNA (1)...(19): siRNA sense strand
caguggaaaucaagugaac

SEQ ID NO: 1010663 - RNA, 19 nt, Homo sapiens
  misc_RNA (1)...(19): siRNA sense strand
ccagcuuugugugugagua

SEQ ID NO: 1010664 - RNA, 19 nt, Homo sapiens
  misc_RNA (1)...(19): siRNA sense strand
gcaauuucagccuuauuuu

SEQ ID NO: 1010665 - RNA, 19 nt, Homo sapiens
  misc_RNA (1)...(19): siRNA sense strand
cauacuaccugggcauagg

SEQ ID NO: 1010666 - RNA, 19 nt, Homo sapiens
  misc_RNA (1)...(19): siRNA sense strand
cgaggcaucgccagcuuug

SEQ ID NO: 1010667 - RNA, 19 nt, Homo sapiens
  misc_RNA (1)...(19): siRNA sense strand
gaaugaguugaccuuccua

SEQ ID NO: 1010668 - RNA, 19 nt, Homo sapiens
  misc_RNA (1)...(19): siRNA sense strand
agcaauuucagccuuauuu

SEQ ID NO: 1010669 - RNA, 19 nt, Homo sapiens
  misc_RNA (1)...(19): siRNA sense strand
acccagauuuauguaauug

SEQ ID NO: 1010670 - RNA, 19 nt, Homo sapiens
  misc_RNA (1)...(19): siRNA sense strand
acagccaggugacugaagu

SEQ ID NO: 1010671 - RNA, 19 nt, Homo sapiens
  misc_RNA (1)...(19): siRNA sense strand
ggcacaaggcucagcugaa

SEQ ID NO: 1010672 - RNA, 19 nt, Homo sapiens
  misc_RNA (1)...(19): siRNA sense strand
gauccuugcagcaguuagu

SEQ ID NO: 1010673 - RNA, 19 nt, Homo sapiens
  misc_RNA (1)...(19): siRNA sense strand
gccagaaugugaaaagcaa

SEQ ID NO: 1010674 - RNA, 19 nt, Homo sapiens
  misc_RNA (1)...(19): siRNA sense strand
ggagagaguucaggaaauu

SEQ ID NO: 1010675 - RNA, 19 nt, Homo sapiens
  misc_RNA (1)...(19): siRNA sense strand
gagaaucuaugauaccaaa

SEQ ID NO: 1010676 - RNA, 19 nt, Homo sapiens
  misc_RNA (1)...(19): siRNA sense strand
gcucuaagcagaauaaauu

SEQ ID NO: 1010677 - RNA, 19 nt, Homo sapiens
  misc_RNA (1)...(19): siRNA sense strand
ggaaaagucugcaauuaaa

SEQ ID NO: 1010678 - RNA, 19 nt, Homo sapiens
  misc_RNA (1)...(19): siRNA sense strand
gaagaaaguuuagguuaca

SEQ ID NO: 1010679 - RNA, 19 nt, Homo sapiens
  misc_RNA (1)...(19): siRNA sense strand
uaaagucacuggaagaaau

SEQ ID NO: 1010680 - RNA, 19 nt, Homo sapiens
  misc_RNA (1)...(19): siRNA sense strand
gaacacaaagcaaagacua

SEQ ID NO: 1010681 - RNA, 19 nt, Homo sapiens
  misc_RNA (1)...(19): siRNA sense strand
uaauguaucuucagggaaa

SEQ ID NO: 1010682 - RNA, 19 nt, Homo sapiens
  misc_RNA (1)...(19): siRNA sense strand
caaaggagaaggagacaaa

SEQ ID NO: 1010683 - RNA, 19 nt, Homo sapiens
  misc_RNA (1)...(19): siRNA sense strand
cuaauaaggccgauucuaa

SEQ ID NO: 1010684 - RNA, 19 nt, Homo sapiens
  misc_RNA (1)...(19): siRNA sense strand
uaaggccgauucuaaugua

SEQ ID NO: 1010685 - RNA, 19 nt, Homo sapiens
  misc_RNA (1)...(19): siRNA sense strand
gaauauggcacuccuacaa

SEQ ID NO: 1010686 - RNA, 19 nt, Homo sapiens
  misc_RNA (1)...(19): siRNA sense strand
ugaggaagaggaaacauua

SEQ ID NO: 1010687 - RNA, 19 nt, Homo sapiens
  misc_RNA (1)...(19): siRNA sense strand
gaagaaauaauggcuuuga

SEQ ID NO: 1010688 - RNA, 19 nt, Homo sapiens
  misc_RNA (1)...(19): siRNA sense strand
gaacuuacacaaauaccuu

SEQ ID NO: 1010689 - RNA, 19 nt, Homo sapiens
  misc_RNA (1)...(19): siRNA sense strand
cacaagagaaucuaugaua

SEQ ID NO: 1010690 - RNA, 19 nt, Homo sapiens
  misc_RNA (1)...(19): siRNA sense strand
uagaagauauauccaagga

SEQ ID NO: 1010691 - RNA, 19 nt, Homo sapiens
  misc_RNA (1)...(19): siRNA sense strand
ggaaauggaagacacacaa

SEQ ID NO: 1010692 - RNA, 19 nt, Homo sapiens
  misc_RNA (1)...(19): siRNA sense strand
aaagagcguuccucaucua

SEQ ID NO: 1010693 - RNA, 19 nt, Homo sapiens
  misc_RNA (1)...(19): siRNA sense strand
gagcguuccucaucuaaag

SEQ ID NO: 1010694 - RNA, 19 nt, Homo sapiens
  misc_RNA (1)...(19): siRNA sense strand
gaacgucuagugaaggaaa

SEQ ID NO: 1010695 - RNA, 19 nt, Homo sapiens
  misc_RNA (1)...(19): siRNA sense strand
aauaauggcuuugaacuuc

SEQ ID NO: 1010696 - RNA, 19 nt, Homo sapiens
  misc_RNA (1)...(19): siRNA sense strand
gaagaggaaacauuaaagu

SEQ ID NO: 1010697 - RNA, 19 nt, Homo sapiens
  misc_RNA (1)...(19): siRNA sense strand
uggaagaaauaauggcuuu

SEQ ID NO: 1010698 - RNA, 19 nt, Homo sapiens
  misc_RNA (1)...(19): siRNA sense strand
gaaauggaagacacacaaa

SEQ ID NO: 1010699 - RNA, 19 nt, Homo sapiens
  misc_RNA (1)...(19): siRNA sense strand
guuacaaccuagacaguga

SEQ ID NO: 1010700 - RNA, 19 nt, Homo sapiens
  misc_RNA (1)...(19): siRNA sense strand
gagaguccuuccuugagaa

SEQ ID NO: 1010701 - RNA, 19 nt, Homo sapiens
  misc_RNA (1)...(19): siRNA sense strand
gaaauaauggcuuugaacu

SEQ ID NO: 1010702 - RNA, 19 nt, Homo sapiens
  misc_RNA (1)...(19): siRNA sense strand
gcuuagaucucagucauca

SEQ ID NO: 1010703 - RNA, 19 nt, Homo sapiens
  misc_RNA (1)...(19): siRNA sense strand
ugaagaaaguuuagguuac

SEQ ID NO: 1010704 - RNA, 19 nt, Homo sapiens
  misc_RNA (1)...(19): siRNA sense strand
guguugcgcuuagaagaua

SEQ ID NO: 1010705 - RNA, 19 nt, Homo sapiens
  misc_RNA (1)...(19): siRNA sense strand
ccuggaacuuacacaaaua

SEQ ID NO: 1010706 - RNA, 19 nt, Homo sapiens
  misc_RNA (1)...(19): siRNA sense strand
aaauggacaucucucaaga

SEQ ID NO: 1010707 - RNA, 19 nt, Homo sapiens
  misc_RNA (1)...(19): siRNA sense strand
ccaaggaaccgagugauga

SEQ ID NO: 1010708 - RNA, 19 nt, Homo sapiens
  misc_RNA (1)...(19): siRNA sense strand
gaccuuugcgcucagaaua

SEQ ID NO: 1010709 - RNA, 19 nt, Homo sapiens
  misc_RNA (1)...(19): siRNA sense strand
caggaaaagucugcaauua

SEQ ID NO: 1010710 - RNA, 19 nt, Homo sapiens
  misc_RNA (1)...(19): siRNA sense strand
gggcuuagaucucagucau

SEQ ID NO: 1010711 - RNA, 19 nt, Homo sapiens
  misc_RNA (1)...(19): siRNA sense strand
uaaagagcguuccucaucu

SEQ ID NO: 1010712 - RNA, 19 nt, Homo sapiens
  misc_RNA (1)...(19): siRNA sense strand
gaauagugaccaaauccaa

SEQ ID NO: 1010713 - RNA, 19 nt, Homo sapiens
  misc_RNA (1)...(19): siRNA sense strand
aaauugugcucuuccaguu

SEQ ID NO: 1010714 - RNA, 19 nt, Homo sapiens
  misc_RNA (1)...(19): siRNA sense strand
uaauaaggccgauucuaau

SEQ ID NO: 1010715 - RNA, 19 nt, Homo sapiens
  misc_RNA (1)...(19): siRNA sense strand
gcacugaaaagaaaacuaa

SEQ ID NO: 1010716 - RNA, 19 nt, Homo sapiens
  misc_RNA (1)...(19): siRNA sense strand
gaaggagagaguucaggaa

SEQ ID NO: 1010717 - RNA, 19 nt, Homo sapiens
  misc_RNA (1)...(19): siRNA sense strand
ggaagaggaaacauuaaag

SEQ ID NO: 1010718 - RNA, 19 nt, Homo sapiens
  misc_RNA (1)...(19): siRNA sense strand
agagaguccuuccuugaga

SEQ ID NO: 1010719 - RNA, 19 nt, Homo sapiens
  misc_RNA (1)...(19): siRNA sense strand
gaggaagaggaaacauuaa

SEQ ID NO: 1010720 - RNA, 19 nt, Homo sapiens
  misc_RNA (1)...(19): siRNA sense strand
acaaggaacacaaagcaaa

SEQ ID NO: 1010721 - RNA, 19 nt, Homo sapiens
  misc_RNA (1)...(19): siRNA sense strand
aaacauauugcacugaaga

SEQ ID NO: 1010722 - RNA, 19 nt, Homo sapiens
  misc_RNA (1)...(19): siRNA sense strand
gaugaagaaaguuuagguu

SEQ ID NO: 1010723 - RNA, 19 nt, Homo sapiens
  misc_RNA (1)...(19): siRNA sense strand
ggacauguucauccuggaa

SEQ ID NO: 1010724 - RNA, 19 nt, Homo sapiens
  misc_RNA (1)...(19): siRNA sense strand
acaagagaaucuaugauac

SEQ ID NO: 1010725 - RNA, 19 nt, Homo sapiens
  misc_RNA (1)...(19): siRNA sense strand
gcaauucuggccaccauuc

SEQ ID NO: 1010726 - RNA, 19 nt, Homo sapiens
  misc_RNA (1)...(19): siRNA sense strand
ugauagugaugaagaaagu

SEQ ID NO: 1010727 - RNA, 19 nt, Homo sapiens
  misc_RNA (1)...(19): siRNA sense strand
ugcagcaccuucagauaaa

SEQ ID NO: 1010728 - RNA, 19 nt, Homo sapiens
  misc_RNA (1)...(19): siRNA sense strand
cugcagcaccuucagauaa

SEQ ID NO: 1010729 - RNA, 19 nt, Homo sapiens
  misc_RNA (1)...(19): siRNA sense strand
ccaaggagacuaagaugca

SEQ ID NO: 1010730 - RNA, 19 nt, Homo sapiens
  misc_RNA (1)...(19): siRNA sense strand
ugagaagcguccugaugga

SEQ ID NO: 1010731 - RNA, 19 nt, Homo sapiens
  misc_RNA (1)...(19): siRNA sense strand
gaaggaaauggaagacaca

SEQ ID NO: 1010732 - RNA, 19 nt, Homo sapiens
  misc_RNA (1)...(19): siRNA sense strand
caaacacaaggaacacaaa

SEQ ID NO: 1010733 - RNA, 19 nt, Homo sapiens
  misc_RNA (1)...(19): siRNA sense strand
guaccaaggagacuaagau

SEQ ID NO: 1010734 - RNA, 19 nt, Homo sapiens
  misc_RNA (1)...(19): siRNA sense strand
caaggaaccgagugaugaa

SEQ ID NO: 1010735 - RNA, 19 nt, Homo sapiens
  misc_RNA (1)...(19): siRNA sense strand
ggugauguguugcgcuuag

SEQ ID NO: 1010736 - RNA, 19 nt, Homo sapiens
  misc_RNA (1)...(19): siRNA sense strand
agacuaagaugcagaaacc

SEQ ID NO: 1010737 - RNA, 19 nt, Homo sapiens
  misc_RNA (1)...(19): siRNA sense strand
aaagucacuggaagaaaua

SEQ ID NO: 1010738 - RNA, 19 nt, Homo sapiens
  misc_RNA (1)...(19): siRNA sense strand
ccuagacagugaugaggaa

SEQ ID NO: 1010739 - RNA, 19 nt, Homo sapiens
  misc_RNA (1)...(19): siRNA sense strand
auaaagagcguuccucauc

SEQ ID NO: 1010740 - RNA, 19 nt, Homo sapiens
  misc_RNA (1)...(19): siRNA sense strand
ggaaccgagugaugaaacu

SEQ ID NO: 1010741 - RNA, 19 nt, Homo sapiens
  misc_RNA (1)...(19): siRNA sense strand
auggacaucucucaagaaa

SEQ ID NO: 1010742 - RNA, 19 nt, Homo sapiens
  misc_RNA (1)...(19): siRNA sense strand
cacaaagcaaagacuaaua

SEQ ID NO: 1010743 - RNA, 19 nt, Homo sapiens
  misc_RNA (1)...(19): siRNA sense strand
caggaauagugaccaaauc

SEQ ID NO: 1010744 - RNA, 19 nt, Homo sapiens
  misc_RNA (1)...(19): siRNA sense strand
agaggaaacauuaaaguca

SEQ ID NO: 1010745 - RNA, 19 nt, Homo sapiens
  misc_RNA (1)...(19): siRNA sense strand
gcacaagagaaucuaugau

SEQ ID NO: 1010746 - RNA, 19 nt, Homo sapiens
  misc_RNA (1)...(19): siRNA sense strand
cuacagaauccaccaaaca

SEQ ID NO: 1010747 - RNA, 19 nt, Homo sapiens
  misc_RNA (1)...(19): siRNA sense strand
guuccucucuaguaccauu

SEQ ID NO: 1010748 - RNA, 19 nt, Homo sapiens
  misc_RNA (1)...(19): siRNA sense strand
ggagacaaaacuaccuuua

SEQ ID NO: 1010749 - RNA, 19 nt, Homo sapiens
  misc_RNA (1)...(19): siRNA sense strand
ggaccacaucagaaagaaa

SEQ ID NO: 1010750 - RNA, 19 nt, Homo sapiens
  misc_RNA (1)...(19): siRNA sense strand
gaaguugugccauguaucc

SEQ ID NO: 1010751 - RNA, 19 nt, Homo sapiens
  misc_RNA (1)...(19): siRNA sense strand
uggaaguugugccauguau

SEQ ID NO: 1010752 - RNA, 19 nt, Homo sapiens
  misc_RNA (1)...(19): siRNA sense strand
ccaaacacaaggaacacaa

SEQ ID NO: 1010753 - RNA, 19 nt, Homo sapiens
  misc_RNA (1)...(19): siRNA sense strand
gcagguaccaaggagacua

SEQ ID NO: 1010754 - RNA, 19 nt, Homo sapiens
  misc_RNA (1)...(19): siRNA sense strand
gcuuggcaccuucaaauuc

SEQ ID NO: 1010755 - RNA, 19 nt, Homo sapiens
  misc_RNA (1)...(19): siRNA sense strand
cagaauccaccaaacacaa

SEQ ID NO: 1010756 - RNA, 19 nt, Homo sapiens
  misc_RNA (1)...(19): siRNA sense strand
gcugguuccucucuaguac

SEQ ID NO: 1010757 - RNA, 19 nt, Homo sapiens
  misc_RNA (1)...(19): siRNA sense strand
ccaccaaacacaaggaaca

SEQ ID NO: 1010758 - RNA, 19 nt, Homo sapiens
  misc_RNA (1)...(19): siRNA sense strand
ccaggaauagugaccaaau

SEQ ID NO: 1010759 - RNA, 19 nt, Homo sapiens
  misc_RNA (1)...(19): siRNA sense strand
gaaaauggacaucucucaa

SEQ ID NO: 1010760 - RNA, 19 nt, Homo sapiens
  misc_RNA (1)...(19): siRNA sense strand
caaggaacacaaagcaaag

SEQ ID NO: 1010761 - RNA, 19 nt, Homo sapiens
  misc_RNA (1)...(19): siRNA sense strand
gaaaagcacaagagaaucu

SEQ ID NO: 1010762 - RNA, 19 nt, Homo sapiens
  misc_RNA (1)...(19): siRNA sense strand
gaaaccccacuuaccuuua

SEQ ID NO: 1010763 - RNA, 19 nt, Homo sapiens
  misc_RNA (1)...(19): siRNA sense strand
aaagcuagcaaccuucaga

SEQ ID NO: 1010764 - RNA, 19 nt, Homo sapiens
  misc_RNA (1)...(19): siRNA sense strand
aggaagaggaaacauuaaa

SEQ ID NO: 1010765 - RNA, 19 nt, Homo sapiens
  misc_RNA (1)...(19): siRNA sense strand
aaggaacucuguggacuca

SEQ ID NO: 1010766 - RNA, 19 nt, Homo sapiens
  misc_RNA (1)...(19): siRNA sense strand
aaggagagaguucaggaaa

SEQ ID NO: 1010767 - RNA, 19 nt, Homo sapiens
  misc_RNA (1)...(19): siRNA sense strand
ggccgauucuaauguaucu

SEQ ID NO: 1010768 - RNA, 19 nt, Homo sapiens
  misc_RNA (1)...(19): siRNA sense strand
gauaaagagcguuccucau

SEQ ID NO: 1010769 - RNA, 19 nt, Homo sapiens
  misc_RNA (1)...(19): siRNA sense strand
gcuuagaagauauauccaa

SEQ ID NO: 1010770 - RNA, 19 nt, Homo sapiens
  misc_RNA (1)...(19): siRNA sense strand
uuagaucucagucaucaga

SEQ ID NO: 1010771 - RNA, 19 nt, Homo sapiens
  misc_RNA (1)...(19): siRNA sense strand
ccaaggggcuuagaucuca

SEQ ID NO: 1010772 - RNA, 19 nt, Homo sapiens
  misc_RNA (1)...(19): siRNA sense strand
agacuaauaaggccgauuc

SEQ ID NO: 1010773 - RNA, 19 nt, Homo sapiens
  misc_RNA (1)...(19): siRNA sense strand
gcgcuuagaagauauaucc

SEQ ID NO: 1010774 - RNA, 19 nt, Homo sapiens
  misc_RNA (1)...(19): siRNA sense strand
ggagagaguucaggaaauu

SEQ ID NO: 1010775 - RNA, 19 nt, Homo sapiens
  misc_RNA (1)...(19): siRNA sense strand
ggaaaagucugcaauuaaa

SEQ ID NO: 1010776 - RNA, 19 nt, Homo sapiens
  misc_RNA (1)...(19): siRNA sense strand
gaagaaaguuuagguuaca

SEQ ID NO: 1010777 - RNA, 19 nt, Homo sapiens
  misc_RNA (1)...(19): siRNA sense strand
uaaagucacuggaagaaau

SEQ ID NO: 1010778 - RNA, 19 nt, Homo sapiens
  misc_RNA (1)...(19): siRNA sense strand
gaacacaaagcaaagacua

SEQ ID NO: 1010779 - RNA, 19 nt, Homo sapiens
  misc_RNA (1)...(19): siRNA sense strand
uaauguaucuucagggaaa

SEQ ID NO: 1010780 - RNA, 19 nt, Homo sapiens
  misc_RNA (1)...(19): siRNA sense strand
caaaggagaaggagacaaa

SEQ ID NO: 1010781 - RNA, 19 nt, Homo sapiens
  misc_RNA (1)...(19): siRNA sense strand
cuaauaaggccgauucuaa

SEQ ID NO: 1010782 - RNA, 19 nt, Homo sapiens
  misc_RNA (1)...(19): siRNA sense strand
uaaggccgauucuaaugua

SEQ ID NO: 1010783 - RNA, 19 nt, Homo sapiens
  misc_RNA (1)...(19): siRNA sense strand
gaauauggcacuccuacaa

SEQ ID NO: 1010784 - RNA, 19 nt, Homo sapiens
  misc_RNA (1)...(19): siRNA sense strand
ugaggaagaggaaacauua

SEQ ID NO: 1010785 - RNA, 19 nt, Homo sapiens
  misc_RNA (1)...(19): siRNA sense strand
gaagaaauaauggcuuuga

SEQ ID NO: 1010786 - RNA, 19 nt, Homo sapiens
  misc_RNA (1)...(19): siRNA sense strand
gaacuuacacaaauaccuu

SEQ ID NO: 1010787 - RNA, 19 nt, Homo sapiens
  misc_RNA (1)...(19): siRNA sense strand
uagaagauauauccaagga

SEQ ID NO: 1010788 - RNA, 19 nt, Homo sapiens
  misc_RNA (1)...(19): siRNA sense strand
ggaaauggaagacacacaa

SEQ ID NO: 1010789 - RNA, 19 nt, Homo sapiens
  misc_RNA (1)...(19): siRNA sense strand
aaagagcguuccucaucua

SEQ ID NO: 1010790 - RNA, 19 nt, Homo sapiens
  misc_RNA (1)...(19): siRNA sense strand
gagcguuccucaucuaaag

SEQ ID NO: 1010791 - RNA, 19 nt, Homo sapiens
  misc_RNA (1)...(19): siRNA sense strand
gaacgucuagugaaggaaa

SEQ ID NO: 1010792 - RNA, 19 nt, Homo sapiens
  misc_RNA (1)...(19): siRNA sense strand
aauaauggcuuugaacuuc

SEQ ID NO: 1010793 - RNA, 19 nt, Homo sapiens
  misc_RNA (1)...(19): siRNA sense strand
gaagaggaaacauuaaagu

SEQ ID NO: 1010794 - RNA, 19 nt, Homo sapiens
  misc_RNA (1)...(19): siRNA sense strand
uggaagaaauaauggcuuu

SEQ ID NO: 1010795 - RNA, 19 nt, Homo sapiens
  misc_RNA (1)...(19): siRNA sense strand
gaaauggaagacacacaaa

SEQ ID NO: 1010796 - RNA, 19 nt, Homo sapiens
  misc_RNA (1)...(19): siRNA sense strand
guuacaaccuagacaguga

SEQ ID NO: 1010797 - RNA, 19 nt, Homo sapiens
  misc_RNA (1)...(19): siRNA sense strand
gagaguccuuccuugagaa

SEQ ID NO: 1010798 - RNA, 19 nt, Homo sapiens
  misc_RNA (1)...(19): siRNA sense strand
gaaauaauggcuuugaacu

SEQ ID NO: 1010799 - RNA, 19 nt, Homo sapiens
  misc_RNA (1)...(19): siRNA sense strand
gcuuagaucucagucauca

SEQ ID NO: 1010800 - RNA, 19 nt, Homo sapiens
  misc_RNA (1)...(19): siRNA sense strand
ugaagaaaguuuagguuac

SEQ ID NO: 1010801 - RNA, 19 nt, Homo sapiens
  misc_RNA (1)...(19): siRNA sense strand
guguugcgcuuagaagaua

SEQ ID NO: 1010802 - RNA, 19 nt, Homo sapiens
  misc_RNA (1)...(19): siRNA sense strand
ccuggaacuuacacaaaua

SEQ ID NO: 1010803 - RNA, 19 nt, Homo sapiens
  misc_RNA (1)...(19): siRNA sense strand
ccaaggaaccgagugauga

SEQ ID NO: 1010804 - RNA, 19 nt, Homo sapiens
  misc_RNA (1)...(19): siRNA sense strand
gaccuuugcgcucagaaua

SEQ ID NO: 1010805 - RNA, 19 nt, Homo sapiens
  misc_RNA (1)...(19): siRNA sense strand
caggaaaagucugcaauua

SEQ ID NO: 1010806 - RNA, 19 nt, Homo sapiens
  misc_RNA (1)...(19): siRNA sense strand
gggcuuagaucucagucau

SEQ ID NO: 1010807 - RNA, 19 nt, Homo sapiens
  misc_RNA (1)...(19): siRNA sense strand
uaaagagcguuccucaucu

SEQ ID NO: 1010808 - RNA, 19 nt, Homo sapiens
  misc_RNA (1)...(19): siRNA sense strand
gaauagugaccaaauccaa

SEQ ID NO: 1010809 - RNA, 19 nt, Homo sapiens
  misc_RNA (1)...(19): siRNA sense strand
aaauugugcucuuccaguu

SEQ ID NO: 1010810 - RNA, 19 nt, Homo sapiens
  misc_RNA (1)...(19): siRNA sense strand
uaauaaggccgauucuaau

SEQ ID NO: 1010811 - RNA, 19 nt, Homo sapiens
  misc_RNA (1)...(19): siRNA sense strand
gcacugaaaagaaaacuaa

SEQ ID NO: 1010812 - RNA, 19 nt, Homo sapiens
  misc_RNA (1)...(19): siRNA sense strand
gaaggagagaguucaggaa

SEQ ID NO: 1010813 - RNA, 19 nt, Homo sapiens
  misc_RNA (1)...(19): siRNA sense strand
ggaagaggaaacauuaaag

SEQ ID NO: 1010814 - RNA, 19 nt, Homo sapiens
  misc_RNA (1)...(19): siRNA sense strand
aaacauauugcacugaaga

SEQ ID NO: 1010815 - RNA, 19 nt, Homo sapiens
  misc_RNA (1)...(19): siRNA sense strand
gaggaagaggaaacauuaa

SEQ ID NO: 1010816 - RNA, 19 nt, Homo sapiens
  misc_RNA (1)...(19): siRNA sense strand
agagaguccuuccuugaga

SEQ ID NO: 1010817 - RNA, 19 nt, Homo sapiens
  misc_RNA (1)...(19): siRNA sense strand
acaaggaacacaaagcaaa

SEQ ID NO: 1010818 - RNA, 19 nt, Homo sapiens
  misc_RNA (1)...(19): siRNA sense strand
gaugaagaaaguuuagguu

SEQ ID NO: 1010819 - RNA, 19 nt, Homo sapiens
  misc_RNA (1)...(19): siRNA sense strand
ggacauguucauccuggaa

SEQ ID NO: 1010820 - RNA, 19 nt, Homo sapiens
  misc_RNA (1)...(19): siRNA sense strand
gcaauucuggccaccauuc

SEQ ID NO: 1010821 - RNA, 19 nt, Homo sapiens
  misc_RNA (1)...(19): siRNA sense strand
ugauagugaugaagaaagu

SEQ ID NO: 1010822 - RNA, 19 nt, Homo sapiens
  misc_RNA (1)...(19): siRNA sense strand
ugcagcaccuucagauaaa

SEQ ID NO: 1010823 - RNA, 19 nt, Homo sapiens
  misc_RNA (1)...(19): siRNA sense strand
cugcagcaccuucagauaa

SEQ ID NO: 1010824 - RNA, 19 nt, Homo sapiens
  misc_RNA (1)...(19): siRNA sense strand
ccaaggagacuaagaugca

SEQ ID NO: 1010825 - RNA, 19 nt, Homo sapiens
  misc_RNA (1)...(19): siRNA sense strand
guaccaaggagacuaagau

SEQ ID NO: 1010826 - RNA, 19 nt, Homo sapiens
  misc_RNA (1)...(19): siRNA sense strand
gaaggaaauggaagacaca

SEQ ID NO: 1010827 - RNA, 19 nt, Homo sapiens
  misc_RNA (1)...(19): siRNA sense strand
caaggaaccgagugaugaa

SEQ ID NO: 1010828 - RNA, 19 nt, Homo sapiens
  misc_RNA (1)...(19): siRNA sense strand
ugagaagcguccugaugga

SEQ ID NO: 1010829 - RNA, 19 nt, Homo sapiens
  misc_RNA (1)...(19): siRNA sense strand
caaacacaaggaacacaaa

SEQ ID NO: 1010830 - RNA, 19 nt, Homo sapiens
  misc_RNA (1)...(19): siRNA sense strand
ggugauguguugcgcuuag

SEQ ID NO: 1010831 - RNA, 19 nt, Homo sapiens
  misc_RNA (1)...(19): siRNA sense strand
agacuaagaugcagaaacc

SEQ ID NO: 1010832 - RNA, 19 nt, Homo sapiens
  misc_RNA (1)...(19): siRNA sense strand
aaagucacuggaagaaaua

SEQ ID NO: 1010833 - RNA, 19 nt, Homo sapiens
  misc_RNA (1)...(19): siRNA sense strand
ccuagacagugaugaggaa

SEQ ID NO: 1010834 - RNA, 19 nt, Homo sapiens
  misc_RNA (1)...(19): siRNA sense strand
auaaagagcguuccucauc

SEQ ID NO: 1010835 - RNA, 19 nt, Homo sapiens
  misc_RNA (1)...(19): siRNA sense strand
ggaaccgagugaugaaacu

SEQ ID NO: 1010836 - RNA, 19 nt, Homo sapiens
  misc_RNA (1)...(19): siRNA sense strand
cacaaagcaaagacuaaua

SEQ ID NO: 1010837 - RNA, 19 nt, Homo sapiens
  misc_RNA (1)...(19): siRNA sense strand
caggaauagugaccaaauc

SEQ ID NO: 1010838 - RNA, 19 nt, Homo sapiens
  misc_RNA (1)...(19): siRNA sense strand
agaggaaacauuaaaguca

SEQ ID NO: 1010839 - RNA, 19 nt, Homo sapiens
  misc_RNA (1)...(19): siRNA sense strand
cuacagaauccaccaaaca

SEQ ID NO: 1010840 - RNA, 19 nt, Homo sapiens
  misc_RNA (1)...(19): siRNA sense strand
guuccucucuaguaccauu

SEQ ID NO: 1010841 - RNA, 19 nt, Homo sapiens
  misc_RNA (1)...(19): siRNA sense strand
ggagacaaaacuaccuuua

SEQ ID NO: 1010842 - RNA, 19 nt, Homo sapiens
  misc_RNA (1)...(19): siRNA sense strand
gcagguaccaaggagacua

SEQ ID NO: 1010843 - RNA, 19 nt, Homo sapiens
  misc_RNA (1)...(19): siRNA sense strand
ggaccacaucagaaagaaa

SEQ ID NO: 1010844 - RNA, 19 nt, Homo sapiens
  misc_RNA (1)...(19): siRNA sense strand
gcuuggcaccuucaaauuc

SEQ ID NO: 1010845 - RNA, 19 nt, Homo sapiens
  misc_RNA (1)...(19): siRNA sense strand
gaaguugugccauguaucc

SEQ ID NO: 1010846 - RNA, 19 nt, Homo sapiens
  misc_RNA (1)...(19): siRNA sense strand
uggaaguugugccauguau

SEQ ID NO: 1010847 - RNA, 19 nt, Homo sapiens
  misc_RNA (1)...(19): siRNA sense strand
ccaaacacaaggaacacaa

SEQ ID NO: 1010848 - RNA, 19 nt, Homo sapiens
  misc_RNA (1)...(19): siRNA sense strand
cagaauccaccaaacacaa

SEQ ID NO: 1010849 - RNA, 19 nt, Homo sapiens
  misc_RNA (1)...(19): siRNA sense strand
gcugguuccucucuaguac

SEQ ID NO: 1010850 - RNA, 19 nt, Homo sapiens
  misc_RNA (1)...(19): siRNA sense strand
ccaccaaacacaaggaaca

SEQ ID NO: 1010851 - RNA, 19 nt, Homo sapiens
  misc_RNA (1)...(19): siRNA sense strand
gaaaccccacuuaccuuua

SEQ ID NO: 1010852 - RNA, 19 nt, Homo sapiens
  misc_RNA (1)...(19): siRNA sense strand
ccaggaauagugaccaaau

SEQ ID NO: 1010853 - RNA, 19 nt, Homo sapiens
  misc_RNA (1)...(19): siRNA sense strand
caaggaacacaaagcaaag

SEQ ID NO: 1010854 - RNA, 19 nt, Homo sapiens
  misc_RNA (1)...(19): siRNA sense strand
aaagcuagcaaccuucaga

SEQ ID NO: 1010855 - RNA, 19 nt, Homo sapiens
  misc_RNA (1)...(19): siRNA sense strand
aggaagaggaaacauuaaa

SEQ ID NO: 1010856 - RNA, 19 nt, Homo sapiens
  misc_RNA (1)...(19): siRNA sense strand
aaggagagaguucaggaaa

SEQ ID NO: 1010857 - RNA, 19 nt, Homo sapiens
  misc_RNA (1)...(19): siRNA sense strand
ggccgauucuaauguaucu

SEQ ID NO: 1010858 - RNA, 19 nt, Homo sapiens
  misc_RNA (1)...(19): siRNA sense strand
gauaaagagcguuccucau

SEQ ID NO: 1010859 - RNA, 19 nt, Homo sapiens
  misc_RNA (1)...(19): siRNA sense strand
gcuuagaagauauauccaa

SEQ ID NO: 1010860 - RNA, 19 nt, Homo sapiens
  misc_RNA (1)...(19): siRNA sense strand
uuagaucucagucaucaga

SEQ ID NO: 1010861 - RNA, 19 nt, Homo sapiens
  misc_RNA (1)...(19): siRNA sense strand
ccaaggggcuuagaucuca

SEQ ID NO: 1010862 - RNA, 19 nt, Homo sapiens
  misc_RNA (1)...(19): siRNA sense strand
gcgcuuagaagauauaucc

SEQ ID NO: 1010863 - RNA, 19 nt, Homo sapiens
  misc_RNA (1)...(19): siRNA sense strand
agacuaauaaggccgauuc

SEQ ID NO: 1010864 - RNA, 19 nt, Homo sapiens
  misc_RNA (1)...(19): siRNA sense strand
ugaaacugauggcucuucu

SEQ ID NO: 1010865 - RNA, 19 nt, Homo sapiens
  misc_RNA (1)...(19): siRNA sense strand
acacaaggaacacaaagca

SEQ ID NO: 1010866 - RNA, 19 nt, Homo sapiens
  misc_RNA (1)...(19): siRNA sense strand
gacuauacaggacauguuc

SEQ ID NO: 1010867 - RNA, 19 nt, Homo sapiens
  misc_RNA (1)...(19): siRNA sense strand
caaccuagacagugaugag

SEQ ID NO: 1010868 - RNA, 19 nt, Homo sapiens
  misc_RNA (1)...(19): siRNA sense strand
ggggugauuuugauaguga

SEQ ID NO: 1010869 - RNA, 19 nt, Homo sapiens
  misc_RNA (1)...(19): siRNA sense strand
aauauggcacuccuacaaa

SEQ ID NO: 1010870 - RNA, 19 nt, Homo sapiens
  misc_RNA (1)...(19): siRNA sense strand
aauaaggccgauucuaaug

SEQ ID NO: 1010871 - RNA, 19 nt, Homo sapiens
  misc_RNA (1)...(19): siRNA sense strand
acacaaagcaaagacuaau

SEQ ID NO: 1010872 - RNA, 19 nt, Homo sapiens
  misc_RNA (1)...(19): siRNA sense strand
ggaagaaauaauggcuuug

SEQ ID NO: 1010873 - RNA, 19 nt, Homo sapiens
  misc_RNA (1)...(19): siRNA sense strand
uccuggaacuuacacaaau

SEQ ID NO: 1010874 - RNA, 19 nt, Homo sapiens
  misc_RNA (1)...(19): siRNA sense strand
ccacugagcuauaaauuga

SEQ ID NO: 1010875 - RNA, 19 nt, Homo sapiens
  misc_RNA (1)...(19): siRNA sense strand
ccacagaacuuugcuaaug

SEQ ID NO: 1010876 - RNA, 19 nt, Homo sapiens
  misc_RNA (1)...(19): siRNA sense strand
gaacuuugcuaaugucugu

SEQ ID NO: 1010877 - RNA, 19 nt, Homo sapiens
  misc_RNA (1)...(19): siRNA sense strand
gagaaucugucuuuaucaa

SEQ ID NO: 1010878 - RNA, 19 nt, Homo sapiens
  misc_RNA (1)...(19): siRNA sense strand
gcaaauuuguugugcuguu

SEQ ID NO: 1010879 - RNA, 19 nt, Homo sapiens
  misc_RNA (1)...(19): siRNA sense strand
cgagaaaacugaagccuaa

SEQ ID NO: 1010880 - RNA, 19 nt, Homo sapiens
  misc_RNA (1)...(19): siRNA sense strand
ccaauuuacugaagauagu

SEQ ID NO: 1010881 - RNA, 19 nt, Homo sapiens
  misc_RNA (1)...(19): siRNA sense strand
cacagaacuuugcuaaugu

SEQ ID NO: 1010882 - RNA, 19 nt, Homo sapiens
  misc_RNA (1)...(19): siRNA sense strand
aggaguagauguccauuuc

SEQ ID NO: 1010883 - RNA, 19 nt, Homo sapiens
  misc_RNA (1)...(19): siRNA sense strand
gcucuggaauggauugaca

SEQ ID NO: 1010884 - RNA, 19 nt, Homo sapiens
  misc_RNA (1)...(19): siRNA sense strand
caaauuuguugugcuguuc

SEQ ID NO: 1010885 - RNA, 19 nt, Homo sapiens
  misc_RNA (1)...(19): siRNA sense strand
gaguagauguccauuucuc

SEQ ID NO: 1010886 - RNA, 19 nt, Homo sapiens
  misc_RNA (1)...(19): siRNA sense strand
ugucuccacugagcuauaa

SEQ ID NO: 1010887 - RNA, 19 nt, Homo sapiens
  misc_RNA (1)...(19): siRNA sense strand
uacugaagauaguuccaua

SEQ ID NO: 1010888 - RNA, 19 nt, Homo sapiens
  misc_RNA (1)...(19): siRNA sense strand
uacauucugucuccacuga

SEQ ID NO: 1010889 - RNA, 19 nt, Homo sapiens
  misc_RNA (1)...(19): siRNA sense strand
cuggcucccuucuuguuua

SEQ ID NO: 1010890 - RNA, 19 nt, Homo sapiens
  misc_RNA (1)...(19): siRNA sense strand
gaauuauguuuagcaccuu

SEQ ID NO: 1010891 - RNA, 19 nt, Homo sapiens
  misc_RNA (1)...(19): siRNA sense strand
gaggaguagauguccauuu

SEQ ID NO: 1010892 - RNA, 19 nt, Homo sapiens
  misc_RNA (1)...(19): siRNA sense strand
gacccucuccuuucccuuu

SEQ ID NO: 1010893 - RNA, 19 nt, Homo sapiens
  misc_RNA (1)...(19): siRNA sense strand
uuuccaccauuguaacaua

SEQ ID NO: 1010894 - RNA, 19 nt, Homo sapiens
  misc_RNA (1)...(19): siRNA sense strand
cuacagaccucaucaaaac

SEQ ID NO: 1010895 - RNA, 19 nt, Homo sapiens
  misc_RNA (1)...(19): siRNA sense strand
ucugcuggcucccuucuug

SEQ ID NO: 1010896 - RNA, 19 nt, Homo sapiens
  misc_RNA (1)...(19): siRNA sense strand
gaugaccugggccacauuu

SEQ ID NO: 1010897 - RNA, 19 nt, Homo sapiens
  misc_RNA (1)...(19): siRNA sense strand
gacagccaauuuacugaag

SEQ ID NO: 1010898 - RNA, 19 nt, Homo sapiens
  misc_RNA (1)...(19): siRNA sense strand
gacccagacccucuccuuu

SEQ ID NO: 1010899 - RNA, 19 nt, Homo sapiens
  misc_RNA (1)...(19): siRNA sense strand
ggguuucccucacuguugu

SEQ ID NO: 1010900 - RNA, 19 nt, Homo sapiens
  misc_RNA (1)...(19): siRNA sense strand
cugaagauaguuccauauu

SEQ ID NO: 1010901 - RNA, 19 nt, Homo sapiens
  misc_RNA (1)...(19): siRNA sense strand
uugagaccgugaagagaaa

SEQ ID NO: 1010902 - RNA, 19 nt, Homo sapiens
  misc_RNA (1)...(19): siRNA sense strand
cagaugaccugggccacau

SEQ ID NO: 1010903 - RNA, 19 nt, Homo sapiens
  misc_RNA (1)...(19): siRNA sense strand
ugacagccaauuuacugaa

SEQ ID NO: 1010904 - RNA, 19 nt, Homo sapiens
  misc_RNA (1)...(19): siRNA sense strand
cagccaauuuacugaagau

SEQ ID NO: 1010905 - RNA, 19 nt, Homo sapiens
  misc_RNA (1)...(19): siRNA sense strand
gaucaugcagaacauacug

SEQ ID NO: 1010906 - RNA, 19 nt, Homo sapiens
  misc_RNA (1)...(19): siRNA sense strand
guuuagcaccuuugaguuc

SEQ ID NO: 1010907 - RNA, 19 nt, Homo sapiens
  misc_RNA (1)...(19): siRNA sense strand
uuacaugaaccuggagaaa

SEQ ID NO: 1010908 - RNA, 19 nt, Homo sapiens
  misc_RNA (1)...(19): siRNA sense strand
acagaacuuugcuaauguc

SEQ ID NO: 1010909 - RNA, 19 nt, Homo sapiens
  misc_RNA (1)...(19): siRNA sense strand
gcuggcucccuucuuguuu

SEQ ID NO: 1010910 - RNA, 19 nt, Homo sapiens
  misc_RNA (1)...(19): siRNA sense strand
gcucccuucuuguuuacau

SEQ ID NO: 1010911 - RNA, 19 nt, Homo sapiens
  misc_RNA (1)...(19): siRNA sense strand
acaugaaccuggagaaaau

SEQ ID NO: 1010912 - RNA, 19 nt, Homo sapiens
  misc_RNA (1)...(19): siRNA sense strand
acagccaauuuacugaaga

SEQ ID NO: 1010913 - RNA, 19 nt, Homo sapiens
  misc_RNA (1)...(19): siRNA sense strand
gccaauuuacugaagauag

SEQ ID NO: 1010914 - RNA, 19 nt, Homo sapiens
  misc_RNA (1)...(19): siRNA sense strand
ucccacagaacuuugcuaa

SEQ ID NO: 1010915 - RNA, 19 nt, Homo sapiens
  misc_RNA (1)...(19): siRNA sense strand
aggagucgaucagaguuug

SEQ ID NO: 1010916 - RNA, 19 nt, Homo sapiens
  misc_RNA (1)...(19): siRNA sense strand
gcacggcauugucuaaaua

SEQ ID NO: 1010917 - RNA, 19 nt, Homo sapiens
  misc_RNA (1)...(19): siRNA sense strand
gaaguuuacuguucugauu

SEQ ID NO: 1010918 - RNA, 19 nt, Homo sapiens
  misc_RNA (1)...(19): siRNA sense strand
gaagauuccuuuguugaaa

SEQ ID NO: 1010919 - RNA, 19 nt, Homo sapiens
  misc_RNA (1)...(19): siRNA sense strand
gggcucagauggaaguuua

SEQ ID NO: 1010920 - RNA, 19 nt, Homo sapiens
  misc_RNA (1)...(19): siRNA sense strand
ccaaacagcugcaaaugga

SEQ ID NO: 1010921 - RNA, 19 nt, Homo sapiens
  misc_RNA (1)...(19): siRNA sense strand
gcacagagaaagagaauga

SEQ ID NO: 1010922 - RNA, 19 nt, Homo sapiens
  misc_RNA (1)...(19): siRNA sense strand
gaaggaagaacgccaguuu

SEQ ID NO: 1010923 - RNA, 19 nt, Homo sapiens
  misc_RNA (1)...(19): siRNA sense strand
ugacaucucuguuuaagga

SEQ ID NO: 1010924 - RNA, 19 nt, Homo sapiens
  misc_RNA (1)...(19): siRNA sense strand
gaaagagaaugaugaagag

SEQ ID NO: 1010925 - RNA, 19 nt, Homo sapiens
  misc_RNA (1)...(19): siRNA sense strand
gaaagaagccaugaagcua

SEQ ID NO: 1010926 - RNA, 19 nt, Homo sapiens
  misc_RNA (1)...(19): siRNA sense strand
gaaagcaugcuaucagaaa

SEQ ID NO: 1010927 - RNA, 19 nt, Homo sapiens
  misc_RNA (1)...(19): siRNA sense strand
ccaugaagcuaaauaauca

SEQ ID NO: 1010928 - RNA, 19 nt, Homo sapiens
  misc_RNA (1)...(19): siRNA sense strand
caggugacaucucuguuua

SEQ ID NO: 1010929 - RNA, 19 nt, Homo sapiens
  misc_RNA (1)...(19): siRNA sense strand
ggacagagaaacagaagga

SEQ ID NO: 1010930 - RNA, 19 nt, Homo sapiens
  misc_RNA (1)...(19): siRNA sense strand
gcaauuccaucagaguuga

SEQ ID NO: 1010931 - RNA, 19 nt, Homo sapiens
  misc_RNA (1)...(19): siRNA sense strand
agaauuacuucgaacauga

SEQ ID NO: 1010932 - RNA, 19 nt, Homo sapiens
  misc_RNA (1)...(19): siRNA sense strand
uaggauggcugaaggagaa

SEQ ID NO: 1010933 - RNA, 19 nt, Homo sapiens
  misc_RNA (1)...(19): siRNA sense strand
caugaggaguuaacuguga

SEQ ID NO: 1010934 - RNA, 19 nt, Homo sapiens
  misc_RNA (1)...(19): siRNA sense strand
cuaauggccuugagucaug

SEQ ID NO: 1010935 - RNA, 19 nt, Homo sapiens
  misc_RNA (1)...(19): siRNA sense strand
agagaaugaugaagagaaa

SEQ ID NO: 1010936 - RNA, 19 nt, Homo sapiens
  misc_RNA (1)...(19): siRNA sense strand
ggccaagaauuacuucgaa

SEQ ID NO: 1010937 - RNA, 19 nt, Homo sapiens
  misc_RNA (1)...(19): siRNA sense strand
gaaugaugcuuucgaagac

SEQ ID NO: 1010938 - RNA, 19 nt, Homo sapiens
  misc_RNA (1)...(19): siRNA sense strand
caaggaggccaaagaaaga

SEQ ID NO: 1010939 - RNA, 19 nt, Homo sapiens
  misc_RNA (1)...(19): siRNA sense strand
ccagcaggcuuaccuuguu

SEQ ID NO: 1010940 - RNA, 19 nt, Homo sapiens
  misc_RNA (1)...(19): siRNA sense strand
ucagaagauuccuuuguug

SEQ ID NO: 1010941 - RNA, 19 nt, Homo sapiens
  misc_RNA (1)...(19): siRNA sense strand
gaaaacaauugaggaacua

SEQ ID NO: 1010942 - RNA, 19 nt, Homo sapiens
  misc_RNA (1)...(19): siRNA sense strand
gaagccaugaagcuaaaua

SEQ ID NO: 1010943 - RNA, 19 nt, Homo sapiens
  misc_RNA (1)...(19): siRNA sense strand
ucaagaggcucauacaaaa

SEQ ID NO: 1010944 - RNA, 19 nt, Homo sapiens
  misc_RNA (1)...(19): siRNA sense strand
agaaagagaaugaugaaga

SEQ ID NO: 1010945 - RNA, 19 nt, Homo sapiens
  misc_RNA (1)...(19): siRNA sense strand
gaaauugaaggaagagcuu

SEQ ID NO: 1010946 - RNA, 19 nt, Homo sapiens
  misc_RNA (1)...(19): siRNA sense strand
cuucgaacaugaggaguua

SEQ ID NO: 1010947 - RNA, 19 nt, Homo sapiens
  misc_RNA (1)...(19): siRNA sense strand
gaaagagcagcgagagaga

SEQ ID NO: 1010948 - RNA, 19 nt, Homo sapiens
  misc_RNA (1)...(19): siRNA sense strand
gauggaaguuuacuguucu

SEQ ID NO: 1010949 - RNA, 19 nt, Homo sapiens
  misc_RNA (1)...(19): siRNA sense strand
caucagaguugaaugaaaa

SEQ ID NO: 1010950 - RNA, 19 nt, Homo sapiens
  misc_RNA (1)...(19): siRNA sense strand
gaaauuaggauggcugaag

SEQ ID NO: 1010951 - RNA, 19 nt, Homo sapiens
  misc_RNA (1)...(19): siRNA sense strand
gaagcagaagggucaguaa

SEQ ID NO: 1010952 - RNA, 19 nt, Homo sapiens
  misc_RNA (1)...(19): siRNA sense strand
aaagaagccaugaagcuaa

SEQ ID NO: 1010953 - RNA, 19 nt, Homo sapiens
  misc_RNA (1)...(19): siRNA sense strand
aagaagccaugaagcuaaa

SEQ ID NO: 1010954 - RNA, 19 nt, Homo sapiens
  misc_RNA (1)...(19): siRNA sense strand
agagaaugaugcuuucgaa

SEQ ID NO: 1010955 - RNA, 19 nt, Homo sapiens
  misc_RNA (1)...(19): siRNA sense strand
ccucagggcucagauggaa

SEQ ID NO: 1010956 - RNA, 19 nt, Homo sapiens
  misc_RNA (1)...(19): siRNA sense strand
uugaggaacuaacaagaaa

SEQ ID NO: 1010957 - RNA, 19 nt, Homo sapiens
  misc_RNA (1)...(19): siRNA sense strand
ggaaagcaugcuaucagaa

SEQ ID NO: 1010958 - RNA, 19 nt, Homo sapiens
  misc_RNA (1)...(19): siRNA sense strand
gaacaugaggaguuaacug

SEQ ID NO: 1010959 - RNA, 19 nt, Homo sapiens
  misc_RNA (1)...(19): siRNA sense strand
caaguaaucguucugagau

SEQ ID NO: 1010960 - RNA, 19 nt, Homo sapiens
  misc_RNA (1)...(19): siRNA sense strand
ggaagagcuuggaaaacua

SEQ ID NO: 1010961 - RNA, 19 nt, Homo sapiens
  misc_RNA (1)...(19): siRNA sense strand
ggaugaaaaguccaaauua

SEQ ID NO: 1010962 - RNA, 19 nt, Homo sapiens
  misc_RNA (1)...(19): siRNA sense strand
ccaggugacaucucuguuu

SEQ ID NO: 1010963 - RNA, 19 nt, Homo sapiens
  misc_RNA (1)...(19): siRNA sense strand
gggcagugcugaaggaacu

SEQ ID NO: 1010964 - RNA, 19 nt, Homo sapiens
  misc_RNA (1)...(19): siRNA sense strand
cagagaaacagaaggaaga

SEQ ID NO: 1010965 - RNA, 19 nt, Homo sapiens
  misc_RNA (1)...(19): siRNA sense strand
uggaaagcaugcuaucaga

SEQ ID NO: 1010966 - RNA, 19 nt, Homo sapiens
  misc_RNA (1)...(19): siRNA sense strand
gaagguggagagacuugaa

SEQ ID NO: 1010967 - RNA, 19 nt, Homo sapiens
  misc_RNA (1)...(19): siRNA sense strand
cagaagauuccuuuguuga

SEQ ID NO: 1010968 - RNA, 19 nt, Homo sapiens
  misc_RNA (1)...(19): siRNA sense strand
gaaggaagagcuuggaaaa

SEQ ID NO: 1010969 - RNA, 19 nt, Homo sapiens
  misc_RNA (1)...(19): siRNA sense strand
cagagaaagagaaugauga

SEQ ID NO: 1010970 - RNA, 19 nt, Homo sapiens
  misc_RNA (1)...(19): siRNA sense strand
cauagacacguuacagauu

SEQ ID NO: 1010971 - RNA, 19 nt, Homo sapiens
  misc_RNA (1)...(19): siRNA sense strand
ggugacaucucuguuuaag

SEQ ID NO: 1010972 - RNA, 19 nt, Homo sapiens
  misc_RNA (1)...(19): siRNA sense strand
cucagaagauuccuuuguu

SEQ ID NO: 1010973 - RNA, 19 nt, Homo sapiens
  misc_RNA (1)...(19): siRNA sense strand
agaaugaugcuuucgaaga

SEQ ID NO: 1010974 - RNA, 19 nt, Homo sapiens
  misc_RNA (1)...(19): siRNA sense strand
agauggaaguuuacuguuc

SEQ ID NO: 1010975 - RNA, 19 nt, Homo sapiens
  misc_RNA (1)...(19): siRNA sense strand
aaaguuagagcuacaagug

SEQ ID NO: 1010976 - RNA, 19 nt, Homo sapiens
  misc_RNA (1)...(19): siRNA sense strand
ccaucagaguugaaugaaa

SEQ ID NO: 1010977 - RNA, 19 nt, Homo sapiens
  misc_RNA (1)...(19): siRNA sense strand
gagcacagagaaagagaau

SEQ ID NO: 1010978 - RNA, 19 nt, Homo sapiens
  misc_RNA (1)...(19): siRNA sense strand
gagagguucugccugacau

SEQ ID NO: 1010979 - RNA, 19 nt, Homo sapiens
  misc_RNA (1)...(19): siRNA sense strand
ggccuugagucaugagaau

SEQ ID NO: 1010980 - RNA, 19 nt, Homo sapiens
  misc_RNA (1)...(19): siRNA sense strand
aggcuuaccuuguucaaag

SEQ ID NO: 1010981 - RNA, 19 nt, Homo sapiens
  misc_RNA (1)...(19): siRNA sense strand
gccaugaagcuaaauaauc

SEQ ID NO: 1010982 - RNA, 19 nt, Homo sapiens
  misc_RNA (1)...(19): siRNA sense strand
gaagaggaccuggaaacca

SEQ ID NO: 1010983 - RNA, 19 nt, Homo sapiens
  misc_RNA (1)...(19): siRNA sense strand
ugaaggaacugagugaaaa

SEQ ID NO: 1010984 - RNA, 19 nt, Homo sapiens
  misc_RNA (1)...(19): siRNA sense strand
ucaaggaggccaaagaaag

SEQ ID NO: 1010985 - RNA, 19 nt, Homo sapiens
  misc_RNA (1)...(19): siRNA sense strand
ugucugaacugcagcucaa

SEQ ID NO: 1010986 - RNA, 19 nt, Homo sapiens
  misc_RNA (1)...(19): siRNA sense strand
agagaaggcagaccuguug

SEQ ID NO: 1010987 - RNA, 19 nt, Homo sapiens
  misc_RNA (1)...(19): siRNA sense strand
ggacagggcagugcugaag

SEQ ID NO: 1010988 - RNA, 19 nt, Homo sapiens
  misc_RNA (1)...(19): siRNA sense strand
auagacacguuacagauuc

SEQ ID NO: 1010989 - RNA, 19 nt, Homo sapiens
  misc_RNA (1)...(19): siRNA sense strand
gacauagacacguuacaga

SEQ ID NO: 1010990 - RNA, 19 nt, Homo sapiens
  misc_RNA (1)...(19): siRNA sense strand
gaaaacaaguaaucguucu

SEQ ID NO: 1010991 - RNA, 19 nt, Homo sapiens
  misc_RNA (1)...(19): siRNA sense strand
cgagaacaagugacucuga

SEQ ID NO: 1010992 - RNA, 19 nt, Homo sapiens
  misc_RNA (1)...(19): siRNA sense strand
aagaggaccuggaaaccau

SEQ ID NO: 1010993 - RNA, 19 nt, Homo sapiens
  misc_RNA (1)...(19): siRNA sense strand
caugcuaucagaaaucaaa

SEQ ID NO: 1010994 - RNA, 19 nt, Homo sapiens
  misc_RNA (1)...(19): siRNA sense strand
ugaaagcacaggaaaugga

SEQ ID NO: 1010995 - RNA, 19 nt, Homo sapiens
  misc_RNA (1)...(19): siRNA sense strand
aaagaaaucaagcauaguc

SEQ ID NO: 1010996 - RNA, 19 nt, Homo sapiens
  misc_RNA (1)...(19): siRNA sense strand
gaaaauucaugaggaaaag

SEQ ID NO: 1010997 - RNA, 19 nt, Homo sapiens
  misc_RNA (1)...(19): siRNA sense strand
aaagcaugcuaucagaaau

SEQ ID NO: 1010998 - RNA, 19 nt, Homo sapiens
  misc_RNA (1)...(19): siRNA sense strand
uaagggaagggaaucagaa

SEQ ID NO: 1010999 - RNA, 19 nt, Homo sapiens
  misc_RNA (1)...(19): siRNA sense strand
cagauggggccaagaauua

SEQ ID NO: 1011000 - RNA, 19 nt, Homo sapiens
  misc_RNA (1)...(19): siRNA sense strand
ugaaggaagagcuuggaaa

SEQ ID NO: 1011001 - RNA, 19 nt, Homo sapiens
  misc_RNA (1)...(19): siRNA sense strand
agauucacgugauggauug

SEQ ID NO: 1011002 - RNA, 19 nt, Homo sapiens
  misc_RNA (1)...(19): siRNA sense strand
ugagauacagagcaaagaa

SEQ ID NO: 1011003 - RNA, 19 nt, Homo sapiens
  misc_RNA (1)...(19): siRNA sense strand
ggaggcaggcaguccuuga

SEQ ID NO: 1011004 - RNA, 19 nt, Homo sapiens
  misc_RNA (1)...(19): siRNA sense strand
gaaccaccagcugaaagaa

SEQ ID NO: 1011005 - RNA, 19 nt, Homo sapiens
  misc_RNA (1)...(19): siRNA sense strand
aagaauuacuucgaacaug

SEQ ID NO: 1011006 - RNA, 19 nt, Homo sapiens
  misc_RNA (1)...(19): siRNA sense strand
ggcacggcauugucuaaau

SEQ ID NO: 1011007 - RNA, 19 nt, Homo sapiens
  misc_RNA (1)...(19): siRNA sense strand
aaagggaaaucagaaaggu

SEQ ID NO: 1011008 - RNA, 19 nt, Homo sapiens
  misc_RNA (1)...(19): siRNA sense strand
agaaugagaaauugaagga

SEQ ID NO: 1011009 - RNA, 19 nt, Homo sapiens
  misc_RNA (1)...(19): siRNA sense strand
agagaaagagaaugaugaa

SEQ ID NO: 1011010 - RNA, 19 nt, Homo sapiens
  misc_RNA (1)...(19): siRNA sense strand
aaacaaguaaucguucuga

SEQ ID NO: 1011011 - RNA, 19 nt, Homo sapiens
  misc_RNA (1)...(19): siRNA sense strand
gcugaaagaagccaugaag

SEQ ID NO: 1011012 - RNA, 19 nt, Homo sapiens
  misc_RNA (1)...(19): siRNA sense strand
gaggacagccccagugaaa

SEQ ID NO: 1011013 - RNA, 19 nt, Homo sapiens
  misc_RNA (1)...(19): siRNA sense strand
cagauucacgugauggauu

SEQ ID NO: 1011014 - RNA, 19 nt, Homo sapiens
  misc_RNA (1)...(19): siRNA sense strand
acucugaccagcaggcuua

SEQ ID NO: 1011015 - RNA, 19 nt, Homo sapiens
  misc_RNA (1)...(19): siRNA sense strand
ucagauggaaguuuacugu

SEQ ID NO: 1011016 - RNA, 19 nt, Homo sapiens
  misc_RNA (1)...(19): siRNA sense strand
ugacagaguucauguugug

SEQ ID NO: 1011017 - RNA, 19 nt, Homo sapiens
  misc_RNA (1)...(19): siRNA sense strand
gcucacagcugcccauugc

SEQ ID NO: 1011018 - RNA, 19 nt, Homo sapiens
  misc_RNA (1)...(19): siRNA sense strand
ccaggagucuucagugugu

SEQ ID NO: 1011019 - RNA, 19 nt, Homo sapiens
  misc_RNA (1)...(19): siRNA sense strand
ccacacccgcucuacaaua

SEQ ID NO: 1011020 - RNA, 19 nt, Homo sapiens
  misc_RNA (1)...(19): siRNA sense strand
cugagaaggugacagaguu

SEQ ID NO: 1011021 - RNA, 19 nt, Homo sapiens
  misc_RNA (1)...(19): siRNA sense strand
cacacccgcucuacaauau

SEQ ID NO: 1011022 - RNA, 19 nt, Homo sapiens
  misc_RNA (1)...(19): siRNA sense strand
ugucagagccugccaagau

SEQ ID NO: 1011023 - RNA, 19 nt, Homo sapiens
  misc_RNA (1)...(19): siRNA sense strand
ggugacagaguucauguug

SEQ ID NO: 1011024 - RNA, 19 nt, Homo sapiens
  misc_RNA (1)...(19): siRNA sense strand
gcccauugccuaaagaaga

SEQ ID NO: 1011025 - RNA, 19 nt, Homo sapiens
  misc_RNA (1)...(19): siRNA sense strand
cacccgcucuacaauauga

SEQ ID NO: 1011026 - RNA, 19 nt, Homo sapiens
  misc_RNA (1)...(19): siRNA sense strand
gaaggugacagaguucaug

SEQ ID NO: 1011027 - RNA, 19 nt, Homo sapiens
  misc_RNA (1)...(19): siRNA sense strand
cccauugccuaaagaagaa

SEQ ID NO: 1011028 - RNA, 19 nt, Homo sapiens
  misc_RNA (1)...(19): siRNA sense strand
gccaagaucacagauguug

SEQ ID NO: 1011029 - RNA, 19 nt, Homo sapiens
  misc_RNA (1)...(19): siRNA sense strand
gcuucaagguaucacauca

SEQ ID NO: 1011030 - RNA, 19 nt, Homo sapiens
  misc_RNA (1)...(19): siRNA sense strand
uacaauaugagccuucuga

SEQ ID NO: 1011031 - RNA, 19 nt, Homo sapiens
  misc_RNA (1)...(19): siRNA sense strand
gcucuggacaggugguaaa

SEQ ID NO: 1011032 - RNA, 19 nt, Homo sapiens
  misc_RNA (1)...(19): siRNA sense strand
gagcuuacucugagaaggu

SEQ ID NO: 1011033 - RNA, 19 nt, Homo sapiens
  misc_RNA (1)...(19): siRNA sense strand
cugccaagaucacagaugu

SEQ ID NO: 1011034 - RNA, 19 nt, Homo sapiens
  misc_RNA (1)...(19): siRNA sense strand
gcaucgaaccagaggaguu

SEQ ID NO: 1011035 - RNA, 19 nt, Homo sapiens
  misc_RNA (1)...(19): siRNA sense strand
ucaaagccuuagaccagau

SEQ ID NO: 1011036 - RNA, 19 nt, Homo sapiens
  misc_RNA (1)...(19): siRNA sense strand
ccaugugcccugccugaaa

SEQ ID NO: 1011037 - RNA, 19 nt, Homo sapiens
  misc_RNA (1)...(19): siRNA sense strand
gucagagccugccaagauc

SEQ ID NO: 1011038 - RNA, 19 nt, Homo sapiens
  misc_RNA (1)...(19): siRNA sense strand
ugaaaagccugcuguguac

SEQ ID NO: 1011039 - RNA, 19 nt, Homo sapiens
  misc_RNA (1)...(19): siRNA sense strand
guuugagccugaagacaca

SEQ ID NO: 1011040 - RNA, 19 nt, Homo sapiens
  misc_RNA (1)...(19): siRNA sense strand
gggguccacuugucuguaa

SEQ ID NO: 1011041 - RNA, 19 nt, Homo sapiens
  misc_RNA (1)...(19): siRNA sense strand
caaccuguuugagccugaa

SEQ ID NO: 1011042 - RNA, 19 nt, Homo sapiens
  misc_RNA (1)...(19): siRNA sense strand
gugacagaguucauguugu

SEQ ID NO: 1011043 - RNA, 19 nt, Homo sapiens
  misc_RNA (1)...(19): siRNA sense strand
uccaucuccuguccaauga

SEQ ID NO: 1011044 - RNA, 19 nt, Homo sapiens
  misc_RNA (1)...(19): siRNA sense strand
uucaagguaucacaucaug

SEQ ID NO: 1011045 - RNA, 19 nt, Homo sapiens
  misc_RNA (1)...(19): siRNA sense strand
caugugcccugccugaaaa

SEQ ID NO: 1011046 - RNA, 19 nt, Homo sapiens
  misc_RNA (1)...(19): siRNA sense strand
gggagugugagaagcauuc

SEQ ID NO: 1011047 - RNA, 19 nt, Homo sapiens
  misc_RNA (1)...(19): siRNA sense strand
ggucggcacaaccuguuug

SEQ ID NO: 1011048 - RNA, 19 nt, Homo sapiens
  misc_RNA (1)...(19): siRNA sense strand
cugaaaagccugcugugua

SEQ ID NO: 1011049 - RNA, 19 nt, Homo sapiens
  misc_RNA (1)...(19): siRNA sense strand
gcugcccauugccuaaaga

SEQ ID NO: 1011050 - RNA, 19 nt, Homo sapiens
  misc_RNA (1)...(19): siRNA sense strand
cagacgguguggauauuua

SEQ ID NO: 1011051 - RNA, 19 nt, Homo sapiens
  misc_RNA (1)...(19): siRNA sense strand
ccaagaaccugccuaaagc

SEQ ID NO: 1011052 - RNA, 19 nt, Homo sapiens
  misc_RNA (1)...(19): siRNA sense strand
ugaacccgcuggaacagua

SEQ ID NO: 1011053 - RNA, 19 nt, Homo sapiens
  misc_RNA (1)...(19): siRNA sense strand
gcagacaaccaguccaaga

SEQ ID NO: 1011054 - RNA, 19 nt, Homo sapiens
  misc_RNA (1)...(19): siRNA sense strand
gaggagagggugaaucaga

SEQ ID NO: 1011055 - RNA, 19 nt, Homo sapiens
  misc_RNA (1)...(19): siRNA sense strand
cguaggaugcgccagauua

SEQ ID NO: 1011056 - RNA, 19 nt, Homo sapiens
  misc_RNA (1)...(19): siRNA sense strand
ggaccaaugugagaguuca

SEQ ID NO: 1011057 - RNA, 19 nt, Homo sapiens
  misc_RNA (1)...(19): siRNA sense strand
guaggaugcgccagauuaa

SEQ ID NO: 1011058 - RNA, 19 nt, Homo sapiens
  misc_RNA (1)...(19): siRNA sense strand
gaaaggugaaugcgucugu

SEQ ID NO: 1011059 - RNA, 19 nt, Homo sapiens
  misc_RNA (1)...(19): siRNA sense strand
cugccugccuggugaauuu

SEQ ID NO: 1011060 - RNA, 19 nt, Homo sapiens
  misc_RNA (1)...(19): siRNA sense strand
gaagaugaacccgcuggaa

SEQ ID NO: 1011061 - RNA, 19 nt, Homo sapiens
  misc_RNA (1)...(19): siRNA sense strand
cacagccaguagaugauua

SEQ ID NO: 1011062 - RNA, 19 nt, Homo sapiens
  misc_RNA (1)...(19): siRNA sense strand
cgacagcgccugguggaaa

SEQ ID NO: 1011063 - RNA, 19 nt, Homo sapiens
  misc_RNA (1)...(19): siRNA sense strand
ggguuucccuuuccacuca

SEQ ID NO: 1011064 - RNA, 19 nt, Homo sapiens
  misc_RNA (1)...(19): siRNA sense strand
gcaguggucggcaaaguca

SEQ ID NO: 1011065 - RNA, 19 nt, Homo sapiens
  misc_RNA (1)...(19): siRNA sense strand
ggaugcgccagauuaauga

SEQ ID NO: 1011066 - RNA, 19 nt, Homo sapiens
  misc_RNA (1)...(19): siRNA sense strand
cgguguggauauuuacuuu

SEQ ID NO: 1011067 - RNA, 19 nt, Homo sapiens
  misc_RNA (1)...(19): siRNA sense strand
gcuaugagaaccccacuua

SEQ ID NO: 1011068 - RNA, 19 nt, Homo sapiens
  misc_RNA (1)...(19): siRNA sense strand
ggaacaguaugagcgaaag

SEQ ID NO: 1011069 - RNA, 19 nt, Homo sapiens
  misc_RNA (1)...(19): siRNA sense strand
gggcugaggacgaggaaga

SEQ ID NO: 1011070 - RNA, 19 nt, Homo sapiens
  misc_RNA (1)...(19): siRNA sense strand
cagacaaccaguccaagaa

SEQ ID NO: 1011071 - RNA, 19 nt, Homo sapiens
  misc_RNA (1)...(19): siRNA sense strand
ggacgaggaagaggaggaa

SEQ ID NO: 1011072 - RNA, 19 nt, Homo sapiens
  misc_RNA (1)...(19): siRNA sense strand
ccagauuaaugaggugaug

SEQ ID NO: 1011073 - RNA, 19 nt, Homo sapiens
  misc_RNA (1)...(19): siRNA sense strand
cuggugaauuugugaguga

SEQ ID NO: 1011074 - RNA, 19 nt, Homo sapiens
  misc_RNA (1)...(19): siRNA sense strand
gaacuccuccacucugaac

SEQ ID NO: 1011075 - RNA, 19 nt, Homo sapiens
  misc_RNA (1)...(19): siRNA sense strand
ggaguacugcagacagaug

SEQ ID NO: 1011076 - RNA, 19 nt, Homo sapiens
  misc_RNA (1)...(19): siRNA sense strand
ccugaaggcugccgguucu

SEQ ID NO: 1011077 - RNA, 19 nt, Homo sapiens
  misc_RNA (1)...(19): siRNA sense strand
gugaaugcgucuguuccaa

SEQ ID NO: 1011078 - RNA, 19 nt, Homo sapiens
  misc_RNA (1)...(19): siRNA sense strand
guguggauauuuacuuugg

SEQ ID NO: 1011079 - RNA, 19 nt, Homo sapiens
  misc_RNA (1)...(19): siRNA sense strand
ccacagccaguagaugauu

SEQ ID NO: 1011080 - RNA, 19 nt, Homo sapiens
  misc_RNA (1)...(19): siRNA sense strand
gcauacccaccuucaagug

SEQ ID NO: 1011081 - RNA, 19 nt, Homo sapiens
  misc_RNA (1)...(19): siRNA sense strand
gugcauacccaccuucaag

SEQ ID NO: 1011082 - RNA, 19 nt, Homo sapiens
  misc_RNA (1)...(19): siRNA sense strand
cgagaaggcacagcagaug

SEQ ID NO: 1011083 - RNA, 19 nt, Homo sapiens
  misc_RNA (1)...(19): siRNA sense strand
uccaagaaccugccuaaag

SEQ ID NO: 1011084 - RNA, 19 nt, Homo sapiens
  misc_RNA (1)...(19): siRNA sense strand
cgucaucgcccuuaucaac

SEQ ID NO: 1011085 - RNA, 19 nt, Homo sapiens
  misc_RNA (1)...(19): siRNA sense strand
gcacuuccaguccauucug

SEQ ID NO: 1011086 - RNA, 19 nt, Homo sapiens
  misc_RNA (1)...(19): siRNA sense strand
gagcacuuccaguccauuc

SEQ ID NO: 1011087 - RNA, 19 nt, Homo sapiens
  misc_RNA (1)...(19): siRNA sense strand
cauacccaccuucaaguga

SEQ ID NO: 1011088 - RNA, 19 nt, Homo sapiens
  misc_RNA (1)...(19): siRNA sense strand
ucaucgcccuuaucaacga

SEQ ID NO: 1011089 - RNA, 19 nt, Homo sapiens
  misc_RNA (1)...(19): siRNA sense strand
gacagcgccugguggaaac

SEQ ID NO: 1011090 - RNA, 19 nt, Homo sapiens
  misc_RNA (1)...(19): siRNA sense strand
ucccacagccaguagauga

SEQ ID NO: 1011091 - RNA, 19 nt, Homo sapiens
  misc_RNA (1)...(19): siRNA sense strand
aaaggugaaugcgucuguu

SEQ ID NO: 1011092 - RNA, 19 nt, Homo sapiens
  misc_RNA (1)...(19): siRNA sense strand
cuggaguacugcagacaga

SEQ ID NO: 1011093 - RNA, 19 nt, Homo sapiens
  misc_RNA (1)...(19): siRNA sense strand
ggaacuccuccacucugaa

SEQ ID NO: 1011094 - RNA, 19 nt, Homo sapiens
  misc_RNA (1)...(19): siRNA sense strand
ccaaaaggguccacagaac

SEQ ID NO: 1011095 - RNA, 19 nt, Homo sapiens
  misc_RNA (1)...(19): siRNA sense strand
gaacccgcuggaacaguau

SEQ ID NO: 1011096 - RNA, 19 nt, Homo sapiens
  misc_RNA (1)...(19): siRNA sense strand
aggaugcgccagauuaaug

SEQ ID NO: 1011097 - RNA, 19 nt, Homo sapiens
  misc_RNA (1)...(19): siRNA sense strand
cagcggcacggcuaugaga

SEQ ID NO: 1011098 - RNA, 19 nt, Homo sapiens
  misc_RNA (1)...(19): siRNA sense strand
ccugagaaagagaagauga

SEQ ID NO: 1011099 - RNA, 19 nt, Homo sapiens
  misc_RNA (1)...(19): siRNA sense strand
gcugaccaauccaguguuu

SEQ ID NO: 1011100 - RNA, 19 nt, Homo sapiens
  misc_RNA (1)...(19): siRNA sense strand
uuauacagguguucaaaga

SEQ ID NO: 1011101 - RNA, 19 nt, Homo sapiens
  misc_RNA (1)...(19): siRNA sense strand
acaaggcgcuggagugcuu

SEQ ID NO: 1011102 - RNA, 19 nt, Homo sapiens
  misc_RNA (1)...(19): siRNA sense strand
guucaaagaguucaauuuc

SEQ ID NO: 1011103 - RNA, 19 nt, Homo sapiens
  misc_RNA (1)...(19): siRNA sense strand
gaaacuuccuggcuuacac

SEQ ID NO: 1011104 - RNA, 19 nt, Homo sapiens
  misc_RNA (1)...(19): siRNA sense strand
gcuccuugcugggcaguuu

SEQ ID NO: 1011105 - RNA, 19 nt, Homo sapiens
  misc_RNA (1)...(19): siRNA sense strand
caucuacuacgucguguuu

SEQ ID NO: 1011106 - RNA, 19 nt, Homo sapiens
  misc_RNA (1)...(19): siRNA sense strand
gggauggccuguggauuca

SEQ ID NO: 1011107 - RNA, 19 nt, Homo sapiens
  misc_RNA (1)...(19): siRNA sense strand
gcagcaucaucguccaguu

SEQ ID NO: 1011108 - RNA, 19 nt, Homo sapiens
  misc_RNA (1)...(19): siRNA sense strand
agaguucaauuucaaccuu

SEQ ID NO: 1011109 - RNA, 19 nt, Homo sapiens
  misc_RNA (1)...(19): siRNA sense strand
auacagguguucaaagagu

SEQ ID NO: 1011110 - RNA, 19 nt, Homo sapiens
  misc_RNA (1)...(19): siRNA sense strand
gcuguuggccagauuggaa

SEQ ID NO: 1011111 - RNA, 19 nt, Homo sapiens
  misc_RNA (1)...(19): siRNA sense strand
guaccguucggguccauuu

SEQ ID NO: 1011112 - RNA, 19 nt, Homo sapiens
  misc_RNA (1)...(19): siRNA sense strand
caacaucauggucuacauc

SEQ ID NO: 1011113 - RNA, 19 nt, Homo sapiens
  misc_RNA (1)...(19): siRNA sense strand
aggaaaagcucaacaucuu

SEQ ID NO: 1011114 - RNA, 19 nt, Homo sapiens
  misc_RNA (1)...(19): siRNA sense strand
gcuccgucgugcugauuau

SEQ ID NO: 1011115 - RNA, 19 nt, Homo sapiens
  misc_RNA (1)...(19): siRNA sense strand
ugaccaauccaguguuugu

SEQ ID NO: 1011116 - RNA, 19 nt, Homo sapiens
  misc_RNA (1)...(19): siRNA sense strand
aggcugagcuggaggaaaa

SEQ ID NO: 1011117 - RNA, 19 nt, Homo sapiens
  misc_RNA (1)...(19): siRNA sense strand
ccaacaucauggucuacau

SEQ ID NO: 1011118 - RNA, 19 nt, Homo sapiens
  misc_RNA (1)...(19): siRNA sense strand
ggccucagccauccucuuc

SEQ ID NO: 1011119 - RNA, 19 nt, Homo sapiens
  misc_RNA (1)...(19): siRNA sense strand
auaacaacccguccaguca

SEQ ID NO: 1011120 - RNA, 19 nt, Homo sapiens
  misc_RNA (1)...(19): siRNA sense strand
uacagguguucaaagaguu

SEQ ID NO: 1011121 - RNA, 19 nt, Homo sapiens
  misc_RNA (1)...(19): siRNA sense strand
ucuacuacgucguguuuac

SEQ ID NO: 1011122 - RNA, 19 nt, Homo sapiens
  misc_RNA (1)...(19): siRNA sense strand
cagcaucaucguccaguuc

SEQ ID NO: 1011123 - RNA, 19 nt, Homo sapiens
  misc_RNA (1)...(19): siRNA sense strand
caguucagguacaucaaca

SEQ ID NO: 1011124 - RNA, 19 nt, Homo sapiens
  misc_RNA (1)...(19): siRNA sense strand
ggaaaagcucaacaucuug

SEQ ID NO: 1011125 - RNA, 19 nt, Homo sapiens
  misc_RNA (1)...(19): siRNA sense strand
caacccguccagucagaga

SEQ ID NO: 1011126 - RNA, 19 nt, Homo sapiens
  misc_RNA (1)...(19): siRNA sense strand
gaaggaaaagcucaacauc

SEQ ID NO: 1011127 - RNA, 19 nt, Homo sapiens
  misc_RNA (1)...(19): siRNA sense strand
caauugaccuggaauauuu

SEQ ID NO: 1011128 - RNA, 19 nt, Homo sapiens
  misc_RNA (1)...(19): siRNA sense strand
gaacauguuucaaggauug

SEQ ID NO: 1011129 - RNA, 19 nt, Homo sapiens
  misc_RNA (1)...(19): siRNA sense strand
caaccgagauguuccauuu

SEQ ID NO: 1011130 - RNA, 19 nt, Homo sapiens
  misc_RNA (1)...(19): siRNA sense strand
gaugauacgucaagaaaga

SEQ ID NO: 1011131 - RNA, 19 nt, Homo sapiens
  misc_RNA (1)...(19): siRNA sense strand
ggaaagaaauacaggaugu

SEQ ID NO: 1011132 - RNA, 19 nt, Homo sapiens
  misc_RNA (1)...(19): siRNA sense strand
gaacgaaucauaccuacuu

SEQ ID NO: 1011133 - RNA, 19 nt, Homo sapiens
  misc_RNA (1)...(19): siRNA sense strand
caaaauggcugguguagaa

SEQ ID NO: 1011134 - RNA, 19 nt, Homo sapiens
  misc_RNA (1)...(19): siRNA sense strand
gaacagagacgagguagga

SEQ ID NO: 1011135 - RNA, 19 nt, Homo sapiens
  misc_RNA (1)...(19): siRNA sense strand
gguaggaugugccagagua

SEQ ID NO: 1011136 - RNA, 19 nt, Homo sapiens
  misc_RNA (1)...(19): siRNA sense strand
caggugaagugccuaauuu

SEQ ID NO: 1011137 - RNA, 19 nt, Homo sapiens
  misc_RNA (1)...(19): siRNA sense strand
agauaaagcugaucggauu

SEQ ID NO: 1011138 - RNA, 19 nt, Homo sapiens
  misc_RNA (1)...(19): siRNA sense strand
aggacuaucuugaugauua

SEQ ID NO: 1011139 - RNA, 19 nt, Homo sapiens
  misc_RNA (1)...(19): siRNA sense strand
gcauucauauggacuuuga

SEQ ID NO: 1011140 - RNA, 19 nt, Homo sapiens
  misc_RNA (1)...(19): siRNA sense strand
caagucccauuaugucuuu

SEQ ID NO: 1011141 - RNA, 19 nt, Homo sapiens
  misc_RNA (1)...(19): siRNA sense strand
caaacugcaucaagcauug

SEQ ID NO: 1011142 - RNA, 19 nt, Homo sapiens
  misc_RNA (1)...(19): siRNA sense strand
caucauauuuggagauuuc

SEQ ID NO: 1011143 - RNA, 19 nt, Homo sapiens
  misc_RNA (1)...(19): siRNA sense strand
caaauguucuacaggacua

SEQ ID NO: 1011144 - RNA, 19 nt, Homo sapiens
  misc_RNA (1)...(19): siRNA sense strand
uaaaugguuuccugaguga

SEQ ID NO: 1011145 - RNA, 19 nt, Homo sapiens
  misc_RNA (1)...(19): siRNA sense strand
uaaauaacauccugaacuc

SEQ ID NO: 1011146 - RNA, 19 nt, Homo sapiens
  misc_RNA (1)...(19): siRNA sense strand
ggacacaagagaucauuga

SEQ ID NO: 1011147 - RNA, 19 nt, Homo sapiens
  misc_RNA (1)...(19): siRNA sense strand
ggacuaucuugaugauuau

SEQ ID NO: 1011148 - RNA, 19 nt, Homo sapiens
  misc_RNA (1)...(19): siRNA sense strand
ugacaugccugauauagag

SEQ ID NO: 1011149 - RNA, 19 nt, Homo sapiens
  misc_RNA (1)...(19): siRNA sense strand
ccaaaugugugcaagacaa

SEQ ID NO: 1011150 - RNA, 19 nt, Homo sapiens
  misc_RNA (1)...(19): siRNA sense strand
gcaauugaccuggaauauu

SEQ ID NO: 1011151 - RNA, 19 nt, Homo sapiens
  misc_RNA (1)...(19): siRNA sense strand
guaguuauguggcuuuauc

SEQ ID NO: 1011152 - RNA, 19 nt, Homo sapiens
  misc_RNA (1)...(19): siRNA sense strand
uauaugcgguuacaaaugu

SEQ ID NO: 1011153 - RNA, 19 nt, Homo sapiens
  misc_RNA (1)...(19): siRNA sense strand
gcucaaacuucaucugcaa

SEQ ID NO: 1011154 - RNA, 19 nt, Homo sapiens
  misc_RNA (1)...(19): siRNA sense strand
gguggaaaccuaacugaaa

SEQ ID NO: 1011155 - RNA, 19 nt, Homo sapiens
  misc_RNA (1)...(19): siRNA sense strand
gaagacaagaauaugguuu

SEQ ID NO: 1011156 - RNA, 19 nt, Homo sapiens
  misc_RNA (1)...(19): siRNA sense strand
cuacaggacuaucuugaug

SEQ ID NO: 1011157 - RNA, 19 nt, Homo sapiens
  misc_RNA (1)...(19): siRNA sense strand
gcucucagccuccgauuga

SEQ ID NO: 1011158 - RNA, 19 nt, Homo sapiens
  misc_RNA (1)...(19): siRNA sense strand
ucacaaaucccaaagaagu

SEQ ID NO: 1011159 - RNA, 19 nt, Homo sapiens
  misc_RNA (1)...(19): siRNA sense strand
gaaguaaaguugguguucu

SEQ ID NO: 1011160 - RNA, 19 nt, Homo sapiens
  misc_RNA (1)...(19): siRNA sense strand
gugaagugccuaauuuauu

SEQ ID NO: 1011161 - RNA, 19 nt, Homo sapiens
  misc_RNA (1)...(19): siRNA sense strand
gagcauucauauggacuuu

SEQ ID NO: 1011162 - RNA, 19 nt, Homo sapiens
  misc_RNA (1)...(19): siRNA sense strand
ucucacaaaucccaaagaa

SEQ ID NO: 1011163 - RNA, 19 nt, Homo sapiens
  misc_RNA (1)...(19): siRNA sense strand
gcaaacugcaucaagcauu

SEQ ID NO: 1011164 - RNA, 19 nt, Homo sapiens
  misc_RNA (1)...(19): siRNA sense strand
ggagauuucauuaaguuug

SEQ ID NO: 1011165 - RNA, 19 nt, Homo sapiens
  misc_RNA (1)...(19): siRNA sense strand
gcucauauaugcgguuaca

SEQ ID NO: 1011166 - RNA, 19 nt, Homo sapiens
  misc_RNA (1)...(19): siRNA sense strand
ggugaucuguggagcauuc

SEQ ID NO: 1011167 - RNA, 19 nt, Homo sapiens
  misc_RNA (1)...(19): siRNA sense strand
gagacuugcagcucauaua

SEQ ID NO: 1011168 - RNA, 19 nt, Homo sapiens
  misc_RNA (1)...(19): siRNA sense strand
caaauacaaccgagauguu

SEQ ID NO: 1011169 - RNA, 19 nt, Homo sapiens
  misc_RNA (1)...(19): siRNA sense strand
gaucuguggagcauucaua

SEQ ID NO: 1011170 - RNA, 19 nt, Homo sapiens
  misc_RNA (1)...(19): siRNA sense strand
agaaucagcuggcuauguc

SEQ ID NO: 1011171 - RNA, 19 nt, Homo sapiens
  misc_RNA (1)...(19): siRNA sense strand
gagauuucauuaaguuugg

SEQ ID NO: 1011172 - RNA, 19 nt, Homo sapiens
  misc_RNA (1)...(19): siRNA sense strand
gaguaguuauguggcuuua

SEQ ID NO: 1011173 - RNA, 19 nt, Homo sapiens
  misc_RNA (1)...(19): siRNA sense strand
ggaguuccuagaagauaua

SEQ ID NO: 1011174 - RNA, 19 nt, Homo sapiens
  misc_RNA (1)...(19): siRNA sense strand
ggagugggcaagucuguga

SEQ ID NO: 1011175 - RNA, 19 nt, Homo sapiens
  misc_RNA (1)...(19): siRNA sense strand
gaauaugguuuuccuuuuc

SEQ ID NO: 1011176 - RNA, 19 nt, Homo sapiens
  misc_RNA (1)...(19): siRNA sense strand
aaggauugcucggaugaua

SEQ ID NO: 1011177 - RNA, 19 nt, Homo sapiens
  misc_RNA (1)...(19): siRNA sense strand
aagcugaucggauuuauga

SEQ ID NO: 1011178 - RNA, 19 nt, Homo sapiens
  misc_RNA (1)...(19): siRNA sense strand
cccauuaugucuuuaacuu

SEQ ID NO: 1011179 - RNA, 19 nt, Homo sapiens
  misc_RNA (1)...(19): siRNA sense strand
ggaugugccagaguaguua

SEQ ID NO: 1011180 - RNA, 19 nt, Homo sapiens
  misc_RNA (1)...(19): siRNA sense strand
ucauauaugcgguuacaaa

SEQ ID NO: 1011181 - RNA, 19 nt, Homo sapiens
  misc_RNA (1)...(19): siRNA sense strand
uagaacauguuucaaggau

SEQ ID NO: 1011182 - RNA, 19 nt, Homo sapiens
  misc_RNA (1)...(19): siRNA sense strand
uaugaugacaugccugaua

SEQ ID NO: 1011183 - RNA, 19 nt, Homo sapiens
  misc_RNA (1)...(19): siRNA sense strand
cagcucauauaugcgguua

SEQ ID NO: 1011184 - RNA, 19 nt, Homo sapiens
  misc_RNA (1)...(19): siRNA sense strand
ucaagaaucagcuggcuau

SEQ ID NO: 1011185 - RNA, 19 nt, Homo sapiens
  misc_RNA (1)...(19): siRNA sense strand
ggugaagugccuaauuuau

SEQ ID NO: 1011186 - RNA, 19 nt, Homo sapiens
  misc_RNA (1)...(19): siRNA sense strand
agagaaaacugcaaauguu

SEQ ID NO: 1011187 - RNA, 19 nt, Homo sapiens
  misc_RNA (1)...(19): siRNA sense strand
gauaaagcugaucggauuu

SEQ ID NO: 1011188 - RNA, 19 nt, Homo sapiens
  misc_RNA (1)...(19): siRNA sense strand
cgaaucauaccuacuuuca

SEQ ID NO: 1011189 - RNA, 19 nt, Homo sapiens
  misc_RNA (1)...(19): siRNA sense strand
ugagggacuuauccaaaug

SEQ ID NO: 1011190 - RNA, 19 nt, Homo sapiens
  misc_RNA (1)...(19): siRNA sense strand
agucaagcauuccguguug

SEQ ID NO: 1011191 - RNA, 19 nt, Homo sapiens
  misc_RNA (1)...(19): siRNA sense strand
ggaguaggaggcacaggaa

SEQ ID NO: 1011192 - RNA, 19 nt, Homo sapiens
  misc_RNA (1)...(19): siRNA sense strand
cugaucggauuuaugauga

SEQ ID NO: 1011193 - RNA, 19 nt, Homo sapiens
  misc_RNA (1)...(19): siRNA sense strand
cggaugauacgucaagaaa

SEQ ID NO: 1011194 - RNA, 19 nt, Homo sapiens
  misc_RNA (1)...(19): siRNA sense strand
gaagugccuaauuuauuug

SEQ ID NO: 1011195 - RNA, 19 nt, Homo sapiens
  misc_RNA (1)...(19): siRNA sense strand
caaaugugugcaagacaaa

SEQ ID NO: 1011196 - RNA, 19 nt, Homo sapiens
  misc_RNA (1)...(19): siRNA sense strand
augaagaccugaggaaguu

SEQ ID NO: 1011197 - RNA, 19 nt, Homo sapiens
  misc_RNA (1)...(19): siRNA sense strand
gaugcuauagaacauguuu

SEQ ID NO: 1011198 - RNA, 19 nt, Homo sapiens
  misc_RNA (1)...(19): siRNA sense strand
ccaggaugcuauagaacau

SEQ ID NO: 1011199 - RNA, 19 nt, Homo sapiens
  misc_RNA (1)...(19): siRNA sense strand
uaaaguugguguucuucca

SEQ ID NO: 1011200 - RNA, 19 nt, Homo sapiens
  misc_RNA (1)...(19): siRNA sense strand
ugaacacuauacuauguca

SEQ ID NO: 1011201 - RNA, 19 nt, Homo sapiens
  misc_RNA (1)...(19): siRNA sense strand
cacaaaucccaaagaagua

SEQ ID NO: 1011202 - RNA, 19 nt, Homo sapiens
  misc_RNA (1)...(19): siRNA sense strand
gcugaucggauuuaugaug

SEQ ID NO: 1011203 - RNA, 19 nt, Homo sapiens
  misc_RNA (1)...(19): siRNA sense strand
agucaaaacuggagagaaa

SEQ ID NO: 1011204 - RNA, 19 nt, Homo sapiens
  misc_RNA (1)...(19): siRNA sense strand
gcaaggacacaagagauca

SEQ ID NO: 1011205 - RNA, 19 nt, Homo sapiens
  misc_RNA (1)...(19): siRNA sense strand
aagcauuccguguuguuua

SEQ ID NO: 1011206 - RNA, 19 nt, Homo sapiens
  misc_RNA (1)...(19): siRNA sense strand
caaaagaaguaggaauuuc

SEQ ID NO: 1011207 - RNA, 19 nt, Homo sapiens
  misc_RNA (1)...(19): siRNA sense strand
gcaaaagaaguaggaauuu

SEQ ID NO: 1011208 - RNA, 19 nt, Homo sapiens
  misc_RNA (1)...(19): siRNA sense strand
ucacugacacccagauugu

SEQ ID NO: 1011209 - RNA, 19 nt, Homo sapiens
  misc_RNA (1)...(19): siRNA sense strand
guagaagacaagaauaugg

SEQ ID NO: 1011210 - RNA, 19 nt, Homo sapiens
  misc_RNA (1)...(19): siRNA sense strand
cuuccaggaugcuauagaa

SEQ ID NO: 1011211 - RNA, 19 nt, Homo sapiens
  misc_RNA (1)...(19): siRNA sense strand
guggaaaccuaacugaaaa

SEQ ID NO: 1011212 - RNA, 19 nt, Homo sapiens
  misc_RNA (1)...(19): siRNA sense strand
gaucggauuuaugaugaca

SEQ ID NO: 1011213 - RNA, 19 nt, Homo sapiens
  misc_RNA (1)...(19): siRNA sense strand
cuggcuaugucccuguuua

SEQ ID NO: 1011214 - RNA, 19 nt, Homo sapiens
  misc_RNA (1)...(19): siRNA sense strand
gaugccaggcuucccaauu

SEQ ID NO: 1011215 - RNA, 19 nt, Homo sapiens
  misc_RNA (1)...(19): siRNA sense strand
aaacguuucuucaccuuuu

SEQ ID NO: 1011216 - RNA, 19 nt, Homo sapiens
  misc_RNA (1)...(19): siRNA sense strand
cuauggguaucuaauggaa

SEQ ID NO: 1011217 - RNA, 19 nt, Homo sapiens
  misc_RNA (1)...(19): siRNA sense strand
aaguaaaguugguguucuu

SEQ ID NO: 1011218 - RNA, 19 nt, Homo sapiens
  misc_RNA (1)...(19): siRNA sense strand
gaugacaugccugauauag

SEQ ID NO: 1011219 - RNA, 19 nt, Homo sapiens
  misc_RNA (1)...(19): siRNA sense strand
uaaagcaaacugcaucaag

SEQ ID NO: 1011220 - RNA, 19 nt, Homo sapiens
  misc_RNA (1)...(19): siRNA sense strand
cguguuguuuacuggaaua

SEQ ID NO: 1011221 - RNA, 19 nt, Homo sapiens
  misc_RNA (1)...(19): siRNA sense strand
uugagggacuuauccaaau

SEQ ID NO: 1011222 - RNA, 19 nt, Homo sapiens
  misc_RNA (1)...(19): siRNA sense strand
gaaucauaccuacuuucaa

SEQ ID NO: 1011223 - RNA, 19 nt, Homo sapiens
  misc_RNA (1)...(19): siRNA sense strand
ucccaaagaaguaaaguug

SEQ ID NO: 1011224 - RNA, 19 nt, Homo sapiens
  misc_RNA (1)...(19): siRNA sense strand
acaaaucccaaagaaguaa

SEQ ID NO: 1011225 - RNA, 19 nt, Homo sapiens
  misc_RNA (1)...(19): siRNA sense strand
augaugacaugccugauau

SEQ ID NO: 1011226 - RNA, 19 nt, Homo sapiens
  misc_RNA (1)...(19): siRNA sense strand
uaaguuuggagcagauaaa

SEQ ID NO: 1011227 - RNA, 19 nt, Homo sapiens
  misc_RNA (1)...(19): siRNA sense strand
caaaggugaugaagaagua

SEQ ID NO: 1011228 - RNA, 19 nt, Homo sapiens
  misc_RNA (1)...(19): siRNA sense strand
aaacagaacuuugcucuug

SEQ ID NO: 1011229 - RNA, 19 nt, Homo sapiens
  misc_RNA (1)...(19): siRNA sense strand
cuacugaagugauuuauga

SEQ ID NO: 1011230 - RNA, 19 nt, Homo sapiens
  misc_RNA (1)...(19): siRNA sense strand
cauaacaucuuccgcauga

SEQ ID NO: 1011231 - RNA, 19 nt, Homo sapiens
  misc_RNA (1)...(19): siRNA sense strand
gaagggagcagagauguuu

SEQ ID NO: 1011232 - RNA, 19 nt, Homo sapiens
  misc_RNA (1)...(19): siRNA sense strand
auacagagcuggcuaaaca

SEQ ID NO: 1011233 - RNA, 19 nt, Homo sapiens
  misc_RNA (1)...(19): siRNA sense strand
cagaagcacuggcucaauu

SEQ ID NO: 1011234 - RNA, 19 nt, Homo sapiens
  misc_RNA (1)...(19): siRNA sense strand
gaaagcaaauggccaugau

SEQ ID NO: 1011235 - RNA, 19 nt, Homo sapiens
  misc_RNA (1)...(19): siRNA sense strand
cagcagauguuuauaguuc

SEQ ID NO: 1011236 - RNA, 19 nt, Homo sapiens
  misc_RNA (1)...(19): siRNA sense strand
uggcaaaggugaugaagaa

SEQ ID NO: 1011237 - RNA, 19 nt, Homo sapiens
  misc_RNA (1)...(19): siRNA sense strand
gggagaggcuuuauuucuu

SEQ ID NO: 1011238 - RNA, 19 nt, Homo sapiens
  misc_RNA (1)...(19): siRNA sense strand
uuucaacacuccacuauuu

SEQ ID NO: 1011239 - RNA, 19 nt, Homo sapiens
  misc_RNA (1)...(19): siRNA sense strand
ggagaggcuuuauuucuuc

SEQ ID NO: 1011240 - RNA, 19 nt, Homo sapiens
  misc_RNA (1)...(19): siRNA sense strand
gaacgccgauucaauucga

SEQ ID NO: 1011241 - RNA, 19 nt, Homo sapiens
  misc_RNA (1)...(19): siRNA sense strand
gaguggauaugugcaauaa

SEQ ID NO: 1011242 - RNA, 19 nt, Homo sapiens
  misc_RNA (1)...(19): siRNA sense strand
ccacacaacagcuuucuaa

SEQ ID NO: 1011243 - RNA, 19 nt, Homo sapiens
  misc_RNA (1)...(19): siRNA sense strand
aagaaucucugaguacaua

SEQ ID NO: 1011244 - RNA, 19 nt, Homo sapiens
  misc_RNA (1)...(19): siRNA sense strand
acaagagacugguugguuu

SEQ ID NO: 1011245 - RNA, 19 nt, Homo sapiens
  misc_RNA (1)...(19): siRNA sense strand
cagacucgcucuuuacuga

SEQ ID NO: 1011246 - RNA, 19 nt, Homo sapiens
  misc_RNA (1)...(19): siRNA sense strand
gcgggaaucucauguguca

SEQ ID NO: 1011247 - RNA, 19 nt, Homo sapiens
  misc_RNA (1)...(19): siRNA sense strand
gaacauagaggcgcagaau

SEQ ID NO: 1011248 - RNA, 19 nt, Homo sapiens
  misc_RNA (1)...(19): siRNA sense strand
gagcuuaaucuucuccaua

SEQ ID NO: 1011249 - RNA, 19 nt, Homo sapiens
  misc_RNA (1)...(19): siRNA sense strand
cagaauuccuugaucagaa

SEQ ID NO: 1011250 - RNA, 19 nt, Homo sapiens
  misc_RNA (1)...(19): siRNA sense strand
cuacagaauuccuugauca

SEQ ID NO: 1011251 - RNA, 19 nt, Homo sapiens
  misc_RNA (1)...(19): siRNA sense strand
ugacucccauuacaaguuu

SEQ ID NO: 1011252 - RNA, 19 nt, Homo sapiens
  misc_RNA (1)...(19): siRNA sense strand
agacaugguucaaagcauu

SEQ ID NO: 1011253 - RNA, 19 nt, Homo sapiens
  misc_RNA (1)...(19): siRNA sense strand
acaggaaccucauccagaa

SEQ ID NO: 1011254 - RNA, 19 nt, Homo sapiens
  misc_RNA (1)...(19): siRNA sense strand
gcugagagcagaaaggaaa

SEQ ID NO: 1011255 - RNA, 19 nt, Homo sapiens
  misc_RNA (1)...(19): siRNA sense strand
gagcaugaccucucaaugg

SEQ ID NO: 1011256 - RNA, 19 nt, Homo sapiens
  misc_RNA (1)...(19): siRNA sense strand
guuaaacgaucaaccagau

SEQ ID NO: 1011257 - RNA, 19 nt, Homo sapiens
  misc_RNA (1)...(19): siRNA sense strand
uaaacaacaucuccagaca

SEQ ID NO: 1011258 - RNA, 19 nt, Homo sapiens
  misc_RNA (1)...(19): siRNA sense strand
gcugguuaccuuaaucuua

SEQ ID NO: 1011259 - RNA, 19 nt, Homo sapiens
  misc_RNA (1)...(19): siRNA sense strand
gagcagagauguuuuccaa

SEQ ID NO: 1011260 - RNA, 19 nt, Homo sapiens
  misc_RNA (1)...(19): siRNA sense strand
caccacagaucaacaggaa

SEQ ID NO: 1011261 - RNA, 19 nt, Homo sapiens
  misc_RNA (1)...(19): siRNA sense strand
ccauaccacuaaccaauga

SEQ ID NO: 1011262 - RNA, 19 nt, Homo sapiens
  misc_RNA (1)...(19): siRNA sense strand
aaacagacagcacuacuga

SEQ ID NO: 1011263 - RNA, 19 nt, Homo sapiens
  misc_RNA (1)...(19): siRNA sense strand
ggaaauccaaaugaacaua

SEQ ID NO: 1011264 - RNA, 19 nt, Homo sapiens
  misc_RNA (1)...(19): siRNA sense strand
gagcguguuugaagaagau

SEQ ID NO: 1011265 - RNA, 19 nt, Homo sapiens
  misc_RNA (1)...(19): siRNA sense strand
gcgcagaauccgaagcaua

SEQ ID NO: 1011266 - RNA, 19 nt, Homo sapiens
  misc_RNA (1)...(19): siRNA sense strand
ggucaccagucaaucuuug

SEQ ID NO: 1011267 - RNA, 19 nt, Homo sapiens
  misc_RNA (1)...(19): siRNA sense strand
acacaaugguucuaccuau

SEQ ID NO: 1011268 - RNA, 19 nt, Homo sapiens
  misc_RNA (1)...(19): siRNA sense strand
acaauuugcugcucaucaa

SEQ ID NO: 1011269 - RNA, 19 nt, Homo sapiens
  misc_RNA (1)...(19): siRNA sense strand
gaagcacuggcucaauuaa

SEQ ID NO: 1011270 - RNA, 19 nt, Homo sapiens
  misc_RNA (1)...(19): siRNA sense strand
ucagaaggauccagaagca

SEQ ID NO: 1011271 - RNA, 19 nt, Homo sapiens
  misc_RNA (1)...(19): siRNA sense strand
gauauugugcuuccugcua

SEQ ID NO: 1011272 - RNA, 19 nt, Homo sapiens
  misc_RNA (1)...(19): siRNA sense strand
gaagcgaugagacaaguau

SEQ ID NO: 1011273 - RNA, 19 nt, Homo sapiens
  misc_RNA (1)...(19): siRNA sense strand
uggaugagcuuaaucuucu

SEQ ID NO: 1011274 - RNA, 19 nt, Homo sapiens
  misc_RNA (1)...(19): siRNA sense strand
caacugcuggcauaugaaa

SEQ ID NO: 1011275 - RNA, 19 nt, Homo sapiens
  misc_RNA (1)...(19): siRNA sense strand
gaaauccaaaugaacauag

SEQ ID NO: 1011276 - RNA, 19 nt, Homo sapiens
  misc_RNA (1)...(19): siRNA sense strand
gagcugaucgcgccuggaa

SEQ ID NO: 1011277 - RNA, 19 nt, Homo sapiens
  misc_RNA (1)...(19): siRNA sense strand
caagauuguucccaaagca

SEQ ID NO: 1011278 - RNA, 19 nt, Homo sapiens
  misc_RNA (1)...(19): siRNA sense strand
guggauaugugcaauaaac

SEQ ID NO: 1011279 - RNA, 19 nt, Homo sapiens
  misc_RNA (1)...(19): siRNA sense strand
gaauuacuuucuguugaug

SEQ ID NO: 1011280 - RNA, 19 nt, Homo sapiens
  misc_RNA (1)...(19): siRNA sense strand
ucaaagcauucagguagaa

SEQ ID NO: 1011281 - RNA, 19 nt, Homo sapiens
  misc_RNA (1)...(19): siRNA sense strand
ccaaacguauggacagcuu

SEQ ID NO: 1011282 - RNA, 19 nt, Homo sapiens
  misc_RNA (1)...(19): siRNA sense strand
aacaacaucuccagacaga

SEQ ID NO: 1011283 - RNA, 19 nt, Homo sapiens
  misc_RNA (1)...(19): siRNA sense strand
uuauugagguucagaagga

SEQ ID NO: 1011284 - RNA, 19 nt, Homo sapiens
  misc_RNA (1)...(19): siRNA sense strand
gaagaguggauaugugcaa

SEQ ID NO: 1011285 - RNA, 19 nt, Homo sapiens
  misc_RNA (1)...(19): siRNA sense strand
guugauagauccacagacu

SEQ ID NO: 1011286 - RNA, 19 nt, Homo sapiens
  misc_RNA (1)...(19): siRNA sense strand
gcagugacucccauuacaa

SEQ ID NO: 1011287 - RNA, 19 nt, Homo sapiens
  misc_RNA (1)...(19): siRNA sense strand
gcaaaggugaugaagaagu

SEQ ID NO: 1011288 - RNA, 19 nt, Homo sapiens
  misc_RNA (1)...(19): siRNA sense strand
cgcagaauccgaagcauaa

SEQ ID NO: 1011289 - RNA, 19 nt, Homo sapiens
  misc_RNA (1)...(19): siRNA sense strand
uaaacgaucaaccagauga

SEQ ID NO: 1011290 - RNA, 19 nt, Homo sapiens
  misc_RNA (1)...(19): siRNA sense strand
caaagcaacagccagucua

SEQ ID NO: 1011291 - RNA, 19 nt, Homo sapiens
  misc_RNA (1)...(19): siRNA sense strand
aguaagcacuuuaaaggau

SEQ ID NO: 1011292 - RNA, 19 nt, Homo sapiens
  misc_RNA (1)...(19): siRNA sense strand
gauaggcuuugcccaugga

SEQ ID NO: 1011293 - RNA, 19 nt, Homo sapiens
  misc_RNA (1)...(19): siRNA sense strand
agagcuggcuaaacaguug

SEQ ID NO: 1011294 - RNA, 19 nt, Homo sapiens
  misc_RNA (1)...(19): siRNA sense strand
uggacaagcuccugcuaga

SEQ ID NO: 1011295 - RNA, 19 nt, Homo sapiens
  misc_RNA (1)...(19): siRNA sense strand
caagcagugacucccauua

SEQ ID NO: 1011296 - RNA, 19 nt, Homo sapiens
  misc_RNA (1)...(19): siRNA sense strand
ugaugaaucuguuuacacu

SEQ ID NO: 1011297 - RNA, 19 nt, Homo sapiens
  misc_RNA (1)...(19): siRNA sense strand
ucuccucccuucaguacua

SEQ ID NO: 1011298 - RNA, 19 nt, Homo sapiens
  misc_RNA (1)...(19): siRNA sense strand
gguucuaccuaucauacaa

SEQ ID NO: 1011299 - RNA, 19 nt, Homo sapiens
  misc_RNA (1)...(19): siRNA sense strand
ccugggagaggcuuuauuu

SEQ ID NO: 1011300 - RNA, 19 nt, Homo sapiens
  misc_RNA (1)...(19): siRNA sense strand
agaagaaucucugaguaca

SEQ ID NO: 1011301 - RNA, 19 nt, Homo sapiens
  misc_RNA (1)...(19): siRNA sense strand
ugggaucaauggcaguuaa

SEQ ID NO: 1011302 - RNA, 19 nt, Homo sapiens
  misc_RNA (1)...(19): siRNA sense strand
ggauaugugcaauaaacaa

SEQ ID NO: 1011303 - RNA, 19 nt, Homo sapiens
  misc_RNA (1)...(19): siRNA sense strand
guacuacugugcccucaac

SEQ ID NO: 1011304 - RNA, 19 nt, Homo sapiens
  misc_RNA (1)...(19): siRNA sense strand
ucaaccagaugacgaugau

SEQ ID NO: 1011305 - RNA, 19 nt, Homo sapiens
  misc_RNA (1)...(19): siRNA sense strand
agaagcacuggcucaauua

SEQ ID NO: 1011306 - RNA, 19 nt, Homo sapiens
  misc_RNA (1)...(19): siRNA sense strand
gagaggcuuuauuucuuca

SEQ ID NO: 1011307 - RNA, 19 nt, Homo sapiens
  misc_RNA (1)...(19): siRNA sense strand
gcuaaacaguuggcagaca

SEQ ID NO: 1011308 - RNA, 19 nt, Homo sapiens
  misc_RNA (1)...(19): siRNA sense strand
gaaauuauugagguucaga

SEQ ID NO: 1011309 - RNA, 19 nt, Homo sapiens
  misc_RNA (1)...(19): siRNA sense strand
gcuacagaauuccuugauc

SEQ ID NO: 1011310 - RNA, 19 nt, Homo sapiens
  misc_RNA (1)...(19): siRNA sense strand
gcacuuuaaaggaucuauu

SEQ ID NO: 1011311 - RNA, 19 nt, Homo sapiens
  misc_RNA (1)...(19): siRNA sense strand
uaucauacaauuccgagaa

SEQ ID NO: 1011312 - RNA, 19 nt, Homo sapiens
  misc_RNA (1)...(19): siRNA sense strand
aaaaggaucucacagaagu

SEQ ID NO: 1011313 - RNA, 19 nt, Homo sapiens
  misc_RNA (1)...(19): siRNA sense strand
ugaaucauuuccagaagca

SEQ ID NO: 1011314 - RNA, 19 nt, Homo sapiens
  misc_RNA (1)...(19): siRNA sense strand
ucaccacgcccaauggaaa

SEQ ID NO: 1011315 - RNA, 19 nt, Homo sapiens
  misc_RNA (1)...(19): siRNA sense strand
ggugucccagcaagaauua

SEQ ID NO: 1011316 - RNA, 19 nt, Homo sapiens
  misc_RNA (1)...(19): siRNA sense strand
uaagaagggagcagagaug

SEQ ID NO: 1011317 - RNA, 19 nt, Homo sapiens
  misc_RNA (1)...(19): siRNA sense strand
uuaaucuucuccauacaga

SEQ ID NO: 1011318 - RNA, 19 nt, Homo sapiens
  misc_RNA (1)...(19): siRNA sense strand
agaaaaggaucucacagaa

SEQ ID NO: 1011319 - RNA, 19 nt, Homo sapiens
  misc_RNA (1)...(19): siRNA sense strand
ucaacgcgcugcaguacag

SEQ ID NO: 1011320 - RNA, 19 nt, Homo sapiens
  misc_RNA (1)...(19): siRNA sense strand
agaugacgaugauggaaau

SEQ ID NO: 1011321 - RNA, 19 nt, Homo sapiens
  misc_RNA (1)...(19): siRNA sense strand
gaagaaguaauuucaacac

SEQ ID NO: 1011322 - RNA, 19 nt, Homo sapiens
  misc_RNA (1)...(19): siRNA sense strand
cugguuaccuuaaucuuag

SEQ ID NO: 1011323 - RNA, 19 nt, Homo sapiens
  misc_RNA (1)...(19): siRNA sense strand
gcagacaugguucaaagca

SEQ ID NO: 1011324 - RNA, 19 nt, Homo sapiens
  misc_RNA (1)...(19): siRNA sense strand
gcaggcguaccaacccuuu

SEQ ID NO: 1011325 - RNA, 19 nt, Homo sapiens
  misc_RNA (1)...(19): siRNA sense strand
ucucugaguacauacauuu

SEQ ID NO: 1011326 - RNA, 19 nt, Homo sapiens
  misc_RNA (1)...(19): siRNA sense strand
agcacuggcucaauuaaug

SEQ ID NO: 1011327 - RNA, 19 nt, Homo sapiens
  misc_RNA (1)...(19): siRNA sense strand
gaacagagcugccucaaug

SEQ ID NO: 1011328 - RNA, 19 nt, Homo sapiens
  misc_RNA (1)...(19): siRNA sense strand
gggcaaagccggaucuuca

SEQ ID NO: 1011329 - RNA, 19 nt, Homo sapiens
  misc_RNA (1)...(19): siRNA sense strand
ucagugaccuggagagugu

SEQ ID NO: 1011330 - RNA, 19 nt, Homo sapiens
  misc_RNA (1)...(19): siRNA sense strand
uggaggagcugcagaggaa

SEQ ID NO: 1011331 - RNA, 19 nt, Homo sapiens
  misc_RNA (1)...(19): siRNA sense strand
gcaguaccgugacuucauc

SEQ ID NO: 1011332 - RNA, 19 nt, Homo sapiens
  misc_RNA (1)...(19): siRNA sense strand
ccacagugcuggccuaugc

SEQ ID NO: 1011333 - RNA, 19 nt, Homo sapiens
  misc_RNA (1)...(19): siRNA sense strand
agacugaacuccgaacaga

SEQ ID NO: 1011334 - RNA, 19 nt, Homo sapiens
  misc_RNA (1)...(19): siRNA sense strand
gugcugagcuguggaaagu

SEQ ID NO: 1011335 - RNA, 19 nt, Homo sapiens
  misc_RNA (1)...(19): siRNA sense strand
ccuaugccaugaagcagua

SEQ ID NO: 1011336 - RNA, 19 nt, Homo sapiens
  misc_RNA (1)...(19): siRNA sense strand
gcaccugcaccucauggua

SEQ ID NO: 1011337 - RNA, 19 nt, Homo sapiens
  misc_RNA (1)...(19): siRNA sense strand
gcugagcuguggaaagugu

SEQ ID NO: 1011338 - RNA, 19 nt, Homo sapiens
  misc_RNA (1)...(19): siRNA sense strand
gggccacacuccagguauu

SEQ ID NO: 1011339 - RNA, 19 nt, Homo sapiens
  misc_RNA (1)...(19): siRNA sense strand
gagacgcaccgcuucauug

SEQ ID NO: 1011340 - RNA, 19 nt, Homo sapiens
  misc_RNA (1)...(19): siRNA sense strand
ggagagcccugcauuuccu

SEQ ID NO: 1011341 - RNA, 19 nt, Homo sapiens
  misc_RNA (1)...(19): siRNA sense strand
ggagacgcaccgcuucauu

SEQ ID NO: 1011342 - RNA, 19 nt, Homo sapiens
  misc_RNA (1)...(19): siRNA sense strand
ccaugaagcaguacgaaug

SEQ ID NO: 1011343 - RNA, 19 nt, Homo sapiens
  misc_RNA (1)...(19): siRNA sense strand
gcgcuucaccuaccacaau

SEQ ID NO: 1011344 - RNA, 19 nt, Homo sapiens
  misc_RNA (1)...(19): siRNA sense strand
gaaaguguuggaugucagu

SEQ ID NO: 1011345 - RNA, 19 nt, Homo sapiens
  misc_RNA (1)...(19): siRNA sense strand
ggucugagccaggaugaga

SEQ ID NO: 1011346 - RNA, 19 nt, Homo sapiens
  misc_RNA (1)...(19): siRNA sense strand
gcaccucagagaccaguga

SEQ ID NO: 1011347 - RNA, 19 nt, Homo sapiens
  misc_RNA (1)...(19): siRNA sense strand
cccgggagauugacaacuu

SEQ ID NO: 1011348 - RNA, 19 nt, Homo sapiens
  misc_RNA (1)...(19): siRNA sense strand
uguggaaaguguuggaugu

SEQ ID NO: 1011349 - RNA, 19 nt, Homo sapiens
  misc_RNA (1)...(19): siRNA sense strand
ggagauugacaacuucuac

SEQ ID NO: 1011350 - RNA, 19 nt, Homo sapiens
  misc_RNA (1)...(19): siRNA sense strand
gaagguuguaggcauggaa

SEQ ID NO: 1011351 - RNA, 19 nt, Homo sapiens
  misc_RNA (1)...(19): siRNA sense strand
gguauugcaccaagcaugu

SEQ ID NO: 1011352 - RNA, 19 nt, Homo sapiens
  misc_RNA (1)...(19): siRNA sense strand
agacgcaccgcuucauuga

SEQ ID NO: 1011353 - RNA, 19 nt, Homo sapiens
  misc_RNA (1)...(19): siRNA sense strand
ucacccacaucuugaacau

SEQ ID NO: 1011354 - RNA, 19 nt, Homo sapiens
  misc_RNA (1)...(19): siRNA sense strand
cagcgaaggcagagcuuug

SEQ ID NO: 1011355 - RNA, 19 nt, Homo sapiens
  misc_RNA (1)...(19): siRNA sense strand
gcaaagccggaucuucaag

SEQ ID NO: 1011356 - RNA, 19 nt, Homo sapiens
  misc_RNA (1)...(19): siRNA sense strand
ucaaugaguggacggcuau

SEQ ID NO: 1011357 - RNA, 19 nt, Homo sapiens
  misc_RNA (1)...(19): siRNA sense strand
uggaaaguguuggauguca

SEQ ID NO: 1011358 - RNA, 19 nt, Homo sapiens
  misc_RNA (1)...(19): siRNA sense strand
ccucagaacaggagcagau

SEQ ID NO: 1011359 - RNA, 19 nt, Homo sapiens
  misc_RNA (1)...(19): siRNA sense strand
cagaacaggagcagaugga

SEQ ID NO: 1011360 - RNA, 19 nt, Homo sapiens
  misc_RNA (1)...(19): siRNA sense strand
ggcaaagccggaucuucaa

SEQ ID NO: 1011361 - RNA, 19 nt, Homo sapiens
  misc_RNA (1)...(19): siRNA sense strand
cagaguggaacgcagcaaa

SEQ ID NO: 1011362 - RNA, 19 nt, Homo sapiens
  misc_RNA (1)...(19): siRNA sense strand
cuggagagcaccucagaga

SEQ ID NO: 1011363 - RNA, 19 nt, Homo sapiens
  misc_RNA (1)...(19): siRNA sense strand
ccagguguacuuagaugga

SEQ ID NO: 1011364 - RNA, 19 nt, Homo sapiens
  misc_RNA (1)...(19): siRNA sense strand
gacaggccagcgugcauga

SEQ ID NO: 1011365 - RNA, 19 nt, Homo sapiens
  misc_RNA (1)...(19): siRNA sense strand
ugacaugccagaggucuuc

SEQ ID NO: 1011366 - RNA, 19 nt, Homo sapiens
  misc_RNA (1)...(19): siRNA sense strand
ggccaguucugagccaaca

SEQ ID NO: 1011367 - RNA, 19 nt, Homo sapiens
  misc_RNA (1)...(19): siRNA sense strand
uggccgaccuggagucucu

SEQ ID NO: 1011368 - RNA, 19 nt, Homo sapiens
  misc_RNA (1)...(19): siRNA sense strand
ggucaugagguccaucagu

SEQ ID NO: 1011369 - RNA, 19 nt, Homo sapiens
  misc_RNA (1)...(19): siRNA sense strand
cgaacagagcugccucaau

SEQ ID NO: 1011370 - RNA, 19 nt, Homo sapiens
  misc_RNA (1)...(19): siRNA sense strand
ccugaagucccgccaguca

SEQ ID NO: 1011371 - RNA, 19 nt, Homo sapiens
  misc_RNA (1)...(19): siRNA sense strand
ugcgccagcugcagaucua

SEQ ID NO: 1011372 - RNA, 19 nt, Homo sapiens
  misc_RNA (1)...(19): siRNA sense strand
gcugguccacugcaagaug

SEQ ID NO: 1011373 - RNA, 19 nt, Homo sapiens
  misc_RNA (1)...(19): siRNA sense strand
gaacagagcugccucaaug

SEQ ID NO: 1011374 - RNA, 19 nt, Homo sapiens
  misc_RNA (1)...(19): siRNA sense strand
gggcaaagccggaucuuca

SEQ ID NO: 1011375 - RNA, 19 nt, Homo sapiens
  misc_RNA (1)...(19): siRNA sense strand
ucagugaccuggagagugu

SEQ ID NO: 1011376 - RNA, 19 nt, Homo sapiens
  misc_RNA (1)...(19): siRNA sense strand
uggaggagcugcagaggaa

SEQ ID NO: 1011377 - RNA, 19 nt, Homo sapiens
  misc_RNA (1)...(19): siRNA sense strand
gcaguaccgugacuucauc

SEQ ID NO: 1011378 - RNA, 19 nt, Homo sapiens
  misc_RNA (1)...(19): siRNA sense strand
ccacagugcuggccuaugc

SEQ ID NO: 1011379 - RNA, 19 nt, Homo sapiens
  misc_RNA (1)...(19): siRNA sense strand
agacugaacuccgaacaga

SEQ ID NO: 1011380 - RNA, 19 nt, Homo sapiens
  misc_RNA (1)...(19): siRNA sense strand
gugcugagcuguggaaagu

SEQ ID NO: 1011381 - RNA, 19 nt, Homo sapiens
  misc_RNA (1)...(19): siRNA sense strand
ccuaugccaugaagcagua

SEQ ID NO: 1011382 - RNA, 19 nt, Homo sapiens
  misc_RNA (1)...(19): siRNA sense strand
gcaccugcaccucauggua

SEQ ID NO: 1011383 - RNA, 19 nt, Homo sapiens
  misc_RNA (1)...(19): siRNA sense strand
gcugagcuguggaaagugu

SEQ ID NO: 1011384 - RNA, 19 nt, Homo sapiens
  misc_RNA (1)...(19): siRNA sense strand
gggccacacuccagguauu

SEQ ID NO: 1011385 - RNA, 19 nt, Homo sapiens
  misc_RNA (1)...(19): siRNA sense strand
gagacgcaccgcuucauug

SEQ ID NO: 1011386 - RNA, 19 nt, Homo sapiens
  misc_RNA (1)...(19): siRNA sense strand
ggagacgcaccgcuucauu

SEQ ID NO: 1011387 - RNA, 19 nt, Homo sapiens
  misc_RNA (1)...(19): siRNA sense strand
ccaugaagcaguacgaaug

SEQ ID NO: 1011388 - RNA, 19 nt, Homo sapiens
  misc_RNA (1)...(19): siRNA sense strand
gcgcuucaccuaccacaau

SEQ ID NO: 1011389 - RNA, 19 nt, Homo sapiens
  misc_RNA (1)...(19): siRNA sense strand
gaaaguguuggaugucagu

SEQ ID NO: 1011390 - RNA, 19 nt, Homo sapiens
  misc_RNA (1)...(19): siRNA sense strand
ggucugagccaggaugaga

SEQ ID NO: 1011391 - RNA, 19 nt, Homo sapiens
  misc_RNA (1)...(19): siRNA sense strand
cccgggagauugacaacuu

SEQ ID NO: 1011392 - RNA, 19 nt, Homo sapiens
  misc_RNA (1)...(19): siRNA sense strand
uguggaaaguguuggaugu

SEQ ID NO: 1011393 - RNA, 19 nt, Homo sapiens
  misc_RNA (1)...(19): siRNA sense strand
ggagauugacaacuucuac

SEQ ID NO: 1011394 - RNA, 19 nt, Homo sapiens
  misc_RNA (1)...(19): siRNA sense strand
gguauugcaccaagcaugu

SEQ ID NO: 1011395 - RNA, 19 nt, Homo sapiens
  misc_RNA (1)...(19): siRNA sense strand
agacgcaccgcuucauuga

SEQ ID NO: 1011396 - RNA, 19 nt, Homo sapiens
  misc_RNA (1)...(19): siRNA sense strand
ucacccacaucuugaacau

SEQ ID NO: 1011397 - RNA, 19 nt, Homo sapiens
  misc_RNA (1)...(19): siRNA sense strand
cagcgaaggcagagcuuug

SEQ ID NO: 1011398 - RNA, 19 nt, Homo sapiens
  misc_RNA (1)...(19): siRNA sense strand
gcaaagccggaucuucaag

SEQ ID NO: 1011399 - RNA, 19 nt, Homo sapiens
  misc_RNA (1)...(19): siRNA sense strand
ucaaugaguggacggcuau

SEQ ID NO: 1011400 - RNA, 19 nt, Homo sapiens
  misc_RNA (1)...(19): siRNA sense strand
uggaaaguguuggauguca

SEQ ID NO: 1011401 - RNA, 19 nt, Homo sapiens
  misc_RNA (1)...(19): siRNA sense strand
ccucagaacaggagcagau

SEQ ID NO: 1011402 - RNA, 19 nt, Homo sapiens
  misc_RNA (1)...(19): siRNA sense strand
cagaacaggagcagaugga

SEQ ID NO: 1011403 - RNA, 19 nt, Homo sapiens
  misc_RNA (1)...(19): siRNA sense strand
ggcaaagccggaucuucaa

SEQ ID NO: 1011404 - RNA, 19 nt, Homo sapiens
  misc_RNA (1)...(19): siRNA sense strand
cagaguggaacgcagcaaa

SEQ ID NO: 1011405 - RNA, 19 nt, Homo sapiens
  misc_RNA (1)...(19): siRNA sense strand
ccagguguacuuagaugga

SEQ ID NO: 1011406 - RNA, 19 nt, Homo sapiens
  misc_RNA (1)...(19): siRNA sense strand
ggccaguucugagccaaca

SEQ ID NO: 1011407 - RNA, 19 nt, Homo sapiens
  misc_RNA (1)...(19): siRNA sense strand
uggccgaccuggagucucu

SEQ ID NO: 1011408 - RNA, 19 nt, Homo sapiens
  misc_RNA (1)...(19): siRNA sense strand
cgaacagagcugccucaau

SEQ ID NO: 1011409 - RNA, 19 nt, Homo sapiens
  misc_RNA (1)...(19): siRNA sense strand
ugcgccagcugcagaucua

SEQ ID NO: 1011410 - RNA, 19 nt, Homo sapiens
  misc_RNA (1)...(19): siRNA sense strand
gcugguccacugcaagaug

SEQ ID NO: 1011411 - RNA, 19 nt, Homo sapiens
  misc_RNA (1)...(19): siRNA sense strand
gaacagagcugccucaaug

SEQ ID NO: 1011412 - RNA, 19 nt, Homo sapiens
  misc_RNA (1)...(19): siRNA sense strand
gggcaaagccggaucuuca

SEQ ID NO: 1011413 - RNA, 19 nt, Homo sapiens
  misc_RNA (1)...(19): siRNA sense strand
ucagugaccuggagagugu

SEQ ID NO: 1011414 - RNA, 19 nt, Homo sapiens
  misc_RNA (1)...(19): siRNA sense strand
uggaggagcugcagaggaa

SEQ ID NO: 1011415 - RNA, 19 nt, Homo sapiens
  misc_RNA (1)...(19): siRNA sense strand
gcaguaccgugacuucauc

SEQ ID NO: 1011416 - RNA, 19 nt, Homo sapiens
  misc_RNA (1)...(19): siRNA sense strand
ccacagugcuggccuaugc

SEQ ID NO: 1011417 - RNA, 19 nt, Homo sapiens
  misc_RNA (1)...(19): siRNA sense strand
agacugaacuccgaacaga

SEQ ID NO: 1011418 - RNA, 19 nt, Homo sapiens
  misc_RNA (1)...(19): siRNA sense strand
gugcugagcuguggaaagu

SEQ ID NO: 1011419 - RNA, 19 nt, Homo sapiens
  misc_RNA (1)...(19): siRNA sense strand
ccuaugccaugaagcagua

SEQ ID NO: 1011420 - RNA, 19 nt, Homo sapiens
  misc_RNA (1)...(19): siRNA sense strand
gcaccugcaccucauggua

SEQ ID NO: 1011421 - RNA, 19 nt, Homo sapiens
  misc_RNA (1)...(19): siRNA sense strand
gcugagcuguggaaagugu

SEQ ID NO: 1011422 - RNA, 19 nt, Homo sapiens
  misc_RNA (1)...(19): siRNA sense strand
gggccacacuccagguauu

SEQ ID NO: 1011423 - RNA, 19 nt, Homo sapiens
  misc_RNA (1)...(19): siRNA sense strand
gagacgcaccgcuucauug

SEQ ID NO: 1011424 - RNA, 19 nt, Homo sapiens
  misc_RNA (1)...(19): siRNA sense strand
ggagagcccugcauuuccu

SEQ ID NO: 1011425 - RNA, 19 nt, Homo sapiens
  misc_RNA (1)...(19): siRNA sense strand
ggagacgcaccgcuucauu

SEQ ID NO: 1011426 - RNA, 19 nt, Homo sapiens
  misc_RNA (1)...(19): siRNA sense strand
ccaugaagcaguacgaaug

SEQ ID NO: 1011427 - RNA, 19 nt, Homo sapiens
  misc_RNA (1)...(19): siRNA sense strand
gcgcuucaccuaccacaau

SEQ ID NO: 1011428 - RNA, 19 nt, Homo sapiens
  misc_RNA (1)...(19): siRNA sense strand
gaaaguguuggaugucagu

SEQ ID NO: 1011429 - RNA, 19 nt, Homo sapiens
  misc_RNA (1)...(19): siRNA sense strand
ggucugagccaggaugaga

SEQ ID NO: 1011430 - RNA, 19 nt, Homo sapiens
  misc_RNA (1)...(19): siRNA sense strand
gcaccucagagaccaguga

SEQ ID NO: 1011431 - RNA, 19 nt, Homo sapiens
  misc_RNA (1)...(19): siRNA sense strand
cccgggagauugacaacuu

SEQ ID NO: 1011432 - RNA, 19 nt, Homo sapiens
  misc_RNA (1)...(19): siRNA sense strand
uguggaaaguguuggaugu

SEQ ID NO: 1011433 - RNA, 19 nt, Homo sapiens
  misc_RNA (1)...(19): siRNA sense strand
ggagauugacaacuucuac

SEQ ID NO: 1011434 - RNA, 19 nt, Homo sapiens
  misc_RNA (1)...(19): siRNA sense strand
gaagguuguaggcauggaa

SEQ ID NO: 1011435 - RNA, 19 nt, Homo sapiens
  misc_RNA (1)...(19): siRNA sense strand
gguauugcaccaagcaugu

SEQ ID NO: 1011436 - RNA, 19 nt, Homo sapiens
  misc_RNA (1)...(19): siRNA sense strand
agacgcaccgcuucauuga

SEQ ID NO: 1011437 - RNA, 19 nt, Homo sapiens
  misc_RNA (1)...(19): siRNA sense strand
ucacccacaucuugaacau

SEQ ID NO: 1011438 - RNA, 19 nt, Homo sapiens
  misc_RNA (1)...(19): siRNA sense strand
cagcgaaggcagagcuuug

SEQ ID NO: 1011439 - RNA, 19 nt, Homo sapiens
  misc_RNA (1)...(19): siRNA sense strand
gcaaagccggaucuucaag

SEQ ID NO: 1011440 - RNA, 19 nt, Homo sapiens
  misc_RNA (1)...(19): siRNA sense strand
ucaaugaguggacggcuau

SEQ ID NO: 1011441 - RNA, 19 nt, Homo sapiens
  misc_RNA (1)...(19): siRNA sense strand
uggaaaguguuggauguca

SEQ ID NO: 1011442 - RNA, 19 nt, Homo sapiens
  misc_RNA (1)...(19): siRNA sense strand
ccucagaacaggagcagau

SEQ ID NO: 1011443 - RNA, 19 nt, Homo sapiens
  misc_RNA (1)...(19): siRNA sense strand
cagaacaggagcagaugga

SEQ ID NO: 1011444 - RNA, 19 nt, Homo sapiens
  misc_RNA (1)...(19): siRNA sense strand
ggcaaagccggaucuucaa

SEQ ID NO: 1011445 - RNA, 19 nt, Homo sapiens
  misc_RNA (1)...(19): siRNA sense strand
cagaguggaacgcagcaaa

SEQ ID NO: 1011446 - RNA, 19 nt, Homo sapiens
  misc_RNA (1)...(19): siRNA sense strand
cuggagagcaccucagaga

SEQ ID NO: 1011447 - RNA, 19 nt, Homo sapiens
  misc_RNA (1)...(19): siRNA sense strand
ccagguguacuuagaugga

SEQ ID NO: 1011448 - RNA, 19 nt, Homo sapiens
  misc_RNA (1)...(19): siRNA sense strand
gacaggccagcgugcauga

SEQ ID NO: 1011449 - RNA, 19 nt, Homo sapiens
  misc_RNA (1)...(19): siRNA sense strand
ugacaugccagaggucuuc

SEQ ID NO: 1011450 - RNA, 19 nt, Homo sapiens
  misc_RNA (1)...(19): siRNA sense strand
ggccaguucugagccaaca

SEQ ID NO: 1011451 - RNA, 19 nt, Homo sapiens
  misc_RNA (1)...(19): siRNA sense strand
uggccgaccuggagucucu

SEQ ID NO: 1011452 - RNA, 19 nt, Homo sapiens
  misc_RNA (1)...(19): siRNA sense strand
ggucaugagguccaucagu

SEQ ID NO: 1011453 - RNA, 19 nt, Homo sapiens
  misc_RNA (1)...(19): siRNA sense strand
cgaacagagcugccucaau

SEQ ID NO: 1011454 - RNA, 19 nt, Homo sapiens
  misc_RNA (1)...(19): siRNA sense strand
ccugaagucccgccaguca

SEQ ID NO: 1011455 - RNA, 19 nt, Homo sapiens
  misc_RNA (1)...(19): siRNA sense strand
ugcgccagcugcagaucua

SEQ ID NO: 1011456 - RNA, 19 nt, Homo sapiens
  misc_RNA (1)...(19): siRNA sense strand
gcugguccacugcaagaug

SEQ ID NO: 1011457 - RNA, 19 nt, Homo sapiens
  misc_RNA (1)...(19): siRNA sense strand
gaacagagcugccucaaug

SEQ ID NO: 1011458 - RNA, 19 nt, Homo sapiens
  misc_RNA (1)...(19): siRNA sense strand
gggcaaagccggaucuuca

SEQ ID NO: 1011459 - RNA, 19 nt, Homo sapiens
  misc_RNA (1)...(19): siRNA sense strand
ucagugaccuggagagugu

SEQ ID NO: 1011460 - RNA, 19 nt, Homo sapiens
  misc_RNA (1)...(19): siRNA sense strand
uggaggagcugcagaggaa

SEQ ID NO: 1011461 - RNA, 19 nt, Homo sapiens
  misc_RNA (1)...(19): siRNA sense strand
gcaguaccgugacuucauc

SEQ ID NO: 1011462 - RNA, 19 nt, Homo sapiens
  misc_RNA (1)...(19): siRNA sense strand
ccacagugcuggccuaugc

SEQ ID NO: 1011463 - RNA, 19 nt, Homo sapiens
  misc_RNA (1)...(19): siRNA sense strand
agacugaacuccgaacaga

SEQ ID NO: 1011464 - RNA, 19 nt, Homo sapiens
  misc_RNA (1)...(19): siRNA sense strand
gugcugagcuguggaaagu

SEQ ID NO: 1011465 - RNA, 19 nt, Homo sapiens
  misc_RNA (1)...(19): siRNA sense strand
ccuaugccaugaagcagua

SEQ ID NO: 1011466 - RNA, 19 nt, Homo sapiens
  misc_RNA (1)...(19): siRNA sense strand
gcaccugcaccucauggua

SEQ ID NO: 1011467 - RNA, 19 nt, Homo sapiens
  misc_RNA (1)...(19): siRNA sense strand
gcugagcuguggaaagugu

SEQ ID NO: 1011468 - RNA, 19 nt, Homo sapiens
  misc_RNA (1)...(19): siRNA sense strand
gggccacacuccagguauu

SEQ ID NO: 1011469 - RNA, 19 nt, Homo sapiens
  misc_RNA (1)...(19): siRNA sense strand
gagacgcaccgcuucauug

SEQ ID NO: 1011470 - RNA, 19 nt, Homo sapiens
  misc_RNA (1)...(19): siRNA sense strand
ggagacgcaccgcuucauu

SEQ ID NO: 1011471 - RNA, 19 nt, Homo sapiens
  misc_RNA (1)...(19): siRNA sense strand
ccaugaagcaguacgaaug

SEQ ID NO: 1011472 - RNA, 19 nt, Homo sapiens
  misc_RNA (1)...(19): siRNA sense strand
gcgcuucaccuaccacaau

SEQ ID NO: 1011473 - RNA, 19 nt, Homo sapiens
  misc_RNA (1)...(19): siRNA sense strand
gaaaguguuggaugucagu

SEQ ID NO: 1011474 - RNA, 19 nt, Homo sapiens
  misc_RNA (1)...(19): siRNA sense strand
ggucugagccaggaugaga

SEQ ID NO: 1011475 - RNA, 19 nt, Homo sapiens
  misc_RNA (1)...(19): siRNA sense strand
cccgggagauugacaacuu

SEQ ID NO: 1011476 - RNA, 19 nt, Homo sapiens
  misc_RNA (1)...(19): siRNA sense strand
uguggaaaguguuggaugu

SEQ ID NO: 1011477 - RNA, 19 nt, Homo sapiens
  misc_RNA (1)...(19): siRNA sense strand
ggagauugacaacuucuac

SEQ ID NO: 1011478 - RNA, 19 nt, Homo sapiens
  misc_RNA (1)...(19): siRNA sense strand
gguauugcaccaagcaugu

SEQ ID NO: 1011479 - RNA, 19 nt, Homo sapiens
  misc_RNA (1)...(19): siRNA sense strand
agacgcaccgcuucauuga

SEQ ID NO: 1011480 - RNA, 19 nt, Homo sapiens
  misc_RNA (1)...(19): siRNA sense strand
ucacccacaucuugaacau

SEQ ID NO: 1011481 - RNA, 19 nt, Homo sapiens
  misc_RNA (1)...(19): siRNA sense strand
cagcgaaggcagagcuuug

SEQ ID NO: 1011482 - RNA, 19 nt, Homo sapiens
  misc_RNA (1)...(19): siRNA sense strand
gcaaagccggaucuucaag

SEQ ID NO: 1011483 - RNA, 19 nt, Homo sapiens
  misc_RNA (1)...(19): siRNA sense strand
ucaaugaguggacggcuau

SEQ ID NO: 1011484 - RNA, 19 nt, Homo sapiens
  misc_RNA (1)...(19): siRNA sense strand
uggaaaguguuggauguca

SEQ ID NO: 1011485 - RNA, 19 nt, Homo sapiens
  misc_RNA (1)...(19): siRNA sense strand
ccucagaacaggagcagau

SEQ ID NO: 1011486 - RNA, 19 nt, Homo sapiens
  misc_RNA (1)...(19): siRNA sense strand
cagaacaggagcagaugga

SEQ ID NO: 1011487 - RNA, 19 nt, Homo sapiens
  misc_RNA (1)...(19): siRNA sense strand
ggcaaagccggaucuucaa

SEQ ID NO: 1011488 - RNA, 19 nt, Homo sapiens
  misc_RNA (1)...(19): siRNA sense strand
cagaguggaacgcagcaaa

SEQ ID NO: 1011489 - RNA, 19 nt, Homo sapiens
  misc_RNA (1)...(19): siRNA sense strand
ccagguguacuuagaugga

SEQ ID NO: 1011490 - RNA, 19 nt, Homo sapiens
  misc_RNA (1)...(19): siRNA sense strand
ggccaguucugagccaaca

SEQ ID NO: 1011491 - RNA, 19 nt, Homo sapiens
  misc_RNA (1)...(19): siRNA sense strand
uggccgaccuggagucucu

SEQ ID NO: 1011492 - RNA, 19 nt, Homo sapiens
  misc_RNA (1)...(19): siRNA sense strand
cgaacagagcugccucaau

SEQ ID NO: 1011493 - RNA, 19 nt, Homo sapiens
  misc_RNA (1)...(19): siRNA sense strand
ugcgccagcugcagaucua

SEQ ID NO: 1011494 - RNA, 19 nt, Homo sapiens
  misc_RNA (1)...(19): siRNA sense strand
gcugguccacugcaagaug

SEQ ID NO: 1011495 - RNA, 19 nt, Homo sapiens
  misc_RNA (1)...(19): siRNA sense strand
cagcaggacuucuccauug

SEQ ID NO: 1011496 - RNA, 19 nt, Homo sapiens
  misc_RNA (1)...(19): siRNA sense strand
gcaaagccaucguucuaca

SEQ ID NO: 1011497 - RNA, 19 nt, Homo sapiens
  misc_RNA (1)...(19): siRNA sense strand
cuaaagaucaugaaaguga

SEQ ID NO: 1011498 - RNA, 19 nt, Homo sapiens
  misc_RNA (1)...(19): siRNA sense strand
caucauggauucccuguuc

SEQ ID NO: 1011499 - RNA, 19 nt, Homo sapiens
  misc_RNA (1)...(19): siRNA sense strand
cagcaaagccaucguucua

SEQ ID NO: 1011500 - RNA, 19 nt, Homo sapiens
  misc_RNA (1)...(19): siRNA sense strand
gagaggcuaugaugaccuu

SEQ ID NO: 1011501 - RNA, 19 nt, Homo sapiens
  misc_RNA (1)...(19): siRNA sense strand
ggaggagguguccacguua

SEQ ID NO: 1011502 - RNA, 19 nt, Homo sapiens
  misc_RNA (1)...(19): siRNA sense strand
aaagaccauugacuacauu

SEQ ID NO: 1011503 - RNA, 19 nt, Homo sapiens
  misc_RNA (1)...(19): siRNA sense strand
ggaucgaggagcacuguaa

SEQ ID NO: 1011504 - RNA, 19 nt, Homo sapiens
  misc_RNA (1)...(19): siRNA sense strand
gaugucaccgcccuaaaga

SEQ ID NO: 1011505 - RNA, 19 nt, Homo sapiens
  misc_RNA (1)...(19): siRNA sense strand
caagagaggcuaugaugac

SEQ ID NO: 1011506 - RNA, 19 nt, Homo sapiens
  misc_RNA (1)...(19): siRNA sense strand
gcagcaggacuucuccauu

SEQ ID NO: 1011507 - RNA, 19 nt, Homo sapiens
  misc_RNA (1)...(19): siRNA sense strand
gagggacgccaucaagaga

SEQ ID NO: 1011508 - RNA, 19 nt, Homo sapiens
  misc_RNA (1)...(19): siRNA sense strand
ggucaaguucaacguguuu

SEQ ID NO: 1011509 - RNA, 19 nt, Homo sapiens
  misc_RNA (1)...(19): siRNA sense strand
gaucaugaaagugaacuau

SEQ ID NO: 1011510 - RNA, 19 nt, Homo sapiens
  misc_RNA (1)...(19): siRNA sense strand
cccuaaagaucaugaaagu

SEQ ID NO: 1011511 - RNA, 19 nt, Homo sapiens
  misc_RNA (1)...(19): siRNA sense strand
aggaggagguguccacguu

SEQ ID NO: 1011512 - RNA, 19 nt, Homo sapiens
  misc_RNA (1)...(19): siRNA sense strand
gaggagguguccacguuac

SEQ ID NO: 1011513 - RNA, 19 nt, Homo sapiens
  misc_RNA (1)...(19): siRNA sense strand
ggagggacgccaucaagag

SEQ ID NO: 1011514 - RNA, 19 nt, Homo sapiens
  misc_RNA (1)...(19): siRNA sense strand
ggaugucaccgcccuaaag

SEQ ID NO: 1011515 - RNA, 19 nt, Homo sapiens
  misc_RNA (1)...(19): siRNA sense strand
ucaagagaggcuaugauga

SEQ ID NO: 1011516 - RNA, 19 nt, Homo sapiens
  misc_RNA (1)...(19): siRNA sense strand
gaugaugaggacagugauu

SEQ ID NO: 1011517 - RNA, 19 nt, Homo sapiens
  misc_RNA (1)...(19): siRNA sense strand
gaggagggacgccaucaag

SEQ ID NO: 1011518 - RNA, 19 nt, Homo sapiens
  misc_RNA (1)...(19): siRNA sense strand
gaacuaugagcagauugug

SEQ ID NO: 1011519 - RNA, 19 nt, Homo sapiens
  misc_RNA (1)...(19): siRNA sense strand
gcucagcaaagccaucguu

SEQ ID NO: 1011520 - RNA, 19 nt, Homo sapiens
  misc_RNA (1)...(19): siRNA sense strand
aaagccaucguucuacaaa

SEQ ID NO: 1011521 - RNA, 19 nt, Homo sapiens
  misc_RNA (1)...(19): siRNA sense strand
caaagccaucguucuacaa

SEQ ID NO: 1011522 - RNA, 19 nt, Homo sapiens
  misc_RNA (1)...(19): siRNA sense strand
acuaugagcagauugugaa

SEQ ID NO: 1011523 - RNA, 19 nt, Homo sapiens
  misc_RNA (1)...(19): siRNA sense strand
uuucaaggcaucauggauu

SEQ ID NO: 1011524 - RNA, 19 nt, Homo sapiens
  misc_RNA (1)...(19): siRNA sense strand
agugaacuaugagcagauu

SEQ ID NO: 1011525 - RNA, 19 nt, Homo sapiens
  misc_RNA (1)...(19): siRNA sense strand
gaucgaggagcacuguaag

SEQ ID NO: 1011526 - RNA, 19 nt, Homo sapiens
  misc_RNA (1)...(19): siRNA sense strand
cuucaaugccuccaucuca

SEQ ID NO: 1011527 - RNA, 19 nt, Homo sapiens
  misc_RNA (1)...(19): siRNA sense strand
ugaaggcacaccaggacaa

SEQ ID NO: 1011528 - RNA, 19 nt, Homo sapiens
  misc_RNA (1)...(19): siRNA sense strand
ugaacuaugagcagauugu

SEQ ID NO: 1011529 - RNA, 19 nt, Homo sapiens
  misc_RNA (1)...(19): siRNA sense strand
ccacguuacgcaaggaugu

SEQ ID NO: 1011530 - RNA, 19 nt, Homo sapiens
  misc_RNA (1)...(19): siRNA sense strand
caaguucaacguguuucaa

SEQ ID NO: 1011531 - RNA, 19 nt, Homo sapiens
  misc_RNA (1)...(19): siRNA sense strand
ucaccgcccuaaagaucau

SEQ ID NO: 1011532 - RNA, 19 nt, Homo sapiens
  misc_RNA (1)...(19): siRNA sense strand
augaugaggacagugauua

SEQ ID NO: 1011533 - RNA, 19 nt, Homo sapiens
  misc_RNA (1)...(19): siRNA sense strand
augaugaccuucagaccau

SEQ ID NO: 1011534 - RNA, 19 nt, Homo sapiens
  misc_RNA (1)...(19): siRNA sense strand
uucaaggcaucauggauuc

SEQ ID NO: 1011535 - RNA, 19 nt, Homo sapiens
  misc_RNA (1)...(19): siRNA sense strand
cauugacuacauucaguuu

SEQ ID NO: 1011536 - RNA, 19 nt, Homo sapiens
  misc_RNA (1)...(19): siRNA sense strand
uacaaaagaccauugacua

SEQ ID NO: 1011537 - RNA, 19 nt, Homo sapiens
  misc_RNA (1)...(19): siRNA sense strand
ugucaccgcccuaaagauc

SEQ ID NO: 1011538 - RNA, 19 nt, Homo sapiens
  misc_RNA (1)...(19): siRNA sense strand
cagcaggacuucuccauug

SEQ ID NO: 1011539 - RNA, 19 nt, Homo sapiens
  misc_RNA (1)...(19): siRNA sense strand
gcaaagccaucguucuaca

SEQ ID NO: 1011540 - RNA, 19 nt, Homo sapiens
  misc_RNA (1)...(19): siRNA sense strand
cuaaagaucaugaaaguga

SEQ ID NO: 1011541 - RNA, 19 nt, Homo sapiens
  misc_RNA (1)...(19): siRNA sense strand
caucauggauucccuguuc

SEQ ID NO: 1011542 - RNA, 19 nt, Homo sapiens
  misc_RNA (1)...(19): siRNA sense strand
cagcaaagccaucguucua

SEQ ID NO: 1011543 - RNA, 19 nt, Homo sapiens
  misc_RNA (1)...(19): siRNA sense strand
gagaggcuaugaugaccuu

SEQ ID NO: 1011544 - RNA, 19 nt, Homo sapiens
  misc_RNA (1)...(19): siRNA sense strand
ggaggagguguccacguua

SEQ ID NO: 1011545 - RNA, 19 nt, Homo sapiens
  misc_RNA (1)...(19): siRNA sense strand
aaagaccauugacuacauu

SEQ ID NO: 1011546 - RNA, 19 nt, Homo sapiens
  misc_RNA (1)...(19): siRNA sense strand
ggaucgaggagcacuguaa

SEQ ID NO: 1011547 - RNA, 19 nt, Homo sapiens
  misc_RNA (1)...(19): siRNA sense strand
gaugucaccgcccuaaaga

SEQ ID NO: 1011548 - RNA, 19 nt, Homo sapiens
  misc_RNA (1)...(19): siRNA sense strand
caagagaggcuaugaugac

SEQ ID NO: 1011549 - RNA, 19 nt, Homo sapiens
  misc_RNA (1)...(19): siRNA sense strand
gcagcaggacuucuccauu

SEQ ID NO: 1011550 - RNA, 19 nt, Homo sapiens
  misc_RNA (1)...(19): siRNA sense strand
gagggacgccaucaagaga

SEQ ID NO: 1011551 - RNA, 19 nt, Homo sapiens
  misc_RNA (1)...(19): siRNA sense strand
ggucaaguucaacguguuu

SEQ ID NO: 1011552 - RNA, 19 nt, Homo sapiens
  misc_RNA (1)...(19): siRNA sense strand
gaucaugaaagugaacuau

SEQ ID NO: 1011553 - RNA, 19 nt, Homo sapiens
  misc_RNA (1)...(19): siRNA sense strand
cccuaaagaucaugaaagu

SEQ ID NO: 1011554 - RNA, 19 nt, Homo sapiens
  misc_RNA (1)...(19): siRNA sense strand
aggaggagguguccacguu

SEQ ID NO: 1011555 - RNA, 19 nt, Homo sapiens
  misc_RNA (1)...(19): siRNA sense strand
gaggagguguccacguuac

SEQ ID NO: 1011556 - RNA, 19 nt, Homo sapiens
  misc_RNA (1)...(19): siRNA sense strand
ggagggacgccaucaagag

SEQ ID NO: 1011557 - RNA, 19 nt, Homo sapiens
  misc_RNA (1)...(19): siRNA sense strand
ggaugucaccgcccuaaag

SEQ ID NO: 1011558 - RNA, 19 nt, Homo sapiens
  misc_RNA (1)...(19): siRNA sense strand
ucaagagaggcuaugauga

SEQ ID NO: 1011559 - RNA, 19 nt, Homo sapiens
  misc_RNA (1)...(19): siRNA sense strand
gaugaugaggacagugauu

SEQ ID NO: 1011560 - RNA, 19 nt, Homo sapiens
  misc_RNA (1)...(19): siRNA sense strand
gaggagggacgccaucaag

SEQ ID NO: 1011561 - RNA, 19 nt, Homo sapiens
  misc_RNA (1)...(19): siRNA sense strand
gaacuaugagcagauugug

SEQ ID NO: 1011562 - RNA, 19 nt, Homo sapiens
  misc_RNA (1)...(19): siRNA sense strand
gcucagcaaagccaucguu

SEQ ID NO: 1011563 - RNA, 19 nt, Homo sapiens
  misc_RNA (1)...(19): siRNA sense strand
aaagccaucguucuacaaa

SEQ ID NO: 1011564 - RNA, 19 nt, Homo sapiens
  misc_RNA (1)...(19): siRNA sense strand
caaagccaucguucuacaa

SEQ ID NO: 1011565 - RNA, 19 nt, Homo sapiens
  misc_RNA (1)...(19): siRNA sense strand
acuaugagcagauugugaa

SEQ ID NO: 1011566 - RNA, 19 nt, Homo sapiens
  misc_RNA (1)...(19): siRNA sense strand
uuucaaggcaucauggauu

SEQ ID NO: 1011567 - RNA, 19 nt, Homo sapiens
  misc_RNA (1)...(19): siRNA sense strand
agugaacuaugagcagauu

SEQ ID NO: 1011568 - RNA, 19 nt, Homo sapiens
  misc_RNA (1)...(19): siRNA sense strand
gaucgaggagcacuguaag

SEQ ID NO: 1011569 - RNA, 19 nt, Homo sapiens
  misc_RNA (1)...(19): siRNA sense strand
cuucaaugccuccaucuca

SEQ ID NO: 1011570 - RNA, 19 nt, Homo sapiens
  misc_RNA (1)...(19): siRNA sense strand
ugaaggcacaccaggacaa

SEQ ID NO: 1011571 - RNA, 19 nt, Homo sapiens
  misc_RNA (1)...(19): siRNA sense strand
ugaacuaugagcagauugu

SEQ ID NO: 1011572 - RNA, 19 nt, Homo sapiens
  misc_RNA (1)...(19): siRNA sense strand
ccacguuacgcaaggaugu

SEQ ID NO: 1011573 - RNA, 19 nt, Homo sapiens
  misc_RNA (1)...(19): siRNA sense strand
caaguucaacguguuucaa

SEQ ID NO: 1011574 - RNA, 19 nt, Homo sapiens
  misc_RNA (1)...(19): siRNA sense strand
ucaccgcccuaaagaucau

SEQ ID NO: 1011575 - RNA, 19 nt, Homo sapiens
  misc_RNA (1)...(19): siRNA sense strand
augaugaggacagugauua

SEQ ID NO: 1011576 - RNA, 19 nt, Homo sapiens
  misc_RNA (1)...(19): siRNA sense strand
augaugaccuucagaccau

SEQ ID NO: 1011577 - RNA, 19 nt, Homo sapiens
  misc_RNA (1)...(19): siRNA sense strand
uucaaggcaucauggauuc

SEQ ID NO: 1011578 - RNA, 19 nt, Homo sapiens
  misc_RNA (1)...(19): siRNA sense strand
cauugacuacauucaguuu

SEQ ID NO: 1011579 - RNA, 19 nt, Homo sapiens
  misc_RNA (1)...(19): siRNA sense strand
uacaaaagaccauugacua

SEQ ID NO: 1011580 - RNA, 19 nt, Homo sapiens
  misc_RNA (1)...(19): siRNA sense strand
ugucaccgcccuaaagauc

SEQ ID NO: 1011581 - RNA, 19 nt, Homo sapiens
  misc_RNA (1)...(19): siRNA sense strand
cagcaggacuucuccauug

SEQ ID NO: 1011582 - RNA, 19 nt, Homo sapiens
  misc_RNA (1)...(19): siRNA sense strand
gcaaagccaucguucuaca

SEQ ID NO: 1011583 - RNA, 19 nt, Homo sapiens
  misc_RNA (1)...(19): siRNA sense strand
cuaaagaucaugaaaguga

SEQ ID NO: 1011584 - RNA, 19 nt, Homo sapiens
  misc_RNA (1)...(19): siRNA sense strand
caucauggauucccuguuc

SEQ ID NO: 1011585 - RNA, 19 nt, Homo sapiens
  misc_RNA (1)...(19): siRNA sense strand
cagcaaagccaucguucua

SEQ ID NO: 1011586 - RNA, 19 nt, Homo sapiens
  misc_RNA (1)...(19): siRNA sense strand
gagaggcuaugaugaccuu

SEQ ID NO: 1011587 - RNA, 19 nt, Homo sapiens
  misc_RNA (1)...(19): siRNA sense strand
ggaggagguguccacguua

SEQ ID NO: 1011588 - RNA, 19 nt, Homo sapiens
  misc_RNA (1)...(19): siRNA sense strand
aaagaccauugacuacauu

SEQ ID NO: 1011589 - RNA, 19 nt, Homo sapiens
  misc_RNA (1)...(19): siRNA sense strand
ggaucgaggagcacuguaa

SEQ ID NO: 1011590 - RNA, 19 nt, Homo sapiens
  misc_RNA (1)...(19): siRNA sense strand
gaugucaccgcccuaaaga

SEQ ID NO: 1011591 - RNA, 19 nt, Homo sapiens
  misc_RNA (1)...(19): siRNA sense strand
caagagaggcuaugaugac

SEQ ID NO: 1011592 - RNA, 19 nt, Homo sapiens
  misc_RNA (1)...(19): siRNA sense strand
gcagcaggacuucuccauu

SEQ ID NO: 1011593 - RNA, 19 nt, Homo sapiens
  misc_RNA (1)...(19): siRNA sense strand
gagggacgccaucaagaga

SEQ ID NO: 1011594 - RNA, 19 nt, Homo sapiens
  misc_RNA (1)...(19): siRNA sense strand
ggucaaguucaacguguuu

SEQ ID NO: 1011595 - RNA, 19 nt, Homo sapiens
  misc_RNA (1)...(19): siRNA sense strand
gaucaugaaagugaacuau

SEQ ID NO: 1011596 - RNA, 19 nt, Homo sapiens
  misc_RNA (1)...(19): siRNA sense strand
cccuaaagaucaugaaagu

SEQ ID NO: 1011597 - RNA, 19 nt, Homo sapiens
  misc_RNA (1)...(19): siRNA sense strand
aggaggagguguccacguu

SEQ ID NO: 1011598 - RNA, 19 nt, Homo sapiens
  misc_RNA (1)...(19): siRNA sense strand
gaggagguguccacguuac

SEQ ID NO: 1011599 - RNA, 19 nt, Homo sapiens
  misc_RNA (1)...(19): siRNA sense strand
ggagggacgccaucaagag

SEQ ID NO: 1011600 - RNA, 19 nt, Homo sapiens
  misc_RNA (1)...(19): siRNA sense strand
ggaugucaccgcccuaaag

SEQ ID NO: 1011601 - RNA, 19 nt, Homo sapiens
  misc_RNA (1)...(19): siRNA sense strand
ucaagagaggcuaugauga

SEQ ID NO: 1011602 - RNA, 19 nt, Homo sapiens
  misc_RNA (1)...(19): siRNA sense strand
gaugaugaggacagugauu

SEQ ID NO: 1011603 - RNA, 19 nt, Homo sapiens
  misc_RNA (1)...(19): siRNA sense strand
gaggagggacgccaucaag

SEQ ID NO: 1011604 - RNA, 19 nt, Homo sapiens
  misc_RNA (1)...(19): siRNA sense strand
gaacuaugagcagauugug

SEQ ID NO: 1011605 - RNA, 19 nt, Homo sapiens
  misc_RNA (1)...(19): siRNA sense strand
gcucagcaaagccaucguu

SEQ ID NO: 1011606 - RNA, 19 nt, Homo sapiens
  misc_RNA (1)...(19): siRNA sense strand
aaagccaucguucuacaaa

SEQ ID NO: 1011607 - RNA, 19 nt, Homo sapiens
  misc_RNA (1)...(19): siRNA sense strand
caaagccaucguucuacaa

SEQ ID NO: 1011608 - RNA, 19 nt, Homo sapiens
  misc_RNA (1)...(19): siRNA sense strand
acuaugagcagauugugaa

SEQ ID NO: 1011609 - RNA, 19 nt, Homo sapiens
  misc_RNA (1)...(19): siRNA sense strand
uuucaaggcaucauggauu

SEQ ID NO: 1011610 - RNA, 19 nt, Homo sapiens
  misc_RNA (1)...(19): siRNA sense strand
agugaacuaugagcagauu

SEQ ID NO: 1011611 - RNA, 19 nt, Homo sapiens
  misc_RNA (1)...(19): siRNA sense strand
gaucgaggagcacuguaag

SEQ ID NO: 1011612 - RNA, 19 nt, Homo sapiens
  misc_RNA (1)...(19): siRNA sense strand
cuucaaugccuccaucuca

SEQ ID NO: 1011613 - RNA, 19 nt, Homo sapiens
  misc_RNA (1)...(19): siRNA sense strand
ugaaggcacaccaggacaa

SEQ ID NO: 1011614 - RNA, 19 nt, Homo sapiens
  misc_RNA (1)...(19): siRNA sense strand
ugaacuaugagcagauugu

SEQ ID NO: 1011615 - RNA, 19 nt, Homo sapiens
  misc_RNA (1)...(19): siRNA sense strand
ccacguuacgcaaggaugu

SEQ ID NO: 1011616 - RNA, 19 nt, Homo sapiens
  misc_RNA (1)...(19): siRNA sense strand
caaguucaacguguuucaa

SEQ ID NO: 1011617 - RNA, 19 nt, Homo sapiens
  misc_RNA (1)...(19): siRNA sense strand
ucaccgcccuaaagaucau

SEQ ID NO: 1011618 - RNA, 19 nt, Homo sapiens
  misc_RNA (1)...(19): siRNA sense strand
augaugaggacagugauua

SEQ ID NO: 1011619 - RNA, 19 nt, Homo sapiens
  misc_RNA (1)...(19): siRNA sense strand
augaugaccuucagaccau

SEQ ID NO: 1011620 - RNA, 19 nt, Homo sapiens
  misc_RNA (1)...(19): siRNA sense strand
uucaaggcaucauggauuc

SEQ ID NO: 1011621 - RNA, 19 nt, Homo sapiens
  misc_RNA (1)...(19): siRNA sense strand
cauugacuacauucaguuu

SEQ ID NO: 1011622 - RNA, 19 nt, Homo sapiens
  misc_RNA (1)...(19): siRNA sense strand
uacaaaagaccauugacua

SEQ ID NO: 1011623 - RNA, 19 nt, Homo sapiens
  misc_RNA (1)...(19): siRNA sense strand
ugucaccgcccuaaagauc

SEQ ID NO: 1011624 - RNA, 19 nt, Homo sapiens
  misc_RNA (1)...(19): siRNA sense strand
cagcaggacuucuccauug

SEQ ID NO: 1011625 - RNA, 19 nt, Homo sapiens
  misc_RNA (1)...(19): siRNA sense strand
gcaaagccaucguucuaca

SEQ ID NO: 1011626 - RNA, 19 nt, Homo sapiens
  misc_RNA (1)...(19): siRNA sense strand
cuaaagaucaugaaaguga

SEQ ID NO: 1011627 - RNA, 19 nt, Homo sapiens
  misc_RNA (1)...(19): siRNA sense strand
caucauggauucccuguuc

SEQ ID NO: 1011628 - RNA, 19 nt, Homo sapiens
  misc_RNA (1)...(19): siRNA sense strand
cagcaaagccaucguucua

SEQ ID NO: 1011629 - RNA, 19 nt, Homo sapiens
  misc_RNA (1)...(19): siRNA sense strand
gagaggcuaugaugaccuu

SEQ ID NO: 1011630 - RNA, 19 nt, Homo sapiens
  misc_RNA (1)...(19): siRNA sense strand
ggaggagguguccacguua

SEQ ID NO: 1011631 - RNA, 19 nt, Homo sapiens
  misc_RNA (1)...(19): siRNA sense strand
aaagaccauugacuacauu

SEQ ID NO: 1011632 - RNA, 19 nt, Homo sapiens
  misc_RNA (1)...(19): siRNA sense strand
ggaucgaggagcacuguaa

SEQ ID NO: 1011633 - RNA, 19 nt, Homo sapiens
  misc_RNA (1)...(19): siRNA sense strand
gaugucaccgcccuaaaga

SEQ ID NO: 1011634 - RNA, 19 nt, Homo sapiens
  misc_RNA (1)...(19): siRNA sense strand
caagagaggcuaugaugac

SEQ ID NO: 1011635 - RNA, 19 nt, Homo sapiens
  misc_RNA (1)...(19): siRNA sense strand
gcagcaggacuucuccauu

SEQ ID NO: 1011636 - RNA, 19 nt, Homo sapiens
  misc_RNA (1)...(19): siRNA sense strand
gagggacgccaucaagaga

SEQ ID NO: 1011637 - RNA, 19 nt, Homo sapiens
  misc_RNA (1)...(19): siRNA sense strand
ggucaaguucaacguguuu

SEQ ID NO: 1011638 - RNA, 19 nt, Homo sapiens
  misc_RNA (1)...(19): siRNA sense strand
gaucaugaaagugaacuau

SEQ ID NO: 1011639 - RNA, 19 nt, Homo sapiens
  misc_RNA (1)...(19): siRNA sense strand
cccuaaagaucaugaaagu

SEQ ID NO: 1011640 - RNA, 19 nt, Homo sapiens
  misc_RNA (1)...(19): siRNA sense strand
aggaggagguguccacguu

SEQ ID NO: 1011641 - RNA, 19 nt, Homo sapiens
  misc_RNA (1)...(19): siRNA sense strand
gaggagguguccacguuac

SEQ ID NO: 1011642 - RNA, 19 nt, Homo sapiens
  misc_RNA (1)...(19): siRNA sense strand
ggagggacgccaucaagag

SEQ ID NO: 1011643 - RNA, 19 nt, Homo sapiens
  misc_RNA (1)...(19): siRNA sense strand
ggaugucaccgcccuaaag

SEQ ID NO: 1011644 - RNA, 19 nt, Homo sapiens
  misc_RNA (1)...(19): siRNA sense strand
ucaagagaggcuaugauga

SEQ ID NO: 1011645 - RNA, 19 nt, Homo sapiens
  misc_RNA (1)...(19): siRNA sense strand
gaugaugaggacagugauu

SEQ ID NO: 1011646 - RNA, 19 nt, Homo sapiens
  misc_RNA (1)...(19): siRNA sense strand
gaggagggacgccaucaag

SEQ ID NO: 1011647 - RNA, 19 nt, Homo sapiens
  misc_RNA (1)...(19): siRNA sense strand
gaacuaugagcagauugug

SEQ ID NO: 1011648 - RNA, 19 nt, Homo sapiens
  misc_RNA (1)...(19): siRNA sense strand
gcucagcaaagccaucguu

SEQ ID NO: 1011649 - RNA, 19 nt, Homo sapiens
  misc_RNA (1)...(19): siRNA sense strand
aaagccaucguucuacaaa

SEQ ID NO: 1011650 - RNA, 19 nt, Homo sapiens
  misc_RNA (1)...(19): siRNA sense strand
caaagccaucguucuacaa

SEQ ID NO: 1011651 - RNA, 19 nt, Homo sapiens
  misc_RNA (1)...(19): siRNA sense strand
acuaugagcagauugugaa

SEQ ID NO: 1011652 - RNA, 19 nt, Homo sapiens
  misc_RNA (1)...(19): siRNA sense strand
uuucaaggcaucauggauu

SEQ ID NO: 1011653 - RNA, 19 nt, Homo sapiens
  misc_RNA (1)...(19): siRNA sense strand
agugaacuaugagcagauu

SEQ ID NO: 1011654 - RNA, 19 nt, Homo sapiens
  misc_RNA (1)...(19): siRNA sense strand
gaucgaggagcacuguaag

SEQ ID NO: 1011655 - RNA, 19 nt, Homo sapiens
  misc_RNA (1)...(19): siRNA sense strand
cuucaaugccuccaucuca

SEQ ID NO: 1011656 - RNA, 19 nt, Homo sapiens
  misc_RNA (1)...(19): siRNA sense strand
ugaaggcacaccaggacaa

SEQ ID NO: 1011657 - RNA, 19 nt, Homo sapiens
  misc_RNA (1)...(19): siRNA sense strand
ugaacuaugagcagauugu

SEQ ID NO: 1011658 - RNA, 19 nt, Homo sapiens
  misc_RNA (1)...(19): siRNA sense strand
ccacguuacgcaaggaugu

SEQ ID NO: 1011659 - RNA, 19 nt, Homo sapiens
  misc_RNA (1)...(19): siRNA sense strand
caaguucaacguguuucaa

SEQ ID NO: 1011660 - RNA, 19 nt, Homo sapiens
  misc_RNA (1)...(19): siRNA sense strand
ucaccgcccuaaagaucau

SEQ ID NO: 1011661 - RNA, 19 nt, Homo sapiens
  misc_RNA (1)...(19): siRNA sense strand
augaugaggacagugauua

SEQ ID NO: 1011662 - RNA, 19 nt, Homo sapiens
  misc_RNA (1)...(19): siRNA sense strand
augaugaccuucagaccau

SEQ ID NO: 1011663 - RNA, 19 nt, Homo sapiens
  misc_RNA (1)...(19): siRNA sense strand
uucaaggcaucauggauuc

SEQ ID NO: 1011664 - RNA, 19 nt, Homo sapiens
  misc_RNA (1)...(19): siRNA sense strand
cauugacuacauucaguuu

SEQ ID NO: 1011665 - RNA, 19 nt, Homo sapiens
  misc_RNA (1)...(19): siRNA sense strand
uacaaaagaccauugacua

SEQ ID NO: 1011666 - RNA, 19 nt, Homo sapiens
  misc_RNA (1)...(19): siRNA sense strand
ugucaccgcccuaaagauc

SEQ ID NO: 1011667 - RNA, 19 nt, Homo sapiens
  misc_RNA (1)...(19): siRNA sense strand
cagcaggacuucuccauug

SEQ ID NO: 1011668 - RNA, 19 nt, Homo sapiens
  misc_RNA (1)...(19): siRNA sense strand
gcaaagccaucguucuaca

SEQ ID NO: 1011669 - RNA, 19 nt, Homo sapiens
  misc_RNA (1)...(19): siRNA sense strand
cuaaagaucaugaaaguga

SEQ ID NO: 1011670 - RNA, 19 nt, Homo sapiens
  misc_RNA (1)...(19): siRNA sense strand
caucauggauucccuguuc

SEQ ID NO: 1011671 - RNA, 19 nt, Homo sapiens
  misc_RNA (1)...(19): siRNA sense strand
cagcaaagccaucguucua

SEQ ID NO: 1011672 - RNA, 19 nt, Homo sapiens
  misc_RNA (1)...(19): siRNA sense strand
gagaggcuaugaugaccuu

SEQ ID NO: 1011673 - RNA, 19 nt, Homo sapiens
  misc_RNA (1)...(19): siRNA sense strand
ggaggagguguccacguua

SEQ ID NO: 1011674 - RNA, 19 nt, Homo sapiens
  misc_RNA (1)...(19): siRNA sense strand
aaagaccauugacuacauu

SEQ ID NO: 1011675 - RNA, 19 nt, Homo sapiens
  misc_RNA (1)...(19): siRNA sense strand
ggaucgaggagcacuguaa

SEQ ID NO: 1011676 - RNA, 19 nt, Homo sapiens
  misc_RNA (1)...(19): siRNA sense strand
gaugucaccgcccuaaaga

SEQ ID NO: 1011677 - RNA, 19 nt, Homo sapiens
  misc_RNA (1)...(19): siRNA sense strand
caagagaggcuaugaugac

SEQ ID NO: 1011678 - RNA, 19 nt, Homo sapiens
  misc_RNA (1)...(19): siRNA sense strand
gcagcaggacuucuccauu

SEQ ID NO: 1011679 - RNA, 19 nt, Homo sapiens
  misc_RNA (1)...(19): siRNA sense strand
gagggacgccaucaagaga

SEQ ID NO: 1011680 - RNA, 19 nt, Homo sapiens
  misc_RNA (1)...(19): siRNA sense strand
ggucaaguucaacguguuu

SEQ ID NO: 1011681 - RNA, 19 nt, Homo sapiens
  misc_RNA (1)...(19): siRNA sense strand
gaucaugaaagugaacuau

SEQ ID NO: 1011682 - RNA, 19 nt, Homo sapiens
  misc_RNA (1)...(19): siRNA sense strand
cccuaaagaucaugaaagu

SEQ ID NO: 1011683 - RNA, 19 nt, Homo sapiens
  misc_RNA (1)...(19): siRNA sense strand
aggaggagguguccacguu

SEQ ID NO: 1011684 - RNA, 19 nt, Homo sapiens
  misc_RNA (1)...(19): siRNA sense strand
gaggagguguccacguuac

SEQ ID NO: 1011685 - RNA, 19 nt, Homo sapiens
  misc_RNA (1)...(19): siRNA sense strand
ggagggacgccaucaagag

SEQ ID NO: 1011686 - RNA, 19 nt, Homo sapiens
  misc_RNA (1)...(19): siRNA sense strand
ggaugucaccgcccuaaag

SEQ ID NO: 1011687 - RNA, 19 nt, Homo sapiens
  misc_RNA (1)...(19): siRNA sense strand
ucaagagaggcuaugauga

SEQ ID NO: 1011688 - RNA, 19 nt, Homo sapiens
  misc_RNA (1)...(19): siRNA sense strand
gaugaugaggacagugauu

SEQ ID NO: 1011689 - RNA, 19 nt, Homo sapiens
  misc_RNA (1)...(19): siRNA sense strand
gaggagggacgccaucaag

SEQ ID NO: 1011690 - RNA, 19 nt, Homo sapiens
  misc_RNA (1)...(19): siRNA sense strand
gaacuaugagcagauugug

SEQ ID NO: 1011691 - RNA, 19 nt, Homo sapiens
  misc_RNA (1)...(19): siRNA sense strand
gcucagcaaagccaucguu

SEQ ID NO: 1011692 - RNA, 19 nt, Homo sapiens
  misc_RNA (1)...(19): siRNA sense strand
aaagccaucguucuacaaa

SEQ ID NO: 1011693 - RNA, 19 nt, Homo sapiens
  misc_RNA (1)...(19): siRNA sense strand
caaagccaucguucuacaa

SEQ ID NO: 1011694 - RNA, 19 nt, Homo sapiens
  misc_RNA (1)...(19): siRNA sense strand
acuaugagcagauugugaa

SEQ ID NO: 1011695 - RNA, 19 nt, Homo sapiens
  misc_RNA (1)...(19): siRNA sense strand
uuucaaggcaucauggauu

SEQ ID NO: 1011696 - RNA, 19 nt, Homo sapiens
  misc_RNA (1)...(19): siRNA sense strand
agugaacuaugagcagauu

SEQ ID NO: 1011697 - RNA, 19 nt, Homo sapiens
  misc_RNA (1)...(19): siRNA sense strand
gaucgaggagcacuguaag

SEQ ID NO: 1011698 - RNA, 19 nt, Homo sapiens
  misc_RNA (1)...(19): siRNA sense strand
cuucaaugccuccaucuca

SEQ ID NO: 1011699 - RNA, 19 nt, Homo sapiens
  misc_RNA (1)...(19): siRNA sense strand
ugaaggcacaccaggacaa

SEQ ID NO: 1011700 - RNA, 19 nt, Homo sapiens
  misc_RNA (1)...(19): siRNA sense strand
ugaacuaugagcagauugu

SEQ ID NO: 1011701 - RNA, 19 nt, Homo sapiens
  misc_RNA (1)...(19): siRNA sense strand
ccacguuacgcaaggaugu

SEQ ID NO: 1011702 - RNA, 19 nt, Homo sapiens
  misc_RNA (1)...(19): siRNA sense strand
caaguucaacguguuucaa

SEQ ID NO: 1011703 - RNA, 19 nt, Homo sapiens
  misc_RNA (1)...(19): siRNA sense strand
ucaccgcccuaaagaucau

SEQ ID NO: 1011704 - RNA, 19 nt, Homo sapiens
  misc_RNA (1)...(19): siRNA sense strand
augaugaggacagugauua

SEQ ID NO: 1011705 - RNA, 19 nt, Homo sapiens
  misc_RNA (1)...(19): siRNA sense strand
augaugaccuucagaccau

SEQ ID NO: 1011706 - RNA, 19 nt, Homo sapiens
  misc_RNA (1)...(19): siRNA sense strand
uucaaggcaucauggauuc

SEQ ID NO: 1011707 - RNA, 19 nt, Homo sapiens
  misc_RNA (1)...(19): siRNA sense strand
cauugacuacauucaguuu

SEQ ID NO: 1011708 - RNA, 19 nt, Homo sapiens
  misc_RNA (1)...(19): siRNA sense strand
uacaaaagaccauugacua

SEQ ID NO: 1011709 - RNA, 19 nt, Homo sapiens
  misc_RNA (1)...(19): siRNA sense strand
ugucaccgcccuaaagauc

SEQ ID NO: 1011710 - RNA, 19 nt, Homo sapiens
  misc_RNA (1)...(19): siRNA sense strand
cagcaggacuucuccauug

SEQ ID NO: 1011711 - RNA, 19 nt, Homo sapiens
  misc_RNA (1)...(19): siRNA sense strand
gcaaagccaucguucuaca

SEQ ID NO: 1011712 - RNA, 19 nt, Homo sapiens
  misc_RNA (1)...(19): siRNA sense strand
cuaaagaucaugaaaguga

SEQ ID NO: 1011713 - RNA, 19 nt, Homo sapiens
  misc_RNA (1)...(19): siRNA sense strand
caucauggauucccuguuc

SEQ ID NO: 1011714 - RNA, 19 nt, Homo sapiens
  misc_RNA (1)...(19): siRNA sense strand
cagcaaagccaucguucua

SEQ ID NO: 1011715 - RNA, 19 nt, Homo sapiens
  misc_RNA (1)...(19): siRNA sense strand
gagaggcuaugaugaccuu

SEQ ID NO: 1011716 - RNA, 19 nt, Homo sapiens
  misc_RNA (1)...(19): siRNA sense strand
ggaggagguguccacguua

SEQ ID NO: 1011717 - RNA, 19 nt, Homo sapiens
  misc_RNA (1)...(19): siRNA sense strand
aaagaccauugacuacauu

SEQ ID NO: 1011718 - RNA, 19 nt, Homo sapiens
  misc_RNA (1)...(19): siRNA sense strand
ggaucgaggagcacuguaa

SEQ ID NO: 1011719 - RNA, 19 nt, Homo sapiens
  misc_RNA (1)...(19): siRNA sense strand
gaugucaccgcccuaaaga

SEQ ID NO: 1011720 - RNA, 19 nt, Homo sapiens
  misc_RNA (1)...(19): siRNA sense strand
caagagaggcuaugaugac

SEQ ID NO: 1011721 - RNA, 19 nt, Homo sapiens
  misc_RNA (1)...(19): siRNA sense strand
gcagcaggacuucuccauu

SEQ ID NO: 1011722 - RNA, 19 nt, Homo sapiens
  misc_RNA (1)...(19): siRNA sense strand
gagggacgccaucaagaga

SEQ ID NO: 1011723 - RNA, 19 nt, Homo sapiens
  misc_RNA (1)...(19): siRNA sense strand
ggucaaguucaacguguuu

SEQ ID NO: 1011724 - RNA, 19 nt, Homo sapiens
  misc_RNA (1)...(19): siRNA sense strand
gaucaugaaagugaacuau

SEQ ID NO: 1011725 - RNA, 19 nt, Homo sapiens
  misc_RNA (1)...(19): siRNA sense strand
cccuaaagaucaugaaagu

SEQ ID NO: 1011726 - RNA, 19 nt, Homo sapiens
  misc_RNA (1)...(19): siRNA sense strand
aggaggagguguccacguu

SEQ ID NO: 1011727 - RNA, 19 nt, Homo sapiens
  misc_RNA (1)...(19): siRNA sense strand
gaggagguguccacguuac

SEQ ID NO: 1011728 - RNA, 19 nt, Homo sapiens
  misc_RNA (1)...(19): siRNA sense strand
ggagggacgccaucaagag

SEQ ID NO: 1011729 - RNA, 19 nt, Homo sapiens
  misc_RNA (1)...(19): siRNA sense strand
ggaugucaccgcccuaaag

SEQ ID NO: 1011730 - RNA, 19 nt, Homo sapiens
  misc_RNA (1)...(19): siRNA sense strand
ucaagagaggcuaugauga

SEQ ID NO: 1011731 - RNA, 19 nt, Homo sapiens
  misc_RNA (1)...(19): siRNA sense strand
gaugaugaggacagugauu

SEQ ID NO: 1011732 - RNA, 19 nt, Homo sapiens
  misc_RNA (1)...(19): siRNA sense strand
gaggagggacgccaucaag

SEQ ID NO: 1011733 - RNA, 19 nt, Homo sapiens
  misc_RNA (1)...(19): siRNA sense strand
gaacuaugagcagauugug

SEQ ID NO: 1011734 - RNA, 19 nt, Homo sapiens
  misc_RNA (1)...(19): siRNA sense strand
gcucagcaaagccaucguu

SEQ ID NO: 1011735 - RNA, 19 nt, Homo sapiens
  misc_RNA (1)...(19): siRNA sense strand
aaagccaucguucuacaaa

SEQ ID NO: 1011736 - RNA, 19 nt, Homo sapiens
  misc_RNA (1)...(19): siRNA sense strand
caaagccaucguucuacaa

SEQ ID NO: 1011737 - RNA, 19 nt, Homo sapiens
  misc_RNA (1)...(19): siRNA sense strand
acuaugagcagauugugaa

SEQ ID NO: 1011738 - RNA, 19 nt, Homo sapiens
  misc_RNA (1)...(19): siRNA sense strand
uuucaaggcaucauggauu

SEQ ID NO: 1011739 - RNA, 19 nt, Homo sapiens
  misc_RNA (1)...(19): siRNA sense strand
agugaacuaugagcagauu

SEQ ID NO: 1011740 - RNA, 19 nt, Homo sapiens
  misc_RNA (1)...(19): siRNA sense strand
gaucgaggagcacuguaag

SEQ ID NO: 1011741 - RNA, 19 nt, Homo sapiens
  misc_RNA (1)...(19): siRNA sense strand
cuucaaugccuccaucuca

SEQ ID NO: 1011742 - RNA, 19 nt, Homo sapiens
  misc_RNA (1)...(19): siRNA sense strand
ugaaggcacaccaggacaa

SEQ ID NO: 1011743 - RNA, 19 nt, Homo sapiens
  misc_RNA (1)...(19): siRNA sense strand
ugaacuaugagcagauugu

SEQ ID NO: 1011744 - RNA, 19 nt, Homo sapiens
  misc_RNA (1)...(19): siRNA sense strand
ccacguuacgcaaggaugu

SEQ ID NO: 1011745 - RNA, 19 nt, Homo sapiens
  misc_RNA (1)...(19): siRNA sense strand
caaguucaacguguuucaa

SEQ ID NO: 1011746 - RNA, 19 nt, Homo sapiens
  misc_RNA (1)...(19): siRNA sense strand
ucaccgcccuaaagaucau

SEQ ID NO: 1011747 - RNA, 19 nt, Homo sapiens
  misc_RNA (1)...(19): siRNA sense strand
augaugaggacagugauua

SEQ ID NO: 1011748 - RNA, 19 nt, Homo sapiens
  misc_RNA (1)...(19): siRNA sense strand
augaugaccuucagaccau

SEQ ID NO: 1011749 - RNA, 19 nt, Homo sapiens
  misc_RNA (1)...(19): siRNA sense strand
uucaaggcaucauggauuc

SEQ ID NO: 1011750 - RNA, 19 nt, Homo sapiens
  misc_RNA (1)...(19): siRNA sense strand
cauugacuacauucaguuu

SEQ ID NO: 1011751 - RNA, 19 nt, Homo sapiens
  misc_RNA (1)...(19): siRNA sense strand
uacaaaagaccauugacua

SEQ ID NO: 1011752 - RNA, 19 nt, Homo sapiens
  misc_RNA (1)...(19): siRNA sense strand
ugucaccgcccuaaagauc

SEQ ID NO: 1011753 - RNA, 19 nt, Homo sapiens
  misc_RNA (1)...(19): siRNA sense strand
cagcaggacuucuccauug

SEQ ID NO: 1011754 - RNA, 19 nt, Homo sapiens
  misc_RNA (1)...(19): siRNA sense strand
gcaaagccaucguucuaca

SEQ ID NO: 1011755 - RNA, 19 nt, Homo sapiens
  misc_RNA (1)...(19): siRNA sense strand
cuaaagaucaugaaaguga

SEQ ID NO: 1011756 - RNA, 19 nt, Homo sapiens
  misc_RNA (1)...(19): siRNA sense strand
caucauggauucccuguuc

SEQ ID NO: 1011757 - RNA, 19 nt, Homo sapiens
  misc_RNA (1)...(19): siRNA sense strand
cagcaaagccaucguucua

SEQ ID NO: 1011758 - RNA, 19 nt, Homo sapiens
  misc_RNA (1)...(19): siRNA sense strand
gagaggcuaugaugaccuu

SEQ ID NO: 1011759 - RNA, 19 nt, Homo sapiens
  misc_RNA (1)...(19): siRNA sense strand
ggaggagguguccacguua

SEQ ID NO: 1011760 - RNA, 19 nt, Homo sapiens
  misc_RNA (1)...(19): siRNA sense strand
aaagaccauugacuacauu

SEQ ID NO: 1011761 - RNA, 19 nt, Homo sapiens
  misc_RNA (1)...(19): siRNA sense strand
ggaucgaggagcacuguaa

SEQ ID NO: 1011762 - RNA, 19 nt, Homo sapiens
  misc_RNA (1)...(19): siRNA sense strand
gaugucaccgcccuaaaga

SEQ ID NO: 1011763 - RNA, 19 nt, Homo sapiens
  misc_RNA (1)...(19): siRNA sense strand
caagagaggcuaugaugac

SEQ ID NO: 1011764 - RNA, 19 nt, Homo sapiens
  misc_RNA (1)...(19): siRNA sense strand
gcagcaggacuucuccauu

SEQ ID NO: 1011765 - RNA, 19 nt, Homo sapiens
  misc_RNA (1)...(19): siRNA sense strand
gagggacgccaucaagaga

SEQ ID NO: 1011766 - RNA, 19 nt, Homo sapiens
  misc_RNA (1)...(19): siRNA sense strand
ggucaaguucaacguguuu

SEQ ID NO: 1011767 - RNA, 19 nt, Homo sapiens
  misc_RNA (1)...(19): siRNA sense strand
gaucaugaaagugaacuau

SEQ ID NO: 1011768 - RNA, 19 nt, Homo sapiens
  misc_RNA (1)...(19): siRNA sense strand
cccuaaagaucaugaaagu

SEQ ID NO: 1011769 - RNA, 19 nt, Homo sapiens
  misc_RNA (1)...(19): siRNA sense strand
aggaggagguguccacguu

SEQ ID NO: 1011770 - RNA, 19 nt, Homo sapiens
  misc_RNA (1)...(19): siRNA sense strand
gaggagguguccacguuac

SEQ ID NO: 1011771 - RNA, 19 nt, Homo sapiens
  misc_RNA (1)...(19): siRNA sense strand
ggagggacgccaucaagag

SEQ ID NO: 1011772 - RNA, 19 nt, Homo sapiens
  misc_RNA (1)...(19): siRNA sense strand
ggaugucaccgcccuaaag

SEQ ID NO: 1011773 - RNA, 19 nt, Homo sapiens
  misc_RNA (1)...(19): siRNA sense strand
ucaagagaggcuaugauga

SEQ ID NO: 1011774 - RNA, 19 nt, Homo sapiens
  misc_RNA (1)...(19): siRNA sense strand
gaugaugaggacagugauu

SEQ ID NO: 1011775 - RNA, 19 nt, Homo sapiens
  misc_RNA (1)...(19): siRNA sense strand
gaggagggacgccaucaag

SEQ ID NO: 1011776 - RNA, 19 nt, Homo sapiens
  misc_RNA (1)...(19): siRNA sense strand
gaacuaugagcagauugug

SEQ ID NO: 1011777 - RNA, 19 nt, Homo sapiens
  misc_RNA (1)...(19): siRNA sense strand
gcucagcaaagccaucguu

SEQ ID NO: 1011778 - RNA, 19 nt, Homo sapiens
  misc_RNA (1)...(19): siRNA sense strand
aaagccaucguucuacaaa

SEQ ID NO: 1011779 - RNA, 19 nt, Homo sapiens
  misc_RNA (1)...(19): siRNA sense strand
caaagccaucguucuacaa

SEQ ID NO: 1011780 - RNA, 19 nt, Homo sapiens
  misc_RNA (1)...(19): siRNA sense strand
acuaugagcagauugugaa

SEQ ID NO: 1011781 - RNA, 19 nt, Homo sapiens
  misc_RNA (1)...(19): siRNA sense strand
uuucaaggcaucauggauu

SEQ ID NO: 1011782 - RNA, 19 nt, Homo sapiens
  misc_RNA (1)...(19): siRNA sense strand
agugaacuaugagcagauu

SEQ ID NO: 1011783 - RNA, 19 nt, Homo sapiens
  misc_RNA (1)...(19): siRNA sense strand
gaucgaggagcacuguaag

SEQ ID NO: 1011784 - RNA, 19 nt, Homo sapiens
  misc_RNA (1)...(19): siRNA sense strand
cuucaaugccuccaucuca

SEQ ID NO: 1011785 - RNA, 19 nt, Homo sapiens
  misc_RNA (1)...(19): siRNA sense strand
ugaaggcacaccaggacaa

SEQ ID NO: 1011786 - RNA, 19 nt, Homo sapiens
  misc_RNA (1)...(19): siRNA sense strand
ugaacuaugagcagauugu

SEQ ID NO: 1011787 - RNA, 19 nt, Homo sapiens
  misc_RNA (1)...(19): siRNA sense strand
ccacguuacgcaaggaugu

SEQ ID NO: 1011788 - RNA, 19 nt, Homo sapiens
  misc_RNA (1)...(19): siRNA sense strand
caaguucaacguguuucaa

SEQ ID NO: 1011789 - RNA, 19 nt, Homo sapiens
  misc_RNA (1)...(19): siRNA sense strand
ucaccgcccuaaagaucau

SEQ ID NO: 1011790 - RNA, 19 nt, Homo sapiens
  misc_RNA (1)...(19): siRNA sense strand
augaugaggacagugauua

SEQ ID NO: 1011791 - RNA, 19 nt, Homo sapiens
  misc_RNA (1)...(19): siRNA sense strand
augaugaccuucagaccau

SEQ ID NO: 1011792 - RNA, 19 nt, Homo sapiens
  misc_RNA (1)...(19): siRNA sense strand
uucaaggcaucauggauuc

SEQ ID NO: 1011793 - RNA, 19 nt, Homo sapiens
  misc_RNA (1)...(19): siRNA sense strand
cauugacuacauucaguuu

SEQ ID NO: 1011794 - RNA, 19 nt, Homo sapiens
  misc_RNA (1)...(19): siRNA sense strand
uacaaaagaccauugacua

SEQ ID NO: 1011795 - RNA, 19 nt, Homo sapiens
  misc_RNA (1)...(19): siRNA sense strand
ugucaccgcccuaaagauc

SEQ ID NO: 1011796 - RNA, 19 nt, Homo sapiens
  misc_RNA (1)...(19): siRNA sense strand
cagcaggacuucuccauug

SEQ ID NO: 1011797 - RNA, 19 nt, Homo sapiens
  misc_RNA (1)...(19): siRNA sense strand
gcaaagccaucguucuaca

SEQ ID NO: 1011798 - RNA, 19 nt, Homo sapiens
  misc_RNA (1)...(19): siRNA sense strand
cuaaagaucaugaaaguga

SEQ ID NO: 1011799 - RNA, 19 nt, Homo sapiens
  misc_RNA (1)...(19): siRNA sense strand
caucauggauucccuguuc

SEQ ID NO: 1011800 - RNA, 19 nt, Homo sapiens
  misc_RNA (1)...(19): siRNA sense strand
cagcaaagccaucguucua

SEQ ID NO: 1011801 - RNA, 19 nt, Homo sapiens
  misc_RNA (1)...(19): siRNA sense strand
gagaggcuaugaugaccuu

SEQ ID NO: 1011802 - RNA, 19 nt, Homo sapiens
  misc_RNA (1)...(19): siRNA sense strand
ggaggagguguccacguua

SEQ ID NO: 1011803 - RNA, 19 nt, Homo sapiens
  misc_RNA (1)...(19): siRNA sense strand
aaagaccauugacuacauu

SEQ ID NO: 1011804 - RNA, 19 nt, Homo sapiens
  misc_RNA (1)...(19): siRNA sense strand
ggaucgaggagcacuguaa

SEQ ID NO: 1011805 - RNA, 19 nt, Homo sapiens
  misc_RNA (1)...(19): siRNA sense strand
gaugucaccgcccuaaaga

SEQ ID NO: 1011806 - RNA, 19 nt, Homo sapiens
  misc_RNA (1)...(19): siRNA sense strand
caagagaggcuaugaugac

SEQ ID NO: 1011807 - RNA, 19 nt, Homo sapiens
  misc_RNA (1)...(19): siRNA sense strand
gcagcaggacuucuccauu

SEQ ID NO: 1011808 - RNA, 19 nt, Homo sapiens
  misc_RNA (1)...(19): siRNA sense strand
gagggacgccaucaagaga

SEQ ID NO: 1011809 - RNA, 19 nt, Homo sapiens
  misc_RNA (1)...(19): siRNA sense strand
ggucaaguucaacguguuu

SEQ ID NO: 1011810 - RNA, 19 nt, Homo sapiens
  misc_RNA (1)...(19): siRNA sense strand
gaucaugaaagugaacuau

SEQ ID NO: 1011811 - RNA, 19 nt, Homo sapiens
  misc_RNA (1)...(19): siRNA sense strand
cccuaaagaucaugaaagu

SEQ ID NO: 1011812 - RNA, 19 nt, Homo sapiens
  misc_RNA (1)...(19): siRNA sense strand
aggaggagguguccacguu

SEQ ID NO: 1011813 - RNA, 19 nt, Homo sapiens
  misc_RNA (1)...(19): siRNA sense strand
gaggagguguccacguuac

SEQ ID NO: 1011814 - RNA, 19 nt, Homo sapiens
  misc_RNA (1)...(19): siRNA sense strand
ggagggacgccaucaagag

SEQ ID NO: 1011815 - RNA, 19 nt, Homo sapiens
  misc_RNA (1)...(19): siRNA sense strand
ggaugucaccgcccuaaag

SEQ ID NO: 1011816 - RNA, 19 nt, Homo sapiens
  misc_RNA (1)...(19): siRNA sense strand
ucaagagaggcuaugauga

SEQ ID NO: 1011817 - RNA, 19 nt, Homo sapiens
  misc_RNA (1)...(19): siRNA sense strand
gaugaugaggacagugauu

SEQ ID NO: 1011818 - RNA, 19 nt, Homo sapiens
  misc_RNA (1)...(19): siRNA sense strand
gaggagggacgccaucaag

SEQ ID NO: 1011819 - RNA, 19 nt, Homo sapiens
  misc_RNA (1)...(19): siRNA sense strand
gaacuaugagcagauugug

SEQ ID NO: 1011820 - RNA, 19 nt, Homo sapiens
  misc_RNA (1)...(19): siRNA sense strand
gcucagcaaagccaucguu

SEQ ID NO: 1011821 - RNA, 19 nt, Homo sapiens
  misc_RNA (1)...(19): siRNA sense strand
aaagccaucguucuacaaa

SEQ ID NO: 1011822 - RNA, 19 nt, Homo sapiens
  misc_RNA (1)...(19): siRNA sense strand
caaagccaucguucuacaa

SEQ ID NO: 1011823 - RNA, 19 nt, Homo sapiens
  misc_RNA (1)...(19): siRNA sense strand
acuaugagcagauugugaa

SEQ ID NO: 1011824 - RNA, 19 nt, Homo sapiens
  misc_RNA (1)...(19): siRNA sense strand
uuucaaggcaucauggauu

SEQ ID NO: 1011825 - RNA, 19 nt, Homo sapiens
  misc_RNA (1)...(19): siRNA sense strand
agugaacuaugagcagauu

SEQ ID NO: 1011826 - RNA, 19 nt, Homo sapiens
  misc_RNA (1)...(19): siRNA sense strand
gaucgaggagcacuguaag

SEQ ID NO: 1011827 - RNA, 19 nt, Homo sapiens
  misc_RNA (1)...(19): siRNA sense strand
cuucaaugccuccaucuca

SEQ ID NO: 1011828 - RNA, 19 nt, Homo sapiens
  misc_RNA (1)...(19): siRNA sense strand
ugaaggcacaccaggacaa

SEQ ID NO: 1011829 - RNA, 19 nt, Homo sapiens
  misc_RNA (1)...(19): siRNA sense strand
ugaacuaugagcagauugu

SEQ ID NO: 1011830 - RNA, 19 nt, Homo sapiens
  misc_RNA (1)...(19): siRNA sense strand
ccacguuacgcaaggaugu

SEQ ID NO: 1011831 - RNA, 19 nt, Homo sapiens
  misc_RNA (1)...(19): siRNA sense strand
caaguucaacguguuucaa

SEQ ID NO: 1011832 - RNA, 19 nt, Homo sapiens
  misc_RNA (1)...(19): siRNA sense strand
ucaccgcccuaaagaucau

SEQ ID NO: 1011833 - RNA, 19 nt, Homo sapiens
  misc_RNA (1)...(19): siRNA sense strand
augaugaggacagugauua

SEQ ID NO: 1011834 - RNA, 19 nt, Homo sapiens
  misc_RNA (1)...(19): siRNA sense strand
augaugaccuucagaccau

SEQ ID NO: 1011835 - RNA, 19 nt, Homo sapiens
  misc_RNA (1)...(19): siRNA sense strand
uucaaggcaucauggauuc

SEQ ID NO: 1011836 - RNA, 19 nt, Homo sapiens
  misc_RNA (1)...(19): siRNA sense strand
cauugacuacauucaguuu

SEQ ID NO: 1011837 - RNA, 19 nt, Homo sapiens
  misc_RNA (1)...(19): siRNA sense strand
uacaaaagaccauugacua

SEQ ID NO: 1011838 - RNA, 19 nt, Homo sapiens
  misc_RNA (1)...(19): siRNA sense strand
ugucaccgcccuaaagauc

SEQ ID NO: 1011839 - RNA, 19 nt, Homo sapiens
  misc_RNA (1)...(19): siRNA sense strand
cagcaggacuucuccauug

SEQ ID NO: 1011840 - RNA, 19 nt, Homo sapiens
  misc_RNA (1)...(19): siRNA sense strand
gcaaagccaucguucuaca

SEQ ID NO: 1011841 - RNA, 19 nt, Homo sapiens
  misc_RNA (1)...(19): siRNA sense strand
cuaaagaucaugaaaguga

SEQ ID NO: 1011842 - RNA, 19 nt, Homo sapiens
  misc_RNA (1)...(19): siRNA sense strand
caucauggauucccuguuc

SEQ ID NO: 1011843 - RNA, 19 nt, Homo sapiens
  misc_RNA (1)...(19): siRNA sense strand
cagcaaagccaucguucua

SEQ ID NO: 1011844 - RNA, 19 nt, Homo sapiens
  misc_RNA (1)...(19): siRNA sense strand
gagaggcuaugaugaccuu

SEQ ID NO: 1011845 - RNA, 19 nt, Homo sapiens
  misc_RNA (1)...(19): siRNA sense strand
ggaggagguguccacguua

SEQ ID NO: 1011846 - RNA, 19 nt, Homo sapiens
  misc_RNA (1)...(19): siRNA sense strand
aaagaccauugacuacauu

SEQ ID NO: 1011847 - RNA, 19 nt, Homo sapiens
  misc_RNA (1)...(19): siRNA sense strand
ggaucgaggagcacuguaa

SEQ ID NO: 1011848 - RNA, 19 nt, Homo sapiens
  misc_RNA (1)...(19): siRNA sense strand
gaugucaccgcccuaaaga

SEQ ID NO: 1011849 - RNA, 19 nt, Homo sapiens
  misc_RNA (1)...(19): siRNA sense strand
caagagaggcuaugaugac

SEQ ID NO: 1011850 - RNA, 19 nt, Homo sapiens
  misc_RNA (1)...(19): siRNA sense strand
gcagcaggacuucuccauu

SEQ ID NO: 1011851 - RNA, 19 nt, Homo sapiens
  misc_RNA (1)...(19): siRNA sense strand
gagggacgccaucaagaga

SEQ ID NO: 1011852 - RNA, 19 nt, Homo sapiens
  misc_RNA (1)...(19): siRNA sense strand
ggucaaguucaacguguuu

SEQ ID NO: 1011853 - RNA, 19 nt, Homo sapiens
  misc_RNA (1)...(19): siRNA sense strand
gaucaugaaagugaacuau

SEQ ID NO: 1011854 - RNA, 19 nt, Homo sapiens
  misc_RNA (1)...(19): siRNA sense strand
cccuaaagaucaugaaagu

SEQ ID NO: 1011855 - RNA, 19 nt, Homo sapiens
  misc_RNA (1)...(19): siRNA sense strand
aggaggagguguccacguu

SEQ ID NO: 1011856 - RNA, 19 nt, Homo sapiens
  misc_RNA (1)...(19): siRNA sense strand
gaggagguguccacguuac

SEQ ID NO: 1011857 - RNA, 19 nt, Homo sapiens
  misc_RNA (1)...(19): siRNA sense strand
ggagggacgccaucaagag

SEQ ID NO: 1011858 - RNA, 19 nt, Homo sapiens
  misc_RNA (1)...(19): siRNA sense strand
ggaugucaccgcccuaaag

SEQ ID NO: 1011859 - RNA, 19 nt, Homo sapiens
  misc_RNA (1)...(19): siRNA sense strand
ucaagagaggcuaugauga

SEQ ID NO: 1011860 - RNA, 19 nt, Homo sapiens
  misc_RNA (1)...(19): siRNA sense strand
gaugaugaggacagugauu

SEQ ID NO: 1011861 - RNA, 19 nt, Homo sapiens
  misc_RNA (1)...(19): siRNA sense strand
gaggagggacgccaucaag

SEQ ID NO: 1011862 - RNA, 19 nt, Homo sapiens
  misc_RNA (1)...(19): siRNA sense strand
gaacuaugagcagauugug

SEQ ID NO: 1011863 - RNA, 19 nt, Homo sapiens
  misc_RNA (1)...(19): siRNA sense strand
gcucagcaaagccaucguu

SEQ ID NO: 1011864 - RNA, 19 nt, Homo sapiens
  misc_RNA (1)...(19): siRNA sense strand
aaagccaucguucuacaaa

SEQ ID NO: 1011865 - RNA, 19 nt, Homo sapiens
  misc_RNA (1)...(19): siRNA sense strand
caaagccaucguucuacaa

SEQ ID NO: 1011866 - RNA, 19 nt, Homo sapiens
  misc_RNA (1)...(19): siRNA sense strand
acuaugagcagauugugaa

SEQ ID NO: 1011867 - RNA, 19 nt, Homo sapiens
  misc_RNA (1)...(19): siRNA sense strand
uuucaaggcaucauggauu

SEQ ID NO: 1011868 - RNA, 19 nt, Homo sapiens
  misc_RNA (1)...(19): siRNA sense strand
agugaacuaugagcagauu

SEQ ID NO: 1011869 - RNA, 19 nt, Homo sapiens
  misc_RNA (1)...(19): siRNA sense strand
gaucgaggagcacuguaag

SEQ ID NO: 1011870 - RNA, 19 nt, Homo sapiens
  misc_RNA (1)...(19): siRNA sense strand
cuucaaugccuccaucuca

SEQ ID NO: 1011871 - RNA, 19 nt, Homo sapiens
  misc_RNA (1)...(19): siRNA sense strand
ugaaggcacaccaggacaa

SEQ ID NO: 1011872 - RNA, 19 nt, Homo sapiens
  misc_RNA (1)...(19): siRNA sense strand
ugaacuaugagcagauugu

SEQ ID NO: 1011873 - RNA, 19 nt, Homo sapiens
  misc_RNA (1)...(19): siRNA sense strand
ccacguuacgcaaggaugu

SEQ ID NO: 1011874 - RNA, 19 nt, Homo sapiens
  misc_RNA (1)...(19): siRNA sense strand
caaguucaacguguuucaa

SEQ ID NO: 1011875 - RNA, 19 nt, Homo sapiens
  misc_RNA (1)...(19): siRNA sense strand
ucaccgcccuaaagaucau

SEQ ID NO: 1011876 - RNA, 19 nt, Homo sapiens
  misc_RNA (1)...(19): siRNA sense strand
augaugaggacagugauua

SEQ ID NO: 1011877 - RNA, 19 nt, Homo sapiens
  misc_RNA (1)...(19): siRNA sense strand
augaugaccuucagaccau

SEQ ID NO: 1011878 - RNA, 19 nt, Homo sapiens
  misc_RNA (1)...(19): siRNA sense strand
uucaaggcaucauggauuc

SEQ ID NO: 1011879 - RNA, 19 nt, Homo sapiens
  misc_RNA (1)...(19): siRNA sense strand
cauugacuacauucaguuu

SEQ ID NO: 1011880 - RNA, 19 nt, Homo sapiens
  misc_RNA (1)...(19): siRNA sense strand
uacaaaagaccauugacua

SEQ ID NO: 1011881 - RNA, 19 nt, Homo sapiens
  misc_RNA (1)...(19): siRNA sense strand
ugucaccgcccuaaagauc

SEQ ID NO: 1011882 - RNA, 19 nt, Homo sapiens
  misc_RNA (1)...(19): siRNA sense strand
gaagagagccuuagagaua

SEQ ID NO: 1011883 - RNA, 19 nt, Homo sapiens
  misc_RNA (1)...(19): siRNA sense strand
gaacaucacaggacuauga

SEQ ID NO: 1011884 - RNA, 19 nt, Homo sapiens
  misc_RNA (1)...(19): siRNA sense strand
gaccauaccucauaacaag

SEQ ID NO: 1011885 - RNA, 19 nt, Homo sapiens
  misc_RNA (1)...(19): siRNA sense strand
uaucagcauuuacgacuua

SEQ ID NO: 1011886 - RNA, 19 nt, Homo sapiens
  misc_RNA (1)...(19): siRNA sense strand
ugaaagaccuccaccaauc

SEQ ID NO: 1011887 - RNA, 19 nt, Homo sapiens
  misc_RNA (1)...(19): siRNA sense strand
gaugaaggcuccagguguu

SEQ ID NO: 1011888 - RNA, 19 nt, Homo sapiens
  misc_RNA (1)...(19): siRNA sense strand
gcaaggagagaauguauga

SEQ ID NO: 1011889 - RNA, 19 nt, Homo sapiens
  misc_RNA (1)...(19): siRNA sense strand
ggaagaugaugaugaauac

SEQ ID NO: 1011890 - RNA, 19 nt, Homo sapiens
  misc_RNA (1)...(19): siRNA sense strand
gaacugagcccauaaucgu

SEQ ID NO: 1011891 - RNA, 19 nt, Homo sapiens
  misc_RNA (1)...(19): siRNA sense strand
gggagaggguuaugccuuu

SEQ ID NO: 1011892 - RNA, 19 nt, Homo sapiens
  misc_RNA (1)...(19): siRNA sense strand
agaaggagcuaaggucuuu

SEQ ID NO: 1011893 - RNA, 19 nt, Homo sapiens
  misc_RNA (1)...(19): siRNA sense strand
gcacgacuacagaaauaua

SEQ ID NO: 1011894 - RNA, 19 nt, Homo sapiens
  misc_RNA (1)...(19): siRNA sense strand
aaaguguacugguccguua

SEQ ID NO: 1011895 - RNA, 19 nt, Homo sapiens
  misc_RNA (1)...(19): siRNA sense strand
uuacagaccauaccucaua

SEQ ID NO: 1011896 - RNA, 19 nt, Homo sapiens
  misc_RNA (1)...(19): siRNA sense strand
aagcacgacuacagaaaua

SEQ ID NO: 1011897 - RNA, 19 nt, Homo sapiens
  misc_RNA (1)...(19): siRNA sense strand
gaacucaccagucacauca

SEQ ID NO: 1011898 - RNA, 19 nt, Homo sapiens
  misc_RNA (1)...(19): siRNA sense strand
uuucagcucuguaagauuu

SEQ ID NO: 1011899 - RNA, 19 nt, Homo sapiens
  misc_RNA (1)...(19): siRNA sense strand
gauuagcucuggccuggaa

SEQ ID NO: 1011900 - RNA, 19 nt, Homo sapiens
  misc_RNA (1)...(19): siRNA sense strand
gagcauccuccgagaauuu

SEQ ID NO: 1011901 - RNA, 19 nt, Homo sapiens
  misc_RNA (1)...(19): siRNA sense strand
agaggaagaugaugaugaa

SEQ ID NO: 1011902 - RNA, 19 nt, Homo sapiens
  misc_RNA (1)...(19): siRNA sense strand
uaacaagcccuuauuucaa

SEQ ID NO: 1011903 - RNA, 19 nt, Homo sapiens
  misc_RNA (1)...(19): siRNA sense strand
ggagagaauguaugaagaa

SEQ ID NO: 1011904 - RNA, 19 nt, Homo sapiens
  misc_RNA (1)...(19): siRNA sense strand
aaacacagacgccaugauu

SEQ ID NO: 1011905 - RNA, 19 nt, Homo sapiens
  misc_RNA (1)...(19): siRNA sense strand
uggcauuucucacauauga

SEQ ID NO: 1011906 - RNA, 19 nt, Homo sapiens
  misc_RNA (1)...(19): siRNA sense strand
gagaauguaugaagaacag

SEQ ID NO: 1011907 - RNA, 19 nt, Homo sapiens
  misc_RNA (1)...(19): siRNA sense strand
gcauuuacgacuuauauug

SEQ ID NO: 1011908 - RNA, 19 nt, Homo sapiens
  misc_RNA (1)...(19): siRNA sense strand
acaggacgcccucugauua

SEQ ID NO: 1011909 - RNA, 19 nt, Homo sapiens
  misc_RNA (1)...(19): siRNA sense strand
aaacaucccugacuuaagc

SEQ ID NO: 1011910 - RNA, 19 nt, Homo sapiens
  misc_RNA (1)...(19): siRNA sense strand
ccagaauaaugucgaaguu

SEQ ID NO: 1011911 - RNA, 19 nt, Homo sapiens
  misc_RNA (1)...(19): siRNA sense strand
gcucuaaaaucaacaauug

SEQ ID NO: 1011912 - RNA, 19 nt, Homo sapiens
  misc_RNA (1)...(19): siRNA sense strand
ucucacauaugaugaaguu

SEQ ID NO: 1011913 - RNA, 19 nt, Homo sapiens
  misc_RNA (1)...(19): siRNA sense strand
gaguaaauaugaugacaac

SEQ ID NO: 1011914 - RNA, 19 nt, Homo sapiens
  misc_RNA (1)...(19): siRNA sense strand
guacugguccguuagcaaa

SEQ ID NO: 1011915 - RNA, 19 nt, Homo sapiens
  misc_RNA (1)...(19): siRNA sense strand
acagaaauauagcaccaaa

SEQ ID NO: 1011916 - RNA, 19 nt, Homo sapiens
  misc_RNA (1)...(19): siRNA sense strand
gaugacaaccagaaacuug

SEQ ID NO: 1011917 - RNA, 19 nt, Homo sapiens
  misc_RNA (1)...(19): siRNA sense strand
gcucauggacaaaguggua

SEQ ID NO: 1011918 - RNA, 19 nt, Homo sapiens
  misc_RNA (1)...(19): siRNA sense strand
gagauagcccagaauaaug

SEQ ID NO: 1011919 - RNA, 19 nt, Homo sapiens
  misc_RNA (1)...(19): siRNA sense strand
caugagguccaccagauua

SEQ ID NO: 1011920 - RNA, 19 nt, Homo sapiens
  misc_RNA (1)...(19): siRNA sense strand
gugcagagaaugacaaaga

SEQ ID NO: 1011921 - RNA, 19 nt, Homo sapiens
  misc_RNA (1)...(19): siRNA sense strand
ggacugcaccagaaauuca

SEQ ID NO: 1011922 - RNA, 19 nt, Homo sapiens
  misc_RNA (1)...(19): siRNA sense strand
gccaaugccucuugaagca

SEQ ID NO: 1011923 - RNA, 19 nt, Homo sapiens
  misc_RNA (1)...(19): siRNA sense strand
ucacaaaacugucccuuau

SEQ ID NO: 1011924 - RNA, 19 nt, Homo sapiens
  misc_RNA (1)...(19): siRNA sense strand
aaucaaacaucccugacuu

SEQ ID NO: 1011925 - RNA, 19 nt, Homo sapiens
  misc_RNA (1)...(19): siRNA sense strand
aggcagaacucaccaguca

SEQ ID NO: 1011926 - RNA, 19 nt, Homo sapiens
  misc_RNA (1)...(19): siRNA sense strand
uaagauuugugcagagaau

SEQ ID NO: 1011927 - RNA, 19 nt, Homo sapiens
  misc_RNA (1)...(19): siRNA sense strand
aaauagcccaccauauaua

SEQ ID NO: 1011928 - RNA, 19 nt, Homo sapiens
  misc_RNA (1)...(19): siRNA sense strand
ggcauagucucauugaaca

SEQ ID NO: 1011929 - RNA, 19 nt, Homo sapiens
  misc_RNA (1)...(19): siRNA sense strand
guuagcaaauucucuuuca

SEQ ID NO: 1011930 - RNA, 19 nt, Homo sapiens
  misc_RNA (1)...(19): siRNA sense strand
gaagugaagaauaugaugu

SEQ ID NO: 1011931 - RNA, 19 nt, Homo sapiens
  misc_RNA (1)...(19): siRNA sense strand
gaaacuugcccaacucagu

SEQ ID NO: 1011932 - RNA, 19 nt, Homo sapiens
  misc_RNA (1)...(19): siRNA sense strand
ucaaacaucccugacuuaa

SEQ ID NO: 1011933 - RNA, 19 nt, Homo sapiens
  misc_RNA (1)...(19): siRNA sense strand
acacagacgccaugauuug

SEQ ID NO: 1011934 - RNA, 19 nt, Homo sapiens
  misc_RNA (1)...(19): siRNA sense strand
gggaaggauuuuaucuuua

SEQ ID NO: 1011935 - RNA, 19 nt, Homo sapiens
  misc_RNA (1)...(19): siRNA sense strand
gcucuggccuggaagcaau

SEQ ID NO: 1011936 - RNA, 19 nt, Homo sapiens
  misc_RNA (1)...(19): siRNA sense strand
gaaguuaaagcacgacuac

SEQ ID NO: 1011937 - RNA, 19 nt, Homo sapiens
  misc_RNA (1)...(19): siRNA sense strand
gagcuaaggucuuuuccaa

SEQ ID NO: 1011938 - RNA, 19 nt, Homo sapiens
  misc_RNA (1)...(19): siRNA sense strand
gccaugauuugccuuuaga

SEQ ID NO: 1011939 - RNA, 19 nt, Homo sapiens
  misc_RNA (1)...(19): siRNA sense strand
gcaccaaacccggaagcua

SEQ ID NO: 1011940 - RNA, 19 nt, Homo sapiens
  misc_RNA (1)...(19): siRNA sense strand
gugagaaugaguacuuuaa

SEQ ID NO: 1011941 - RNA, 19 nt, Homo sapiens
  misc_RNA (1)...(19): siRNA sense strand
gaugggaggaguuauaauc

SEQ ID NO: 1011942 - RNA, 19 nt, Homo sapiens
  misc_RNA (1)...(19): siRNA sense strand
ggucgaauuuuggguauua

SEQ ID NO: 1011943 - RNA, 19 nt, Homo sapiens
  misc_RNA (1)...(19): siRNA sense strand
cuacauugauagccuuaug

SEQ ID NO: 1011944 - RNA, 19 nt, Homo sapiens
  misc_RNA (1)...(19): siRNA sense strand
ggaagcucauggacaaagu

SEQ ID NO: 1011945 - RNA, 19 nt, Homo sapiens
  misc_RNA (1)...(19): siRNA sense strand
ccuuggaagugaagaauau

SEQ ID NO: 1011946 - RNA, 19 nt, Homo sapiens
  misc_RNA (1)...(19): siRNA sense strand
gcuaaggucuuuuccaaug

SEQ ID NO: 1011947 - RNA, 19 nt, Homo sapiens
  misc_RNA (1)...(19): siRNA sense strand
gacaauagacugaguagac

SEQ ID NO: 1011948 - RNA, 19 nt, Homo sapiens
  misc_RNA (1)...(19): siRNA sense strand
ucaccaaagucuucuccuu

SEQ ID NO: 1011949 - RNA, 19 nt, Homo sapiens
  misc_RNA (1)...(19): siRNA sense strand
ucagaaaggcauaguuaga

SEQ ID NO: 1011950 - RNA, 19 nt, Homo sapiens
  misc_RNA (1)...(19): siRNA sense strand
uggcagaaaucaaagcaau

SEQ ID NO: 1011951 - RNA, 19 nt, Homo sapiens
  misc_RNA (1)...(19): siRNA sense strand
guaaauaugaugacaacca

SEQ ID NO: 1011952 - RNA, 19 nt, Homo sapiens
  misc_RNA (1)...(19): siRNA sense strand
uuagagauagcccagaaua

SEQ ID NO: 1011953 - RNA, 19 nt, Homo sapiens
  misc_RNA (1)...(19): siRNA sense strand
ggagaggguuaugccuuug

SEQ ID NO: 1011954 - RNA, 19 nt, Homo sapiens
  misc_RNA (1)...(19): siRNA sense strand
ggacgcccucugauuauga

SEQ ID NO: 1011955 - RNA, 19 nt, Homo sapiens
  misc_RNA (1)...(19): siRNA sense strand
aauacaagauuccuucauc

SEQ ID NO: 1011956 - RNA, 19 nt, Homo sapiens
  misc_RNA (1)...(19): siRNA sense strand
ggacagacgaaaucucaca

SEQ ID NO: 1011957 - RNA, 19 nt, Homo sapiens
  misc_RNA (1)...(19): siRNA sense strand
gugaagagagccuuagaga

SEQ ID NO: 1011958 - RNA, 19 nt, Homo sapiens
  misc_RNA (1)...(19): siRNA sense strand
gaucagcuuccuucauguu

SEQ ID NO: 1011959 - RNA, 19 nt, Homo sapiens
  misc_RNA (1)...(19): siRNA sense strand
aagcaugguucuucacuca

SEQ ID NO: 1011960 - RNA, 19 nt, Homo sapiens
  misc_RNA (1)...(19): siRNA sense strand
gaaaacaagagacccagua

SEQ ID NO: 1011961 - RNA, 19 nt, Homo sapiens
  misc_RNA (1)...(19): siRNA sense strand
cuuggaagcucauggacaa

SEQ ID NO: 1011962 - RNA, 19 nt, Homo sapiens
  misc_RNA (1)...(19): siRNA sense strand
gcagaacucaccagucaca

SEQ ID NO: 1011963 - RNA, 19 nt, Homo sapiens
  misc_RNA (1)...(19): siRNA sense strand
uggaagcaauggcucuaaa

SEQ ID NO: 1011964 - RNA, 19 nt, Homo sapiens
  misc_RNA (1)...(19): siRNA sense strand
aaaaggaacugagcccaua

SEQ ID NO: 1011965 - RNA, 19 nt, Homo sapiens
  misc_RNA (1)...(19): siRNA sense strand
uaaagcacgacuacagaaa

SEQ ID NO: 1011966 - RNA, 19 nt, Homo sapiens
  misc_RNA (1)...(19): siRNA sense strand
gcauuucucacauaugaug

SEQ ID NO: 1011967 - RNA, 19 nt, Homo sapiens
  misc_RNA (1)...(19): siRNA sense strand
cagcauuuacgacuuauau

SEQ ID NO: 1011968 - RNA, 19 nt, Homo sapiens
  misc_RNA (1)...(19): siRNA sense strand
agagauagcccagaauaau

SEQ ID NO: 1011969 - RNA, 19 nt, Homo sapiens
  misc_RNA (1)...(19): siRNA sense strand
cuucagaucccuuuguuga

SEQ ID NO: 1011970 - RNA, 19 nt, Homo sapiens
  misc_RNA (1)...(19): siRNA sense strand
gcaaggcauagucucauug

SEQ ID NO: 1011971 - RNA, 19 nt, Homo sapiens
  misc_RNA (1)...(19): siRNA sense strand
aggaagaugaugaugaaua

SEQ ID NO: 1011972 - RNA, 19 nt, Homo sapiens
  misc_RNA (1)...(19): siRNA sense strand
gggauguguuugggacuaa

SEQ ID NO: 1011973 - RNA, 19 nt, Homo sapiens
  misc_RNA (1)...(19): siRNA sense strand
uaucguaccauggaaagua

SEQ ID NO: 1011974 - RNA, 19 nt, Homo sapiens
  misc_RNA (1)...(19): siRNA sense strand
ccagaaacuugcccaacuc

SEQ ID NO: 1011975 - RNA, 19 nt, Homo sapiens
  misc_RNA (1)...(19): siRNA sense strand
ucucaucccuccauuaggu

SEQ ID NO: 1011976 - RNA, 19 nt, Homo sapiens
  misc_RNA (1)...(19): siRNA sense strand
ggaagugaagaauaugaug

SEQ ID NO: 1011977 - RNA, 19 nt, Homo sapiens
  misc_RNA (1)...(19): siRNA sense strand
agaaaggcauaguuagauc

SEQ ID NO: 1011978 - RNA, 19 nt, Homo sapiens
  misc_RNA (1)...(19): siRNA sense strand
gccuggaucuaauucagaa

SEQ ID NO: 1011979 - RNA, 19 nt, Homo sapiens
  misc_RNA (1)...(19): siRNA sense strand
uuacacaggaacaauauga

SEQ ID NO: 1011980 - RNA, 19 nt, Homo sapiens
  misc_RNA (1)...(19): siRNA sense strand
caccaaacccggaagcuau

SEQ ID NO: 1011981 - RNA, 19 nt, Homo sapiens
  misc_RNA (1)...(19): siRNA sense strand
gcagaaaucaaagcaaucu

SEQ ID NO: 1011982 - RNA, 19 nt, Homo sapiens
  misc_RNA (1)...(19): siRNA sense strand
ugacagaaguugacaauua

SEQ ID NO: 1011983 - RNA, 19 nt, Homo sapiens
  misc_RNA (1)...(19): siRNA sense strand
gagaaagaauugccuguaa

SEQ ID NO: 1011984 - RNA, 19 nt, Homo sapiens
  misc_RNA (1)...(19): siRNA sense strand
ccaaagagcaguucaauga

SEQ ID NO: 1011985 - RNA, 19 nt, Homo sapiens
  misc_RNA (1)...(19): siRNA sense strand
gaagccagauguuaagaaa

SEQ ID NO: 1011986 - RNA, 19 nt, Homo sapiens
  misc_RNA (1)...(19): siRNA sense strand
uaaaguggcugcucagaau

SEQ ID NO: 1011987 - RNA, 19 nt, Homo sapiens
  misc_RNA (1)...(19): siRNA sense strand
gaguuacagugucuuaaua

SEQ ID NO: 1011988 - RNA, 19 nt, Homo sapiens
  misc_RNA (1)...(19): siRNA sense strand
guaagaagccagauguuaa

SEQ ID NO: 1011989 - RNA, 19 nt, Homo sapiens
  misc_RNA (1)...(19): siRNA sense strand
gacagaaguugacaauuau

SEQ ID NO: 1011990 - RNA, 19 nt, Homo sapiens
  misc_RNA (1)...(19): siRNA sense strand
gagaugaacuuagggcaaa

SEQ ID NO: 1011991 - RNA, 19 nt, Homo sapiens
  misc_RNA (1)...(19): siRNA sense strand
gaaagaguaugagcuggaa

SEQ ID NO: 1011992 - RNA, 19 nt, Homo sapiens
  misc_RNA (1)...(19): siRNA sense strand
gcccucaccugcuacuuua

SEQ ID NO: 1011993 - RNA, 19 nt, Homo sapiens
  misc_RNA (1)...(19): siRNA sense strand
gaacacaccagagaaagaa

SEQ ID NO: 1011994 - RNA, 19 nt, Homo sapiens
  misc_RNA (1)...(19): siRNA sense strand
gcgcagacauucccguuug

SEQ ID NO: 1011995 - RNA, 19 nt, Homo sapiens
  misc_RNA (1)...(19): siRNA sense strand
gaggagcuauuauccauuc

SEQ ID NO: 1011996 - RNA, 19 nt, Homo sapiens
  misc_RNA (1)...(19): siRNA sense strand
caaugaagcucaacuugca

SEQ ID NO: 1011997 - RNA, 19 nt, Homo sapiens
  misc_RNA (1)...(19): siRNA sense strand
uggaguaagucgagaagua

SEQ ID NO: 1011998 - RNA, 19 nt, Homo sapiens
  misc_RNA (1)...(19): siRNA sense strand
gagcaagauuuagaucauu

SEQ ID NO: 1011999 - RNA, 19 nt, Homo sapiens
  misc_RNA (1)...(19): siRNA sense strand
caaacagaaugguccuaaa

SEQ ID NO: 1012000 - RNA, 19 nt, Homo sapiens
  misc_RNA (1)...(19): siRNA sense strand
uugcaaagcuuucaaccaa

SEQ ID NO: 1012001 - RNA, 19 nt, Homo sapiens
  misc_RNA (1)...(19): siRNA sense strand
caccuuauaucucgaaguu

SEQ ID NO: 1012002 - RNA, 19 nt, Homo sapiens
  misc_RNA (1)...(19): siRNA sense strand
gcacagcagaauucaauga

SEQ ID NO: 1012003 - RNA, 19 nt, Homo sapiens
  misc_RNA (1)...(19): siRNA sense strand
ugaagagacaggugaauuu

SEQ ID NO: 1012004 - RNA, 19 nt, Homo sapiens
  misc_RNA (1)...(19): siRNA sense strand
agaacuagagcaagauuua

SEQ ID NO: 1012005 - RNA, 19 nt, Homo sapiens
  misc_RNA (1)...(19): siRNA sense strand
gggaggagcuauuauccau

SEQ ID NO: 1012006 - RNA, 19 nt, Homo sapiens
  misc_RNA (1)...(19): siRNA sense strand
ucucugaacuucuaaaugg

SEQ ID NO: 1012007 - RNA, 19 nt, Homo sapiens
  misc_RNA (1)...(19): siRNA sense strand
gaaagaauugccuguaagu

SEQ ID NO: 1012008 - RNA, 19 nt, Homo sapiens
  misc_RNA (1)...(19): siRNA sense strand
gaaguggaagagcuagaua

SEQ ID NO: 1012009 - RNA, 19 nt, Homo sapiens
  misc_RNA (1)...(19): siRNA sense strand
ggacauggauuugauugac

SEQ ID NO: 1012010 - RNA, 19 nt, Homo sapiens
  misc_RNA (1)...(19): siRNA sense strand
gcaaagcuuucaaccaaaa

SEQ ID NO: 1012011 - RNA, 19 nt, Homo sapiens
  misc_RNA (1)...(19): siRNA sense strand
ggauuugauugacauacuu

SEQ ID NO: 1012012 - RNA, 19 nt, Homo sapiens
  misc_RNA (1)...(19): siRNA sense strand
cuacuuggccucagugauu

SEQ ID NO: 1012013 - RNA, 19 nt, Homo sapiens
  misc_RNA (1)...(19): siRNA sense strand
caacucagcaccuuauauc

SEQ ID NO: 1012014 - RNA, 19 nt, Homo sapiens
  misc_RNA (1)...(19): siRNA sense strand
ggaaagacaagaacaacuc

SEQ ID NO: 1012015 - RNA, 19 nt, Homo sapiens
  misc_RNA (1)...(19): siRNA sense strand
gcauuucacuaaacacaag

SEQ ID NO: 1012016 - RNA, 19 nt, Homo sapiens
  misc_RNA (1)...(19): siRNA sense strand
cagaugcuuuguacuuuga

SEQ ID NO: 1012017 - RNA, 19 nt, Homo sapiens
  misc_RNA (1)...(19): siRNA sense strand
gaagagacaggugaauuuc

SEQ ID NO: 1012018 - RNA, 19 nt, Homo sapiens
  misc_RNA (1)...(19): siRNA sense strand
acaacuagaugaagagaca

SEQ ID NO: 1012019 - RNA, 19 nt, Homo sapiens
  misc_RNA (1)...(19): siRNA sense strand
ucuauacccucaauggaaa

SEQ ID NO: 1012020 - RNA, 19 nt, Homo sapiens
  misc_RNA (1)...(19): siRNA sense strand
ucaacgaaaugauguccaa

SEQ ID NO: 1012021 - RNA, 19 nt, Homo sapiens
  misc_RNA (1)...(19): siRNA sense strand
cacaagagaugaacuuagg

SEQ ID NO: 1012022 - RNA, 19 nt, Homo sapiens
  misc_RNA (1)...(19): siRNA sense strand
ugaaagcacagcagaauuc

SEQ ID NO: 1012023 - RNA, 19 nt, Homo sapiens
  misc_RNA (1)...(19): siRNA sense strand
aagcucaacuugcauuaau

SEQ ID NO: 1012024 - RNA, 19 nt, Homo sapiens
  misc_RNA (1)...(19): siRNA sense strand
gguagccccuguugauuua

SEQ ID NO: 1012025 - RNA, 19 nt, Homo sapiens
  misc_RNA (1)...(19): siRNA sense strand
gaagcucaacuugcauuaa

SEQ ID NO: 1012026 - RNA, 19 nt, Homo sapiens
  misc_RNA (1)...(19): siRNA sense strand
ggaagugucaaacagaaug

SEQ ID NO: 1012027 - RNA, 19 nt, Homo sapiens
  misc_RNA (1)...(19): siRNA sense strand
gcagcauccucuccacaga

SEQ ID NO: 1012028 - RNA, 19 nt, Homo sapiens
  misc_RNA (1)...(19): siRNA sense strand
ggaguaagucgagaaguau

SEQ ID NO: 1012029 - RNA, 19 nt, Homo sapiens
  misc_RNA (1)...(19): siRNA sense strand
ucagaugcuuuguacuuug

SEQ ID NO: 1012030 - RNA, 19 nt, Homo sapiens
  misc_RNA (1)...(19): siRNA sense strand
aaacaccaguacauucuuc

SEQ ID NO: 1012031 - RNA, 19 nt, Homo sapiens
  misc_RNA (1)...(19): siRNA sense strand
ucauuaaccucccuguugu

SEQ ID NO: 1012032 - RNA, 19 nt, Homo sapiens
  misc_RNA (1)...(19): siRNA sense strand
aaacaacucagcaccuuau

SEQ ID NO: 1012033 - RNA, 19 nt, Homo sapiens
  misc_RNA (1)...(19): siRNA sense strand
gcaaacaagagauggcaau

SEQ ID NO: 1012034 - RNA, 19 nt, Homo sapiens
  misc_RNA (1)...(19): siRNA sense strand
cagcacauccagucagaaa

SEQ ID NO: 1012035 - RNA, 19 nt, Homo sapiens
  misc_RNA (1)...(19): siRNA sense strand
acgaaaugauguccaaaga

SEQ ID NO: 1012036 - RNA, 19 nt, Homo sapiens
  misc_RNA (1)...(19): siRNA sense strand
ggcaaaagcucuccauauc

SEQ ID NO: 1012037 - RNA, 19 nt, Homo sapiens
  misc_RNA (1)...(19): siRNA sense strand
gaaaaccccauucacaaaa

SEQ ID NO: 1012038 - RNA, 19 nt, Homo sapiens
  misc_RNA (1)...(19): siRNA sense strand
gauucugacuccggcauuu

SEQ ID NO: 1012039 - RNA, 19 nt, Homo sapiens
  misc_RNA (1)...(19): siRNA sense strand
gacagugaacucauuaaau

SEQ ID NO: 1012040 - RNA, 19 nt, Homo sapiens
  misc_RNA (1)...(19): siRNA sense strand
cgagagcccagucuucauu

SEQ ID NO: 1012041 - RNA, 19 nt, Homo sapiens
  misc_RNA (1)...(19): siRNA sense strand
ugagaacacaccagagaaa

SEQ ID NO: 1012042 - RNA, 19 nt, Homo sapiens
  misc_RNA (1)...(19): siRNA sense strand
gauauagaucuuggaguaa

SEQ ID NO: 1012043 - RNA, 19 nt, Homo sapiens
  misc_RNA (1)...(19): siRNA sense strand
ccauugauguuucugaucu

SEQ ID NO: 1012044 - RNA, 19 nt, Homo sapiens
  misc_RNA (1)...(19): siRNA sense strand
guaacuguaguccacauuu

SEQ ID NO: 1012045 - RNA, 19 nt, Homo sapiens
  misc_RNA (1)...(19): siRNA sense strand
agaaguagguaacuguagu

SEQ ID NO: 1012046 - RNA, 19 nt, Homo sapiens
  misc_RNA (1)...(19): siRNA sense strand
ggaaaaccccauucacaaa

SEQ ID NO: 1012047 - RNA, 19 nt, Homo sapiens
  misc_RNA (1)...(19): siRNA sense strand
agaaagaauugccuguaag

SEQ ID NO: 1012048 - RNA, 19 nt, Homo sapiens
  misc_RNA (1)...(19): siRNA sense strand
ugacagugaacucauuaaa

SEQ ID NO: 1012049 - RNA, 19 nt, Homo sapiens
  misc_RNA (1)...(19): siRNA sense strand
aaucagaugcuuuguacuu

SEQ ID NO: 1012050 - RNA, 19 nt, Homo sapiens
  misc_RNA (1)...(19): siRNA sense strand
aguaagaagccagauguua

SEQ ID NO: 1012051 - RNA, 19 nt, Homo sapiens
  misc_RNA (1)...(19): siRNA sense strand
gacauggauuugauugaca

SEQ ID NO: 1012052 - RNA, 19 nt, Homo sapiens
  misc_RNA (1)...(19): siRNA sense strand
gaauacucccugcagcaaa

SEQ ID NO: 1012053 - RNA, 19 nt, Homo sapiens
  misc_RNA (1)...(19): siRNA sense strand
ggaaaaccuuauucuccua

SEQ ID NO: 1012054 - RNA, 19 nt, Homo sapiens
  misc_RNA (1)...(19): siRNA sense strand
acagcagaauucaaugauu

SEQ ID NO: 1012055 - RNA, 19 nt, Homo sapiens
  misc_RNA (1)...(19): siRNA sense strand
caacacagauuuuggugau

SEQ ID NO: 1012056 - RNA, 19 nt, Homo sapiens
  misc_RNA (1)...(19): siRNA sense strand
ccacagucaacacagauuu

SEQ ID NO: 1012057 - RNA, 19 nt, Homo sapiens
  misc_RNA (1)...(19): siRNA sense strand
gcagacauucccguuugua

SEQ ID NO: 1012058 - RNA, 19 nt, Homo sapiens
  misc_RNA (1)...(19): siRNA sense strand
ggaggcucaucucacaaga

SEQ ID NO: 1012059 - RNA, 19 nt, Homo sapiens
  misc_RNA (1)...(19): siRNA sense strand
gaaagcacagcagaauuca

SEQ ID NO: 1012060 - RNA, 19 nt, Homo sapiens
  misc_RNA (1)...(19): siRNA sense strand
ggacauugagcaaguuugg

SEQ ID NO: 1012061 - RNA, 19 nt, Homo sapiens
  misc_RNA (1)...(19): siRNA sense strand
uauuauccauuccugaguu

SEQ ID NO: 1012062 - RNA, 19 nt, Homo sapiens
  misc_RNA (1)...(19): siRNA sense strand
gaacuagagcaagauuuag

SEQ ID NO: 1012063 - RNA, 19 nt, Homo sapiens
  misc_RNA (1)...(19): siRNA sense strand
ucaaacagaaugguccuaa

SEQ ID NO: 1012064 - RNA, 19 nt, Homo sapiens
  misc_RNA (1)...(19): siRNA sense strand
aagccaaacugacagaagu

SEQ ID NO: 1012065 - RNA, 19 nt, Homo sapiens
  misc_RNA (1)...(19): siRNA sense strand
aaaguaagaagccagaugu

SEQ ID NO: 1012066 - RNA, 19 nt, Homo sapiens
  misc_RNA (1)...(19): siRNA sense strand
caugcuacgugaugaagau

SEQ ID NO: 1012067 - RNA, 19 nt, Homo sapiens
  misc_RNA (1)...(19): siRNA sense strand
gcaagauuuagaucauuug

SEQ ID NO: 1012068 - RNA, 19 nt, Homo sapiens
  misc_RNA (1)...(19): siRNA sense strand
gcucaacuugcauuaauuc

SEQ ID NO: 1012069 - RNA, 19 nt, Homo sapiens
  misc_RNA (1)...(19): siRNA sense strand
aaagaaguagguaacugua

SEQ ID NO: 1012070 - RNA, 19 nt, Homo sapiens
  misc_RNA (1)...(19): siRNA sense strand
caguggaucugccaacuac

SEQ ID NO: 1012071 - RNA, 19 nt, Homo sapiens
  misc_RNA (1)...(19): siRNA sense strand
ugacuucaacgaaaugaug

SEQ ID NO: 1012072 - RNA, 19 nt, Homo sapiens
  misc_RNA (1)...(19): siRNA sense strand
uaacuguaguccacauuuu

SEQ ID NO: 1012073 - RNA, 19 nt, Homo sapiens
  misc_RNA (1)...(19): siRNA sense strand
gguugagacuaccaugguu

SEQ ID NO: 1012074 - RNA, 19 nt, Homo sapiens
  misc_RNA (1)...(19): siRNA sense strand
gcaggacauggauuugauu

SEQ ID NO: 1012075 - RNA, 19 nt, Homo sapiens
  misc_RNA (1)...(19): siRNA sense strand
guaugcaacaggacauuga

SEQ ID NO: 1012076 - RNA, 19 nt, Homo sapiens
  misc_RNA (1)...(19): siRNA sense strand
uaagaagccagauguuaag

SEQ ID NO: 1012077 - RNA, 19 nt, Homo sapiens
  misc_RNA (1)...(19): siRNA sense strand
agagcaagauuuagaucau

SEQ ID NO: 1012078 - RNA, 19 nt, Homo sapiens
  misc_RNA (1)...(19): siRNA sense strand
guagaacuagagcaagauu

SEQ ID NO: 1012079 - RNA, 19 nt, Homo sapiens
  misc_RNA (1)...(19): siRNA sense strand
aagcacagcagaauucaau

SEQ ID NO: 1012080 - RNA, 19 nt, Homo sapiens
  misc_RNA (1)...(19): siRNA sense strand
guugacagugaacucauua

SEQ ID NO: 1012081 - RNA, 19 nt, Homo sapiens
  misc_RNA (1)...(19): siRNA sense strand
gcaacaggacauugagcaa

SEQ ID NO: 1012082 - RNA, 19 nt, Homo sapiens
  misc_RNA (1)...(19): siRNA sense strand
gcacauggauuuaacuuua

SEQ ID NO: 1012083 - RNA, 19 nt, Homo sapiens
  misc_RNA (1)...(19): siRNA sense strand
gaaacaggauuuaaagaug

SEQ ID NO: 1012084 - RNA, 19 nt, Homo sapiens
  misc_RNA (1)...(19): siRNA sense strand
gaaagucgaugccuaugga

SEQ ID NO: 1012085 - RNA, 19 nt, Homo sapiens
  misc_RNA (1)...(19): siRNA sense strand
ggaaguagggaaaguauuu

SEQ ID NO: 1012086 - RNA, 19 nt, Homo sapiens
  misc_RNA (1)...(19): siRNA sense strand
ucaucaaccugcuguauua

SEQ ID NO: 1012087 - RNA, 19 nt, Homo sapiens
  misc_RNA (1)...(19): siRNA sense strand
cuucagagcuuggauauuu

SEQ ID NO: 1012088 - RNA, 19 nt, Homo sapiens
  misc_RNA (1)...(19): siRNA sense strand
gcacaucaguggauuucaa

SEQ ID NO: 1012089 - RNA, 19 nt, Homo sapiens
  misc_RNA (1)...(19): siRNA sense strand
gagaacaguauccaaauaa

SEQ ID NO: 1012090 - RNA, 19 nt, Homo sapiens
  misc_RNA (1)...(19): siRNA sense strand
ugacuuaccuguuugacuu

SEQ ID NO: 1012091 - RNA, 19 nt, Homo sapiens
  misc_RNA (1)...(19): siRNA sense strand
ccagagacguauuaagaaa

SEQ ID NO: 1012092 - RNA, 19 nt, Homo sapiens
  misc_RNA (1)...(19): siRNA sense strand
ggauaagcaugcccugaaa

SEQ ID NO: 1012093 - RNA, 19 nt, Homo sapiens
  misc_RNA (1)...(19): siRNA sense strand
caaagacacugacuacaag

SEQ ID NO: 1012094 - RNA, 19 nt, Homo sapiens
  misc_RNA (1)...(19): siRNA sense strand
gagaugauacugaaagauu

SEQ ID NO: 1012095 - RNA, 19 nt, Homo sapiens
  misc_RNA (1)...(19): siRNA sense strand
ccagucaagugaugcguua

SEQ ID NO: 1012096 - RNA, 19 nt, Homo sapiens
  misc_RNA (1)...(19): siRNA sense strand
agagaacaguauccaaaua

SEQ ID NO: 1012097 - RNA, 19 nt, Homo sapiens
  misc_RNA (1)...(19): siRNA sense strand
ggaggaggaggaagaauaa

SEQ ID NO: 1012098 - RNA, 19 nt, Homo sapiens
  misc_RNA (1)...(19): siRNA sense strand
gaacuucagagcuuggaua

SEQ ID NO: 1012099 - RNA, 19 nt, Homo sapiens
  misc_RNA (1)...(19): siRNA sense strand
ugagaaguauguagucaaa

SEQ ID NO: 1012100 - RNA, 19 nt, Homo sapiens
  misc_RNA (1)...(19): siRNA sense strand
gaacacacuauucaaccua

SEQ ID NO: 1012101 - RNA, 19 nt, Homo sapiens
  misc_RNA (1)...(19): siRNA sense strand
agaaguauguagucaaaga

SEQ ID NO: 1012102 - RNA, 19 nt, Homo sapiens
  misc_RNA (1)...(19): siRNA sense strand
gaaggaaguagggaaagua

SEQ ID NO: 1012103 - RNA, 19 nt, Homo sapiens
  misc_RNA (1)...(19): siRNA sense strand
ggagugaucgguuacagaa

SEQ ID NO: 1012104 - RNA, 19 nt, Homo sapiens
  misc_RNA (1)...(19): siRNA sense strand
guggagagauuaguuucua

SEQ ID NO: 1012105 - RNA, 19 nt, Homo sapiens
  misc_RNA (1)...(19): siRNA sense strand
gcaaugagcguccagacau

SEQ ID NO: 1012106 - RNA, 19 nt, Homo sapiens
  misc_RNA (1)...(19): siRNA sense strand
ucaaagacacugacuacaa

SEQ ID NO: 1012107 - RNA, 19 nt, Homo sapiens
  misc_RNA (1)...(19): siRNA sense strand
aaacugccuuugcuucuga

SEQ ID NO: 1012108 - RNA, 19 nt, Homo sapiens
  misc_RNA (1)...(19): siRNA sense strand
ggagagauuaguuucuauu

SEQ ID NO: 1012109 - RNA, 19 nt, Homo sapiens
  misc_RNA (1)...(19): siRNA sense strand
uaccaacagugacuauaaa

SEQ ID NO: 1012110 - RNA, 19 nt, Homo sapiens
  misc_RNA (1)...(19): siRNA sense strand
gaguaugagucccuugguu

SEQ ID NO: 1012111 - RNA, 19 nt, Homo sapiens
  misc_RNA (1)...(19): siRNA sense strand
ccagcgagaugauacugaa

SEQ ID NO: 1012112 - RNA, 19 nt, Homo sapiens
  misc_RNA (1)...(19): siRNA sense strand
gcgagaugauacugaaaga

SEQ ID NO: 1012113 - RNA, 19 nt, Homo sapiens
  misc_RNA (1)...(19): siRNA sense strand
ccaacagugacuauaaaua

SEQ ID NO: 1012114 - RNA, 19 nt, Homo sapiens
  misc_RNA (1)...(19): siRNA sense strand
ggaguauguuccaggaugu

SEQ ID NO: 1012115 - RNA, 19 nt, Homo sapiens
  misc_RNA (1)...(19): siRNA sense strand
gcuguugacuggguucauu

SEQ ID NO: 1012116 - RNA, 19 nt, Homo sapiens
  misc_RNA (1)...(19): siRNA sense strand
cagcuuugcuuaugauucu

SEQ ID NO: 1012117 - RNA, 19 nt, Homo sapiens
  misc_RNA (1)...(19): siRNA sense strand
agauaugccugcuaacaug

SEQ ID NO: 1012118 - RNA, 19 nt, Homo sapiens
  misc_RNA (1)...(19): siRNA sense strand
gaccauggcaguccuacuu

SEQ ID NO: 1012119 - RNA, 19 nt, Homo sapiens
  misc_RNA (1)...(19): siRNA sense strand
ggucugugcacauggauuu

SEQ ID NO: 1012120 - RNA, 19 nt, Homo sapiens
  misc_RNA (1)...(19): siRNA sense strand
gcguuaugcugaccucuau

SEQ ID NO: 1012121 - RNA, 19 nt, Homo sapiens
  misc_RNA (1)...(19): siRNA sense strand
gaugaaggaaguagggaaa

SEQ ID NO: 1012122 - RNA, 19 nt, Homo sapiens
  misc_RNA (1)...(19): siRNA sense strand
cuagagaacaguauccaaa

SEQ ID NO: 1012123 - RNA, 19 nt, Homo sapiens
  misc_RNA (1)...(19): siRNA sense strand
gaugaugggaagccuguuu

SEQ ID NO: 1012124 - RNA, 19 nt, Homo sapiens
  misc_RNA (1)...(19): siRNA sense strand
gcacaggagcuacaugucu

SEQ ID NO: 1012125 - RNA, 19 nt, Homo sapiens
  misc_RNA (1)...(19): siRNA sense strand
cggcaaggguggcgaacuu

SEQ ID NO: 1012126 - RNA, 19 nt, Homo sapiens
  misc_RNA (1)...(19): siRNA sense strand
gagagauuaguuucuauug

SEQ ID NO: 1012127 - RNA, 19 nt, Homo sapiens
  misc_RNA (1)...(19): siRNA sense strand
ggucaauuagugagauuaa

SEQ ID NO: 1012128 - RNA, 19 nt, Homo sapiens
  misc_RNA (1)...(19): siRNA sense strand
uggcugaacucuacaagca

SEQ ID NO: 1012129 - RNA, 19 nt, Homo sapiens
  misc_RNA (1)...(19): siRNA sense strand
cuaccaacagugacuauaa

SEQ ID NO: 1012130 - RNA, 19 nt, Homo sapiens
  misc_RNA (1)...(19): siRNA sense strand
ccagauauaccaguuguga

SEQ ID NO: 1012131 - RNA, 19 nt, Homo sapiens
  misc_RNA (1)...(19): siRNA sense strand
gcucagcuuugcuuaugau

SEQ ID NO: 1012132 - RNA, 19 nt, Homo sapiens
  misc_RNA (1)...(19): siRNA sense strand
gaaacuagagaacaguauc

SEQ ID NO: 1012133 - RNA, 19 nt, Homo sapiens
  misc_RNA (1)...(19): siRNA sense strand
uguauuacccuuucagcua

SEQ ID NO: 1012134 - RNA, 19 nt, Homo sapiens
  misc_RNA (1)...(19): siRNA sense strand
gacaugugcuaugggauga

SEQ ID NO: 1012135 - RNA, 19 nt, Homo sapiens
  misc_RNA (1)...(19): siRNA sense strand
gagcuuggauauuuucuug

SEQ ID NO: 1012136 - RNA, 19 nt, Homo sapiens
  misc_RNA (1)...(19): siRNA sense strand
ggaaaagacaguugaaaau

SEQ ID NO: 1012137 - RNA, 19 nt, Homo sapiens
  misc_RNA (1)...(19): siRNA sense strand
ccuguuggccugccuagua

SEQ ID NO: 1012138 - RNA, 19 nt, Homo sapiens
  misc_RNA (1)...(19): siRNA sense strand
gaaaauugguaccuacaca

SEQ ID NO: 1012139 - RNA, 19 nt, Homo sapiens
  misc_RNA (1)...(19): siRNA sense strand
ugacuggguucauuacaag

SEQ ID NO: 1012140 - RNA, 19 nt, Homo sapiens
  misc_RNA (1)...(19): siRNA sense strand
agauauaccaguugugaaa

SEQ ID NO: 1012141 - RNA, 19 nt, Homo sapiens
  misc_RNA (1)...(19): siRNA sense strand
gauuauacccuugcugugu

SEQ ID NO: 1012142 - RNA, 19 nt, Homo sapiens
  misc_RNA (1)...(19): siRNA sense strand
gaaccgcacaucaguggau

SEQ ID NO: 1012143 - RNA, 19 nt, Homo sapiens
  misc_RNA (1)...(19): siRNA sense strand
uuacuaauugucccagaua

SEQ ID NO: 1012144 - RNA, 19 nt, Homo sapiens
  misc_RNA (1)...(19): siRNA sense strand
agagacguauuaagaaagu

SEQ ID NO: 1012145 - RNA, 19 nt, Homo sapiens
  misc_RNA (1)...(19): siRNA sense strand
gcacggaaaccacucuuuu

SEQ ID NO: 1012146 - RNA, 19 nt, Homo sapiens
  misc_RNA (1)...(19): siRNA sense strand
uguaagagaugcuguugac

SEQ ID NO: 1012147 - RNA, 19 nt, Homo sapiens
  misc_RNA (1)...(19): siRNA sense strand
agugaucgguuacagaaug

SEQ ID NO: 1012148 - RNA, 19 nt, Homo sapiens
  misc_RNA (1)...(19): siRNA sense strand
gaaguauguagucaaagau

SEQ ID NO: 1012149 - RNA, 19 nt, Homo sapiens
  misc_RNA (1)...(19): siRNA sense strand
caucaguggauuucaaaga

SEQ ID NO: 1012150 - RNA, 19 nt, Homo sapiens
  misc_RNA (1)...(19): siRNA sense strand
caaugagcguccagacauc

SEQ ID NO: 1012151 - RNA, 19 nt, Homo sapiens
  misc_RNA (1)...(19): siRNA sense strand
uacgaucugugaccuguug

SEQ ID NO: 1012152 - RNA, 19 nt, Homo sapiens
  misc_RNA (1)...(19): siRNA sense strand
ugcgucagguggauacuaa

SEQ ID NO: 1012153 - RNA, 19 nt, Homo sapiens
  misc_RNA (1)...(19): siRNA sense strand
auuauacccuugcugugua

SEQ ID NO: 1012154 - RNA, 19 nt, Homo sapiens
  misc_RNA (1)...(19): siRNA sense strand
ccauggcaguccuacuuug

SEQ ID NO: 1012155 - RNA, 19 nt, Homo sapiens
  misc_RNA (1)...(19): siRNA sense strand
uggccugccuaguagauuu

SEQ ID NO: 1012156 - RNA, 19 nt, Homo sapiens
  misc_RNA (1)...(19): siRNA sense strand
cagaaacuagagaacagua

SEQ ID NO: 1012157 - RNA, 19 nt, Homo sapiens
  misc_RNA (1)...(19): siRNA sense strand
guauauuggagaucacauu

SEQ ID NO: 1012158 - RNA, 19 nt, Homo sapiens
  misc_RNA (1)...(19): siRNA sense strand
ugaaggaaguagggaaagu

SEQ ID NO: 1012159 - RNA, 19 nt, Homo sapiens
  misc_RNA (1)...(19): siRNA sense strand
gaaaagacaguugaaaauc

SEQ ID NO: 1012160 - RNA, 19 nt, Homo sapiens
  misc_RNA (1)...(19): siRNA sense strand
guuccaggauguaagagau

SEQ ID NO: 1012161 - RNA, 19 nt, Homo sapiens
  misc_RNA (1)...(19): siRNA sense strand
ccaggggacuugucuuuga

SEQ ID NO: 1012162 - RNA, 19 nt, Homo sapiens
  misc_RNA (1)...(19): siRNA sense strand
aggaggaggaggaagaaua

SEQ ID NO: 1012163 - RNA, 19 nt, Homo sapiens
  misc_RNA (1)...(19): siRNA sense strand
uuucuuggcugaacucuac

SEQ ID NO: 1012164 - RNA, 19 nt, Homo sapiens
  misc_RNA (1)...(19): siRNA sense strand
guacaaguccccagaguau

SEQ ID NO: 1012165 - RNA, 19 nt, Homo sapiens
  misc_RNA (1)...(19): siRNA sense strand
ugacaagaguucacuuuuc

SEQ ID NO: 1012166 - RNA, 19 nt, Homo sapiens
  misc_RNA (1)...(19): siRNA sense strand
ggaggaggaggaggaagaa

SEQ ID NO: 1012167 - RNA, 19 nt, Homo sapiens
  misc_RNA (1)...(19): siRNA sense strand
gagacguauuaagaaagua

SEQ ID NO: 1012168 - RNA, 19 nt, Homo sapiens
  misc_RNA (1)...(19): siRNA sense strand
gauucuacauucccuacca

SEQ ID NO: 1012169 - RNA, 19 nt, Homo sapiens
  misc_RNA (1)...(19): siRNA sense strand
gauguaagagaugcuguug

SEQ ID NO: 1012170 - RNA, 19 nt, Homo sapiens
  misc_RNA (1)...(19): siRNA sense strand
ggauguaagagaugcuguu

SEQ ID NO: 1012171 - RNA, 19 nt, Homo sapiens
  misc_RNA (1)...(19): siRNA sense strand
aaauuuauccagcgagaug

SEQ ID NO: 1012172 - RNA, 19 nt, Homo sapiens
  misc_RNA (1)...(19): siRNA sense strand
gaccagaaacuagagaaca

SEQ ID NO: 1012173 - RNA, 19 nt, Homo sapiens
  misc_RNA (1)...(19): siRNA sense strand
uaccagagaccuaccuguu

SEQ ID NO: 1012174 - RNA, 19 nt, Homo sapiens
  misc_RNA (1)...(19): siRNA sense strand
ucaguggauuucaaagaca

SEQ ID NO: 1012175 - RNA, 19 nt, Homo sapiens
  misc_RNA (1)...(19): siRNA sense strand
ugacagcaguagcaaugag

SEQ ID NO: 1012176 - RNA, 19 nt, Homo sapiens
  misc_RNA (1)...(19): siRNA sense strand
agagauuaguuucuauugg

SEQ ID NO: 1012177 - RNA, 19 nt, Homo sapiens
  misc_RNA (1)...(19): siRNA sense strand
gugaaacaggauuuaaaga

SEQ ID NO: 1012178 - RNA, 19 nt, Homo sapiens
  misc_RNA (1)...(19): siRNA sense strand
uuacagaaugcagcagaua

SEQ ID NO: 1012179 - RNA, 19 nt, Homo sapiens
  misc_RNA (1)...(19): siRNA sense strand
ggagcacacacacguagau

SEQ ID NO: 1012180 - RNA, 19 nt, Homo sapiens
  misc_RNA (1)...(19): siRNA sense strand
cuucugauacgaucuguga

SEQ ID NO: 1012181 - RNA, 19 nt, Homo sapiens
  misc_RNA (1)...(19): siRNA sense strand
uugcucagcuuugcuuaug

SEQ ID NO: 1012182 - RNA, 19 nt, Homo sapiens
  misc_RNA (1)...(19): siRNA sense strand
ggacauggcugcucagauc

SEQ ID NO: 1012183 - RNA, 19 nt, Homo sapiens
  misc_RNA (1)...(19): siRNA sense strand
ugacugagcucaccacaaa

SEQ ID NO: 1012184 - RNA, 19 nt, Homo sapiens
  misc_RNA (1)...(19): siRNA sense strand
ugaagaagcugaggcauga

SEQ ID NO: 1012185 - RNA, 19 nt, Homo sapiens
  misc_RNA (1)...(19): siRNA sense strand
gagagaaccuggugugcaa

SEQ ID NO: 1012186 - RNA, 19 nt, Homo sapiens
  misc_RNA (1)...(19): siRNA sense strand
gcaguuguaugcugugguu

SEQ ID NO: 1012187 - RNA, 19 nt, Homo sapiens
  misc_RNA (1)...(19): siRNA sense strand
ggaguuugcuggacuuucu

SEQ ID NO: 1012188 - RNA, 19 nt, Homo sapiens
  misc_RNA (1)...(19): siRNA sense strand
ccaagggccucaacgugaa

SEQ ID NO: 1012189 - RNA, 19 nt, Homo sapiens
  misc_RNA (1)...(19): siRNA sense strand
uccagaagcugcccucuau

SEQ ID NO: 1012190 - RNA, 19 nt, Homo sapiens
  misc_RNA (1)...(19): siRNA sense strand
cagaggagcccauuuacau

SEQ ID NO: 1012191 - RNA, 19 nt, Homo sapiens
  misc_RNA (1)...(19): siRNA sense strand
uuucagaggagcccauuua

SEQ ID NO: 1012192 - RNA, 19 nt, Homo sapiens
  misc_RNA (1)...(19): siRNA sense strand
augagaagcuggugcaguu

SEQ ID NO: 1012193 - RNA, 19 nt, Homo sapiens
  misc_RNA (1)...(19): siRNA sense strand
gagaaagugagaccacgaa

SEQ ID NO: 1012194 - RNA, 19 nt, Homo sapiens
  misc_RNA (1)...(19): siRNA sense strand
gaaagugagaccacgaaag

SEQ ID NO: 1012195 - RNA, 19 nt, Homo sapiens
  misc_RNA (1)...(19): siRNA sense strand
gaccuguccuucaagaaag

SEQ ID NO: 1012196 - RNA, 19 nt, Homo sapiens
  misc_RNA (1)...(19): siRNA sense strand
agaagcuggugcaguugua

SEQ ID NO: 1012197 - RNA, 19 nt, Homo sapiens
  misc_RNA (1)...(19): siRNA sense strand
gaaccuggugugcaaagug

SEQ ID NO: 1012198 - RNA, 19 nt, Homo sapiens
  misc_RNA (1)...(19): siRNA sense strand
uggcucggcucauugaaga

SEQ ID NO: 1012199 - RNA, 19 nt, Homo sapiens
  misc_RNA (1)...(19): siRNA sense strand
agaccuguccuucaagaaa

SEQ ID NO: 1012200 - RNA, 19 nt, Homo sapiens
  misc_RNA (1)...(19): siRNA sense strand
uguaugcugugguuucaga

SEQ ID NO: 1012201 - RNA, 19 nt, Homo sapiens
  misc_RNA (1)...(19): siRNA sense strand
aaagugagaccacgaaagg

SEQ ID NO: 1012202 - RNA, 19 nt, Homo sapiens
  misc_RNA (1)...(19): siRNA sense strand
gcucagcacaggacagaca

SEQ ID NO: 1012203 - RNA, 19 nt, Homo sapiens
  misc_RNA (1)...(19): siRNA sense strand
gcugaggagugguauuuug

SEQ ID NO: 1012204 - RNA, 19 nt, Homo sapiens
  misc_RNA (1)...(19): siRNA sense strand
guuguaugcugugguuuca

SEQ ID NO: 1012205 - RNA, 19 nt, Homo sapiens
  misc_RNA (1)...(19): siRNA sense strand
gagaagcuggugcaguugu

SEQ ID NO: 1012206 - RNA, 19 nt, Homo sapiens
  misc_RNA (1)...(19): siRNA sense strand
cguccaagccgcagacuca

SEQ ID NO: 1012207 - RNA, 19 nt, Homo sapiens
  misc_RNA (1)...(19): siRNA sense strand
aggcccaggucaugaagaa

SEQ ID NO: 1012208 - RNA, 19 nt, Homo sapiens
  misc_RNA (1)...(19): siRNA sense strand
caacgugaagcacuacaag

SEQ ID NO: 1012209 - RNA, 19 nt, Homo sapiens
  misc_RNA (1)...(19): siRNA sense strand
ccacgaaaggugccuacug

SEQ ID NO: 1012210 - RNA, 19 nt, Homo sapiens
  misc_RNA (1)...(19): siRNA sense strand
cagaagcugcccucuaugg

SEQ ID NO: 1012211 - RNA, 19 nt, Homo sapiens
  misc_RNA (1)...(19): siRNA sense strand
gccucaacgugaagcacua

SEQ ID NO: 1012212 - RNA, 19 nt, Homo sapiens
  misc_RNA (1)...(19): siRNA sense strand
ucacggaguacaugagcaa

SEQ ID NO: 1012213 - RNA, 19 nt, Homo sapiens
  misc_RNA (1)...(19): siRNA sense strand
caagagcaagcccaaggau

SEQ ID NO: 1012214 - RNA, 19 nt, Homo sapiens
  misc_RNA (1)...(19): siRNA sense strand
ucgggauccugcugacuga

SEQ ID NO: 1012215 - RNA, 19 nt, Homo sapiens
  misc_RNA (1)...(19): siRNA sense strand
gaagcuggugcaguuguau

SEQ ID NO: 1012216 - RNA, 19 nt, Homo sapiens
  misc_RNA (1)...(19): siRNA sense strand
aggcugaggagugguauuu

SEQ ID NO: 1012217 - RNA, 19 nt, Homo sapiens
  misc_RNA (1)...(19): siRNA sense strand
ucagaggagcccauuuaca

SEQ ID NO: 1012218 - RNA, 19 nt, Homo sapiens
  misc_RNA (1)...(19): siRNA sense strand
gaagcugaggcaugagaag

SEQ ID NO: 1012219 - RNA, 19 nt, Homo sapiens
  misc_RNA (1)...(19): siRNA sense strand
ccucaggcauggcguacgu

SEQ ID NO: 1012220 - RNA, 19 nt, Homo sapiens
  misc_RNA (1)...(19): siRNA sense strand
ggacauggcugcucagauc

SEQ ID NO: 1012221 - RNA, 19 nt, Homo sapiens
  misc_RNA (1)...(19): siRNA sense strand
ugacugagcucaccacaaa

SEQ ID NO: 1012222 - RNA, 19 nt, Homo sapiens
  misc_RNA (1)...(19): siRNA sense strand
ugaagaagcugaggcauga

SEQ ID NO: 1012223 - RNA, 19 nt, Homo sapiens
  misc_RNA (1)...(19): siRNA sense strand
gagagaaccuggugugcaa

SEQ ID NO: 1012224 - RNA, 19 nt, Homo sapiens
  misc_RNA (1)...(19): siRNA sense strand
gcaguuguaugcugugguu

SEQ ID NO: 1012225 - RNA, 19 nt, Homo sapiens
  misc_RNA (1)...(19): siRNA sense strand
ggaguuugcuggacuuucu

SEQ ID NO: 1012226 - RNA, 19 nt, Homo sapiens
  misc_RNA (1)...(19): siRNA sense strand
ccaagggccucaacgugaa

SEQ ID NO: 1012227 - RNA, 19 nt, Homo sapiens
  misc_RNA (1)...(19): siRNA sense strand
uccagaagcugcccucuau

SEQ ID NO: 1012228 - RNA, 19 nt, Homo sapiens
  misc_RNA (1)...(19): siRNA sense strand
cagaggagcccauuuacau

SEQ ID NO: 1012229 - RNA, 19 nt, Homo sapiens
  misc_RNA (1)...(19): siRNA sense strand
uuucagaggagcccauuua

SEQ ID NO: 1012230 - RNA, 19 nt, Homo sapiens
  misc_RNA (1)...(19): siRNA sense strand
augagaagcuggugcaguu

SEQ ID NO: 1012231 - RNA, 19 nt, Homo sapiens
  misc_RNA (1)...(19): siRNA sense strand
gagaaagugagaccacgaa

SEQ ID NO: 1012232 - RNA, 19 nt, Homo sapiens
  misc_RNA (1)...(19): siRNA sense strand
gaaagugagaccacgaaag

SEQ ID NO: 1012233 - RNA, 19 nt, Homo sapiens
  misc_RNA (1)...(19): siRNA sense strand
gaccuguccuucaagaaag

SEQ ID NO: 1012234 - RNA, 19 nt, Homo sapiens
  misc_RNA (1)...(19): siRNA sense strand
agaagcuggugcaguugua

SEQ ID NO: 1012235 - RNA, 19 nt, Homo sapiens
  misc_RNA (1)...(19): siRNA sense strand
gaaccuggugugcaaagug

SEQ ID NO: 1012236 - RNA, 19 nt, Homo sapiens
  misc_RNA (1)...(19): siRNA sense strand
uggcucggcucauugaaga

SEQ ID NO: 1012237 - RNA, 19 nt, Homo sapiens
  misc_RNA (1)...(19): siRNA sense strand
agaccuguccuucaagaaa

SEQ ID NO: 1012238 - RNA, 19 nt, Homo sapiens
  misc_RNA (1)...(19): siRNA sense strand
uguaugcugugguuucaga

SEQ ID NO: 1012239 - RNA, 19 nt, Homo sapiens
  misc_RNA (1)...(19): siRNA sense strand
aaagugagaccacgaaagg

SEQ ID NO: 1012240 - RNA, 19 nt, Homo sapiens
  misc_RNA (1)...(19): siRNA sense strand
gcucagcacaggacagaca

SEQ ID NO: 1012241 - RNA, 19 nt, Homo sapiens
  misc_RNA (1)...(19): siRNA sense strand
gcugaggagugguauuuug

SEQ ID NO: 1012242 - RNA, 19 nt, Homo sapiens
  misc_RNA (1)...(19): siRNA sense strand
guuguaugcugugguuuca

SEQ ID NO: 1012243 - RNA, 19 nt, Homo sapiens
  misc_RNA (1)...(19): siRNA sense strand
gagaagcuggugcaguugu

SEQ ID NO: 1012244 - RNA, 19 nt, Homo sapiens
  misc_RNA (1)...(19): siRNA sense strand
cguccaagccgcagacuca

SEQ ID NO: 1012245 - RNA, 19 nt, Homo sapiens
  misc_RNA (1)...(19): siRNA sense strand
aggcccaggucaugaagaa

SEQ ID NO: 1012246 - RNA, 19 nt, Homo sapiens
  misc_RNA (1)...(19): siRNA sense strand
caacgugaagcacuacaag

SEQ ID NO: 1012247 - RNA, 19 nt, Homo sapiens
  misc_RNA (1)...(19): siRNA sense strand
ccacgaaaggugccuacug

SEQ ID NO: 1012248 - RNA, 19 nt, Homo sapiens
  misc_RNA (1)...(19): siRNA sense strand
cagaagcugcccucuaugg

SEQ ID NO: 1012249 - RNA, 19 nt, Homo sapiens
  misc_RNA (1)...(19): siRNA sense strand
gccucaacgugaagcacua

SEQ ID NO: 1012250 - RNA, 19 nt, Homo sapiens
  misc_RNA (1)...(19): siRNA sense strand
ucacggaguacaugagcaa

SEQ ID NO: 1012251 - RNA, 19 nt, Homo sapiens
  misc_RNA (1)...(19): siRNA sense strand
caagagcaagcccaaggau

SEQ ID NO: 1012252 - RNA, 19 nt, Homo sapiens
  misc_RNA (1)...(19): siRNA sense strand
ucgggauccugcugacuga

SEQ ID NO: 1012253 - RNA, 19 nt, Homo sapiens
  misc_RNA (1)...(19): siRNA sense strand
gaagcuggugcaguuguau

SEQ ID NO: 1012254 - RNA, 19 nt, Homo sapiens
  misc_RNA (1)...(19): siRNA sense strand
aggcugaggagugguauuu

SEQ ID NO: 1012255 - RNA, 19 nt, Homo sapiens
  misc_RNA (1)...(19): siRNA sense strand
ucagaggagcccauuuaca

SEQ ID NO: 1012256 - RNA, 19 nt, Homo sapiens
  misc_RNA (1)...(19): siRNA sense strand
gaagcugaggcaugagaag

SEQ ID NO: 1012257 - RNA, 19 nt, Homo sapiens
  misc_RNA (1)...(19): siRNA sense strand
ccucaggcauggcguacgu

SEQ ID NO: 1012258 - RNA, 19 nt, Homo sapiens
  misc_RNA (1)...(19): siRNA sense strand
gauagugacucuuggcaaa

SEQ ID NO: 1012259 - RNA, 19 nt, Homo sapiens
  misc_RNA (1)...(19): siRNA sense strand
gagaauacuuacagcaaga

SEQ ID NO: 1012260 - RNA, 19 nt, Homo sapiens
  misc_RNA (1)...(19): siRNA sense strand
gaacaaggcagaucucucu

SEQ ID NO: 1012261 - RNA, 19 nt, Homo sapiens
  misc_RNA (1)...(19): siRNA sense strand
cugcauagcuuccaaguca

SEQ ID NO: 1012262 - RNA, 19 nt, Homo sapiens
  misc_RNA (1)...(19): siRNA sense strand
guuaugugcuuguguauuc

SEQ ID NO: 1012263 - RNA, 19 nt, Homo sapiens
  misc_RNA (1)...(19): siRNA sense strand
caaggcaucuucaccaaag

SEQ ID NO: 1012264 - RNA, 19 nt, Homo sapiens
  misc_RNA (1)...(19): siRNA sense strand
gagagaaucagcugacuca

SEQ ID NO: 1012265 - RNA, 19 nt, Homo sapiens
  misc_RNA (1)...(19): siRNA sense strand
cuacaguggagaauacuua

SEQ ID NO: 1012266 - RNA, 19 nt, Homo sapiens
  misc_RNA (1)...(19): siRNA sense strand
cagcagggcaggaugagua

SEQ ID NO: 1012267 - RNA, 19 nt, Homo sapiens
  misc_RNA (1)...(19): siRNA sense strand
cgacauuuauggagucauc

SEQ ID NO: 1012268 - RNA, 19 nt, Homo sapiens
  misc_RNA (1)...(19): siRNA sense strand
ucugucaccucucugcaua

SEQ ID NO: 1012269 - RNA, 19 nt, Homo sapiens
  misc_RNA (1)...(19): siRNA sense strand
agacaucuuuggcacauca

SEQ ID NO: 1012270 - RNA, 19 nt, Homo sapiens
  misc_RNA (1)...(19): siRNA sense strand
caaagaugaguuucaccua

SEQ ID NO: 1012271 - RNA, 19 nt, Homo sapiens
  misc_RNA (1)...(19): siRNA sense strand
gaauacuuacagcaagaua

SEQ ID NO: 1012272 - RNA, 19 nt, Homo sapiens
  misc_RNA (1)...(19): siRNA sense strand
ucaccucucugcauagcuu

SEQ ID NO: 1012273 - RNA, 19 nt, Homo sapiens
  misc_RNA (1)...(19): siRNA sense strand
ggaaagaagcuggcagagu

SEQ ID NO: 1012274 - RNA, 19 nt, Homo sapiens
  misc_RNA (1)...(19): siRNA sense strand
guacagcauucugcccuau

SEQ ID NO: 1012275 - RNA, 19 nt, Homo sapiens
  misc_RNA (1)...(19): siRNA sense strand
ccaaagucauccaggagau

SEQ ID NO: 1012276 - RNA, 19 nt, Homo sapiens
  misc_RNA (1)...(19): siRNA sense strand
gcauagcuuccaagucauu

SEQ ID NO: 1012277 - RNA, 19 nt, Homo sapiens
  misc_RNA (1)...(19): siRNA sense strand
gcauucugcccuauucauu

SEQ ID NO: 1012278 - RNA, 19 nt, Homo sapiens
  misc_RNA (1)...(19): siRNA sense strand
gauccuacaguggagaaua

SEQ ID NO: 1012279 - RNA, 19 nt, Homo sapiens
  misc_RNA (1)...(19): siRNA sense strand
gagaaucagcugacucaag

SEQ ID NO: 1012280 - RNA, 19 nt, Homo sapiens
  misc_RNA (1)...(19): siRNA sense strand
ggacacagcagggcaggau

SEQ ID NO: 1012281 - RNA, 19 nt, Homo sapiens
  misc_RNA (1)...(19): siRNA sense strand
caggaugaguacagcauuc

SEQ ID NO: 1012282 - RNA, 19 nt, Homo sapiens
  misc_RNA (1)...(19): siRNA sense strand
ucgcugccaucucauguga

SEQ ID NO: 1012283 - RNA, 19 nt, Homo sapiens
  misc_RNA (1)...(19): siRNA sense strand
ggaaggcuacgauccuaca

SEQ ID NO: 1012284 - RNA, 19 nt, Homo sapiens
  misc_RNA (1)...(19): siRNA sense strand
gugcuuguguauucuguca

SEQ ID NO: 1012285 - RNA, 19 nt, Homo sapiens
  misc_RNA (1)...(19): siRNA sense strand
aagaugaguuucaccuaca

SEQ ID NO: 1012286 - RNA, 19 nt, Homo sapiens
  misc_RNA (1)...(19): siRNA sense strand
gcaggaugaguacagcauu

SEQ ID NO: 1012287 - RNA, 19 nt, Homo sapiens
  misc_RNA (1)...(19): siRNA sense strand
uacaggcaguugaaggaaa

SEQ ID NO: 1012288 - RNA, 19 nt, Homo sapiens
  misc_RNA (1)...(19): siRNA sense strand
gguacaggcaguugaagga

SEQ ID NO: 1012289 - RNA, 19 nt, Homo sapiens
  misc_RNA (1)...(19): siRNA sense strand
gguccaugguuaugugcuu

SEQ ID NO: 1012290 - RNA, 19 nt, Homo sapiens
  misc_RNA (1)...(19): siRNA sense strand
caaagucauccaggagauu

SEQ ID NO: 1012291 - RNA, 19 nt, Homo sapiens
  misc_RNA (1)...(19): siRNA sense strand
acagcauucugcccuauuc

SEQ ID NO: 1012292 - RNA, 19 nt, Homo sapiens
  misc_RNA (1)...(19): siRNA sense strand
gagagguacaggcaguuga

SEQ ID NO: 1012293 - RNA, 19 nt, Homo sapiens
  misc_RNA (1)...(19): siRNA sense strand
gaguuucaccuacauuugg

SEQ ID NO: 1012294 - RNA, 19 nt, Homo sapiens
  misc_RNA (1)...(19): siRNA sense strand
ucggaaggcuacgauccua

SEQ ID NO: 1012295 - RNA, 19 nt, Homo sapiens
  misc_RNA (1)...(19): siRNA sense strand
guacaggcaguugaaggaa

SEQ ID NO: 1012296 - RNA, 19 nt, Homo sapiens
  misc_RNA (1)...(19): siRNA sense strand
ucauugggguccaugguua

SEQ ID NO: 1012297 - RNA, 19 nt, Homo sapiens
  misc_RNA (1)...(19): siRNA sense strand
ccucggauaccgcugugua

SEQ ID NO: 1012298 - RNA, 19 nt, Homo sapiens
  misc_RNA (1)...(19): siRNA sense strand
gaauuccuaugggcaagag

SEQ ID NO: 1012299 - RNA, 19 nt, Homo sapiens
  misc_RNA (1)...(19): siRNA sense strand
acacagcagggcaggauga

SEQ ID NO: 1012300 - RNA, 19 nt, Homo sapiens
  misc_RNA (1)...(19): siRNA sense strand
caucuuuggcacaucaauu

SEQ ID NO: 1012301 - RNA, 19 nt, Homo sapiens
  misc_RNA (1)...(19): siRNA sense strand
gucaucugcucgagagaau

SEQ ID NO: 1012302 - RNA, 19 nt, Homo sapiens
  misc_RNA (1)...(19): siRNA sense strand
augguuaugugcuugugua

SEQ ID NO: 1012303 - RNA, 19 nt, Homo sapiens
  misc_RNA (1)...(19): siRNA sense strand
gcccuauucauucaucauu

SEQ ID NO: 1012304 - RNA, 19 nt, Homo sapiens
  misc_RNA (1)...(19): siRNA sense strand
acagcaagauagugacucu

SEQ ID NO: 1012305 - RNA, 19 nt, Homo sapiens
  misc_RNA (1)...(19): siRNA sense strand
ucaaggcaucuucaccaaa

SEQ ID NO: 1012306 - RNA, 19 nt, Homo sapiens
  misc_RNA (1)...(19): siRNA sense strand
caucugcucgagagaauca

SEQ ID NO: 1012307 - RNA, 19 nt, Homo sapiens
  misc_RNA (1)...(19): siRNA sense strand
acaggcaguugaaggaaag

SEQ ID NO: 1012308 - RNA, 19 nt, Homo sapiens
  misc_RNA (1)...(19): siRNA sense strand
ccuauucauucaucauugg

SEQ ID NO: 1012309 - RNA, 19 nt, Homo sapiens
  misc_RNA (1)...(19): siRNA sense strand
caucuucaccaaagucauc

SEQ ID NO: 1012310 - RNA, 19 nt, Homo sapiens
  misc_RNA (1)...(19): siRNA sense strand
gaugaguuucaccuacauu

SEQ ID NO: 1012311 - RNA, 19 nt, Homo sapiens
  misc_RNA (1)...(19): siRNA sense strand
ugaguuucaccuacauuug

SEQ ID NO: 1012312 - RNA, 19 nt, Homo sapiens
  misc_RNA (1)...(19): siRNA sense strand
uggagaauacuuacagcaa

SEQ ID NO: 1012313 - RNA, 19 nt, Homo sapiens
  misc_RNA (1)...(19): siRNA sense strand
uguauucugucaccucucu

SEQ ID NO: 1012314 - RNA, 19 nt, Homo sapiens
  misc_RNA (1)...(19): siRNA sense strand
aaagucauccaggagauug

SEQ ID NO: 1012315 - RNA, 19 nt, Homo sapiens
  misc_RNA (1)...(19): siRNA sense strand
uaagaaagcuccagaauuc

SEQ ID NO: 1012316 - RNA, 19 nt, Homo sapiens
  misc_RNA (1)...(19): siRNA sense strand
guaagaaagcuccagaauu

SEQ ID NO: 1012317 - RNA, 19 nt, Homo sapiens
  misc_RNA (1)...(19): siRNA sense strand
ggaauuuauugcuccugua

SEQ ID NO: 1012318 - RNA, 19 nt, Homo sapiens
  misc_RNA (1)...(19): siRNA sense strand
ggaggacagugacaaguuc

SEQ ID NO: 1012319 - RNA, 19 nt, Homo sapiens
  misc_RNA (1)...(19): siRNA sense strand
gaagacauaagaagccaaa

SEQ ID NO: 1012320 - RNA, 19 nt, Homo sapiens
  misc_RNA (1)...(19): siRNA sense strand
gugacaaguucauaccuaa

SEQ ID NO: 1012321 - RNA, 19 nt, Homo sapiens
  misc_RNA (1)...(19): siRNA sense strand
ccacaaggauuuccagaac

SEQ ID NO: 1012322 - RNA, 19 nt, Homo sapiens
  misc_RNA (1)...(19): siRNA sense strand
ggagggcagucgcuguuug

SEQ ID NO: 1012323 - RNA, 19 nt, Homo sapiens
  misc_RNA (1)...(19): siRNA sense strand
gcaccuugucuuccaguua

SEQ ID NO: 1012324 - RNA, 19 nt, Homo sapiens
  misc_RNA (1)...(19): siRNA sense strand
ggacagugacaaguucaua

SEQ ID NO: 1012325 - RNA, 19 nt, Homo sapiens
  misc_RNA (1)...(19): siRNA sense strand
uguaucagcucccaccaaa

SEQ ID NO: 1012326 - RNA, 19 nt, Homo sapiens
  misc_RNA (1)...(19): siRNA sense strand
gagugucccuggagacuuc

SEQ ID NO: 1012327 - RNA, 19 nt, Homo sapiens
  misc_RNA (1)...(19): siRNA sense strand
ccagagagcagucagaauc

SEQ ID NO: 1012328 - RNA, 19 nt, Homo sapiens
  misc_RNA (1)...(19): siRNA sense strand
gaauuuauugcuccuguau

SEQ ID NO: 1012329 - RNA, 19 nt, Homo sapiens
  misc_RNA (1)...(19): siRNA sense strand
aaacguacgugggcaugaa

SEQ ID NO: 1012330 - RNA, 19 nt, Homo sapiens
  misc_RNA (1)...(19): siRNA sense strand
ccaggucaauuuaacuugu

SEQ ID NO: 1012331 - RNA, 19 nt, Homo sapiens
  misc_RNA (1)...(19): siRNA sense strand
guacgugggcaugaaguaa

SEQ ID NO: 1012332 - RNA, 19 nt, Homo sapiens
  misc_RNA (1)...(19): siRNA sense strand
acaaggauuuccagaacug

SEQ ID NO: 1012333 - RNA, 19 nt, Homo sapiens
  misc_RNA (1)...(19): siRNA sense strand
ggaugggcuuguccucaga

SEQ ID NO: 1012334 - RNA, 19 nt, Homo sapiens
  misc_RNA (1)...(19): siRNA sense strand
gggaggacagugacaaguu

SEQ ID NO: 1012335 - RNA, 19 nt, Homo sapiens
  misc_RNA (1)...(19): siRNA sense strand
uaucagcucccaccaaauc

SEQ ID NO: 1012336 - RNA, 19 nt, Homo sapiens
  misc_RNA (1)...(19): siRNA sense strand
guugaggccacaaggauuu

SEQ ID NO: 1012337 - RNA, 19 nt, Homo sapiens
  misc_RNA (1)...(19): siRNA sense strand
gggcgguccaggucaauuu

SEQ ID NO: 1012338 - RNA, 19 nt, Homo sapiens
  misc_RNA (1)...(19): siRNA sense strand
agugacaaguucauaccua

SEQ ID NO: 1012339 - RNA, 19 nt, Homo sapiens
  misc_RNA (1)...(19): siRNA sense strand
gcaaguggaaguucaaagc

SEQ ID NO: 1012340 - RNA, 19 nt, Homo sapiens
  misc_RNA (1)...(19): siRNA sense strand
gaagccaaacccacaccaa

SEQ ID NO: 1012341 - RNA, 19 nt, Homo sapiens
  misc_RNA (1)...(19): siRNA sense strand
gcaccaggaugggcuuguc

SEQ ID NO: 1012342 - RNA, 19 nt, Homo sapiens
  misc_RNA (1)...(19): siRNA sense strand
ccucagccuugaagagugu

SEQ ID NO: 1012343 - RNA, 19 nt, Homo sapiens
  misc_RNA (1)...(19): siRNA sense strand
caccuugucuuccaguuac

SEQ ID NO: 1012344 - RNA, 19 nt, Homo sapiens
  misc_RNA (1)...(19): siRNA sense strand
gcuguuuggguccacguua

SEQ ID NO: 1012345 - RNA, 19 nt, Homo sapiens
  misc_RNA (1)...(19): siRNA sense strand
ugcuaacucucucuuacaa

SEQ ID NO: 1012346 - RNA, 19 nt, Homo sapiens
  misc_RNA (1)...(19): siRNA sense strand
ggcgguccaggucaauuua

SEQ ID NO: 1012347 - RNA, 19 nt, Homo sapiens
  misc_RNA (1)...(19): siRNA sense strand
ugacaaguucauaccuaaa

SEQ ID NO: 1012348 - RNA, 19 nt, Homo sapiens
  misc_RNA (1)...(19): siRNA sense strand
ccacgggaagacauaagaa

SEQ ID NO: 1012349 - RNA, 19 nt, Homo sapiens
  misc_RNA (1)...(19): siRNA sense strand
uuaccuagaucugcuaacu

SEQ ID NO: 1012350 - RNA, 19 nt, Homo sapiens
  misc_RNA (1)...(19): siRNA sense strand
auuuauugcuccuguauca

SEQ ID NO: 1012351 - RNA, 19 nt, Homo sapiens
  misc_RNA (1)...(19): siRNA sense strand
aagccaaacccacaccaaa

SEQ ID NO: 1012352 - RNA, 19 nt, Homo sapiens
  misc_RNA (1)...(19): siRNA sense strand
gacaaguucauaccuaaac

SEQ ID NO: 1012353 - RNA, 19 nt, Homo sapiens
  misc_RNA (1)...(19): siRNA sense strand
gccacaaggauuuccagaa

SEQ ID NO: 1012354 - RNA, 19 nt, Homo sapiens
  misc_RNA (1)...(19): siRNA sense strand
gcccagagagcagucagaa

SEQ ID NO: 1012355 - RNA, 19 nt, Homo sapiens
  misc_RNA (1)...(19): siRNA sense strand
caaagccucagccuugaag

SEQ ID NO: 1012356 - RNA, 19 nt, Homo sapiens
  misc_RNA (1)...(19): siRNA sense strand
guccucagauccaguuguc

SEQ ID NO: 1012357 - RNA, 19 nt, Homo sapiens
  misc_RNA (1)...(19): siRNA sense strand
cagagagcagucagaauca

SEQ ID NO: 1012358 - RNA, 19 nt, Homo sapiens
  misc_RNA (1)...(19): siRNA sense strand
gaucugcuaacucucucuu

SEQ ID NO: 1012359 - RNA, 19 nt, Homo sapiens
  misc_RNA (1)...(19): siRNA sense strand
gauugaccuucgccugagu

SEQ ID NO: 1012360 - RNA, 19 nt, Homo sapiens
  misc_RNA (1)...(19): siRNA sense strand
caggucaauuuaacuuguc

SEQ ID NO: 1012361 - RNA, 19 nt, Homo sapiens
  misc_RNA (1)...(19): siRNA sense strand
gcgguccaggucaauuuaa

SEQ ID NO: 1012362 - RNA, 19 nt, Homo sapiens
  misc_RNA (1)...(19): siRNA sense strand
ucccacggaugcccagaga

SEQ ID NO: 1012363 - RNA, 19 nt, Homo sapiens
  misc_RNA (1)...(19): siRNA sense strand
ucugcuaacucucucuuac

SEQ ID NO: 1012364 - RNA, 19 nt, Homo sapiens
  misc_RNA (1)...(19): siRNA sense strand
gaccaugacuuaccagaaa

SEQ ID NO: 1012365 - RNA, 19 nt, Homo sapiens
  misc_RNA (1)...(19): siRNA sense strand
cagaggagccugucuauaa

SEQ ID NO: 1012366 - RNA, 19 nt, Homo sapiens
  misc_RNA (1)...(19): siRNA sense strand
ggaagaagcuccgacuguu

SEQ ID NO: 1012367 - RNA, 19 nt, Homo sapiens
  misc_RNA (1)...(19): siRNA sense strand
ccagggcacucagaaauua

SEQ ID NO: 1012368 - RNA, 19 nt, Homo sapiens
  misc_RNA (1)...(19): siRNA sense strand
ggaggaagcugacuuacca

SEQ ID NO: 1012369 - RNA, 19 nt, Homo sapiens
  misc_RNA (1)...(19): siRNA sense strand
gaagcugacuuaccaguuc

SEQ ID NO: 1012370 - RNA, 19 nt, Homo sapiens
  misc_RNA (1)...(19): siRNA sense strand
caagcugggucaagcauuu

SEQ ID NO: 1012371 - RNA, 19 nt, Homo sapiens
  misc_RNA (1)...(19): siRNA sense strand
gaucaagaauaucucaguu

SEQ ID NO: 1012372 - RNA, 19 nt, Homo sapiens
  misc_RNA (1)...(19): siRNA sense strand
gaagaagcuccgacuguuu

SEQ ID NO: 1012373 - RNA, 19 nt, Homo sapiens
  misc_RNA (1)...(19): siRNA sense strand
gaucuucuauucacagugu

SEQ ID NO: 1012374 - RNA, 19 nt, Homo sapiens
  misc_RNA (1)...(19): siRNA sense strand
acaggaagaccaugacuua

SEQ ID NO: 1012375 - RNA, 19 nt, Homo sapiens
  misc_RNA (1)...(19): siRNA sense strand
ggagaacgguaauuaacag

SEQ ID NO: 1012376 - RNA, 19 nt, Homo sapiens
  misc_RNA (1)...(19): siRNA sense strand
ggaagaccaugacuuacca

SEQ ID NO: 1012377 - RNA, 19 nt, Homo sapiens
  misc_RNA (1)...(19): siRNA sense strand
uaacagugcugcggacuuc

SEQ ID NO: 1012378 - RNA, 19 nt, Homo sapiens
  misc_RNA (1)...(19): siRNA sense strand
ccaauuaccaugagcuaaa

SEQ ID NO: 1012379 - RNA, 19 nt, Homo sapiens
  misc_RNA (1)...(19): siRNA sense strand
ugacuuaccaguucaguga

SEQ ID NO: 1012380 - RNA, 19 nt, Homo sapiens
  misc_RNA (1)...(19): siRNA sense strand
cagcugcuauggaguguug

SEQ ID NO: 1012381 - RNA, 19 nt, Homo sapiens
  misc_RNA (1)...(19): siRNA sense strand
acucagaaauuacggaaga

SEQ ID NO: 1012382 - RNA, 19 nt, Homo sapiens
  misc_RNA (1)...(19): siRNA sense strand
gagccugucuauaauugga

SEQ ID NO: 1012383 - RNA, 19 nt, Homo sapiens
  misc_RNA (1)...(19): siRNA sense strand
agaggagccugucuauaau

SEQ ID NO: 1012384 - RNA, 19 nt, Homo sapiens
  misc_RNA (1)...(19): siRNA sense strand
ucaaccugaucaagaauau

SEQ ID NO: 1012385 - RNA, 19 nt, Homo sapiens
  misc_RNA (1)...(19): siRNA sense strand
ggaagaaguggggaaauua

SEQ ID NO: 1012386 - RNA, 19 nt, Homo sapiens
  misc_RNA (1)...(19): siRNA sense strand
caauuaccaugagcuaaau

SEQ ID NO: 1012387 - RNA, 19 nt, Homo sapiens
  misc_RNA (1)...(19): siRNA sense strand
gugcugcggacuucuauuu

SEQ ID NO: 1012388 - RNA, 19 nt, Homo sapiens
  misc_RNA (1)...(19): siRNA sense strand
caaagacucucuccauccu

SEQ ID NO: 1012389 - RNA, 19 nt, Homo sapiens
  misc_RNA (1)...(19): siRNA sense strand
cugcagaacauaacugaaa

SEQ ID NO: 1012390 - RNA, 19 nt, Homo sapiens
  misc_RNA (1)...(19): siRNA sense strand
cuucaguacucgccagauu

SEQ ID NO: 1012391 - RNA, 19 nt, Homo sapiens
  misc_RNA (1)...(19): siRNA sense strand
uguauucaguggguagaua

SEQ ID NO: 1012392 - RNA, 19 nt, Homo sapiens
  misc_RNA (1)...(19): siRNA sense strand
gaggagccugucuauaauu

SEQ ID NO: 1012393 - RNA, 19 nt, Homo sapiens
  misc_RNA (1)...(19): siRNA sense strand
agaaauuaccuggcuuuaa

SEQ ID NO: 1012394 - RNA, 19 nt, Homo sapiens
  misc_RNA (1)...(19): siRNA sense strand
ggaagcugacuuaccaguu

SEQ ID NO: 1012395 - RNA, 19 nt, Homo sapiens
  misc_RNA (1)...(19): siRNA sense strand
ggaaauauucaucaaucuc

SEQ ID NO: 1012396 - RNA, 19 nt, Homo sapiens
  misc_RNA (1)...(19): siRNA sense strand
cuucacgaaucccuguaua

SEQ ID NO: 1012397 - RNA, 19 nt, Homo sapiens
  misc_RNA (1)...(19): siRNA sense strand
ucacgaaucccuguauaau

SEQ ID NO: 1012398 - RNA, 19 nt, Homo sapiens
  misc_RNA (1)...(19): siRNA sense strand
uuaccuggcuuuaaucaac

SEQ ID NO: 1012399 - RNA, 19 nt, Homo sapiens
  misc_RNA (1)...(19): siRNA sense strand
uguucaaccugaucaagaa

SEQ ID NO: 1012400 - RNA, 19 nt, Homo sapiens
  misc_RNA (1)...(19): siRNA sense strand
gagaucuucuauucacagu

SEQ ID NO: 1012401 - RNA, 19 nt, Homo sapiens
  misc_RNA (1)...(19): siRNA sense strand
gaaauuccagcugcuaugg

SEQ ID NO: 1012402 - RNA, 19 nt, Homo sapiens
  misc_RNA (1)...(19): siRNA sense strand
guauucaguggguagauaa

SEQ ID NO: 1012403 - RNA, 19 nt, Homo sapiens
  misc_RNA (1)...(19): siRNA sense strand
ccaucguccucaugucaaa

SEQ ID NO: 1012404 - RNA, 19 nt, Homo sapiens
  misc_RNA (1)...(19): siRNA sense strand
guacucgccagauuacaga

SEQ ID NO: 1012405 - RNA, 19 nt, Homo sapiens
  misc_RNA (1)...(19): siRNA sense strand
aagacucucuccauccuau

SEQ ID NO: 1012406 - RNA, 19 nt, Homo sapiens
  misc_RNA (1)...(19): siRNA sense strand
cuggagaucuucaguacuc

SEQ ID NO: 1012407 - RNA, 19 nt, Homo sapiens
  misc_RNA (1)...(19): siRNA sense strand
acauucaacuggagaucuu

SEQ ID NO: 1012408 - RNA, 19 nt, Homo sapiens
  misc_RNA (1)...(19): siRNA sense strand
uauaauuggagaacgguaa

SEQ ID NO: 1012409 - RNA, 19 nt, Homo sapiens
  misc_RNA (1)...(19): siRNA sense strand
gccagggcacucagaaauu

SEQ ID NO: 1012410 - RNA, 19 nt, Homo sapiens
  misc_RNA (1)...(19): siRNA sense strand
ggccagggcacucagaaau

SEQ ID NO: 1012411 - RNA, 19 nt, Homo sapiens
  misc_RNA (1)...(19): siRNA sense strand
aagaagcuccgacuguuug

SEQ ID NO: 1012412 - RNA, 19 nt, Homo sapiens
  misc_RNA (1)...(19): siRNA sense strand
ugaagaugcuuuugagguu

SEQ ID NO: 1012413 - RNA, 19 nt, Homo sapiens
  misc_RNA (1)...(19): siRNA sense strand
cagaaauuaccuggcuuua

SEQ ID NO: 1012414 - RNA, 19 nt, Homo sapiens
  misc_RNA (1)...(19): siRNA sense strand
cauaugccaauuaccauga

SEQ ID NO: 1012415 - RNA, 19 nt, Homo sapiens
  misc_RNA (1)...(19): siRNA sense strand
aggagccugucuauaauug

SEQ ID NO: 1012416 - RNA, 19 nt, Homo sapiens
  misc_RNA (1)...(19): siRNA sense strand
ccaguucagugaggccauu

SEQ ID NO: 1012417 - RNA, 19 nt, Homo sapiens
  misc_RNA (1)...(19): siRNA sense strand
gagguucugaggcaacauu

SEQ ID NO: 1012418 - RNA, 19 nt, Homo sapiens
  misc_RNA (1)...(19): siRNA sense strand
cgccagauuacagaaauua

SEQ ID NO: 1012419 - RNA, 19 nt, Homo sapiens
  misc_RNA (1)...(19): siRNA sense strand
acagaaauuaccuggcuuu

SEQ ID NO: 1012420 - RNA, 19 nt, Homo sapiens
  misc_RNA (1)...(19): siRNA sense strand
ugaggccauucuccaaaga

SEQ ID NO: 1012421 - RNA, 19 nt, Homo sapiens
  misc_RNA (1)...(19): siRNA sense strand
gugaggccauucuccaaag

SEQ ID NO: 1012422 - RNA, 19 nt, Homo sapiens
  misc_RNA (1)...(19): siRNA sense strand
agaaauuacggaagaagug

SEQ ID NO: 1012423 - RNA, 19 nt, Homo sapiens
  misc_RNA (1)...(19): siRNA sense strand
guucugaggcaacauucaa

SEQ ID NO: 1012424 - RNA, 19 nt, Homo sapiens
  misc_RNA (1)...(19): siRNA sense strand
acgaaucccuguauaaucc

SEQ ID NO: 1012425 - RNA, 19 nt, Homo sapiens
  misc_RNA (1)...(19): siRNA sense strand
caaucucugcagaacauaa

SEQ ID NO: 1012426 - RNA, 19 nt, Homo sapiens
  misc_RNA (1)...(19): siRNA sense strand
gacucucuccauccuauuu

SEQ ID NO: 1012427 - RNA, 19 nt, Homo sapiens
  misc_RNA (1)...(19): siRNA sense strand
ggcaacaggaagaccauga

SEQ ID NO: 1012428 - RNA, 19 nt, Homo sapiens
  misc_RNA (1)...(19): siRNA sense strand
aggcaucuuucaguuugua

SEQ ID NO: 1012429 - RNA, 19 nt, Homo sapiens
  misc_RNA (1)...(19): siRNA sense strand
caaccaucguccucauguc

SEQ ID NO: 1012430 - RNA, 19 nt, Homo sapiens
  misc_RNA (1)...(19): siRNA sense strand
auacauaugccaauuacca

SEQ ID NO: 1012431 - RNA, 19 nt, Homo sapiens
  misc_RNA (1)...(19): siRNA sense strand
cggaagaaguggggaaauu

SEQ ID NO: 1012432 - RNA, 19 nt, Homo sapiens
  misc_RNA (1)...(19): siRNA sense strand
ccucaugucaaaggaaauu

SEQ ID NO: 1012433 - RNA, 19 nt, Homo sapiens
  misc_RNA (1)...(19): siRNA sense strand
gcugcggacuucuauuuug

SEQ ID NO: 1012434 - RNA, 19 nt, Homo sapiens
  misc_RNA (1)...(19): siRNA sense strand
guggggaaauuaccaaaau

SEQ ID NO: 1012435 - RNA, 19 nt, Homo sapiens
  misc_RNA (1)...(19): siRNA sense strand
ccacucuucuccagcaaaa

SEQ ID NO: 1012436 - RNA, 19 nt, Homo sapiens
  misc_RNA (1)...(19): siRNA sense strand
caucuuucaguuuguauca

SEQ ID NO: 1012437 - RNA, 19 nt, Homo sapiens
  misc_RNA (1)...(19): siRNA sense strand
guggguagauaaaaccaaa

SEQ ID NO: 1012438 - RNA, 19 nt, Homo sapiens
  misc_RNA (1)...(19): siRNA sense strand
guguucaaccugaucaaga

SEQ ID NO: 1012439 - RNA, 19 nt, Homo sapiens
  misc_RNA (1)...(19): siRNA sense strand
ucgccagauuacagaaauu

SEQ ID NO: 1012440 - RNA, 19 nt, Homo sapiens
  misc_RNA (1)...(19): siRNA sense strand
aaucaaccaucguccucau

SEQ ID NO: 1012441 - RNA, 19 nt, Homo sapiens
  misc_RNA (1)...(19): siRNA sense strand
ucaaccaucguccucaugu

SEQ ID NO: 1012442 - RNA, 19 nt, Homo sapiens
  misc_RNA (1)...(19): siRNA sense strand
gcaauucguugauguauau

SEQ ID NO: 1012443 - RNA, 19 nt, Homo sapiens
  misc_RNA (1)...(19): siRNA sense strand
ggaggaaucugugucaaug

SEQ ID NO: 1012444 - RNA, 19 nt, Homo sapiens
  misc_RNA (1)...(19): siRNA sense strand
gcgcgacccugaugaacua

SEQ ID NO: 1012445 - RNA, 19 nt, Homo sapiens
  misc_RNA (1)...(19): siRNA sense strand
gaaguuugcaagaaguuua

SEQ ID NO: 1012446 - RNA, 19 nt, Homo sapiens
  misc_RNA (1)...(19): siRNA sense strand
ggcaauucguugauguaua

SEQ ID NO: 1012447 - RNA, 19 nt, Homo sapiens
  misc_RNA (1)...(19): siRNA sense strand
ccauagaaguuugcaagaa

SEQ ID NO: 1012448 - RNA, 19 nt, Homo sapiens
  misc_RNA (1)...(19): siRNA sense strand
aagacaagaugcacuuuga

SEQ ID NO: 1012449 - RNA, 19 nt, Homo sapiens
  misc_RNA (1)...(19): siRNA sense strand
gaacagaagaggaagaaaa

SEQ ID NO: 1012450 - RNA, 19 nt, Homo sapiens
  misc_RNA (1)...(19): siRNA sense strand
cauagaaguuugcaagaag

SEQ ID NO: 1012451 - RNA, 19 nt, Homo sapiens
  misc_RNA (1)...(19): siRNA sense strand
ccugaugaacuaagauuua

SEQ ID NO: 1012452 - RNA, 19 nt, Homo sapiens
  misc_RNA (1)...(19): siRNA sense strand
gagaaaguagaucuucauu

SEQ ID NO: 1012453 - RNA, 19 nt, Homo sapiens
  misc_RNA (1)...(19): siRNA sense strand
ccaauuaaccauggugaaa

SEQ ID NO: 1012454 - RNA, 19 nt, Homo sapiens
  misc_RNA (1)...(19): siRNA sense strand
gggcaucucuaugaauuag

SEQ ID NO: 1012455 - RNA, 19 nt, Homo sapiens
  misc_RNA (1)...(19): siRNA sense strand
gaggaugccauagaaguuu

SEQ ID NO: 1012456 - RNA, 19 nt, Homo sapiens
  misc_RNA (1)...(19): siRNA sense strand
uuaaugcgauugcucuuuc

SEQ ID NO: 1012457 - RNA, 19 nt, Homo sapiens
  misc_RNA (1)...(19): siRNA sense strand
ucaccaaccaguuucuuaa

SEQ ID NO: 1012458 - RNA, 19 nt, Homo sapiens
  misc_RNA (1)...(19): siRNA sense strand
ggacugauucaugcuauug

SEQ ID NO: 1012459 - RNA, 19 nt, Homo sapiens
  misc_RNA (1)...(19): siRNA sense strand
caaugccuguggaacaauu

SEQ ID NO: 1012460 - RNA, 19 nt, Homo sapiens
  misc_RNA (1)...(19): siRNA sense strand
uggaacaauuggacugauu

SEQ ID NO: 1012461 - RNA, 19 nt, Homo sapiens
  misc_RNA (1)...(19): siRNA sense strand
gcacuuugaaucuggauca

SEQ ID NO: 1012462 - RNA, 19 nt, Homo sapiens
  misc_RNA (1)...(19): siRNA sense strand
gacaagaugcacuuugaau

SEQ ID NO: 1012463 - RNA, 19 nt, Homo sapiens
  misc_RNA (1)...(19): siRNA sense strand
gaacaauuggacugauuca

SEQ ID NO: 1012464 - RNA, 19 nt, Homo sapiens
  misc_RNA (1)...(19): siRNA sense strand
caccaaguauagaugagaa

SEQ ID NO: 1012465 - RNA, 19 nt, Homo sapiens
  misc_RNA (1)...(19): siRNA sense strand
ugauguauauggaauggau

SEQ ID NO: 1012466 - RNA, 19 nt, Homo sapiens
  misc_RNA (1)...(19): siRNA sense strand
cgacccugaugaacuaaga

SEQ ID NO: 1012467 - RNA, 19 nt, Homo sapiens
  misc_RNA (1)...(19): siRNA sense strand
cgaggucaccaaccaguuu

SEQ ID NO: 1012468 - RNA, 19 nt, Homo sapiens
  misc_RNA (1)...(19): siRNA sense strand
gaagccauuuccaauuaac

SEQ ID NO: 1012469 - RNA, 19 nt, Homo sapiens
  misc_RNA (1)...(19): siRNA sense strand
gaagcaaacaaucagcaau

SEQ ID NO: 1012470 - RNA, 19 nt, Homo sapiens
  misc_RNA (1)...(19): siRNA sense strand
accagucugugcagucuua

SEQ ID NO: 1012471 - RNA, 19 nt, Homo sapiens
  misc_RNA (1)...(19): siRNA sense strand
acaauuggacugauucaug

SEQ ID NO: 1012472 - RNA, 19 nt, Homo sapiens
  misc_RNA (1)...(19): siRNA sense strand
gaaguauucagaacagaag

SEQ ID NO: 1012473 - RNA, 19 nt, Homo sapiens
  misc_RNA (1)...(19): siRNA sense strand
aaugagcccugaagaacga

SEQ ID NO: 1012474 - RNA, 19 nt, Homo sapiens
  misc_RNA (1)...(19): siRNA sense strand
ggaacaauuggacugauuc

SEQ ID NO: 1012475 - RNA, 19 nt, Homo sapiens
  misc_RNA (1)...(19): siRNA sense strand
cauccuaacuggcaauucg

SEQ ID NO: 1012476 - RNA, 19 nt, Homo sapiens
  misc_RNA (1)...(19): siRNA sense strand
caguauauuucaugaagca

SEQ ID NO: 1012477 - RNA, 19 nt, Homo sapiens
  misc_RNA (1)...(19): siRNA sense strand
cugaagaacgagccagaua

SEQ ID NO: 1012478 - RNA, 19 nt, Homo sapiens
  misc_RNA (1)...(19): siRNA sense strand
auuagaggaugccauagaa

SEQ ID NO: 1012479 - RNA, 19 nt, Homo sapiens
  misc_RNA (1)...(19): siRNA sense strand
gaaacuagugaugaaacuu

SEQ ID NO: 1012480 - RNA, 19 nt, Homo sapiens
  misc_RNA (1)...(19): siRNA sense strand
ugcauuaguucauguagau

SEQ ID NO: 1012481 - RNA, 19 nt, Homo sapiens
  misc_RNA (1)...(19): siRNA sense strand
gaugagaaaguagaucuuc

SEQ ID NO: 1012482 - RNA, 19 nt, Homo sapiens
  misc_RNA (1)...(19): siRNA sense strand
agacugaggcaccaaguau

SEQ ID NO: 1012483 - RNA, 19 nt, Homo sapiens
  misc_RNA (1)...(19): siRNA sense strand
ugagaccagugcccaugaa

SEQ ID NO: 1012484 - RNA, 19 nt, Homo sapiens
  misc_RNA (1)...(19): siRNA sense strand
gacugaggcaccaaguaua

SEQ ID NO: 1012485 - RNA, 19 nt, Homo sapiens
  misc_RNA (1)...(19): siRNA sense strand
acaauuaggucuacauccu

SEQ ID NO: 1012486 - RNA, 19 nt, Homo sapiens
  misc_RNA (1)...(19): siRNA sense strand
guauagaugagaaaguaga

SEQ ID NO: 1012487 - RNA, 19 nt, Homo sapiens
  misc_RNA (1)...(19): siRNA sense strand
ugaacuccuuagcauggua

SEQ ID NO: 1012488 - RNA, 19 nt, Homo sapiens
  misc_RNA (1)...(19): siRNA sense strand
ggagcgcgacccugaugaa

SEQ ID NO: 1012489 - RNA, 19 nt, Homo sapiens
  misc_RNA (1)...(19): siRNA sense strand
uggaauggauccugaacuc

SEQ ID NO: 1012490 - RNA, 19 nt, Homo sapiens
  misc_RNA (1)...(19): siRNA sense strand
gcaccaaguauagaugaga

SEQ ID NO: 1012491 - RNA, 19 nt, Homo sapiens
  misc_RNA (1)...(19): siRNA sense strand
uaaccauggugaaacuagu

SEQ ID NO: 1012492 - RNA, 19 nt, Homo sapiens
  misc_RNA (1)...(19): siRNA sense strand
ucucagggacaagauguua

SEQ ID NO: 1012493 - RNA, 19 nt, Homo sapiens
  misc_RNA (1)...(19): siRNA sense strand
uuuauuagaggaugccaua

SEQ ID NO: 1012494 - RNA, 19 nt, Homo sapiens
  misc_RNA (1)...(19): siRNA sense strand
gaccagugcccaugaaggu

SEQ ID NO: 1012495 - RNA, 19 nt, Homo sapiens
  misc_RNA (1)...(19): siRNA sense strand
cagcaaugccuguggaaca

SEQ ID NO: 1012496 - RNA, 19 nt, Homo sapiens
  misc_RNA (1)...(19): siRNA sense strand
cagaacagaagaggaagaa

SEQ ID NO: 1012497 - RNA, 19 nt, Homo sapiens
  misc_RNA (1)...(19): siRNA sense strand
gucaccaaccaguuucuua

SEQ ID NO: 1012498 - RNA, 19 nt, Homo sapiens
  misc_RNA (1)...(19): siRNA sense strand
ugaaacuagugaugaaacu

SEQ ID NO: 1012499 - RNA, 19 nt, Homo sapiens
  misc_RNA (1)...(19): siRNA sense strand
ucucuuuccuauuacagaa

SEQ ID NO: 1012500 - RNA, 19 nt, Homo sapiens
  misc_RNA (1)...(19): siRNA sense strand
uggugaaacuagugaugaa

SEQ ID NO: 1012501 - RNA, 19 nt, Homo sapiens
  misc_RNA (1)...(19): siRNA sense strand
gaggaaucugugucaauga

SEQ ID NO: 1012502 - RNA, 19 nt, Homo sapiens
  misc_RNA (1)...(19): siRNA sense strand
aagcaaacaaucagcaaug

SEQ ID NO: 1012503 - RNA, 19 nt, Homo sapiens
  misc_RNA (1)...(19): siRNA sense strand
caccaaccaguuucuuaaa

SEQ ID NO: 1012504 - RNA, 19 nt, Homo sapiens
  misc_RNA (1)...(19): siRNA sense strand
augggcaucucuaugaauu

SEQ ID NO: 1012505 - RNA, 19 nt, Homo sapiens
  misc_RNA (1)...(19): siRNA sense strand
ucaaugagcccugaagaac

SEQ ID NO: 1012506 - RNA, 19 nt, Homo sapiens
  misc_RNA (1)...(19): siRNA sense strand
gcaaacaauaaagacaaga

SEQ ID NO: 1012507 - RNA, 19 nt, Homo sapiens
  misc_RNA (1)...(19): siRNA sense strand
gucaaugagcccugaagaa

SEQ ID NO: 1012508 - RNA, 19 nt, Homo sapiens
  misc_RNA (1)...(19): siRNA sense strand
gauaccuggagaacuauga

SEQ ID NO: 1012509 - RNA, 19 nt, Homo sapiens
  misc_RNA (1)...(19): siRNA sense strand
uauuagaggaugccauaga

SEQ ID NO: 1012510 - RNA, 19 nt, Homo sapiens
  misc_RNA (1)...(19): siRNA sense strand
gaagaacgagccagauacc

SEQ ID NO: 1012511 - RNA, 19 nt, Homo sapiens
  misc_RNA (1)...(19): siRNA sense strand
ggugaaacuagugaugaaa

SEQ ID NO: 1012512 - RNA, 19 nt, Homo sapiens
  misc_RNA (1)...(19): siRNA sense strand
uaacuggcaauucguugau

SEQ ID NO: 1012513 - RNA, 19 nt, Homo sapiens
  misc_RNA (1)...(19): siRNA sense strand
gauccugaacuccuuagca

SEQ ID NO: 1012514 - RNA, 19 nt, Homo sapiens
  misc_RNA (1)...(19): siRNA sense strand
auaaagacaagaugcacuu

SEQ ID NO: 1012515 - RNA, 19 nt, Homo sapiens
  misc_RNA (1)...(19): siRNA sense strand
cagacugaggcaccaagua

SEQ ID NO: 1012516 - RNA, 19 nt, Homo sapiens
  misc_RNA (1)...(19): siRNA sense strand
agaggaugccauagaaguu

SEQ ID NO: 1012517 - RNA, 19 nt, Homo sapiens
  misc_RNA (1)...(19): siRNA sense strand
uagaggaugccauagaagu

SEQ ID NO: 1012518 - RNA, 19 nt, Homo sapiens
  misc_RNA (1)...(19): siRNA sense strand
ugauucaugcuauugcaaa

SEQ ID NO: 1012519 - RNA, 19 nt, Homo sapiens
  misc_RNA (1)...(19): siRNA sense strand
auagaaguuugcaagaagu

SEQ ID NO: 1012520 - RNA, 19 nt, Homo sapiens
  misc_RNA (1)...(19): siRNA sense strand
aaacaauuaggucuacauc

SEQ ID NO: 1012521 - RNA, 19 nt, Homo sapiens
  misc_RNA (1)...(19): siRNA sense strand
ugagaaaguagaucuucau

SEQ ID NO: 1012522 - RNA, 19 nt, Homo sapiens
  misc_RNA (1)...(19): siRNA sense strand
acaagaugcacuuugaauc

SEQ ID NO: 1012523 - RNA, 19 nt, Homo sapiens
  misc_RNA (1)...(19): siRNA sense strand
auucagaacagaagaggaa

SEQ ID NO: 1012524 - RNA, 19 nt, Homo sapiens
  misc_RNA (1)...(19): siRNA sense strand
guugauguauauggaaugg

SEQ ID NO: 1012525 - RNA, 19 nt, Homo sapiens
  misc_RNA (1)...(19): siRNA sense strand
caaguauagaugagaaagu

SEQ ID NO: 1012526 - RNA, 19 nt, Homo sapiens
  misc_RNA (1)...(19): siRNA sense strand
ugaagaacgagccagauac

SEQ ID NO: 1012527 - RNA, 19 nt, Homo sapiens
  misc_RNA (1)...(19): siRNA sense strand
cuaacuggcaauucguuga

SEQ ID NO: 1012528 - RNA, 19 nt, Homo sapiens
  misc_RNA (1)...(19): siRNA sense strand
aauaaaaucucagggacaa

SEQ ID NO: 1012529 - RNA, 19 nt, Homo sapiens
  misc_RNA (1)...(19): siRNA sense strand
agacaagaugcacuuugaa

SEQ ID NO: 1012530 - RNA, 19 nt, Homo sapiens
  misc_RNA (1)...(19): siRNA sense strand
ugaagcaaacaaucagcaa

SEQ ID NO: 1012531 - RNA, 19 nt, Homo sapiens
  misc_RNA (1)...(19): siRNA sense strand
gccauagaaguuugcaaga

SEQ ID NO: 1012532 - RNA, 19 nt, Homo sapiens
  misc_RNA (1)...(19): siRNA sense strand
cuuaaacaauuaggucuac

SEQ ID NO: 1012533 - RNA, 19 nt, Homo sapiens
  misc_RNA (1)...(19): siRNA sense strand
aauggauccugaacuccuu

SEQ ID NO: 1012534 - RNA, 19 nt, Homo sapiens
  misc_RNA (1)...(19): siRNA sense strand
gauucaugcuauugcaaac

SEQ ID NO: 1012535 - RNA, 19 nt, Homo sapiens
  misc_RNA (1)...(19): siRNA sense strand
agcaaugccuguggaacaa

SEQ ID NO: 1012536 - RNA, 19 nt, Homo sapiens
  misc_RNA (1)...(19): siRNA sense strand
caacauggcuuuccuagcu

SEQ ID NO: 1012537 - RNA, 19 nt, Homo sapiens
  misc_RNA (1)...(19): siRNA sense strand
agauggagcugaaauuaaa

SEQ ID NO: 1012538 - RNA, 19 nt, Homo sapiens
  misc_RNA (1)...(19): siRNA sense strand
gacauuagcuggcgucuac

SEQ ID NO: 1012539 - RNA, 19 nt, Homo sapiens
  misc_RNA (1)...(19): siRNA sense strand
uaccauagcuuuaagauac

SEQ ID NO: 1012540 - RNA, 19 nt, Homo sapiens
  misc_RNA (1)...(19): siRNA sense strand
ccugauggcugcagucuau

SEQ ID NO: 1012541 - RNA, 19 nt, Homo sapiens
  misc_RNA (1)...(19): siRNA sense strand
gaacaacauggcuuuccua

SEQ ID NO: 1012542 - RNA, 19 nt, Homo sapiens
  misc_RNA (1)...(19): siRNA sense strand
acacuucuguugugguuaa

SEQ ID NO: 1012543 - RNA, 19 nt, Homo sapiens
  misc_RNA (1)...(19): siRNA sense strand
gagaaacagcuucaaagga

SEQ ID NO: 1012544 - RNA, 19 nt, Homo sapiens
  misc_RNA (1)...(19): siRNA sense strand
gaaaccagcccaagcuaca

SEQ ID NO: 1012545 - RNA, 19 nt, Homo sapiens
  misc_RNA (1)...(19): siRNA sense strand
guacucuucuuguaugugu

SEQ ID NO: 1012546 - RNA, 19 nt, Homo sapiens
  misc_RNA (1)...(19): siRNA sense strand
gcuuuaagauacacaagga

SEQ ID NO: 1012547 - RNA, 19 nt, Homo sapiens
  misc_RNA (1)...(19): siRNA sense strand
gagaguuauugguguguga

SEQ ID NO: 1012548 - RNA, 19 nt, Homo sapiens
  misc_RNA (1)...(19): siRNA sense strand
guacacagacaacaucaug

SEQ ID NO: 1012549 - RNA, 19 nt, Homo sapiens
  misc_RNA (1)...(19): siRNA sense strand
caguaaugcuguuuggauu

SEQ ID NO: 1012550 - RNA, 19 nt, Homo sapiens
  misc_RNA (1)...(19): siRNA sense strand
acagauaacacucaccuuu

SEQ ID NO: 1012551 - RNA, 19 nt, Homo sapiens
  misc_RNA (1)...(19): siRNA sense strand
uauuaugucugguuuguca

SEQ ID NO: 1012552 - RNA, 19 nt, Homo sapiens
  misc_RNA (1)...(19): siRNA sense strand
guucagauacuucucuuug

SEQ ID NO: 1012553 - RNA, 19 nt, Homo sapiens
  misc_RNA (1)...(19): siRNA sense strand
cagauggagcugaaauuaa

SEQ ID NO: 1012554 - RNA, 19 nt, Homo sapiens
  misc_RNA (1)...(19): siRNA sense strand
cgcuauagcuauugcugua

SEQ ID NO: 1012555 - RNA, 19 nt, Homo sapiens
  misc_RNA (1)...(19): siRNA sense strand
cuacacuucuguugugguu

SEQ ID NO: 1012556 - RNA, 19 nt, Homo sapiens
  misc_RNA (1)...(19): siRNA sense strand
guauugugcucaggauuug

SEQ ID NO: 1012557 - RNA, 19 nt, Homo sapiens
  misc_RNA (1)...(19): siRNA sense strand
ggagaaacagcuucaaagg

SEQ ID NO: 1012558 - RNA, 19 nt, Homo sapiens
  misc_RNA (1)...(19): siRNA sense strand
cuauagcuauugcuguauu

SEQ ID NO: 1012559 - RNA, 19 nt, Homo sapiens
  misc_RNA (1)...(19): siRNA sense strand
ccucuacacuucuguugug

SEQ ID NO: 1012560 - RNA, 19 nt, Homo sapiens
  misc_RNA (1)...(19): siRNA sense strand
ggagcugaaauuaaagaaa

SEQ ID NO: 1012561 - RNA, 19 nt, Homo sapiens
  misc_RNA (1)...(19): siRNA sense strand
ugucugguuugucaucuuu

SEQ ID NO: 1012562 - RNA, 19 nt, Homo sapiens
  misc_RNA (1)...(19): siRNA sense strand
guguaucacagaaguuaua

SEQ ID NO: 1012563 - RNA, 19 nt, Homo sapiens
  misc_RNA (1)...(19): siRNA sense strand
caacaaggagaaacagcuu

SEQ ID NO: 1012564 - RNA, 19 nt, Homo sapiens
  misc_RNA (1)...(19): siRNA sense strand
cagauaacacucaccuuug

SEQ ID NO: 1012565 - RNA, 19 nt, Homo sapiens
  misc_RNA (1)...(19): siRNA sense strand
gcaggaguauauuuugaaa

SEQ ID NO: 1012566 - RNA, 19 nt, Homo sapiens
  misc_RNA (1)...(19): siRNA sense strand
caaaggagagaguuauugg

SEQ ID NO: 1012567 - RNA, 19 nt, Homo sapiens
  misc_RNA (1)...(19): siRNA sense strand
ccuggguacucuucuugua

SEQ ID NO: 1012568 - RNA, 19 nt, Homo sapiens
  misc_RNA (1)...(19): siRNA sense strand
cagacaacaucaugaaagg

SEQ ID NO: 1012569 - RNA, 19 nt, Homo sapiens
  misc_RNA (1)...(19): siRNA sense strand
acacagacaacaucaugaa

SEQ ID NO: 1012570 - RNA, 19 nt, Homo sapiens
  misc_RNA (1)...(19): siRNA sense strand
cagggauuauugugacauu

SEQ ID NO: 1012571 - RNA, 19 nt, Homo sapiens
  misc_RNA (1)...(19): siRNA sense strand
cuucuguugugguuaagua

SEQ ID NO: 1012572 - RNA, 19 nt, Homo sapiens
  misc_RNA (1)...(19): siRNA sense strand
caaauuacaguggguuuca

SEQ ID NO: 1012573 - RNA, 19 nt, Homo sapiens
  misc_RNA (1)...(19): siRNA sense strand
cacaaggacaucagacaaa

SEQ ID NO: 1012574 - RNA, 19 nt, Homo sapiens
  misc_RNA (1)...(19): siRNA sense strand
uuuccuagcucuuagcaau

SEQ ID NO: 1012575 - RNA, 19 nt, Homo sapiens
  misc_RNA (1)...(19): siRNA sense strand
gacaagacacuacauccau

SEQ ID NO: 1012576 - RNA, 19 nt, Homo sapiens
  misc_RNA (1)...(19): siRNA sense strand
guuuggcgcuauagcuauu

SEQ ID NO: 1012577 - RNA, 19 nt, Homo sapiens
  misc_RNA (1)...(19): siRNA sense strand
uuacaguggguuucaguuu

SEQ ID NO: 1012578 - RNA, 19 nt, Homo sapiens
  misc_RNA (1)...(19): siRNA sense strand
ggacaucagacaaagaacu

SEQ ID NO: 1012579 - RNA, 19 nt, Homo sapiens
  misc_RNA (1)...(19): siRNA sense strand
gauuugcaggaguauauuu

SEQ ID NO: 1012580 - RNA, 19 nt, Homo sapiens
  misc_RNA (1)...(19): siRNA sense strand
ucaaaggagagaguuauug

SEQ ID NO: 1012581 - RNA, 19 nt, Homo sapiens
  misc_RNA (1)...(19): siRNA sense strand
gaguucagauacuucucuu

SEQ ID NO: 1012582 - RNA, 19 nt, Homo sapiens
  misc_RNA (1)...(19): siRNA sense strand
gauuccguguacugcuuua

SEQ ID NO: 1012583 - RNA, 19 nt, Homo sapiens
  misc_RNA (1)...(19): siRNA sense strand
cagcggccauuguccuuuc

SEQ ID NO: 1012584 - RNA, 19 nt, Homo sapiens
  misc_RNA (1)...(19): siRNA sense strand
guuaagugugccaucguua

SEQ ID NO: 1012585 - RNA, 19 nt, Homo sapiens
  misc_RNA (1)...(19): siRNA sense strand
gcaaauuacaguggguuuc

SEQ ID NO: 1012586 - RNA, 19 nt, Homo sapiens
  misc_RNA (1)...(19): siRNA sense strand
acaaggacaucagacaaag

SEQ ID NO: 1012587 - RNA, 19 nt, Homo sapiens
  misc_RNA (1)...(19): siRNA sense strand
ugaccuaccaguugaagau

SEQ ID NO: 1012588 - RNA, 19 nt, Homo sapiens
  misc_RNA (1)...(19): siRNA sense strand
uaaguacacagacaacauc

SEQ ID NO: 1012589 - RNA, 19 nt, Homo sapiens
  misc_RNA (1)...(19): siRNA sense strand
uguauugugcucaggauuu

SEQ ID NO: 1012590 - RNA, 19 nt, Homo sapiens
  misc_RNA (1)...(19): siRNA sense strand
caaaaguggugguggaaca

SEQ ID NO: 1012591 - RNA, 19 nt, Homo sapiens
  misc_RNA (1)...(19): siRNA sense strand
ggaguuacgcuuguacagu

SEQ ID NO: 1012592 - RNA, 19 nt, Homo sapiens
  misc_RNA (1)...(19): siRNA sense strand
uggguacucuucuuguaug

SEQ ID NO: 1012593 - RNA, 19 nt, Homo sapiens
  misc_RNA (1)...(19): siRNA sense strand
agauaacacucaccuuugc

SEQ ID NO: 1012594 - RNA, 19 nt, Homo sapiens
  misc_RNA (1)...(19): siRNA sense strand
ggauuacagauaacacuca

SEQ ID NO: 1012595 - RNA, 19 nt, Homo sapiens
  misc_RNA (1)...(19): siRNA sense strand
uauagcuauugcuguauug

SEQ ID NO: 1012596 - RNA, 19 nt, Homo sapiens
  misc_RNA (1)...(19): siRNA sense strand
aagauuccguguacugcuu

SEQ ID NO: 1012597 - RNA, 19 nt, Homo sapiens
  misc_RNA (1)...(19): siRNA sense strand
aaggacaucagacaaagaa

SEQ ID NO: 1012598 - RNA, 19 nt, Homo sapiens
  misc_RNA (1)...(19): siRNA sense strand
gugguuaaguacacagaca

SEQ ID NO: 1012599 - RNA, 19 nt, Homo sapiens
  misc_RNA (1)...(19): siRNA sense strand
gggauuauugugacauuag

SEQ ID NO: 1012600 - RNA, 19 nt, Homo sapiens
  misc_RNA (1)...(19): siRNA sense strand
caucagacaaagaacucua

SEQ ID NO: 1012601 - RNA, 19 nt, Homo sapiens
  misc_RNA (1)...(19): siRNA sense strand
cucaggauuugcaggagua

SEQ ID NO: 1012602 - RNA, 19 nt, Homo sapiens
  misc_RNA (1)...(19): siRNA sense strand
ggguuuggcgcuauagcua

SEQ ID NO: 1012603 - RNA, 19 nt, Homo sapiens
  misc_RNA (1)...(19): siRNA sense strand
gugcuggaguuacgcuugu

SEQ ID NO: 1012604 - RNA, 19 nt, Homo sapiens
  misc_RNA (1)...(19): siRNA sense strand
uaaagaguucagauacuuc

SEQ ID NO: 1012605 - RNA, 19 nt, Homo sapiens
  misc_RNA (1)...(19): siRNA sense strand
caaggacaucagacaaaga

SEQ ID NO: 1012606 - RNA, 19 nt, Homo sapiens
  misc_RNA (1)...(19): siRNA sense strand
acacaaggacaucagacaa

SEQ ID NO: 1012607 - RNA, 19 nt, Homo sapiens
  misc_RNA (1)...(19): siRNA sense strand
ggauuacccagacaagaca

SEQ ID NO: 1012608 - RNA, 19 nt, Homo sapiens
  misc_RNA (1)...(19): siRNA sense strand
ucaguaaugcuguuuggau

SEQ ID NO: 1012609 - RNA, 19 nt, Homo sapiens
  misc_RNA (1)...(19): siRNA sense strand
gauacacaaggacaucaga

SEQ ID NO: 1012610 - RNA, 19 nt, Homo sapiens
  misc_RNA (1)...(19): siRNA sense strand
guacugcuuuaugcacugu

SEQ ID NO: 1012611 - RNA, 19 nt, Homo sapiens
  misc_RNA (1)...(19): siRNA sense strand
aaggagaaacagcuucaaa

SEQ ID NO: 1012612 - RNA, 19 nt, Homo sapiens
  misc_RNA (1)...(19): siRNA sense strand
uuugucaucuuucuugcaa

SEQ ID NO: 1012613 - RNA, 19 nt, Homo sapiens
  misc_RNA (1)...(19): siRNA sense strand
ugucaucuuucuugcaagu

SEQ ID NO: 1012614 - RNA, 19 nt, Homo sapiens
  misc_RNA (1)...(19): siRNA sense strand
guaucuaucagggauuauu

SEQ ID NO: 1012615 - RNA, 19 nt, Homo sapiens
  misc_RNA (1)...(19): siRNA sense strand
gcuucaaaggagagaguua

SEQ ID NO: 1012616 - RNA, 19 nt, Homo sapiens
  misc_RNA (1)...(19): siRNA sense strand
guugguggccucuacacuu

SEQ ID NO: 1012617 - RNA, 19 nt, Homo sapiens
  misc_RNA (1)...(19): siRNA sense strand
ggacacucagcaaauuaca

SEQ ID NO: 1012618 - RNA, 19 nt, Homo sapiens
  misc_RNA (1)...(19): siRNA sense strand
caucuuucuugcaaguguu

SEQ ID NO: 1012619 - RNA, 19 nt, Homo sapiens
  misc_RNA (1)...(19): siRNA sense strand
cuggguagauucaaagcau

SEQ ID NO: 1012620 - RNA, 19 nt, Homo sapiens
  misc_RNA (1)...(19): siRNA sense strand
gguagucuggguagauuca

SEQ ID NO: 1012621 - RNA, 19 nt, Homo sapiens
  misc_RNA (1)...(19): siRNA sense strand
cuaaagaaacugguagucu

SEQ ID NO: 1012622 - RNA, 19 nt, Homo sapiens
  misc_RNA (1)...(19): siRNA sense strand
gcuguauugugcucaggau

SEQ ID NO: 1012623 - RNA, 19 nt, Homo sapiens
  misc_RNA (1)...(19): siRNA sense strand
uaagauacacaaggacauc

SEQ ID NO: 1012624 - RNA, 19 nt, Homo sapiens
  misc_RNA (1)...(19): siRNA sense strand
uagucuggguagauucaaa

SEQ ID NO: 1012625 - RNA, 19 nt, Homo sapiens
  misc_RNA (1)...(19): siRNA sense strand
gcagcggccauuguccuuu

SEQ ID NO: 1012626 - RNA, 19 nt, Homo sapiens
  misc_RNA (1)...(19): siRNA sense strand
ucaucuuucuugcaagugu

SEQ ID NO: 1012627 - RNA, 19 nt, Homo sapiens
  misc_RNA (1)...(19): siRNA sense strand
ggauuauugugacauuagc

SEQ ID NO: 1012628 - RNA, 19 nt, Homo sapiens
  misc_RNA (1)...(19): siRNA sense strand
agggauuauugugacauua

SEQ ID NO: 1012629 - RNA, 19 nt, Homo sapiens
  misc_RNA (1)...(19): siRNA sense strand
auguaucuaucagggauua

SEQ ID NO: 1012630 - RNA, 19 nt, Homo sapiens
  misc_RNA (1)...(19): siRNA sense strand
ggauuugcaggaguauauu

SEQ ID NO: 1012631 - RNA, 19 nt, Homo sapiens
  misc_RNA (1)...(19): siRNA sense strand
uaucuaucagggauuauug

SEQ ID NO: 1012632 - RNA, 19 nt, Homo sapiens
  misc_RNA (1)...(19): siRNA sense strand
cugguagucuggguagauu

SEQ ID NO: 1012633 - RNA, 19 nt, Homo sapiens
  misc_RNA (1)...(19): siRNA sense strand
cauuguccuuuccaccauu

SEQ ID NO: 1012634 - RNA, 19 nt, Homo sapiens
  misc_RNA (1)...(19): siRNA sense strand
acagacaacaucaugaaag

SEQ ID NO: 1012635 - RNA, 19 nt, Homo sapiens
  misc_RNA (1)...(19): siRNA sense strand
uagcuggcgucuacuuguc

SEQ ID NO: 1012636 - RNA, 19 nt, Homo sapiens
  misc_RNA (1)...(19): siRNA sense strand
gcgaagagcugcacuguga

SEQ ID NO: 1012637 - RNA, 19 nt, Homo sapiens
  misc_RNA (1)...(19): siRNA sense strand
cuacaguguuugagaauua

SEQ ID NO: 1012638 - RNA, 19 nt, Homo sapiens
  misc_RNA (1)...(19): siRNA sense strand
gaaauuauccagcaaaucu

SEQ ID NO: 1012639 - RNA, 19 nt, Homo sapiens
  misc_RNA (1)...(19): siRNA sense strand
gagaagagccagccagaaa

SEQ ID NO: 1012640 - RNA, 19 nt, Homo sapiens
  misc_RNA (1)...(19): siRNA sense strand
gaacgugaaaugcaagaua

SEQ ID NO: 1012641 - RNA, 19 nt, Homo sapiens
  misc_RNA (1)...(19): siRNA sense strand
gggcaaauauggccaaaca

SEQ ID NO: 1012642 - RNA, 19 nt, Homo sapiens
  misc_RNA (1)...(19): siRNA sense strand
uaguagagcucuccaauca

SEQ ID NO: 1012643 - RNA, 19 nt, Homo sapiens
  misc_RNA (1)...(19): siRNA sense strand
gcaaauauggccaaacaga

SEQ ID NO: 1012644 - RNA, 19 nt, Homo sapiens
  misc_RNA (1)...(19): siRNA sense strand
aaacugcgcugcuccaugu

SEQ ID NO: 1012645 - RNA, 19 nt, Homo sapiens
  misc_RNA (1)...(19): siRNA sense strand
gaaaucgacacacaaagaa

SEQ ID NO: 1012646 - RNA, 19 nt, Homo sapiens
  misc_RNA (1)...(19): siRNA sense strand
gaagagccagccagaaauu

SEQ ID NO: 1012647 - RNA, 19 nt, Homo sapiens
  misc_RNA (1)...(19): siRNA sense strand
guagagcucuccaaucaca

SEQ ID NO: 1012648 - RNA, 19 nt, Homo sapiens
  misc_RNA (1)...(19): siRNA sense strand
gagcugcacugugauguga

SEQ ID NO: 1012649 - RNA, 19 nt, Homo sapiens
  misc_RNA (1)...(19): siRNA sense strand
cagcaaaucuaucauggau

SEQ ID NO: 1012650 - RNA, 19 nt, Homo sapiens
  misc_RNA (1)...(19): siRNA sense strand
ccacaaagcggauuucaca

SEQ ID NO: 1012651 - RNA, 19 nt, Homo sapiens
  misc_RNA (1)...(19): siRNA sense strand
gaaaauagcgucagagaca

SEQ ID NO: 1012652 - RNA, 19 nt, Homo sapiens
  misc_RNA (1)...(19): siRNA sense strand
uaucgaaugcucagcuuua

SEQ ID NO: 1012653 - RNA, 19 nt, Homo sapiens
  misc_RNA (1)...(19): siRNA sense strand
agaauuacacggccaguuu

SEQ ID NO: 1012654 - RNA, 19 nt, Homo sapiens
  misc_RNA (1)...(19): siRNA sense strand
ugaaaucgacacacaaaga

SEQ ID NO: 1012655 - RNA, 19 nt, Homo sapiens
  misc_RNA (1)...(19): siRNA sense strand
agaauuacguuccuacagu

SEQ ID NO: 1012656 - RNA, 19 nt, Homo sapiens
  misc_RNA (1)...(19): siRNA sense strand
caaagcggauuucacacau

SEQ ID NO: 1012657 - RNA, 19 nt, Homo sapiens
  misc_RNA (1)...(19): siRNA sense strand
cagagacccuggacagugu

SEQ ID NO: 1012658 - RNA, 19 nt, Homo sapiens
  misc_RNA (1)...(19): siRNA sense strand
ggcaguugcuacggacuua

SEQ ID NO: 1012659 - RNA, 19 nt, Homo sapiens
  misc_RNA (1)...(19): siRNA sense strand
aaggugaaauccaggaauu

SEQ ID NO: 1012660 - RNA, 19 nt, Homo sapiens
  misc_RNA (1)...(19): siRNA sense strand
cagaaauuauccagcaaau

SEQ ID NO: 1012661 - RNA, 19 nt, Homo sapiens
  misc_RNA (1)...(19): siRNA sense strand
gaagagcugcacugugaug

SEQ ID NO: 1012662 - RNA, 19 nt, Homo sapiens
  misc_RNA (1)...(19): siRNA sense strand
aaauauggccaaacagauu

SEQ ID NO: 1012663 - RNA, 19 nt, Homo sapiens
  misc_RNA (1)...(19): siRNA sense strand
gcggacagauguuaguaca

SEQ ID NO: 1012664 - RNA, 19 nt, Homo sapiens
  misc_RNA (1)...(19): siRNA sense strand
uuacguuccuacaguguuu

SEQ ID NO: 1012665 - RNA, 19 nt, Homo sapiens
  misc_RNA (1)...(19): siRNA sense strand
agacgccaguguccuauga

SEQ ID NO: 1012666 - RNA, 19 nt, Homo sapiens
  misc_RNA (1)...(19): siRNA sense strand
gauuggagcagcuacuuau

SEQ ID NO: 1012667 - RNA, 19 nt, Homo sapiens
  misc_RNA (1)...(19): siRNA sense strand
acacuucggguucuccuua

SEQ ID NO: 1012668 - RNA, 19 nt, Homo sapiens
  misc_RNA (1)...(19): siRNA sense strand
aaucgacacacaaagaaua

SEQ ID NO: 1012669 - RNA, 19 nt, Homo sapiens
  misc_RNA (1)...(19): siRNA sense strand
gaaaggugaaauccaggaa

SEQ ID NO: 1012670 - RNA, 19 nt, Homo sapiens
  misc_RNA (1)...(19): siRNA sense strand
gaaaugcaagauaguugug

SEQ ID NO: 1012671 - RNA, 19 nt, Homo sapiens
  misc_RNA (1)...(19): siRNA sense strand
gaaaggacaaagcgaagag

SEQ ID NO: 1012672 - RNA, 19 nt, Homo sapiens
  misc_RNA (1)...(19): siRNA sense strand
gcuacggacuuacgaaagg

SEQ ID NO: 1012673 - RNA, 19 nt, Homo sapiens
  misc_RNA (1)...(19): siRNA sense strand
cggaugcugugcugauuug

SEQ ID NO: 1012674 - RNA, 19 nt, Homo sapiens
  misc_RNA (1)...(19): siRNA sense strand
ggagacagucaguguggaa

SEQ ID NO: 1012675 - RNA, 19 nt, Homo sapiens
  misc_RNA (1)...(19): siRNA sense strand
gcagcuacuuauaucgaau

SEQ ID NO: 1012676 - RNA, 19 nt, Homo sapiens
  misc_RNA (1)...(19): siRNA sense strand
gagcagcuacuuauaucga

SEQ ID NO: 1012677 - RNA, 19 nt, Homo sapiens
  misc_RNA (1)...(19): siRNA sense strand
ucauggauccuaaucagaa

SEQ ID NO: 1012678 - RNA, 19 nt, Homo sapiens
  misc_RNA (1)...(19): siRNA sense strand
ggacuuacgaaaggacaaa

SEQ ID NO: 1012679 - RNA, 19 nt, Homo sapiens
  misc_RNA (1)...(19): siRNA sense strand
acacaaagaauagaguuga

SEQ ID NO: 1012680 - RNA, 19 nt, Homo sapiens
  misc_RNA (1)...(19): siRNA sense strand
cuaaucagaacgugaaaug

SEQ ID NO: 1012681 - RNA, 19 nt, Homo sapiens
  misc_RNA (1)...(19): siRNA sense strand
caaauauggccaaacagau

SEQ ID NO: 1012682 - RNA, 19 nt, Homo sapiens
  misc_RNA (1)...(19): siRNA sense strand
uaucauggauccuaaucag

SEQ ID NO: 1012683 - RNA, 19 nt, Homo sapiens
  misc_RNA (1)...(19): siRNA sense strand
aaucuaucauggauccuaa

SEQ ID NO: 1012684 - RNA, 19 nt, Homo sapiens
  misc_RNA (1)...(19): siRNA sense strand
gugcugauuugcuuugaca

SEQ ID NO: 1012685 - RNA, 19 nt, Homo sapiens
  misc_RNA (1)...(19): siRNA sense strand
ccagaaauuauccagcaaa

SEQ ID NO: 1012686 - RNA, 19 nt, Homo sapiens
  misc_RNA (1)...(19): siRNA sense strand
uggagcagcuacuuauauc

SEQ ID NO: 1012687 - RNA, 19 nt, Homo sapiens
  misc_RNA (1)...(19): siRNA sense strand
cggguucuccuuacuauga

SEQ ID NO: 1012688 - RNA, 19 nt, Homo sapiens
  misc_RNA (1)...(19): siRNA sense strand
gugaaaugcaagauaguug

SEQ ID NO: 1012689 - RNA, 19 nt, Homo sapiens
  misc_RNA (1)...(19): siRNA sense strand
caccuuggcauguguaaau

SEQ ID NO: 1012690 - RNA, 19 nt, Homo sapiens
  misc_RNA (1)...(19): siRNA sense strand
gccagaaauuauccagcaa

SEQ ID NO: 1012691 - RNA, 19 nt, Homo sapiens
  misc_RNA (1)...(19): siRNA sense strand
gauuugcuuugacaucagu

SEQ ID NO: 1012692 - RNA, 19 nt, Homo sapiens
  misc_RNA (1)...(19): siRNA sense strand
ggcagacgccaguguccua

SEQ ID NO: 1012693 - RNA, 19 nt, Homo sapiens
  misc_RNA (1)...(19): siRNA sense strand
ucacagagagccacaaagc

SEQ ID NO: 1012694 - RNA, 19 nt, Homo sapiens
  misc_RNA (1)...(19): siRNA sense strand
ugaaaugcaagauaguugu

SEQ ID NO: 1012695 - RNA, 19 nt, Homo sapiens
  misc_RNA (1)...(19): siRNA sense strand
aacgugaaaugcaagauag

SEQ ID NO: 1012696 - RNA, 19 nt, Homo sapiens
  misc_RNA (1)...(19): siRNA sense strand
uauaucgaaugcucagcuu

SEQ ID NO: 1012697 - RNA, 19 nt, Homo sapiens
  misc_RNA (1)...(19): siRNA sense strand
gagaauuacguuccuacag

SEQ ID NO: 1012698 - RNA, 19 nt, Homo sapiens
  misc_RNA (1)...(19): siRNA sense strand
aaagcggauuucacacaug

SEQ ID NO: 1012699 - RNA, 19 nt, Homo sapiens
  misc_RNA (1)...(19): siRNA sense strand
acaaagcggauuucacaca

SEQ ID NO: 1012700 - RNA, 19 nt, Homo sapiens
  misc_RNA (1)...(19): siRNA sense strand
ggugggagacagucagugu

SEQ ID NO: 1012701 - RNA, 19 nt, Homo sapiens
  misc_RNA (1)...(19): siRNA sense strand
gcggaacaaaucacagaga

SEQ ID NO: 1012702 - RNA, 19 nt, Homo sapiens
  misc_RNA (1)...(19): siRNA sense strand
aaacagauuggagcagcua

SEQ ID NO: 1012703 - RNA, 19 nt, Homo sapiens
  misc_RNA (1)...(19): siRNA sense strand
gagccagccagaaauuauc

SEQ ID NO: 1012704 - RNA, 19 nt, Homo sapiens
  misc_RNA (1)...(19): siRNA sense strand
aaucagaacgugaaaugca

SEQ ID NO: 1012705 - RNA, 19 nt, Homo sapiens
  misc_RNA (1)...(19): siRNA sense strand
gagaauuacacggccaguu

SEQ ID NO: 1012706 - RNA, 19 nt, Homo sapiens
  misc_RNA (1)...(19): siRNA sense strand
ccuacaguguuugagaauu

SEQ ID NO: 1012707 - RNA, 19 nt, Homo sapiens
  misc_RNA (1)...(19): siRNA sense strand
gaauuacacggccaguuuu

SEQ ID NO: 1012708 - RNA, 19 nt, Homo sapiens
  misc_RNA (1)...(19): siRNA sense strand
cgaaaggacaaagcgaaga

SEQ ID NO: 1012709 - RNA, 19 nt, Homo sapiens
  misc_RNA (1)...(19): siRNA sense strand
aaauagcgucagagacauu

SEQ ID NO: 1012710 - RNA, 19 nt, Homo sapiens
  misc_RNA (1)...(19): siRNA sense strand
gacaucaguagaccagaga

SEQ ID NO: 1012711 - RNA, 19 nt, Homo sapiens
  misc_RNA (1)...(19): siRNA sense strand
acacacaaagaauagaguu

SEQ ID NO: 1012712 - RNA, 19 nt, Homo sapiens
  misc_RNA (1)...(19): siRNA sense strand
cuacggacuuacgaaagga

SEQ ID NO: 1012713 - RNA, 19 nt, Homo sapiens
  misc_RNA (1)...(19): siRNA sense strand
aagagccagccagaaauua

SEQ ID NO: 1012714 - RNA, 19 nt, Homo sapiens
  misc_RNA (1)...(19): siRNA sense strand
aaucacagagagccacaaa

SEQ ID NO: 1012715 - RNA, 19 nt, Homo sapiens
  misc_RNA (1)...(19): siRNA sense strand
agauuggagcagcuacuua

SEQ ID NO: 1012716 - RNA, 19 nt, Homo sapiens
  misc_RNA (1)...(19): siRNA sense strand
cacaaagaauagaguugag

SEQ ID NO: 1012717 - RNA, 19 nt, Homo sapiens
  misc_RNA (1)...(19): siRNA sense strand
agaagagccagccagaaau

SEQ ID NO: 1012718 - RNA, 19 nt, Homo sapiens
  misc_RNA (1)...(19): siRNA sense strand
cgaaugcucagcuuuacag

SEQ ID NO: 1012719 - RNA, 19 nt, Homo sapiens
  misc_RNA (1)...(19): siRNA sense strand
gcagacgccaguguccuau

SEQ ID NO: 1012720 - RNA, 19 nt, Homo sapiens
  misc_RNA (1)...(19): siRNA sense strand
gagacagucaguguggaaa

SEQ ID NO: 1012721 - RNA, 19 nt, Homo sapiens
  misc_RNA (1)...(19): siRNA sense strand
agagccagccagaaauuau

SEQ ID NO: 1012722 - RNA, 19 nt, Homo sapiens
  misc_RNA (1)...(19): siRNA sense strand
aaaguggaaaggugaaauc

SEQ ID NO: 1012723 - RNA, 19 nt, Homo sapiens
  misc_RNA (1)...(19): siRNA sense strand
aagcggaacaaaucacaga

SEQ ID NO: 1012724 - RNA, 19 nt, Homo sapiens
  misc_RNA (1)...(19): siRNA sense strand
gcuuuacagucggaaaaua

SEQ ID NO: 1012725 - RNA, 19 nt, Homo sapiens
  misc_RNA (1)...(19): siRNA sense strand
gaggguuucucuuagacua

SEQ ID NO: 1012726 - RNA, 19 nt, Homo sapiens
  misc_RNA (1)...(19): siRNA sense strand
cuuggaggcuggucccuuu

SEQ ID NO: 1012727 - RNA, 19 nt, Homo sapiens
  misc_RNA (1)...(19): siRNA sense strand
ccucuuccuuucaagcuuu

SEQ ID NO: 1012728 - RNA, 19 nt, Homo sapiens
  misc_RNA (1)...(19): siRNA sense strand
gggcggaaguucaaauagc

SEQ ID NO: 1012729 - RNA, 19 nt, Homo sapiens
  misc_RNA (1)...(19): siRNA sense strand
gaacccgagcugaguguca

SEQ ID NO: 1012730 - RNA, 19 nt, Homo sapiens
  misc_RNA (1)...(19): siRNA sense strand
gacgcugucuccucuccuu

SEQ ID NO: 1012731 - RNA, 19 nt, Homo sapiens
  misc_RNA (1)...(19): siRNA sense strand
cgcagcgucuccuauucua

SEQ ID NO: 1012732 - RNA, 19 nt, Homo sapiens
  misc_RNA (1)...(19): siRNA sense strand
ggguuucucuuagacuaug

SEQ ID NO: 1012733 - RNA, 19 nt, Homo sapiens
  misc_RNA (1)...(19): siRNA sense strand
ccuggucccucuuccuuuc

SEQ ID NO: 1012734 - RNA, 19 nt, Homo sapiens
  misc_RNA (1)...(19): siRNA sense strand
gcugccacuuggaggguuu

SEQ ID NO: 1012735 - RNA, 19 nt, Homo sapiens
  misc_RNA (1)...(19): siRNA sense strand
acuuggaggguuucucuua

SEQ ID NO: 1012736 - RNA, 19 nt, Homo sapiens
  misc_RNA (1)...(19): siRNA sense strand
ggcggaaguucaaauagcu

SEQ ID NO: 1012737 - RNA, 19 nt, Homo sapiens
  misc_RNA (1)...(19): siRNA sense strand
uuggaggguuucucuuaga

SEQ ID NO: 1012738 - RNA, 19 nt, Homo sapiens
  misc_RNA (1)...(19): siRNA sense strand
gcgcagcgucuccuauucu

SEQ ID NO: 1012739 - RNA, 19 nt, Homo sapiens
  misc_RNA (1)...(19): siRNA sense strand
ccacuuggaggguuucucu

SEQ ID NO: 1012740 - RNA, 19 nt, Homo sapiens
  misc_RNA (1)...(19): siRNA sense strand
ggcgcagcgucuccuauuc

SEQ ID NO: 1012741 - RNA, 19 nt, Homo sapiens
  misc_RNA (1)...(19): siRNA sense strand
caaauagcugccacuugga

SEQ ID NO: 1012742 - RNA, 19 nt, Homo sapiens
  misc_RNA (1)...(19): siRNA sense strand
gggcagaucuggcuggaua

SEQ ID NO: 1012743 - RNA, 19 nt, Homo sapiens
  misc_RNA (1)...(19): siRNA sense strand
gaaguuuacuacaguggua

SEQ ID NO: 1012744 - RNA, 19 nt, Homo sapiens
  misc_RNA (1)...(19): siRNA sense strand
uaaaggagaucaaggacaa

SEQ ID NO: 1012745 - RNA, 19 nt, Homo sapiens
  misc_RNA (1)...(19): siRNA sense strand
guagacaacuucacucaga

SEQ ID NO: 1012746 - RNA, 19 nt, Homo sapiens
  misc_RNA (1)...(19): siRNA sense strand
gaagggcccuguacaaagu

SEQ ID NO: 1012747 - RNA, 19 nt, Homo sapiens
  misc_RNA (1)...(19): siRNA sense strand
ggagauguauuuccucaau

SEQ ID NO: 1012748 - RNA, 19 nt, Homo sapiens
  misc_RNA (1)...(19): siRNA sense strand
ccagggauguucagaauca

SEQ ID NO: 1012749 - RNA, 19 nt, Homo sapiens
  misc_RNA (1)...(19): siRNA sense strand
cgaaaucaauguuccaaag

SEQ ID NO: 1012750 - RNA, 19 nt, Homo sapiens
  misc_RNA (1)...(19): siRNA sense strand
gacgagcucuugagugaga

SEQ ID NO: 1012751 - RNA, 19 nt, Homo sapiens
  misc_RNA (1)...(19): siRNA sense strand
ggacacaggacuucaagga

SEQ ID NO: 1012752 - RNA, 19 nt, Homo sapiens
  misc_RNA (1)...(19): siRNA sense strand
caauggagccuuucgaaau

SEQ ID NO: 1012753 - RNA, 19 nt, Homo sapiens
  misc_RNA (1)...(19): siRNA sense strand
gcaaaauucugaugccauu

SEQ ID NO: 1012754 - RNA, 19 nt, Homo sapiens
  misc_RNA (1)...(19): siRNA sense strand
gcaauggagccuuucgaaa

SEQ ID NO: 1012755 - RNA, 19 nt, Homo sapiens
  misc_RNA (1)...(19): siRNA sense strand
gaacuaagggagagaaagg

SEQ ID NO: 1012756 - RNA, 19 nt, Homo sapiens
  misc_RNA (1)...(19): siRNA sense strand
ugaaagaggugaaaacuca

SEQ ID NO: 1012757 - RNA, 19 nt, Homo sapiens
  misc_RNA (1)...(19): siRNA sense strand
aggacgagcucuugaguga

SEQ ID NO: 1012758 - RNA, 19 nt, Homo sapiens
  misc_RNA (1)...(19): siRNA sense strand
agauguauuuccucaauga

SEQ ID NO: 1012759 - RNA, 19 nt, Homo sapiens
  misc_RNA (1)...(19): siRNA sense strand
gggacgagauggagcaaca

SEQ ID NO: 1012760 - RNA, 19 nt, Homo sapiens
  misc_RNA (1)...(19): siRNA sense strand
ggaagggcccuguacaaag

SEQ ID NO: 1012761 - RNA, 19 nt, Homo sapiens
  misc_RNA (1)...(19): siRNA sense strand
gagauguauuuccucaaug

SEQ ID NO: 1012762 - RNA, 19 nt, Homo sapiens
  misc_RNA (1)...(19): siRNA sense strand
gggcugaaguuuacuacag

SEQ ID NO: 1012763 - RNA, 19 nt, Homo sapiens
  misc_RNA (1)...(19): siRNA sense strand
aaauugcaauggagccuuu

SEQ ID NO: 1012764 - RNA, 19 nt, Homo sapiens
  misc_RNA (1)...(19): siRNA sense strand
agaucuggcuggauaaugu

SEQ ID NO: 1012765 - RNA, 19 nt, Homo sapiens
  misc_RNA (1)...(19): siRNA sense strand
uagcugugguggucaucua

SEQ ID NO: 1012766 - RNA, 19 nt, Homo sapiens
  misc_RNA (1)...(19): siRNA sense strand
aauggagccuuucgaaauc

SEQ ID NO: 1012767 - RNA, 19 nt, Homo sapiens
  misc_RNA (1)...(19): siRNA sense strand
caugcuggguuacuccaaa

SEQ ID NO: 1012768 - RNA, 19 nt, Homo sapiens
  misc_RNA (1)...(19): siRNA sense strand
ggagagaagggcagcaaag

SEQ ID NO: 1012769 - RNA, 19 nt, Homo sapiens
  misc_RNA (1)...(19): siRNA sense strand
gaaauggggugaacuucuc

SEQ ID NO: 1012770 - RNA, 19 nt, Homo sapiens
  misc_RNA (1)...(19): siRNA sense strand
uagacaacuucacucagaa

SEQ ID NO: 1012771 - RNA, 19 nt, Homo sapiens
  misc_RNA (1)...(19): siRNA sense strand
gaugacgaguggcaaaauu

SEQ ID NO: 1012772 - RNA, 19 nt, Homo sapiens
  misc_RNA (1)...(19): siRNA sense strand
ccaaagcccaagaggagaa

SEQ ID NO: 1012773 - RNA, 19 nt, Homo sapiens
  misc_RNA (1)...(19): siRNA sense strand
ccaaaggaagggcccugua

SEQ ID NO: 1012774 - RNA, 19 nt, Homo sapiens
  misc_RNA (1)...(19): siRNA sense strand
uggacaagcuggccagaag

SEQ ID NO: 1012775 - RNA, 19 nt, Homo sapiens
  misc_RNA (1)...(19): siRNA sense strand
gggaccaccugcugagaag

SEQ ID NO: 1012776 - RNA, 19 nt, Homo sapiens
  misc_RNA (1)...(19): siRNA sense strand
cuguggagcugcaccaaga

SEQ ID NO: 1012777 - RNA, 19 nt, Homo sapiens
  misc_RNA (1)...(19): siRNA sense strand
ggagcugcaccaagaauag

SEQ ID NO: 1012778 - RNA, 19 nt, Homo sapiens
  misc_RNA (1)...(19): siRNA sense strand
cgucagccaugagcacuug

SEQ ID NO: 1012779 - RNA, 19 nt, Homo sapiens
  misc_RNA (1)...(19): siRNA sense strand
gcuggauaauguucagugu

SEQ ID NO: 1012780 - RNA, 19 nt, Homo sapiens
  misc_RNA (1)...(19): siRNA sense strand
ucaaggacagcaaggaaga

SEQ ID NO: 1012781 - RNA, 19 nt, Homo sapiens
  misc_RNA (1)...(19): siRNA sense strand
gaaaucaauguuccaaagc

SEQ ID NO: 1012782 - RNA, 19 nt, Homo sapiens
  misc_RNA (1)...(19): siRNA sense strand
ggagugaaaggaucuucug

SEQ ID NO: 1012783 - RNA, 19 nt, Homo sapiens
  misc_RNA (1)...(19): siRNA sense strand
aaaggagaaucaggaguuc

SEQ ID NO: 1012784 - RNA, 19 nt, Homo sapiens
  misc_RNA (1)...(19): siRNA sense strand
cagaaucaaaggugaacaa

SEQ ID NO: 1012785 - RNA, 19 nt, Homo sapiens
  misc_RNA (1)...(19): siRNA sense strand
caaaggaagggcccuguac

SEQ ID NO: 1012786 - RNA, 19 nt, Homo sapiens
  misc_RNA (1)...(19): siRNA sense strand
gcaaggaguaaagggagaa

SEQ ID NO: 1012787 - RNA, 19 nt, Homo sapiens
  misc_RNA (1)...(19): siRNA sense strand
gccacaggccugaaaggaa

SEQ ID NO: 1012788 - RNA, 19 nt, Homo sapiens
  misc_RNA (1)...(19): siRNA sense strand
ggaggacgagcucuugagu

SEQ ID NO: 1012789 - RNA, 19 nt, Homo sapiens
  misc_RNA (1)...(19): siRNA sense strand
acccagggauguucagaau

SEQ ID NO: 1012790 - RNA, 19 nt, Homo sapiens
  misc_RNA (1)...(19): siRNA sense strand
ggcugaaguuuacuacagu

SEQ ID NO: 1012791 - RNA, 19 nt, Homo sapiens
  misc_RNA (1)...(19): siRNA sense strand
gaccagggagugaaaggau

SEQ ID NO: 1012792 - RNA, 19 nt, Homo sapiens
  misc_RNA (1)...(19): siRNA sense strand
gggagaccagggagugaaa

SEQ ID NO: 1012793 - RNA, 19 nt, Homo sapiens
  misc_RNA (1)...(19): siRNA sense strand
gaucuggcuggauaauguu

SEQ ID NO: 1012794 - RNA, 19 nt, Homo sapiens
  misc_RNA (1)...(19): siRNA sense strand
aggauugucggcaguagua

SEQ ID NO: 1012795 - RNA, 19 nt, Homo sapiens
  misc_RNA (1)...(19): siRNA sense strand
gguccaaguucugaaucug

SEQ ID NO: 1012796 - RNA, 19 nt, Homo sapiens
  misc_RNA (1)...(19): siRNA sense strand
gcagaucuggcuggauaau

SEQ ID NO: 1012797 - RNA, 19 nt, Homo sapiens
  misc_RNA (1)...(19): siRNA sense strand
ggguagacaacuucacuca

SEQ ID NO: 1012798 - RNA, 19 nt, Homo sapiens
  misc_RNA (1)...(19): siRNA sense strand
aggaagggcccuguacaaa

SEQ ID NO: 1012799 - RNA, 19 nt, Homo sapiens
  misc_RNA (1)...(19): siRNA sense strand
ggagaaauggggugaacuu

SEQ ID NO: 1012800 - RNA, 19 nt, Homo sapiens
  misc_RNA (1)...(19): siRNA sense strand
ucaaggaggacgagcucuu

SEQ ID NO: 1012801 - RNA, 19 nt, Homo sapiens
  misc_RNA (1)...(19): siRNA sense strand
gagagaagggcagcaaagg

SEQ ID NO: 1012802 - RNA, 19 nt, Homo sapiens
  misc_RNA (1)...(19): siRNA sense strand
ggaacuaagggagagaaag

SEQ ID NO: 1012803 - RNA, 19 nt, Homo sapiens
  misc_RNA (1)...(19): siRNA sense strand
aaggaagggcccuguacaa

SEQ ID NO: 1012804 - RNA, 19 nt, Homo sapiens
  misc_RNA (1)...(19): siRNA sense strand
caaggacagcaaggaagaa

SEQ ID NO: 1012805 - RNA, 19 nt, Homo sapiens
  misc_RNA (1)...(19): siRNA sense strand
gcaaagagcucauuagcaa

SEQ ID NO: 1012806 - RNA, 19 nt, Homo sapiens
  misc_RNA (1)...(19): siRNA sense strand
ugagaaagcugguaaagua

SEQ ID NO: 1012807 - RNA, 19 nt, Homo sapiens
  misc_RNA (1)...(19): siRNA sense strand
guuaaacgcuuacacaaua

SEQ ID NO: 1012808 - RNA, 19 nt, Homo sapiens
  misc_RNA (1)...(19): siRNA sense strand
gaaaguccuugaugcaaua

SEQ ID NO: 1012809 - RNA, 19 nt, Homo sapiens
  misc_RNA (1)...(19): siRNA sense strand
agaaagaacuuauggguuu

SEQ ID NO: 1012810 - RNA, 19 nt, Homo sapiens
  misc_RNA (1)...(19): siRNA sense strand
gaagagauuucgguucuaa

SEQ ID NO: 1012811 - RNA, 19 nt, Homo sapiens
  misc_RNA (1)...(19): siRNA sense strand
acaaauagauggucacauu

SEQ ID NO: 1012812 - RNA, 19 nt, Homo sapiens
  misc_RNA (1)...(19): siRNA sense strand
ucacauaaguggaaagaaa

SEQ ID NO: 1012813 - RNA, 19 nt, Homo sapiens
  misc_RNA (1)...(19): siRNA sense strand
gaagagcaauauacuauca

SEQ ID NO: 1012814 - RNA, 19 nt, Homo sapiens
  misc_RNA (1)...(19): siRNA sense strand
ggaauugacuuggaccaua

SEQ ID NO: 1012815 - RNA, 19 nt, Homo sapiens
  misc_RNA (1)...(19): siRNA sense strand
gaaacgaauugcugaaaug

SEQ ID NO: 1012816 - RNA, 19 nt, Homo sapiens
  misc_RNA (1)...(19): siRNA sense strand
gaauugacuuggaccauaa

SEQ ID NO: 1012817 - RNA, 19 nt, Homo sapiens
  misc_RNA (1)...(19): siRNA sense strand
gcaaucugcuucaagaauu

SEQ ID NO: 1012818 - RNA, 19 nt, Homo sapiens
  misc_RNA (1)...(19): siRNA sense strand
ucggagaguugaaauauua

SEQ ID NO: 1012819 - RNA, 19 nt, Homo sapiens
  misc_RNA (1)...(19): siRNA sense strand
cagcagaggucguaaagaa

SEQ ID NO: 1012820 - RNA, 19 nt, Homo sapiens
  misc_RNA (1)...(19): siRNA sense strand
gcacuggacuacauuguug

SEQ ID NO: 1012821 - RNA, 19 nt, Homo sapiens
  misc_RNA (1)...(19): siRNA sense strand
guaguuaaguuacggcaua

SEQ ID NO: 1012822 - RNA, 19 nt, Homo sapiens
  misc_RNA (1)...(19): siRNA sense strand
gaacaaauugcuaugauga

SEQ ID NO: 1012823 - RNA, 19 nt, Homo sapiens
  misc_RNA (1)...(19): siRNA sense strand
gaaagaacaucgcaaucug

SEQ ID NO: 1012824 - RNA, 19 nt, Homo sapiens
  misc_RNA (1)...(19): siRNA sense strand
uuaaggaacuugaagcuaa

SEQ ID NO: 1012825 - RNA, 19 nt, Homo sapiens
  misc_RNA (1)...(19): siRNA sense strand
gcagaggucguaaagaaua

SEQ ID NO: 1012826 - RNA, 19 nt, Homo sapiens
  misc_RNA (1)...(19): siRNA sense strand
gaaugugcuucugcuauua

SEQ ID NO: 1012827 - RNA, 19 nt, Homo sapiens
  misc_RNA (1)...(19): siRNA sense strand
ggaaucauguucaguguuc

SEQ ID NO: 1012828 - RNA, 19 nt, Homo sapiens
  misc_RNA (1)...(19): siRNA sense strand
gagaagagcaauauacuau

SEQ ID NO: 1012829 - RNA, 19 nt, Homo sapiens
  misc_RNA (1)...(19): siRNA sense strand
uaaaggaaguuauggauag

SEQ ID NO: 1012830 - RNA, 19 nt, Homo sapiens
  misc_RNA (1)...(19): siRNA sense strand
acacagaggagauaaguua

SEQ ID NO: 1012831 - RNA, 19 nt, Homo sapiens
  misc_RNA (1)...(19): siRNA sense strand
ccaagaauguguaaacuuc

SEQ ID NO: 1012832 - RNA, 19 nt, Homo sapiens
  misc_RNA (1)...(19): siRNA sense strand
gugaggaacuugauaauag

SEQ ID NO: 1012833 - RNA, 19 nt, Homo sapiens
  misc_RNA (1)...(19): siRNA sense strand
cacaagggcuucagaaaga

SEQ ID NO: 1012834 - RNA, 19 nt, Homo sapiens
  misc_RNA (1)...(19): siRNA sense strand
ggaaaguccuugaugcaau

SEQ ID NO: 1012835 - RNA, 19 nt, Homo sapiens
  misc_RNA (1)...(19): siRNA sense strand
uaaggaagcucuaauugca

SEQ ID NO: 1012836 - RNA, 19 nt, Homo sapiens
  misc_RNA (1)...(19): siRNA sense strand
gauggagagugguaacuuu

SEQ ID NO: 1012837 - RNA, 19 nt, Homo sapiens
  misc_RNA (1)...(19): siRNA sense strand
ucacauugcugaacauaau

SEQ ID NO: 1012838 - RNA, 19 nt, Homo sapiens
  misc_RNA (1)...(19): siRNA sense strand
gaaagcugguaaaguagaa

SEQ ID NO: 1012839 - RNA, 19 nt, Homo sapiens
  misc_RNA (1)...(19): siRNA sense strand
gaaguuauggauagccuua

SEQ ID NO: 1012840 - RNA, 19 nt, Homo sapiens
  misc_RNA (1)...(19): siRNA sense strand
aaggaaagcugcaaucaga

SEQ ID NO: 1012841 - RNA, 19 nt, Homo sapiens
  misc_RNA (1)...(19): siRNA sense strand
ggauagacuuauuggaauu

SEQ ID NO: 1012842 - RNA, 19 nt, Homo sapiens
  misc_RNA (1)...(19): siRNA sense strand
cuuaguagcugacaacuug

SEQ ID NO: 1012843 - RNA, 19 nt, Homo sapiens
  misc_RNA (1)...(19): siRNA sense strand
ggguaugcuugaauauuua

SEQ ID NO: 1012844 - RNA, 19 nt, Homo sapiens
  misc_RNA (1)...(19): siRNA sense strand
caaucugcuucaagaauua

SEQ ID NO: 1012845 - RNA, 19 nt, Homo sapiens
  misc_RNA (1)...(19): siRNA sense strand
uaccagagauccagaaaga

SEQ ID NO: 1012846 - RNA, 19 nt, Homo sapiens
  misc_RNA (1)...(19): siRNA sense strand
gcaagcauccagcguuuaa

SEQ ID NO: 1012847 - RNA, 19 nt, Homo sapiens
  misc_RNA (1)...(19): siRNA sense strand
agucagaacuugauaucua

SEQ ID NO: 1012848 - RNA, 19 nt, Homo sapiens
  misc_RNA (1)...(19): siRNA sense strand
ggaagauguucaaguuaga

SEQ ID NO: 1012849 - RNA, 19 nt, Homo sapiens
  misc_RNA (1)...(19): siRNA sense strand
gaacagucagguacaauga

SEQ ID NO: 1012850 - RNA, 19 nt, Homo sapiens
  misc_RNA (1)...(19): siRNA sense strand
gcaaauccaagaacagaaa

SEQ ID NO: 1012851 - RNA, 19 nt, Homo sapiens
  misc_RNA (1)...(19): siRNA sense strand
gaagcccggugucaugaaa

SEQ ID NO: 1012852 - RNA, 19 nt, Homo sapiens
  misc_RNA (1)...(19): siRNA sense strand
acaaggacauucagaguug

SEQ ID NO: 1012853 - RNA, 19 nt, Homo sapiens
  misc_RNA (1)...(19): siRNA sense strand
gaaggaagaauuguauuug

SEQ ID NO: 1012854 - RNA, 19 nt, Homo sapiens
  misc_RNA (1)...(19): siRNA sense strand
gggugaaguugaacaaauu

SEQ ID NO: 1012855 - RNA, 19 nt, Homo sapiens
  misc_RNA (1)...(19): siRNA sense strand
ccacaagaguagcauauca

SEQ ID NO: 1012856 - RNA, 19 nt, Homo sapiens
  misc_RNA (1)...(19): siRNA sense strand
ugaaugugcuucugcuauu

SEQ ID NO: 1012857 - RNA, 19 nt, Homo sapiens
  misc_RNA (1)...(19): siRNA sense strand
gaagaaagaguaguuaagu

SEQ ID NO: 1012858 - RNA, 19 nt, Homo sapiens
  misc_RNA (1)...(19): siRNA sense strand
gaaacaaugcccucgagaa

SEQ ID NO: 1012859 - RNA, 19 nt, Homo sapiens
  misc_RNA (1)...(19): siRNA sense strand
gaagucauuccuaacagua

SEQ ID NO: 1012860 - RNA, 19 nt, Homo sapiens
  misc_RNA (1)...(19): siRNA sense strand
gaagauaauccuauugaag

SEQ ID NO: 1012861 - RNA, 19 nt, Homo sapiens
  misc_RNA (1)...(19): siRNA sense strand
gaaaugaggaacacacuag

SEQ ID NO: 1012862 - RNA, 19 nt, Homo sapiens
  misc_RNA (1)...(19): siRNA sense strand
aaucagagauauagaagga

SEQ ID NO: 1012863 - RNA, 19 nt, Homo sapiens
  misc_RNA (1)...(19): siRNA sense strand
ucagagauauagaaggaaa

SEQ ID NO: 1012864 - RNA, 19 nt, Homo sapiens
  misc_RNA (1)...(19): siRNA sense strand
guagacagcuuggauccuu

SEQ ID NO: 1012865 - RNA, 19 nt, Homo sapiens
  misc_RNA (1)...(19): siRNA sense strand
ugauauagcccaagaaugu

SEQ ID NO: 1012866 - RNA, 19 nt, Homo sapiens
  misc_RNA (1)...(19): siRNA sense strand
aggaauauauggaagauug

SEQ ID NO: 1012867 - RNA, 19 nt, Homo sapiens
  misc_RNA (1)...(19): siRNA sense strand
agaacggccugcagagaua

SEQ ID NO: 1012868 - RNA, 19 nt, Homo sapiens
  misc_RNA (1)...(19): siRNA sense strand
aaauaucacugcauccuau

SEQ ID NO: 1012869 - RNA, 19 nt, Homo sapiens
  misc_RNA (1)...(19): siRNA sense strand
gcagaaauugcuagaagaa

SEQ ID NO: 1012870 - RNA, 19 nt, Homo sapiens
  misc_RNA (1)...(19): siRNA sense strand
gagauaauacuucugucua

SEQ ID NO: 1012871 - RNA, 19 nt, Homo sapiens
  misc_RNA (1)...(19): siRNA sense strand
ggacuacauuguuguugau

SEQ ID NO: 1012872 - RNA, 19 nt, Homo sapiens
  misc_RNA (1)...(19): siRNA sense strand
ugaagaagagguaaacaaa

SEQ ID NO: 1012873 - RNA, 19 nt, Homo sapiens
  misc_RNA (1)...(19): siRNA sense strand
gaagcaaaguaaugaaagg

SEQ ID NO: 1012874 - RNA, 19 nt, Homo sapiens
  misc_RNA (1)...(19): siRNA sense strand
uagauaagauggcuguaug

SEQ ID NO: 1012875 - RNA, 19 nt, Homo sapiens
  misc_RNA (1)...(19): siRNA sense strand
ucaugaagauaccaaagaa

SEQ ID NO: 1012876 - RNA, 19 nt, Homo sapiens
  misc_RNA (1)...(19): siRNA sense strand
aaucaagacugcugacaga

SEQ ID NO: 1012877 - RNA, 19 nt, Homo sapiens
  misc_RNA (1)...(19): siRNA sense strand
guuccucacuuguuauuga

SEQ ID NO: 1012878 - RNA, 19 nt, Homo sapiens
  misc_RNA (1)...(19): siRNA sense strand
gaaaggaaagcugcaauca

SEQ ID NO: 1012879 - RNA, 19 nt, Homo sapiens
  misc_RNA (1)...(19): siRNA sense strand
uuacacagcuagauuugga

SEQ ID NO: 1012880 - RNA, 19 nt, Homo sapiens
  misc_RNA (1)...(19): siRNA sense strand
gaaguugaacaaauugcua

SEQ ID NO: 1012881 - RNA, 19 nt, Homo sapiens
  misc_RNA (1)...(19): siRNA sense strand
aaacguuagugcuuucaaa

SEQ ID NO: 1012882 - RNA, 19 nt, Homo sapiens
  misc_RNA (1)...(19): siRNA sense strand
ggaucaagccacaagagua

SEQ ID NO: 1012883 - RNA, 19 nt, Homo sapiens
  misc_RNA (1)...(19): siRNA sense strand
gaaacaacaaccagaaaca

SEQ ID NO: 1012884 - RNA, 19 nt, Homo sapiens
  misc_RNA (1)...(19): siRNA sense strand
gaacacaaggacauucaga

SEQ ID NO: 1012885 - RNA, 19 nt, Homo sapiens
  misc_RNA (1)...(19): siRNA sense strand
uaaaguagaagcugagguu

SEQ ID NO: 1012886 - RNA, 19 nt, Homo sapiens
  misc_RNA (1)...(19): siRNA sense strand
ggacaaaucauagaacagu

SEQ ID NO: 1012887 - RNA, 19 nt, Homo sapiens
  misc_RNA (1)...(19): siRNA sense strand
cagcaaaucgguaaaugaa

SEQ ID NO: 1012888 - RNA, 19 nt, Homo sapiens
  misc_RNA (1)...(19): siRNA sense strand
gaacacagaggagauaagu

SEQ ID NO: 1012889 - RNA, 19 nt, Homo sapiens
  misc_RNA (1)...(19): siRNA sense strand
ggaaggggaugauuaugaa

SEQ ID NO: 1012890 - RNA, 19 nt, Homo sapiens
  misc_RNA (1)...(19): siRNA sense strand
aguagaagcugagguuaaa

SEQ ID NO: 1012891 - RNA, 19 nt, Homo sapiens
  misc_RNA (1)...(19): siRNA sense strand
aggguaugcuugaauauuu

SEQ ID NO: 1012892 - RNA, 19 nt, Homo sapiens
  misc_RNA (1)...(19): siRNA sense strand
acaaugcccucgagaagga

SEQ ID NO: 1012893 - RNA, 19 nt, Homo sapiens
  misc_RNA (1)...(19): siRNA sense strand
ugaaaauacuccucguuua

SEQ ID NO: 1012894 - RNA, 19 nt, Homo sapiens
  misc_RNA (1)...(19): siRNA sense strand
uaucucagucgucauaaua

SEQ ID NO: 1012895 - RNA, 19 nt, Homo sapiens
  misc_RNA (1)...(19): siRNA sense strand
ugaggaacuugauaauaga

SEQ ID NO: 1012896 - RNA, 19 nt, Homo sapiens
  misc_RNA (1)...(19): siRNA sense strand
ggacuuaggagccauugau

SEQ ID NO: 1012897 - RNA, 19 nt, Homo sapiens
  misc_RNA (1)...(19): siRNA sense strand
cauaagcgcuuuuccugua

SEQ ID NO: 1012898 - RNA, 19 nt, Homo sapiens
  misc_RNA (1)...(19): siRNA sense strand
ggaaagcugcaaucagaga

SEQ ID NO: 1012899 - RNA, 19 nt, Homo sapiens
  misc_RNA (1)...(19): siRNA sense strand
gcuaaggaagcucuaauug

SEQ ID NO: 1012900 - RNA, 19 nt, Homo sapiens
  misc_RNA (1)...(19): siRNA sense strand
caaagcagcagaggucgua

SEQ ID NO: 1012901 - RNA, 19 nt, Homo sapiens
  misc_RNA (1)...(19): siRNA sense strand
agaauggguuccucacuug

SEQ ID NO: 1012902 - RNA, 19 nt, Homo sapiens
  misc_RNA (1)...(19): siRNA sense strand
gaaaauacuccucguuuau

SEQ ID NO: 1012903 - RNA, 19 nt, Homo sapiens
  misc_RNA (1)...(19): siRNA sense strand
gaauguguaaacuuccuua

SEQ ID NO: 1012904 - RNA, 19 nt, Homo sapiens
  misc_RNA (1)...(19): siRNA sense strand
uacaaaugcugcagaggaa

SEQ ID NO: 1012905 - RNA, 19 nt, Homo sapiens
  misc_RNA (1)...(19): siRNA sense strand
aaaccuggcuccaaacaaa

SEQ ID NO: 1012906 - RNA, 19 nt, Homo sapiens
  misc_RNA (1)...(19): siRNA sense strand
ggauaagggugguaaaucu

SEQ ID NO: 1012907 - RNA, 19 nt, Homo sapiens
  misc_RNA (1)...(19): siRNA sense strand
ggugguaaaucucgugaaa

SEQ ID NO: 1012908 - RNA, 19 nt, Homo sapiens
  misc_RNA (1)...(19): siRNA sense strand
uaaaggaugcgucaccaua

SEQ ID NO: 1012909 - RNA, 19 nt, Homo sapiens
  misc_RNA (1)...(19): siRNA sense strand
gagaccacuuccucccuua

SEQ ID NO: 1012910 - RNA, 19 nt, Homo sapiens
  misc_RNA (1)...(19): siRNA sense strand
gagcaaggaaccagagaga

SEQ ID NO: 1012911 - RNA, 19 nt, Homo sapiens
  misc_RNA (1)...(19): siRNA sense strand
agcagaggcuguaaaugua

SEQ ID NO: 1012912 - RNA, 19 nt, Homo sapiens
  misc_RNA (1)...(19): siRNA sense strand
ccauagccauccaugcaaa

SEQ ID NO: 1012913 - RNA, 19 nt, Homo sapiens
  misc_RNA (1)...(19): siRNA sense strand
caggaagagugaugugguu

SEQ ID NO: 1012914 - RNA, 19 nt, Homo sapiens
  misc_RNA (1)...(19): siRNA sense strand
gcugagcucugucgguauc

SEQ ID NO: 1012915 - RNA, 19 nt, Homo sapiens
  misc_RNA (1)...(19): siRNA sense strand
caaacaaaaugcuguaaca

SEQ ID NO: 1012916 - RNA, 19 nt, Homo sapiens
  misc_RNA (1)...(19): siRNA sense strand
gaagagugaugugguuuug

SEQ ID NO: 1012917 - RNA, 19 nt, Homo sapiens
  misc_RNA (1)...(19): siRNA sense strand
caucagagggagaggcuaa

SEQ ID NO: 1012918 - RNA, 19 nt, Homo sapiens
  misc_RNA (1)...(19): siRNA sense strand
ggcuguaaauguagcuauu

SEQ ID NO: 1012919 - RNA, 19 nt, Homo sapiens
  misc_RNA (1)...(19): siRNA sense strand
gaaccagagagaccacuuc

SEQ ID NO: 1012920 - RNA, 19 nt, Homo sapiens
  misc_RNA (1)...(19): siRNA sense strand
gucgguaucuuuccaaggu

SEQ ID NO: 1012921 - RNA, 19 nt, Homo sapiens
  misc_RNA (1)...(19): siRNA sense strand
gugcgacgaccaaggguaa

SEQ ID NO: 1012922 - RNA, 19 nt, Homo sapiens
  misc_RNA (1)...(19): siRNA sense strand
gagcucugucgguaucuuu

SEQ ID NO: 1012923 - RNA, 19 nt, Homo sapiens
  misc_RNA (1)...(19): siRNA sense strand
gcagaggcuguaaauguag

SEQ ID NO: 1012924 - RNA, 19 nt, Homo sapiens
  misc_RNA (1)...(19): siRNA sense strand
agagaucuuggagaaauua

SEQ ID NO: 1012925 - RNA, 19 nt, Homo sapiens
  misc_RNA (1)...(19): siRNA sense strand
gugaugugguuuuggauaa

SEQ ID NO: 1012926 - RNA, 19 nt, Homo sapiens
  misc_RNA (1)...(19): siRNA sense strand
cuacaacuccagaagagau

SEQ ID NO: 1012927 - RNA, 19 nt, Homo sapiens
  misc_RNA (1)...(19): siRNA sense strand
caccauagccauccaugca

SEQ ID NO: 1012928 - RNA, 19 nt, Homo sapiens
  misc_RNA (1)...(19): siRNA sense strand
uguggcaguugauccuaaa

SEQ ID NO: 1012929 - RNA, 19 nt, Homo sapiens
  misc_RNA (1)...(19): siRNA sense strand
gcuguaaauguagcuauug

SEQ ID NO: 1012930 - RNA, 19 nt, Homo sapiens
  misc_RNA (1)...(19): siRNA sense strand
gagaucuuggagaaauuaa

SEQ ID NO: 1012931 - RNA, 19 nt, Homo sapiens
  misc_RNA (1)...(19): siRNA sense strand
gauaagggugguaaaucuc

SEQ ID NO: 1012932 - RNA, 19 nt, Homo sapiens
  misc_RNA (1)...(19): siRNA sense strand
ggaaccagagagaccacuu

SEQ ID NO: 1012933 - RNA, 19 nt, Homo sapiens
  misc_RNA (1)...(19): siRNA sense strand
ggaagagugaugugguuuu

SEQ ID NO: 1012934 - RNA, 19 nt, Homo sapiens
  misc_RNA (1)...(19): siRNA sense strand
aaaggaugcgucaccauag

SEQ ID NO: 1012935 - RNA, 19 nt, Homo sapiens
  misc_RNA (1)...(19): siRNA sense strand
ggcuaaugcugagcucugu

SEQ ID NO: 1012936 - RNA, 19 nt, Homo sapiens
  misc_RNA (1)...(19): siRNA sense strand
ugcaaaaccuggcuccaaa

SEQ ID NO: 1012937 - RNA, 19 nt, Homo sapiens
  misc_RNA (1)...(19): siRNA sense strand
gugaaaagguggugaagcu

SEQ ID NO: 1012938 - RNA, 19 nt, Homo sapiens
  misc_RNA (1)...(19): siRNA sense strand
gauaaagcgucugaaguua

SEQ ID NO: 1012939 - RNA, 19 nt, Homo sapiens
  misc_RNA (1)...(19): siRNA sense strand
ggauaaagcgucugaaguu

SEQ ID NO: 1012940 - RNA, 19 nt, Homo sapiens
  misc_RNA (1)...(19): siRNA sense strand
ucacagaccugacuucauc

SEQ ID NO: 1012941 - RNA, 19 nt, Homo sapiens
  misc_RNA (1)...(19): siRNA sense strand
gcaggaaucgcuucaguuu

SEQ ID NO: 1012942 - RNA, 19 nt, Homo sapiens
  misc_RNA (1)...(19): siRNA sense strand
gagcaacccugcaggaauc

SEQ ID NO: 1012943 - RNA, 19 nt, Homo sapiens
  misc_RNA (1)...(19): siRNA sense strand
gaaacccacugaagcuguu

SEQ ID NO: 1012944 - RNA, 19 nt, Homo sapiens
  misc_RNA (1)...(19): siRNA sense strand
ggaguuuccugguuuguuc

SEQ ID NO: 1012945 - RNA, 19 nt, Homo sapiens
  misc_RNA (1)...(19): siRNA sense strand
uaaagcgucugaaguuaau

SEQ ID NO: 1012946 - RNA, 19 nt, Homo sapiens
  misc_RNA (1)...(19): siRNA sense strand
gacuucaucucccacauuu

SEQ ID NO: 1012947 - RNA, 19 nt, Homo sapiens
  misc_RNA (1)...(19): siRNA sense strand
agagaaagcugcagagcau

SEQ ID NO: 1012948 - RNA, 19 nt, Homo sapiens
  misc_RNA (1)...(19): siRNA sense strand
gcaagaaggaaaugauuca

SEQ ID NO: 1012949 - RNA, 19 nt, Homo sapiens
  misc_RNA (1)...(19): siRNA sense strand
ccacugaagcuguuuguga

SEQ ID NO: 1012950 - RNA, 19 nt, Homo sapiens
  misc_RNA (1)...(19): siRNA sense strand
aggaaucgcuucaguuuca

SEQ ID NO: 1012951 - RNA, 19 nt, Homo sapiens
  misc_RNA (1)...(19): siRNA sense strand
gcagagaggauggcagaaa

SEQ ID NO: 1012952 - RNA, 19 nt, Homo sapiens
  misc_RNA (1)...(19): siRNA sense strand
cugcagagcauguuaaaga

SEQ ID NO: 1012953 - RNA, 19 nt, Homo sapiens
  misc_RNA (1)...(19): siRNA sense strand
cagaagaacaagccuauca

SEQ ID NO: 1012954 - RNA, 19 nt, Homo sapiens
  misc_RNA (1)...(19): siRNA sense strand
gggaugcgcuauucgacau

SEQ ID NO: 1012955 - RNA, 19 nt, Homo sapiens
  misc_RNA (1)...(19): siRNA sense strand
gcagaaacccacugaagcu

SEQ ID NO: 1012956 - RNA, 19 nt, Homo sapiens
  misc_RNA (1)...(19): siRNA sense strand
gaggaacaguagcacaaag

SEQ ID NO: 1012957 - RNA, 19 nt, Homo sapiens
  misc_RNA (1)...(19): siRNA sense strand
agaacaagccuaucagcaa

SEQ ID NO: 1012958 - RNA, 19 nt, Homo sapiens
  misc_RNA (1)...(19): siRNA sense strand
aauguggagucuagauaaa

SEQ ID NO: 1012959 - RNA, 19 nt, Homo sapiens
  misc_RNA (1)...(19): siRNA sense strand
gcagcacccagaccaugua

SEQ ID NO: 1012960 - RNA, 19 nt, Homo sapiens
  misc_RNA (1)...(19): siRNA sense strand
cagcaagaaggaaaugauu

SEQ ID NO: 1012961 - RNA, 19 nt, Homo sapiens
  misc_RNA (1)...(19): siRNA sense strand
ggaggaacaguagcacaaa

SEQ ID NO: 1012962 - RNA, 19 nt, Homo sapiens
  misc_RNA (1)...(19): siRNA sense strand
aaauguggagucuagauaa

SEQ ID NO: 1012963 - RNA, 19 nt, Homo sapiens
  misc_RNA (1)...(19): siRNA sense strand
gagcggauaaagcgucuga

SEQ ID NO: 1012964 - RNA, 19 nt, Homo sapiens
  misc_RNA (1)...(19): siRNA sense strand
auaaagcgucugaaguuaa

SEQ ID NO: 1012965 - RNA, 19 nt, Homo sapiens
  misc_RNA (1)...(19): siRNA sense strand
gaugcgcuauucgacauug

SEQ ID NO: 1012966 - RNA, 19 nt, Homo sapiens
  misc_RNA (1)...(19): siRNA sense strand
cagagaggauggcagaaac

SEQ ID NO: 1012967 - RNA, 19 nt, Homo sapiens
  misc_RNA (1)...(19): siRNA sense strand
gagagcaacccugcaggaa

SEQ ID NO: 1012968 - RNA, 19 nt, Homo sapiens
  misc_RNA (1)...(19): siRNA sense strand
gaaagcugcagagcauguu

SEQ ID NO: 1012969 - RNA, 19 nt, Homo sapiens
  misc_RNA (1)...(19): siRNA sense strand
acacgcaggaggaacagua

SEQ ID NO: 1012970 - RNA, 19 nt, Homo sapiens
  misc_RNA (1)...(19): siRNA sense strand
guuaauaguccaggagaga

SEQ ID NO: 1012971 - RNA, 19 nt, Homo sapiens
  misc_RNA (1)...(19): siRNA sense strand
uaauaguccaggagagaaa

SEQ ID NO: 1012972 - RNA, 19 nt, Homo sapiens
  misc_RNA (1)...(19): siRNA sense strand
ugacuucaucucccacauu

SEQ ID NO: 1012973 - RNA, 19 nt, Homo sapiens
  misc_RNA (1)...(19): siRNA sense strand
gauggcagaaacccacuga

SEQ ID NO: 1012974 - RNA, 19 nt, Homo sapiens
  misc_RNA (1)...(19): siRNA sense strand
acaagccuaucagcaagaa

SEQ ID NO: 1012975 - RNA, 19 nt, Homo sapiens
  misc_RNA (1)...(19): siRNA sense strand
ccuaucagcaagaaggaaa

SEQ ID NO: 1012976 - RNA, 19 nt, Homo sapiens
  misc_RNA (1)...(19): siRNA sense strand
aaaacaugcucaagacuca

SEQ ID NO: 1012977 - RNA, 19 nt, Homo sapiens
  misc_RNA (1)...(19): siRNA sense strand
uuuccugguuuguuccuuu

SEQ ID NO: 1012978 - RNA, 19 nt, Homo sapiens
  misc_RNA (1)...(19): siRNA sense strand
aagaaggaaaugauucaga

SEQ ID NO: 1012979 - RNA, 19 nt, Homo sapiens
  misc_RNA (1)...(19): siRNA sense strand
aaagcugcagagcauguua

SEQ ID NO: 1012980 - RNA, 19 nt, Homo sapiens
  misc_RNA (1)...(19): siRNA sense strand
gcggauaaagcgucugaag

SEQ ID NO: 1012981 - RNA, 19 nt, Homo sapiens
  misc_RNA (1)...(19): siRNA sense strand
gaaaauguggagucuagau

SEQ ID NO: 1012982 - RNA, 19 nt, Homo sapiens
  misc_RNA (1)...(19): siRNA sense strand
cugcaggaaucgcuucagu

SEQ ID NO: 1012983 - RNA, 19 nt, Homo sapiens
  misc_RNA (1)...(19): siRNA sense strand
gcaccuccaucaaggaauu

SEQ ID NO: 1012984 - RNA, 19 nt, Homo sapiens
  misc_RNA (1)...(19): siRNA sense strand
ggaagaagaucuccaacac

SEQ ID NO: 1012985 - RNA, 19 nt, Homo sapiens
  misc_RNA (1)...(19): siRNA sense strand
gcucauggcugacuucaac

SEQ ID NO: 1012986 - RNA, 19 nt, Homo sapiens
  misc_RNA (1)...(19): siRNA sense strand
ucaagacucugcucuggaa

SEQ ID NO: 1012987 - RNA, 19 nt, Homo sapiens
  misc_RNA (1)...(19): siRNA sense strand
uuacgggacuuucuacaug

SEQ ID NO: 1012988 - RNA, 19 nt, Homo sapiens
  misc_RNA (1)...(19): siRNA sense strand
ggcgggagcugguacuguu

SEQ ID NO: 1012989 - RNA, 19 nt, Homo sapiens
  misc_RNA (1)...(19): siRNA sense strand
gccagguggucauuuguga

SEQ ID NO: 1012990 - RNA, 19 nt, Homo sapiens
  misc_RNA (1)...(19): siRNA sense strand
gcucuuacgggacuuucua

SEQ ID NO: 1012991 - RNA, 19 nt, Homo sapiens
  misc_RNA (1)...(19): siRNA sense strand
acucugcucuggaagaaga

SEQ ID NO: 1012992 - RNA, 19 nt, Homo sapiens
  misc_RNA (1)...(19): siRNA sense strand
ugugugagcugcauauggu

SEQ ID NO: 1012993 - RNA, 19 nt, Homo sapiens
  misc_RNA (1)...(19): siRNA sense strand
caaggugugcgcacugcua

SEQ ID NO: 1012994 - RNA, 19 nt, Homo sapiens
  misc_RNA (1)...(19): siRNA sense strand
gggagcugguacuguuuga

SEQ ID NO: 1012995 - RNA, 19 nt, Homo sapiens
  misc_RNA (1)...(19): siRNA sense strand
agacucugcucuggaagaa

SEQ ID NO: 1012996 - RNA, 19 nt, Homo sapiens
  misc_RNA (1)...(19): siRNA sense strand
gagcugguacuguuugaca

SEQ ID NO: 1012997 - RNA, 19 nt, Homo sapiens
  misc_RNA (1)...(19): siRNA sense strand
uggcugacuucaacaagga

SEQ ID NO: 1012998 - RNA, 19 nt, Homo sapiens
  misc_RNA (1)...(19): siRNA sense strand
ggacuuucuacauguguga

SEQ ID NO: 1012999 - RNA, 19 nt, Homo sapiens
  misc_RNA (1)...(19): siRNA sense strand
ccaucggccugcuggaguu

SEQ ID NO: 1013000 - RNA, 19 nt, Homo sapiens
  misc_RNA (1)...(19): siRNA sense strand
gggcaccuccaucaaggaa

SEQ ID NO: 1013001 - RNA, 19 nt, Homo sapiens
  misc_RNA (1)...(19): siRNA sense strand
gugcucagccaccucaaga

SEQ ID NO: 1013002 - RNA, 19 nt, Homo sapiens
  misc_RNA (1)...(19): siRNA sense strand
ucagccaccucaagacucu

SEQ ID NO: 1013003 - RNA, 19 nt, Homo sapiens
  misc_RNA (1)...(19): siRNA sense strand
ucaaggaauuccgggagau

SEQ ID NO: 1013004 - RNA, 19 nt, Homo sapiens
  misc_RNA (1)...(19): siRNA sense strand
caccuacgacuucaagaug

SEQ ID NO: 1013005 - RNA, 19 nt, Homo sapiens
  misc_RNA (1)...(19): siRNA sense strand
ucugccagguggucauuug

SEQ ID NO: 1013006 - RNA, 19 nt, Homo sapiens
  misc_RNA (1)...(19): siRNA sense strand
ggaccugugugagcugcau

SEQ ID NO: 1013007 - RNA, 19 nt, Homo sapiens
  misc_RNA (1)...(19): siRNA sense strand
gugcaagggcgaccucauc

SEQ ID NO: 1013008 - RNA, 19 nt, Homo sapiens
  misc_RNA (1)...(19): siRNA sense strand
ccaccuacgacuucaagau

SEQ ID NO: 1013009 - RNA, 19 nt, Homo sapiens
  misc_RNA (1)...(19): siRNA sense strand
uacgggacuuucuacaugu

SEQ ID NO: 1013010 - RNA, 19 nt, Homo sapiens
  misc_RNA (1)...(19): siRNA sense strand
acacagccaccuacgacuu

SEQ ID NO: 1013011 - RNA, 19 nt, Homo sapiens
  misc_RNA (1)...(19): siRNA sense strand
caaggaauuccgggagaug

SEQ ID NO: 1013012 - RNA, 19 nt, Homo sapiens
  misc_RNA (1)...(19): siRNA sense strand
agaccacacuggccaacgu

SEQ ID NO: 1013013 - RNA, 19 nt, Homo sapiens
  misc_RNA (1)...(19): siRNA sense strand
gaacuaugaugcugccaaa

SEQ ID NO: 1013014 - RNA, 19 nt, Homo sapiens
  misc_RNA (1)...(19): siRNA sense strand
gagagaagccaauuacauc

SEQ ID NO: 1013015 - RNA, 19 nt, Homo sapiens
  misc_RNA (1)...(19): siRNA sense strand
cgaucaggcugccaauaaa

SEQ ID NO: 1013016 - RNA, 19 nt, Homo sapiens
  misc_RNA (1)...(19): siRNA sense strand
ccaauuacaucggcucaga

SEQ ID NO: 1013017 - RNA, 19 nt, Homo sapiens
  misc_RNA (1)...(19): siRNA sense strand
uuacaucggcucagacaaa

SEQ ID NO: 1013018 - RNA, 19 nt, Homo sapiens
  misc_RNA (1)...(19): siRNA sense strand
ccgaucaggcugccaauaa

SEQ ID NO: 1013019 - RNA, 19 nt, Homo sapiens
  misc_RNA (1)...(19): siRNA sense strand
cagagagaauauccagaga

SEQ ID NO: 1013020 - RNA, 19 nt, Homo sapiens
  misc_RNA (1)...(19): siRNA sense strand
gaucaggcugccaauaaau

SEQ ID NO: 1013021 - RNA, 19 nt, Homo sapiens
  misc_RNA (1)...(19): siRNA sense strand
ugagagaagccaauuacau

SEQ ID NO: 1013022 - RNA, 19 nt, Homo sapiens
  misc_RNA (1)...(19): siRNA sense strand
gcagagaccccaaucacuu

SEQ ID NO: 1013023 - RNA, 19 nt, Homo sapiens
  misc_RNA (1)...(19): siRNA sense strand
gcuccuugguccugagugu

SEQ ID NO: 1013024 - RNA, 19 nt, Homo sapiens
  misc_RNA (1)...(19): siRNA sense strand
cugcuggccugccugagaa

SEQ ID NO: 1013025 - RNA, 19 nt, Homo sapiens
  misc_RNA (1)...(19): siRNA sense strand
caugagagaagccaauuac

SEQ ID NO: 1013026 - RNA, 19 nt, Homo sapiens
  misc_RNA (1)...(19): siRNA sense strand
gacaugagagaagccaauu

SEQ ID NO: 1013027 - RNA, 19 nt, Homo sapiens
  misc_RNA (1)...(19): siRNA sense strand
agccuacucugacaugaga

SEQ ID NO: 1013028 - RNA, 19 nt, Homo sapiens
  misc_RNA (1)...(19): siRNA sense strand
cagcagccgaagcuucuuu

SEQ ID NO: 1013029 - RNA, 19 nt, Homo sapiens
  misc_RNA (1)...(19): siRNA sense strand
caucggcucagacaaauac

SEQ ID NO: 1013030 - RNA, 19 nt, Homo sapiens
  misc_RNA (1)...(19): siRNA sense strand
aggacucgcuggccgauca

SEQ ID NO: 1013031 - RNA, 19 nt, Homo sapiens
  misc_RNA (1)...(19): siRNA sense strand
uacaucggcucagacaaau

SEQ ID NO: 1013032 - RNA, 19 nt, Homo sapiens
  misc_RNA (1)...(19): siRNA sense strand
acaugagagaagccaauua

SEQ ID NO: 1013033 - RNA, 19 nt, Homo sapiens
  misc_RNA (1)...(19): siRNA sense strand
ugacaugagagaagccaau

SEQ ID NO: 1013034 - RNA, 19 nt, Homo sapiens
  misc_RNA (1)...(19): siRNA sense strand
agacaaauacuuccaugcu

SEQ ID NO: 1013035 - RNA, 19 nt, Homo sapiens
  misc_RNA (1)...(19): siRNA sense strand
gaacagcagugaccaggaa

SEQ ID NO: 1013036 - RNA, 19 nt, Homo sapiens
  misc_RNA (1)...(19): siRNA sense strand
caacaaggaugugaagauu

SEQ ID NO: 1013037 - RNA, 19 nt, Homo sapiens
  misc_RNA (1)...(19): siRNA sense strand
gaccaucccugccaacaaa

SEQ ID NO: 1013038 - RNA, 19 nt, Homo sapiens
  misc_RNA (1)...(19): siRNA sense strand
ggccaacacuccucaagaa

SEQ ID NO: 1013039 - RNA, 19 nt, Homo sapiens
  misc_RNA (1)...(19): siRNA sense strand
acaaggaugugaagauuga

SEQ ID NO: 1013040 - RNA, 19 nt, Homo sapiens
  misc_RNA (1)...(19): siRNA sense strand
gagacaagccaggcaguua

SEQ ID NO: 1013041 - RNA, 19 nt, Homo sapiens
  misc_RNA (1)...(19): siRNA sense strand
gaaaugcccagccgaaagu

SEQ ID NO: 1013042 - RNA, 19 nt, Homo sapiens
  misc_RNA (1)...(19): siRNA sense strand
caacacuccucaagaacug

SEQ ID NO: 1013043 - RNA, 19 nt, Homo sapiens
  misc_RNA (1)...(19): siRNA sense strand
gcaacaaggaugugaagau

SEQ ID NO: 1013044 - RNA, 19 nt, Homo sapiens
  misc_RNA (1)...(19): siRNA sense strand
gaaagugagacuccuaaag

SEQ ID NO: 1013045 - RNA, 19 nt, Homo sapiens
  misc_RNA (1)...(19): siRNA sense strand
cauuugagcucugcaagau

SEQ ID NO: 1013046 - RNA, 19 nt, Homo sapiens
  misc_RNA (1)...(19): siRNA sense strand
gcagugggccaucggcuau

SEQ ID NO: 1013047 - RNA, 19 nt, Homo sapiens
  misc_RNA (1)...(19): siRNA sense strand
gccaggcaguuacaucuuc

SEQ ID NO: 1013048 - RNA, 19 nt, Homo sapiens
  misc_RNA (1)...(19): siRNA sense strand
gcugggaggccgugaguau

SEQ ID NO: 1013049 - RNA, 19 nt, Homo sapiens
  misc_RNA (1)...(19): siRNA sense strand
gggacuuucuacucaucua

SEQ ID NO: 1013050 - RNA, 19 nt, Homo sapiens
  misc_RNA (1)...(19): siRNA sense strand
ugcaagaucugugcugaga

SEQ ID NO: 1013051 - RNA, 19 nt, Homo sapiens
  misc_RNA (1)...(19): siRNA sense strand
ucaucuaccuggccaaucu

SEQ ID NO: 1013052 - RNA, 19 nt, Homo sapiens
  misc_RNA (1)...(19): siRNA sense strand
aaagugagacuccuaaagg

SEQ ID NO: 1013053 - RNA, 19 nt, Homo sapiens
  misc_RNA (1)...(19): siRNA sense strand
gggaggccgugaguaucua

SEQ ID NO: 1013054 - RNA, 19 nt, Homo sapiens
  misc_RNA (1)...(19): siRNA sense strand
caagcuggccaucaucuuc

SEQ ID NO: 1013055 - RNA, 19 nt, Homo sapiens
  misc_RNA (1)...(19): siRNA sense strand
gagcaacaaggaugugaag

SEQ ID NO: 1013056 - RNA, 19 nt, Homo sapiens
  misc_RNA (1)...(19): siRNA sense strand
uggccuuccucaccuauga

SEQ ID NO: 1013057 - RNA, 19 nt, Homo sapiens
  misc_RNA (1)...(19): siRNA sense strand
ccuuucggcuccuccauug

SEQ ID NO: 1013058 - RNA, 19 nt, Homo sapiens
  misc_RNA (1)...(19): siRNA sense strand
ccaggaagcccagaaaugc

SEQ ID NO: 1013059 - RNA, 19 nt, Homo sapiens
  misc_RNA (1)...(19): siRNA sense strand
gcgggcacguguccaucuu

SEQ ID NO: 1013060 - RNA, 19 nt, Homo sapiens
  misc_RNA (1)...(19): siRNA sense strand
gagagcaacaaggauguga

SEQ ID NO: 1013061 - RNA, 19 nt, Homo sapiens
  misc_RNA (1)...(19): siRNA sense strand
ggacggcuucuaccucuac

SEQ ID NO: 1013062 - RNA, 19 nt, Homo sapiens
  misc_RNA (1)...(19): siRNA sense strand
cgaaagugagacuccuaaa

SEQ ID NO: 1013063 - RNA, 19 nt, Homo sapiens
  misc_RNA (1)...(19): siRNA sense strand
cagaaaugcccagccgaaa

SEQ ID NO: 1013064 - RNA, 19 nt, Homo sapiens
  misc_RNA (1)...(19): siRNA sense strand
ccgaaagugagacuccuaa

SEQ ID NO: 1013065 - RNA, 19 nt, Homo sapiens
  misc_RNA (1)...(19): siRNA sense strand
uucgagagguggcccauuc

SEQ ID NO: 1013066 - RNA, 19 nt, Homo sapiens
  misc_RNA (1)...(19): siRNA sense strand
ccacaacccagaccugacu

SEQ ID NO: 1013067 - RNA, 19 nt, Homo sapiens
  misc_RNA (1)...(19): siRNA sense strand
ccaggaaggcagggaguug

SEQ ID NO: 1013068 - RNA, 19 nt, Homo sapiens
  misc_RNA (1)...(19): siRNA sense strand
uuugagcucugcaagaucu

SEQ ID NO: 1013069 - RNA, 19 nt, Homo sapiens
  misc_RNA (1)...(19): siRNA sense strand
ccuaugaugagguccaaga

SEQ ID NO: 1013070 - RNA, 19 nt, Homo sapiens
  misc_RNA (1)...(19): siRNA sense strand
gacaagccaggcaguuaca

SEQ ID NO: 1013071 - RNA, 19 nt, Homo sapiens
  misc_RNA (1)...(19): siRNA sense strand
agaaaugcccagccgaaag

SEQ ID NO: 1013072 - RNA, 19 nt, Homo sapiens
  misc_RNA (1)...(19): siRNA sense strand
ccgugaguaucuaccaguu

SEQ ID NO: 1013073 - RNA, 19 nt, Homo sapiens
  misc_RNA (1)...(19): siRNA sense strand
cgacucggcucuucccuuu

SEQ ID NO: 1013074 - RNA, 19 nt, Homo sapiens
  misc_RNA (1)...(19): siRNA sense strand
ucacagaggucagggaguu

SEQ ID NO: 1013075 - RNA, 19 nt, Homo sapiens
  misc_RNA (1)...(19): siRNA sense strand
gaucgacgcucucuaugac

SEQ ID NO: 1013076 - RNA, 19 nt, Homo sapiens
  misc_RNA (1)...(19): siRNA sense strand
gaucgcagccuucaacauc

SEQ ID NO: 1013077 - RNA, 19 nt, Homo sapiens
  misc_RNA (1)...(19): siRNA sense strand
ggacggaacagcuauaagg

SEQ ID NO: 1013078 - RNA, 19 nt, Homo sapiens
  misc_RNA (1)...(19): siRNA sense strand
ggacagcuacuacuacgau

SEQ ID NO: 1013079 - RNA, 19 nt, Homo sapiens
  misc_RNA (1)...(19): siRNA sense strand
acucggcucuucccuuuaa

SEQ ID NO: 1013080 - RNA, 19 nt, Homo sapiens
  misc_RNA (1)...(19): siRNA sense strand
ucagggaguuugccauugu

SEQ ID NO: 1013081 - RNA, 19 nt, Homo sapiens
  misc_RNA (1)...(19): siRNA sense strand
agaccaagauguccaaugc

SEQ ID NO: 1013082 - RNA, 19 nt, Homo sapiens
  misc_RNA (1)...(19): siRNA sense strand
caaccgagagccagccauu

SEQ ID NO: 1013083 - RNA, 19 nt, Homo sapiens
  misc_RNA (1)...(19): siRNA sense strand
ggucagggaguuugccauu

SEQ ID NO: 1013084 - RNA, 19 nt, Homo sapiens
  misc_RNA (1)...(19): siRNA sense strand
caccagacaccuaucacua

SEQ ID NO: 1013085 - RNA, 19 nt, Homo sapiens
  misc_RNA (1)...(19): siRNA sense strand
caguggaggugaugcugaa

SEQ ID NO: 1013086 - RNA, 19 nt, Homo sapiens
  misc_RNA (1)...(19): siRNA sense strand
ggaagcugcuggacaaccu

SEQ ID NO: 1013087 - RNA, 19 nt, Homo sapiens
  misc_RNA (1)...(19): siRNA sense strand
ucagcuacauugugcagau

SEQ ID NO: 1013088 - RNA, 19 nt, Homo sapiens
  misc_RNA (1)...(19): siRNA sense strand
ggacaaccucaaucaggau

SEQ ID NO: 1013089 - RNA, 19 nt, Homo sapiens
  misc_RNA (1)...(19): siRNA sense strand
ggaugcaccagacaccuau

SEQ ID NO: 1013090 - RNA, 19 nt, Homo sapiens
  misc_RNA (1)...(19): siRNA sense strand
uggaggacgucauguugau

SEQ ID NO: 1013091 - RNA, 19 nt, Homo sapiens
  misc_RNA (1)...(19): siRNA sense strand
gggcugcagcuaugugaga

SEQ ID NO: 1013092 - RNA, 19 nt, Homo sapiens
  misc_RNA (1)...(19): siRNA sense strand
auaaggagcgcuaccuguu

SEQ ID NO: 1013093 - RNA, 19 nt, Homo sapiens
  misc_RNA (1)...(19): siRNA sense strand
cagggaguuugccauuguu

SEQ ID NO: 1013094 - RNA, 19 nt, Homo sapiens
  misc_RNA (1)...(19): siRNA sense strand
gacggaacagcuauaagga

SEQ ID NO: 1013095 - RNA, 19 nt, Homo sapiens
  misc_RNA (1)...(19): siRNA sense strand
ggacgcaguagccgagauc

SEQ ID NO: 1013096 - RNA, 19 nt, Homo sapiens
  misc_RNA (1)...(19): siRNA sense strand
uaaggagcgcuaccuguuc

SEQ ID NO: 1013097 - RNA, 19 nt, Homo sapiens
  misc_RNA (1)...(19): siRNA sense strand
gggcuuggaggacgucaug

SEQ ID NO: 1013098 - RNA, 19 nt, Homo sapiens
  misc_RNA (1)...(19): siRNA sense strand
caaccucaaucaggaugca

SEQ ID NO: 1013099 - RNA, 19 nt, Homo sapiens
  misc_RNA (1)...(19): siRNA sense strand
uggaggugaugcugaagug

SEQ ID NO: 1013100 - RNA, 19 nt, Homo sapiens
  misc_RNA (1)...(19): siRNA sense strand
gagaccaagauguccaaug

SEQ ID NO: 1013101 - RNA, 19 nt, Homo sapiens
  misc_RNA (1)...(19): siRNA sense strand
gcaccagacaccuaucacu

SEQ ID NO: 1013102 - RNA, 19 nt, Homo sapiens
  misc_RNA (1)...(19): siRNA sense strand
aaugcgggcugcagcuaug

SEQ ID NO: 1013103 - RNA, 19 nt, Homo sapiens
  misc_RNA (1)...(19): siRNA sense strand
gcuuggaggacgucauguu

SEQ ID NO: 1013104 - RNA, 19 nt, Homo sapiens
  misc_RNA (1)...(19): siRNA sense strand
gucagggaguuugccauug

SEQ ID NO: 1013105 - RNA, 19 nt, Homo sapiens
  misc_RNA (1)...(19): siRNA sense strand
cgagagccagccauuguca

SEQ ID NO: 1013106 - RNA, 19 nt, Homo sapiens
  misc_RNA (1)...(19): siRNA sense strand
agccagccauugucagguu

SEQ ID NO: 1013107 - RNA, 19 nt, Homo sapiens
  misc_RNA (1)...(19): siRNA sense strand
agaucgacgcucucuauga

SEQ ID NO: 1013108 - RNA, 19 nt, Homo sapiens
  misc_RNA (1)...(19): siRNA sense strand
gaagaggagacgacuaaua

SEQ ID NO: 1013109 - RNA, 19 nt, Homo sapiens
  misc_RNA (1)...(19): siRNA sense strand
ccaaagcgcugggauaaca

SEQ ID NO: 1013110 - RNA, 19 nt, Homo sapiens
  misc_RNA (1)...(19): siRNA sense strand
gaguaaguuucaucaggua

SEQ ID NO: 1013111 - RNA, 19 nt, Homo sapiens
  misc_RNA (1)...(19): siRNA sense strand
gaagcuguuucacuguuug

SEQ ID NO: 1013112 - RNA, 19 nt, Homo sapiens
  misc_RNA (1)...(19): siRNA sense strand
gcaaucaucgucugucuuc

SEQ ID NO: 1013113 - RNA, 19 nt, Homo sapiens
  misc_RNA (1)...(19): siRNA sense strand
ucacauugaugaagaugga

SEQ ID NO: 1013114 - RNA, 19 nt, Homo sapiens
  misc_RNA (1)...(19): siRNA sense strand
aaagagccauuggguguuu

SEQ ID NO: 1013115 - RNA, 19 nt, Homo sapiens
  misc_RNA (1)...(19): siRNA sense strand
ggccaucccucgaguaagu

SEQ ID NO: 1013116 - RNA, 19 nt, Homo sapiens
  misc_RNA (1)...(19): siRNA sense strand
gaaugucacagguagacua

SEQ ID NO: 1013117 - RNA, 19 nt, Homo sapiens
  misc_RNA (1)...(19): siRNA sense strand
gcagcuuuauuaccuguau

SEQ ID NO: 1013118 - RNA, 19 nt, Homo sapiens
  misc_RNA (1)...(19): siRNA sense strand
ucacggaucgagcucuuua

SEQ ID NO: 1013119 - RNA, 19 nt, Homo sapiens
  misc_RNA (1)...(19): siRNA sense strand
ggugauauuugccuuuagu

SEQ ID NO: 1013120 - RNA, 19 nt, Homo sapiens
  misc_RNA (1)...(19): siRNA sense strand
cggaagaggagacgacuaa

SEQ ID NO: 1013121 - RNA, 19 nt, Homo sapiens
  misc_RNA (1)...(19): siRNA sense strand
ugucacagguagacuaaug

SEQ ID NO: 1013122 - RNA, 19 nt, Homo sapiens
  misc_RNA (1)...(19): siRNA sense strand
aaucagacauccaguagca

SEQ ID NO: 1013123 - RNA, 19 nt, Homo sapiens
  misc_RNA (1)...(19): siRNA sense strand
gccauuggguguuugaauc

SEQ ID NO: 1013124 - RNA, 19 nt, Homo sapiens
  misc_RNA (1)...(19): siRNA sense strand
gcagcaggauaguaaugau

SEQ ID NO: 1013125 - RNA, 19 nt, Homo sapiens
  misc_RNA (1)...(19): siRNA sense strand
caucgucugucuucucugu

SEQ ID NO: 1013126 - RNA, 19 nt, Homo sapiens
  misc_RNA (1)...(19): siRNA sense strand
cgacuaauagaccaagaaa

SEQ ID NO: 1013127 - RNA, 19 nt, Homo sapiens
  misc_RNA (1)...(19): siRNA sense strand
ugggugauauuugccuuua

SEQ ID NO: 1013128 - RNA, 19 nt, Homo sapiens
  misc_RNA (1)...(19): siRNA sense strand
cucagcagcagcuuuauua

SEQ ID NO: 1013129 - RNA, 19 nt, Homo sapiens
  misc_RNA (1)...(19): siRNA sense strand
gaaagagccauuggguguu

SEQ ID NO: 1013130 - RNA, 19 nt, Homo sapiens
  misc_RNA (1)...(19): siRNA sense strand
gaggcugaaucaagaaucu

SEQ ID NO: 1013131 - RNA, 19 nt, Homo sapiens
  misc_RNA (1)...(19): siRNA sense strand
aagaggagacgacuaauag

SEQ ID NO: 1013132 - RNA, 19 nt, Homo sapiens
  misc_RNA (1)...(19): siRNA sense strand
guacugugggugauauuug

SEQ ID NO: 1013133 - RNA, 19 nt, Homo sapiens
  misc_RNA (1)...(19): siRNA sense strand
ugaugacacugaagcuguu

SEQ ID NO: 1013134 - RNA, 19 nt, Homo sapiens
  misc_RNA (1)...(19): siRNA sense strand
caucagguagacauuaauu

SEQ ID NO: 1013135 - RNA, 19 nt, Homo sapiens
  misc_RNA (1)...(19): siRNA sense strand
gcucagcagcagcuuuauu

SEQ ID NO: 1013136 - RNA, 19 nt, Homo sapiens
  misc_RNA (1)...(19): siRNA sense strand
uuagugcacucuucuccuu

SEQ ID NO: 1013137 - RNA, 19 nt, Homo sapiens
  misc_RNA (1)...(19): siRNA sense strand
ggauaguaaugaugacacu

SEQ ID NO: 1013138 - RNA, 19 nt, Homo sapiens
  misc_RNA (1)...(19): siRNA sense strand
gguagacauuaauucuuuc

SEQ ID NO: 1013139 - RNA, 19 nt, Homo sapiens
  misc_RNA (1)...(19): siRNA sense strand
gaagaaugucacagguaga

SEQ ID NO: 1013140 - RNA, 19 nt, Homo sapiens
  misc_RNA (1)...(19): siRNA sense strand
guuguugucgugugacuuu

SEQ ID NO: 1013141 - RNA, 19 nt, Homo sapiens
  misc_RNA (1)...(19): siRNA sense strand
cuacguugguggaaucaca

SEQ ID NO: 1013142 - RNA, 19 nt, Homo sapiens
  misc_RNA (1)...(19): siRNA sense strand
ucaguacugugggugauau

SEQ ID NO: 1013143 - RNA, 19 nt, Homo sapiens
  misc_RNA (1)...(19): siRNA sense strand
caaaaucagacauccagua

SEQ ID NO: 1013144 - RNA, 19 nt, Homo sapiens
  misc_RNA (1)...(19): siRNA sense strand
uucaucagguagacauuaa

SEQ ID NO: 1013145 - RNA, 19 nt, Homo sapiens
  misc_RNA (1)...(19): siRNA sense strand
guaaguuucaucagguaga

SEQ ID NO: 1013146 - RNA, 19 nt, Homo sapiens
  misc_RNA (1)...(19): siRNA sense strand
acucuucuccuucacagua

SEQ ID NO: 1013147 - RNA, 19 nt, Homo sapiens
  misc_RNA (1)...(19): siRNA sense strand
cuuauugccuguucaguac

SEQ ID NO: 1013148 - RNA, 19 nt, Homo sapiens
  misc_RNA (1)...(19): siRNA sense strand
gacauccaguagcaucguu

SEQ ID NO: 1013149 - RNA, 19 nt, Homo sapiens
  misc_RNA (1)...(19): siRNA sense strand
ggccuacguugguggaauc

SEQ ID NO: 1013150 - RNA, 19 nt, Homo sapiens
  misc_RNA (1)...(19): siRNA sense strand
uaguaaugaugacacugaa

SEQ ID NO: 1013151 - RNA, 19 nt, Homo sapiens
  misc_RNA (1)...(19): siRNA sense strand
uuaauucuuucacgaggau

SEQ ID NO: 1013152 - RNA, 19 nt, Homo sapiens
  misc_RNA (1)...(19): siRNA sense strand
ucagguagacauuaauucu

SEQ ID NO: 1013153 - RNA, 19 nt, Homo sapiens
  misc_RNA (1)...(19): siRNA sense strand
gugcaaucaucgucugucu

SEQ ID NO: 1013154 - RNA, 19 nt, Homo sapiens
  misc_RNA (1)...(19): siRNA sense strand
gaggagacgacuaauagac

SEQ ID NO: 1013155 - RNA, 19 nt, Homo sapiens
  misc_RNA (1)...(19): siRNA sense strand
guugguggaaucacauuga

SEQ ID NO: 1013156 - RNA, 19 nt, Homo sapiens
  misc_RNA (1)...(19): siRNA sense strand
ucgagucagugcaaucauc

SEQ ID NO: 1013157 - RNA, 19 nt, Homo sapiens
  misc_RNA (1)...(19): siRNA sense strand
gacgacuaauagaccaaga

SEQ ID NO: 1013158 - RNA, 19 nt, Homo sapiens
  misc_RNA (1)...(19): siRNA sense strand
auaguaaugaugacacuga

SEQ ID NO: 1013159 - RNA, 19 nt, Homo sapiens
  misc_RNA (1)...(19): siRNA sense strand
cauuggguguuugaaucua

SEQ ID NO: 1013160 - RNA, 19 nt, Homo sapiens
  misc_RNA (1)...(19): siRNA sense strand
cacuuauucuuucgaguca

SEQ ID NO: 1013161 - RNA, 19 nt, Homo sapiens
  misc_RNA (1)...(19): siRNA sense strand
cagguagacauuaauucuu

SEQ ID NO: 1013162 - RNA, 19 nt, Homo sapiens
  misc_RNA (1)...(19): siRNA sense strand
aagaaaagccaaaaucaga

SEQ ID NO: 1013163 - RNA, 19 nt, Homo sapiens
  misc_RNA (1)...(19): siRNA sense strand
ucgucugucuucucuguga

SEQ ID NO: 1013164 - RNA, 19 nt, Homo sapiens
  misc_RNA (1)...(19): siRNA sense strand
ggacuuauugccuguucag

SEQ ID NO: 1013165 - RNA, 19 nt, Homo sapiens
  misc_RNA (1)...(19): siRNA sense strand
uuccaaagcgcugggauaa

SEQ ID NO: 1013166 - RNA, 19 nt, Homo sapiens
  misc_RNA (1)...(19): siRNA sense strand
acuuauugccuguucagua

SEQ ID NO: 1013167 - RNA, 19 nt, Homo sapiens
  misc_RNA (1)...(19): siRNA sense strand
cagcaggauaguaaugaug

SEQ ID NO: 1013168 - RNA, 19 nt, Homo sapiens
  misc_RNA (1)...(19): siRNA sense strand
uuucaucagguagacauua

SEQ ID NO: 1013169 - RNA, 19 nt, Homo sapiens
  misc_RNA (1)...(19): siRNA sense strand
guguuugaaucuagaaagg

SEQ ID NO: 1013170 - RNA, 19 nt, Homo sapiens
  misc_RNA (1)...(19): siRNA sense strand
gcaggauaguaaugaugac

SEQ ID NO: 1013171 - RNA, 19 nt, Homo sapiens
  misc_RNA (1)...(19): siRNA sense strand
ccaagaaaagccaaaauca

SEQ ID NO: 1013172 - RNA, 19 nt, Homo sapiens
  misc_RNA (1)...(19): siRNA sense strand
caauuaucuuguuguuguc

SEQ ID NO: 1013173 - RNA, 19 nt, Homo sapiens
  misc_RNA (1)...(19): siRNA sense strand
gaacaaaccugaagcagaa

SEQ ID NO: 1013174 - RNA, 19 nt, Homo sapiens
  misc_RNA (1)...(19): siRNA sense strand
gaauaaggaugccaccaaa

SEQ ID NO: 1013175 - RNA, 19 nt, Homo sapiens
  misc_RNA (1)...(19): siRNA sense strand
gauaaacuguuacgcauau

SEQ ID NO: 1013176 - RNA, 19 nt, Homo sapiens
  misc_RNA (1)...(19): siRNA sense strand
gagaagaauuagaauccua

SEQ ID NO: 1013177 - RNA, 19 nt, Homo sapiens
  misc_RNA (1)...(19): siRNA sense strand
gauggaacauugagacuau

SEQ ID NO: 1013178 - RNA, 19 nt, Homo sapiens
  misc_RNA (1)...(19): siRNA sense strand
gaaauuaguggucauacuu

SEQ ID NO: 1013179 - RNA, 19 nt, Homo sapiens
  misc_RNA (1)...(19): siRNA sense strand
gcaaagaugguaaaccuau

SEQ ID NO: 1013180 - RNA, 19 nt, Homo sapiens
  misc_RNA (1)...(19): siRNA sense strand
ccaauuaaauccuuugaag

SEQ ID NO: 1013181 - RNA, 19 nt, Homo sapiens
  misc_RNA (1)...(19): siRNA sense strand
gugcaacacugaauaagga

SEQ ID NO: 1013182 - RNA, 19 nt, Homo sapiens
  misc_RNA (1)...(19): siRNA sense strand
gaggauaaacagauucuuu

SEQ ID NO: 1013183 - RNA, 19 nt, Homo sapiens
  misc_RNA (1)...(19): siRNA sense strand
agaaauugcuucagagaau

SEQ ID NO: 1013184 - RNA, 19 nt, Homo sapiens
  misc_RNA (1)...(19): siRNA sense strand
gaauucagagugcaucuuu

SEQ ID NO: 1013185 - RNA, 19 nt, Homo sapiens
  misc_RNA (1)...(19): siRNA sense strand
ugacagaagugaaaucucu

SEQ ID NO: 1013186 - RNA, 19 nt, Homo sapiens
  misc_RNA (1)...(19): siRNA sense strand
aaucagcgcuugcaaagau

SEQ ID NO: 1013187 - RNA, 19 nt, Homo sapiens
  misc_RNA (1)...(19): siRNA sense strand
ggagagauuuugguuauaa

SEQ ID NO: 1013188 - RNA, 19 nt, Homo sapiens
  misc_RNA (1)...(19): siRNA sense strand
gcaggauaguaauuauuug

SEQ ID NO: 1013189 - RNA, 19 nt, Homo sapiens
  misc_RNA (1)...(19): siRNA sense strand
ucaguggcaucacgccuua

SEQ ID NO: 1013190 - RNA, 19 nt, Homo sapiens
  misc_RNA (1)...(19): siRNA sense strand
gaagaggagcuagaagaaa

SEQ ID NO: 1013191 - RNA, 19 nt, Homo sapiens
  misc_RNA (1)...(19): siRNA sense strand
gagacuggauuggaacauu

SEQ ID NO: 1013192 - RNA, 19 nt, Homo sapiens
  misc_RNA (1)...(19): siRNA sense strand
aagaggagcuagaagaaau

SEQ ID NO: 1013193 - RNA, 19 nt, Homo sapiens
  misc_RNA (1)...(19): siRNA sense strand
ggacccaauuaaauccuuu

SEQ ID NO: 1013194 - RNA, 19 nt, Homo sapiens
  misc_RNA (1)...(19): siRNA sense strand
agacuggauuggaacauuu

SEQ ID NO: 1013195 - RNA, 19 nt, Homo sapiens
  misc_RNA (1)...(19): siRNA sense strand
ggaaauuaguggucauacu

SEQ ID NO: 1013196 - RNA, 19 nt, Homo sapiens
  misc_RNA (1)...(19): siRNA sense strand
caucacgccuuauggguau

SEQ ID NO: 1013197 - RNA, 19 nt, Homo sapiens
  misc_RNA (1)...(19): siRNA sense strand
ggcaaacugugguaggaaa

SEQ ID NO: 1013198 - RNA, 19 nt, Homo sapiens
  misc_RNA (1)...(19): siRNA sense strand
gcauauaugacuugaacaa

SEQ ID NO: 1013199 - RNA, 19 nt, Homo sapiens
  misc_RNA (1)...(19): siRNA sense strand
ggauaaacuguuacgcaua

SEQ ID NO: 1013200 - RNA, 19 nt, Homo sapiens
  misc_RNA (1)...(19): siRNA sense strand
ucacgcaggauaguaauua

SEQ ID NO: 1013201 - RNA, 19 nt, Homo sapiens
  misc_RNA (1)...(19): siRNA sense strand
ucauaaaggugcuguuugg

SEQ ID NO: 1013202 - RNA, 19 nt, Homo sapiens
  misc_RNA (1)...(19): siRNA sense strand
caaagaugguaaaccuaug

SEQ ID NO: 1013203 - RNA, 19 nt, Homo sapiens
  misc_RNA (1)...(19): siRNA sense strand
caacagaagaggagcuaga

SEQ ID NO: 1013204 - RNA, 19 nt, Homo sapiens
  misc_RNA (1)...(19): siRNA sense strand
acaggagacuggauuggaa

SEQ ID NO: 1013205 - RNA, 19 nt, Homo sapiens
  misc_RNA (1)...(19): siRNA sense strand
ugacaaaacuguucgacuu

SEQ ID NO: 1013206 - RNA, 19 nt, Homo sapiens
  misc_RNA (1)...(19): siRNA sense strand
gcagugaggauaaacagau

SEQ ID NO: 1013207 - RNA, 19 nt, Homo sapiens
  misc_RNA (1)...(19): siRNA sense strand
gcucauaaacacauuguca

SEQ ID NO: 1013208 - RNA, 19 nt, Homo sapiens
  misc_RNA (1)...(19): siRNA sense strand
ggucauaaaggugcuguuu

SEQ ID NO: 1013209 - RNA, 19 nt, Homo sapiens
  misc_RNA (1)...(19): siRNA sense strand
cagaagaggagcuagaaga

SEQ ID NO: 1013210 - RNA, 19 nt, Homo sapiens
  misc_RNA (1)...(19): siRNA sense strand
gagauuuaguccugaugga

SEQ ID NO: 1013211 - RNA, 19 nt, Homo sapiens
  misc_RNA (1)...(19): siRNA sense strand
gcagaaccuaaggaaauua

SEQ ID NO: 1013212 - RNA, 19 nt, Homo sapiens
  misc_RNA (1)...(19): siRNA sense strand
gaagcagaaccuaaggaaa

SEQ ID NO: 1013213 - RNA, 19 nt, Homo sapiens
  misc_RNA (1)...(19): siRNA sense strand
aagcagaaccuaaggaaau

SEQ ID NO: 1013214 - RNA, 19 nt, Homo sapiens
  misc_RNA (1)...(19): siRNA sense strand
caucaauucugcaucucuu

SEQ ID NO: 1013215 - RNA, 19 nt, Homo sapiens
  misc_RNA (1)...(19): siRNA sense strand
ccuuauggguauuucuuaa

SEQ ID NO: 1013216 - RNA, 19 nt, Homo sapiens
  misc_RNA (1)...(19): siRNA sense strand
uucagaagauggaacauug

SEQ ID NO: 1013217 - RNA, 19 nt, Homo sapiens
  misc_RNA (1)...(19): siRNA sense strand
cguauggccuuuggaaaug

SEQ ID NO: 1013218 - RNA, 19 nt, Homo sapiens
  misc_RNA (1)...(19): siRNA sense strand
cucaggagaugaauugaug

SEQ ID NO: 1013219 - RNA, 19 nt, Homo sapiens
  misc_RNA (1)...(19): siRNA sense strand
uauggacgaucuauugcuu

SEQ ID NO: 1013220 - RNA, 19 nt, Homo sapiens
  misc_RNA (1)...(19): siRNA sense strand
cagugaggauaaacagauu

SEQ ID NO: 1013221 - RNA, 19 nt, Homo sapiens
  misc_RNA (1)...(19): siRNA sense strand
cgcaggauaguaauuauuu

SEQ ID NO: 1013222 - RNA, 19 nt, Homo sapiens
  misc_RNA (1)...(19): siRNA sense strand
ugucaagacuguggauuuc

SEQ ID NO: 1013223 - RNA, 19 nt, Homo sapiens
  misc_RNA (1)...(19): siRNA sense strand
aaacguauggccuuuggaa

SEQ ID NO: 1013224 - RNA, 19 nt, Homo sapiens
  misc_RNA (1)...(19): siRNA sense strand
ugaauaaggaugccaccaa

SEQ ID NO: 1013225 - RNA, 19 nt, Homo sapiens
  misc_RNA (1)...(19): siRNA sense strand
gaaaugugugcuuccugaa

SEQ ID NO: 1013226 - RNA, 19 nt, Homo sapiens
  misc_RNA (1)...(19): siRNA sense strand
agaagaggagcuagaagaa

SEQ ID NO: 1013227 - RNA, 19 nt, Homo sapiens
  misc_RNA (1)...(19): siRNA sense strand
gacccuggcucauaaacac

SEQ ID NO: 1013228 - RNA, 19 nt, Homo sapiens
  misc_RNA (1)...(19): siRNA sense strand
ugaagcagaaccuaaggaa

SEQ ID NO: 1013229 - RNA, 19 nt, Homo sapiens
  misc_RNA (1)...(19): siRNA sense strand
cauaaacacauugucaaga

SEQ ID NO: 1013230 - RNA, 19 nt, Homo sapiens
  misc_RNA (1)...(19): siRNA sense strand
agaauuagaauccuacaag

SEQ ID NO: 1013231 - RNA, 19 nt, Homo sapiens
  misc_RNA (1)...(19): siRNA sense strand
auaaacacauugucaagac

SEQ ID NO: 1013232 - RNA, 19 nt, Homo sapiens
  misc_RNA (1)...(19): siRNA sense strand
acauugagacuauggcaaa

SEQ ID NO: 1013233 - RNA, 19 nt, Homo sapiens
  misc_RNA (1)...(19): siRNA sense strand
acgcauauaugacuugaac

SEQ ID NO: 1013234 - RNA, 19 nt, Homo sapiens
  misc_RNA (1)...(19): siRNA sense strand
gauacaggagacuggauug

SEQ ID NO: 1013235 - RNA, 19 nt, Homo sapiens
  misc_RNA (1)...(19): siRNA sense strand
gagugcaucuuuccuucag

SEQ ID NO: 1013236 - RNA, 19 nt, Homo sapiens
  misc_RNA (1)...(19): siRNA sense strand
gacaacagaagaggagcua

SEQ ID NO: 1013237 - RNA, 19 nt, Homo sapiens
  misc_RNA (1)...(19): siRNA sense strand
ggagaagaauuagaauccu

SEQ ID NO: 1013238 - RNA, 19 nt, Homo sapiens
  misc_RNA (1)...(19): siRNA sense strand
ggauaaacagauucuuucu

SEQ ID NO: 1013239 - RNA, 19 nt, Homo sapiens
  misc_RNA (1)...(19): siRNA sense strand
agcagaaccuaaggaaauu

SEQ ID NO: 1013240 - RNA, 19 nt, Homo sapiens
  misc_RNA (1)...(19): siRNA sense strand
uaaacacauugucaagacu

SEQ ID NO: 1013241 - RNA, 19 nt, Homo sapiens
  misc_RNA (1)...(19): siRNA sense strand
uaguggagaagaauuagaa

SEQ ID NO: 1013242 - RNA, 19 nt, Homo sapiens
  misc_RNA (1)...(19): siRNA sense strand
uaacuuauggacgaucuau

SEQ ID NO: 1013243 - RNA, 19 nt, Homo sapiens
  misc_RNA (1)...(19): siRNA sense strand
acagaagugaaaucucuaa

SEQ ID NO: 1013244 - RNA, 19 nt, Homo sapiens
  misc_RNA (1)...(19): siRNA sense strand
aaacuguuacgcauauaug

SEQ ID NO: 1013245 - RNA, 19 nt, Homo sapiens
  misc_RNA (1)...(19): siRNA sense strand
gacagaagugaaaucucua

SEQ ID NO: 1013246 - RNA, 19 nt, Homo sapiens
  misc_RNA (1)...(19): siRNA sense strand
uugcaaagaugguaaaccu

SEQ ID NO: 1013247 - RNA, 19 nt, Homo sapiens
  misc_RNA (1)...(19): siRNA sense strand
guggugcagugaggauaaa

SEQ ID NO: 1013248 - RNA, 19 nt, Homo sapiens
  misc_RNA (1)...(19): siRNA sense strand
gaggagcuagaagaaauug

SEQ ID NO: 1013249 - RNA, 19 nt, Homo sapiens
  misc_RNA (1)...(19): siRNA sense strand
ucagaagauggaacauuga

SEQ ID NO: 1013250 - RNA, 19 nt, Homo sapiens
  misc_RNA (1)...(19): siRNA sense strand
gccagugguucagaagaug

SEQ ID NO: 1013251 - RNA, 19 nt, Homo sapiens
  misc_RNA (1)...(19): siRNA sense strand
cacgcaggauaguaauuau

SEQ ID NO: 1013252 - RNA, 19 nt, Homo sapiens
  misc_RNA (1)...(19): siRNA sense strand
ucagagugcaucuuuccuu

SEQ ID NO: 1013253 - RNA, 19 nt, Homo sapiens
  misc_RNA (1)...(19): siRNA sense strand
cgcgacccgugguugauuu

SEQ ID NO: 1013254 - RNA, 19 nt, Homo sapiens
  misc_RNA (1)...(19): siRNA sense strand
guauggccuuuggaaaugu

SEQ ID NO: 1013255 - RNA, 19 nt, Homo sapiens
  misc_RNA (1)...(19): siRNA sense strand
aaccaucaauucugcaucu

SEQ ID NO: 1013256 - RNA, 19 nt, Homo sapiens
  misc_RNA (1)...(19): siRNA sense strand
gccuuauggguauuucuua

SEQ ID NO: 1013257 - RNA, 19 nt, Homo sapiens
  misc_RNA (1)...(19): siRNA sense strand
ucauagugcaguaaguuug

SEQ ID NO: 1013258 - RNA, 19 nt, Homo sapiens
  misc_RNA (1)...(19): siRNA sense strand
gacgaucuauugcuuuuca

SEQ ID NO: 1013259 - RNA, 19 nt, Homo sapiens
  misc_RNA (1)...(19): siRNA sense strand
uaaggaaauuaguggucau

SEQ ID NO: 1013260 - RNA, 19 nt, Homo sapiens
  misc_RNA (1)...(19): siRNA sense strand
guggauuucacgcaggaua

SEQ ID NO: 1013261 - RNA, 19 nt, Homo sapiens
  misc_RNA (1)...(19): siRNA sense strand
gaagaauuagaauccuaca

SEQ ID NO: 1013262 - RNA, 19 nt, Homo sapiens
  misc_RNA (1)...(19): siRNA sense strand
acuuauggacgaucuauug

SEQ ID NO: 1013263 - RNA, 19 nt, Homo sapiens
  misc_RNA (1)...(19): siRNA sense strand
ucuuucugcugaugacaaa

SEQ ID NO: 1013264 - RNA, 19 nt, Homo sapiens
  misc_RNA (1)...(19): siRNA sense strand
uuacgcauauaugacuuga

SEQ ID NO: 1013265 - RNA, 19 nt, Homo sapiens
  misc_RNA (1)...(19): siRNA sense strand
uuaaucagcgcuugcaaag

SEQ ID NO: 1013266 - RNA, 19 nt, Homo sapiens
  misc_RNA (1)...(19): siRNA sense strand
uauaugacuugaacaaacc

SEQ ID NO: 1013267 - RNA, 19 nt, Homo sapiens
  misc_RNA (1)...(19): siRNA sense strand
gagcuagaagaaauugcuu

SEQ ID NO: 1013268 - RNA, 19 nt, Homo sapiens
  misc_RNA (1)...(19): siRNA sense strand
gcgcuugcaaagaugguaa

SEQ ID NO: 1013269 - RNA, 19 nt, Homo sapiens
  misc_RNA (1)...(19): siRNA sense strand
gcuacuaugacagaaguga

SEQ ID NO: 1013270 - RNA, 19 nt, Homo sapiens
  misc_RNA (1)...(19): siRNA sense strand
ugccagugguucagaagau

SEQ ID NO: 1013271 - RNA, 19 nt, Homo sapiens
  misc_RNA (1)...(19): siRNA sense strand
gggagagauuuugguuaua

SEQ ID NO: 1013272 - RNA, 19 nt, Homo sapiens
  misc_RNA (1)...(19): siRNA sense strand
cagaagugaaaucucuaaa

SEQ ID NO: 1013273 - RNA, 19 nt, Homo sapiens
  misc_RNA (1)...(19): siRNA sense strand
gaccaaagcugaucucaua

SEQ ID NO: 1013274 - RNA, 19 nt, Homo sapiens
  misc_RNA (1)...(19): siRNA sense strand
gcagacaucuccaugauug

SEQ ID NO: 1013275 - RNA, 19 nt, Homo sapiens
  misc_RNA (1)...(19): siRNA sense strand
gaaagaagaggaagauaaa

SEQ ID NO: 1013276 - RNA, 19 nt, Homo sapiens
  misc_RNA (1)...(19): siRNA sense strand
guaaagagcugaaaauuga

SEQ ID NO: 1013277 - RNA, 19 nt, Homo sapiens
  misc_RNA (1)...(19): siRNA sense strand
ggacagcugugaugaguug

SEQ ID NO: 1013278 - RNA, 19 nt, Homo sapiens
  misc_RNA (1)...(19): siRNA sense strand
gaaauacauugaucaggaa

SEQ ID NO: 1013279 - RNA, 19 nt, Homo sapiens
  misc_RNA (1)...(19): siRNA sense strand
aaagugauccuccaucuua

SEQ ID NO: 1013280 - RNA, 19 nt, Homo sapiens
  misc_RNA (1)...(19): siRNA sense strand
cuaagaagaucaaagagaa

SEQ ID NO: 1013281 - RNA, 19 nt, Homo sapiens
  misc_RNA (1)...(19): siRNA sense strand
ucaaagaaguagugaagaa

SEQ ID NO: 1013282 - RNA, 19 nt, Homo sapiens
  misc_RNA (1)...(19): siRNA sense strand
cagaagacaaggagaauua

SEQ ID NO: 1013283 - RNA, 19 nt, Homo sapiens
  misc_RNA (1)...(19): siRNA sense strand
caaggagaauuacaagaaa

SEQ ID NO: 1013284 - RNA, 19 nt, Homo sapiens
  misc_RNA (1)...(19): siRNA sense strand
gcacaacgaugaugaacag

SEQ ID NO: 1013285 - RNA, 19 nt, Homo sapiens
  misc_RNA (1)...(19): siRNA sense strand
gaaauucuaugaggcauuc

SEQ ID NO: 1013286 - RNA, 19 nt, Homo sapiens
  misc_RNA (1)...(19): siRNA sense strand
acaagagccucacuaauga

SEQ ID NO: 1013287 - RNA, 19 nt, Homo sapiens
  misc_RNA (1)...(19): siRNA sense strand
ucacaaagcacaacgauga

SEQ ID NO: 1013288 - RNA, 19 nt, Homo sapiens
  misc_RNA (1)...(19): siRNA sense strand
caacgaugaugaacaguau

SEQ ID NO: 1013289 - RNA, 19 nt, Homo sapiens
  misc_RNA (1)...(19): siRNA sense strand
gaagcauucucaguucaua

SEQ ID NO: 1013290 - RNA, 19 nt, Homo sapiens
  misc_RNA (1)...(19): siRNA sense strand
gaacguacccugacuuugg

SEQ ID NO: 1013291 - RNA, 19 nt, Homo sapiens
  misc_RNA (1)...(19): siRNA sense strand
gcaguuugguguuggcuuu

SEQ ID NO: 1013292 - RNA, 19 nt, Homo sapiens
  misc_RNA (1)...(19): siRNA sense strand
acacagaaguccaucuauu

SEQ ID NO: 1013293 - RNA, 19 nt, Homo sapiens
  misc_RNA (1)...(19): siRNA sense strand
ggaagagccuggucucagu

SEQ ID NO: 1013294 - RNA, 19 nt, Homo sapiens
  misc_RNA (1)...(19): siRNA sense strand
ugacagacccuucgaaguu

SEQ ID NO: 1013295 - RNA, 19 nt, Homo sapiens
  misc_RNA (1)...(19): siRNA sense strand
gaugacagcgguaaggaua

SEQ ID NO: 1013296 - RNA, 19 nt, Homo sapiens
  misc_RNA (1)...(19): siRNA sense strand
gaguugaucucuaaugcuu

SEQ ID NO: 1013297 - RNA, 19 nt, Homo sapiens
  misc_RNA (1)...(19): siRNA sense strand
caacucaugucccucauca

SEQ ID NO: 1013298 - RNA, 19 nt, Homo sapiens
  misc_RNA (1)...(19): siRNA sense strand
cacagaaguccaucuauua

SEQ ID NO: 1013299 - RNA, 19 nt, Homo sapiens
  misc_RNA (1)...(19): siRNA sense strand
caaagcugaucucauaaau

SEQ ID NO: 1013300 - RNA, 19 nt, Homo sapiens
  misc_RNA (1)...(19): siRNA sense strand
gaagaccacuuggcaguca

SEQ ID NO: 1013301 - RNA, 19 nt, Homo sapiens
  misc_RNA (1)...(19): siRNA sense strand
gaaauugcccaacucaugu

SEQ ID NO: 1013302 - RNA, 19 nt, Homo sapiens
  misc_RNA (1)...(19): siRNA sense strand
agagaaaggugagaaagaa

SEQ ID NO: 1013303 - RNA, 19 nt, Homo sapiens
  misc_RNA (1)...(19): siRNA sense strand
gcuaucccaucacccuuua

SEQ ID NO: 1013304 - RNA, 19 nt, Homo sapiens
  misc_RNA (1)...(19): siRNA sense strand
gccuugagcucuucucuga

SEQ ID NO: 1013305 - RNA, 19 nt, Homo sapiens
  misc_RNA (1)...(19): siRNA sense strand
gaucgaagauguggguuca

SEQ ID NO: 1013306 - RNA, 19 nt, Homo sapiens
  misc_RNA (1)...(19): siRNA sense strand
gaaggucaguuggaauuca

SEQ ID NO: 1013307 - RNA, 19 nt, Homo sapiens
  misc_RNA (1)...(19): siRNA sense strand
guaaggauaagaagaagaa

SEQ ID NO: 1013308 - RNA, 19 nt, Homo sapiens
  misc_RNA (1)...(19): siRNA sense strand
uacaagagccucacuaaug

SEQ ID NO: 1013309 - RNA, 19 nt, Homo sapiens
  misc_RNA (1)...(19): siRNA sense strand
ggaaauuagugaugaugag

SEQ ID NO: 1013310 - RNA, 19 nt, Homo sapiens
  misc_RNA (1)...(19): siRNA sense strand
caucaucaauaccuucuau

SEQ ID NO: 1013311 - RNA, 19 nt, Homo sapiens
  misc_RNA (1)...(19): siRNA sense strand
agaaagaagaggaagauaa

SEQ ID NO: 1013312 - RNA, 19 nt, Homo sapiens
  misc_RNA (1)...(19): siRNA sense strand
gaaguuggacagugguaaa

SEQ ID NO: 1013313 - RNA, 19 nt, Homo sapiens
  misc_RNA (1)...(19): siRNA sense strand
aggaggagguggagacuuu

SEQ ID NO: 1013314 - RNA, 19 nt, Homo sapiens
  misc_RNA (1)...(19): siRNA sense strand
ggacaagauucgcuaugag

SEQ ID NO: 1013315 - RNA, 19 nt, Homo sapiens
  misc_RNA (1)...(19): siRNA sense strand
ucugcaagcucaugaaaga

SEQ ID NO: 1013316 - RNA, 19 nt, Homo sapiens
  misc_RNA (1)...(19): siRNA sense strand
gaagagagcaaggcaaagu

SEQ ID NO: 1013317 - RNA, 19 nt, Homo sapiens
  misc_RNA (1)...(19): siRNA sense strand
gaguauguuucucgcauga

SEQ ID NO: 1013318 - RNA, 19 nt, Homo sapiens
  misc_RNA (1)...(19): siRNA sense strand
ggaagagaaaggugagaaa

SEQ ID NO: 1013319 - RNA, 19 nt, Homo sapiens
  misc_RNA (1)...(19): siRNA sense strand
gacagacccuucgaaguug

SEQ ID NO: 1013320 - RNA, 19 nt, Homo sapiens
  misc_RNA (1)...(19): siRNA sense strand
gcauggaagaagucgauua

SEQ ID NO: 1013321 - RNA, 19 nt, Homo sapiens
  misc_RNA (1)...(19): siRNA sense strand
gaagauguggguucagaug

SEQ ID NO: 1013322 - RNA, 19 nt, Homo sapiens
  misc_RNA (1)...(19): siRNA sense strand
aagaagaucagacagagua

SEQ ID NO: 1013323 - RNA, 19 nt, Homo sapiens
  misc_RNA (1)...(19): siRNA sense strand
gcaagcucaugaaagaaau

SEQ ID NO: 1013324 - RNA, 19 nt, Homo sapiens
  misc_RNA (1)...(19): siRNA sense strand
uaaacaagaccaagccuau

SEQ ID NO: 1013325 - RNA, 19 nt, Homo sapiens
  misc_RNA (1)...(19): siRNA sense strand
acaaggagaauuacaagaa

SEQ ID NO: 1013326 - RNA, 19 nt, Homo sapiens
  misc_RNA (1)...(19): siRNA sense strand
gugcagacaucuccaugau

SEQ ID NO: 1013327 - RNA, 19 nt, Homo sapiens
  misc_RNA (1)...(19): siRNA sense strand
aaaccgcccugcuaucuuc

SEQ ID NO: 1013328 - RNA, 19 nt, Homo sapiens
  misc_RNA (1)...(19): siRNA sense strand
cagcugugaugaguugaua

SEQ ID NO: 1013329 - RNA, 19 nt, Homo sapiens
  misc_RNA (1)...(19): siRNA sense strand
gaagagaggcgggucaaag

SEQ ID NO: 1013330 - RNA, 19 nt, Homo sapiens
  misc_RNA (1)...(19): siRNA sense strand
ccaaagugauccuccaucu

SEQ ID NO: 1013331 - RNA, 19 nt, Homo sapiens
  misc_RNA (1)...(19): siRNA sense strand
ccaaagcugaucucauaaa

SEQ ID NO: 1013332 - RNA, 19 nt, Homo sapiens
  misc_RNA (1)...(19): siRNA sense strand
ggaacccaaugcugcaguu

SEQ ID NO: 1013333 - RNA, 19 nt, Homo sapiens
  misc_RNA (1)...(19): siRNA sense strand
ccugcuaucuucuggcuuu

SEQ ID NO: 1013334 - RNA, 19 nt, Homo sapiens
  misc_RNA (1)...(19): siRNA sense strand
gaagaaaacuaagaagauc

SEQ ID NO: 1013335 - RNA, 19 nt, Homo sapiens
  misc_RNA (1)...(19): siRNA sense strand
gaagaggaagauaaagaug

SEQ ID NO: 1013336 - RNA, 19 nt, Homo sapiens
  misc_RNA (1)...(19): siRNA sense strand
gcagagaaagugguuguga

SEQ ID NO: 1013337 - RNA, 19 nt, Homo sapiens
  misc_RNA (1)...(19): siRNA sense strand
caaagcacaacgaugauga

SEQ ID NO: 1013338 - RNA, 19 nt, Homo sapiens
  misc_RNA (1)...(19): siRNA sense strand
auaagaagguugagaaggu

SEQ ID NO: 1013339 - RNA, 19 nt, Homo sapiens
  misc_RNA (1)...(19): siRNA sense strand
ugcagcagcucaaggaauu

SEQ ID NO: 1013340 - RNA, 19 nt, Homo sapiens
  misc_RNA (1)...(19): siRNA sense strand
uaccagaguaucucaauuu

SEQ ID NO: 1013341 - RNA, 19 nt, Homo sapiens
  misc_RNA (1)...(19): siRNA sense strand
gcgguaaggauaagaagaa

SEQ ID NO: 1013342 - RNA, 19 nt, Homo sapiens
  misc_RNA (1)...(19): siRNA sense strand
ggucaaagaaguagugaag

SEQ ID NO: 1013343 - RNA, 19 nt, Homo sapiens
  misc_RNA (1)...(19): siRNA sense strand
gacaagauucgcuaugaga

SEQ ID NO: 1013344 - RNA, 19 nt, Homo sapiens
  misc_RNA (1)...(19): siRNA sense strand
gcaugaaggagacacagaa

SEQ ID NO: 1013345 - RNA, 19 nt, Homo sapiens
  misc_RNA (1)...(19): siRNA sense strand
agaggaguauggagaauuc

SEQ ID NO: 1013346 - RNA, 19 nt, Homo sapiens
  misc_RNA (1)...(19): siRNA sense strand
gcagaaauugcccaacuca

SEQ ID NO: 1013347 - RNA, 19 nt, Homo sapiens
  misc_RNA (1)...(19): siRNA sense strand
ugccaagucugguacuaaa

SEQ ID NO: 1013348 - RNA, 19 nt, Homo sapiens
  misc_RNA (1)...(19): siRNA sense strand
caagaaugauaaggcaguu

SEQ ID NO: 1013349 - RNA, 19 nt, Homo sapiens
  misc_RNA (1)...(19): siRNA sense strand
gcuaugagagccugacaga

SEQ ID NO: 1013350 - RNA, 19 nt, Homo sapiens
  misc_RNA (1)...(19): siRNA sense strand
uggacaagauucgcuauga

SEQ ID NO: 1013351 - RNA, 19 nt, Homo sapiens
  misc_RNA (1)...(19): siRNA sense strand
agaaauugcccaacucaug

SEQ ID NO: 1013352 - RNA, 19 nt, Homo sapiens
  misc_RNA (1)...(19): siRNA sense strand
cagagaaagugguugugau

SEQ ID NO: 1013353 - RNA, 19 nt, Homo sapiens
  misc_RNA (1)...(19): siRNA sense strand
uagaaggucaguuggaauu

SEQ ID NO: 1013354 - RNA, 19 nt, Homo sapiens
  misc_RNA (1)...(19): siRNA sense strand
gaagaucaaagagaaauac

SEQ ID NO: 1013355 - RNA, 19 nt, Homo sapiens
  misc_RNA (1)...(19): siRNA sense strand
agaggaagauaaagaugau

SEQ ID NO: 1013356 - RNA, 19 nt, Homo sapiens
  misc_RNA (1)...(19): siRNA sense strand
guacuaaagcauucaugga

SEQ ID NO: 1013357 - RNA, 19 nt, Homo sapiens
  misc_RNA (1)...(19): siRNA sense strand
agaaugauaaggcaguuaa

SEQ ID NO: 1013358 - RNA, 19 nt, Homo sapiens
  misc_RNA (1)...(19): siRNA sense strand
agaagaagaagauggaaga

SEQ ID NO: 1013359 - RNA, 19 nt, Homo sapiens
  misc_RNA (1)...(19): siRNA sense strand
agaaguccaucuauuacau

SEQ ID NO: 1013360 - RNA, 19 nt, Homo sapiens
  misc_RNA (1)...(19): siRNA sense strand
ucuaugaggcauucucuaa

SEQ ID NO: 1013361 - RNA, 19 nt, Homo sapiens
  misc_RNA (1)...(19): siRNA sense strand
uauggagaauucuacaaga

SEQ ID NO: 1013362 - RNA, 19 nt, Homo sapiens
  misc_RNA (1)...(19): siRNA sense strand
gagaaagaagaggaagaua

SEQ ID NO: 1013363 - RNA, 19 nt, Homo sapiens
  misc_RNA (1)...(19): siRNA sense strand
gaagagaaaggugagaaag

SEQ ID NO: 1013364 - RNA, 19 nt, Homo sapiens
  misc_RNA (1)...(19): siRNA sense strand
ucagacagaguaccuagaa

SEQ ID NO: 1013365 - RNA, 19 nt, Homo sapiens
  misc_RNA (1)...(19): siRNA sense strand
ggaagauaaagaugaugaa

SEQ ID NO: 1013366 - RNA, 19 nt, Homo sapiens
  misc_RNA (1)...(19): siRNA sense strand
gaaaccgcccugcuaucuu

SEQ ID NO: 1013367 - RNA, 19 nt, Homo sapiens
  misc_RNA (1)...(19): siRNA sense strand
gacaaucuccaauagacuu

SEQ ID NO: 1013368 - RNA, 19 nt, Homo sapiens
  misc_RNA (1)...(19): siRNA sense strand
uagauaagaagguugagaa

SEQ ID NO: 1013369 - RNA, 19 nt, Homo sapiens
  misc_RNA (1)...(19): siRNA sense strand
gaagagccuggucucaguu

SEQ ID NO: 1013370 - RNA, 19 nt, Homo sapiens
  misc_RNA (1)...(19): siRNA sense strand
agaagugccuugagcucuu

SEQ ID NO: 1013371 - RNA, 19 nt, Homo sapiens
  misc_RNA (1)...(19): siRNA sense strand
uguagaaggucaguuggaa

SEQ ID NO: 1013372 - RNA, 19 nt, Homo sapiens
  misc_RNA (1)...(19): siRNA sense strand
guucagaugaggaggauga

SEQ ID NO: 1013373 - RNA, 19 nt, Homo sapiens
  misc_RNA (1)...(19): siRNA sense strand
gaaaugaguuggaaagcua

SEQ ID NO: 1013374 - RNA, 19 nt, Homo sapiens
  misc_RNA (1)...(19): siRNA sense strand
gaagaagucugauauugau

SEQ ID NO: 1013375 - RNA, 19 nt, Homo sapiens
  misc_RNA (1)...(19): siRNA sense strand
caaagacgcuggaacuauu

SEQ ID NO: 1013376 - RNA, 19 nt, Homo sapiens
  misc_RNA (1)...(19): siRNA sense strand
gcaaagaugucaggaaaga

SEQ ID NO: 1013377 - RNA, 19 nt, Homo sapiens
  misc_RNA (1)...(19): siRNA sense strand
gauaaucaaccaacuguua

SEQ ID NO: 1013378 - RNA, 19 nt, Homo sapiens
  misc_RNA (1)...(19): siRNA sense strand
gggcaaagaugucaggaaa

SEQ ID NO: 1013379 - RNA, 19 nt, Homo sapiens
  misc_RNA (1)...(19): siRNA sense strand
caauagagcugugcagaaa

SEQ ID NO: 1013380 - RNA, 19 nt, Homo sapiens
  misc_RNA (1)...(19): siRNA sense strand
gaaauugaguccuucuaug

SEQ ID NO: 1013381 - RNA, 19 nt, Homo sapiens
  misc_RNA (1)...(19): siRNA sense strand
ccaccaagaugcugacauu

SEQ ID NO: 1013382 - RNA, 19 nt, Homo sapiens
  misc_RNA (1)...(19): siRNA sense strand
gacauuugcuccugaagaa

SEQ ID NO: 1013383 - RNA, 19 nt, Homo sapiens
  misc_RNA (1)...(19): siRNA sense strand
ggaaagcuaugccuauucu

SEQ ID NO: 1013384 - RNA, 19 nt, Homo sapiens
  misc_RNA (1)...(19): siRNA sense strand
gaagucaccuuugagauag

SEQ ID NO: 1013385 - RNA, 19 nt, Homo sapiens
  misc_RNA (1)...(19): siRNA sense strand
gaaaggaugguuaaugaug

SEQ ID NO: 1013386 - RNA, 19 nt, Homo sapiens
  misc_RNA (1)...(19): siRNA sense strand
ucgaaaggaugguuaauga

SEQ ID NO: 1013387 - RNA, 19 nt, Homo sapiens
  misc_RNA (1)...(19): siRNA sense strand
ccaagaugcugacauugaa

SEQ ID NO: 1013388 - RNA, 19 nt, Homo sapiens
  misc_RNA (1)...(19): siRNA sense strand
ggaagauucugauuugaag

SEQ ID NO: 1013389 - RNA, 19 nt, Homo sapiens
  misc_RNA (1)...(19): siRNA sense strand
agaaggaacuggaagaaau

SEQ ID NO: 1013390 - RNA, 19 nt, Homo sapiens
  misc_RNA (1)...(19): siRNA sense strand
guuggaagauucugauuug

SEQ ID NO: 1013391 - RNA, 19 nt, Homo sapiens
  misc_RNA (1)...(19): siRNA sense strand
gaaaucgaaaggaugguua

SEQ ID NO: 1013392 - RNA, 19 nt, Homo sapiens
  misc_RNA (1)...(19): siRNA sense strand
ugaagucaccuuugagaua

SEQ ID NO: 1013393 - RNA, 19 nt, Homo sapiens
  misc_RNA (1)...(19): siRNA sense strand
gaaggaacuggaagaaauu

SEQ ID NO: 1013394 - RNA, 19 nt, Homo sapiens
  misc_RNA (1)...(19): siRNA sense strand
ggaagaaauuguucaacca

SEQ ID NO: 1013395 - RNA, 19 nt, Homo sapiens
  misc_RNA (1)...(19): siRNA sense strand
aaacuuuccucugaagaua

SEQ ID NO: 1013396 - RNA, 19 nt, Homo sapiens
  misc_RNA (1)...(19): siRNA sense strand
ggaaccaucccguggcaua

SEQ ID NO: 1013397 - RNA, 19 nt, Homo sapiens
  misc_RNA (1)...(19): siRNA sense strand
gaagucugauauugaugaa

SEQ ID NO: 1013398 - RNA, 19 nt, Homo sapiens
  misc_RNA (1)...(19): siRNA sense strand
aaacccagaugaagcugua

SEQ ID NO: 1013399 - RNA, 19 nt, Homo sapiens
  misc_RNA (1)...(19): siRNA sense strand
ugaagaagucugauauuga

SEQ ID NO: 1013400 - RNA, 19 nt, Homo sapiens
  misc_RNA (1)...(19): siRNA sense strand
gaagaaauuguucaaccaa

SEQ ID NO: 1013401 - RNA, 19 nt, Homo sapiens
  misc_RNA (1)...(19): siRNA sense strand
gaagaaggaacuggaagaa

SEQ ID NO: 1013402 - RNA, 19 nt, Homo sapiens
  misc_RNA (1)...(19): siRNA sense strand
agaugaagcuguagcguau

SEQ ID NO: 1013403 - RNA, 19 nt, Homo sapiens
  misc_RNA (1)...(19): siRNA sense strand
uaaugaugcugagaaguuu

SEQ ID NO: 1013404 - RNA, 19 nt, Homo sapiens
  misc_RNA (1)...(19): siRNA sense strand
caaggucuaugaaggugaa

SEQ ID NO: 1013405 - RNA, 19 nt, Homo sapiens
  misc_RNA (1)...(19): siRNA sense strand
cagaaaguguuggaagauu

SEQ ID NO: 1013406 - RNA, 19 nt, Homo sapiens
  misc_RNA (1)...(19): siRNA sense strand
ugaagaggauacagcagaa

SEQ ID NO: 1013407 - RNA, 19 nt, Homo sapiens
  misc_RNA (1)...(19): siRNA sense strand
gaagguuacccaugcaguu

SEQ ID NO: 1013408 - RNA, 19 nt, Homo sapiens
  misc_RNA (1)...(19): siRNA sense strand
gaugaaauuguucuuguug

SEQ ID NO: 1013409 - RNA, 19 nt, Homo sapiens
  misc_RNA (1)...(19): siRNA sense strand
gaucuguuccggucuacua

SEQ ID NO: 1013410 - RNA, 19 nt, Homo sapiens
  misc_RNA (1)...(19): siRNA sense strand
gaacacuucaucaaacugu

SEQ ID NO: 1013411 - RNA, 19 nt, Homo sapiens
  misc_RNA (1)...(19): siRNA sense strand
gaaguuguggccacuaaug

SEQ ID NO: 1013412 - RNA, 19 nt, Homo sapiens
  misc_RNA (1)...(19): siRNA sense strand
gcgcauugauacuagaaau

SEQ ID NO: 1013413 - RNA, 19 nt, Homo sapiens
  misc_RNA (1)...(19): siRNA sense strand
ucaaccaacuguuacaauc

SEQ ID NO: 1013414 - RNA, 19 nt, Homo sapiens
  misc_RNA (1)...(19): siRNA sense strand
agauagaugugaaugguau

SEQ ID NO: 1013415 - RNA, 19 nt, Homo sapiens
  misc_RNA (1)...(19): siRNA sense strand
agauugaagucaccuuuga

SEQ ID NO: 1013416 - RNA, 19 nt, Homo sapiens
  misc_RNA (1)...(19): siRNA sense strand
gaaguuugcugaggaagac

SEQ ID NO: 1013417 - RNA, 19 nt, Homo sapiens
  misc_RNA (1)...(19): siRNA sense strand
ccugacaccugaagaaauc

SEQ ID NO: 1013418 - RNA, 19 nt, Homo sapiens
  misc_RNA (1)...(19): siRNA sense strand
ggaggugggcaaacaaaga

SEQ ID NO: 1013419 - RNA, 19 nt, Homo sapiens
  misc_RNA (1)...(19): siRNA sense strand
ggaacuggaagaaauuguu

SEQ ID NO: 1013420 - RNA, 19 nt, Homo sapiens
  misc_RNA (1)...(19): siRNA sense strand
aaauugaguccuucuauga

SEQ ID NO: 1013421 - RNA, 19 nt, Homo sapiens
  misc_RNA (1)...(19): siRNA sense strand
uugaagaagucugauauug

SEQ ID NO: 1013422 - RNA, 19 nt, Homo sapiens
  misc_RNA (1)...(19): siRNA sense strand
gaaccaucccguggcauaa

SEQ ID NO: 1013423 - RNA, 19 nt, Homo sapiens
  misc_RNA (1)...(19): siRNA sense strand
guucuucaauggcaaggaa

SEQ ID NO: 1013424 - RNA, 19 nt, Homo sapiens
  misc_RNA (1)...(19): siRNA sense strand
agaaaguguuggaagauuc

SEQ ID NO: 1013425 - RNA, 19 nt, Homo sapiens
  misc_RNA (1)...(19): siRNA sense strand
gauaaggagaccauggaaa

SEQ ID NO: 1013426 - RNA, 19 nt, Homo sapiens
  misc_RNA (1)...(19): siRNA sense strand
gguaaacuuuccucugaag

SEQ ID NO: 1013427 - RNA, 19 nt, Homo sapiens
  misc_RNA (1)...(19): siRNA sense strand
cauuugaucugacuggaau

SEQ ID NO: 1013428 - RNA, 19 nt, Homo sapiens
  misc_RNA (1)...(19): siRNA sense strand
cgacucgaauuccaaagau

SEQ ID NO: 1013429 - RNA, 19 nt, Homo sapiens
  misc_RNA (1)...(19): siRNA sense strand
ccaaagacgcuggaacuau

SEQ ID NO: 1013430 - RNA, 19 nt, Homo sapiens
  misc_RNA (1)...(19): siRNA sense strand
ugagaaguuugcugaggaa

SEQ ID NO: 1013431 - RNA, 19 nt, Homo sapiens
  misc_RNA (1)...(19): siRNA sense strand
uuaaugaugcugagaaguu

SEQ ID NO: 1013432 - RNA, 19 nt, Homo sapiens
  misc_RNA (1)...(19): siRNA sense strand
gaucagggcaaccgcauca

SEQ ID NO: 1013433 - RNA, 19 nt, Homo sapiens
  misc_RNA (1)...(19): siRNA sense strand
agaaccagcucaccuccaa

SEQ ID NO: 1013434 - RNA, 19 nt, Homo sapiens
  misc_RNA (1)...(19): siRNA sense strand
agaaaccgcugaggcuuau

SEQ ID NO: 1013435 - RNA, 19 nt, Homo sapiens
  misc_RNA (1)...(19): siRNA sense strand
ccaauuaucagcaaacucu

SEQ ID NO: 1013436 - RNA, 19 nt, Homo sapiens
  misc_RNA (1)...(19): siRNA sense strand
ugagauagaugugaauggu

SEQ ID NO: 1013437 - RNA, 19 nt, Homo sapiens
  misc_RNA (1)...(19): siRNA sense strand
cagcaucaagcaagaauug

SEQ ID NO: 1013438 - RNA, 19 nt, Homo sapiens
  misc_RNA (1)...(19): siRNA sense strand
cagcugcuauugcuuaugg

SEQ ID NO: 1013439 - RNA, 19 nt, Homo sapiens
  misc_RNA (1)...(19): siRNA sense strand
aaagacauuugcuccugaa

SEQ ID NO: 1013440 - RNA, 19 nt, Homo sapiens
  misc_RNA (1)...(19): siRNA sense strand
gagauagaugugaauggua

SEQ ID NO: 1013441 - RNA, 19 nt, Homo sapiens
  misc_RNA (1)...(19): siRNA sense strand
cauggaacacuucaucaaa

SEQ ID NO: 1013442 - RNA, 19 nt, Homo sapiens
  misc_RNA (1)...(19): siRNA sense strand
cggcagcugcuauugcuua

SEQ ID NO: 1013443 - RNA, 19 nt, Homo sapiens
  misc_RNA (1)...(19): siRNA sense strand
ucgaaguuguggccacuaa

SEQ ID NO: 1013444 - RNA, 19 nt, Homo sapiens
  misc_RNA (1)...(19): siRNA sense strand
cugaagaaaucgaaaggau

SEQ ID NO: 1013445 - RNA, 19 nt, Homo sapiens
  misc_RNA (1)...(19): siRNA sense strand
gauuugaagaagucugaua

SEQ ID NO: 1013446 - RNA, 19 nt, Homo sapiens
  misc_RNA (1)...(19): siRNA sense strand
gcaucacgccguccuaugu

SEQ ID NO: 1013447 - RNA, 19 nt, Homo sapiens
  misc_RNA (1)...(19): siRNA sense strand
aagaaaccgcugaggcuua

SEQ ID NO: 1013448 - RNA, 19 nt, Homo sapiens
  misc_RNA (1)...(19): siRNA sense strand
aagauugaauggcuggaaa

SEQ ID NO: 1013449 - RNA, 19 nt, Homo sapiens
  misc_RNA (1)...(19): siRNA sense strand
gguacugcuugauguaugu

SEQ ID NO: 1013450 - RNA, 19 nt, Homo sapiens
  misc_RNA (1)...(19): siRNA sense strand
gccuaaauguuaugaggau

SEQ ID NO: 1013451 - RNA, 19 nt, Homo sapiens
  misc_RNA (1)...(19): siRNA sense strand
caaggugguugaaaagaaa

SEQ ID NO: 1013452 - RNA, 19 nt, Homo sapiens
  misc_RNA (1)...(19): siRNA sense strand
caaccaacuguuacaauca

SEQ ID NO: 1013453 - RNA, 19 nt, Homo sapiens
  misc_RNA (1)...(19): siRNA sense strand
ugaaauugaguccuucuau

SEQ ID NO: 1013454 - RNA, 19 nt, Homo sapiens
  misc_RNA (1)...(19): siRNA sense strand
uaugaagcccguccagaaa

SEQ ID NO: 1013455 - RNA, 19 nt, Homo sapiens
  misc_RNA (1)...(19): siRNA sense strand
gaagaggauacagcagaaa

SEQ ID NO: 1013456 - RNA, 19 nt, Homo sapiens
  misc_RNA (1)...(19): siRNA sense strand
aagaaaagcugggagguaa

SEQ ID NO: 1013457 - RNA, 19 nt, Homo sapiens
  misc_RNA (1)...(19): siRNA sense strand
ggagcgcauugauacuaga

SEQ ID NO: 1013458 - RNA, 19 nt, Homo sapiens
  misc_RNA (1)...(19): siRNA sense strand
gaacuauugcuggccuaaa

SEQ ID NO: 1013459 - RNA, 19 nt, Homo sapiens
  misc_RNA (1)...(19): siRNA sense strand
uaagaagaaggaacuggaa

SEQ ID NO: 1013460 - RNA, 19 nt, Homo sapiens
  misc_RNA (1)...(19): siRNA sense strand
gaaagaccccugacaaaag

SEQ ID NO: 1013461 - RNA, 19 nt, Homo sapiens
  misc_RNA (1)...(19): siRNA sense strand
ugaaauuguucuuguuggu

SEQ ID NO: 1013462 - RNA, 19 nt, Homo sapiens
  misc_RNA (1)...(19): siRNA sense strand
cuaugaaggagaagacuuu

SEQ ID NO: 1013463 - RNA, 19 nt, Homo sapiens
  misc_RNA (1)...(19): siRNA sense strand
acaauggugucuucgaagu

SEQ ID NO: 1013464 - RNA, 19 nt, Homo sapiens
  misc_RNA (1)...(19): siRNA sense strand
ucaaagcuaagaagaagga

SEQ ID NO: 1013465 - RNA, 19 nt, Homo sapiens
  misc_RNA (1)...(19): siRNA sense strand
gcucucuggugaucaagau

SEQ ID NO: 1013466 - RNA, 19 nt, Homo sapiens
  misc_RNA (1)...(19): siRNA sense strand
gacucgaauuccaaagauu

SEQ ID NO: 1013467 - RNA, 19 nt, Homo sapiens
  misc_RNA (1)...(19): siRNA sense strand
gaaaguguuggaagauucu

SEQ ID NO: 1013468 - RNA, 19 nt, Homo sapiens
  misc_RNA (1)...(19): siRNA sense strand
cuaugaagcccguccagaa

SEQ ID NO: 1013469 - RNA, 19 nt, Homo sapiens
  misc_RNA (1)...(19): siRNA sense strand
ugacucgggccaaauuuga

SEQ ID NO: 1013470 - RNA, 19 nt, Homo sapiens
  misc_RNA (1)...(19): siRNA sense strand
aaaccgcugaggcuuauuu

SEQ ID NO: 1013471 - RNA, 19 nt, Homo sapiens
  misc_RNA (1)...(19): siRNA sense strand
agaucacaaucaccaauga

SEQ ID NO: 1013472 - RNA, 19 nt, Homo sapiens
  misc_RNA (1)...(19): siRNA sense strand
agugacagcugaagacaag

SEQ ID NO: 1013473 - RNA, 19 nt, Homo sapiens
  misc_RNA (1)...(19): siRNA sense strand
gaaguuguauugagcaaga

SEQ ID NO: 1013474 - RNA, 19 nt, Homo sapiens
  misc_RNA (1)...(19): siRNA sense strand
ccaaaucucugccguaugu

SEQ ID NO: 1013475 - RNA, 19 nt, Homo sapiens
  misc_RNA (1)...(19): siRNA sense strand
caauggaaaugcacaguaa

SEQ ID NO: 1013476 - RNA, 19 nt, Homo sapiens
  misc_RNA (1)...(19): siRNA sense strand
gcacaacucacuacucuga

SEQ ID NO: 1013477 - RNA, 19 nt, Homo sapiens
  misc_RNA (1)...(19): siRNA sense strand
caacauaguuacagaacau

SEQ ID NO: 1013478 - RNA, 19 nt, Homo sapiens
  misc_RNA (1)...(19): siRNA sense strand
aaucagggcuugcagguuu

SEQ ID NO: 1013479 - RNA, 19 nt, Homo sapiens
  misc_RNA (1)...(19): siRNA sense strand
gagcugaaauuagucauca

SEQ ID NO: 1013480 - RNA, 19 nt, Homo sapiens
  misc_RNA (1)...(19): siRNA sense strand
gaugacagaaguuguauug

SEQ ID NO: 1013481 - RNA, 19 nt, Homo sapiens
  misc_RNA (1)...(19): siRNA sense strand
gcaagcaaauuggcuacuu

SEQ ID NO: 1013482 - RNA, 19 nt, Homo sapiens
  misc_RNA (1)...(19): siRNA sense strand
gaugaagacugggauaaag

SEQ ID NO: 1013483 - RNA, 19 nt, Homo sapiens
  misc_RNA (1)...(19): siRNA sense strand
gggcacaacucacuacucu

SEQ ID NO: 1013484 - RNA, 19 nt, Homo sapiens
  misc_RNA (1)...(19): siRNA sense strand
ugacagaaguuguauugag

SEQ ID NO: 1013485 - RNA, 19 nt, Homo sapiens
  misc_RNA (1)...(19): siRNA sense strand
agacugggauaaagauuug

SEQ ID NO: 1013486 - RNA, 19 nt, Homo sapiens
  misc_RNA (1)...(19): siRNA sense strand
gcugaaauuagucaucaua

SEQ ID NO: 1013487 - RNA, 19 nt, Homo sapiens
  misc_RNA (1)...(19): siRNA sense strand
cugagaagcuauugcaaug

SEQ ID NO: 1013488 - RNA, 19 nt, Homo sapiens
  misc_RNA (1)...(19): siRNA sense strand
cuuaucaucuuaucaagug

SEQ ID NO: 1013489 - RNA, 19 nt, Homo sapiens
  misc_RNA (1)...(19): siRNA sense strand
gcaacauaguuacagaaca

SEQ ID NO: 1013490 - RNA, 19 nt, Homo sapiens
  misc_RNA (1)...(19): siRNA sense strand
ucacuacucugacaacaac

SEQ ID NO: 1013491 - RNA, 19 nt, Homo sapiens
  misc_RNA (1)...(19): siRNA sense strand
ccaggagccuuagacaaga

SEQ ID NO: 1013492 - RNA, 19 nt, Homo sapiens
  misc_RNA (1)...(19): siRNA sense strand
aaccaaaccaggagccuua

SEQ ID NO: 1013493 - RNA, 19 nt, Homo sapiens
  misc_RNA (1)...(19): siRNA sense strand
cgagcaacauaguuacaga

SEQ ID NO: 1013494 - RNA, 19 nt, Homo sapiens
  misc_RNA (1)...(19): siRNA sense strand
gggcuugcagguuuccuua

SEQ ID NO: 1013495 - RNA, 19 nt, Homo sapiens
  misc_RNA (1)...(19): siRNA sense strand
gaagacugggauaaagauu

SEQ ID NO: 1013496 - RNA, 19 nt, Homo sapiens
  misc_RNA (1)...(19): siRNA sense strand
cuuaucaagugcagaaaga

SEQ ID NO: 1013497 - RNA, 19 nt, Homo sapiens
  misc_RNA (1)...(19): siRNA sense strand
gcaaugccccuaugacaaa

SEQ ID NO: 1013498 - RNA, 19 nt, Homo sapiens
  misc_RNA (1)...(19): siRNA sense strand
gagcaacauaguuacagaa

SEQ ID NO: 1013499 - RNA, 19 nt, Homo sapiens
  misc_RNA (1)...(19): siRNA sense strand
gcaugcgaguucccaaauc

SEQ ID NO: 1013500 - RNA, 19 nt, Homo sapiens
  misc_RNA (1)...(19): siRNA sense strand
cguauguucugccauggaa

SEQ ID NO: 1013501 - RNA, 19 nt, Homo sapiens
  misc_RNA (1)...(19): siRNA sense strand
gcuugcagguuuccuuauc

SEQ ID NO: 1013502 - RNA, 19 nt, Homo sapiens
  misc_RNA (1)...(19): siRNA sense strand
ccugcgagcaacauaguua

SEQ ID NO: 1013503 - RNA, 19 nt, Homo sapiens
  misc_RNA (1)...(19): siRNA sense strand
caucuuaucaagugcagaa

SEQ ID NO: 1013504 - RNA, 19 nt, Homo sapiens
  misc_RNA (1)...(19): siRNA sense strand
cagguuuccuuaucaucuu

SEQ ID NO: 1013505 - RNA, 19 nt, Homo sapiens
  misc_RNA (1)...(19): siRNA sense strand
gcgaugaagacugggauaa

SEQ ID NO: 1013506 - RNA, 19 nt, Homo sapiens
  misc_RNA (1)...(19): siRNA sense strand
ccagguuccucgagcugaa

SEQ ID NO: 1013507 - RNA, 19 nt, Homo sapiens
  misc_RNA (1)...(19): siRNA sense strand
gcagguuuccuuaucaucu

SEQ ID NO: 1013508 - RNA, 19 nt, Homo sapiens
  misc_RNA (1)...(19): siRNA sense strand
guuccucgagcugaaauua

SEQ ID NO: 1013509 - RNA, 19 nt, Homo sapiens
  misc_RNA (1)...(19): siRNA sense strand
ucccaaaucucugccguau

SEQ ID NO: 1013510 - RNA, 19 nt, Homo sapiens
  misc_RNA (1)...(19): siRNA sense strand
cgaugaagacugggauaaa

SEQ ID NO: 1013511 - RNA, 19 nt, Homo sapiens
  misc_RNA (1)...(19): siRNA sense strand
cagaaguuguauugagcaa

SEQ ID NO: 1013512 - RNA, 19 nt, Homo sapiens
  misc_RNA (1)...(19): siRNA sense strand
acaauggaaaugcacagua

SEQ ID NO: 1013513 - RNA, 19 nt, Homo sapiens
  misc_RNA (1)...(19): siRNA sense strand
caugcgaguucccaaaucu

SEQ ID NO: 1013514 - RNA, 19 nt, Homo sapiens
  misc_RNA (1)...(19): siRNA sense strand
ugugaugacagaaguugua

SEQ ID NO: 1013515 - RNA, 19 nt, Homo sapiens
  misc_RNA (1)...(19): siRNA sense strand
guauugagcaagauguugu

SEQ ID NO: 1013516 - RNA, 19 nt, Homo sapiens
  misc_RNA (1)...(19): siRNA sense strand
acaacucacuacucugaca

SEQ ID NO: 1013517 - RNA, 19 nt, Homo sapiens
  misc_RNA (1)...(19): siRNA sense strand
cuacuugucccuucaaugc

SEQ ID NO: 1013518 - RNA, 19 nt, Homo sapiens
  misc_RNA (1)...(19): siRNA sense strand
aagacugggauaaagauuu

SEQ ID NO: 1013519 - RNA, 19 nt, Homo sapiens
  misc_RNA (1)...(19): siRNA sense strand
ccuggacccugagaagcua

SEQ ID NO: 1013520 - RNA, 19 nt, Homo sapiens
  misc_RNA (1)...(19): siRNA sense strand
ugaagacugggauaaagau

SEQ ID NO: 1013521 - RNA, 19 nt, Homo sapiens
  misc_RNA (1)...(19): siRNA sense strand
caacucacuacucugacaa

SEQ ID NO: 1013522 - RNA, 19 nt, Homo sapiens
  misc_RNA (1)...(19): siRNA sense strand
ucaagugcagaaagaauca

SEQ ID NO: 1013523 - RNA, 19 nt, Homo sapiens
  misc_RNA (1)...(19): siRNA sense strand
uaucaagugcagaaagaau

SEQ ID NO: 1013524 - RNA, 19 nt, Homo sapiens
  misc_RNA (1)...(19): siRNA sense strand
ccugagaagcuauugcaau

SEQ ID NO: 1013525 - RNA, 19 nt, Homo sapiens
  misc_RNA (1)...(19): siRNA sense strand
agguuuccuuaucaucuua

SEQ ID NO: 1013526 - RNA, 19 nt, Homo sapiens
  misc_RNA (1)...(19): siRNA sense strand
gcauccagcuuccuguuua

SEQ ID NO: 1013527 - RNA, 19 nt, Homo sapiens
  misc_RNA (1)...(19): siRNA sense strand
cagaguaaaugaacaaugu

SEQ ID NO: 1013528 - RNA, 19 nt, Homo sapiens
  misc_RNA (1)...(19): siRNA sense strand
gcuagaguauucaugagaa

SEQ ID NO: 1013529 - RNA, 19 nt, Homo sapiens
  misc_RNA (1)...(19): siRNA sense strand
cgggcuaucugauggguua

SEQ ID NO: 1013530 - RNA, 19 nt, Homo sapiens
  misc_RNA (1)...(19): siRNA sense strand
caacagaguaaaugaacaa

SEQ ID NO: 1013531 - RNA, 19 nt, Homo sapiens
  misc_RNA (1)...(19): siRNA sense strand
cucaauagauuucuucuuc

SEQ ID NO: 1013532 - RNA, 19 nt, Homo sapiens
  misc_RNA (1)...(19): siRNA sense strand
aauaggagguuuagguuuc

SEQ ID NO: 1013533 - RNA, 19 nt, Homo sapiens
  misc_RNA (1)...(19): siRNA sense strand
uuucauggcuagaguauuc

SEQ ID NO: 1013534 - RNA, 19 nt, Homo sapiens
  misc_RNA (1)...(19): siRNA sense strand
gauggaaugcaccaaauau

SEQ ID NO: 1013535 - RNA, 19 nt, Homo sapiens
  misc_RNA (1)...(19): siRNA sense strand
gauuguguaugcucugaug

SEQ ID NO: 1013536 - RNA, 19 nt, Homo sapiens
  misc_RNA (1)...(19): siRNA sense strand
ucacuggaggaauaauuua

SEQ ID NO: 1013537 - RNA, 19 nt, Homo sapiens
  misc_RNA (1)...(19): siRNA sense strand
agguuuagguuucauauuc

SEQ ID NO: 1013538 - RNA, 19 nt, Homo sapiens
  misc_RNA (1)...(19): siRNA sense strand
ccaaauaucccaaaacuca

SEQ ID NO: 1013539 - RNA, 19 nt, Homo sapiens
  misc_RNA (1)...(19): siRNA sense strand
caauaggagguuuagguuu

SEQ ID NO: 1013540 - RNA, 19 nt, Homo sapiens
  misc_RNA (1)...(19): siRNA sense strand
cgauggaaugcaccaaaua

SEQ ID NO: 1013541 - RNA, 19 nt, Homo sapiens
  misc_RNA (1)...(19): siRNA sense strand
uggauucguuuguguccua

SEQ ID NO: 1013542 - RNA, 19 nt, Homo sapiens
  misc_RNA (1)...(19): siRNA sense strand
uguugaaccuccaagcauu

SEQ ID NO: 1013543 - RNA, 19 nt, Homo sapiens
  misc_RNA (1)...(19): siRNA sense strand
ccagcuuccuguuuacaau

SEQ ID NO: 1013544 - RNA, 19 nt, Homo sapiens
  misc_RNA (1)...(19): siRNA sense strand
ucccaaaacucaauagauu

SEQ ID NO: 1013545 - RNA, 19 nt, Homo sapiens
  misc_RNA (1)...(19): siRNA sense strand
ccaacagaguaaaugaaca

SEQ ID NO: 1013546 - RNA, 19 nt, Homo sapiens
  misc_RNA (1)...(19): siRNA sense strand
ccgauggaaugcaccaaau

SEQ ID NO: 1013547 - RNA, 19 nt, Homo sapiens
  misc_RNA (1)...(19): siRNA sense strand
gcauuggcucuaugacuga

SEQ ID NO: 1013548 - RNA, 19 nt, Homo sapiens
  misc_RNA (1)...(19): siRNA sense strand
ggagguuuagguuucauau

SEQ ID NO: 1013549 - RNA, 19 nt, Homo sapiens
  misc_RNA (1)...(19): siRNA sense strand
cagcuuccuguuuacaaua

SEQ ID NO: 1013550 - RNA, 19 nt, Homo sapiens
  misc_RNA (1)...(19): siRNA sense strand
acaauaggagguuuagguu

SEQ ID NO: 1013551 - RNA, 19 nt, Homo sapiens
  misc_RNA (1)...(19): siRNA sense strand
ucuauucauuggauucguu

SEQ ID NO: 1013552 - RNA, 19 nt, Homo sapiens
  misc_RNA (1)...(19): siRNA sense strand
caucagaggccaguagcuu

SEQ ID NO: 1013553 - RNA, 19 nt, Homo sapiens
  misc_RNA (1)...(19): siRNA sense strand
ugaugguggugucuuacuu

SEQ ID NO: 1013554 - RNA, 19 nt, Homo sapiens
  misc_RNA (1)...(19): siRNA sense strand
gucacuggaggaauaauuu

SEQ ID NO: 1013555 - RNA, 19 nt, Homo sapiens
  misc_RNA (1)...(19): siRNA sense strand
gagguuuagguuucauauu

SEQ ID NO: 1013556 - RNA, 19 nt, Homo sapiens
  misc_RNA (1)...(19): siRNA sense strand
ggccaacagaguaaaugaa

SEQ ID NO: 1013557 - RNA, 19 nt, Homo sapiens
  misc_RNA (1)...(19): siRNA sense strand
cuucuucuauucauuggau

SEQ ID NO: 1013558 - RNA, 19 nt, Homo sapiens
  misc_RNA (1)...(19): siRNA sense strand
gcucuaugacugaugaaca

SEQ ID NO: 1013559 - RNA, 19 nt, Homo sapiens
  misc_RNA (1)...(19): siRNA sense strand
gaugguggugucuuacuuc

SEQ ID NO: 1013560 - RNA, 19 nt, Homo sapiens
  misc_RNA (1)...(19): siRNA sense strand
uuucuuggccaacagagua

SEQ ID NO: 1013561 - RNA, 19 nt, Homo sapiens
  misc_RNA (1)...(19): siRNA sense strand
ucauuggauucguuugugu

SEQ ID NO: 1013562 - RNA, 19 nt, Homo sapiens
  misc_RNA (1)...(19): siRNA sense strand
uacaauaggagguuuaggu

SEQ ID NO: 1013563 - RNA, 19 nt, Homo sapiens
  misc_RNA (1)...(19): siRNA sense strand
ucagaggccaguagcuuuc

SEQ ID NO: 1013564 - RNA, 19 nt, Homo sapiens
  misc_RNA (1)...(19): siRNA sense strand
gggcaucagaggccaguag

SEQ ID NO: 1013565 - RNA, 19 nt, Homo sapiens
  misc_RNA (1)...(19): siRNA sense strand
auucguuuguguccuauug

SEQ ID NO: 1013566 - RNA, 19 nt, Homo sapiens
  misc_RNA (1)...(19): siRNA sense strand
guugaaccuccaagcauug

SEQ ID NO: 1013567 - RNA, 19 nt, Homo sapiens
  misc_RNA (1)...(19): siRNA sense strand
guuuacaauaggagguuua

SEQ ID NO: 1013568 - RNA, 19 nt, Homo sapiens
  misc_RNA (1)...(19): siRNA sense strand
cgucacuggaggaauaauu

SEQ ID NO: 1013569 - RNA, 19 nt, Homo sapiens
  misc_RNA (1)...(19): siRNA sense strand
ggauucguuuguguccuau

SEQ ID NO: 1013570 - RNA, 19 nt, Homo sapiens
  misc_RNA (1)...(19): siRNA sense strand
cucugaugguggugucuua

SEQ ID NO: 1013571 - RNA, 19 nt, Homo sapiens
  misc_RNA (1)...(19): siRNA sense strand
gauauauucuggagacuua

SEQ ID NO: 1013572 - RNA, 19 nt, Homo sapiens
  misc_RNA (1)...(19): siRNA sense strand
gaacguuucucugaagaua

SEQ ID NO: 1013573 - RNA, 19 nt, Homo sapiens
  misc_RNA (1)...(19): siRNA sense strand
ccacagaccugcuuaugaa

SEQ ID NO: 1013574 - RNA, 19 nt, Homo sapiens
  misc_RNA (1)...(19): siRNA sense strand
gaaccucacugccuuguug

SEQ ID NO: 1013575 - RNA, 19 nt, Homo sapiens
  misc_RNA (1)...(19): siRNA sense strand
gcucaagagucacauuaaa

SEQ ID NO: 1013576 - RNA, 19 nt, Homo sapiens
  misc_RNA (1)...(19): siRNA sense strand
gaagauaugaugacaaauc

SEQ ID NO: 1013577 - RNA, 19 nt, Homo sapiens
  misc_RNA (1)...(19): siRNA sense strand
gaagaccucuauguugaaa

SEQ ID NO: 1013578 - RNA, 19 nt, Homo sapiens
  misc_RNA (1)...(19): siRNA sense strand
acacagagacccuugauaa

SEQ ID NO: 1013579 - RNA, 19 nt, Homo sapiens
  misc_RNA (1)...(19): siRNA sense strand
ggaagaagaagauaugaug

SEQ ID NO: 1013580 - RNA, 19 nt, Homo sapiens
  misc_RNA (1)...(19): siRNA sense strand
ggaagaagauguuuaucac

SEQ ID NO: 1013581 - RNA, 19 nt, Homo sapiens
  misc_RNA (1)...(19): siRNA sense strand
ggacaacgaggauaaugaa

SEQ ID NO: 1013582 - RNA, 19 nt, Homo sapiens
  misc_RNA (1)...(19): siRNA sense strand
gaaaccacugucuauguua

SEQ ID NO: 1013583 - RNA, 19 nt, Homo sapiens
  misc_RNA (1)...(19): siRNA sense strand
ggacugcaccucuuuggaa

SEQ ID NO: 1013584 - RNA, 19 nt, Homo sapiens
  misc_RNA (1)...(19): siRNA sense strand
ugaccaaucuggagagaga

SEQ ID NO: 1013585 - RNA, 19 nt, Homo sapiens
  misc_RNA (1)...(19): siRNA sense strand
ucaaccagcuggaagaaga

SEQ ID NO: 1013586 - RNA, 19 nt, Homo sapiens
  misc_RNA (1)...(19): siRNA sense strand
cugaagaccucuauguuga

SEQ ID NO: 1013587 - RNA, 19 nt, Homo sapiens
  misc_RNA (1)...(19): siRNA sense strand
gaagaagaagauaugauga

SEQ ID NO: 1013588 - RNA, 19 nt, Homo sapiens
  misc_RNA (1)...(19): siRNA sense strand
caacgaggauaaugaaguc

SEQ ID NO: 1013589 - RNA, 19 nt, Homo sapiens
  misc_RNA (1)...(19): siRNA sense strand
gaucggaguccuuucguuu

SEQ ID NO: 1013590 - RNA, 19 nt, Homo sapiens
  misc_RNA (1)...(19): siRNA sense strand
caacaagcauggccacuac

SEQ ID NO: 1013591 - RNA, 19 nt, Homo sapiens
  misc_RNA (1)...(19): siRNA sense strand
ggagaucacggucccaauu

SEQ ID NO: 1013592 - RNA, 19 nt, Homo sapiens
  misc_RNA (1)...(19): siRNA sense strand
gugaaaccguuaucagcua

SEQ ID NO: 1013593 - RNA, 19 nt, Homo sapiens
  misc_RNA (1)...(19): siRNA sense strand
agaaaccacugucuauguu

SEQ ID NO: 1013594 - RNA, 19 nt, Homo sapiens
  misc_RNA (1)...(19): siRNA sense strand
ccgaaucccugaagaacaa

SEQ ID NO: 1013595 - RNA, 19 nt, Homo sapiens
  misc_RNA (1)...(19): siRNA sense strand
aagccaagguggagaauga

SEQ ID NO: 1013596 - RNA, 19 nt, Homo sapiens
  misc_RNA (1)...(19): siRNA sense strand
gaaacgaucggaguccuuu

SEQ ID NO: 1013597 - RNA, 19 nt, Homo sapiens
  misc_RNA (1)...(19): siRNA sense strand
aaaccguuaucagcuauua

SEQ ID NO: 1013598 - RNA, 19 nt, Homo sapiens
  misc_RNA (1)...(19): siRNA sense strand
guuaucagcuauuauacug

SEQ ID NO: 1013599 - RNA, 19 nt, Homo sapiens
  misc_RNA (1)...(19): siRNA sense strand
gaaagcagacagacuugga

SEQ ID NO: 1013600 - RNA, 19 nt, Homo sapiens
  misc_RNA (1)...(19): siRNA sense strand
gcaaguagcccaaguaacc

SEQ ID NO: 1013601 - RNA, 19 nt, Homo sapiens
  misc_RNA (1)...(19): siRNA sense strand
ggaugacgaugaggccuuu

SEQ ID NO: 1013602 - RNA, 19 nt, Homo sapiens
  misc_RNA (1)...(19): siRNA sense strand
caaaucagagggaugaaga

SEQ ID NO: 1013603 - RNA, 19 nt, Homo sapiens
  misc_RNA (1)...(19): siRNA sense strand
ugacaacgaaccauacauu

SEQ ID NO: 1013604 - RNA, 19 nt, Homo sapiens
  misc_RNA (1)...(19): siRNA sense strand
gacaacgaaccauacauuu

SEQ ID NO: 1013605 - RNA, 19 nt, Homo sapiens
  misc_RNA (1)...(19): siRNA sense strand
ucaagagucacauuaaaga

SEQ ID NO: 1013606 - RNA, 19 nt, Homo sapiens
  misc_RNA (1)...(19): siRNA sense strand
gagacuuagugguguguga

SEQ ID NO: 1013607 - RNA, 19 nt, Homo sapiens
  misc_RNA (1)...(19): siRNA sense strand
gcaugggaaugaccaaucu

SEQ ID NO: 1013608 - RNA, 19 nt, Homo sapiens
  misc_RNA (1)...(19): siRNA sense strand
ugacaaaucagagggauga

SEQ ID NO: 1013609 - RNA, 19 nt, Homo sapiens
  misc_RNA (1)...(19): siRNA sense strand
cagagacccuugauaaacu

SEQ ID NO: 1013610 - RNA, 19 nt, Homo sapiens
  misc_RNA (1)...(19): siRNA sense strand
auacugacauggaagaaau

SEQ ID NO: 1013611 - RNA, 19 nt, Homo sapiens
  misc_RNA (1)...(19): siRNA sense strand
gauaaacugcuaaccgaau

SEQ ID NO: 1013612 - RNA, 19 nt, Homo sapiens
  misc_RNA (1)...(19): siRNA sense strand
aaaccacugucuauguuau

SEQ ID NO: 1013613 - RNA, 19 nt, Homo sapiens
  misc_RNA (1)...(19): siRNA sense strand
gggcagaaaccacugucua

SEQ ID NO: 1013614 - RNA, 19 nt, Homo sapiens
  misc_RNA (1)...(19): siRNA sense strand
gaguacaccauuucaguga

SEQ ID NO: 1013615 - RNA, 19 nt, Homo sapiens
  misc_RNA (1)...(19): siRNA sense strand
agaccucuauguugaaaug

SEQ ID NO: 1013616 - RNA, 19 nt, Homo sapiens
  misc_RNA (1)...(19): siRNA sense strand
gaagaagauaugaugacaa

SEQ ID NO: 1013617 - RNA, 19 nt, Homo sapiens
  misc_RNA (1)...(19): siRNA sense strand
gaaucaaccagcuggaaga

SEQ ID NO: 1013618 - RNA, 19 nt, Homo sapiens
  misc_RNA (1)...(19): siRNA sense strand
gcuauuauacugacaugga

SEQ ID NO: 1013619 - RNA, 19 nt, Homo sapiens
  misc_RNA (1)...(19): siRNA sense strand
ccagcugccugacaacgaa

SEQ ID NO: 1013620 - RNA, 19 nt, Homo sapiens
  misc_RNA (1)...(19): siRNA sense strand
gaagaagauguuuaucaca

SEQ ID NO: 1013621 - RNA, 19 nt, Homo sapiens
  misc_RNA (1)...(19): siRNA sense strand
ccaacaccaucgcugagaa

SEQ ID NO: 1013622 - RNA, 19 nt, Homo sapiens
  misc_RNA (1)...(19): siRNA sense strand
gggaacguuucucugaaga

SEQ ID NO: 1013623 - RNA, 19 nt, Homo sapiens
  misc_RNA (1)...(19): siRNA sense strand
gaagacagagagagaagca

SEQ ID NO: 1013624 - RNA, 19 nt, Homo sapiens
  misc_RNA (1)...(19): siRNA sense strand
ucaggaagaagauguuuau

SEQ ID NO: 1013625 - RNA, 19 nt, Homo sapiens
  misc_RNA (1)...(19): siRNA sense strand
cagaccugcuuaugaaaug

SEQ ID NO: 1013626 - RNA, 19 nt, Homo sapiens
  misc_RNA (1)...(19): siRNA sense strand
gcagaaaccacugucuaug

SEQ ID NO: 1013627 - RNA, 19 nt, Homo sapiens
  misc_RNA (1)...(19): siRNA sense strand
ccgcgaauccuguggaauu

SEQ ID NO: 1013628 - RNA, 19 nt, Homo sapiens
  misc_RNA (1)...(19): siRNA sense strand
acguuucucugaagauaua

SEQ ID NO: 1013629 - RNA, 19 nt, Homo sapiens
  misc_RNA (1)...(19): siRNA sense strand
cacagcaccugccugcaaa

SEQ ID NO: 1013630 - RNA, 19 nt, Homo sapiens
  misc_RNA (1)...(19): siRNA sense strand
caacaccaucgcugagaaa

SEQ ID NO: 1013631 - RNA, 19 nt, Homo sapiens
  misc_RNA (1)...(19): siRNA sense strand
cagcaaguagcccaaguaa

SEQ ID NO: 1013632 - RNA, 19 nt, Homo sapiens
  misc_RNA (1)...(19): siRNA sense strand
caggaaagcagacagacuu

SEQ ID NO: 1013633 - RNA, 19 nt, Homo sapiens
  misc_RNA (1)...(19): siRNA sense strand
ucagagagcaucaggaaag

SEQ ID NO: 1013634 - RNA, 19 nt, Homo sapiens
  misc_RNA (1)...(19): siRNA sense strand
ccugggaauuucuacguuu

SEQ ID NO: 1013635 - RNA, 19 nt, Homo sapiens
  misc_RNA (1)...(19): siRNA sense strand
cagaaaccacugucuaugu

SEQ ID NO: 1013636 - RNA, 19 nt, Homo sapiens
  misc_RNA (1)...(19): siRNA sense strand
ccacugaagaccucuaugu

SEQ ID NO: 1013637 - RNA, 19 nt, Homo sapiens
  misc_RNA (1)...(19): siRNA sense strand
ugacgaggaucucuaugag

SEQ ID NO: 1013638 - RNA, 19 nt, Homo sapiens
  misc_RNA (1)...(19): siRNA sense strand
ugaaaccguuaucagcuau

SEQ ID NO: 1013639 - RNA, 19 nt, Homo sapiens
  misc_RNA (1)...(19): siRNA sense strand
gagacgaggagacuggaaa

SEQ ID NO: 1013640 - RNA, 19 nt, Homo sapiens
  misc_RNA (1)...(19): siRNA sense strand
caagagcggccugggaauu

SEQ ID NO: 1013641 - RNA, 19 nt, Homo sapiens
  misc_RNA (1)...(19): siRNA sense strand
ggcaacagcaugggaauga

SEQ ID NO: 1013642 - RNA, 19 nt, Homo sapiens
  misc_RNA (1)...(19): siRNA sense strand
guccauggcugccuuuguc

SEQ ID NO: 1013643 - RNA, 19 nt, Homo sapiens
  misc_RNA (1)...(19): siRNA sense strand
ugucaggccuuuaaaauug

SEQ ID NO: 1013644 - RNA, 19 nt, Homo sapiens
  misc_RNA (1)...(19): siRNA sense strand
gggacaacgaggauaauga

SEQ ID NO: 1013645 - RNA, 19 nt, Homo sapiens
  misc_RNA (1)...(19): siRNA sense strand
ccacuaaggacucuaugau

SEQ ID NO: 1013646 - RNA, 19 nt, Homo sapiens
  misc_RNA (1)...(19): siRNA sense strand
ggcaguucaucgacgagua

SEQ ID NO: 1013647 - RNA, 19 nt, Homo sapiens
  misc_RNA (1)...(19): siRNA sense strand
cgaaguauggacugaagaa

SEQ ID NO: 1013648 - RNA, 19 nt, Homo sapiens
  misc_RNA (1)...(19): siRNA sense strand
agaagaagauaugaugaca

SEQ ID NO: 1013649 - RNA, 19 nt, Homo sapiens
  misc_RNA (1)...(19): siRNA sense strand
uaaccgaaucccugaagaa

SEQ ID NO: 1013650 - RNA, 19 nt, Homo sapiens
  misc_RNA (1)...(19): siRNA sense strand
gcuggaagaagaagauaug

SEQ ID NO: 1013651 - RNA, 19 nt, Homo sapiens
  misc_RNA (1)...(19): siRNA sense strand
gaaaugcuucaggccagua

SEQ ID NO: 1013652 - RNA, 19 nt, Homo sapiens
  misc_RNA (1)...(19): siRNA sense strand
gcaguucaucgacgaguau

SEQ ID NO: 1013653 - RNA, 19 nt, Homo sapiens
  misc_RNA (1)...(19): siRNA sense strand
ggcagaaaccacugucuau

SEQ ID NO: 1013654 - RNA, 19 nt, Homo sapiens
  misc_RNA (1)...(19): siRNA sense strand
cacagagacccuugauaaa

SEQ ID NO: 1013655 - RNA, 19 nt, Homo sapiens
  misc_RNA (1)...(19): siRNA sense strand
ucacagcaccugccugcaa

SEQ ID NO: 1013656 - RNA, 19 nt, Homo sapiens
  misc_RNA (1)...(19): siRNA sense strand
gagaucacggucccaauuc

SEQ ID NO: 1013657 - RNA, 19 nt, Homo sapiens
  misc_RNA (1)...(19): siRNA sense strand
gcagacagacuuggagauc

SEQ ID NO: 1013658 - RNA, 19 nt, Homo sapiens
  misc_RNA (1)...(19): siRNA sense strand
agacagagagagaagcaaa

SEQ ID NO: 1013659 - RNA, 19 nt, Homo sapiens
  misc_RNA (1)...(19): siRNA sense strand
gugacgaggaucucuauga

SEQ ID NO: 1013660 - RNA, 19 nt, Homo sapiens
  misc_RNA (1)...(19): siRNA sense strand
caagcggacugcaccucuu

SEQ ID NO: 1013661 - RNA, 19 nt, Homo sapiens
  misc_RNA (1)...(19): siRNA sense strand
cuauuauacugacauggaa

SEQ ID NO: 1013662 - RNA, 19 nt, Homo sapiens
  misc_RNA (1)...(19): siRNA sense strand
gcaccugccugcaaaagug

SEQ ID NO: 1013663 - RNA, 19 nt, Homo sapiens
  misc_RNA (1)...(19): siRNA sense strand
ccaagguggagaaugagua

SEQ ID NO: 1013664 - RNA, 19 nt, Homo sapiens
  misc_RNA (1)...(19): siRNA sense strand
ccucagagagcaucaggaa

SEQ ID NO: 1013665 - RNA, 19 nt, Homo sapiens
  misc_RNA (1)...(19): siRNA sense strand
gacccuugauaaacugcua

SEQ ID NO: 1013666 - RNA, 19 nt, Homo sapiens
  misc_RNA (1)...(19): siRNA sense strand
aguggcagcucaaccagaa

SEQ ID NO: 1013667 - RNA, 19 nt, Homo sapiens
  misc_RNA (1)...(19): siRNA sense strand
ccaacaagcauggccacua

SEQ ID NO: 1013668 - RNA, 19 nt, Homo sapiens
  misc_RNA (1)...(19): siRNA sense strand
gcaccucuuuggaaucaac

SEQ ID NO: 1013669 - RNA, 19 nt, Homo sapiens
  misc_RNA (1)...(19): siRNA sense strand
ggaggcugaugcuguguac

SEQ ID NO: 1013670 - RNA, 19 nt, Homo sapiens
  misc_RNA (1)...(19): siRNA sense strand
ggcgacagaagcagaguuu

SEQ ID NO: 1013671 - RNA, 19 nt, Homo sapiens
  misc_RNA (1)...(19): siRNA sense strand
gcagacagaugaccuacuc

SEQ ID NO: 1013672 - RNA, 19 nt, Homo sapiens
  misc_RNA (1)...(19): siRNA sense strand
gcugaagacucgccugaug

SEQ ID NO: 1013673 - RNA, 19 nt, Homo sapiens
  misc_RNA (1)...(19): siRNA sense strand
guaccucucugacaacauc

SEQ ID NO: 1013674 - RNA, 19 nt, Homo sapiens
  misc_RNA (1)...(19): siRNA sense strand
gacaacaucuucacucacu

SEQ ID NO: 1013675 - RNA, 19 nt, Homo sapiens
  misc_RNA (1)...(19): siRNA sense strand
caacaucuucacucacuuu

SEQ ID NO: 1013676 - RNA, 19 nt, Homo sapiens
  misc_RNA (1)...(19): siRNA sense strand
ccgcguagcucgugaagag

SEQ ID NO: 1013677 - RNA, 19 nt, Homo sapiens
  misc_RNA (1)...(19): siRNA sense strand
gaggugaagcugcgcauga

SEQ ID NO: 1013678 - RNA, 19 nt, Homo sapiens
  misc_RNA (1)...(19): siRNA sense strand
caucuucacucacuuuguc

SEQ ID NO: 1013679 - RNA, 19 nt, Homo sapiens
  misc_RNA (1)...(19): siRNA sense strand
ugacucgguucgccaucua

SEQ ID NO: 1013680 - RNA, 19 nt, Homo sapiens
  misc_RNA (1)...(19): siRNA sense strand
ccggguaccucucugacaa

SEQ ID NO: 1013681 - RNA, 19 nt, Homo sapiens
  misc_RNA (1)...(19): siRNA sense strand
ugaagacucgccugaugaa

SEQ ID NO: 1013682 - RNA, 19 nt, Homo sapiens
  misc_RNA (1)...(19): siRNA sense strand
gcaccggguaccucucuga

SEQ ID NO: 1013683 - RNA, 19 nt, Homo sapiens
  misc_RNA (1)...(19): siRNA sense strand
cugacaacaucuucacuca

SEQ ID NO: 1013684 - RNA, 19 nt, Homo sapiens
  misc_RNA (1)...(19): siRNA sense strand
ugggccagcuguccugcua

SEQ ID NO: 1013685 - RNA, 19 nt, Homo sapiens
  misc_RNA (1)...(19): siRNA sense strand
agacucgccugaugaacuc

SEQ ID NO: 1013686 - RNA, 19 nt, Homo sapiens
  misc_RNA (1)...(19): siRNA sense strand
ggaugcagaacgacgugaa

SEQ ID NO: 1013687 - RNA, 19 nt, Homo sapiens
  misc_RNA (1)...(19): siRNA sense strand
cccacaccgugcucacuuu

SEQ ID NO: 1013688 - RNA, 19 nt, Homo sapiens
  misc_RNA (1)...(19): siRNA sense strand
ucacuuugucgccagcuuu

SEQ ID NO: 1013689 - RNA, 19 nt, Homo sapiens
  misc_RNA (1)...(19): siRNA sense strand
ccgcagacuuggucaacgu

SEQ ID NO: 1013690 - RNA, 19 nt, Homo sapiens
  misc_RNA (1)...(19): siRNA sense strand
agacgcagcaggaggugaa

SEQ ID NO: 1013691 - RNA, 19 nt, Homo sapiens
  misc_RNA (1)...(19): siRNA sense strand
gggcuccgucagcgguuua

SEQ ID NO: 1013692 - RNA, 19 nt, Homo sapiens
  misc_RNA (1)...(19): siRNA sense strand
cugaagacucgccugauga

SEQ ID NO: 1013693 - RNA, 19 nt, Homo sapiens
  misc_RNA (1)...(19): siRNA sense strand
ggaucuaccugaauaacaa

SEQ ID NO: 1013694 - RNA, 19 nt, Homo sapiens
  misc_RNA (1)...(19): siRNA sense strand
caaggaagcaggaauguau

SEQ ID NO: 1013695 - RNA, 19 nt, Homo sapiens
  misc_RNA (1)...(19): siRNA sense strand
ucaucuaggucacguguuu

SEQ ID NO: 1013696 - RNA, 19 nt, Homo sapiens
  misc_RNA (1)...(19): siRNA sense strand
gaacggaaccgccuuucag

SEQ ID NO: 1013697 - RNA, 19 nt, Homo sapiens
  misc_RNA (1)...(19): siRNA sense strand
gaaguucaaaccaaggaaa

SEQ ID NO: 1013698 - RNA, 19 nt, Homo sapiens
  misc_RNA (1)...(19): siRNA sense strand
uaacaaggaagcaggaaug

SEQ ID NO: 1013699 - RNA, 19 nt, Homo sapiens
  misc_RNA (1)...(19): siRNA sense strand
ggucagagguuuugcauca

SEQ ID NO: 1013700 - RNA, 19 nt, Homo sapiens
  misc_RNA (1)...(19): siRNA sense strand
agugggaucuaccugaaua

SEQ ID NO: 1013701 - RNA, 19 nt, Homo sapiens
  misc_RNA (1)...(19): siRNA sense strand
ggucacguguuuccugaug

SEQ ID NO: 1013702 - RNA, 19 nt, Homo sapiens
  misc_RNA (1)...(19): siRNA sense strand
gcaguucuacgucacaaga

SEQ ID NO: 1013703 - RNA, 19 nt, Homo sapiens
  misc_RNA (1)...(19): siRNA sense strand
gugugaagcucaucuaggu

SEQ ID NO: 1013704 - RNA, 19 nt, Homo sapiens
  misc_RNA (1)...(19): siRNA sense strand
gaggcagggucucuugcaa

SEQ ID NO: 1013705 - RNA, 19 nt, Homo sapiens
  misc_RNA (1)...(19): siRNA sense strand
caucaacaguguggcuuug

SEQ ID NO: 1013706 - RNA, 19 nt, Homo sapiens
  misc_RNA (1)...(19): siRNA sense strand
gagcaguucuacgucacaa

SEQ ID NO: 1013707 - RNA, 19 nt, Homo sapiens
  misc_RNA (1)...(19): siRNA sense strand
gcccaauggucagagguuu

SEQ ID NO: 1013708 - RNA, 19 nt, Homo sapiens
  misc_RNA (1)...(19): siRNA sense strand
cuggauaccucguuaggau

SEQ ID NO: 1013709 - RNA, 19 nt, Homo sapiens
  misc_RNA (1)...(19): siRNA sense strand
guacgucuggcucugauga

SEQ ID NO: 1013710 - RNA, 19 nt, Homo sapiens
  misc_RNA (1)...(19): siRNA sense strand
acaguccacucuucaguuc

SEQ ID NO: 1013711 - RNA, 19 nt, Homo sapiens
  misc_RNA (1)...(19): siRNA sense strand
gcacuggguggccuucguu

SEQ ID NO: 1013712 - RNA, 19 nt, Homo sapiens
  misc_RNA (1)...(19): siRNA sense strand
gcagugugaagcucaucua

SEQ ID NO: 1013713 - RNA, 19 nt, Homo sapiens
  misc_RNA (1)...(19): siRNA sense strand
ggaacggaaccgccuuuca

SEQ ID NO: 1013714 - RNA, 19 nt, Homo sapiens
  misc_RNA (1)...(19): siRNA sense strand
caguguggcuuugaaguuc

SEQ ID NO: 1013715 - RNA, 19 nt, Homo sapiens
  misc_RNA (1)...(19): siRNA sense strand
ucacguguuuccugaugga

SEQ ID NO: 1013716 - RNA, 19 nt, Homo sapiens
  misc_RNA (1)...(19): siRNA sense strand
ggauaccucguuaggauca

SEQ ID NO: 1013717 - RNA, 19 nt, Homo sapiens
  misc_RNA (1)...(19): siRNA sense strand
gcaucaacaguguggcuuu

SEQ ID NO: 1013718 - RNA, 19 nt, Homo sapiens
  misc_RNA (1)...(19): siRNA sense strand
cuaccugaauaacaaggaa

SEQ ID NO: 1013719 - RNA, 19 nt, Homo sapiens
  misc_RNA (1)...(19): siRNA sense strand
gacaguccacucuucaguu

SEQ ID NO: 1013720 - RNA, 19 nt, Homo sapiens
  misc_RNA (1)...(19): siRNA sense strand
caaaccaaggaaacacuga

SEQ ID NO: 1013721 - RNA, 19 nt, Homo sapiens
  misc_RNA (1)...(19): siRNA sense strand
gggaucuaccugaauaaca

SEQ ID NO: 1013722 - RNA, 19 nt, Homo sapiens
  misc_RNA (1)...(19): siRNA sense strand
acaaggaagcaggaaugua

SEQ ID NO: 1013723 - RNA, 19 nt, Homo sapiens
  misc_RNA (1)...(19): siRNA sense strand
caacaguguggcuuugaag

SEQ ID NO: 1013724 - RNA, 19 nt, Homo sapiens
  misc_RNA (1)...(19): siRNA sense strand
cgacaguccacucuucagu

SEQ ID NO: 1013725 - RNA, 19 nt, Homo sapiens
  misc_RNA (1)...(19): siRNA sense strand
acaguguggcuuugaaguu

SEQ ID NO: 1013726 - RNA, 19 nt, Homo sapiens
  misc_RNA (1)...(19): siRNA sense strand
ugauggaccugggcccaau

SEQ ID NO: 1013727 - RNA, 19 nt, Homo sapiens
  misc_RNA (1)...(19): siRNA sense strand
caagcagugugaagcucau

SEQ ID NO: 1013728 - RNA, 19 nt, Homo sapiens
  misc_RNA (1)...(19): siRNA sense strand
ggaggcagggucucuugca

SEQ ID NO: 1013729 - RNA, 19 nt, Homo sapiens
  misc_RNA (1)...(19): siRNA sense strand
cugcgacaguccacucuuc

SEQ ID NO: 1013730 - RNA, 19 nt, Homo sapiens
  misc_RNA (1)...(19): siRNA sense strand
gaaacaaggugcuggauuu

SEQ ID NO: 1013731 - RNA, 19 nt, Homo sapiens
  misc_RNA (1)...(19): siRNA sense strand
gaugagaacacuccaauua

SEQ ID NO: 1013732 - RNA, 19 nt, Homo sapiens
  misc_RNA (1)...(19): siRNA sense strand
gaccauaccuucuguguug

SEQ ID NO: 1013733 - RNA, 19 nt, Homo sapiens
  misc_RNA (1)...(19): siRNA sense strand
gaagaaacauguggauuug

SEQ ID NO: 1013734 - RNA, 19 nt, Homo sapiens
  misc_RNA (1)...(19): siRNA sense strand
ggaagaauccaguaucuaa

SEQ ID NO: 1013735 - RNA, 19 nt, Homo sapiens
  misc_RNA (1)...(19): siRNA sense strand
caacagaacaacacaauuu

SEQ ID NO: 1013736 - RNA, 19 nt, Homo sapiens
  misc_RNA (1)...(19): siRNA sense strand
acaagaagauccauaagaa

SEQ ID NO: 1013737 - RNA, 19 nt, Homo sapiens
  misc_RNA (1)...(19): siRNA sense strand
caaaguggaaucagcauua

SEQ ID NO: 1013738 - RNA, 19 nt, Homo sapiens
  misc_RNA (1)...(19): siRNA sense strand
guuaaugacuggaagguaa

SEQ ID NO: 1013739 - RNA, 19 nt, Homo sapiens
  misc_RNA (1)...(19): siRNA sense strand
gcaagaacuuucccaacaa

SEQ ID NO: 1013740 - RNA, 19 nt, Homo sapiens
  misc_RNA (1)...(19): siRNA sense strand
ccucuuagcugcuuuguug

SEQ ID NO: 1013741 - RNA, 19 nt, Homo sapiens
  misc_RNA (1)...(19): siRNA sense strand
caagauugcuucaguuugu

SEQ ID NO: 1013742 - RNA, 19 nt, Homo sapiens
  misc_RNA (1)...(19): siRNA sense strand
gaacaaauggugcaacaug

SEQ ID NO: 1013743 - RNA, 19 nt, Homo sapiens
  misc_RNA (1)...(19): siRNA sense strand
uggaagcgauuaaugauaa

SEQ ID NO: 1013744 - RNA, 19 nt, Homo sapiens
  misc_RNA (1)...(19): siRNA sense strand
gcagaaaggauuuaaugaa

SEQ ID NO: 1013745 - RNA, 19 nt, Homo sapiens
  misc_RNA (1)...(19): siRNA sense strand
agaauacgcuugauccaaa

SEQ ID NO: 1013746 - RNA, 19 nt, Homo sapiens
  misc_RNA (1)...(19): siRNA sense strand
gaagguaaacacccgguua

SEQ ID NO: 1013747 - RNA, 19 nt, Homo sapiens
  misc_RNA (1)...(19): siRNA sense strand
gaacaacacaauuuacaga

SEQ ID NO: 1013748 - RNA, 19 nt, Homo sapiens
  misc_RNA (1)...(19): siRNA sense strand
gagguuggauuuaugcaaa

SEQ ID NO: 1013749 - RNA, 19 nt, Homo sapiens
  misc_RNA (1)...(19): siRNA sense strand
gaucuuagcaacaucaauu

SEQ ID NO: 1013750 - RNA, 19 nt, Homo sapiens
  misc_RNA (1)...(19): siRNA sense strand
ggaagucaauuaccuugga

SEQ ID NO: 1013751 - RNA, 19 nt, Homo sapiens
  misc_RNA (1)...(19): siRNA sense strand
caacaucaauugugaagag

SEQ ID NO: 1013752 - RNA, 19 nt, Homo sapiens
  misc_RNA (1)...(19): siRNA sense strand
gugaagagcuugguccauu

SEQ ID NO: 1013753 - RNA, 19 nt, Homo sapiens
  misc_RNA (1)...(19): siRNA sense strand
ggaguuagagcucauuauu

SEQ ID NO: 1013754 - RNA, 19 nt, Homo sapiens
  misc_RNA (1)...(19): siRNA sense strand
gaagacauuugaugagaag

SEQ ID NO: 1013755 - RNA, 19 nt, Homo sapiens
  misc_RNA (1)...(19): siRNA sense strand
gaagauccauaagaaacaa

SEQ ID NO: 1013756 - RNA, 19 nt, Homo sapiens
  misc_RNA (1)...(19): siRNA sense strand
ugaagaaacauguggauuu

SEQ ID NO: 1013757 - RNA, 19 nt, Homo sapiens
  misc_RNA (1)...(19): siRNA sense strand
ccacuuuguuggacgaaua

SEQ ID NO: 1013758 - RNA, 19 nt, Homo sapiens
  misc_RNA (1)...(19): siRNA sense strand
ggcaagaacuuucccaaca

SEQ ID NO: 1013759 - RNA, 19 nt, Homo sapiens
  misc_RNA (1)...(19): siRNA sense strand
gaaauuacaugagcagaac

SEQ ID NO: 1013760 - RNA, 19 nt, Homo sapiens
  misc_RNA (1)...(19): siRNA sense strand
uaucagagguuggauuuau

SEQ ID NO: 1013761 - RNA, 19 nt, Homo sapiens
  misc_RNA (1)...(19): siRNA sense strand
cgacauagaaauuacauga

SEQ ID NO: 1013762 - RNA, 19 nt, Homo sapiens
  misc_RNA (1)...(19): siRNA sense strand
gcuaacagccauugaagaa

SEQ ID NO: 1013763 - RNA, 19 nt, Homo sapiens
  misc_RNA (1)...(19): siRNA sense strand
cagaaaggauuuaaugaag

SEQ ID NO: 1013764 - RNA, 19 nt, Homo sapiens
  misc_RNA (1)...(19): siRNA sense strand
gcaaaaguaucccuguuaa

SEQ ID NO: 1013765 - RNA, 19 nt, Homo sapiens
  misc_RNA (1)...(19): siRNA sense strand
caacaggcagaguuuauuu

SEQ ID NO: 1013766 - RNA, 19 nt, Homo sapiens
  misc_RNA (1)...(19): siRNA sense strand
aguuagagcucauuauuug

SEQ ID NO: 1013767 - RNA, 19 nt, Homo sapiens
  misc_RNA (1)...(19): siRNA sense strand
gaagaauccaguaucuaaa

SEQ ID NO: 1013768 - RNA, 19 nt, Homo sapiens
  misc_RNA (1)...(19): siRNA sense strand
gaagaaggccuugacuaug

SEQ ID NO: 1013769 - RNA, 19 nt, Homo sapiens
  misc_RNA (1)...(19): siRNA sense strand
ucacaacgacauagaaauu

SEQ ID NO: 1013770 - RNA, 19 nt, Homo sapiens
  misc_RNA (1)...(19): siRNA sense strand
gaacauuuauccuauuucc

SEQ ID NO: 1013771 - RNA, 19 nt, Homo sapiens
  misc_RNA (1)...(19): siRNA sense strand
gagcagaacacauuuacau

SEQ ID NO: 1013772 - RNA, 19 nt, Homo sapiens
  misc_RNA (1)...(19): siRNA sense strand
ggaagcgauuaaugauaaa

SEQ ID NO: 1013773 - RNA, 19 nt, Homo sapiens
  misc_RNA (1)...(19): siRNA sense strand
gagaagaaggccuugacua

SEQ ID NO: 1013774 - RNA, 19 nt, Homo sapiens
  misc_RNA (1)...(19): siRNA sense strand
cuggaaagcuguggaguuu

SEQ ID NO: 1013775 - RNA, 19 nt, Homo sapiens
  misc_RNA (1)...(19): siRNA sense strand
gagaaccgccucuggaaga

SEQ ID NO: 1013776 - RNA, 19 nt, Homo sapiens
  misc_RNA (1)...(19): siRNA sense strand
cggaacauuuauccuauuu

SEQ ID NO: 1013777 - RNA, 19 nt, Homo sapiens
  misc_RNA (1)...(19): siRNA sense strand
gcaggucauugccgcauug

SEQ ID NO: 1013778 - RNA, 19 nt, Homo sapiens
  misc_RNA (1)...(19): siRNA sense strand
ugagaacacuccaauuagu

SEQ ID NO: 1013779 - RNA, 19 nt, Homo sapiens
  misc_RNA (1)...(19): siRNA sense strand
caaagacacugguuaucag

SEQ ID NO: 1013780 - RNA, 19 nt, Homo sapiens
  misc_RNA (1)...(19): siRNA sense strand
uaacagccauugaagaaac

SEQ ID NO: 1013781 - RNA, 19 nt, Homo sapiens
  misc_RNA (1)...(19): siRNA sense strand
ucaauuaccuuggaugaca

SEQ ID NO: 1013782 - RNA, 19 nt, Homo sapiens
  misc_RNA (1)...(19): siRNA sense strand
gaugggagauccguaauac

SEQ ID NO: 1013783 - RNA, 19 nt, Homo sapiens
  misc_RNA (1)...(19): siRNA sense strand
ugacaaugauacaguuaga

SEQ ID NO: 1013784 - RNA, 19 nt, Homo sapiens
  misc_RNA (1)...(19): siRNA sense strand
ggaaagauagauguuaaug

SEQ ID NO: 1013785 - RNA, 19 nt, Homo sapiens
  misc_RNA (1)...(19): siRNA sense strand
ccagaaggcuaugaacaga

SEQ ID NO: 1013786 - RNA, 19 nt, Homo sapiens
  misc_RNA (1)...(19): siRNA sense strand
caagaagauccauaagaaa

SEQ ID NO: 1013787 - RNA, 19 nt, Homo sapiens
  misc_RNA (1)...(19): siRNA sense strand
gaguuagagcucauuauuu

SEQ ID NO: 1013788 - RNA, 19 nt, Homo sapiens
  misc_RNA (1)...(19): siRNA sense strand
gaaguaauuccacaacauc

SEQ ID NO: 1013789 - RNA, 19 nt, Homo sapiens
  misc_RNA (1)...(19): siRNA sense strand
uaacaagaacuacgcaaug

SEQ ID NO: 1013790 - RNA, 19 nt, Homo sapiens
  misc_RNA (1)...(19): siRNA sense strand
ccaauuaguggaacaaaug

SEQ ID NO: 1013791 - RNA, 19 nt, Homo sapiens
  misc_RNA (1)...(19): siRNA sense strand
gguuguaucucuugucaca

SEQ ID NO: 1013792 - RNA, 19 nt, Homo sapiens
  misc_RNA (1)...(19): siRNA sense strand
uaaaucggcagaaccaauu

SEQ ID NO: 1013793 - RNA, 19 nt, Homo sapiens
  misc_RNA (1)...(19): siRNA sense strand
gcagaacacauuuacauac

SEQ ID NO: 1013794 - RNA, 19 nt, Homo sapiens
  misc_RNA (1)...(19): siRNA sense strand
cauuaugaccuguauauug

SEQ ID NO: 1013795 - RNA, 19 nt, Homo sapiens
  misc_RNA (1)...(19): siRNA sense strand
ugaagacauuugaugagaa

SEQ ID NO: 1013796 - RNA, 19 nt, Homo sapiens
  misc_RNA (1)...(19): siRNA sense strand
gggaaugguuguaucucuu

SEQ ID NO: 1013797 - RNA, 19 nt, Homo sapiens
  misc_RNA (1)...(19): siRNA sense strand
gauaaaauuucguggagaa

SEQ ID NO: 1013798 - RNA, 19 nt, Homo sapiens
  misc_RNA (1)...(19): siRNA sense strand
aggcagaguuuauuucguu

SEQ ID NO: 1013799 - RNA, 19 nt, Homo sapiens
  misc_RNA (1)...(19): siRNA sense strand
gcaugaacuuaaaccaaau

SEQ ID NO: 1013800 - RNA, 19 nt, Homo sapiens
  misc_RNA (1)...(19): siRNA sense strand
gggaauggcuguguuucau

SEQ ID NO: 1013801 - RNA, 19 nt, Homo sapiens
  misc_RNA (1)...(19): siRNA sense strand
caguuaauccggaacauuu

SEQ ID NO: 1013802 - RNA, 19 nt, Homo sapiens
  misc_RNA (1)...(19): siRNA sense strand
aagaaggccuugacuaugg

SEQ ID NO: 1013803 - RNA, 19 nt, Homo sapiens
  misc_RNA (1)...(19): siRNA sense strand
agaagaaggccuugacuau

SEQ ID NO: 1013804 - RNA, 19 nt, Homo sapiens
  misc_RNA (1)...(19): siRNA sense strand
caacaaggccagguguauu

SEQ ID NO: 1013805 - RNA, 19 nt, Homo sapiens
  misc_RNA (1)...(19): siRNA sense strand
cagauacugugaagaauac

SEQ ID NO: 1013806 - RNA, 19 nt, Homo sapiens
  misc_RNA (1)...(19): siRNA sense strand
gaagagcgacgagcaagau

SEQ ID NO: 1013807 - RNA, 19 nt, Homo sapiens
  misc_RNA (1)...(19): siRNA sense strand
ugaaguaauuccacaacau

SEQ ID NO: 1013808 - RNA, 19 nt, Homo sapiens
  misc_RNA (1)...(19): siRNA sense strand
gaauaugucaggcucuaug

SEQ ID NO: 1013809 - RNA, 19 nt, Homo sapiens
  misc_RNA (1)...(19): siRNA sense strand
gaagucaauuaccuuggau

SEQ ID NO: 1013810 - RNA, 19 nt, Homo sapiens
  misc_RNA (1)...(19): siRNA sense strand
caugaaauguugaauccau

SEQ ID NO: 1013811 - RNA, 19 nt, Homo sapiens
  misc_RNA (1)...(19): siRNA sense strand
gaccauaacaacagaacaa

SEQ ID NO: 1013812 - RNA, 19 nt, Homo sapiens
  misc_RNA (1)...(19): siRNA sense strand
ugcagucguuuauuugaua

SEQ ID NO: 1013813 - RNA, 19 nt, Homo sapiens
  misc_RNA (1)...(19): siRNA sense strand
gcaauugcuugggaaguca

SEQ ID NO: 1013814 - RNA, 19 nt, Homo sapiens
  misc_RNA (1)...(19): siRNA sense strand
acuauggccucuuccagua

SEQ ID NO: 1013815 - RNA, 19 nt, Homo sapiens
  misc_RNA (1)...(19): siRNA sense strand
gcaacaggcagaguuuauu

SEQ ID NO: 1013816 - RNA, 19 nt, Homo sapiens
  misc_RNA (1)...(19): siRNA sense strand
ugaagagcuugguccauug

SEQ ID NO: 1013817 - RNA, 19 nt, Homo sapiens
  misc_RNA (1)...(19): siRNA sense strand
uuagcaacaucaauuguga

SEQ ID NO: 1013818 - RNA, 19 nt, Homo sapiens
  misc_RNA (1)...(19): siRNA sense strand
gcaacaaggccagguguau

SEQ ID NO: 1013819 - RNA, 19 nt, Homo sapiens
  misc_RNA (1)...(19): siRNA sense strand
gaggacagauaguaguaag

SEQ ID NO: 1013820 - RNA, 19 nt, Homo sapiens
  misc_RNA (1)...(19): siRNA sense strand
aaaguaucccuguuaauga

SEQ ID NO: 1013821 - RNA, 19 nt, Homo sapiens
  misc_RNA (1)...(19): siRNA sense strand
agcaugaacuuaaaccaaa

SEQ ID NO: 1013822 - RNA, 19 nt, Homo sapiens
  misc_RNA (1)...(19): siRNA sense strand
ucaaagacacugguuauca

SEQ ID NO: 1013823 - RNA, 19 nt, Homo sapiens
  misc_RNA (1)...(19): siRNA sense strand
ggacuuggaaagauagaug

SEQ ID NO: 1013824 - RNA, 19 nt, Homo sapiens
  misc_RNA (1)...(19): siRNA sense strand
ggaaugguuguaucucuug

SEQ ID NO: 1013825 - RNA, 19 nt, Homo sapiens
  misc_RNA (1)...(19): siRNA sense strand
caagugguaucguuauguc

SEQ ID NO: 1013826 - RNA, 19 nt, Homo sapiens
  misc_RNA (1)...(19): siRNA sense strand
ggucacaacgacauagaaa

SEQ ID NO: 1013827 - RNA, 19 nt, Homo sapiens
  misc_RNA (1)...(19): siRNA sense strand
caaaugacaaugauacagu

SEQ ID NO: 1013828 - RNA, 19 nt, Homo sapiens
  misc_RNA (1)...(19): siRNA sense strand
uccaguaucuaaaccauau

SEQ ID NO: 1013829 - RNA, 19 nt, Homo sapiens
  misc_RNA (1)...(19): siRNA sense strand
ccagggaucuuagcaacau

SEQ ID NO: 1013830 - RNA, 19 nt, Homo sapiens
  misc_RNA (1)...(19): siRNA sense strand
ggaaggagcuggagaaaga

SEQ ID NO: 1013831 - RNA, 19 nt, Homo sapiens
  misc_RNA (1)...(19): siRNA sense strand
gcucucagaugaccaaaua

SEQ ID NO: 1013832 - RNA, 19 nt, Homo sapiens
  misc_RNA (1)...(19): siRNA sense strand
ggaaggaccugauggugaa

SEQ ID NO: 1013833 - RNA, 19 nt, Homo sapiens
  misc_RNA (1)...(19): siRNA sense strand
gauaucggcucucagauga

SEQ ID NO: 1013834 - RNA, 19 nt, Homo sapiens
  misc_RNA (1)...(19): siRNA sense strand
gcaaggaggugaccagcaa

SEQ ID NO: 1013835 - RNA, 19 nt, Homo sapiens
  misc_RNA (1)...(19): siRNA sense strand
ccacugcgcuguuacaugu

SEQ ID NO: 1013836 - RNA, 19 nt, Homo sapiens
  misc_RNA (1)...(19): siRNA sense strand
gcaaguggacagugaguaa

SEQ ID NO: 1013837 - RNA, 19 nt, Homo sapiens
  misc_RNA (1)...(19): siRNA sense strand
gcaauuacgagauucugua

SEQ ID NO: 1013838 - RNA, 19 nt, Homo sapiens
  misc_RNA (1)...(19): siRNA sense strand
ucaacaagcucucacagau

SEQ ID NO: 1013839 - RNA, 19 nt, Homo sapiens
  misc_RNA (1)...(19): siRNA sense strand
gcacugcuuugaaugcuau

SEQ ID NO: 1013840 - RNA, 19 nt, Homo sapiens
  misc_RNA (1)...(19): siRNA sense strand
cgugaucucucucuauauu

SEQ ID NO: 1013841 - RNA, 19 nt, Homo sapiens
  misc_RNA (1)...(19): siRNA sense strand
caacgucgccauccagaaa

SEQ ID NO: 1013842 - RNA, 19 nt, Homo sapiens
  misc_RNA (1)...(19): siRNA sense strand
aguacaaccugauuaauga

SEQ ID NO: 1013843 - RNA, 19 nt, Homo sapiens
  misc_RNA (1)...(19): siRNA sense strand
guagaggaguuccggaaga

SEQ ID NO: 1013844 - RNA, 19 nt, Homo sapiens
  misc_RNA (1)...(19): siRNA sense strand
uacgugaucucucucuaua

SEQ ID NO: 1013845 - RNA, 19 nt, Homo sapiens
  misc_RNA (1)...(19): siRNA sense strand
gaaauguguucagcguuga

SEQ ID NO: 1013846 - RNA, 19 nt, Homo sapiens
  misc_RNA (1)...(19): siRNA sense strand
ggaacaagucgccaccuaa

SEQ ID NO: 1013847 - RNA, 19 nt, Homo sapiens
  misc_RNA (1)...(19): siRNA sense strand
caacaucgccgucccgaau

SEQ ID NO: 1013848 - RNA, 19 nt, Homo sapiens
  misc_RNA (1)...(19): siRNA sense strand
uaaaaugggucacugauau

SEQ ID NO: 1013849 - RNA, 19 nt, Homo sapiens
  misc_RNA (1)...(19): siRNA sense strand
ucacugauaucgagaaguc

SEQ ID NO: 1013850 - RNA, 19 nt, Homo sapiens
  misc_RNA (1)...(19): siRNA sense strand
uaaggaagccuacgugauc

SEQ ID NO: 1013851 - RNA, 19 nt, Homo sapiens
  misc_RNA (1)...(19): siRNA sense strand
ucaaguacaaccugauuaa

SEQ ID NO: 1013852 - RNA, 19 nt, Homo sapiens
  misc_RNA (1)...(19): siRNA sense strand
ccaaaccacuaugaacuga

SEQ ID NO: 1013853 - RNA, 19 nt, Homo sapiens
  misc_RNA (1)...(19): siRNA sense strand
gaacaagucgccaccuaag

SEQ ID NO: 1013854 - RNA, 19 nt, Homo sapiens
  misc_RNA (1)...(19): siRNA sense strand
gugcaaaccauccgaaaug

SEQ ID NO: 1013855 - RNA, 19 nt, Homo sapiens
  misc_RNA (1)...(19): siRNA sense strand
ggauaucggcucucagaug

SEQ ID NO: 1013856 - RNA, 19 nt, Homo sapiens
  misc_RNA (1)...(19): siRNA sense strand
caucuucguuugugucuca

SEQ ID NO: 1013857 - RNA, 19 nt, Homo sapiens
  misc_RNA (1)...(19): siRNA sense strand
gcaucuuccuuaucaacaa

SEQ ID NO: 1013858 - RNA, 19 nt, Homo sapiens
  misc_RNA (1)...(19): siRNA sense strand
gaccaaauagucaaccauu

SEQ ID NO: 1013859 - RNA, 19 nt, Homo sapiens
  misc_RNA (1)...(19): siRNA sense strand
caaaccauccgaaaugugu

SEQ ID NO: 1013860 - RNA, 19 nt, Homo sapiens
  misc_RNA (1)...(19): siRNA sense strand
auuacgagauucuguauga

SEQ ID NO: 1013861 - RNA, 19 nt, Homo sapiens
  misc_RNA (1)...(19): siRNA sense strand
aacaagcucucacagauca

SEQ ID NO: 1013862 - RNA, 19 nt, Homo sapiens
  misc_RNA (1)...(19): siRNA sense strand
ugaaaucccagacugcaaa

SEQ ID NO: 1013863 - RNA, 19 nt, Homo sapiens
  misc_RNA (1)...(19): siRNA sense strand
ugaguaaccugcggcucua

SEQ ID NO: 1013864 - RNA, 19 nt, Homo sapiens
  misc_RNA (1)...(19): siRNA sense strand
ucuguaugaugaagaauug

SEQ ID NO: 1013865 - RNA, 19 nt, Homo sapiens
  misc_RNA (1)...(19): siRNA sense strand
gacaacauguucguucauc

SEQ ID NO: 1013866 - RNA, 19 nt, Homo sapiens
  misc_RNA (1)...(19): siRNA sense strand
aacaacccguuacuaauug

SEQ ID NO: 1013867 - RNA, 19 nt, Homo sapiens
  misc_RNA (1)...(19): siRNA sense strand
uggaacaagucgccaccua

SEQ ID NO: 1013868 - RNA, 19 nt, Homo sapiens
  misc_RNA (1)...(19): siRNA sense strand
gcuacgacaucaucaucga

SEQ ID NO: 1013869 - RNA, 19 nt, Homo sapiens
  misc_RNA (1)...(19): siRNA sense strand
gcuguuacauguacaagcu

SEQ ID NO: 1013870 - RNA, 19 nt, Homo sapiens
  misc_RNA (1)...(19): siRNA sense strand
gagaggauggguccaagug

SEQ ID NO: 1013871 - RNA, 19 nt, Homo sapiens
  misc_RNA (1)...(19): siRNA sense strand
acgagauucuguaugauga

SEQ ID NO: 1013872 - RNA, 19 nt, Homo sapiens
  misc_RNA (1)...(19): siRNA sense strand
gaccgaauccucaaguaca

SEQ ID NO: 1013873 - RNA, 19 nt, Homo sapiens
  misc_RNA (1)...(19): siRNA sense strand
caacaagcucucacagauc

SEQ ID NO: 1013874 - RNA, 19 nt, Homo sapiens
  misc_RNA (1)...(19): siRNA sense strand
ggaugagugugcaaaccau

SEQ ID NO: 1013875 - RNA, 19 nt, Homo sapiens
  misc_RNA (1)...(19): siRNA sense strand
cgccggugaugaacaauga

SEQ ID NO: 1013876 - RNA, 19 nt, Homo sapiens
  misc_RNA (1)...(19): siRNA sense strand
gcaagcuguucgacgagau

SEQ ID NO: 1013877 - RNA, 19 nt, Homo sapiens
  misc_RNA (1)...(19): siRNA sense strand
gagcaggccgaucgagaga

SEQ ID NO: 1013878 - RNA, 19 nt, Homo sapiens
  misc_RNA (1)...(19): siRNA sense strand
gcaaaccauccgaaaugug

SEQ ID NO: 1013879 - RNA, 19 nt, Homo sapiens
  misc_RNA (1)...(19): siRNA sense strand
gcaggccgaucgagagacu

SEQ ID NO: 1013880 - RNA, 19 nt, Homo sapiens
  misc_RNA (1)...(19): siRNA sense strand
guuugugucucaaucuaau

SEQ ID NO: 1013881 - RNA, 19 nt, Homo sapiens
  misc_RNA (1)...(19): siRNA sense strand
gagauucuguaugaugaag

SEQ ID NO: 1013882 - RNA, 19 nt, Homo sapiens
  misc_RNA (1)...(19): siRNA sense strand
acaagucgccaccuaagga

SEQ ID NO: 1013883 - RNA, 19 nt, Homo sapiens
  misc_RNA (1)...(19): siRNA sense strand
gugaucucucucuauauua

SEQ ID NO: 1013884 - RNA, 19 nt, Homo sapiens
  misc_RNA (1)...(19): siRNA sense strand
gaaaucccagacugcaaau

SEQ ID NO: 1013885 - RNA, 19 nt, Homo sapiens
  misc_RNA (1)...(19): siRNA sense strand
gugcugaucaauaacuuug

SEQ ID NO: 1013886 - RNA, 19 nt, Homo sapiens
  misc_RNA (1)...(19): siRNA sense strand
guaaaaugggucacugaua

SEQ ID NO: 1013887 - RNA, 19 nt, Homo sapiens
  misc_RNA (1)...(19): siRNA sense strand
gcacugccaaugaccgaau

SEQ ID NO: 1013888 - RNA, 19 nt, Homo sapiens
  misc_RNA (1)...(19): siRNA sense strand
caauuacgagauucuguau

SEQ ID NO: 1013889 - RNA, 19 nt, Homo sapiens
  misc_RNA (1)...(19): siRNA sense strand
aaguacaaccugauuaaug

SEQ ID NO: 1013890 - RNA, 19 nt, Homo sapiens
  misc_RNA (1)...(19): siRNA sense strand
ggaaguccucggcaauuac

SEQ ID NO: 1013891 - RNA, 19 nt, Homo sapiens
  misc_RNA (1)...(19): siRNA sense strand
gaaggagcuggagaaagaa

SEQ ID NO: 1013892 - RNA, 19 nt, Homo sapiens
  misc_RNA (1)...(19): siRNA sense strand
ggacaacauguucguucau

SEQ ID NO: 1013893 - RNA, 19 nt, Homo sapiens
  misc_RNA (1)...(19): siRNA sense strand
ggucacugauaucgagaag

SEQ ID NO: 1013894 - RNA, 19 nt, Homo sapiens
  misc_RNA (1)...(19): siRNA sense strand
auaccucuaucuggacuuu

SEQ ID NO: 1013895 - RNA, 19 nt, Homo sapiens
  misc_RNA (1)...(19): siRNA sense strand
caagucgccaccuaaggaa

SEQ ID NO: 1013896 - RNA, 19 nt, Homo sapiens
  misc_RNA (1)...(19): siRNA sense strand
uaaugacacccucaacauc

SEQ ID NO: 1013897 - RNA, 19 nt, Homo sapiens
  misc_RNA (1)...(19): siRNA sense strand
caaguacaaccugauuaau

SEQ ID NO: 1013898 - RNA, 19 nt, Homo sapiens
  misc_RNA (1)...(19): siRNA sense strand
ccaaugaccgaauccucaa

SEQ ID NO: 1013899 - RNA, 19 nt, Homo sapiens
  misc_RNA (1)...(19): siRNA sense strand
gaccugauggugaagaaca

SEQ ID NO: 1013900 - RNA, 19 nt, Homo sapiens
  misc_RNA (1)...(19): siRNA sense strand
gacugcaaauggaacaagu

SEQ ID NO: 1013901 - RNA, 19 nt, Homo sapiens
  misc_RNA (1)...(19): siRNA sense strand
ccucaaguacaaccugauu

SEQ ID NO: 1013902 - RNA, 19 nt, Homo sapiens
  misc_RNA (1)...(19): siRNA sense strand
caacauguucguucaucuc

SEQ ID NO: 1013903 - RNA, 19 nt, Homo sapiens
  misc_RNA (1)...(19): siRNA sense strand
uggacaacauguucguuca

SEQ ID NO: 1013904 - RNA, 19 nt, Homo sapiens
  misc_RNA (1)...(19): siRNA sense strand
ccagggaaagggcaucuuc

SEQ ID NO: 1013905 - RNA, 19 nt, Homo sapiens
  misc_RNA (1)...(19): siRNA sense strand
cuaauuggcgggaggaagu

SEQ ID NO: 1013906 - RNA, 19 nt, Homo sapiens
  misc_RNA (1)...(19): siRNA sense strand
gucucaaucuaauaaggaa

SEQ ID NO: 1013907 - RNA, 19 nt, Homo sapiens
  misc_RNA (1)...(19): siRNA sense strand
caagcucucacagaucaaa

SEQ ID NO: 1013908 - RNA, 19 nt, Homo sapiens
  misc_RNA (1)...(19): siRNA sense strand
acaggaaggagcuggagaa

SEQ ID NO: 1013909 - RNA, 19 nt, Homo sapiens
  misc_RNA (1)...(19): siRNA sense strand
uuaaugacacccucaacau

SEQ ID NO: 1013910 - RNA, 19 nt, Homo sapiens
  misc_RNA (1)...(19): siRNA sense strand
caucuuccuuaucaacaag

SEQ ID NO: 1013911 - RNA, 19 nt, Homo sapiens
  misc_RNA (1)...(19): siRNA sense strand
cuacgugaucucucucuau

SEQ ID NO: 1013912 - RNA, 19 nt, Homo sapiens
  misc_RNA (1)...(19): siRNA sense strand
uagaggaguuccggaagag

SEQ ID NO: 1013913 - RNA, 19 nt, Homo sapiens
  misc_RNA (1)...(19): siRNA sense strand
aaagagaggauggguccaa

SEQ ID NO: 1013914 - RNA, 19 nt, Homo sapiens
  misc_RNA (1)...(19): siRNA sense strand
gguucugcacagugaaaua

SEQ ID NO: 1013915 - RNA, 19 nt, Homo sapiens
  misc_RNA (1)...(19): siRNA sense strand
ugccgguucugcacaguga

SEQ ID NO: 1013916 - RNA, 19 nt, Homo sapiens
  misc_RNA (1)...(19): siRNA sense strand
ccuacgugaucucucucua

SEQ ID NO: 1013917 - RNA, 19 nt, Homo sapiens
  misc_RNA (1)...(19): siRNA sense strand
ucguuugugucucaaucua

SEQ ID NO: 1013918 - RNA, 19 nt, Homo sapiens
  misc_RNA (1)...(19): siRNA sense strand
ugcaaaccauccgaaaugu

SEQ ID NO: 1013919 - RNA, 19 nt, Homo sapiens
  misc_RNA (1)...(19): siRNA sense strand
guccagcacugccaaugac

SEQ ID NO: 1013920 - RNA, 19 nt, Homo sapiens
  misc_RNA (1)...(19): siRNA sense strand
ucaccaacgucgccaucca

SEQ ID NO: 1013921 - RNA, 19 nt, Homo sapiens
  misc_RNA (1)...(19): siRNA sense strand
cauguacaagcuuggguuu

SEQ ID NO: 1013922 - RNA, 19 nt, Homo sapiens
  misc_RNA (1)...(19): siRNA sense strand
aagccuacgugaucucucu

SEQ ID NO: 1013923 - RNA, 19 nt, Homo sapiens
  misc_RNA (1)...(19): siRNA sense strand
cagugcugaucaauaacuu

SEQ ID NO: 1013924 - RNA, 19 nt, Homo sapiens
  misc_RNA (1)...(19): siRNA sense strand
gaugugacguugacaauua

SEQ ID NO: 1013925 - RNA, 19 nt, Homo sapiens
  misc_RNA (1)...(19): siRNA sense strand
gcaaaucuaucaagaacug

SEQ ID NO: 1013926 - RNA, 19 nt, Homo sapiens
  misc_RNA (1)...(19): siRNA sense strand
caaggaaacuguuacuuca

SEQ ID NO: 1013927 - RNA, 19 nt, Homo sapiens
  misc_RNA (1)...(19): siRNA sense strand
gcagauacauggccacaag

SEQ ID NO: 1013928 - RNA, 19 nt, Homo sapiens
  misc_RNA (1)...(19): siRNA sense strand
gaacugaccgauuugaaga

SEQ ID NO: 1013929 - RNA, 19 nt, Homo sapiens
  misc_RNA (1)...(19): siRNA sense strand
gaugggacuuucagaccua

SEQ ID NO: 1013930 - RNA, 19 nt, Homo sapiens
  misc_RNA (1)...(19): siRNA sense strand
ugaagacugugcggaauuu

SEQ ID NO: 1013931 - RNA, 19 nt, Homo sapiens
  misc_RNA (1)...(19): siRNA sense strand
cagcaaaucuaucaagaac

SEQ ID NO: 1013932 - RNA, 19 nt, Homo sapiens
  misc_RNA (1)...(19): siRNA sense strand
gaaccugacccagcuuaaa

SEQ ID NO: 1013933 - RNA, 19 nt, Homo sapiens
  misc_RNA (1)...(19): siRNA sense strand
aucaagaacugaccgauuu

SEQ ID NO: 1013934 - RNA, 19 nt, Homo sapiens
  misc_RNA (1)...(19): siRNA sense strand
ccaagcagcagcaaaucua

SEQ ID NO: 1013935 - RNA, 19 nt, Homo sapiens
  misc_RNA (1)...(19): siRNA sense strand
ccaaggaaacuguuacuuc

SEQ ID NO: 1013936 - RNA, 19 nt, Homo sapiens
  misc_RNA (1)...(19): siRNA sense strand
ggaaacuguuacuucaugu

SEQ ID NO: 1013937 - RNA, 19 nt, Homo sapiens
  misc_RNA (1)...(19): siRNA sense strand
caagagacuuucaauucca

SEQ ID NO: 1013938 - RNA, 19 nt, Homo sapiens
  misc_RNA (1)...(19): siRNA sense strand
gcagcaaaucuaucaagaa

SEQ ID NO: 1013939 - RNA, 19 nt, Homo sapiens
  misc_RNA (1)...(19): siRNA sense strand
guggagaacccaacaauag

SEQ ID NO: 1013940 - RNA, 19 nt, Homo sapiens
  misc_RNA (1)...(19): siRNA sense strand
ccaagagacuuucaauucc

SEQ ID NO: 1013941 - RNA, 19 nt, Homo sapiens
  misc_RNA (1)...(19): siRNA sense strand
ggacggcucaccucuguca

SEQ ID NO: 1013942 - RNA, 19 nt, Homo sapiens
  misc_RNA (1)...(19): siRNA sense strand
cugcagacuuccaggagua

SEQ ID NO: 1013943 - RNA, 19 nt, Homo sapiens
  misc_RNA (1)...(19): siRNA sense strand
aauccaagcugcaggagau

SEQ ID NO: 1013944 - RNA, 19 nt, Homo sapiens
  misc_RNA (1)...(19): siRNA sense strand
gggcccagcucgucguaau

SEQ ID NO: 1013945 - RNA, 19 nt, Homo sapiens
  misc_RNA (1)...(19): siRNA sense strand
aauccaagcugcaggagau

SEQ ID NO: 1013946 - RNA, 19 nt, Homo sapiens
  misc_RNA (1)...(19): siRNA sense strand
aauccaagcugcaggagau

SEQ ID NO: 1013947 - RNA, 19 nt, Homo sapiens
  misc_RNA (1)...(19): siRNA sense strand
aauccaagcugcaggagau

SEQ ID NO: 1013948 - RNA, 19 nt, Homo sapiens
  misc_RNA (1)...(19): siRNA sense strand
aauccaagcugcaggagau

SEQ ID NO: 1013949 - RNA, 19 nt, Homo sapiens
  misc_RNA (1)...(19): siRNA sense strand
gaagacugugcggaauuua

SEQ ID NO: 1013950 - RNA, 19 nt, Homo sapiens
  misc_RNA (1)...(19): siRNA sense strand
acuguuacuucaugucuaa

SEQ ID NO: 1013951 - RNA, 19 nt, Homo sapiens
  misc_RNA (1)...(19): siRNA sense strand
uccaagagacuuucaauuc

SEQ ID NO: 1013952 - RNA, 19 nt, Homo sapiens
  misc_RNA (1)...(19): siRNA sense strand
uuugaagacugcauuugaa

SEQ ID NO: 1013953 - RNA, 19 nt, Homo sapiens
  misc_RNA (1)...(19): siRNA sense strand
guggacggcucaccucugu

SEQ ID NO: 1013954 - RNA, 19 nt, Homo sapiens
  misc_RNA (1)...(19): siRNA sense strand
gaagaagauccaacaacca

SEQ ID NO: 1013955 - RNA, 19 nt, Homo sapiens
  misc_RNA (1)...(19): siRNA sense strand
aggaaacuguuacuucaug

SEQ ID NO: 1013956 - RNA, 19 nt, Homo sapiens
  misc_RNA (1)...(19): siRNA sense strand
ggaacgacaaucgauguga

SEQ ID NO: 1013957 - RNA, 19 nt, Homo sapiens
  misc_RNA (1)...(19): siRNA sense strand
uagcgggaaugaagacugu

SEQ ID NO: 1013958 - RNA, 19 nt, Homo sapiens
  misc_RNA (1)...(19): siRNA sense strand
uaucaagaacugaccgauu

SEQ ID NO: 1013959 - RNA, 19 nt, Homo sapiens
  misc_RNA (1)...(19): siRNA sense strand
caagaacugaccgauuuga

SEQ ID NO: 1013960 - RNA, 19 nt, Homo sapiens
  misc_RNA (1)...(19): siRNA sense strand
cagaaccugacccagcuua

SEQ ID NO: 1013961 - RNA, 19 nt, Homo sapiens
  misc_RNA (1)...(19): siRNA sense strand
cccaaggacuggacauucu

SEQ ID NO: 1013962 - RNA, 19 nt, Homo sapiens
  misc_RNA (1)...(19): siRNA sense strand
ugggugaguugccagagaa

SEQ ID NO: 1013963 - RNA, 19 nt, Homo sapiens
  misc_RNA (1)...(19): siRNA sense strand
ugggugaguugccagagaa

SEQ ID NO: 1013964 - RNA, 19 nt, Homo sapiens
  misc_RNA (1)...(19): siRNA sense strand
ugggugaguugccagagaa

SEQ ID NO: 1013965 - RNA, 19 nt, Homo sapiens
  misc_RNA (1)...(19): siRNA sense strand
ugggugaguugccagagaa

SEQ ID NO: 1013966 - RNA, 19 nt, Homo sapiens
  misc_RNA (1)...(19): siRNA sense strand
gcaacuccucuccuucaug

SEQ ID NO: 1013967 - RNA, 19 nt, Homo sapiens
  misc_RNA (1)...(19): siRNA sense strand
caacaauagcgggaaugaa

SEQ ID NO: 1013968 - RNA, 19 nt, Homo sapiens
  misc_RNA (1)...(19): siRNA sense strand
ggaacaauccgagcaagac

SEQ ID NO: 1013969 - RNA, 19 nt, Homo sapiens
  misc_RNA (1)...(19): siRNA sense strand
ccaacaauagcgggaauga

SEQ ID NO: 1013970 - RNA, 19 nt, Homo sapiens
  misc_RNA (1)...(19): siRNA sense strand
ggaaggcacguggcaaugg

SEQ ID NO: 1013971 - RNA, 19 nt, Homo sapiens
  misc_RNA (1)...(19): siRNA sense strand
gugggugaguugccagaga

SEQ ID NO: 1013972 - RNA, 19 nt, Homo sapiens
  misc_RNA (1)...(19): siRNA sense strand
gugggugaguugccagaga

SEQ ID NO: 1013973 - RNA, 19 nt, Homo sapiens
  misc_RNA (1)...(19): siRNA sense strand
gugggugaguugccagaga

SEQ ID NO: 1013974 - RNA, 19 nt, Homo sapiens
  misc_RNA (1)...(19): siRNA sense strand
gugggugaguugccagaga

SEQ ID NO: 1013975 - RNA, 19 nt, Homo sapiens
  misc_RNA (1)...(19): siRNA sense strand
uccuacagcugcagacuuc

SEQ ID NO: 1013976 - RNA, 19 nt, Homo sapiens
  misc_RNA (1)...(19): siRNA sense strand
aagacgcaaucuaccagaa

SEQ ID NO: 1013977 - RNA, 19 nt, Homo sapiens
  misc_RNA (1)...(19): siRNA sense strand
aacaauagcgggaaugaag

SEQ ID NO: 1013978 - RNA, 19 nt, Homo sapiens
  misc_RNA (1)...(19): siRNA sense strand
ccaagcugcaggagaucua

SEQ ID NO: 1013979 - RNA, 19 nt, Homo sapiens
  misc_RNA (1)...(19): siRNA sense strand
ccagcucgucguaaucaaa

SEQ ID NO: 1013980 - RNA, 19 nt, Homo sapiens
  misc_RNA (1)...(19): siRNA sense strand
ccaagcugcaggagaucua

SEQ ID NO: 1013981 - RNA, 19 nt, Homo sapiens
  misc_RNA (1)...(19): siRNA sense strand
ccaagcugcaggagaucua

SEQ ID NO: 1013982 - RNA, 19 nt, Homo sapiens
  misc_RNA (1)...(19): siRNA sense strand
ccaagcugcaggagaucua

SEQ ID NO: 1013983 - RNA, 19 nt, Homo sapiens
  misc_RNA (1)...(19): siRNA sense strand
ccaagcugcaggagaucua

SEQ ID NO: 1013984 - RNA, 19 nt, Homo sapiens
  misc_RNA (1)...(19): siRNA sense strand
cgagcaagacgcaaucuac

SEQ ID NO: 1013985 - RNA, 19 nt, Homo sapiens
  misc_RNA (1)...(19): siRNA sense strand
caagcagcagcaaaucuau

SEQ ID NO: 1013986 - RNA, 19 nt, Homo sapiens
  misc_RNA (1)...(19): siRNA sense strand
gaaacuguuacuucauguc

SEQ ID NO: 1013987 - RNA, 19 nt, Homo sapiens
  misc_RNA (1)...(19): siRNA sense strand
cgacaaucgaugugacguu

SEQ ID NO: 1013988 - RNA, 19 nt, Homo sapiens
  misc_RNA (1)...(19): siRNA sense strand
ggacuuucagaccuaaauc

SEQ ID NO: 1013989 - RNA, 19 nt, Homo sapiens
  misc_RNA (1)...(19): siRNA sense strand
gauuugaagacugcauuug

SEQ ID NO: 1013990 - RNA, 19 nt, Homo sapiens
  misc_RNA (1)...(19): siRNA sense strand
aaugaagacugugcggaau

SEQ ID NO: 1013991 - RNA, 19 nt, Homo sapiens
  misc_RNA (1)...(19): siRNA sense strand
aacaaccaguggcaucaga

SEQ ID NO: 1013992 - RNA, 19 nt, Homo sapiens
  misc_RNA (1)...(19): siRNA sense strand
caaucgaugugacguugac

SEQ ID NO: 1013993 - RNA, 19 nt, Homo sapiens
  misc_RNA (1)...(19): siRNA sense strand
caggaaggcacguggcaau

SEQ ID NO: 1013994 - RNA, 19 nt, Homo sapiens
  misc_RNA (1)...(19): siRNA sense strand
ccaaggacuggacauucuu

SEQ ID NO: 1013995 - RNA, 19 nt, Homo sapiens
  misc_RNA (1)...(19): siRNA sense strand
ucaagaacugaccgauuug

SEQ ID NO: 1013996 - RNA, 19 nt, Homo sapiens
  misc_RNA (1)...(19): siRNA sense strand
agcagcaaaucuaucaaga

SEQ ID NO: 1013997 - RNA, 19 nt, Homo sapiens
  misc_RNA (1)...(19): siRNA sense strand
ccaacaaccaguggcauca

SEQ ID NO: 1013998 - RNA, 19 nt, Homo sapiens
  misc_RNA (1)...(19): siRNA sense strand
gugaguugccagagaaauc

SEQ ID NO: 1013999 - RNA, 19 nt, Homo sapiens
  misc_RNA (1)...(19): siRNA sense strand
acaauagcgggaaugaaga

SEQ ID NO: 1014000 - RNA, 19 nt, Homo sapiens
  misc_RNA (1)...(19): siRNA sense strand
gcccagcucgucguaauca

SEQ ID NO: 1014001 - RNA, 19 nt, Homo sapiens
  misc_RNA (1)...(19): siRNA sense strand
cgauuugaagacugcauuu

SEQ ID NO: 1014002 - RNA, 19 nt, Homo sapiens
  misc_RNA (1)...(19): siRNA sense strand
accaguggcaucagacuuu

SEQ ID NO: 1014003 - RNA, 19 nt, Homo sapiens
  misc_RNA (1)...(19): siRNA sense strand
gugaguugccagagaaauc

SEQ ID NO: 1014004 - RNA, 19 nt, Homo sapiens
  misc_RNA (1)...(19): siRNA sense strand
gugaguugccagagaaauc

SEQ ID NO: 1014005 - RNA, 19 nt, Homo sapiens
  misc_RNA (1)...(19): siRNA sense strand
gugaguugccagagaaauc

SEQ ID NO: 1014006 - RNA, 19 nt, Homo sapiens
  misc_RNA (1)...(19): siRNA sense strand
ggugugaccagcuuuguuu

SEQ ID NO: 1014007 - RNA, 19 nt, Homo sapiens
  misc_RNA (1)...(19): siRNA sense strand
guacaaccuugcugugaag

SEQ ID NO: 1014008 - RNA, 19 nt, Homo sapiens
  misc_RNA (1)...(19): siRNA sense strand
cgagggaucugaccuacca

SEQ ID NO: 1014009 - RNA, 19 nt, Homo sapiens
  misc_RNA (1)...(19): siRNA sense strand
caagacacccugcuacauc

SEQ ID NO: 1014010 - RNA, 19 nt, Homo sapiens
  misc_RNA (1)...(19): siRNA sense strand
ugacaucgcccucaucaag

SEQ ID NO: 1014011 - RNA, 19 nt, Homo sapiens
  misc_RNA (1)...(19): siRNA sense strand
gaccauagcaagccacuag

SEQ ID NO: 1014012 - RNA, 19 nt, Homo sapiens
  misc_RNA (1)...(19): siRNA sense strand
cagcuuuguuucuggcuuu

SEQ ID NO: 1014013 - RNA, 19 nt, Homo sapiens
  misc_RNA (1)...(19): siRNA sense strand
ggccgucucuauaccaaug

SEQ ID NO: 1014014 - RNA, 19 nt, Homo sapiens
  misc_RNA (1)...(19): siRNA sense strand
ucaguucccuccuccuugu

SEQ ID NO: 1014015 - RNA, 19 nt, Homo sapiens
  misc_RNA (1)...(19): siRNA sense strand
ugacauccuucccaacaag

SEQ ID NO: 1014016 - RNA, 19 nt, Homo sapiens
  misc_RNA (1)...(19): siRNA sense strand
gaguacaaccuugcuguga

SEQ ID NO: 1014017 - RNA, 19 nt, Homo sapiens
  misc_RNA (1)...(19): siRNA sense strand
gcugcaacuucaucuggaa

SEQ ID NO: 1014018 - RNA, 19 nt, Homo sapiens
  misc_RNA (1)...(19): siRNA sense strand
ccaacaagacacccugcua

SEQ ID NO: 1014019 - RNA, 19 nt, Homo sapiens
  misc_RNA (1)...(19): siRNA sense strand
ggugacauccuucccaaca

SEQ ID NO: 1014020 - RNA, 19 nt, Homo sapiens
  misc_RNA (1)...(19): siRNA sense strand
ggcuuuggcugcaacuuca

SEQ ID NO: 1014021 - RNA, 19 nt, Homo sapiens
  misc_RNA (1)...(19): siRNA sense strand
aguacaaccuugcugugaa

SEQ ID NO: 1014022 - RNA, 19 nt, Homo sapiens
  misc_RNA (1)...(19): siRNA sense strand
aagacacccugcuacauca

SEQ ID NO: 1014023 - RNA, 19 nt, Homo sapiens
  misc_RNA (1)...(19): siRNA sense strand
agguuucccugcaguauga

SEQ ID NO: 1014024 - RNA, 19 nt, Homo sapiens
  misc_RNA (1)...(19): siRNA sense strand
gugacauccuucccaacaa

SEQ ID NO: 1014025 - RNA, 19 nt, Homo sapiens
  misc_RNA (1)...(19): siRNA sense strand
ccaccuuccucucacucuu

SEQ ID NO: 1014026 - RNA, 19 nt, Homo sapiens
  misc_RNA (1)...(19): siRNA sense strand
gcucaguucccuccuccuu

SEQ ID NO: 1014027 - RNA, 19 nt, Homo sapiens
  misc_RNA (1)...(19): siRNA sense strand
gaagaaaaccauggugugu

SEQ ID NO: 1014028 - RNA, 19 nt, Homo sapiens
  misc_RNA (1)...(19): siRNA sense strand
ugcccgugguggacuauaa

SEQ ID NO: 1014029 - RNA, 19 nt, Homo sapiens
  misc_RNA (1)...(19): siRNA sense strand
gugaccagcuuuguuucug

SEQ ID NO: 1014030 - RNA, 19 nt, Homo sapiens
  misc_RNA (1)...(19): siRNA sense strand
caacucugaggagcuguuu

SEQ ID NO: 1014031 - RNA, 19 nt, Homo sapiens
  misc_RNA (1)...(19): siRNA sense strand
gaagauaguuuaaggaaga

SEQ ID NO: 1014032 - RNA, 19 nt, Homo sapiens
  misc_RNA (1)...(19): siRNA sense strand
gcaagaagcuauucagaag

SEQ ID NO: 1014033 - RNA, 19 nt, Homo sapiens
  misc_RNA (1)...(19): siRNA sense strand
gcacucagaagauaguuua

SEQ ID NO: 1014034 - RNA, 19 nt, Homo sapiens
  misc_RNA (1)...(19): siRNA sense strand
caacacaucuucaauacca

SEQ ID NO: 1014035 - RNA, 19 nt, Homo sapiens
  misc_RNA (1)...(19): siRNA sense strand
uaaggaagauggcaauaau

SEQ ID NO: 1014036 - RNA, 19 nt, Homo sapiens
  misc_RNA (1)...(19): siRNA sense strand
gaagauggcaauaauaaca

SEQ ID NO: 1014037 - RNA, 19 nt, Homo sapiens
  misc_RNA (1)...(19): siRNA sense strand
ucaggcagcucgaaacaug

SEQ ID NO: 1014038 - RNA, 19 nt, Homo sapiens
  misc_RNA (1)...(19): siRNA sense strand
ccaguugaaucaucuguug

SEQ ID NO: 1014039 - RNA, 19 nt, Homo sapiens
  misc_RNA (1)...(19): siRNA sense strand
aagaagcuauucagaagaa

SEQ ID NO: 1014040 - RNA, 19 nt, Homo sapiens
  misc_RNA (1)...(19): siRNA sense strand
gcaauaauaacaacacauc

SEQ ID NO: 1014041 - RNA, 19 nt, Homo sapiens
  misc_RNA (1)...(19): siRNA sense strand
gaacagucaucggaucuac

SEQ ID NO: 1014042 - RNA, 19 nt, Homo sapiens
  misc_RNA (1)...(19): siRNA sense strand
cagaagauaguuuaaggaa

SEQ ID NO: 1014043 - RNA, 19 nt, Homo sapiens
  misc_RNA (1)...(19): siRNA sense strand
aggaagauggcaauaauaa

SEQ ID NO: 1014044 - RNA, 19 nt, Homo sapiens
  misc_RNA (1)...(19): siRNA sense strand
uaaucgcgcucaccaagca

SEQ ID NO: 1014045 - RNA, 19 nt, Homo sapiens
  misc_RNA (1)...(19): siRNA sense strand
aacaacacaucuucaauac

SEQ ID NO: 1014046 - RNA, 19 nt, Homo sapiens
  misc_RNA (1)...(19): siRNA sense strand
aaacaugguacuccaggaa

SEQ ID NO: 1014047 - RNA, 19 nt, Homo sapiens
  misc_RNA (1)...(19): siRNA sense strand
uuaaggaagauggcaauaa

SEQ ID NO: 1014048 - RNA, 19 nt, Homo sapiens
  misc_RNA (1)...(19): siRNA sense strand
caagaagcuauucagaaga

SEQ ID NO: 1014049 - RNA, 19 nt, Homo sapiens
  misc_RNA (1)...(19): siRNA sense strand
guugaaucaucuguugaaa

SEQ ID NO: 1014050 - RNA, 19 nt, Homo sapiens
  misc_RNA (1)...(19): siRNA sense strand
caccugugguacugacgua

SEQ ID NO: 1014051 - RNA, 19 nt, Homo sapiens
  misc_RNA (1)...(19): siRNA sense strand
cagcaagaagcuauucaga

SEQ ID NO: 1014052 - RNA, 19 nt, Homo sapiens
  misc_RNA (1)...(19): siRNA sense strand
ggaucuacaggaccaguug

SEQ ID NO: 1014053 - RNA, 19 nt, Homo sapiens
  misc_RNA (1)...(19): siRNA sense strand
uacaggaccaguugaauca

SEQ ID NO: 1014054 - RNA, 19 nt, Homo sapiens
  misc_RNA (1)...(19): siRNA sense strand
aaggaagauggcaauaaua

SEQ ID NO: 1014055 - RNA, 19 nt, Homo sapiens
  misc_RNA (1)...(19): siRNA sense strand
caggaccaguugaaucauc

SEQ ID NO: 1014056 - RNA, 19 nt, Homo sapiens
  misc_RNA (1)...(19): siRNA sense strand
cuacaggaccaguugaauc

SEQ ID NO: 1014057 - RNA, 19 nt, Homo sapiens
  misc_RNA (1)...(19): siRNA sense strand
ggaagauggcaauaauaac

SEQ ID NO: 1014058 - RNA, 19 nt, Homo sapiens
  misc_RNA (1)...(19): siRNA sense strand
ggucaggcagcucgaaaca

SEQ ID NO: 1014059 - RNA, 19 nt, Homo sapiens
  misc_RNA (1)...(19): siRNA sense strand
gaucuacaggaccaguuga

SEQ ID NO: 1014060 - RNA, 19 nt, Homo sapiens
  misc_RNA (1)...(19): siRNA sense strand
acaugguacuccaggaaga

SEQ ID NO: 1014061 - RNA, 19 nt, Homo sapiens
  misc_RNA (1)...(19): siRNA sense strand
caagcgcgguucggucagu

SEQ ID NO: 1014062 - RNA, 19 nt, Homo sapiens
  misc_RNA (1)...(19): siRNA sense strand
ucagaagauaguuuaagga

SEQ ID NO: 1014063 - RNA, 19 nt, Homo sapiens
  misc_RNA (1)...(19): siRNA sense strand
cucagaagauaguuuaagg

SEQ ID NO: 1014064 - RNA, 19 nt, Homo sapiens
  misc_RNA (1)...(19): siRNA sense strand
agcaagaagcuauucagaa

SEQ ID NO: 1014065 - RNA, 19 nt, Homo sapiens
  misc_RNA (1)...(19): siRNA sense strand
gggaaaucgugcaggauga

SEQ ID NO: 1014066 - RNA, 19 nt, Homo sapiens
  misc_RNA (1)...(19): siRNA sense strand
gugcggaucuuggccaaug

SEQ ID NO: 1014067 - RNA, 19 nt, Homo sapiens
  misc_RNA (1)...(19): siRNA sense strand
ccaccaagagguagcauuc

SEQ ID NO: 1014068 - RNA, 19 nt, Homo sapiens
  misc_RNA (1)...(19): siRNA sense strand
gguagcauuccucgacaga

SEQ ID NO: 1014069 - RNA, 19 nt, Homo sapiens
  misc_RNA (1)...(19): siRNA sense strand
gaaaacagauggcgacuua

SEQ ID NO: 1014070 - RNA, 19 nt, Homo sapiens
  misc_RNA (1)...(19): siRNA sense strand
cuacagaccucgcuuguug

SEQ ID NO: 1014071 - RNA, 19 nt, Homo sapiens
  misc_RNA (1)...(19): siRNA sense strand
ucacggagcugccgaggau

SEQ ID NO: 1014072 - RNA, 19 nt, Homo sapiens
  misc_RNA (1)...(19): siRNA sense strand
gcagcaaagucuucucugu

SEQ ID NO: 1014073 - RNA, 19 nt, Homo sapiens
  misc_RNA (1)...(19): siRNA sense strand
gcagagaggccugagcuaa

SEQ ID NO: 1014074 - RNA, 19 nt, Homo sapiens
  misc_RNA (1)...(19): siRNA sense strand
gcacgaagugagcaaagaa

SEQ ID NO: 1014075 - RNA, 19 nt, Homo sapiens
  misc_RNA (1)...(19): siRNA sense strand
aagaagcgccuuuagcaaa

SEQ ID NO: 1014076 - RNA, 19 nt, Homo sapiens
  misc_RNA (1)...(19): siRNA sense strand
gcuccacucuguagcacuu

SEQ ID NO: 1014077 - RNA, 19 nt, Homo sapiens
  misc_RNA (1)...(19): siRNA sense strand
ggagcuggcacuguuggua

SEQ ID NO: 1014078 - RNA, 19 nt, Homo sapiens
  misc_RNA (1)...(19): siRNA sense strand
agcaaagucuucucugugu

SEQ ID NO: 1014079 - RNA, 19 nt, Homo sapiens
  misc_RNA (1)...(19): siRNA sense strand
caugcgaucccaccacaaa

SEQ ID NO: 1014080 - RNA, 19 nt, Homo sapiens
  misc_RNA (1)...(19): siRNA sense strand
agaguggccaccuugcuua

SEQ ID NO: 1014081 - RNA, 19 nt, Homo sapiens
  misc_RNA (1)...(19): siRNA sense strand
aaccuguccuuucgccuaa

SEQ ID NO: 1014082 - RNA, 19 nt, Homo sapiens
  misc_RNA (1)...(19): siRNA sense strand
caaagugcaaccuguccuu

SEQ ID NO: 1014083 - RNA, 19 nt, Homo sapiens
  misc_RNA (1)...(19): siRNA sense strand
ggccugacccacauucuca

SEQ ID NO: 1014084 - RNA, 19 nt, Homo sapiens
  misc_RNA (1)...(19): siRNA sense strand
agaagcgccuuuagcaaac

SEQ ID NO: 1014085 - RNA, 19 nt, Homo sapiens
  misc_RNA (1)...(19): siRNA sense strand
uguggaacuugcaagcauu

SEQ ID NO: 1014086 - RNA, 19 nt, Homo sapiens
  misc_RNA (1)...(19): siRNA sense strand
guggccaccuugcuuaucu

SEQ ID NO: 1014087 - RNA, 19 nt, Homo sapiens
  misc_RNA (1)...(19): siRNA sense strand
agccagugcugcucgagaa

SEQ ID NO: 1014088 - RNA, 19 nt, Homo sapiens
  misc_RNA (1)...(19): siRNA sense strand
cagaguggccaccuugcuu

SEQ ID NO: 1014089 - RNA, 19 nt, Homo sapiens
  misc_RNA (1)...(19): siRNA sense strand
ccacagaaugcuccacucu

SEQ ID NO: 1014090 - RNA, 19 nt, Homo sapiens
  misc_RNA (1)...(19): siRNA sense strand
cagaacuggugugcaaagu

SEQ ID NO: 1014091 - RNA, 19 nt, Homo sapiens
  misc_RNA (1)...(19): siRNA sense strand
caucauccuccaccacuuc

SEQ ID NO: 1014092 - RNA, 19 nt, Homo sapiens
  misc_RNA (1)...(19): siRNA sense strand
ccacagcugacccagaaca

SEQ ID NO: 1014093 - RNA, 19 nt, Homo sapiens
  misc_RNA (1)...(19): siRNA sense strand
cacuguggcuggagcauac

SEQ ID NO: 1014094 - RNA, 19 nt, Homo sapiens
  misc_RNA (1)...(19): siRNA sense strand
agaaugcuccacucuguag

SEQ ID NO: 1014095 - RNA, 19 nt, Homo sapiens
  misc_RNA (1)...(19): siRNA sense strand
ggagagggagcacgaugac

SEQ ID NO: 1014096 - RNA, 19 nt, Homo sapiens
  misc_RNA (1)...(19): siRNA sense strand
gaagaaugcuguuauuaug

SEQ ID NO: 1014097 - RNA, 19 nt, Homo sapiens
  misc_RNA (1)...(19): siRNA sense strand
gaaguaaucucccaacuca

SEQ ID NO: 1014098 - RNA, 19 nt, Homo sapiens
  misc_RNA (1)...(19): siRNA sense strand
caaacuaucucaagaacua

SEQ ID NO: 1014099 - RNA, 19 nt, Homo sapiens
  misc_RNA (1)...(19): siRNA sense strand
ucgaagagcuuuagacuug

SEQ ID NO: 1014100 - RNA, 19 nt, Homo sapiens
  misc_RNA (1)...(19): siRNA sense strand
ggaagaaugcuguuauuau

SEQ ID NO: 1014101 - RNA, 19 nt, Homo sapiens
  misc_RNA (1)...(19): siRNA sense strand
gaauggcucuucagaaucu

SEQ ID NO: 1014102 - RNA, 19 nt, Homo sapiens
  misc_RNA (1)...(19): siRNA sense strand
caacuucagcacagaaaua

SEQ ID NO: 1014103 - RNA, 19 nt, Homo sapiens
  misc_RNA (1)...(19): siRNA sense strand
gaaauaacccauaccucaa

SEQ ID NO: 1014104 - RNA, 19 nt, Homo sapiens
  misc_RNA (1)...(19): siRNA sense strand
ccucaaaccucaccugugu

SEQ ID NO: 1014105 - RNA, 19 nt, Homo sapiens
  misc_RNA (1)...(19): siRNA sense strand
gaaacccuccguacccaua

SEQ ID NO: 1014106 - RNA, 19 nt, Homo sapiens
  misc_RNA (1)...(19): siRNA sense strand
ccuacuaacuguuggauau

SEQ ID NO: 1014107 - RNA, 19 nt, Homo sapiens
  misc_RNA (1)...(19): siRNA sense strand
gagcagaggagcuucgaaa

SEQ ID NO: 1014108 - RNA, 19 nt, Homo sapiens
  misc_RNA (1)...(19): siRNA sense strand
gggaagaaugcuguuauua

SEQ ID NO: 1014109 - RNA, 19 nt, Homo sapiens
  misc_RNA (1)...(19): siRNA sense strand
ggaaaucucagcugcacaa

SEQ ID NO: 1014110 - RNA, 19 nt, Homo sapiens
  misc_RNA (1)...(19): siRNA sense strand
ggacuuacuucacccaaac

SEQ ID NO: 1014111 - RNA, 19 nt, Homo sapiens
  misc_RNA (1)...(19): siRNA sense strand
gcaugcaaauacucauuau

SEQ ID NO: 1014112 - RNA, 19 nt, Homo sapiens
  misc_RNA (1)...(19): siRNA sense strand
gaacuucaggccauauguu

SEQ ID NO: 1014113 - RNA, 19 nt, Homo sapiens
  misc_RNA (1)...(19): siRNA sense strand
gaacaacuucagcacagaa

SEQ ID NO: 1014114 - RNA, 19 nt, Homo sapiens
  misc_RNA (1)...(19): siRNA sense strand
aaucgaagcuguaaaacua

SEQ ID NO: 1014115 - RNA, 19 nt, Homo sapiens
  misc_RNA (1)...(19): siRNA sense strand
gaguacccauucuuccuuu

SEQ ID NO: 1014116 - RNA, 19 nt, Homo sapiens
  misc_RNA (1)...(19): siRNA sense strand
cgagaucgaauacaacgua

SEQ ID NO: 1014117 - RNA, 19 nt, Homo sapiens
  misc_RNA (1)...(19): siRNA sense strand
cuacucaguucuacuacaa

SEQ ID NO: 1014118 - RNA, 19 nt, Homo sapiens
  misc_RNA (1)...(19): siRNA sense strand
gaaugcagcgucccggaaa

SEQ ID NO: 1014119 - RNA, 19 nt, Homo sapiens
  misc_RNA (1)...(19): siRNA sense strand
ggcccucccuuaucauauu

SEQ ID NO: 1014120 - RNA, 19 nt, Homo sapiens
  misc_RNA (1)...(19): siRNA sense strand
ggaacaacuucagcacaga

SEQ ID NO: 1014121 - RNA, 19 nt, Homo sapiens
  misc_RNA (1)...(19): siRNA sense strand
caagaucaggcaagagaaa

SEQ ID NO: 1014122 - RNA, 19 nt, Homo sapiens
  misc_RNA (1)...(19): siRNA sense strand
gcagaggagcuucgaaaca

SEQ ID NO: 1014123 - RNA, 19 nt, Homo sapiens
  misc_RNA (1)...(19): siRNA sense strand
ucaaaccucaccuguguaa

SEQ ID NO: 1014124 - RNA, 19 nt, Homo sapiens
  misc_RNA (1)...(19): siRNA sense strand
ucacugagaaaguuaaaga

SEQ ID NO: 1014125 - RNA, 19 nt, Homo sapiens
  misc_RNA (1)...(19): siRNA sense strand
uuuggacccuguaucuuua

SEQ ID NO: 1014126 - RNA, 19 nt, Homo sapiens
  misc_RNA (1)...(19): siRNA sense strand
gaacaauggaacaacuuca

SEQ ID NO: 1014127 - RNA, 19 nt, Homo sapiens
  misc_RNA (1)...(19): siRNA sense strand
gccaauggaugcccuggau

SEQ ID NO: 1014128 - RNA, 19 nt, Homo sapiens
  misc_RNA (1)...(19): siRNA sense strand
cuacacugaacaagauuua

SEQ ID NO: 1014129 - RNA, 19 nt, Homo sapiens
  misc_RNA (1)...(19): siRNA sense strand
cuacaaacuaucucaagaa

SEQ ID NO: 1014130 - RNA, 19 nt, Homo sapiens
  misc_RNA (1)...(19): siRNA sense strand
aaucgucacugagaaaguu

SEQ ID NO: 1014131 - RNA, 19 nt, Homo sapiens
  misc_RNA (1)...(19): siRNA sense strand
gguaacuccucccacacaa

SEQ ID NO: 1014132 - RNA, 19 nt, Homo sapiens
  misc_RNA (1)...(19): siRNA sense strand
caaccucuacucaguucua

SEQ ID NO: 1014133 - RNA, 19 nt, Homo sapiens
  misc_RNA (1)...(19): siRNA sense strand
gugcuuccucucauucuua

SEQ ID NO: 1014134 - RNA, 19 nt, Homo sapiens
  misc_RNA (1)...(19): siRNA sense strand
cagcgucccggaaauauug

SEQ ID NO: 1014135 - RNA, 19 nt, Homo sapiens
  misc_RNA (1)...(19): siRNA sense strand
uaauauugcuacuccucuu

SEQ ID NO: 1014136 - RNA, 19 nt, Homo sapiens
  misc_RNA (1)...(19): siRNA sense strand
guacuggcauuggcgguau

SEQ ID NO: 1014137 - RNA, 19 nt, Homo sapiens
  misc_RNA (1)...(19): siRNA sense strand
aaauaacccauaccucaaa

SEQ ID NO: 1014138 - RNA, 19 nt, Homo sapiens
  misc_RNA (1)...(19): siRNA sense strand
cguauaggagucuuucuaa

SEQ ID NO: 1014139 - RNA, 19 nt, Homo sapiens
  misc_RNA (1)...(19): siRNA sense strand
guauaggagucuuucuaag

SEQ ID NO: 1014140 - RNA, 19 nt, Homo sapiens
  misc_RNA (1)...(19): siRNA sense strand
uuaguaggaccucuuguuu

SEQ ID NO: 1014141 - RNA, 19 nt, Homo sapiens
  misc_RNA (1)...(19): siRNA sense strand
caaaggacuagaucucuca

SEQ ID NO: 1014142 - RNA, 19 nt, Homo sapiens
  misc_RNA (1)...(19): siRNA sense strand
caugaggucucggcccaaa

SEQ ID NO: 1014143 - RNA, 19 nt, Homo sapiens
  misc_RNA (1)...(19): siRNA sense strand
cuaugaccaucuacacuga

SEQ ID NO: 1014144 - RNA, 19 nt, Homo sapiens
  misc_RNA (1)...(19): siRNA sense strand
uaacuccucccacacaaau

SEQ ID NO: 1014145 - RNA, 19 nt, Homo sapiens
  misc_RNA (1)...(19): siRNA sense strand
uaggaccucuuguuuccaa

SEQ ID NO: 1014146 - RNA, 19 nt, Homo sapiens
  misc_RNA (1)...(19): siRNA sense strand
cccacgaucugauguuaau

SEQ ID NO: 1014147 - RNA, 19 nt, Homo sapiens
  misc_RNA (1)...(19): siRNA sense strand
gaagagcuuuagacuugcu

SEQ ID NO: 1014148 - RNA, 19 nt, Homo sapiens
  misc_RNA (1)...(19): siRNA sense strand
uaccaagaguuucuaugga

SEQ ID NO: 1014149 - RNA, 19 nt, Homo sapiens
  misc_RNA (1)...(19): siRNA sense strand
caaugcaucagguggguaa

SEQ ID NO: 1014150 - RNA, 19 nt, Homo sapiens
  misc_RNA (1)...(19): siRNA sense strand
uagcaauacuacauacaca

SEQ ID NO: 1014151 - RNA, 19 nt, Homo sapiens
  misc_RNA (1)...(19): siRNA sense strand
caacucacccggguacaug

SEQ ID NO: 1014152 - RNA, 19 nt, Homo sapiens
  misc_RNA (1)...(19): siRNA sense strand
gcccucccuuaucauauuu

SEQ ID NO: 1014153 - RNA, 19 nt, Homo sapiens
  misc_RNA (1)...(19): siRNA sense strand
acuacaaacuaucucaaga

SEQ ID NO: 1014154 - RNA, 19 nt, Homo sapiens
  misc_RNA (1)...(19): siRNA sense strand
gccuaucguuguuugaaug

SEQ ID NO: 1014155 - RNA, 19 nt, Homo sapiens
  misc_RNA (1)...(19): siRNA sense strand
cacccaaacugguaugucu

SEQ ID NO: 1014156 - RNA, 19 nt, Homo sapiens
  misc_RNA (1)...(19): siRNA sense strand
cagaggagcuucgaaacac

SEQ ID NO: 1014157 - RNA, 19 nt, Homo sapiens
  misc_RNA (1)...(19): siRNA sense strand
gaucgaauacaacguagag

SEQ ID NO: 1014158 - RNA, 19 nt, Homo sapiens
  misc_RNA (1)...(19): siRNA sense strand
cacaaccucuacucaguuc

SEQ ID NO: 1014159 - RNA, 19 nt, Homo sapiens
  misc_RNA (1)...(19): siRNA sense strand
gcagcgucccggaaauauu

SEQ ID NO: 1014160 - RNA, 19 nt, Homo sapiens
  misc_RNA (1)...(19): siRNA sense strand
ccaaaacccuacuaacugu

SEQ ID NO: 1014161 - RNA, 19 nt, Homo sapiens
  misc_RNA (1)...(19): siRNA sense strand
ccucuacucaguucuacua

SEQ ID NO: 1014162 - RNA, 19 nt, Homo sapiens
  misc_RNA (1)...(19): siRNA sense strand
caauggaugcccuggauuc

SEQ ID NO: 1014163 - RNA, 19 nt, Homo sapiens
  misc_RNA (1)...(19): siRNA sense strand
cugccuacccucaggaaua

SEQ ID NO: 1014164 - RNA, 19 nt, Homo sapiens
  misc_RNA (1)...(19): siRNA sense strand
acaaauggagcccaagaug

SEQ ID NO: 1014165 - RNA, 19 nt, Homo sapiens
  misc_RNA (1)...(19): siRNA sense strand
gcagcaguaguccuucaaa

SEQ ID NO: 1014166 - RNA, 19 nt, Homo sapiens
  misc_RNA (1)...(19): siRNA sense strand
gcacuagguacuggcauug

SEQ ID NO: 1014167 - RNA, 19 nt, Homo sapiens
  misc_RNA (1)...(19): siRNA sense strand
gaccaucuacacugaacaa

SEQ ID NO: 1014168 - RNA, 19 nt, Homo sapiens
  misc_RNA (1)...(19): siRNA sense strand
ucacugcccacacccauau

SEQ ID NO: 1014169 - RNA, 19 nt, Homo sapiens
  misc_RNA (1)...(19): siRNA sense strand
ucacaaccucuacucaguu

SEQ ID NO: 1014170 - RNA, 19 nt, Homo sapiens
  misc_RNA (1)...(19): siRNA sense strand
ccucaccuguguaaaauuu

SEQ ID NO: 1014171 - RNA, 19 nt, Homo sapiens
  misc_RNA (1)...(19): siRNA sense strand
aauccggaaucgucacuga

SEQ ID NO: 1014172 - RNA, 19 nt, Homo sapiens
  misc_RNA (1)...(19): siRNA sense strand
ggggaagaaugcuguuauu

SEQ ID NO: 1014173 - RNA, 19 nt, Homo sapiens
  misc_RNA (1)...(19): siRNA sense strand
gcaauacuacauacacaac

SEQ ID NO: 1014174 - RNA, 19 nt, Homo sapiens
  misc_RNA (1)...(19): siRNA sense strand
caacaaaagaguacccauu

SEQ ID NO: 1014175 - RNA, 19 nt, Homo sapiens
  misc_RNA (1)...(19): siRNA sense strand
caaacugguaugucugaug

SEQ ID NO: 1014176 - RNA, 19 nt, Homo sapiens
  misc_RNA (1)...(19): siRNA sense strand
aaauggagcccaagaugca

SEQ ID NO: 1014177 - RNA, 19 nt, Homo sapiens
  misc_RNA (1)...(19): siRNA sense strand
uagcagcaguaguccuuca

SEQ ID NO: 1014178 - RNA, 19 nt, Homo sapiens
  misc_RNA (1)...(19): siRNA sense strand
uacaaacuaucucaagaac

SEQ ID NO: 1014179 - RNA, 19 nt, Homo sapiens
  misc_RNA (1)...(19): siRNA sense strand
guaacuccucccacacaaa

SEQ ID NO: 1014180 - RNA, 19 nt, Homo sapiens
  misc_RNA (1)...(19): siRNA sense strand
acaaccaacucccaaugca

SEQ ID NO: 1014181 - RNA, 19 nt, Homo sapiens
  misc_RNA (1)...(19): siRNA sense strand
cacgaucugauguuaauga

SEQ ID NO: 1014182 - RNA, 19 nt, Homo sapiens
  misc_RNA (1)...(19): siRNA sense strand
ugccuacccucaggaauau

SEQ ID NO: 1014183 - RNA, 19 nt, Homo sapiens
  misc_RNA (1)...(19): siRNA sense strand
aaucucagcugcacaaccu

SEQ ID NO: 1014184 - RNA, 19 nt, Homo sapiens
  misc_RNA (1)...(19): siRNA sense strand
cuacaaauggagcccaaga

SEQ ID NO: 1014185 - RNA, 19 nt, Homo sapiens
  misc_RNA (1)...(19): siRNA sense strand
cuuuggacccuguaucuuu

SEQ ID NO: 1014186 - RNA, 19 nt, Homo sapiens
  misc_RNA (1)...(19): siRNA sense strand
guuaaucaauccggaaucg

SEQ ID NO: 1014187 - RNA, 19 nt, Homo sapiens
  misc_RNA (1)...(19): siRNA sense strand
gcaguaguccuucaaaauc

SEQ ID NO: 1014188 - RNA, 19 nt, Homo sapiens
  misc_RNA (1)...(19): siRNA sense strand
ggcauuggcgguaucacaa

SEQ ID NO: 1014189 - RNA, 19 nt, Homo sapiens
  misc_RNA (1)...(19): siRNA sense strand
cuaugugcuuccucucauu

SEQ ID NO: 1014190 - RNA, 19 nt, Homo sapiens
  misc_RNA (1)...(19): siRNA sense strand
cuacaaaggacuagaucuc

SEQ ID NO: 1014191 - RNA, 19 nt, Homo sapiens
  misc_RNA (1)...(19): siRNA sense strand
uauaggagucuuucuaagg

SEQ ID NO: 1014192 - RNA, 19 nt, Homo sapiens
  misc_RNA (1)...(19): siRNA sense strand
ugcaugcaaauacucauua

SEQ ID NO: 1014193 - RNA, 19 nt, Homo sapiens
  misc_RNA (1)...(19): siRNA sense strand
gucacugucuguuggacuu

SEQ ID NO: 1014194 - RNA, 19 nt, Homo sapiens
  misc_RNA (1)...(19): siRNA sense strand
gaccucuuguuuccaaucu

SEQ ID NO: 1014195 - RNA, 19 nt, Homo sapiens
  misc_RNA (1)...(19): siRNA sense strand
ccuccaugccgcuguauga

SEQ ID NO: 1014196 - RNA, 19 nt, Homo sapiens
  misc_RNA (1)...(19): siRNA sense strand
gcgcggagauguaccacua

SEQ ID NO: 1014197 - RNA, 19 nt, Homo sapiens
  misc_RNA (1)...(19): siRNA sense strand
gcacagagcgcggagaugu

SEQ ID NO: 1014198 - RNA, 19 nt, Homo sapiens
  misc_RNA (1)...(19): siRNA sense strand
gaaugaggacggagacuuc

SEQ ID NO: 1014199 - RNA, 19 nt, Homo sapiens
  misc_RNA (1)...(19): siRNA sense strand
auaaagagccacccaagga

SEQ ID NO: 1014200 - RNA, 19 nt, Homo sapiens
  misc_RNA (1)...(19): siRNA sense strand
gcaccaacggcaacagaug

SEQ ID NO: 1014201 - RNA, 19 nt, Homo sapiens
  misc_RNA (1)...(19): siRNA sense strand
ugacucagaaggccgacua

SEQ ID NO: 1014202 - RNA, 19 nt, Homo sapiens
  misc_RNA (1)...(19): siRNA sense strand
gccuggagcggcauaaaga

SEQ ID NO: 1014203 - RNA, 19 nt, Homo sapiens
  misc_RNA (1)...(19): siRNA sense strand
gaccaacggcuggcacaga

SEQ ID NO: 1014204 - RNA, 19 nt, Homo sapiens
  misc_RNA (1)...(19): siRNA sense strand
acggagacuucacggugua

SEQ ID NO: 1014205 - RNA, 19 nt, Homo sapiens
  misc_RNA (1)...(19): siRNA sense strand
cagacuggaagaugagauu

SEQ ID NO: 1014206 - RNA, 19 nt, Homo sapiens
  misc_RNA (1)...(19): siRNA sense strand
gacuggaagaugagauuga

SEQ ID NO: 1014207 - RNA, 19 nt, Homo sapiens
  misc_RNA (1)...(19): siRNA sense strand
aagaugagauugacuuccu

SEQ ID NO: 1014208 - RNA, 19 nt, Homo sapiens
  misc_RNA (1)...(19): siRNA sense strand
cacagagcgcggagaugua

SEQ ID NO: 1014209 - RNA, 19 nt, Homo sapiens
  misc_RNA (1)...(19): siRNA sense strand
uggaagaugagauugacuu

SEQ ID NO: 1014210 - RNA, 19 nt, Homo sapiens
  misc_RNA (1)...(19): siRNA sense strand
cagcaccaacggcaacaga

SEQ ID NO: 1014211 - RNA, 19 nt, Homo sapiens
  misc_RNA (1)...(19): siRNA sense strand
gaacucugcggcucaaaga

SEQ ID NO: 1014212 - RNA, 19 nt, Homo sapiens
  misc_RNA (1)...(19): siRNA sense strand
ggacaccuguauuccagau

SEQ ID NO: 1014213 - RNA, 19 nt, Homo sapiens
  misc_RNA (1)...(19): siRNA sense strand
ggagaacucugcggcucaa

SEQ ID NO: 1014214 - RNA, 19 nt, Homo sapiens
  misc_RNA (1)...(19): siRNA sense strand
gauccugucugcccuaugc

SEQ ID NO: 1014215 - RNA, 19 nt, Homo sapiens
  misc_RNA (1)...(19): siRNA sense strand
uggcagugcucaugacguu

SEQ ID NO: 1014216 - RNA, 19 nt, Homo sapiens
  misc_RNA (1)...(19): siRNA sense strand
gcagggauuuucuacaugu

SEQ ID NO: 1014217 - RNA, 19 nt, Homo sapiens
  misc_RNA (1)...(19): siRNA sense strand
caacagaccacuggaugca

SEQ ID NO: 1014218 - RNA, 19 nt, Homo sapiens
  misc_RNA (1)...(19): siRNA sense strand
gagcaacccaagcauacug

SEQ ID NO: 1014219 - RNA, 19 nt, Homo sapiens
  misc_RNA (1)...(19): siRNA sense strand
gggagcaacccaagcauac

SEQ ID NO: 1014220 - RNA, 19 nt, Homo sapiens
  misc_RNA (1)...(19): siRNA sense strand
caucauggccuucgcucau

SEQ ID NO: 1014221 - RNA, 19 nt, Homo sapiens
  misc_RNA (1)...(19): siRNA sense strand
gcccaaggacaccuguauu

SEQ ID NO: 1014222 - RNA, 19 nt, Homo sapiens
  misc_RNA (1)...(19): siRNA sense strand
agugcuaccugcagacaga

SEQ ID NO: 1014223 - RNA, 19 nt, Homo sapiens
  misc_RNA (1)...(19): siRNA sense strand
caacccaagcauacuggaa

SEQ ID NO: 1014224 - RNA, 19 nt, Homo sapiens
  misc_RNA (1)...(19): siRNA sense strand
caugggugguggccuguuc

SEQ ID NO: 1014225 - RNA, 19 nt, Homo sapiens
  misc_RNA (1)...(19): siRNA sense strand
caaggacaccuguauucca

SEQ ID NO: 1014226 - RNA, 19 nt, Homo sapiens
  misc_RNA (1)...(19): siRNA sense strand
aaagggagcaacccaagca

SEQ ID NO: 1014227 - RNA, 19 nt, Homo sapiens
  misc_RNA (1)...(19): siRNA sense strand
gcagugcucaugacguucu

SEQ ID NO: 1014228 - RNA, 19 nt, Homo sapiens
  misc_RNA (1)...(19): siRNA sense strand
cccaaggacaccuguauuc

SEQ ID NO: 1014229 - RNA, 19 nt, Homo sapiens
  misc_RNA (1)...(19): siRNA sense strand
cuucucugcuggcaucaug

SEQ ID NO: 1014230 - RNA, 19 nt, Homo sapiens
  misc_RNA (1)...(19): siRNA sense strand
ggcccaaggacaccuguau

SEQ ID NO: 1014231 - RNA, 19 nt, Homo sapiens
  misc_RNA (1)...(19): siRNA sense strand
ccuaccgggugcaugaaug

SEQ ID NO: 1014232 - RNA, 19 nt, Homo sapiens
  misc_RNA (1)...(19): siRNA sense strand
gcucaucagccuaccuucu

SEQ ID NO: 1014233 - RNA, 19 nt, Homo sapiens
  misc_RNA (1)...(19): siRNA sense strand
gcacggagauuaaaauuuu

SEQ ID NO: 1014234 - RNA, 19 nt, Homo sapiens
  misc_RNA (1)...(19): siRNA sense strand
gaaugaggcucuuguacga

SEQ ID NO: 1014235 - RNA, 19 nt, Homo sapiens
  misc_RNA (1)...(19): siRNA sense strand
gaaagaagacagcagcuau

SEQ ID NO: 1014236 - RNA, 19 nt, Homo sapiens
  misc_RNA (1)...(19): siRNA sense strand
gaagaaaugcuaaugucaa

SEQ ID NO: 1014237 - RNA, 19 nt, Homo sapiens
  misc_RNA (1)...(19): siRNA sense strand
gagaaucguuuccuuccuu

SEQ ID NO: 1014238 - RNA, 19 nt, Homo sapiens
  misc_RNA (1)...(19): siRNA sense strand
gauauugcacggagauuaa

SEQ ID NO: 1014239 - RNA, 19 nt, Homo sapiens
  misc_RNA (1)...(19): siRNA sense strand
gaaguuaaugcuacagauu

SEQ ID NO: 1014240 - RNA, 19 nt, Homo sapiens
  misc_RNA (1)...(19): siRNA sense strand
caaagacaaagcagaauga

SEQ ID NO: 1014241 - RNA, 19 nt, Homo sapiens
  misc_RNA (1)...(19): siRNA sense strand
guacgaaugcuacuugaug

SEQ ID NO: 1014242 - RNA, 19 nt, Homo sapiens
  misc_RNA (1)...(19): siRNA sense strand
ggauauugcacggagauua

SEQ ID NO: 1014243 - RNA, 19 nt, Homo sapiens
  misc_RNA (1)...(19): siRNA sense strand
ccaagcagccuaucagaau

SEQ ID NO: 1014244 - RNA, 19 nt, Homo sapiens
  misc_RNA (1)...(19): siRNA sense strand
gcuaaggaaagcauuguaa

SEQ ID NO: 1014245 - RNA, 19 nt, Homo sapiens
  misc_RNA (1)...(19): siRNA sense strand
cagcagcuaugccaacguu

SEQ ID NO: 1014246 - RNA, 19 nt, Homo sapiens
  misc_RNA (1)...(19): siRNA sense strand
gaauuaaugcuaaggaaag

SEQ ID NO: 1014247 - RNA, 19 nt, Homo sapiens
  misc_RNA (1)...(19): siRNA sense strand
gcagaaugaggcucuugua

SEQ ID NO: 1014248 - RNA, 19 nt, Homo sapiens
  misc_RNA (1)...(19): siRNA sense strand
uaucaaagacaaagcagaa

SEQ ID NO: 1014249 - RNA, 19 nt, Homo sapiens
  misc_RNA (1)...(19): siRNA sense strand
caagcagccuaucagaaug

SEQ ID NO: 1014250 - RNA, 19 nt, Homo sapiens
  misc_RNA (1)...(19): siRNA sense strand
aagaagaaaugcuaauguc

SEQ ID NO: 1014251 - RNA, 19 nt, Homo sapiens
  misc_RNA (1)...(19): siRNA sense strand
cagaaugacuuuggacaag

SEQ ID NO: 1014252 - RNA, 19 nt, Homo sapiens
  misc_RNA (1)...(19): siRNA sense strand
cuuaaugccuguucugcuu

SEQ ID NO: 1014253 - RNA, 19 nt, Homo sapiens
  misc_RNA (1)...(19): siRNA sense strand
gguauuuccucaugguauc

SEQ ID NO: 1014254 - RNA, 19 nt, Homo sapiens
  misc_RNA (1)...(19): siRNA sense strand
gggcaugugagaaucguuu

SEQ ID NO: 1014255 - RNA, 19 nt, Homo sapiens
  misc_RNA (1)...(19): siRNA sense strand
cgaaguuaaugcuacagau

SEQ ID NO: 1014256 - RNA, 19 nt, Homo sapiens
  misc_RNA (1)...(19): siRNA sense strand
ggcggugggugaaagaaga

SEQ ID NO: 1014257 - RNA, 19 nt, Homo sapiens
  misc_RNA (1)...(19): siRNA sense strand
ccagauugaauuaaugcua

SEQ ID NO: 1014258 - RNA, 19 nt, Homo sapiens
  misc_RNA (1)...(19): siRNA sense strand
agaaucguuuccuuccuuu

SEQ ID NO: 1014259 - RNA, 19 nt, Homo sapiens
  misc_RNA (1)...(19): siRNA sense strand
uuauggcuguaccgcauua

SEQ ID NO: 1014260 - RNA, 19 nt, Homo sapiens
  misc_RNA (1)...(19): siRNA sense strand
ucaaagacaaagcagaaug

SEQ ID NO: 1014261 - RNA, 19 nt, Homo sapiens
  misc_RNA (1)...(19): siRNA sense strand
caacguucaagauggcuuu

SEQ ID NO: 1014262 - RNA, 19 nt, Homo sapiens
  misc_RNA (1)...(19): siRNA sense strand
gcagcuaugccaacguuca

SEQ ID NO: 1014263 - RNA, 19 nt, Homo sapiens
  misc_RNA (1)...(19): siRNA sense strand
ugaaagaagacagcagcua

SEQ ID NO: 1014264 - RNA, 19 nt, Homo sapiens
  misc_RNA (1)...(19): siRNA sense strand
aagaaaugcuaaugucaac

SEQ ID NO: 1014265 - RNA, 19 nt, Homo sapiens
  misc_RNA (1)...(19): siRNA sense strand
uaaugccuguucugcuuau

SEQ ID NO: 1014266 - RNA, 19 nt, Homo sapiens
  misc_RNA (1)...(19): siRNA sense strand
agaaccugcuugcaucaug

SEQ ID NO: 1014267 - RNA, 19 nt, Homo sapiens
  misc_RNA (1)...(19): siRNA sense strand
gaaaugcuaaugucaaccu

SEQ ID NO: 1014268 - RNA, 19 nt, Homo sapiens
  misc_RNA (1)...(19): siRNA sense strand
aaagaagacagcagcuaug

SEQ ID NO: 1014269 - RNA, 19 nt, Homo sapiens
  misc_RNA (1)...(19): siRNA sense strand
gccaagcagccuaucagaa

SEQ ID NO: 1014270 - RNA, 19 nt, Homo sapiens
  misc_RNA (1)...(19): siRNA sense strand
cguucaagauggcuuuaau

SEQ ID NO: 1014271 - RNA, 19 nt, Homo sapiens
  misc_RNA (1)...(19): siRNA sense strand
agaaagagagaaccugcuu

SEQ ID NO: 1014272 - RNA, 19 nt, Homo sapiens
  misc_RNA (1)...(19): siRNA sense strand
agagagaaccugcuugcau

SEQ ID NO: 1014273 - RNA, 19 nt, Homo sapiens
  misc_RNA (1)...(19): siRNA sense strand
gugcagaccccacaauaaa

SEQ ID NO: 1014274 - RNA, 19 nt, Homo sapiens
  misc_RNA (1)...(19): siRNA sense strand
ucaagauggcuuuaaugga

SEQ ID NO: 1014275 - RNA, 19 nt, Homo sapiens
  misc_RNA (1)...(19): siRNA sense strand
ucagaaugacuuuggacaa

SEQ ID NO: 1014276 - RNA, 19 nt, Homo sapiens
  misc_RNA (1)...(19): siRNA sense strand
uauuggguauuuccucaug

SEQ ID NO: 1014277 - RNA, 19 nt, Homo sapiens
  misc_RNA (1)...(19): siRNA sense strand
gcgagggcaugugagaauc

SEQ ID NO: 1014278 - RNA, 19 nt, Homo sapiens
  misc_RNA (1)...(19): siRNA sense strand
uuaugccugugaaaugaaa

SEQ ID NO: 1014279 - RNA, 19 nt, Homo sapiens
  misc_RNA (1)...(19): siRNA sense strand
gaugcuggugucgaaguua

SEQ ID NO: 1014280 - RNA, 19 nt, Homo sapiens
  misc_RNA (1)...(19): siRNA sense strand
guucaagauggcuuuaaug

SEQ ID NO: 1014281 - RNA, 19 nt, Homo sapiens
  misc_RNA (1)...(19): siRNA sense strand
uuaaugccuguucugcuua

SEQ ID NO: 1014282 - RNA, 19 nt, Homo sapiens
  misc_RNA (1)...(19): siRNA sense strand
gcuaugccaacguucaaga

SEQ ID NO: 1014283 - RNA, 19 nt, Homo sapiens
  misc_RNA (1)...(19): siRNA sense strand
ggcgagggcaugugagaau

SEQ ID NO: 1014284 - RNA, 19 nt, Homo sapiens
  misc_RNA (1)...(19): siRNA sense strand
cagccuaucagaaugacuu

SEQ ID NO: 1014285 - RNA, 19 nt, Homo sapiens
  misc_RNA (1)...(19): siRNA sense strand
ccacaauaaagaauaagca

SEQ ID NO: 1014286 - RNA, 19 nt, Homo sapiens
  misc_RNA (1)...(19): siRNA sense strand
ucuuaucccucugcucuug

SEQ ID NO: 1014287 - RNA, 19 nt, Homo sapiens
  misc_RNA (1)...(19): siRNA sense strand
agaagaaaugcuaauguca

SEQ ID NO: 1014288 - RNA, 19 nt, Homo sapiens
  misc_RNA (1)...(19): siRNA sense strand
ugaugcuggugucgaaguu

SEQ ID NO: 1014289 - RNA, 19 nt, Homo sapiens
  misc_RNA (1)...(19): siRNA sense strand
augcuggugucgaaguuaa

SEQ ID NO: 1014290 - RNA, 19 nt, Homo sapiens
  misc_RNA (1)...(19): siRNA sense strand
ggguauuuccucaugguau

SEQ ID NO: 1014291 - RNA, 19 nt, Homo sapiens
  misc_RNA (1)...(19): siRNA sense strand
ugucgaaguuaaugcuaca

SEQ ID NO: 1014292 - RNA, 19 nt, Homo sapiens
  misc_RNA (1)...(19): siRNA sense strand
aaguuaaugcuacagauug

SEQ ID NO: 1014293 - RNA, 19 nt, Homo sapiens
  misc_RNA (1)...(19): siRNA sense strand
aagcagccuaucagaauga

SEQ ID NO: 1014294 - RNA, 19 nt, Homo sapiens
  misc_RNA (1)...(19): siRNA sense strand
gcagaccccacaauaaaga

SEQ ID NO: 1014295 - RNA, 19 nt, Homo sapiens
  misc_RNA (1)...(19): siRNA sense strand
ggagagguguguuguaaga

SEQ ID NO: 1014296 - RNA, 19 nt, Homo sapiens
  misc_RNA (1)...(19): siRNA sense strand
gaggaaaccuggacagaca

SEQ ID NO: 1014297 - RNA, 19 nt, Homo sapiens
  misc_RNA (1)...(19): siRNA sense strand
ggagaggccucaggagaaa

SEQ ID NO: 1014298 - RNA, 19 nt, Homo sapiens
  misc_RNA (1)...(19): siRNA sense strand
gaacacagcccgaccucau

SEQ ID NO: 1014299 - RNA, 19 nt, Homo sapiens
  misc_RNA (1)...(19): siRNA sense strand
aaggagagguguguuguaa

SEQ ID NO: 1014300 - RNA, 19 nt, Homo sapiens
  misc_RNA (1)...(19): siRNA sense strand
gaaggagagguguguugua

SEQ ID NO: 1014301 - RNA, 19 nt, Homo sapiens
  misc_RNA (1)...(19): siRNA sense strand
gaagaaaccgagugaggau

SEQ ID NO: 1014302 - RNA, 19 nt, Homo sapiens
  misc_RNA (1)...(19): siRNA sense strand
gagguguguuguaagaaga

SEQ ID NO: 1014303 - RNA, 19 nt, Homo sapiens
  misc_RNA (1)...(19): siRNA sense strand
ggacagacaggaagaaacc

SEQ ID NO: 1014304 - RNA, 19 nt, Homo sapiens
  misc_RNA (1)...(19): siRNA sense strand
agaaaccgagugaggauga

SEQ ID NO: 1014305 - RNA, 19 nt, Homo sapiens
  misc_RNA (1)...(19): siRNA sense strand
agagguguguuguaagaag

SEQ ID NO: 1014306 - RNA, 19 nt, Homo sapiens
  misc_RNA (1)...(19): siRNA sense strand
uggaagacacggauucugu

SEQ ID NO: 1014307 - RNA, 19 nt, Homo sapiens
  misc_RNA (1)...(19): siRNA sense strand
gugaaggagagguguguug

SEQ ID NO: 1014308 - RNA, 19 nt, Homo sapiens
  misc_RNA (1)...(19): siRNA sense strand
acaggaagaaaccgaguga

SEQ ID NO: 1014309 - RNA, 19 nt, Homo sapiens
  misc_RNA (1)...(19): siRNA sense strand
caccugcucccaugcaaau

SEQ ID NO: 1014310 - RNA, 19 nt, Homo sapiens
  misc_RNA (1)...(19): siRNA sense strand
aggagaggccucaggagaa

SEQ ID NO: 1014311 - RNA, 19 nt, Homo sapiens
  misc_RNA (1)...(19): siRNA sense strand
ggacagggaagucuuauuu

SEQ ID NO: 1014312 - RNA, 19 nt, Homo sapiens
  misc_RNA (1)...(19): siRNA sense strand
ccuuauauauucccuguua

SEQ ID NO: 1014313 - RNA, 19 nt, Homo sapiens
  misc_RNA (1)...(19): siRNA sense strand
gaacugaggagacucuuug

SEQ ID NO: 1014314 - RNA, 19 nt, Homo sapiens
  misc_RNA (1)...(19): siRNA sense strand
acacagaacugacaccaau

SEQ ID NO: 1014315 - RNA, 19 nt, Homo sapiens
  misc_RNA (1)...(19): siRNA sense strand
gugcugacgugcaucguuu

SEQ ID NO: 1014316 - RNA, 19 nt, Homo sapiens
  misc_RNA (1)...(19): siRNA sense strand
cuguuaagcuucaucagua

SEQ ID NO: 1014317 - RNA, 19 nt, Homo sapiens
  misc_RNA (1)...(19): siRNA sense strand
ggaacgccuucuccaucua

SEQ ID NO: 1014318 - RNA, 19 nt, Homo sapiens
  misc_RNA (1)...(19): siRNA sense strand
uauauucccuguuaagcuu

SEQ ID NO: 1014319 - RNA, 19 nt, Homo sapiens
  misc_RNA (1)...(19): siRNA sense strand
caucagauuucaucacagu

SEQ ID NO: 1014320 - RNA, 19 nt, Homo sapiens
  misc_RNA (1)...(19): siRNA sense strand
caacggaacugaggagacu

SEQ ID NO: 1014321 - RNA, 19 nt, Homo sapiens
  misc_RNA (1)...(19): siRNA sense strand
gaugauguuuuccuacuuu

SEQ ID NO: 1014322 - RNA, 19 nt, Homo sapiens
  misc_RNA (1)...(19): siRNA sense strand
ugucaaacaucagauuuca

SEQ ID NO: 1014323 - RNA, 19 nt, Homo sapiens
  misc_RNA (1)...(19): siRNA sense strand
ucaaacaucagauuucauc

SEQ ID NO: 1014324 - RNA, 19 nt, Homo sapiens
  misc_RNA (1)...(19): siRNA sense strand
ccaucuacauccucaacuu

SEQ ID NO: 1014325 - RNA, 19 nt, Homo sapiens
  misc_RNA (1)...(19): siRNA sense strand
ugucagcgguggugugugu

SEQ ID NO: 1014326 - RNA, 19 nt, Homo sapiens
  misc_RNA (1)...(19): siRNA sense strand
ggacgcgucugagguggau

SEQ ID NO: 1014327 - RNA, 19 nt, Homo sapiens
  misc_RNA (1)...(19): siRNA sense strand
ggaacugaggagacucuuu

SEQ ID NO: 1014328 - RNA, 19 nt, Homo sapiens
  misc_RNA (1)...(19): siRNA sense strand
uuauguggcuuccuguuca

SEQ ID NO: 1014329 - RNA, 19 nt, Homo sapiens
  misc_RNA (1)...(19): siRNA sense strand
acagucgcguggcugauuu

SEQ ID NO: 1014330 - RNA, 19 nt, Homo sapiens
  misc_RNA (1)...(19): siRNA sense strand
ggugucaaacaucagauuu

SEQ ID NO: 1014331 - RNA, 19 nt, Homo sapiens
  misc_RNA (1)...(19): siRNA sense strand
gauucugcuuggugucaaa

SEQ ID NO: 1014332 - RNA, 19 nt, Homo sapiens
  misc_RNA (1)...(19): siRNA sense strand
gugcaucguuucccuuguc

SEQ ID NO: 1014333 - RNA, 19 nt, Homo sapiens
  misc_RNA (1)...(19): siRNA sense strand
aacaucagauuucaucaca

SEQ ID NO: 1014334 - RNA, 19 nt, Homo sapiens
  misc_RNA (1)...(19): siRNA sense strand
gacaggaaacgcaguugug

SEQ ID NO: 1014335 - RNA, 19 nt, Homo sapiens
  misc_RNA (1)...(19): siRNA sense strand
cugaggagacucuuugcua

SEQ ID NO: 1014336 - RNA, 19 nt, Homo sapiens
  misc_RNA (1)...(19): siRNA sense strand
gaccauccugcucacagua

SEQ ID NO: 1014337 - RNA, 19 nt, Homo sapiens
  misc_RNA (1)...(19): siRNA sense strand
ucucaaccuuggacacaga

SEQ ID NO: 1014338 - RNA, 19 nt, Homo sapiens
  misc_RNA (1)...(19): siRNA sense strand
gcaggaacgccuucuccau

SEQ ID NO: 1014339 - RNA, 19 nt, Homo sapiens
  misc_RNA (1)...(19): siRNA sense strand
ggagacucuuugcuacaag

SEQ ID NO: 1014340 - RNA, 19 nt, Homo sapiens
  misc_RNA (1)...(19): siRNA sense strand
gaacgccuucuccaucuac

SEQ ID NO: 1014341 - RNA, 19 nt, Homo sapiens
  misc_RNA (1)...(19): siRNA sense strand
gaagucuuauuuugucaug

SEQ ID NO: 1014342 - RNA, 19 nt, Homo sapiens
  misc_RNA (1)...(19): siRNA sense strand
caucuacauccucaacuug

SEQ ID NO: 1014343 - RNA, 19 nt, Homo sapiens
  misc_RNA (1)...(19): siRNA sense strand
gaggagacucuuugcuaca

SEQ ID NO: 1014344 - RNA, 19 nt, Homo sapiens
  misc_RNA (1)...(19): siRNA sense strand
gcaggccugagcuuucuga

SEQ ID NO: 1014345 - RNA, 19 nt, Homo sapiens
  misc_RNA (1)...(19): siRNA sense strand
gugccaaccccaucauuua

SEQ ID NO: 1014346 - RNA, 19 nt, Homo sapiens
  misc_RNA (1)...(19): siRNA sense strand
acagggaagucuuauuuug

SEQ ID NO: 1014347 - RNA, 19 nt, Homo sapiens
  misc_RNA (1)...(19): siRNA sense strand
aaaauccucuauccuguga

SEQ ID NO: 1014348 - RNA, 19 nt, Homo sapiens
  misc_RNA (1)...(19): siRNA sense strand
ucuauccugugaugauguu

SEQ ID NO: 1014349 - RNA, 19 nt, Homo sapiens
  misc_RNA (1)...(19): siRNA sense strand
aauccucuauccugugaug

SEQ ID NO: 1014350 - RNA, 19 nt, Homo sapiens
  misc_RNA (1)...(19): siRNA sense strand
ugaccauccugcucacagu

SEQ ID NO: 1014351 - RNA, 19 nt, Homo sapiens
  misc_RNA (1)...(19): siRNA sense strand
aggagacucuuugcuacaa

SEQ ID NO: 1014352 - RNA, 19 nt, Homo sapiens
  misc_RNA (1)...(19): siRNA sense strand
uguuaagcuucaucaguau

SEQ ID NO: 1014353 - RNA, 19 nt, Homo sapiens
  misc_RNA (1)...(19): siRNA sense strand
cguggacagggaagucuua

SEQ ID NO: 1014354 - RNA, 19 nt, Homo sapiens
  misc_RNA (1)...(19): siRNA sense strand
gcccuuuggcauucaguuu

SEQ ID NO: 1014355 - RNA, 19 nt, Homo sapiens
  misc_RNA (1)...(19): siRNA sense strand
ccucuauccugugaugaug

SEQ ID NO: 1014356 - RNA, 19 nt, Homo sapiens
  misc_RNA (1)...(19): siRNA sense strand
acagaacugacaccaauca

SEQ ID NO: 1014357 - RNA, 19 nt, Homo sapiens
  misc_RNA (1)...(19): siRNA sense strand
ugucauguucaucuaguuu

SEQ ID NO: 1014358 - RNA, 19 nt, Homo sapiens
  misc_RNA (1)...(19): siRNA sense strand
ucacaguacuggucuuccu

SEQ ID NO: 1014359 - RNA, 19 nt, Homo sapiens
  misc_RNA (1)...(19): siRNA sense strand
gcugacaggaaacgcaguu

SEQ ID NO: 1014360 - RNA, 19 nt, Homo sapiens
  misc_RNA (1)...(19): siRNA sense strand
guuauguggcuuccuguuc

SEQ ID NO: 1014361 - RNA, 19 nt, Homo sapiens
  misc_RNA (1)...(19): siRNA sense strand
cccaggagcugaucuguua

SEQ ID NO: 1014362 - RNA, 19 nt, Homo sapiens
  misc_RNA (1)...(19): siRNA sense strand
gagcugaucuguuacaagu

SEQ ID NO: 1014363 - RNA, 19 nt, Homo sapiens
  misc_RNA (1)...(19): siRNA sense strand
ccaagaagcuggugaacuc

SEQ ID NO: 1014364 - RNA, 19 nt, Homo sapiens
  misc_RNA (1)...(19): siRNA sense strand
ggaugagccucuccugaaa

SEQ ID NO: 1014365 - RNA, 19 nt, Homo sapiens
  misc_RNA (1)...(19): siRNA sense strand
ggacuaugcuggauucucu

SEQ ID NO: 1014366 - RNA, 19 nt, Homo sapiens
  misc_RNA (1)...(19): siRNA sense strand
ggaagagccaguuauauca

SEQ ID NO: 1014367 - RNA, 19 nt, Homo sapiens
  misc_RNA (1)...(19): siRNA sense strand
uggaagccaugcagaagua

SEQ ID NO: 1014368 - RNA, 19 nt, Homo sapiens
  misc_RNA (1)...(19): siRNA sense strand
caaccuggguggccuguca

SEQ ID NO: 1014369 - RNA, 19 nt, Homo sapiens
  misc_RNA (1)...(19): siRNA sense strand
ggacaggacuaugcuggau

SEQ ID NO: 1014370 - RNA, 19 nt, Homo sapiens
  misc_RNA (1)...(19): siRNA sense strand
cagcgucccugguuccaaa

SEQ ID NO: 1014371 - RNA, 19 nt, Homo sapiens
  misc_RNA (1)...(19): siRNA sense strand
ggacgcuccuuaucgugaa

SEQ ID NO: 1014372 - RNA, 19 nt, Homo sapiens
  misc_RNA (1)...(19): siRNA sense strand
gaccaaagcagucaagagu

SEQ ID NO: 1014373 - RNA, 19 nt, Homo sapiens
  misc_RNA (1)...(19): siRNA sense strand
gagccucuccugaaacuga

SEQ ID NO: 1014374 - RNA, 19 nt, Homo sapiens
  misc_RNA (1)...(19): siRNA sense strand
ccgaugagauugugaaacu

SEQ ID NO: 1014375 - RNA, 19 nt, Homo sapiens
  misc_RNA (1)...(19): siRNA sense strand
cagcugcucuccaaguugu

SEQ ID NO: 1014376 - RNA, 19 nt, Homo sapiens
  misc_RNA (1)...(19): siRNA sense strand
ggcaaccgccgaugagauu

SEQ ID NO: 1014377 - RNA, 19 nt, Homo sapiens
  misc_RNA (1)...(19): siRNA sense strand
gccggaagagccaguuaua

SEQ ID NO: 1014378 - RNA, 19 nt, Homo sapiens
  misc_RNA (1)...(19): siRNA sense strand
uggaggagaucgcaaagca

SEQ ID NO: 1014379 - RNA, 19 nt, Homo sapiens
  misc_RNA (1)...(19): siRNA sense strand
cggaagagccaguuauauc

SEQ ID NO: 1014380 - RNA, 19 nt, Homo sapiens
  misc_RNA (1)...(19): siRNA sense strand
gaagagcccaggagcugau

SEQ ID NO: 1014381 - RNA, 19 nt, Homo sapiens
  misc_RNA (1)...(19): siRNA sense strand
gccgaggccaccaagaaua

SEQ ID NO: 1014382 - RNA, 19 nt, Homo sapiens
  misc_RNA (1)...(19): siRNA sense strand
ugcccaugcugguuucaua

SEQ ID NO: 1014383 - RNA, 19 nt, Homo sapiens
  misc_RNA (1)...(19): siRNA sense strand
acaggacuaugcuggauuc

SEQ ID NO: 1014384 - RNA, 19 nt, Homo sapiens
  misc_RNA (1)...(19): siRNA sense strand
cagccgaggccaccaagaa

SEQ ID NO: 1014385 - RNA, 19 nt, Homo sapiens
  misc_RNA (1)...(19): siRNA sense strand
uggaugagccucuccugaa

SEQ ID NO: 1014386 - RNA, 19 nt, Homo sapiens
  misc_RNA (1)...(19): siRNA sense strand
gcuccucaguugugaugau

SEQ ID NO: 1014387 - RNA, 19 nt, Homo sapiens
  misc_RNA (1)...(19): siRNA sense strand
gagccggaagagccaguua

SEQ ID NO: 1014388 - RNA, 19 nt, Homo sapiens
  misc_RNA (1)...(19): siRNA sense strand
gaaacugauagaugcugaa

SEQ ID NO: 1014389 - RNA, 19 nt, Homo sapiens
  misc_RNA (1)...(19): siRNA sense strand
uuacaaguccugaccaaag

SEQ ID NO: 1014390 - RNA, 19 nt, Homo sapiens
  misc_RNA (1)...(19): siRNA sense strand
gaagagccaguuauaucag

SEQ ID NO: 1014391 - RNA, 19 nt, Homo sapiens
  misc_RNA (1)...(19): siRNA sense strand
aaacugauagaugcugaaa

SEQ ID NO: 1014392 - RNA, 19 nt, Homo sapiens
  misc_RNA (1)...(19): siRNA sense strand
cccagcugcucuccaaguu

SEQ ID NO: 1014393 - RNA, 19 nt, Homo sapiens
  misc_RNA (1)...(19): siRNA sense strand
ccaccaacgcgucccaugu

SEQ ID NO: 1014394 - RNA, 19 nt, Homo sapiens
  misc_RNA (1)...(19): siRNA sense strand
ccgaggccaccaagaauau

SEQ ID NO: 1014395 - RNA, 19 nt, Homo sapiens
  misc_RNA (1)...(19): siRNA sense strand
gaagccaugcagaaguaug

SEQ ID NO: 1014396 - RNA, 19 nt, Homo sapiens
  misc_RNA (1)...(19): siRNA sense strand
ggacgacagcgccuucacu

SEQ ID NO: 1014397 - RNA, 19 nt, Homo sapiens
  misc_RNA (1)...(19): siRNA sense strand
gacaggacuaugcuggauu

SEQ ID NO: 1014398 - RNA, 19 nt, Homo sapiens
  misc_RNA (1)...(19): siRNA sense strand
cugcccagcugcucuccaa

SEQ ID NO: 1014399 - RNA, 19 nt, Homo sapiens
  misc_RNA (1)...(19): siRNA sense strand
ggaagcuggagccggaaga

SEQ ID NO: 1014400 - RNA, 19 nt, Homo sapiens
  misc_RNA (1)...(19): siRNA sense strand
ucgcaaagcaggugaacgu

SEQ ID NO: 1014401 - RNA, 19 nt, Homo sapiens
  misc_RNA (1)...(19): siRNA sense strand
guggcuggcugugcugaug

SEQ ID NO: 1014402 - RNA, 19 nt, Homo sapiens
  misc_RNA (1)...(19): siRNA sense strand
acugauagaugcugaaacc

SEQ ID NO: 1014403 - RNA, 19 nt, Homo sapiens
  misc_RNA (1)...(19): siRNA sense strand
caccaacgcgucccaugug

SEQ ID NO: 1014404 - RNA, 19 nt, Homo sapiens
  misc_RNA (1)...(19): siRNA sense strand
guaaguaccucuaugauga

SEQ ID NO: 1014405 - RNA, 19 nt, Homo sapiens
  misc_RNA (1)...(19): siRNA sense strand
gaaggaggcucuacuaugg

SEQ ID NO: 1014406 - RNA, 19 nt, Homo sapiens
  misc_RNA (1)...(19): siRNA sense strand
aaagcugucuugccuguua

SEQ ID NO: 1014407 - RNA, 19 nt, Homo sapiens
  misc_RNA (1)...(19): siRNA sense strand
cuucauaacugccaccuuu

SEQ ID NO: 1014408 - RNA, 19 nt, Homo sapiens
  misc_RNA (1)...(19): siRNA sense strand
ccucagcaauguucccuuu

SEQ ID NO: 1014409 - RNA, 19 nt, Homo sapiens
  misc_RNA (1)...(19): siRNA sense strand
ccuguuagcuguggcauau

SEQ ID NO: 1014410 - RNA, 19 nt, Homo sapiens
  misc_RNA (1)...(19): siRNA sense strand
cguaauacaucagucuuug

SEQ ID NO: 1014411 - RNA, 19 nt, Homo sapiens
  misc_RNA (1)...(19): siRNA sense strand
ccaguaaguaccucuauga

SEQ ID NO: 1014412 - RNA, 19 nt, Homo sapiens
  misc_RNA (1)...(19): siRNA sense strand
cgaaggaggcucuacuaug

SEQ ID NO: 1014413 - RNA, 19 nt, Homo sapiens
  misc_RNA (1)...(19): siRNA sense strand
uggcucgccucaagucuuu

SEQ ID NO: 1014414 - RNA, 19 nt, Homo sapiens
  misc_RNA (1)...(19): siRNA sense strand
ccacucuucuucauaacug

SEQ ID NO: 1014415 - RNA, 19 nt, Homo sapiens
  misc_RNA (1)...(19): siRNA sense strand
ggacugggaagccgacugu

SEQ ID NO: 1014416 - RNA, 19 nt, Homo sapiens
  misc_RNA (1)...(19): siRNA sense strand
gcaccgaaacccagacuac

SEQ ID NO: 1014417 - RNA, 19 nt, Homo sapiens
  misc_RNA (1)...(19): siRNA sense strand
gccaguaaguaccucuaug

SEQ ID NO: 1014418 - RNA, 19 nt, Homo sapiens
  misc_RNA (1)...(19): siRNA sense strand
aggaggaggucuucaacga

SEQ ID NO: 1014419 - RNA, 19 nt, Homo sapiens
  misc_RNA (1)...(19): siRNA sense strand
cgccucaagucuuucguuu

SEQ ID NO: 1014420 - RNA, 19 nt, Homo sapiens
  misc_RNA (1)...(19): siRNA sense strand
cucccacucuucuucauaa

SEQ ID NO: 1014421 - RNA, 19 nt, Homo sapiens
  misc_RNA (1)...(19): siRNA sense strand
cagacuacuugcagcaugu

SEQ ID NO: 1014422 - RNA, 19 nt, Homo sapiens
  misc_RNA (1)...(19): siRNA sense strand
gcugguacaccuacacaga

SEQ ID NO: 1014423 - RNA, 19 nt, Homo sapiens
  misc_RNA (1)...(19): siRNA sense strand
ggauuggcaucucuacacu

SEQ ID NO: 1014424 - RNA, 19 nt, Homo sapiens
  misc_RNA (1)...(19): siRNA sense strand
gaugcuggcucugguguac

SEQ ID NO: 1014425 - RNA, 19 nt, Homo sapiens
  misc_RNA (1)...(19): siRNA sense strand
ccgaaacccagacuacuug

SEQ ID NO: 1014426 - RNA, 19 nt, Homo sapiens
  misc_RNA (1)...(19): siRNA sense strand
uggcauaugugagcagugu

SEQ ID NO: 1014427 - RNA, 19 nt, Homo sapiens
  misc_RNA (1)...(19): siRNA sense strand
gaugguggccaguaaguac

SEQ ID NO: 1014428 - RNA, 19 nt, Homo sapiens
  misc_RNA (1)...(19): siRNA sense strand
uggcaucgguggccguaau

SEQ ID NO: 1014429 - RNA, 19 nt, Homo sapiens
  misc_RNA (1)...(19): siRNA sense strand
uaaguaccucuaugaugaa

SEQ ID NO: 1014430 - RNA, 19 nt, Homo sapiens
  misc_RNA (1)...(19): siRNA sense strand
ccucaagucuuucguuuuc

SEQ ID NO: 1014431 - RNA, 19 nt, Homo sapiens
  misc_RNA (1)...(19): siRNA sense strand
ggucuucaacgacgaaugg

SEQ ID NO: 1014432 - RNA, 19 nt, Homo sapiens
  misc_RNA (1)...(19): siRNA sense strand
auuggcaucucuacacuga

SEQ ID NO: 1014433 - RNA, 19 nt, Homo sapiens
  misc_RNA (1)...(19): siRNA sense strand
gccgacuccagaagaaaua

SEQ ID NO: 1014434 - RNA, 19 nt, Homo sapiens
  misc_RNA (1)...(19): siRNA sense strand
gcagucuucuggccucacu

SEQ ID NO: 1014435 - RNA, 19 nt, Homo sapiens
  misc_RNA (1)...(19): siRNA sense strand
uguuagcuguggcauaugu

SEQ ID NO: 1014436 - RNA, 19 nt, Homo sapiens
  misc_RNA (1)...(19): siRNA sense strand
gcucugguguacauugaac

SEQ ID NO: 1014437 - RNA, 19 nt, Homo sapiens
  misc_RNA (1)...(19): siRNA sense strand
uggcucugguguacauuga

SEQ ID NO: 1014438 - RNA, 19 nt, Homo sapiens
  misc_RNA (1)...(19): siRNA sense strand
cuggagcccugcauaccuu

SEQ ID NO: 1014439 - RNA, 19 nt, Homo sapiens
  misc_RNA (1)...(19): siRNA sense strand
ggaggucuucaacgacgaa

SEQ ID NO: 1014440 - RNA, 19 nt, Homo sapiens
  misc_RNA (1)...(19): siRNA sense strand
ggcaucgguggccguaaua

SEQ ID NO: 1014441 - RNA, 19 nt, Homo sapiens
  misc_RNA (1)...(19): siRNA sense strand
ccucugacuuguuccugau

SEQ ID NO: 1014442 - RNA, 19 nt, Homo sapiens
  misc_RNA (1)...(19): siRNA sense strand
ggaggaggaggucuucaac

SEQ ID NO: 1014443 - RNA, 19 nt, Homo sapiens
  misc_RNA (1)...(19): siRNA sense strand
ggaggaggaggaggucuuc

SEQ ID NO: 1014444 - RNA, 19 nt, Homo sapiens
  misc_RNA (1)...(19): siRNA sense strand
gggaggaggaggaggucuu

SEQ ID NO: 1014445 - RNA, 19 nt, Homo sapiens
  misc_RNA (1)...(19): siRNA sense strand
gaaucacgcuggugcucuu

SEQ ID NO: 1014446 - RNA, 19 nt, Homo sapiens
  misc_RNA (1)...(19): siRNA sense strand
gcgcaaccacccacucuuu

SEQ ID NO: 1014447 - RNA, 19 nt, Homo sapiens
  misc_RNA (1)...(19): siRNA sense strand
caaccuggcccacuucuuc

SEQ ID NO: 1014448 - RNA, 19 nt, Homo sapiens
  misc_RNA (1)...(19): siRNA sense strand
ggucaggccuccgguucuu

SEQ ID NO: 1014449 - RNA, 19 nt, Homo sapiens
  misc_RNA (1)...(19): siRNA sense strand
gggaauucaucuccucaca

SEQ ID NO: 1014450 - RNA, 19 nt, Homo sapiens
  misc_RNA (1)...(19): siRNA sense strand
gcaaccacccacucuuugu

SEQ ID NO: 1014451 - RNA, 19 nt, Homo sapiens
  misc_RNA (1)...(19): siRNA sense strand
gggcugaggaggaggaaga

SEQ ID NO: 1014452 - RNA, 19 nt, Homo sapiens
  misc_RNA (1)...(19): siRNA sense strand
auaccgagcugcggcaaug

SEQ ID NO: 1014453 - RNA, 19 nt, Homo sapiens
  misc_RNA (1)...(19): siRNA sense strand
gacccuggcuacgugaaug

SEQ ID NO: 1014454 - RNA, 19 nt, Homo sapiens
  misc_RNA (1)...(19): siRNA sense strand
ggagcagacagccaugguu

SEQ ID NO: 1014455 - RNA, 19 nt, Homo sapiens
  misc_RNA (1)...(19): siRNA sense strand
caaccacccacucuuugug

SEQ ID NO: 1014456 - RNA, 19 nt, Homo sapiens
  misc_RNA (1)...(19): siRNA sense strand
gagcgcaaccacccacucu

SEQ ID NO: 1014457 - RNA, 19 nt, Homo sapiens
  misc_RNA (1)...(19): siRNA sense strand
cuucggcgcugcagauacu

SEQ ID NO: 1014458 - RNA, 19 nt, Homo sapiens
  misc_RNA (1)...(19): siRNA sense strand
caacgggaccuuagagauu

SEQ ID NO: 1014459 - RNA, 19 nt, Homo sapiens
  misc_RNA (1)...(19): siRNA sense strand
ggaagagagugugguguga

SEQ ID NO: 1014460 - RNA, 19 nt, Homo sapiens
  misc_RNA (1)...(19): siRNA sense strand
ggccacagcccgaguagaa

SEQ ID NO: 1014461 - RNA, 19 nt, Homo sapiens
  misc_RNA (1)...(19): siRNA sense strand
gcugguggcugccuuacug

SEQ ID NO: 1014462 - RNA, 19 nt, Homo sapiens
  misc_RNA (1)...(19): siRNA sense strand
gcggcuggcugacaacuuc

SEQ ID NO: 1014463 - RNA, 19 nt, Homo sapiens
  misc_RNA (1)...(19): siRNA sense strand
caaccuggaccauaaccuu

SEQ ID NO: 1014464 - RNA, 19 nt, Homo sapiens
  misc_RNA (1)...(19): siRNA sense strand
ccaccgaggccugcuguuu

SEQ ID NO: 1014465 - RNA, 19 nt, Homo sapiens
  misc_RNA (1)...(19): siRNA sense strand
guacaacagcagcgaagau

SEQ ID NO: 1014466 - RNA, 19 nt, Homo sapiens
  misc_RNA (1)...(19): siRNA sense strand
caacagcagcgaagaugag

SEQ ID NO: 1014467 - RNA, 19 nt, Homo sapiens
  misc_RNA (1)...(19): siRNA sense strand
cccucaaccuggaccauaa

SEQ ID NO: 1014468 - RNA, 19 nt, Homo sapiens
  misc_RNA (1)...(19): siRNA sense strand
aacgggaccuuagagauug

SEQ ID NO: 1014469 - RNA, 19 nt, Homo sapiens
  misc_RNA (1)...(19): siRNA sense strand
caccgaggccugcuguuug

SEQ ID NO: 1014470 - RNA, 19 nt, Homo sapiens
  misc_RNA (1)...(19): siRNA sense strand
aaccuggaccauaaccuua

SEQ ID NO: 1014471 - RNA, 19 nt, Homo sapiens
  misc_RNA (1)...(19): siRNA sense strand
ccaacgggaccuuagagau

SEQ ID NO: 1014472 - RNA, 19 nt, Homo sapiens
  misc_RNA (1)...(19): siRNA sense strand
acaccugcaucgccaccaa

SEQ ID NO: 1014473 - RNA, 19 nt, Homo sapiens
  misc_RNA (1)...(19): siRNA sense strand
acccucaucuaccggauug

SEQ ID NO: 1014474 - RNA, 19 nt, Homo sapiens
  misc_RNA (1)...(19): siRNA sense strand
gaacaaagcagaugagagu

SEQ ID NO: 1014475 - RNA, 19 nt, Homo sapiens
  misc_RNA (1)...(19): siRNA sense strand
aagcaaagcugaaagagaa

SEQ ID NO: 1014476 - RNA, 19 nt, Homo sapiens
  misc_RNA (1)...(19): siRNA sense strand
agaaagaacuggaggaaau

SEQ ID NO: 1014477 - RNA, 19 nt, Homo sapiens
  misc_RNA (1)...(19): siRNA sense strand
ccaaggaucuagccaagaa

SEQ ID NO: 1014478 - RNA, 19 nt, Homo sapiens
  misc_RNA (1)...(19): siRNA sense strand
gaacagugguaucuagaca

SEQ ID NO: 1014479 - RNA, 19 nt, Homo sapiens
  misc_RNA (1)...(19): siRNA sense strand
aaagaagucucaagcaaug

SEQ ID NO: 1014480 - RNA, 19 nt, Homo sapiens
  misc_RNA (1)...(19): siRNA sense strand
gcagaacagugguaucuag

SEQ ID NO: 1014481 - RNA, 19 nt, Homo sapiens
  misc_RNA (1)...(19): siRNA sense strand
gaaagaagucucaagcaau

SEQ ID NO: 1014482 - RNA, 19 nt, Homo sapiens
  misc_RNA (1)...(19): siRNA sense strand
ggagauggauucuacuucu

SEQ ID NO: 1014483 - RNA, 19 nt, Homo sapiens
  misc_RNA (1)...(19): siRNA sense strand
ggaggaagacuuugugaga

SEQ ID NO: 1014484 - RNA, 19 nt, Homo sapiens
  misc_RNA (1)...(19): siRNA sense strand
caaagcagaugagaguauu

SEQ ID NO: 1014485 - RNA, 19 nt, Homo sapiens
  misc_RNA (1)...(19): siRNA sense strand
ggaagcugcucgacagaga

SEQ ID NO: 1014486 - RNA, 19 nt, Homo sapiens
  misc_RNA (1)...(19): siRNA sense strand
gaacugcuccucucuucuu

SEQ ID NO: 1014487 - RNA, 19 nt, Homo sapiens
  misc_RNA (1)...(19): siRNA sense strand
gggcucaccugccuccuuu

SEQ ID NO: 1014488 - RNA, 19 nt, Homo sapiens
  misc_RNA (1)...(19): siRNA sense strand
gaggaagacuuugugagaa

SEQ ID NO: 1014489 - RNA, 19 nt, Homo sapiens
  misc_RNA (1)...(19): siRNA sense strand
agaaagaagucucaagcaa

SEQ ID NO: 1014490 - RNA, 19 nt, Homo sapiens
  misc_RNA (1)...(19): siRNA sense strand
ggagcugucucaucaguca

SEQ ID NO: 1014491 - RNA, 19 nt, Homo sapiens
  misc_RNA (1)...(19): siRNA sense strand
gaaaugaagcagcgaauac

SEQ ID NO: 1014492 - RNA, 19 nt, Homo sapiens
  misc_RNA (1)...(19): siRNA sense strand
gaggaaguguucaaagcaa

SEQ ID NO: 1014493 - RNA, 19 nt, Homo sapiens
  misc_RNA (1)...(19): siRNA sense strand
ggaaaugaagcagcgaaua

SEQ ID NO: 1014494 - RNA, 19 nt, Homo sapiens
  misc_RNA (1)...(19): siRNA sense strand
uggaggagcugucucauca

SEQ ID NO: 1014495 - RNA, 19 nt, Homo sapiens
  misc_RNA (1)...(19): siRNA sense strand
aggaggaccuggagaguuu

SEQ ID NO: 1014496 - RNA, 19 nt, Homo sapiens
  misc_RNA (1)...(19): siRNA sense strand
aaagagaaccggaacaaug

SEQ ID NO: 1014497 - RNA, 19 nt, Homo sapiens
  misc_RNA (1)...(19): siRNA sense strand
gaacuuacaggaacugaag

SEQ ID NO: 1014498 - RNA, 19 nt, Homo sapiens
  misc_RNA (1)...(19): siRNA sense strand
ccagaaggauucccaaguc

SEQ ID NO: 1014499 - RNA, 19 nt, Homo sapiens
  misc_RNA (1)...(19): siRNA sense strand
gagcauuuaccagaacuua

SEQ ID NO: 1014500 - RNA, 19 nt, Homo sapiens
  misc_RNA (1)...(19): siRNA sense strand
gaaaaucucguaucacuug

SEQ ID NO: 1014501 - RNA, 19 nt, Homo sapiens
  misc_RNA (1)...(19): siRNA sense strand
ugaacaaccuucccuccaa

SEQ ID NO: 1014502 - RNA, 19 nt, Homo sapiens
  misc_RNA (1)...(19): siRNA sense strand
uacaggaacugaagcagaa

SEQ ID NO: 1014503 - RNA, 19 nt, Homo sapiens
  misc_RNA (1)...(19): siRNA sense strand
ccuaucgccuccucuagua

SEQ ID NO: 1014504 - RNA, 19 nt, Homo sapiens
  misc_RNA (1)...(19): siRNA sense strand
ccaaggagucguucucuga

SEQ ID NO: 1014505 - RNA, 19 nt, Homo sapiens
  misc_RNA (1)...(19): siRNA sense strand
gcgaaagaauauaagaaag

SEQ ID NO: 1014506 - RNA, 19 nt, Homo sapiens
  misc_RNA (1)...(19): siRNA sense strand
agaaggaucucuagaacag

SEQ ID NO: 1014507 - RNA, 19 nt, Homo sapiens
  misc_RNA (1)...(19): siRNA sense strand
uacaaggccuuccagagaa

SEQ ID NO: 1014508 - RNA, 19 nt, Homo sapiens
  misc_RNA (1)...(19): siRNA sense strand
ucucaucagucaccagaaa

SEQ ID NO: 1014509 - RNA, 19 nt, Homo sapiens
  misc_RNA (1)...(19): siRNA sense strand
aaacaaggcccuaucucuu

SEQ ID NO: 1014510 - RNA, 19 nt, Homo sapiens
  misc_RNA (1)...(19): siRNA sense strand
gagcgaaagaauauaagaa

SEQ ID NO: 1014511 - RNA, 19 nt, Homo sapiens
  misc_RNA (1)...(19): siRNA sense strand
uuacaaggccuuccagaga

SEQ ID NO: 1014512 - RNA, 19 nt, Homo sapiens
  misc_RNA (1)...(19): siRNA sense strand
gaggagcugucucaucagu

SEQ ID NO: 1014513 - RNA, 19 nt, Homo sapiens
  misc_RNA (1)...(19): siRNA sense strand
gaaagaacuggaggaaaug

SEQ ID NO: 1014514 - RNA, 19 nt, Homo sapiens
  misc_RNA (1)...(19): siRNA sense strand
gaacaaugaccguaaaaga

SEQ ID NO: 1014515 - RNA, 19 nt, Homo sapiens
  misc_RNA (1)...(19): siRNA sense strand
gagaagagcagccaaaaga

SEQ ID NO: 1014516 - RNA, 19 nt, Homo sapiens
  misc_RNA (1)...(19): siRNA sense strand
gaaaaccucucugaagaug

SEQ ID NO: 1014517 - RNA, 19 nt, Homo sapiens
  misc_RNA (1)...(19): siRNA sense strand
aggaagacuuugugagaaa

SEQ ID NO: 1014518 - RNA, 19 nt, Homo sapiens
  misc_RNA (1)...(19): siRNA sense strand
ucacagaugccaccaggaa

SEQ ID NO: 1014519 - RNA, 19 nt, Homo sapiens
  misc_RNA (1)...(19): siRNA sense strand
ggcccuaucucuuugaaca

SEQ ID NO: 1014520 - RNA, 19 nt, Homo sapiens
  misc_RNA (1)...(19): siRNA sense strand
ugacucaacugggagcauu

SEQ ID NO: 1014521 - RNA, 19 nt, Homo sapiens
  misc_RNA (1)...(19): siRNA sense strand
ggagauacacagaaagaag

SEQ ID NO: 1014522 - RNA, 19 nt, Homo sapiens
  misc_RNA (1)...(19): siRNA sense strand
gagcaggguuuagaaggau

SEQ ID NO: 1014523 - RNA, 19 nt, Homo sapiens
  misc_RNA (1)...(19): siRNA sense strand
guaaaagagcgaaagaaua

SEQ ID NO: 1014524 - RNA, 19 nt, Homo sapiens
  misc_RNA (1)...(19): siRNA sense strand
gaaagagaaccggaacaau

SEQ ID NO: 1014525 - RNA, 19 nt, Homo sapiens
  misc_RNA (1)...(19): siRNA sense strand
caagcaauguccaaaucug

SEQ ID NO: 1014526 - RNA, 19 nt, Homo sapiens
  misc_RNA (1)...(19): siRNA sense strand
aagagaaccggaacaauga

SEQ ID NO: 1014527 - RNA, 19 nt, Homo sapiens
  misc_RNA (1)...(19): siRNA sense strand
acaaggcccuaucucuuug

SEQ ID NO: 1014528 - RNA, 19 nt, Homo sapiens
  misc_RNA (1)...(19): siRNA sense strand
ggauucuacuucugacuca

SEQ ID NO: 1014529 - RNA, 19 nt, Homo sapiens
  misc_RNA (1)...(19): siRNA sense strand
gcaauguccaaaucuguga

SEQ ID NO: 1014530 - RNA, 19 nt, Homo sapiens
  misc_RNA (1)...(19): siRNA sense strand
gcauuuaccagaacuuaca

SEQ ID NO: 1014531 - RNA, 19 nt, Homo sapiens
  misc_RNA (1)...(19): siRNA sense strand
ucaaagcaaagcugaaaga

SEQ ID NO: 1014532 - RNA, 19 nt, Homo sapiens
  misc_RNA (1)...(19): siRNA sense strand
ugaacaaguugccaaggau

SEQ ID NO: 1014533 - RNA, 19 nt, Homo sapiens
  misc_RNA (1)...(19): siRNA sense strand
caaacaaggcccuaucucu

SEQ ID NO: 1014534 - RNA, 19 nt, Homo sapiens
  misc_RNA (1)...(19): siRNA sense strand
gagauggauucuacuucug

SEQ ID NO: 1014535 - RNA, 19 nt, Homo sapiens
  misc_RNA (1)...(19): siRNA sense strand
caagaaagaagcagaacag

SEQ ID NO: 1014536 - RNA, 19 nt, Homo sapiens
  misc_RNA (1)...(19): siRNA sense strand
uaagaaagaacuggaggaa

SEQ ID NO: 1014537 - RNA, 19 nt, Homo sapiens
  misc_RNA (1)...(19): siRNA sense strand
ggcuggagauacacagaaa

SEQ ID NO: 1014538 - RNA, 19 nt, Homo sapiens
  misc_RNA (1)...(19): siRNA sense strand
gcacacuaacuucagauuc

SEQ ID NO: 1014539 - RNA, 19 nt, Homo sapiens
  misc_RNA (1)...(19): siRNA sense strand
caaccuucccuccaacauu

SEQ ID NO: 1014540 - RNA, 19 nt, Homo sapiens
  misc_RNA (1)...(19): siRNA sense strand
ggaucuagccaagaaagaa

SEQ ID NO: 1014541 - RNA, 19 nt, Homo sapiens
  misc_RNA (1)...(19): siRNA sense strand
gagauacacagaaagaagu

SEQ ID NO: 1014542 - RNA, 19 nt, Homo sapiens
  misc_RNA (1)...(19): siRNA sense strand
gaaggccaccagaaggauu

SEQ ID NO: 1014543 - RNA, 19 nt, Homo sapiens
  misc_RNA (1)...(19): siRNA sense strand
aacaaggcccuaucucuuu

SEQ ID NO: 1014544 - RNA, 19 nt, Homo sapiens
  misc_RNA (1)...(19): siRNA sense strand
aaacucagcaucagagauc

SEQ ID NO: 1014545 - RNA, 19 nt, Homo sapiens
  misc_RNA (1)...(19): siRNA sense strand
aaaccucucugaagaugag

SEQ ID NO: 1014546 - RNA, 19 nt, Homo sapiens
  misc_RNA (1)...(19): siRNA sense strand
ccggaacaaugaccguaaa

SEQ ID NO: 1014547 - RNA, 19 nt, Homo sapiens
  misc_RNA (1)...(19): siRNA sense strand
ggaggaaguguucaaagca

SEQ ID NO: 1014548 - RNA, 19 nt, Homo sapiens
  misc_RNA (1)...(19): siRNA sense strand
ccucggccauuccgcauga

SEQ ID NO: 1014549 - RNA, 19 nt, Homo sapiens
  misc_RNA (1)...(19): siRNA sense strand
ucucguaucacuugcuuaa

SEQ ID NO: 1014550 - RNA, 19 nt, Homo sapiens
  misc_RNA (1)...(19): siRNA sense strand
aggcugggcuggaggaaga

SEQ ID NO: 1014551 - RNA, 19 nt, Homo sapiens
  misc_RNA (1)...(19): siRNA sense strand
ugaaagagaaccggaacaa

SEQ ID NO: 1014552 - RNA, 19 nt, Homo sapiens
  misc_RNA (1)...(19): siRNA sense strand
gagaaggaggagcagcuaa

SEQ ID NO: 1014553 - RNA, 19 nt, Homo sapiens
  misc_RNA (1)...(19): siRNA sense strand
ggagaaggaggagcagcua

SEQ ID NO: 1014554 - RNA, 19 nt, Homo sapiens
  misc_RNA (1)...(19): siRNA sense strand
gaggagauggauucuacuu

SEQ ID NO: 1014555 - RNA, 19 nt, Homo sapiens
  misc_RNA (1)...(19): siRNA sense strand
gcagaugagaguauucagu

SEQ ID NO: 1014556 - RNA, 19 nt, Homo sapiens
  misc_RNA (1)...(19): siRNA sense strand
ccagagaagagcagccaaa

SEQ ID NO: 1014557 - RNA, 19 nt, Homo sapiens
  misc_RNA (1)...(19): siRNA sense strand
aaaauucgcauccaaauga

SEQ ID NO: 1014558 - RNA, 19 nt, Homo sapiens
  misc_RNA (1)...(19): siRNA sense strand
cugcuccucucuucuuuga

SEQ ID NO: 1014559 - RNA, 19 nt, Homo sapiens
  misc_RNA (1)...(19): siRNA sense strand
agagcaggguuuagaagga

SEQ ID NO: 1014560 - RNA, 19 nt, Homo sapiens
  misc_RNA (1)...(19): siRNA sense strand
aaccuucccuccaacauuc

SEQ ID NO: 1014561 - RNA, 19 nt, Homo sapiens
  misc_RNA (1)...(19): siRNA sense strand
ggaagacuuugugagaaac

SEQ ID NO: 1014562 - RNA, 19 nt, Homo sapiens
  misc_RNA (1)...(19): siRNA sense strand
cagaggaggagauggauuc

SEQ ID NO: 1014563 - RNA, 19 nt, Homo sapiens
  misc_RNA (1)...(19): siRNA sense strand
aggaggagauggauucuac

SEQ ID NO: 1014564 - RNA, 19 nt, Homo sapiens
  misc_RNA (1)...(19): siRNA sense strand
gaaggauucccaaguccau

SEQ ID NO: 1014565 - RNA, 19 nt, Homo sapiens
  misc_RNA (1)...(19): siRNA sense strand
aagccaagaucuccaagca

SEQ ID NO: 1014566 - RNA, 19 nt, Homo sapiens
  misc_RNA (1)...(19): siRNA sense strand
ggaggagcagcuaaaggaa

SEQ ID NO: 1014567 - RNA, 19 nt, Homo sapiens
  misc_RNA (1)...(19): siRNA sense strand
agaaggaggagcagcuaaa

SEQ ID NO: 1014568 - RNA, 19 nt, Homo sapiens
  misc_RNA (1)...(19): siRNA sense strand
gaggaggaccuggagaguu

SEQ ID NO: 1014569 - RNA, 19 nt, Homo sapiens
  misc_RNA (1)...(19): siRNA sense strand
caagaggccacucgcaaca

SEQ ID NO: 1014570 - RNA, 19 nt, Homo sapiens
  misc_RNA (1)...(19): siRNA sense strand
gcucaccugccuccuuuga

SEQ ID NO: 1014571 - RNA, 19 nt, Homo sapiens
  misc_RNA (1)...(19): siRNA sense strand
acaaagcagaugagaguau

SEQ ID NO: 1014572 - RNA, 19 nt, Homo sapiens
  misc_RNA (1)...(19): siRNA sense strand
cagaaaaucucguaucacu

SEQ ID NO: 1014573 - RNA, 19 nt, Homo sapiens
  misc_RNA (1)...(19): siRNA sense strand
uugaacaaguugccaagga

SEQ ID NO: 1014574 - RNA, 19 nt, Homo sapiens
  misc_RNA (1)...(19): siRNA sense strand
ccagauggcuaccuguaug

SEQ ID NO: 1014575 - RNA, 19 nt, Homo sapiens
  misc_RNA (1)...(19): siRNA sense strand
gaugaaggccuacgagaag

SEQ ID NO: 1014576 - RNA, 19 nt, Homo sapiens
  misc_RNA (1)...(19): siRNA sense strand
ggacuucgacugcuguugu

SEQ ID NO: 1014577 - RNA, 19 nt, Homo sapiens
  misc_RNA (1)...(19): siRNA sense strand
gugaggccauccuggagua

SEQ ID NO: 1014578 - RNA, 19 nt, Homo sapiens
  misc_RNA (1)...(19): siRNA sense strand
caaguaaggacaaggacaa

SEQ ID NO: 1014579 - RNA, 19 nt, Homo sapiens
  misc_RNA (1)...(19): siRNA sense strand
guaaggacaaggacaaagu

SEQ ID NO: 1014580 - RNA, 19 nt, Homo sapiens
  misc_RNA (1)...(19): siRNA sense strand
gggaugccgugaaggacuu

SEQ ID NO: 1014581 - RNA, 19 nt, Homo sapiens
  misc_RNA (1)...(19): siRNA sense strand
gagaaggagucggcuaucg

SEQ ID NO: 1014582 - RNA, 19 nt, Homo sapiens
  misc_RNA (1)...(19): siRNA sense strand
cagcccagaugauguccaa

SEQ ID NO: 1014583 - RNA, 19 nt, Homo sapiens
  misc_RNA (1)...(19): siRNA sense strand
gcaccagcccagaugaugu

SEQ ID NO: 1014584 - RNA, 19 nt, Homo sapiens
  misc_RNA (1)...(19): siRNA sense strand
acaccuaccacgagaagaa

SEQ ID NO: 1014585 - RNA, 19 nt, Homo sapiens
  misc_RNA (1)...(19): siRNA sense strand
ucacagaccgcgacaucau

SEQ ID NO: 1014586 - RNA, 19 nt, Homo sapiens
  misc_RNA (1)...(19): siRNA sense strand
guguggguccuccaaguaa

SEQ ID NO: 1014587 - RNA, 19 nt, Homo sapiens
  misc_RNA (1)...(19): siRNA sense strand
agaugaaggccuacgagaa

SEQ ID NO: 1014588 - RNA, 19 nt, Homo sapiens
  misc_RNA (1)...(19): siRNA sense strand
gcugcaagcggagaaauca

SEQ ID NO: 1014589 - RNA, 19 nt, Homo sapiens
  misc_RNA (1)...(19): siRNA sense strand
uaaggacaaggacaaagug

SEQ ID NO: 1014590 - RNA, 19 nt, Homo sapiens
  misc_RNA (1)...(19): siRNA sense strand
cccugugacuggagacaaa

SEQ ID NO: 1014591 - RNA, 19 nt, Homo sapiens
  misc_RNA (1)...(19): siRNA sense strand
acccagaacauucgacuga

SEQ ID NO: 1014592 - RNA, 19 nt, Homo sapiens
  misc_RNA (1)...(19): siRNA sense strand
cagauggcuaccuguauga

SEQ ID NO: 1014593 - RNA, 19 nt, Homo sapiens
  misc_RNA (1)...(19): siRNA sense strand
gaagcugcaagcggagaaa

SEQ ID NO: 1014594 - RNA, 19 nt, Homo sapiens
  misc_RNA (1)...(19): siRNA sense strand
caguguggguccuccaagu

SEQ ID NO: 1014595 - RNA, 19 nt, Homo sapiens
  misc_RNA (1)...(19): siRNA sense strand
gcuggaaacuccuuuauga

SEQ ID NO: 1014596 - RNA, 19 nt, Homo sapiens
  misc_RNA (1)...(19): siRNA sense strand
gaaacuggcucuggaaaga

SEQ ID NO: 1014597 - RNA, 19 nt, Homo sapiens
  misc_RNA (1)...(19): siRNA sense strand
ggaaacuccuuuaugauau

SEQ ID NO: 1014598 - RNA, 19 nt, Homo sapiens
  misc_RNA (1)...(19): siRNA sense strand
ugacagauguguuguguga

SEQ ID NO: 1014599 - RNA, 19 nt, Homo sapiens
  misc_RNA (1)...(19): siRNA sense strand
ggaugaagccgaccgaaua

SEQ ID NO: 1014600 - RNA, 19 nt, Homo sapiens
  misc_RNA (1)...(19): siRNA sense strand
gcagagugcugugauugua

SEQ ID NO: 1014601 - RNA, 19 nt, Homo sapiens
  misc_RNA (1)...(19): siRNA sense strand
ggacaaaugagucagagua

SEQ ID NO: 1014602 - RNA, 19 nt, Homo sapiens
  misc_RNA (1)...(19): siRNA sense strand
gaagaauccugugaaaugu

SEQ ID NO: 1014603 - RNA, 19 nt, Homo sapiens
  misc_RNA (1)...(19): siRNA sense strand
gacaagauccucaaaguga

SEQ ID NO: 1014604 - RNA, 19 nt, Homo sapiens
  misc_RNA (1)...(19): siRNA sense strand
gcgcauagaacacuuaauu

SEQ ID NO: 1014605 - RNA, 19 nt, Homo sapiens
  misc_RNA (1)...(19): siRNA sense strand
gauugaagcuauuccuuug

SEQ ID NO: 1014606 - RNA, 19 nt, Homo sapiens
  misc_RNA (1)...(19): siRNA sense strand
agacagagguugacaagau

SEQ ID NO: 1014607 - RNA, 19 nt, Homo sapiens
  misc_RNA (1)...(19): siRNA sense strand
uaaaugaauuggcuggaaa

SEQ ID NO: 1014608 - RNA, 19 nt, Homo sapiens
  misc_RNA (1)...(19): siRNA sense strand
gagaacagcuuugcuacug

SEQ ID NO: 1014609 - RNA, 19 nt, Homo sapiens
  misc_RNA (1)...(19): siRNA sense strand
ggaggaaacuaaaacauuu

SEQ ID NO: 1014610 - RNA, 19 nt, Homo sapiens
  misc_RNA (1)...(19): siRNA sense strand
ugaagaauccugugaaaug

SEQ ID NO: 1014611 - RNA, 19 nt, Homo sapiens
  misc_RNA (1)...(19): siRNA sense strand
auaccuaccugguuuauau

SEQ ID NO: 1014612 - RNA, 19 nt, Homo sapiens
  misc_RNA (1)...(19): siRNA sense strand
ugcagcaccuguaauaaua

SEQ ID NO: 1014613 - RNA, 19 nt, Homo sapiens
  misc_RNA (1)...(19): siRNA sense strand
cgccuaggaucccuuaaua

SEQ ID NO: 1014614 - RNA, 19 nt, Homo sapiens
  misc_RNA (1)...(19): siRNA sense strand
ucaaauacuuggucaugga

SEQ ID NO: 1014615 - RNA, 19 nt, Homo sapiens
  misc_RNA (1)...(19): siRNA sense strand
gagcuggccuuucagaucu

SEQ ID NO: 1014616 - RNA, 19 nt, Homo sapiens
  misc_RNA (1)...(19): siRNA sense strand
uggaaacuccuuuaugaua

SEQ ID NO: 1014617 - RNA, 19 nt, Homo sapiens
  misc_RNA (1)...(19): siRNA sense strand
gauuguagguggaauugau

SEQ ID NO: 1014618 - RNA, 19 nt, Homo sapiens
  misc_RNA (1)...(19): siRNA sense strand
ggaagaggaggaaacuaaa

SEQ ID NO: 1014619 - RNA, 19 nt, Homo sapiens
  misc_RNA (1)...(19): siRNA sense strand
cagccgagguuuggacaua

SEQ ID NO: 1014620 - RNA, 19 nt, Homo sapiens
  misc_RNA (1)...(19): siRNA sense strand
aaggauaccuaccugguuu

SEQ ID NO: 1014621 - RNA, 19 nt, Homo sapiens
  misc_RNA (1)...(19): siRNA sense strand
cuaaauaccagacaguuga

SEQ ID NO: 1014622 - RNA, 19 nt, Homo sapiens
  misc_RNA (1)...(19): siRNA sense strand
ccagagaacagcuuugcua

SEQ ID NO: 1014623 - RNA, 19 nt, Homo sapiens
  misc_RNA (1)...(19): siRNA sense strand
gggaagaaacuaccagguu

SEQ ID NO: 1014624 - RNA, 19 nt, Homo sapiens
  misc_RNA (1)...(19): siRNA sense strand
gagaggaugcuggagauaa

SEQ ID NO: 1014625 - RNA, 19 nt, Homo sapiens
  misc_RNA (1)...(19): siRNA sense strand
gcauagaacacuuaauugg

SEQ ID NO: 1014626 - RNA, 19 nt, Homo sapiens
  misc_RNA (1)...(19): siRNA sense strand
caagguggcuggaggaaaa

SEQ ID NO: 1014627 - RNA, 19 nt, Homo sapiens
  misc_RNA (1)...(19): siRNA sense strand
gagauaaugaugacacaga

SEQ ID NO: 1014628 - RNA, 19 nt, Homo sapiens
  misc_RNA (1)...(19): siRNA sense strand
gaauauggauuuugagaca

SEQ ID NO: 1014629 - RNA, 19 nt, Homo sapiens
  misc_RNA (1)...(19): siRNA sense strand
gacaaaugagucagaguaa

SEQ ID NO: 1014630 - RNA, 19 nt, Homo sapiens
  misc_RNA (1)...(19): siRNA sense strand
gaagccgaccgaauacuga

SEQ ID NO: 1014631 - RNA, 19 nt, Homo sapiens
  misc_RNA (1)...(19): siRNA sense strand
caaagugauuccucgagau

SEQ ID NO: 1014632 - RNA, 19 nt, Homo sapiens
  misc_RNA (1)...(19): siRNA sense strand
ggacaaaacccaccaagau

SEQ ID NO: 1014633 - RNA, 19 nt, Homo sapiens
  misc_RNA (1)...(19): siRNA sense strand
cuaccugguuuauauucua

SEQ ID NO: 1014634 - RNA, 19 nt, Homo sapiens
  misc_RNA (1)...(19): siRNA sense strand
uggaagaggaggaaacuaa

SEQ ID NO: 1014635 - RNA, 19 nt, Homo sapiens
  misc_RNA (1)...(19): siRNA sense strand
gacaggcgccuuugcuuug

SEQ ID NO: 1014636 - RNA, 19 nt, Homo sapiens
  misc_RNA (1)...(19): siRNA sense strand
gcgagaggaugcuggagau

SEQ ID NO: 1014637 - RNA, 19 nt, Homo sapiens
  misc_RNA (1)...(19): siRNA sense strand
acacuuaauugggaagaaa

SEQ ID NO: 1014638 - RNA, 19 nt, Homo sapiens
  misc_RNA (1)...(19): siRNA sense strand
cuaaaugaauuggcuggaa

SEQ ID NO: 1014639 - RNA, 19 nt, Homo sapiens
  misc_RNA (1)...(19): siRNA sense strand
cagcuuugcuacugcgaaa

SEQ ID NO: 1014640 - RNA, 19 nt, Homo sapiens
  misc_RNA (1)...(19): siRNA sense strand
gacagagguugacaagauc

SEQ ID NO: 1014641 - RNA, 19 nt, Homo sapiens
  misc_RNA (1)...(19): siRNA sense strand
ucugaagaauccugugaaa

SEQ ID NO: 1014642 - RNA, 19 nt, Homo sapiens
  misc_RNA (1)...(19): siRNA sense strand
acaaggucgugauaucauu

SEQ ID NO: 1014643 - RNA, 19 nt, Homo sapiens
  misc_RNA (1)...(19): siRNA sense strand
gaccgaauacugaauaugg

SEQ ID NO: 1014644 - RNA, 19 nt, Homo sapiens
  misc_RNA (1)...(19): siRNA sense strand
aaugugccguuuccucuaa

SEQ ID NO: 1014645 - RNA, 19 nt, Homo sapiens
  misc_RNA (1)...(19): siRNA sense strand
ggagcuggccuuucagauc

SEQ ID NO: 1014646 - RNA, 19 nt, Homo sapiens
  misc_RNA (1)...(19): siRNA sense strand
agaggaugcuggagauaau

SEQ ID NO: 1014647 - RNA, 19 nt, Homo sapiens
  misc_RNA (1)...(19): siRNA sense strand
guaauaauacccagagaac

SEQ ID NO: 1014648 - RNA, 19 nt, Homo sapiens
  misc_RNA (1)...(19): siRNA sense strand
uuacauccaucgaguaggu

SEQ ID NO: 1014649 - RNA, 19 nt, Homo sapiens
  misc_RNA (1)...(19): siRNA sense strand
uucaaugucucaaucuuug

SEQ ID NO: 1014650 - RNA, 19 nt, Homo sapiens
  misc_RNA (1)...(19): siRNA sense strand
ugacacagagggugcuauu

SEQ ID NO: 1014651 - RNA, 19 nt, Homo sapiens
  misc_RNA (1)...(19): siRNA sense strand
caagauccucaaagugauu

SEQ ID NO: 1014652 - RNA, 19 nt, Homo sapiens
  misc_RNA (1)...(19): siRNA sense strand
gaaacgcucgcgagaggau

SEQ ID NO: 1014653 - RNA, 19 nt, Homo sapiens
  misc_RNA (1)...(19): siRNA sense strand
gaagcggaaaggccguuaa

SEQ ID NO: 1014654 - RNA, 19 nt, Homo sapiens
  misc_RNA (1)...(19): siRNA sense strand
agacaggcgccuuugcuuu

SEQ ID NO: 1014655 - RNA, 19 nt, Homo sapiens
  misc_RNA (1)...(19): siRNA sense strand
acagauguguugugugaag

SEQ ID NO: 1014656 - RNA, 19 nt, Homo sapiens
  misc_RNA (1)...(19): siRNA sense strand
caaggauaccuaccugguu

SEQ ID NO: 1014657 - RNA, 19 nt, Homo sapiens
  misc_RNA (1)...(19): siRNA sense strand
ccucuaaauucaaggauac

SEQ ID NO: 1014658 - RNA, 19 nt, Homo sapiens
  misc_RNA (1)...(19): siRNA sense strand
caaggcccguuccauucuu

SEQ ID NO: 1014659 - RNA, 19 nt, Homo sapiens
  misc_RNA (1)...(19): siRNA sense strand
ugaagcuugugaccaguug

SEQ ID NO: 1014660 - RNA, 19 nt, Homo sapiens
  misc_RNA (1)...(19): siRNA sense strand
cuacccauuccaaggauua

SEQ ID NO: 1014661 - RNA, 19 nt, Homo sapiens
  misc_RNA (1)...(19): siRNA sense strand
gccaaggcccguuccauuc

SEQ ID NO: 1014662 - RNA, 19 nt, Homo sapiens
  misc_RNA (1)...(19): siRNA sense strand
ucagaucucagagcaguuu

SEQ ID NO: 1014663 - RNA, 19 nt, Homo sapiens
  misc_RNA (1)...(19): siRNA sense strand
ucauugggcuugcagaaac

SEQ ID NO: 1014664 - RNA, 19 nt, Homo sapiens
  misc_RNA (1)...(19): siRNA sense strand
gcucugaagaauccuguga

SEQ ID NO: 1014665 - RNA, 19 nt, Homo sapiens
  misc_RNA (1)...(19): siRNA sense strand
guuaagggagcauggagaa

SEQ ID NO: 1014666 - RNA, 19 nt, Homo sapiens
  misc_RNA (1)...(19): siRNA sense strand
gaacucuuccagcgcauag

SEQ ID NO: 1014667 - RNA, 19 nt, Homo sapiens
  misc_RNA (1)...(19): siRNA sense strand
gauuacauccaucgaguag

SEQ ID NO: 1014668 - RNA, 19 nt, Homo sapiens
  misc_RNA (1)...(19): siRNA sense strand
ccugugaaaugugccguuu

SEQ ID NO: 1014669 - RNA, 19 nt, Homo sapiens
  misc_RNA (1)...(19): siRNA sense strand
gcguuuguuugcccuaguu

SEQ ID NO: 1014670 - RNA, 19 nt, Homo sapiens
  misc_RNA (1)...(19): siRNA sense strand
agauugaagcuauuccuuu

SEQ ID NO: 1014671 - RNA, 19 nt, Homo sapiens
  misc_RNA (1)...(19): siRNA sense strand
ugacaagauccucaaagug

SEQ ID NO: 1014672 - RNA, 19 nt, Homo sapiens
  misc_RNA (1)...(19): siRNA sense strand
gaucucagagcaguuugaa

SEQ ID NO: 1014673 - RNA, 19 nt, Homo sapiens
  misc_RNA (1)...(19): siRNA sense strand
cuuacaaggucgugauauc

SEQ ID NO: 1014674 - RNA, 19 nt, Homo sapiens
  misc_RNA (1)...(19): siRNA sense strand
caaaugagucagaguaagc

SEQ ID NO: 1014675 - RNA, 19 nt, Homo sapiens
  misc_RNA (1)...(19): siRNA sense strand
acaagauccucaaagugau

SEQ ID NO: 1014676 - RNA, 19 nt, Homo sapiens
  misc_RNA (1)...(19): siRNA sense strand
gccgaccgaauacugaaua

SEQ ID NO: 1014677 - RNA, 19 nt, Homo sapiens
  misc_RNA (1)...(19): siRNA sense strand
gaagaggaggaaacuaaaa

SEQ ID NO: 1014678 - RNA, 19 nt, Homo sapiens
  misc_RNA (1)...(19): siRNA sense strand
cgaguaggucgaacagcua

SEQ ID NO: 1014679 - RNA, 19 nt, Homo sapiens
  misc_RNA (1)...(19): siRNA sense strand
acacagagggugcuauugg

SEQ ID NO: 1014680 - RNA, 19 nt, Homo sapiens
  misc_RNA (1)...(19): siRNA sense strand
gacagaacgcgucgcugaa

SEQ ID NO: 1014681 - RNA, 19 nt, Homo sapiens
  misc_RNA (1)...(19): siRNA sense strand
gaacacuuaauugggaaga

SEQ ID NO: 1014682 - RNA, 19 nt, Homo sapiens
  misc_RNA (1)...(19): siRNA sense strand
gaagcgucccagccgauug

SEQ ID NO: 1014683 - RNA, 19 nt, Homo sapiens
  misc_RNA (1)...(19): siRNA sense strand
caaggucgugauaucauug

SEQ ID NO: 1014684 - RNA, 19 nt, Homo sapiens
  misc_RNA (1)...(19): siRNA sense strand
gauaccuaccugguuuaua

SEQ ID NO: 1014685 - RNA, 19 nt, Homo sapiens
  misc_RNA (1)...(19): siRNA sense strand
uaaauaccagacaguugaa

SEQ ID NO: 1014686 - RNA, 19 nt, Homo sapiens
  misc_RNA (1)...(19): siRNA sense strand
cucgggagcuggccuuuca

SEQ ID NO: 1014687 - RNA, 19 nt, Homo sapiens
  misc_RNA (1)...(19): siRNA sense strand
ccauucuucuagcaacuga

SEQ ID NO: 1014688 - RNA, 19 nt, Homo sapiens
  misc_RNA (1)...(19): siRNA sense strand
gccuaggaucccuuaauaa

SEQ ID NO: 1014689 - RNA, 19 nt, Homo sapiens
  misc_RNA (1)...(19): siRNA sense strand
gaugaagccgaccgaauac

SEQ ID NO: 1014690 - RNA, 19 nt, Homo sapiens
  misc_RNA (1)...(19): siRNA sense strand
gcaacuccuggucgacuga

SEQ ID NO: 1014691 - RNA, 19 nt, Homo sapiens
  misc_RNA (1)...(19): siRNA sense strand
aguaugauguggaacucuu

SEQ ID NO: 1014692 - RNA, 19 nt, Homo sapiens
  misc_RNA (1)...(19): siRNA sense strand
cccucuaaauucaaggaua

SEQ ID NO: 1014693 - RNA, 19 nt, Homo sapiens
  misc_RNA (1)...(19): siRNA sense strand
cgaauacugaauauggauu

SEQ ID NO: 1014694 - RNA, 19 nt, Homo sapiens
  misc_RNA (1)...(19): siRNA sense strand
ggaugaugagguuaugaug

SEQ ID NO: 1014695 - RNA, 19 nt, Homo sapiens
  misc_RNA (1)...(19): siRNA sense strand
gaagauggaucaccucuaa

SEQ ID NO: 1014696 - RNA, 19 nt, Homo sapiens
  misc_RNA (1)...(19): siRNA sense strand
gaaaaggacuggaauucua

SEQ ID NO: 1014697 - RNA, 19 nt, Homo sapiens
  misc_RNA (1)...(19): siRNA sense strand
ucucaaggauuucuucuaa

SEQ ID NO: 1014698 - RNA, 19 nt, Homo sapiens
  misc_RNA (1)...(19): siRNA sense strand
cuaaacuucucaaggauuu

SEQ ID NO: 1014699 - RNA, 19 nt, Homo sapiens
  misc_RNA (1)...(19): siRNA sense strand
ccucuaaacuucucaagga

SEQ ID NO: 1014700 - RNA, 19 nt, Homo sapiens
  misc_RNA (1)...(19): siRNA sense strand
agaucaagcuuuauucuga

SEQ ID NO: 1014701 - RNA, 19 nt, Homo sapiens
  misc_RNA (1)...(19): siRNA sense strand
uguaagaagugucccuuug

SEQ ID NO: 1014702 - RNA, 19 nt, Homo sapiens
  misc_RNA (1)...(19): siRNA sense strand
ggauuggucugaggaacaa

SEQ ID NO: 1014703 - RNA, 19 nt, Homo sapiens
  misc_RNA (1)...(19): siRNA sense strand
gcugugaaguuccuuuaca

SEQ ID NO: 1014704 - RNA, 19 nt, Homo sapiens
  misc_RNA (1)...(19): siRNA sense strand
caacccaagcccagaauga

SEQ ID NO: 1014705 - RNA, 19 nt, Homo sapiens
  misc_RNA (1)...(19): siRNA sense strand
uggaucaccucuaaacuuc

SEQ ID NO: 1014706 - RNA, 19 nt, Homo sapiens
  misc_RNA (1)...(19): siRNA sense strand
uaagaagugucccuuugca

SEQ ID NO: 1014707 - RNA, 19 nt, Homo sapiens
  misc_RNA (1)...(19): siRNA sense strand
gauaacggacaaucaggaa

SEQ ID NO: 1014708 - RNA, 19 nt, Homo sapiens
  misc_RNA (1)...(19): siRNA sense strand
gaucaccucuaaacuucuc

SEQ ID NO: 1014709 - RNA, 19 nt, Homo sapiens
  misc_RNA (1)...(19): siRNA sense strand
uaacggacaaucaggaaau

SEQ ID NO: 1014710 - RNA, 19 nt, Homo sapiens
  misc_RNA (1)...(19): siRNA sense strand
cuuugcagaucaagcuuua

SEQ ID NO: 1014711 - RNA, 19 nt, Homo sapiens
  misc_RNA (1)...(19): siRNA sense strand
gaagugucccuuugcagau

SEQ ID NO: 1014712 - RNA, 19 nt, Homo sapiens
  misc_RNA (1)...(19): siRNA sense strand
ggaagauggaucaccucua

SEQ ID NO: 1014713 - RNA, 19 nt, Homo sapiens
  misc_RNA (1)...(19): siRNA sense strand
gcagaucaagcuuuauucu

SEQ ID NO: 1014714 - RNA, 19 nt, Homo sapiens
  misc_RNA (1)...(19): siRNA sense strand
gacaugcggugccaucaac

SEQ ID NO: 1014715 - RNA, 19 nt, Homo sapiens
  misc_RNA (1)...(19): siRNA sense strand
ugagugugcugcuauacca

SEQ ID NO: 1014716 - RNA, 19 nt, Homo sapiens
  misc_RNA (1)...(19): siRNA sense strand
gacuauggaccacagcaaa

SEQ ID NO: 1014717 - RNA, 19 nt, Homo sapiens
  misc_RNA (1)...(19): siRNA sense strand
cugacaguguuauuuauuc

SEQ ID NO: 1014718 - RNA, 19 nt, Homo sapiens
  misc_RNA (1)...(19): siRNA sense strand
cugcaguucuucugagugu

SEQ ID NO: 1014719 - RNA, 19 nt, Homo sapiens
  misc_RNA (1)...(19): siRNA sense strand
gaggugggaagauggauca

SEQ ID NO: 1014720 - RNA, 19 nt, Homo sapiens
  misc_RNA (1)...(19): siRNA sense strand
gcuucugacugcaguucuu

SEQ ID NO: 1014721 - RNA, 19 nt, Homo sapiens
  misc_RNA (1)...(19): siRNA sense strand
gccucaagcugugaaguuc

SEQ ID NO: 1014722 - RNA, 19 nt, Homo sapiens
  misc_RNA (1)...(19): siRNA sense strand
caaggauuucuucuaauag

SEQ ID NO: 1014723 - RNA, 19 nt, Homo sapiens
  misc_RNA (1)...(19): siRNA sense strand
ggauuucuucuaauagcuu

SEQ ID NO: 1014724 - RNA, 19 nt, Homo sapiens
  misc_RNA (1)...(19): siRNA sense strand
guaagaagugucccuuugc

SEQ ID NO: 1014725 - RNA, 19 nt, Homo sapiens
  misc_RNA (1)...(19): siRNA sense strand
aagcugugaaguuccuuua

SEQ ID NO: 1014726 - RNA, 19 nt, Homo sapiens
  misc_RNA (1)...(19): siRNA sense strand
uugcagaucaagcuuuauu

SEQ ID NO: 1014727 - RNA, 19 nt, Homo sapiens
  misc_RNA (1)...(19): siRNA sense strand
gacugcaguucuucugagu

SEQ ID NO: 1014728 - RNA, 19 nt, Homo sapiens
  misc_RNA (1)...(19): siRNA sense strand
uaauagcuuugugcagaca

SEQ ID NO: 1014729 - RNA, 19 nt, Homo sapiens
  misc_RNA (1)...(19): siRNA sense strand
gagacucacaccuccuugu

SEQ ID NO: 1014730 - RNA, 19 nt, Homo sapiens
  misc_RNA (1)...(19): siRNA sense strand
ggcuggaggugggaagaug

SEQ ID NO: 1014731 - RNA, 19 nt, Homo sapiens
  misc_RNA (1)...(19): siRNA sense strand
gcuccaacuacuccacuug

SEQ ID NO: 1014732 - RNA, 19 nt, Homo sapiens
  misc_RNA (1)...(19): siRNA sense strand
cccaagcccagaaugacua

SEQ ID NO: 1014733 - RNA, 19 nt, Homo sapiens
  misc_RNA (1)...(19): siRNA sense strand
ucuaaacuucucaaggauu

SEQ ID NO: 1014734 - RNA, 19 nt, Homo sapiens
  misc_RNA (1)...(19): siRNA sense strand
ggucugaggaacaauucug

SEQ ID NO: 1014735 - RNA, 19 nt, Homo sapiens
  misc_RNA (1)...(19): siRNA sense strand
cuggaauucuagucuggaa

SEQ ID NO: 1014736 - RNA, 19 nt, Homo sapiens
  misc_RNA (1)...(19): siRNA sense strand
gcacaaagcucggcuggaa

SEQ ID NO: 1014737 - RNA, 19 nt, Homo sapiens
  misc_RNA (1)...(19): siRNA sense strand
gcaaagaggaucaucauuu

SEQ ID NO: 1014738 - RNA, 19 nt, Homo sapiens
  misc_RNA (1)...(19): siRNA sense strand
uaaagggacucaaacauga

SEQ ID NO: 1014739 - RNA, 19 nt, Homo sapiens
  misc_RNA (1)...(19): siRNA sense strand
ccagacagguuaugcauuu

SEQ ID NO: 1014740 - RNA, 19 nt, Homo sapiens
  misc_RNA (1)...(19): siRNA sense strand
caacugaacuacaagauuc

SEQ ID NO: 1014741 - RNA, 19 nt, Homo sapiens
  misc_RNA (1)...(19): siRNA sense strand
gauuugggcugcucuuuaa

SEQ ID NO: 1014742 - RNA, 19 nt, Homo sapiens
  misc_RNA (1)...(19): siRNA sense strand
caaagaggaucaucauuuc

SEQ ID NO: 1014743 - RNA, 19 nt, Homo sapiens
  misc_RNA (1)...(19): siRNA sense strand
ugagugagguggagauuaa

SEQ ID NO: 1014744 - RNA, 19 nt, Homo sapiens
  misc_RNA (1)...(19): siRNA sense strand
gagcauagacuuugaggaa

SEQ ID NO: 1014745 - RNA, 19 nt, Homo sapiens
  misc_RNA (1)...(19): siRNA sense strand
caaaccagaucaagcagaa

SEQ ID NO: 1014746 - RNA, 19 nt, Homo sapiens
  misc_RNA (1)...(19): siRNA sense strand
gaacaaggacauccaaagu

SEQ ID NO: 1014747 - RNA, 19 nt, Homo sapiens
  misc_RNA (1)...(19): siRNA sense strand
agaaguggcuggaaaugaa

SEQ ID NO: 1014748 - RNA, 19 nt, Homo sapiens
  misc_RNA (1)...(19): siRNA sense strand
ugaauuccaucuucugaaa

SEQ ID NO: 1014749 - RNA, 19 nt, Homo sapiens
  misc_RNA (1)...(19): siRNA sense strand
uuuaagagcuuuccugaga

SEQ ID NO: 1014750 - RNA, 19 nt, Homo sapiens
  misc_RNA (1)...(19): siRNA sense strand
caagcaccaucaagaaauu

SEQ ID NO: 1014751 - RNA, 19 nt, Homo sapiens
  misc_RNA (1)...(19): siRNA sense strand
ggacaaaccagaucaagca

SEQ ID NO: 1014752 - RNA, 19 nt, Homo sapiens
  misc_RNA (1)...(19): siRNA sense strand
gagcagaggcccugguuga

SEQ ID NO: 1014753 - RNA, 19 nt, Homo sapiens
  misc_RNA (1)...(19): siRNA sense strand
cgaaaacgauugcucuaua

SEQ ID NO: 1014754 - RNA, 19 nt, Homo sapiens
  misc_RNA (1)...(19): siRNA sense strand
ccaguucaguggccuguuu

SEQ ID NO: 1014755 - RNA, 19 nt, Homo sapiens
  misc_RNA (1)...(19): siRNA sense strand
gaucaucauuuccuugaag

SEQ ID NO: 1014756 - RNA, 19 nt, Homo sapiens
  misc_RNA (1)...(19): siRNA sense strand
uaagauaaagggacucaaa

SEQ ID NO: 1014757 - RNA, 19 nt, Homo sapiens
  misc_RNA (1)...(19): siRNA sense strand
gaaaacgauugcucuauau

SEQ ID NO: 1014758 - RNA, 19 nt, Homo sapiens
  misc_RNA (1)...(19): siRNA sense strand
gcaauuccgacuuaugaaa

SEQ ID NO: 1014759 - RNA, 19 nt, Homo sapiens
  misc_RNA (1)...(19): siRNA sense strand
gcagauccaccuccacaaa

SEQ ID NO: 1014760 - RNA, 19 nt, Homo sapiens
  misc_RNA (1)...(19): siRNA sense strand
ugaagaaccucuacaugag

SEQ ID NO: 1014761 - RNA, 19 nt, Homo sapiens
  misc_RNA (1)...(19): siRNA sense strand
cggcacgccuggugaagua

SEQ ID NO: 1014762 - RNA, 19 nt, Homo sapiens
  misc_RNA (1)...(19): siRNA sense strand
gugcguggaugugaugaua

SEQ ID NO: 1014763 - RNA, 19 nt, Homo sapiens
  misc_RNA (1)...(19): siRNA sense strand
gcaacugaacuacaagauu

SEQ ID NO: 1014764 - RNA, 19 nt, Homo sapiens
  misc_RNA (1)...(19): siRNA sense strand
gaugauagccagacucaag

SEQ ID NO: 1014765 - RNA, 19 nt, Homo sapiens
  misc_RNA (1)...(19): siRNA sense strand
ccugagaacuguugcuuuc

SEQ ID NO: 1014766 - RNA, 19 nt, Homo sapiens
  misc_RNA (1)...(19): siRNA sense strand
cgacaugguccaccugaaa

SEQ ID NO: 1014767 - RNA, 19 nt, Homo sapiens
  misc_RNA (1)...(19): siRNA sense strand
cugaagaaccucuacauga

SEQ ID NO: 1014768 - RNA, 19 nt, Homo sapiens
  misc_RNA (1)...(19): siRNA sense strand
gagaaguggcuggaaauga

SEQ ID NO: 1014769 - RNA, 19 nt, Homo sapiens
  misc_RNA (1)...(19): siRNA sense strand
gcauucaucuucccagcau

SEQ ID NO: 1014770 - RNA, 19 nt, Homo sapiens
  misc_RNA (1)...(19): siRNA sense strand
aacaugauacuaccucuua

SEQ ID NO: 1014771 - RNA, 19 nt, Homo sapiens
  misc_RNA (1)...(19): siRNA sense strand
gcacacagaccuggaaucu

SEQ ID NO: 1014772 - RNA, 19 nt, Homo sapiens
  misc_RNA (1)...(19): siRNA sense strand
ggaagcagaugugauucuc

SEQ ID NO: 1014773 - RNA, 19 nt, Homo sapiens
  misc_RNA (1)...(19): siRNA sense strand
caaaagccauaccuugaaa

SEQ ID NO: 1014774 - RNA, 19 nt, Homo sapiens
  misc_RNA (1)...(19): siRNA sense strand
gauaaagggacucaaacau

SEQ ID NO: 1014775 - RNA, 19 nt, Homo sapiens
  misc_RNA (1)...(19): siRNA sense strand
cgauugcucuauauggauu

SEQ ID NO: 1014776 - RNA, 19 nt, Homo sapiens
  misc_RNA (1)...(19): siRNA sense strand
cgagcucaaucaccuaaga

SEQ ID NO: 1014777 - RNA, 19 nt, Homo sapiens
  misc_RNA (1)...(19): siRNA sense strand
gaagaaccucuacaugagu

SEQ ID NO: 1014778 - RNA, 19 nt, Homo sapiens
  misc_RNA (1)...(19): siRNA sense strand
gggcaucccaaucuaugua

SEQ ID NO: 1014779 - RNA, 19 nt, Homo sapiens
  misc_RNA (1)...(19): siRNA sense strand
caugauacuaccucuuaua

SEQ ID NO: 1014780 - RNA, 19 nt, Homo sapiens
  misc_RNA (1)...(19): siRNA sense strand
ggacucaaacaugauacua

SEQ ID NO: 1014781 - RNA, 19 nt, Homo sapiens
  misc_RNA (1)...(19): siRNA sense strand
gagcuuuccugagaacugu

SEQ ID NO: 1014782 - RNA, 19 nt, Homo sapiens
  misc_RNA (1)...(19): siRNA sense strand
ggcaggaguucaggacaaa

SEQ ID NO: 1014783 - RNA, 19 nt, Homo sapiens
  misc_RNA (1)...(19): siRNA sense strand
uuucacaaauccagaaguu

SEQ ID NO: 1014784 - RNA, 19 nt, Homo sapiens
  misc_RNA (1)...(19): siRNA sense strand
ggugaaguaugagaucaga

SEQ ID NO: 1014785 - RNA, 19 nt, Homo sapiens
  misc_RNA (1)...(19): siRNA sense strand
uggccaagcucuaccugaa

SEQ ID NO: 1014786 - RNA, 19 nt, Homo sapiens
  misc_RNA (1)...(19): siRNA sense strand
cacccaggcugugagauuu

SEQ ID NO: 1014787 - RNA, 19 nt, Homo sapiens
  misc_RNA (1)...(19): siRNA sense strand
cuacaagauucaggcaauu

SEQ ID NO: 1014788 - RNA, 19 nt, Homo sapiens
  misc_RNA (1)...(19): siRNA sense strand
ucaguggccuguuucaaag

SEQ ID NO: 1014789 - RNA, 19 nt, Homo sapiens
  misc_RNA (1)...(19): siRNA sense strand
ccuaagaagaccaaagaaa

SEQ ID NO: 1014790 - RNA, 19 nt, Homo sapiens
  misc_RNA (1)...(19): siRNA sense strand
aagcagaaguuuggguuga

SEQ ID NO: 1014791 - RNA, 19 nt, Homo sapiens
  misc_RNA (1)...(19): siRNA sense strand
gcucucacuuucccagaug

SEQ ID NO: 1014792 - RNA, 19 nt, Homo sapiens
  misc_RNA (1)...(19): siRNA sense strand
gccaagcaccaucaagaaa

SEQ ID NO: 1014793 - RNA, 19 nt, Homo sapiens
  misc_RNA (1)...(19): siRNA sense strand
ccaggagaauacaacuuau

SEQ ID NO: 1014794 - RNA, 19 nt, Homo sapiens
  misc_RNA (1)...(19): siRNA sense strand
gccaagcucuaccugaaag

SEQ ID NO: 1014795 - RNA, 19 nt, Homo sapiens
  misc_RNA (1)...(19): siRNA sense strand
gacauaggacggagcuuga

SEQ ID NO: 1014796 - RNA, 19 nt, Homo sapiens
  misc_RNA (1)...(19): siRNA sense strand
ccaagcaccaucaagaaau

SEQ ID NO: 1014797 - RNA, 19 nt, Homo sapiens
  misc_RNA (1)...(19): siRNA sense strand
caccuaagaagaccaaaga

SEQ ID NO: 1014798 - RNA, 19 nt, Homo sapiens
  misc_RNA (1)...(19): siRNA sense strand
uucaggcaauuccgacuua

SEQ ID NO: 1014799 - RNA, 19 nt, Homo sapiens
  misc_RNA (1)...(19): siRNA sense strand
ggaucaucauuuccuugaa

SEQ ID NO: 1014800 - RNA, 19 nt, Homo sapiens
  misc_RNA (1)...(19): siRNA sense strand
caaaggugcguggauguga

SEQ ID NO: 1014801 - RNA, 19 nt, Homo sapiens
  misc_RNA (1)...(19): siRNA sense strand
auaaagggacucaaacaug

SEQ ID NO: 1014802 - RNA, 19 nt, Homo sapiens
  misc_RNA (1)...(19): siRNA sense strand
accaggagaauacaacuua

SEQ ID NO: 1014803 - RNA, 19 nt, Homo sapiens
  misc_RNA (1)...(19): siRNA sense strand
uuaagagcuuuccugagaa

SEQ ID NO: 1014804 - RNA, 19 nt, Homo sapiens
  misc_RNA (1)...(19): siRNA sense strand
caaccaaccgguggcguuu

SEQ ID NO: 1014805 - RNA, 19 nt, Homo sapiens
  misc_RNA (1)...(19): siRNA sense strand
gcaaaagccauaccuugaa

SEQ ID NO: 1014806 - RNA, 19 nt, Homo sapiens
  misc_RNA (1)...(19): siRNA sense strand
agauuugggcugcucuuua

SEQ ID NO: 1014807 - RNA, 19 nt, Homo sapiens
  misc_RNA (1)...(19): siRNA sense strand
gcucaaucaccuaagaaga

SEQ ID NO: 1014808 - RNA, 19 nt, Homo sapiens
  misc_RNA (1)...(19): siRNA sense strand
caagaacaaggacauccaa

SEQ ID NO: 1014809 - RNA, 19 nt, Homo sapiens
  misc_RNA (1)...(19): siRNA sense strand
ucacaaauccagaaguuuu

SEQ ID NO: 1014810 - RNA, 19 nt, Homo sapiens
  misc_RNA (1)...(19): siRNA sense strand
uaagagcuuuccugagaac

SEQ ID NO: 1014811 - RNA, 19 nt, Homo sapiens
  misc_RNA (1)...(19): siRNA sense strand
augaaaccgugaugacauu

SEQ ID NO: 1014812 - RNA, 19 nt, Homo sapiens
  misc_RNA (1)...(19): siRNA sense strand
uaacuuggaagaccuacug

SEQ ID NO: 1014813 - RNA, 19 nt, Homo sapiens
  misc_RNA (1)...(19): siRNA sense strand
gagcucaaucaccuaagaa

SEQ ID NO: 1014814 - RNA, 19 nt, Homo sapiens
  misc_RNA (1)...(19): siRNA sense strand
gcaaguggcaggaguucag

SEQ ID NO: 1014815 - RNA, 19 nt, Homo sapiens
  misc_RNA (1)...(19): siRNA sense strand
ccacggcccugaagaaccu

SEQ ID NO: 1014816 - RNA, 19 nt, Homo sapiens
  misc_RNA (1)...(19): siRNA sense strand
cuaagaagaccaaagaaaa

SEQ ID NO: 1014817 - RNA, 19 nt, Homo sapiens
  misc_RNA (1)...(19): siRNA sense strand
ccagaucaagcagaaguuu

SEQ ID NO: 1014818 - RNA, 19 nt, Homo sapiens
  misc_RNA (1)...(19): siRNA sense strand
aacgauugcucuauaugga

SEQ ID NO: 1014819 - RNA, 19 nt, Homo sapiens
  misc_RNA (1)...(19): siRNA sense strand
uaacuucuucccagaguca

SEQ ID NO: 1014820 - RNA, 19 nt, Homo sapiens
  misc_RNA (1)...(19): siRNA sense strand
gguggagauuaacuuggaa

SEQ ID NO: 1014821 - RNA, 19 nt, Homo sapiens
  misc_RNA (1)...(19): siRNA sense strand
caucuucccagcaucuuga

SEQ ID NO: 1014822 - RNA, 19 nt, Homo sapiens
  misc_RNA (1)...(19): siRNA sense strand
gaccacgucauccugcaaa

SEQ ID NO: 1014823 - RNA, 19 nt, Homo sapiens
  misc_RNA (1)...(19): siRNA sense strand
uggcaggaguucaggacaa

SEQ ID NO: 1014824 - RNA, 19 nt, Homo sapiens
  misc_RNA (1)...(19): siRNA sense strand
gagauuugggcugcucuuu

SEQ ID NO: 1014825 - RNA, 19 nt, Homo sapiens
  misc_RNA (1)...(19): siRNA sense strand
aggcaauuccgacuuauga

SEQ ID NO: 1014826 - RNA, 19 nt, Homo sapiens
  misc_RNA (1)...(19): siRNA sense strand
acuacaagauucaggcaau

SEQ ID NO: 1014827 - RNA, 19 nt, Homo sapiens
  misc_RNA (1)...(19): siRNA sense strand
ucuugcaacugaacuacaa

SEQ ID NO: 1014828 - RNA, 19 nt, Homo sapiens
  misc_RNA (1)...(19): siRNA sense strand
gcccacauccuccaguuca

SEQ ID NO: 1014829 - RNA, 19 nt, Homo sapiens
  misc_RNA (1)...(19): siRNA sense strand
uuuagugaauuccaucuuc

SEQ ID NO: 1014830 - RNA, 19 nt, Homo sapiens
  misc_RNA (1)...(19): siRNA sense strand
gguuauuuaccuuuaguga

SEQ ID NO: 1014831 - RNA, 19 nt, Homo sapiens
  misc_RNA (1)...(19): siRNA sense strand
gcgagaaguggcuggaaau

SEQ ID NO: 1014832 - RNA, 19 nt, Homo sapiens
  misc_RNA (1)...(19): siRNA sense strand
ugcgagaaguggcuggaaa

SEQ ID NO: 1014833 - RNA, 19 nt, Homo sapiens
  misc_RNA (1)...(19): siRNA sense strand
gggaccugcucucacuuuc

SEQ ID NO: 1014834 - RNA, 19 nt, Homo sapiens
  misc_RNA (1)...(19): siRNA sense strand
gcgacaugguccaccugaa

SEQ ID NO: 1014835 - RNA, 19 nt, Homo sapiens
  misc_RNA (1)...(19): siRNA sense strand
ggccaagcucuaccugaaa

SEQ ID NO: 1014836 - RNA, 19 nt, Homo sapiens
  misc_RNA (1)...(19): siRNA sense strand
ggaucgaccuguccuuuaa

SEQ ID NO: 1014837 - RNA, 19 nt, Homo sapiens
  misc_RNA (1)...(19): siRNA sense strand
gaacaaacgggacuauaug

SEQ ID NO: 1014838 - RNA, 19 nt, Homo sapiens
  misc_RNA (1)...(19): siRNA sense strand
gaaaggguauaggcaauau

SEQ ID NO: 1014839 - RNA, 19 nt, Homo sapiens
  misc_RNA (1)...(19): siRNA sense strand
ggaaacgcaugaacaucaa

SEQ ID NO: 1014840 - RNA, 19 nt, Homo sapiens
  misc_RNA (1)...(19): siRNA sense strand
uucaagaucugguaaauga

SEQ ID NO: 1014841 - RNA, 19 nt, Homo sapiens
  misc_RNA (1)...(19): siRNA sense strand
gagaaaggguauaggcaau

SEQ ID NO: 1014842 - RNA, 19 nt, Homo sapiens
  misc_RNA (1)...(19): siRNA sense strand
caaccugaguguccucuau

SEQ ID NO: 1014843 - RNA, 19 nt, Homo sapiens
  misc_RNA (1)...(19): siRNA sense strand
gggacuauaugaacacuuc

SEQ ID NO: 1014844 - RNA, 19 nt, Homo sapiens
  misc_RNA (1)...(19): siRNA sense strand
ucaaugaucugagagacuu

SEQ ID NO: 1014845 - RNA, 19 nt, Homo sapiens
  misc_RNA (1)...(19): siRNA sense strand
cagagaaccuggccuggau

SEQ ID NO: 1014846 - RNA, 19 nt, Homo sapiens
  misc_RNA (1)...(19): siRNA sense strand
aaacgggacuauaugaaca

SEQ ID NO: 1014847 - RNA, 19 nt, Homo sapiens
  misc_RNA (1)...(19): siRNA sense strand
gaacaucaagcccaagaag

SEQ ID NO: 1014848 - RNA, 19 nt, Homo sapiens
  misc_RNA (1)...(19): siRNA sense strand
caagcagaauacacuuuga

SEQ ID NO: 1014849 - RNA, 19 nt, Homo sapiens
  misc_RNA (1)...(19): siRNA sense strand
uuaaugaccugacuuccau

SEQ ID NO: 1014850 - RNA, 19 nt, Homo sapiens
  misc_RNA (1)...(19): siRNA sense strand
ccuaacaacuuucuucaac

SEQ ID NO: 1014851 - RNA, 19 nt, Homo sapiens
  misc_RNA (1)...(19): siRNA sense strand
gcauccacgucauucaaga

SEQ ID NO: 1014852 - RNA, 19 nt, Homo sapiens
  misc_RNA (1)...(19): siRNA sense strand
ggaccaagcagaauacacu

SEQ ID NO: 1014853 - RNA, 19 nt, Homo sapiens
  misc_RNA (1)...(19): siRNA sense strand
ggaggaagagaaaggguau

SEQ ID NO: 1014854 - RNA, 19 nt, Homo sapiens
  misc_RNA (1)...(19): siRNA sense strand
ccaagcagaauacacuuug

SEQ ID NO: 1014855 - RNA, 19 nt, Homo sapiens
  misc_RNA (1)...(19): siRNA sense strand
acaauguucucaaugaucu

SEQ ID NO: 1014856 - RNA, 19 nt, Homo sapiens
  misc_RNA (1)...(19): siRNA sense strand
uaacaacuuucuucaaccu

SEQ ID NO: 1014857 - RNA, 19 nt, Homo sapiens
  misc_RNA (1)...(19): siRNA sense strand
ucaaccagguggcuucaca

SEQ ID NO: 1014858 - RNA, 19 nt, Homo sapiens
  misc_RNA (1)...(19): siRNA sense strand
cauugacccuguccuaaca

SEQ ID NO: 1014859 - RNA, 19 nt, Homo sapiens
  misc_RNA (1)...(19): siRNA sense strand
ugaguguccucuaucuuca

SEQ ID NO: 1014860 - RNA, 19 nt, Homo sapiens
  misc_RNA (1)...(19): siRNA sense strand
cauucaagaucugguaaau

SEQ ID NO: 1014861 - RNA, 19 nt, Homo sapiens
  misc_RNA (1)...(19): siRNA sense strand
ccacgucauucaagaucug

SEQ ID NO: 1014862 - RNA, 19 nt, Homo sapiens
  misc_RNA (1)...(19): siRNA sense strand
uggaaacgcaugaacauca

SEQ ID NO: 1014863 - RNA, 19 nt, Homo sapiens
  misc_RNA (1)...(19): siRNA sense strand
guaaaugaggagccaagga

SEQ ID NO: 1014864 - RNA, 19 nt, Homo sapiens
  misc_RNA (1)...(19): siRNA sense strand
agaaaggguauaggcaaua

SEQ ID NO: 1014865 - RNA, 19 nt, Homo sapiens
  misc_RNA (1)...(19): siRNA sense strand
cagaagcauccacgucauu

SEQ ID NO: 1014866 - RNA, 19 nt, Homo sapiens
  misc_RNA (1)...(19): siRNA sense strand
gacccuguccuaacaacuu

SEQ ID NO: 1014867 - RNA, 19 nt, Homo sapiens
  misc_RNA (1)...(19): siRNA sense strand
ccucuugacuacuccuuca

SEQ ID NO: 1014868 - RNA, 19 nt, Homo sapiens
  misc_RNA (1)...(19): siRNA sense strand
cccuguggcugaauaacaa

SEQ ID NO: 1014869 - RNA, 19 nt, Homo sapiens
  misc_RNA (1)...(19): siRNA sense strand
ccaagaaggccuggaccaa

SEQ ID NO: 1014870 - RNA, 19 nt, Homo sapiens
  misc_RNA (1)...(19): siRNA sense strand
caaacgggacuauaugaac

SEQ ID NO: 1014871 - RNA, 19 nt, Homo sapiens
  misc_RNA (1)...(19): siRNA sense strand
gaagcauccacgucauuca

SEQ ID NO: 1014872 - RNA, 19 nt, Homo sapiens
  misc_RNA (1)...(19): siRNA sense strand
uggaucgaccuguccuuua

SEQ ID NO: 1014873 - RNA, 19 nt, Homo sapiens
  misc_RNA (1)...(19): siRNA sense strand
acaaacgggacuauaugaa

SEQ ID NO: 1014874 - RNA, 19 nt, Homo sapiens
  misc_RNA (1)...(19): siRNA sense strand
gaagucuggaaacgcauga

SEQ ID NO: 1014875 - RNA, 19 nt, Homo sapiens
  misc_RNA (1)...(19): siRNA sense strand
ugaccugacuuccauugac

SEQ ID NO: 1014876 - RNA, 19 nt, Homo sapiens
  misc_RNA (1)...(19): siRNA sense strand
gaauaagcuggcuguccuu

SEQ ID NO: 1014877 - RNA, 19 nt, Homo sapiens
  misc_RNA (1)...(19): siRNA sense strand
ucagaagcauccacgucau

SEQ ID NO: 1014878 - RNA, 19 nt, Homo sapiens
  misc_RNA (1)...(19): siRNA sense strand
ccacagcugaagucuggaa

SEQ ID NO: 1014879 - RNA, 19 nt, Homo sapiens
  misc_RNA (1)...(19): siRNA sense strand
aacaaacgggacuauauga

SEQ ID NO: 1014880 - RNA, 19 nt, Homo sapiens
  misc_RNA (1)...(19): siRNA sense strand
uaagcuggcuguccuuccu

SEQ ID NO: 1014881 - RNA, 19 nt, Homo sapiens
  misc_RNA (1)...(19): siRNA sense strand
gaucgaccuguccuuuaau

SEQ ID NO: 1014882 - RNA, 19 nt, Homo sapiens
  misc_RNA (1)...(19): siRNA sense strand
cagucccuguggcugaaua

SEQ ID NO: 1014883 - RNA, 19 nt, Homo sapiens
  misc_RNA (1)...(19): siRNA sense strand
gccuggaccaagcagaaua

SEQ ID NO: 1014884 - RNA, 19 nt, Homo sapiens
  misc_RNA (1)...(19): siRNA sense strand
uaugaacacuucgguacag

SEQ ID NO: 1014885 - RNA, 19 nt, Homo sapiens
  misc_RNA (1)...(19): siRNA sense strand
gccaaggacaggacuacga

SEQ ID NO: 1014886 - RNA, 19 nt, Homo sapiens
  misc_RNA (1)...(19): siRNA sense strand
gaggaagagaaaggguaua

SEQ ID NO: 1014887 - RNA, 19 nt, Homo sapiens
  misc_RNA (1)...(19): siRNA sense strand
acaggacuacgaccacuga

SEQ ID NO: 1014888 - RNA, 19 nt, Homo sapiens
  misc_RNA (1)...(19): siRNA sense strand
uaucaccacguucgacuuc

SEQ ID NO: 1014889 - RNA, 19 nt, Homo sapiens
  misc_RNA (1)...(19): siRNA sense strand
acccuguccuaacaacuuu

SEQ ID NO: 1014890 - RNA, 19 nt, Homo sapiens
  misc_RNA (1)...(19): siRNA sense strand
cuugacuacuccuucagaa

SEQ ID NO: 1014891 - RNA, 19 nt, Homo sapiens
  misc_RNA (1)...(19): siRNA sense strand
cagcugaagucuggaaacg

SEQ ID NO: 1014892 - RNA, 19 nt, Homo sapiens
  misc_RNA (1)...(19): siRNA sense strand
cgucauucaagaucuggua

SEQ ID NO: 1014893 - RNA, 19 nt, Homo sapiens
  misc_RNA (1)...(19): siRNA sense strand
ggacacaggugccaaauuc

SEQ ID NO: 1014894 - RNA, 19 nt, Homo sapiens
  misc_RNA (1)...(19): siRNA sense strand
gaaugucccuggaguacua

SEQ ID NO: 1014895 - RNA, 19 nt, Homo sapiens
  misc_RNA (1)...(19): siRNA sense strand
cgaccucagugucuacuuu

SEQ ID NO: 1014896 - RNA, 19 nt, Homo sapiens
  misc_RNA (1)...(19): siRNA sense strand
cauccgagcugcccucagu

SEQ ID NO: 1014897 - RNA, 19 nt, Homo sapiens
  misc_RNA (1)...(19): siRNA sense strand
guccuggccuuccucauga

SEQ ID NO: 1014898 - RNA, 19 nt, Homo sapiens
  misc_RNA (1)...(19): siRNA sense strand
gaacaugacgcugguagag

SEQ ID NO: 1014899 - RNA, 19 nt, Homo sapiens
  misc_RNA (1)...(19): siRNA sense strand
cgcaauaucugcccuaacu

SEQ ID NO: 1014900 - RNA, 19 nt, Homo sapiens
  misc_RNA (1)...(19): siRNA sense strand
gccaaauucuaccguggaa

SEQ ID NO: 1014901 - RNA, 19 nt, Homo sapiens
  misc_RNA (1)...(19): siRNA sense strand
gggaaucacccacguugug

SEQ ID NO: 1014902 - RNA, 19 nt, Homo sapiens
  misc_RNA (1)...(19): siRNA sense strand
gugcaggcccaccgcaaua

SEQ ID NO: 1014903 - RNA, 19 nt, Homo sapiens
  misc_RNA (1)...(19): siRNA sense strand
acacaggugccaaauucua

SEQ ID NO: 1014904 - RNA, 19 nt, Homo sapiens
  misc_RNA (1)...(19): siRNA sense strand
caauaucugcccuaacuca

SEQ ID NO: 1014905 - RNA, 19 nt, Homo sapiens
  misc_RNA (1)...(19): siRNA sense strand
cugccacacugaaccauau

SEQ ID NO: 1014906 - RNA, 19 nt, Homo sapiens
  misc_RNA (1)...(19): siRNA sense strand
ggacaagagcaagcugauc

SEQ ID NO: 1014907 - RNA, 19 nt, Homo sapiens
  misc_RNA (1)...(19): siRNA sense strand
gcugccacacugaaccaua

SEQ ID NO: 1014908 - RNA, 19 nt, Homo sapiens
  misc_RNA (1)...(19): siRNA sense strand
gguggacacaggugccaaa

SEQ ID NO: 1014909 - RNA, 19 nt, Homo sapiens
  misc_RNA (1)...(19): siRNA sense strand
uggccuuccucaugaucua

SEQ ID NO: 1014910 - RNA, 19 nt, Homo sapiens
  misc_RNA (1)...(19): siRNA sense strand
gccuguugcucgauacauc

SEQ ID NO: 1014911 - RNA, 19 nt, Homo sapiens
  misc_RNA (1)...(19): siRNA sense strand
cacugaaccauaucgauga

SEQ ID NO: 1014912 - RNA, 19 nt, Homo sapiens
  misc_RNA (1)...(19): siRNA sense strand
cgagcugcccucaguguuc

SEQ ID NO: 1014913 - RNA, 19 nt, Homo sapiens
  misc_RNA (1)...(19): siRNA sense strand
aagccgcucugccacacuu

SEQ ID NO: 1014914 - RNA, 19 nt, Homo sapiens
  misc_RNA (1)...(19): siRNA sense strand
gcaacaaguguguguauua

SEQ ID NO: 1014915 - RNA, 19 nt, Homo sapiens
  misc_RNA (1)...(19): siRNA sense strand
gcccauagcucugaacagu

SEQ ID NO: 1014916 - RNA, 19 nt, Homo sapiens
  misc_RNA (1)...(19): siRNA sense strand
caacaaguguguguauuac

SEQ ID NO: 1014917 - RNA, 19 nt, Homo sapiens
  misc_RNA (1)...(19): siRNA sense strand
gcacauggagccugaccuu

SEQ ID NO: 1014918 - RNA, 19 nt, Homo sapiens
  misc_RNA (1)...(19): siRNA sense strand
ggagaaccacggugugaug

SEQ ID NO: 1014919 - RNA, 19 nt, Homo sapiens
  misc_RNA (1)...(19): siRNA sense strand
ggaccuggcuguguacaac

SEQ ID NO: 1014920 - RNA, 19 nt, Homo sapiens
  misc_RNA (1)...(19): siRNA sense strand
gcaagaugcgggaguaugg

SEQ ID NO: 1014921 - RNA, 19 nt, Homo sapiens
  misc_RNA (1)...(19): siRNA sense strand
acaaccagcugcucaacau

SEQ ID NO: 1014922 - RNA, 19 nt, Homo sapiens
  misc_RNA (1)...(19): siRNA sense strand
gugguucccucgauucaug

SEQ ID NO: 1014923 - RNA, 19 nt, Homo sapiens
  misc_RNA (1)...(19): siRNA sense strand
cagcaggagugugggauug

SEQ ID NO: 1014924 - RNA, 19 nt, Homo sapiens
  misc_RNA (1)...(19): siRNA sense strand
gcagacggugcagaaauuu

SEQ ID NO: 1014925 - RNA, 19 nt, Homo sapiens
  misc_RNA (1)...(19): siRNA sense strand
gugccagggucaccaucua

SEQ ID NO: 1014926 - RNA, 19 nt, Homo sapiens
  misc_RNA (1)...(19): siRNA sense strand
ccacauugacuucaucuac

SEQ ID NO: 1014927 - RNA, 19 nt, Homo sapiens
  misc_RNA (1)...(19): siRNA sense strand
cauggagccugaccuuagu

SEQ ID NO: 1014928 - RNA, 19 nt, Homo sapiens
  misc_RNA (1)...(19): siRNA sense strand
ccaacaaggagacggaguu

SEQ ID NO: 1014929 - RNA, 19 nt, Homo sapiens
  misc_RNA (1)...(19): siRNA sense strand
acaaguguguguauuacca

SEQ ID NO: 1014930 - RNA, 19 nt, Homo sapiens
  misc_RNA (1)...(19): siRNA sense strand
agacggaguuccugcugau

SEQ ID NO: 1014931 - RNA, 19 nt, Homo sapiens
  misc_RNA (1)...(19): siRNA sense strand
cggaguuccugcugauuca

SEQ ID NO: 1014932 - RNA, 19 nt, Homo sapiens
  misc_RNA (1)...(19): siRNA sense strand
cuguggagcuggccauguu

SEQ ID NO: 1014933 - RNA, 19 nt, Homo sapiens
  misc_RNA (1)...(19): siRNA sense strand
ggaggagagggaaguggaa

SEQ ID NO: 1014934 - RNA, 19 nt, Homo sapiens
  misc_RNA (1)...(19): siRNA sense strand
ggaguggcugggacaacua

SEQ ID NO: 1014935 - RNA, 19 nt, Homo sapiens
  misc_RNA (1)...(19): siRNA sense strand
ggaguggaaccucuacuac

SEQ ID NO: 1014936 - RNA, 19 nt, Homo sapiens
  misc_RNA (1)...(19): siRNA sense strand
gcagcaggagugugggauu

SEQ ID NO: 1014937 - RNA, 19 nt, Homo sapiens
  misc_RNA (1)...(19): siRNA sense strand
gaauccagagucccgauca

SEQ ID NO: 1014938 - RNA, 19 nt, Homo sapiens
  misc_RNA (1)...(19): siRNA sense strand
ccaucuaccagguuccuuu

SEQ ID NO: 1014939 - RNA, 19 nt, Homo sapiens
  misc_RNA (1)...(19): siRNA sense strand
aggcgacgauggcuaagug

SEQ ID NO: 1014940 - RNA, 19 nt, Homo sapiens
  misc_RNA (1)...(19): siRNA sense strand
caacaaggagacggaguuc

SEQ ID NO: 1014941 - RNA, 19 nt, Homo sapiens
  misc_RNA (1)...(19): siRNA sense strand
gcagcuggaccuggaguau

SEQ ID NO: 1014942 - RNA, 19 nt, Homo sapiens
  misc_RNA (1)...(19): siRNA sense strand
caucauccagcgcaucuuc

SEQ ID NO: 1014943 - RNA, 19 nt, Homo sapiens
  misc_RNA (1)...(19): siRNA sense strand
gggccacauugacuucauc

SEQ ID NO: 1014944 - RNA, 19 nt, Homo sapiens
  misc_RNA (1)...(19): siRNA sense strand
cgcaacaaguguguguauu

SEQ ID NO: 1014945 - RNA, 19 nt, Homo sapiens
  misc_RNA (1)...(19): siRNA sense strand
ucaaguuggugcgccugaa

SEQ ID NO: 1014946 - RNA, 19 nt, Homo sapiens
  misc_RNA (1)...(19): siRNA sense strand
gcccuuugaggaccuguuu

SEQ ID NO: 1014947 - RNA, 19 nt, Homo sapiens
  misc_RNA (1)...(19): siRNA sense strand
acauggagccugaccuuag

SEQ ID NO: 1014948 - RNA, 19 nt, Homo sapiens
  misc_RNA (1)...(19): siRNA sense strand
cacaggaaccuccaucucu

SEQ ID NO: 1014949 - RNA, 19 nt, Homo sapiens
  misc_RNA (1)...(19): siRNA sense strand
agcgggaccuggcugugua

SEQ ID NO: 1014950 - RNA, 19 nt, Homo sapiens
  misc_RNA (1)...(19): siRNA sense strand
uggagcagauggagaacca

SEQ ID NO: 1014951 - RNA, 19 nt, Homo sapiens
  misc_RNA (1)...(19): siRNA sense strand
ggagagggaaguggaagag

SEQ ID NO: 1014952 - RNA, 19 nt, Homo sapiens
  misc_RNA (1)...(19): siRNA sense strand
ccgcaacaaguguguguau

SEQ ID NO: 1014953 - RNA, 19 nt, Homo sapiens
  misc_RNA (1)...(19): siRNA sense strand
cucaacaggugcagcagau

SEQ ID NO: 1014954 - RNA, 19 nt, Homo sapiens
  misc_RNA (1)...(19): siRNA sense strand
cgacgauggcuaaguggau

SEQ ID NO: 1014955 - RNA, 19 nt, Homo sapiens
  misc_RNA (1)...(19): siRNA sense strand
ggucaccaucuaccagguu

SEQ ID NO: 1014956 - RNA, 19 nt, Homo sapiens
  misc_RNA (1)...(19): siRNA sense strand
ggaaguagccuuaaagaua

SEQ ID NO: 1014957 - RNA, 19 nt, Homo sapiens
  misc_RNA (1)...(19): siRNA sense strand
gaaguagccuuaaagauaa

SEQ ID NO: 1014958 - RNA, 19 nt, Homo sapiens
  misc_RNA (1)...(19): siRNA sense strand
gaagaaagcccauucauga

SEQ ID NO: 1014959 - RNA, 19 nt, Homo sapiens
  misc_RNA (1)...(19): siRNA sense strand
caauaaagcugcuguguug

SEQ ID NO: 1014960 - RNA, 19 nt, Homo sapiens
  misc_RNA (1)...(19): siRNA sense strand
gcucuuauuucuacaguua

SEQ ID NO: 1014961 - RNA, 19 nt, Homo sapiens
  misc_RNA (1)...(19): siRNA sense strand
guaaggagaucaucaggaa

SEQ ID NO: 1014962 - RNA, 19 nt, Homo sapiens
  misc_RNA (1)...(19): siRNA sense strand
ggaggaaugucaccugaaa

SEQ ID NO: 1014963 - RNA, 19 nt, Homo sapiens
  misc_RNA (1)...(19): siRNA sense strand
ucacagagaugcugguaaa

SEQ ID NO: 1014964 - RNA, 19 nt, Homo sapiens
  misc_RNA (1)...(19): siRNA sense strand
ggacaauucuuugaccuaa

SEQ ID NO: 1014965 - RNA, 19 nt, Homo sapiens
  misc_RNA (1)...(19): siRNA sense strand
gcaggcaucuuacagacua

SEQ ID NO: 1014966 - RNA, 19 nt, Homo sapiens
  misc_RNA (1)...(19): siRNA sense strand
gaaguuauuugaaguugga

SEQ ID NO: 1014967 - RNA, 19 nt, Homo sapiens
  misc_RNA (1)...(19): siRNA sense strand
gacagaggcuauuucagua

SEQ ID NO: 1014968 - RNA, 19 nt, Homo sapiens
  misc_RNA (1)...(19): siRNA sense strand
gaaggaagcacuacaguuc

SEQ ID NO: 1014969 - RNA, 19 nt, Homo sapiens
  misc_RNA (1)...(19): siRNA sense strand
gaacugauuucugaugaug

SEQ ID NO: 1014970 - RNA, 19 nt, Homo sapiens
  misc_RNA (1)...(19): siRNA sense strand
ggaagaggaaguagccuua

SEQ ID NO: 1014971 - RNA, 19 nt, Homo sapiens
  misc_RNA (1)...(19): siRNA sense strand
aaacaggaaugucgaauca

SEQ ID NO: 1014972 - RNA, 19 nt, Homo sapiens
  misc_RNA (1)...(19): siRNA sense strand
ggacagaggcuauuucagu

SEQ ID NO: 1014973 - RNA, 19 nt, Homo sapiens
  misc_RNA (1)...(19): siRNA sense strand
caccugaaauuacuucuuu

SEQ ID NO: 1014974 - RNA, 19 nt, Homo sapiens
  misc_RNA (1)...(19): siRNA sense strand
uagagugugugcuguauuu

SEQ ID NO: 1014975 - RNA, 19 nt, Homo sapiens
  misc_RNA (1)...(19): siRNA sense strand
uaacacacgcuaccucuuu

SEQ ID NO: 1014976 - RNA, 19 nt, Homo sapiens
  misc_RNA (1)...(19): siRNA sense strand
ggaagaaagcccauucaug

SEQ ID NO: 1014977 - RNA, 19 nt, Homo sapiens
  misc_RNA (1)...(19): siRNA sense strand
aagcugcuguguugaaaua

SEQ ID NO: 1014978 - RNA, 19 nt, Homo sapiens
  misc_RNA (1)...(19): siRNA sense strand
ggaaugucaccugaaauua

SEQ ID NO: 1014979 - RNA, 19 nt, Homo sapiens
  misc_RNA (1)...(19): siRNA sense strand
cagaggcuauuucaguaua

SEQ ID NO: 1014980 - RNA, 19 nt, Homo sapiens
  misc_RNA (1)...(19): siRNA sense strand
ggcuuuccaucacuuauua

SEQ ID NO: 1014981 - RNA, 19 nt, Homo sapiens
  misc_RNA (1)...(19): siRNA sense strand
cauaugcucugaugacgaa

SEQ ID NO: 1014982 - RNA, 19 nt, Homo sapiens
  misc_RNA (1)...(19): siRNA sense strand
guuggaggaucaccuagua

SEQ ID NO: 1014983 - RNA, 19 nt, Homo sapiens
  misc_RNA (1)...(19): siRNA sense strand
cagagaugcugguaaaugu

SEQ ID NO: 1014984 - RNA, 19 nt, Homo sapiens
  misc_RNA (1)...(19): siRNA sense strand
agaaguagaugcuccaauc

SEQ ID NO: 1014985 - RNA, 19 nt, Homo sapiens
  misc_RNA (1)...(19): siRNA sense strand
gcacgggucuuuucaauuc

SEQ ID NO: 1014986 - RNA, 19 nt, Homo sapiens
  misc_RNA (1)...(19): siRNA sense strand
gcacuacaguucguaagga

SEQ ID NO: 1014987 - RNA, 19 nt, Homo sapiens
  misc_RNA (1)...(19): siRNA sense strand
acaggaaugucgaaucaaa

SEQ ID NO: 1014988 - RNA, 19 nt, Homo sapiens
  misc_RNA (1)...(19): siRNA sense strand
gcaagagaagacuaugaua

SEQ ID NO: 1014989 - RNA, 19 nt, Homo sapiens
  misc_RNA (1)...(19): siRNA sense strand
gagaucaucaggaauaaga

SEQ ID NO: 1014990 - RNA, 19 nt, Homo sapiens
  misc_RNA (1)...(19): siRNA sense strand
gaaguuggaggaucaccua

SEQ ID NO: 1014991 - RNA, 19 nt, Homo sapiens
  misc_RNA (1)...(19): siRNA sense strand
gcaaugagaagaccuugga

SEQ ID NO: 1014992 - RNA, 19 nt, Homo sapiens
  misc_RNA (1)...(19): siRNA sense strand
uaaagcugcuguguugaaa

SEQ ID NO: 1014993 - RNA, 19 nt, Homo sapiens
  misc_RNA (1)...(19): siRNA sense strand
cuacuggcuuccaaacuuu

SEQ ID NO: 1014994 - RNA, 19 nt, Homo sapiens
  misc_RNA (1)...(19): siRNA sense strand
caacccaacggcuuacuuu

SEQ ID NO: 1014995 - RNA, 19 nt, Homo sapiens
  misc_RNA (1)...(19): siRNA sense strand
cgagacagccacaguagaa

SEQ ID NO: 1014996 - RNA, 19 nt, Homo sapiens
  misc_RNA (1)...(19): siRNA sense strand
acaauucuuugaccuaaug

SEQ ID NO: 1014997 - RNA, 19 nt, Homo sapiens
  misc_RNA (1)...(19): siRNA sense strand
aaggagaucaucaggaaua

SEQ ID NO: 1014998 - RNA, 19 nt, Homo sapiens
  misc_RNA (1)...(19): siRNA sense strand
gaagaggaaguagccuuaa

SEQ ID NO: 1014999 - RNA, 19 nt, Homo sapiens
  misc_RNA (1)...(19): siRNA sense strand
ucacauggucuuugccuuu

SEQ ID NO: 1015000 - RNA, 19 nt, Homo sapiens
  misc_RNA (1)...(19): siRNA sense strand
gaaugucaccugaaauuac

SEQ ID NO: 1015001 - RNA, 19 nt, Homo sapiens
  misc_RNA (1)...(19): siRNA sense strand
gguaucgaauguacaggaa

SEQ ID NO: 1015002 - RNA, 19 nt, Homo sapiens
  misc_RNA (1)...(19): siRNA sense strand
ccuacuggcuuccaaacuu

SEQ ID NO: 1015003 - RNA, 19 nt, Homo sapiens
  misc_RNA (1)...(19): siRNA sense strand
uaucgaauguacaggaaga

SEQ ID NO: 1015004 - RNA, 19 nt, Homo sapiens
  misc_RNA (1)...(19): siRNA sense strand
gaaugggaaaccuaaaguu

SEQ ID NO: 1015005 - RNA, 19 nt, Homo sapiens
  misc_RNA (1)...(19): siRNA sense strand
aagaggaaguagccuuaaa

SEQ ID NO: 1015006 - RNA, 19 nt, Homo sapiens
  misc_RNA (1)...(19): siRNA sense strand
gaugcuggguaucgaaugu

SEQ ID NO: 1015007 - RNA, 19 nt, Homo sapiens
  misc_RNA (1)...(19): siRNA sense strand
gaggaaguagccuuaaaga

SEQ ID NO: 1015008 - RNA, 19 nt, Homo sapiens
  misc_RNA (1)...(19): siRNA sense strand
gaaguagaugcuccaauca

SEQ ID NO: 1015009 - RNA, 19 nt, Homo sapiens
  misc_RNA (1)...(19): siRNA sense strand
gaagcacuacaguucguaa

SEQ ID NO: 1015010 - RNA, 19 nt, Homo sapiens
  misc_RNA (1)...(19): siRNA sense strand
cgagggugcucuuauuucu

SEQ ID NO: 1015011 - RNA, 19 nt, Homo sapiens
  misc_RNA (1)...(19): siRNA sense strand
guccgagggugcucuuauu

SEQ ID NO: 1015012 - RNA, 19 nt, Homo sapiens
  misc_RNA (1)...(19): siRNA sense strand
uacggaaccucccgccuuu

SEQ ID NO: 1015013 - RNA, 19 nt, Homo sapiens
  misc_RNA (1)...(19): siRNA sense strand
caaggaaguauuugagaau

SEQ ID NO: 1015014 - RNA, 19 nt, Homo sapiens
  misc_RNA (1)...(19): siRNA sense strand
ugauauucauggacaauuc

SEQ ID NO: 1015015 - RNA, 19 nt, Homo sapiens
  misc_RNA (1)...(19): siRNA sense strand
caacauaugcucugaugac

SEQ ID NO: 1015016 - RNA, 19 nt, Homo sapiens
  misc_RNA (1)...(19): siRNA sense strand
augaauaucaggcaguuua

SEQ ID NO: 1015017 - RNA, 19 nt, Homo sapiens
  misc_RNA (1)...(19): siRNA sense strand
guauagagugugugcugua

SEQ ID NO: 1015018 - RNA, 19 nt, Homo sapiens
  misc_RNA (1)...(19): siRNA sense strand
ucuuugaccuaaugaaguu

SEQ ID NO: 1015019 - RNA, 19 nt, Homo sapiens
  misc_RNA (1)...(19): siRNA sense strand
caagcagacuaucgagaca

SEQ ID NO: 1015020 - RNA, 19 nt, Homo sapiens
  misc_RNA (1)...(19): siRNA sense strand
gagaaugggaaaccuaaag

SEQ ID NO: 1015021 - RNA, 19 nt, Homo sapiens
  misc_RNA (1)...(19): siRNA sense strand
augacgaacugauuucuga

SEQ ID NO: 1015022 - RNA, 19 nt, Homo sapiens
  misc_RNA (1)...(19): siRNA sense strand
ggaaugucgaaucaaauau

SEQ ID NO: 1015023 - RNA, 19 nt, Homo sapiens
  misc_RNA (1)...(19): siRNA sense strand
aggaaugucgaaucaaaua

SEQ ID NO: 1015024 - RNA, 19 nt, Homo sapiens
  misc_RNA (1)...(19): siRNA sense strand
cccaacggcuuacuuucaa

SEQ ID NO: 1015025 - RNA, 19 nt, Homo sapiens
  misc_RNA (1)...(19): siRNA sense strand
gaccuaaugaaguuauuug

SEQ ID NO: 1015026 - RNA, 19 nt, Homo sapiens
  misc_RNA (1)...(19): siRNA sense strand
ucagaggguucucgcuuca

SEQ ID NO: 1015027 - RNA, 19 nt, Homo sapiens
  misc_RNA (1)...(19): siRNA sense strand
gaagcagaaggaagcacua

SEQ ID NO: 1015028 - RNA, 19 nt, Homo sapiens
  misc_RNA (1)...(19): siRNA sense strand
agaagaccuuggagcacua

SEQ ID NO: 1015029 - RNA, 19 nt, Homo sapiens
  misc_RNA (1)...(19): siRNA sense strand
ugggaaaccuaaaguugau

SEQ ID NO: 1015030 - RNA, 19 nt, Homo sapiens
  misc_RNA (1)...(19): siRNA sense strand
gaauaagaucagagccauu

SEQ ID NO: 1015031 - RNA, 19 nt, Homo sapiens
  misc_RNA (1)...(19): siRNA sense strand
caucaggaauaagaucaga

SEQ ID NO: 1015032 - RNA, 19 nt, Homo sapiens
  misc_RNA (1)...(19): siRNA sense strand
gcugcuguguugaaauaug

SEQ ID NO: 1015033 - RNA, 19 nt, Homo sapiens
  misc_RNA (1)...(19): siRNA sense strand
acaguuacccugcaguuug

SEQ ID NO: 1015034 - RNA, 19 nt, Homo sapiens
  misc_RNA (1)...(19): siRNA sense strand
gacaauucuuugaccuaau

SEQ ID NO: 1015035 - RNA, 19 nt, Homo sapiens
  misc_RNA (1)...(19): siRNA sense strand
gguucucgcuucagcacaa

SEQ ID NO: 1015036 - RNA, 19 nt, Homo sapiens
  misc_RNA (1)...(19): siRNA sense strand
cagacuauuucaccuucaa

SEQ ID NO: 1015037 - RNA, 19 nt, Homo sapiens
  misc_RNA (1)...(19): siRNA sense strand
gguguaugaugccuguaug

SEQ ID NO: 1015038 - RNA, 19 nt, Homo sapiens
  misc_RNA (1)...(19): siRNA sense strand
aaaggaaggacgacuggaa

SEQ ID NO: 1015039 - RNA, 19 nt, Homo sapiens
  misc_RNA (1)...(19): siRNA sense strand
cugcuguguugaaauauga

SEQ ID NO: 1015040 - RNA, 19 nt, Homo sapiens
  misc_RNA (1)...(19): siRNA sense strand
caguuacccugcaguuugu

SEQ ID NO: 1015041 - RNA, 19 nt, Homo sapiens
  misc_RNA (1)...(19): siRNA sense strand
gaaauuagacagguuuacg

SEQ ID NO: 1015042 - RNA, 19 nt, Homo sapiens
  misc_RNA (1)...(19): siRNA sense strand
uauagagugugugcuguau

SEQ ID NO: 1015043 - RNA, 19 nt, Homo sapiens
  misc_RNA (1)...(19): siRNA sense strand
acgaacugauuucugauga

SEQ ID NO: 1015044 - RNA, 19 nt, Homo sapiens
  misc_RNA (1)...(19): siRNA sense strand
ccaagaugcuggguaucga

SEQ ID NO: 1015045 - RNA, 19 nt, Homo sapiens
  misc_RNA (1)...(19): siRNA sense strand
ggaaaccuaaaguugaugu

SEQ ID NO: 1015046 - RNA, 19 nt, Homo sapiens
  misc_RNA (1)...(19): siRNA sense strand
aggaaugucaccugaaauu

SEQ ID NO: 1015047 - RNA, 19 nt, Homo sapiens
  misc_RNA (1)...(19): siRNA sense strand
ggcaagagaagacuaugau

SEQ ID NO: 1015048 - RNA, 19 nt, Homo sapiens
  misc_RNA (1)...(19): siRNA sense strand
ccagcaguuucucugugua

SEQ ID NO: 1015049 - RNA, 19 nt, Homo sapiens
  misc_RNA (1)...(19): siRNA sense strand
uaucgagacagccacagua

SEQ ID NO: 1015050 - RNA, 19 nt, Homo sapiens
  misc_RNA (1)...(19): siRNA sense strand
aauaagaucagagccauug

SEQ ID NO: 1015051 - RNA, 19 nt, Homo sapiens
  misc_RNA (1)...(19): siRNA sense strand
acugauuucugaugaugaa

SEQ ID NO: 1015052 - RNA, 19 nt, Homo sapiens
  misc_RNA (1)...(19): siRNA sense strand
ucaugaauaucaggcaguu

SEQ ID NO: 1015053 - RNA, 19 nt, Homo sapiens
  misc_RNA (1)...(19): siRNA sense strand
acaauaaagcugcuguguu

SEQ ID NO: 1015054 - RNA, 19 nt, Homo sapiens
  misc_RNA (1)...(19): siRNA sense strand
ccacaggcuuuccaucacu

SEQ ID NO: 1015055 - RNA, 19 nt, Homo sapiens
  misc_RNA (1)...(19): siRNA sense strand
gacauuaggaaauuagaca

SEQ ID NO: 1015056 - RNA, 19 nt, Homo sapiens
  misc_RNA (1)...(19): siRNA sense strand
gcacacugcugaacugaag

SEQ ID NO: 1015057 - RNA, 19 nt, Homo sapiens
  misc_RNA (1)...(19): siRNA sense strand
gugaagaauuccagcugaa

SEQ ID NO: 1015058 - RNA, 19 nt, Homo sapiens
  misc_RNA (1)...(19): siRNA sense strand
gcaaagugccgggaucaug

SEQ ID NO: 1015059 - RNA, 19 nt, Homo sapiens
  misc_RNA (1)...(19): siRNA sense strand
caaguccugugcaucauca

SEQ ID NO: 1015060 - RNA, 19 nt, Homo sapiens
  misc_RNA (1)...(19): siRNA sense strand
cuaccagugugaagaauuc

SEQ ID NO: 1015061 - RNA, 19 nt, Homo sapiens
  misc_RNA (1)...(19): siRNA sense strand
cauccuguuccucaaauua

SEQ ID NO: 1015062 - RNA, 19 nt, Homo sapiens
  misc_RNA (1)...(19): siRNA sense strand
gaagugauggagcaaagug

SEQ ID NO: 1015063 - RNA, 19 nt, Homo sapiens
  misc_RNA (1)...(19): siRNA sense strand
gaagaauuccagcugaaca

SEQ ID NO: 1015064 - RNA, 19 nt, Homo sapiens
  misc_RNA (1)...(19): siRNA sense strand
caaagugccgggaucaugu

SEQ ID NO: 1015065 - RNA, 19 nt, Homo sapiens
  misc_RNA (1)...(19): siRNA sense strand
guucuugcuuccaggcuuu

SEQ ID NO: 1015066 - RNA, 19 nt, Homo sapiens
  misc_RNA (1)...(19): siRNA sense strand
gaacguucaagacaugugu

SEQ ID NO: 1015067 - RNA, 19 nt, Homo sapiens
  misc_RNA (1)...(19): siRNA sense strand
cugcugaacugaaggagau

SEQ ID NO: 1015068 - RNA, 19 nt, Homo sapiens
  misc_RNA (1)...(19): siRNA sense strand
gcaacaccccucuuuguaa

SEQ ID NO: 1015069 - RNA, 19 nt, Homo sapiens
  misc_RNA (1)...(19): siRNA sense strand
gaaagaagugauggagcaa

SEQ ID NO: 1015070 - RNA, 19 nt, Homo sapiens
  misc_RNA (1)...(19): siRNA sense strand
gaauugcacggugaacguu

SEQ ID NO: 1015071 - RNA, 19 nt, Homo sapiens
  misc_RNA (1)...(19): siRNA sense strand
ccgcaaguccugugcauca

SEQ ID NO: 1015072 - RNA, 19 nt, Homo sapiens
  misc_RNA (1)...(19): siRNA sense strand
gagcaaagugccgggauca

SEQ ID NO: 1015073 - RNA, 19 nt, Homo sapiens
  misc_RNA (1)...(19): siRNA sense strand
aagaagugauggagcaaag

SEQ ID NO: 1015074 - RNA, 19 nt, Homo sapiens
  misc_RNA (1)...(19): siRNA sense strand
gggaucauguaccgcaagu

SEQ ID NO: 1015075 - RNA, 19 nt, Homo sapiens
  misc_RNA (1)...(19): siRNA sense strand
ccaccauccuguuccucaa

SEQ ID NO: 1015076 - RNA, 19 nt, Homo sapiens
  misc_RNA (1)...(19): siRNA sense strand
aaagugccgggaucaugua

SEQ ID NO: 1015077 - RNA, 19 nt, Homo sapiens
  misc_RNA (1)...(19): siRNA sense strand
gcaaguccugugcaucauc

SEQ ID NO: 1015078 - RNA, 19 nt, Homo sapiens
  misc_RNA (1)...(19): siRNA sense strand
gcuaccagugugaagaauu

SEQ ID NO: 1015079 - RNA, 19 nt, Homo sapiens
  misc_RNA (1)...(19): siRNA sense strand
aauuccagcugaacaacga

SEQ ID NO: 1015080 - RNA, 19 nt, Homo sapiens
  misc_RNA (1)...(19): siRNA sense strand
gcaccaccauccuguuccu

SEQ ID NO: 1015081 - RNA, 19 nt, Homo sapiens
  misc_RNA (1)...(19): siRNA sense strand
gugcuaccagugugaagaa

SEQ ID NO: 1015082 - RNA, 19 nt, Homo sapiens
  misc_RNA (1)...(19): siRNA sense strand
ccauccuguuccucaaauu

SEQ ID NO: 1015083 - RNA, 19 nt, Homo sapiens
  misc_RNA (1)...(19): siRNA sense strand
gguggugugucuucaguua

SEQ ID NO: 1015084 - RNA, 19 nt, Homo sapiens
  misc_RNA (1)...(19): siRNA sense strand
agacaaugcucaagaguau

SEQ ID NO: 1015085 - RNA, 19 nt, Homo sapiens
  misc_RNA (1)...(19): siRNA sense strand
caaacugcauaucauaaga

SEQ ID NO: 1015086 - RNA, 19 nt, Homo sapiens
  misc_RNA (1)...(19): siRNA sense strand
uaaagaagaaccagacaau

SEQ ID NO: 1015087 - RNA, 19 nt, Homo sapiens
  misc_RNA (1)...(19): siRNA sense strand
gaacccaggcuuucagcuu

SEQ ID NO: 1015088 - RNA, 19 nt, Homo sapiens
  misc_RNA (1)...(19): siRNA sense strand
ccaaguguguugcuuccuu

SEQ ID NO: 1015089 - RNA, 19 nt, Homo sapiens
  misc_RNA (1)...(19): siRNA sense strand
gcaguugaacccaggcuuu

SEQ ID NO: 1015090 - RNA, 19 nt, Homo sapiens
  misc_RNA (1)...(19): siRNA sense strand
gggccaaacugcauaucau

SEQ ID NO: 1015091 - RNA, 19 nt, Homo sapiens
  misc_RNA (1)...(19): siRNA sense strand
gaaaauugguggugugucu

SEQ ID NO: 1015092 - RNA, 19 nt, Homo sapiens
  misc_RNA (1)...(19): siRNA sense strand
ggccaaacugcauaucaua

SEQ ID NO: 1015093 - RNA, 19 nt, Homo sapiens
  misc_RNA (1)...(19): siRNA sense strand
gcaggagcuucuggacaaa

SEQ ID NO: 1015094 - RNA, 19 nt, Homo sapiens
  misc_RNA (1)...(19): siRNA sense strand
gccaaacugcauaucauaa

SEQ ID NO: 1015095 - RNA, 19 nt, Homo sapiens
  misc_RNA (1)...(19): siRNA sense strand
cagacaaugcucaagagua

SEQ ID NO: 1015096 - RNA, 19 nt, Homo sapiens
  misc_RNA (1)...(19): siRNA sense strand
guuaaugagagaccuauug

SEQ ID NO: 1015097 - RNA, 19 nt, Homo sapiens
  misc_RNA (1)...(19): siRNA sense strand
aacccaggcuuucagcuuu

SEQ ID NO: 1015098 - RNA, 19 nt, Homo sapiens
  misc_RNA (1)...(19): siRNA sense strand
uuccagcuguugcuauuaa

SEQ ID NO: 1015099 - RNA, 19 nt, Homo sapiens
  misc_RNA (1)...(19): siRNA sense strand
agcaggagcuucuggacaa

SEQ ID NO: 1015100 - RNA, 19 nt, Homo sapiens
  misc_RNA (1)...(19): siRNA sense strand
gagcuucuggacaaaauua

SEQ ID NO: 1015101 - RNA, 19 nt, Homo sapiens
  misc_RNA (1)...(19): siRNA sense strand
gaucuacucagcucuucug

SEQ ID NO: 1015102 - RNA, 19 nt, Homo sapiens
  misc_RNA (1)...(19): siRNA sense strand
gcucaagaguauggaugug

SEQ ID NO: 1015103 - RNA, 19 nt, Homo sapiens
  misc_RNA (1)...(19): siRNA sense strand
gauggugaauguggcaaag

SEQ ID NO: 1015104 - RNA, 19 nt, Homo sapiens
  misc_RNA (1)...(19): siRNA sense strand
ccaaacugcauaucauaag

SEQ ID NO: 1015105 - RNA, 19 nt, Homo sapiens
  misc_RNA (1)...(19): siRNA sense strand
uaucauaagacaggaucua

SEQ ID NO: 1015106 - RNA, 19 nt, Homo sapiens
  misc_RNA (1)...(19): siRNA sense strand
cgaugcaucaccagacauu

SEQ ID NO: 1015107 - RNA, 19 nt, Homo sapiens
  misc_RNA (1)...(19): siRNA sense strand
aagaagaaccagacaaugc

SEQ ID NO: 1015108 - RNA, 19 nt, Homo sapiens
  misc_RNA (1)...(19): siRNA sense strand
cauaagacaggaucuacuc

SEQ ID NO: 1015109 - RNA, 19 nt, Homo sapiens
  misc_RNA (1)...(19): siRNA sense strand
uggugugucuucaguuaau

SEQ ID NO: 1015110 - RNA, 19 nt, Homo sapiens
  misc_RNA (1)...(19): siRNA sense strand
aagaaaaccugcacaaacu

SEQ ID NO: 1015111 - RNA, 19 nt, Homo sapiens
  misc_RNA (1)...(19): siRNA sense strand
cacgaugcaucaccagaca

SEQ ID NO: 1015112 - RNA, 19 nt, Homo sapiens
  misc_RNA (1)...(19): siRNA sense strand
uauaagggccaaacugcau

SEQ ID NO: 1015113 - RNA, 19 nt, Homo sapiens
  misc_RNA (1)...(19): siRNA sense strand
aaagaagaaccagacaaug

SEQ ID NO: 1015114 - RNA, 19 nt, Homo sapiens
  misc_RNA (1)...(19): siRNA sense strand
ggauggugaauguggcaaa

SEQ ID NO: 1015115 - RNA, 19 nt, Homo sapiens
  misc_RNA (1)...(19): siRNA sense strand
gccaccuccucccaagaaa

SEQ ID NO: 1015116 - RNA, 19 nt, Homo sapiens
  misc_RNA (1)...(19): siRNA sense strand
guguguugcuuccuucagu

SEQ ID NO: 1015117 - RNA, 19 nt, Homo sapiens
  misc_RNA (1)...(19): siRNA sense strand
caagaaaaccugcacaaac

SEQ ID NO: 1015118 - RNA, 19 nt, Homo sapiens
  misc_RNA (1)...(19): siRNA sense strand
uuaaagaagaaccagacaa

SEQ ID NO: 1015119 - RNA, 19 nt, Homo sapiens
  misc_RNA (1)...(19): siRNA sense strand
gcuguugcuauuaagguuu

SEQ ID NO: 1015120 - RNA, 19 nt, Homo sapiens
  misc_RNA (1)...(19): siRNA sense strand
caucaucuggcccaagugu

SEQ ID NO: 1015121 - RNA, 19 nt, Homo sapiens
  misc_RNA (1)...(19): siRNA sense strand
gguggugugucuucaguua

SEQ ID NO: 1015122 - RNA, 19 nt, Homo sapiens
  misc_RNA (1)...(19): siRNA sense strand
agacaaugcucaagaguau

SEQ ID NO: 1015123 - RNA, 19 nt, Homo sapiens
  misc_RNA (1)...(19): siRNA sense strand
caaacugcauaucauaaga

SEQ ID NO: 1015124 - RNA, 19 nt, Homo sapiens
  misc_RNA (1)...(19): siRNA sense strand
uaaagaagaaccagacaau

SEQ ID NO: 1015125 - RNA, 19 nt, Homo sapiens
  misc_RNA (1)...(19): siRNA sense strand
gaacccaggcuuucagcuu

SEQ ID NO: 1015126 - RNA, 19 nt, Homo sapiens
  misc_RNA (1)...(19): siRNA sense strand
ccaaguguguugcuuccuu

SEQ ID NO: 1015127 - RNA, 19 nt, Homo sapiens
  misc_RNA (1)...(19): siRNA sense strand
gcaguugaacccaggcuuu

SEQ ID NO: 1015128 - RNA, 19 nt, Homo sapiens
  misc_RNA (1)...(19): siRNA sense strand
gggccaaacugcauaucau

SEQ ID NO: 1015129 - RNA, 19 nt, Homo sapiens
  misc_RNA (1)...(19): siRNA sense strand
gaaaauugguggugugucu

SEQ ID NO: 1015130 - RNA, 19 nt, Homo sapiens
  misc_RNA (1)...(19): siRNA sense strand
ggccaaacugcauaucaua

SEQ ID NO: 1015131 - RNA, 19 nt, Homo sapiens
  misc_RNA (1)...(19): siRNA sense strand
gcaggagcuucuggacaaa

SEQ ID NO: 1015132 - RNA, 19 nt, Homo sapiens
  misc_RNA (1)...(19): siRNA sense strand
gccaaacugcauaucauaa

SEQ ID NO: 1015133 - RNA, 19 nt, Homo sapiens
  misc_RNA (1)...(19): siRNA sense strand
cagacaaugcucaagagua

SEQ ID NO: 1015134 - RNA, 19 nt, Homo sapiens
  misc_RNA (1)...(19): siRNA sense strand
guuaaugagagaccuauug

SEQ ID NO: 1015135 - RNA, 19 nt, Homo sapiens
  misc_RNA (1)...(19): siRNA sense strand
aacccaggcuuucagcuuu

SEQ ID NO: 1015136 - RNA, 19 nt, Homo sapiens
  misc_RNA (1)...(19): siRNA sense strand
uuccagcuguugcuauuaa

SEQ ID NO: 1015137 - RNA, 19 nt, Homo sapiens
  misc_RNA (1)...(19): siRNA sense strand
agcaggagcuucuggacaa

SEQ ID NO: 1015138 - RNA, 19 nt, Homo sapiens
  misc_RNA (1)...(19): siRNA sense strand
gagcuucuggacaaaauua

SEQ ID NO: 1015139 - RNA, 19 nt, Homo sapiens
  misc_RNA (1)...(19): siRNA sense strand
gaucuacucagcucuucug

SEQ ID NO: 1015140 - RNA, 19 nt, Homo sapiens
  misc_RNA (1)...(19): siRNA sense strand
gcucaagaguauggaugug

SEQ ID NO: 1015141 - RNA, 19 nt, Homo sapiens
  misc_RNA (1)...(19): siRNA sense strand
gauggugaauguggcaaag

SEQ ID NO: 1015142 - RNA, 19 nt, Homo sapiens
  misc_RNA (1)...(19): siRNA sense strand
ccaaacugcauaucauaag

SEQ ID NO: 1015143 - RNA, 19 nt, Homo sapiens
  misc_RNA (1)...(19): siRNA sense strand
uaucauaagacaggaucua

SEQ ID NO: 1015144 - RNA, 19 nt, Homo sapiens
  misc_RNA (1)...(19): siRNA sense strand
cgaugcaucaccagacauu

SEQ ID NO: 1015145 - RNA, 19 nt, Homo sapiens
  misc_RNA (1)...(19): siRNA sense strand
aagaagaaccagacaaugc

SEQ ID NO: 1015146 - RNA, 19 nt, Homo sapiens
  misc_RNA (1)...(19): siRNA sense strand
cauaagacaggaucuacuc

SEQ ID NO: 1015147 - RNA, 19 nt, Homo sapiens
  misc_RNA (1)...(19): siRNA sense strand
uggugugucuucaguuaau

SEQ ID NO: 1015148 - RNA, 19 nt, Homo sapiens
  misc_RNA (1)...(19): siRNA sense strand
aagaaaaccugcacaaacu

SEQ ID NO: 1015149 - RNA, 19 nt, Homo sapiens
  misc_RNA (1)...(19): siRNA sense strand
cacgaugcaucaccagaca

SEQ ID NO: 1015150 - RNA, 19 nt, Homo sapiens
  misc_RNA (1)...(19): siRNA sense strand
uauaagggccaaacugcau

SEQ ID NO: 1015151 - RNA, 19 nt, Homo sapiens
  misc_RNA (1)...(19): siRNA sense strand
aaagaagaaccagacaaug

SEQ ID NO: 1015152 - RNA, 19 nt, Homo sapiens
  misc_RNA (1)...(19): siRNA sense strand
ggauggugaauguggcaaa

SEQ ID NO: 1015153 - RNA, 19 nt, Homo sapiens
  misc_RNA (1)...(19): siRNA sense strand
gccaccuccucccaagaaa

SEQ ID NO: 1015154 - RNA, 19 nt, Homo sapiens
  misc_RNA (1)...(19): siRNA sense strand
guguguugcuuccuucagu

SEQ ID NO: 1015155 - RNA, 19 nt, Homo sapiens
  misc_RNA (1)...(19): siRNA sense strand
caagaaaaccugcacaaac

SEQ ID NO: 1015156 - RNA, 19 nt, Homo sapiens
  misc_RNA (1)...(19): siRNA sense strand
uuaaagaagaaccagacaa

SEQ ID NO: 1015157 - RNA, 19 nt, Homo sapiens
  misc_RNA (1)...(19): siRNA sense strand
gcuguugcuauuaagguuu

SEQ ID NO: 1015158 - RNA, 19 nt, Homo sapiens
  misc_RNA (1)...(19): siRNA sense strand
caucaucuggcccaagugu

SEQ ID NO: 1015159 - RNA, 19 nt, Homo sapiens
  misc_RNA (1)...(19): siRNA sense strand
ggaaacagcuaauugagaa

SEQ ID NO: 1015160 - RNA, 19 nt, Homo sapiens
  misc_RNA (1)...(19): siRNA sense strand
gcacagggauggauucaaa

SEQ ID NO: 1015161 - RNA, 19 nt, Homo sapiens
  misc_RNA (1)...(19): siRNA sense strand
ggaaggaacuguacaacaa

SEQ ID NO: 1015162 - RNA, 19 nt, Homo sapiens
  misc_RNA (1)...(19): siRNA sense strand
gaagauugaugaugaaguu

SEQ ID NO: 1015163 - RNA, 19 nt, Homo sapiens
  misc_RNA (1)...(19): siRNA sense strand
gaaagaacauugagaacau

SEQ ID NO: 1015164 - RNA, 19 nt, Homo sapiens
  misc_RNA (1)...(19): siRNA sense strand
caaauuagcucgcuuagag

SEQ ID NO: 1015165 - RNA, 19 nt, Homo sapiens
  misc_RNA (1)...(19): siRNA sense strand
gaacaugucucagccagaa

SEQ ID NO: 1015166 - RNA, 19 nt, Homo sapiens
  misc_RNA (1)...(19): siRNA sense strand
caaccaagauaaagaacua

SEQ ID NO: 1015167 - RNA, 19 nt, Homo sapiens
  misc_RNA (1)...(19): siRNA sense strand
ccaaucaacuggagaugua

SEQ ID NO: 1015168 - RNA, 19 nt, Homo sapiens
  misc_RNA (1)...(19): siRNA sense strand
gaaagagcguccugaccua

SEQ ID NO: 1015169 - RNA, 19 nt, Homo sapiens
  misc_RNA (1)...(19): siRNA sense strand
ggaagaaugucccaucugu

SEQ ID NO: 1015170 - RNA, 19 nt, Homo sapiens
  misc_RNA (1)...(19): siRNA sense strand
ccaagcaacuucuacguaa

SEQ ID NO: 1015171 - RNA, 19 nt, Homo sapiens
  misc_RNA (1)...(19): siRNA sense strand
gcucugcgcugacuucaaa

SEQ ID NO: 1015172 - RNA, 19 nt, Homo sapiens
  misc_RNA (1)...(19): siRNA sense strand
ggaggaagcagaauuagaa

SEQ ID NO: 1015173 - RNA, 19 nt, Homo sapiens
  misc_RNA (1)...(19): siRNA sense strand
gaucagagcuaagguguca

SEQ ID NO: 1015174 - RNA, 19 nt, Homo sapiens
  misc_RNA (1)...(19): siRNA sense strand
caagauuuaucgcacauuu

SEQ ID NO: 1015175 - RNA, 19 nt, Homo sapiens
  misc_RNA (1)...(19): siRNA sense strand
gauagugacuuugaagaaa

SEQ ID NO: 1015176 - RNA, 19 nt, Homo sapiens
  misc_RNA (1)...(19): siRNA sense strand
caugauagcugcaaagcaa

SEQ ID NO: 1015177 - RNA, 19 nt, Homo sapiens
  misc_RNA (1)...(19): siRNA sense strand
gcagaaggaugauaaagag

SEQ ID NO: 1015178 - RNA, 19 nt, Homo sapiens
  misc_RNA (1)...(19): siRNA sense strand
gacuauggcuucaaacuga

SEQ ID NO: 1015179 - RNA, 19 nt, Homo sapiens
  misc_RNA (1)...(19): siRNA sense strand
ggaagacucugauguggau

SEQ ID NO: 1015180 - RNA, 19 nt, Homo sapiens
  misc_RNA (1)...(19): siRNA sense strand
ugagagaucuuccaaauac

SEQ ID NO: 1015181 - RNA, 19 nt, Homo sapiens
  misc_RNA (1)...(19): siRNA sense strand
caacacagcagaaggauga

SEQ ID NO: 1015182 - RNA, 19 nt, Homo sapiens
  misc_RNA (1)...(19): siRNA sense strand
ucacugaacucacggcaaa

SEQ ID NO: 1015183 - RNA, 19 nt, Homo sapiens
  misc_RNA (1)...(19): siRNA sense strand
gcuuauaucugaaggagaa

SEQ ID NO: 1015184 - RNA, 19 nt, Homo sapiens
  misc_RNA (1)...(19): siRNA sense strand
gauguaaaccuuauucuug

SEQ ID NO: 1015185 - RNA, 19 nt, Homo sapiens
  misc_RNA (1)...(19): siRNA sense strand
ucacagagaugaugucaca

SEQ ID NO: 1015186 - RNA, 19 nt, Homo sapiens
  misc_RNA (1)...(19): siRNA sense strand
gaugaaggguggauuagga

SEQ ID NO: 1015187 - RNA, 19 nt, Homo sapiens
  misc_RNA (1)...(19): siRNA sense strand
gggaagagaugcggaaaga

SEQ ID NO: 1015188 - RNA, 19 nt, Homo sapiens
  misc_RNA (1)...(19): siRNA sense strand
gaaguuuguuccagauuau

SEQ ID NO: 1015189 - RNA, 19 nt, Homo sapiens
  misc_RNA (1)...(19): siRNA sense strand
ucaaugagguggcagaaga

SEQ ID NO: 1015190 - RNA, 19 nt, Homo sapiens
  misc_RNA (1)...(19): siRNA sense strand
caacugaggucuuaucaac

SEQ ID NO: 1015191 - RNA, 19 nt, Homo sapiens
  misc_RNA (1)...(19): siRNA sense strand
gaaagcagcauccggaaga

SEQ ID NO: 1015192 - RNA, 19 nt, Homo sapiens
  misc_RNA (1)...(19): siRNA sense strand
guagauaaagugacagaua

SEQ ID NO: 1015193 - RNA, 19 nt, Homo sapiens
  misc_RNA (1)...(19): siRNA sense strand
gcagugcugugcuuauuau

SEQ ID NO: 1015194 - RNA, 19 nt, Homo sapiens
  misc_RNA (1)...(19): siRNA sense strand
gaaaauggacccuuaauga

SEQ ID NO: 1015195 - RNA, 19 nt, Homo sapiens
  misc_RNA (1)...(19): siRNA sense strand
caugagagaucuuccaaau

SEQ ID NO: 1015196 - RNA, 19 nt, Homo sapiens
  misc_RNA (1)...(19): siRNA sense strand
ccauacaucuccuuucuug

SEQ ID NO: 1015197 - RNA, 19 nt, Homo sapiens
  misc_RNA (1)...(19): siRNA sense strand
gggaaagcgucuuggauga

SEQ ID NO: 1015198 - RNA, 19 nt, Homo sapiens
  misc_RNA (1)...(19): siRNA sense strand
gaaaagacagucauucaua

SEQ ID NO: 1015199 - RNA, 19 nt, Homo sapiens
  misc_RNA (1)...(19): siRNA sense strand
gaaagcgucuuggaugaug

SEQ ID NO: 1015200 - RNA, 19 nt, Homo sapiens
  misc_RNA (1)...(19): siRNA sense strand
caacagaacaggcucauuc

SEQ ID NO: 1015201 - RNA, 19 nt, Homo sapiens
  misc_RNA (1)...(19): siRNA sense strand
guaagaacaucuccaagca

SEQ ID NO: 1015202 - RNA, 19 nt, Homo sapiens
  misc_RNA (1)...(19): siRNA sense strand
agaaguuuguuccagauua

SEQ ID NO: 1015203 - RNA, 19 nt, Homo sapiens
  misc_RNA (1)...(19): siRNA sense strand
ggaaugcucaguagaauca

SEQ ID NO: 1015204 - RNA, 19 nt, Homo sapiens
  misc_RNA (1)...(19): siRNA sense strand
guaugaggauuugcuuaua

SEQ ID NO: 1015205 - RNA, 19 nt, Homo sapiens
  misc_RNA (1)...(19): siRNA sense strand
ggacauaugaggacuaaca

SEQ ID NO: 1015206 - RNA, 19 nt, Homo sapiens
  misc_RNA (1)...(19): siRNA sense strand
gaaacaaucacagagauga

SEQ ID NO: 1015207 - RNA, 19 nt, Homo sapiens
  misc_RNA (1)...(19): siRNA sense strand
ggaaagcaauggcacugau

SEQ ID NO: 1015208 - RNA, 19 nt, Homo sapiens
  misc_RNA (1)...(19): siRNA sense strand
agacauugauugcaaguug

SEQ ID NO: 1015209 - RNA, 19 nt, Homo sapiens
  misc_RNA (1)...(19): siRNA sense strand
gagagucaguacacuaaga

SEQ ID NO: 1015210 - RNA, 19 nt, Homo sapiens
  misc_RNA (1)...(19): siRNA sense strand
gagagcaucuggagcuaau

SEQ ID NO: 1015211 - RNA, 19 nt, Homo sapiens
  misc_RNA (1)...(19): siRNA sense strand
gaaaaucucugguucucaa

SEQ ID NO: 1015212 - RNA, 19 nt, Homo sapiens
  misc_RNA (1)...(19): siRNA sense strand
gaugaagauugaugaugaa

SEQ ID NO: 1015213 - RNA, 19 nt, Homo sapiens
  misc_RNA (1)...(19): siRNA sense strand
agaugaagauugaugauga

SEQ ID NO: 1015214 - RNA, 19 nt, Homo sapiens
  misc_RNA (1)...(19): siRNA sense strand
caagacaggguuacuauau

SEQ ID NO: 1015215 - RNA, 19 nt, Homo sapiens
  misc_RNA (1)...(19): siRNA sense strand
ggaaucaucucugaagaag

SEQ ID NO: 1015216 - RNA, 19 nt, Homo sapiens
  misc_RNA (1)...(19): siRNA sense strand
cuaggaauguaauggcuua

SEQ ID NO: 1015217 - RNA, 19 nt, Homo sapiens
  misc_RNA (1)...(19): siRNA sense strand
gaagaaggauaaggaccaa

SEQ ID NO: 1015218 - RNA, 19 nt, Homo sapiens
  misc_RNA (1)...(19): siRNA sense strand
agaagaugcuguagacuau

SEQ ID NO: 1015219 - RNA, 19 nt, Homo sapiens
  misc_RNA (1)...(19): siRNA sense strand
gggauaugguggaauaaga

SEQ ID NO: 1015220 - RNA, 19 nt, Homo sapiens
  misc_RNA (1)...(19): siRNA sense strand
ggagguggcccauuuacuu

SEQ ID NO: 1015221 - RNA, 19 nt, Homo sapiens
  misc_RNA (1)...(19): siRNA sense strand
gaagaaaugggaaagaaca

SEQ ID NO: 1015222 - RNA, 19 nt, Homo sapiens
  misc_RNA (1)...(19): siRNA sense strand
caacuucuacguaaauuug

SEQ ID NO: 1015223 - RNA, 19 nt, Homo sapiens
  misc_RNA (1)...(19): siRNA sense strand
aagaagagaucagagcuaa

SEQ ID NO: 1015224 - RNA, 19 nt, Homo sapiens
  misc_RNA (1)...(19): siRNA sense strand
ggauacgaauggaagauau

SEQ ID NO: 1015225 - RNA, 19 nt, Homo sapiens
  misc_RNA (1)...(19): siRNA sense strand
gggaggauaucaaacacaa

SEQ ID NO: 1015226 - RNA, 19 nt, Homo sapiens
  misc_RNA (1)...(19): siRNA sense strand
gugaagacauugauugcaa

SEQ ID NO: 1015227 - RNA, 19 nt, Homo sapiens
  misc_RNA (1)...(19): siRNA sense strand
caacaugaaccugugauaa

SEQ ID NO: 1015228 - RNA, 19 nt, Homo sapiens
  misc_RNA (1)...(19): siRNA sense strand
gaaagaagacaaauuagcu

SEQ ID NO: 1015229 - RNA, 19 nt, Homo sapiens
  misc_RNA (1)...(19): siRNA sense strand
gaaggaugcuggcuauggu

SEQ ID NO: 1015230 - RNA, 19 nt, Homo sapiens
  misc_RNA (1)...(19): siRNA sense strand
ccacucggauuaugaugaa

SEQ ID NO: 1015231 - RNA, 19 nt, Homo sapiens
  misc_RNA (1)...(19): siRNA sense strand
gaagaagagaucagagcua

SEQ ID NO: 1015232 - RNA, 19 nt, Homo sapiens
  misc_RNA (1)...(19): siRNA sense strand
ggugggugcuuaagucuga

SEQ ID NO: 1015233 - RNA, 19 nt, Homo sapiens
  misc_RNA (1)...(19): siRNA sense strand
ggacaagacaggguuacua

SEQ ID NO: 1015234 - RNA, 19 nt, Homo sapiens
  misc_RNA (1)...(19): siRNA sense strand
gagaaagacacaacaugaa

SEQ ID NO: 1015235 - RNA, 19 nt, Homo sapiens
  misc_RNA (1)...(19): siRNA sense strand
gcccgacugugguaugaua

SEQ ID NO: 1015236 - RNA, 19 nt, Homo sapiens
  misc_RNA (1)...(19): siRNA sense strand
ggaauaagacccaaacaac

SEQ ID NO: 1015237 - RNA, 19 nt, Homo sapiens
  misc_RNA (1)...(19): siRNA sense strand
gacaauccuuucucugcua

SEQ ID NO: 1015238 - RNA, 19 nt, Homo sapiens
  misc_RNA (1)...(19): siRNA sense strand
aaacauucauugacucaga

SEQ ID NO: 1015239 - RNA, 19 nt, Homo sapiens
  misc_RNA (1)...(19): siRNA sense strand
gcaccagauuguaaauaug

SEQ ID NO: 1015240 - RNA, 19 nt, Homo sapiens
  misc_RNA (1)...(19): siRNA sense strand
gaaggaaucaucucugaag

SEQ ID NO: 1015241 - RNA, 19 nt, Homo sapiens
  misc_RNA (1)...(19): siRNA sense strand
gcaguggguuugacuaugg

SEQ ID NO: 1015242 - RNA, 19 nt, Homo sapiens
  misc_RNA (1)...(19): siRNA sense strand
caacuggagauguagauaa

SEQ ID NO: 1015243 - RNA, 19 nt, Homo sapiens
  misc_RNA (1)...(19): siRNA sense strand
ggaaagaacauugagaaca

SEQ ID NO: 1015244 - RNA, 19 nt, Homo sapiens
  misc_RNA (1)...(19): siRNA sense strand
gucaucaacugaggucuua

SEQ ID NO: 1015245 - RNA, 19 nt, Homo sapiens
  misc_RNA (1)...(19): siRNA sense strand
gaagauuuccagaugaaga

SEQ ID NO: 1015246 - RNA, 19 nt, Homo sapiens
  misc_RNA (1)...(19): siRNA sense strand
ggacagcgaggaagauuca

SEQ ID NO: 1015247 - RNA, 19 nt, Homo sapiens
  misc_RNA (1)...(19): siRNA sense strand
ggagaaagaggaagaagca

SEQ ID NO: 1015248 - RNA, 19 nt, Homo sapiens
  misc_RNA (1)...(19): siRNA sense strand
gagaagaugaugaggaaga

SEQ ID NO: 1015249 - RNA, 19 nt, Homo sapiens
  misc_RNA (1)...(19): siRNA sense strand
guaaaggacuacuacaaaa

SEQ ID NO: 1015250 - RNA, 19 nt, Homo sapiens
  misc_RNA (1)...(19): siRNA sense strand
uaugaggacuaacaaauuc

SEQ ID NO: 1015251 - RNA, 19 nt, Homo sapiens
  misc_RNA (1)...(19): siRNA sense strand
ggaaggaacuacggcgaau

SEQ ID NO: 1015252 - RNA, 19 nt, Homo sapiens
  misc_RNA (1)...(19): siRNA sense strand
aagaaggaaucaucucuga

SEQ ID NO: 1015253 - RNA, 19 nt, Homo sapiens
  misc_RNA (1)...(19): siRNA sense strand
gaagauggcaguggguuug

SEQ ID NO: 1015254 - RNA, 19 nt, Homo sapiens
  misc_RNA (1)...(19): siRNA sense strand
ugacucagaucucucaauc

SEQ ID NO: 1015255 - RNA, 19 nt, Homo sapiens
  misc_RNA (1)...(19): siRNA sense strand
cuacaaacacuccgugaaa

SEQ ID NO: 1015256 - RNA, 19 nt, Homo sapiens
  misc_RNA (1)...(19): siRNA sense strand
cuagaaugauggaggaauu

SEQ ID NO: 1015257 - RNA, 19 nt, Homo sapiens
  misc_RNA (1)...(19): siRNA sense strand
caauuugucugucuuggau

SEQ ID NO: 1015258 - RNA, 19 nt, Homo sapiens
  misc_RNA (1)...(19): siRNA sense strand
ugugggauaugguggaaua

SEQ ID NO: 1015259 - RNA, 19 nt, Homo sapiens
  misc_RNA (1)...(19): siRNA sense strand
gaacagauauacaguugug

SEQ ID NO: 1015260 - RNA, 19 nt, Homo sapiens
  misc_RNA (1)...(19): siRNA sense strand
gaacagauguauagugauc

SEQ ID NO: 1015261 - RNA, 19 nt, Homo sapiens
  misc_RNA (1)...(19): siRNA sense strand
uaauauagcucuuggacaa

SEQ ID NO: 1015262 - RNA, 19 nt, Homo sapiens
  misc_RNA (1)...(19): siRNA sense strand
aaaccaagcuuaacagaga

SEQ ID NO: 1015263 - RNA, 19 nt, Homo sapiens
  misc_RNA (1)...(19): siRNA sense strand
ccagaucucuauauugaaa

SEQ ID NO: 1015264 - RNA, 19 nt, Homo sapiens
  misc_RNA (1)...(19): siRNA sense strand
cggaacagauguauaguga

SEQ ID NO: 1015265 - RNA, 19 nt, Homo sapiens
  misc_RNA (1)...(19): siRNA sense strand
ggucacaccuucaacuaug

SEQ ID NO: 1015266 - RNA, 19 nt, Homo sapiens
  misc_RNA (1)...(19): siRNA sense strand
gacaauauaugggagcauu

SEQ ID NO: 1015267 - RNA, 19 nt, Homo sapiens
  misc_RNA (1)...(19): siRNA sense strand
cuccagaucucuauauuga

SEQ ID NO: 1015268 - RNA, 19 nt, Homo sapiens
  misc_RNA (1)...(19): siRNA sense strand
ccuaaugccuuuacuuuua

SEQ ID NO: 1015269 - RNA, 19 nt, Homo sapiens
  misc_RNA (1)...(19): siRNA sense strand
gauguauagugaucugauu

SEQ ID NO: 1015270 - RNA, 19 nt, Homo sapiens
  misc_RNA (1)...(19): siRNA sense strand
cuucaacuauggcaaauau

SEQ ID NO: 1015271 - RNA, 19 nt, Homo sapiens
  misc_RNA (1)...(19): siRNA sense strand
ugccauagaucaacuuuua

SEQ ID NO: 1015272 - RNA, 19 nt, Homo sapiens
  misc_RNA (1)...(19): siRNA sense strand
acaguuguguguauaaaug

SEQ ID NO: 1015273 - RNA, 19 nt, Homo sapiens
  misc_RNA (1)...(19): siRNA sense strand
cagcagcacucggaacaga

SEQ ID NO: 1015274 - RNA, 19 nt, Homo sapiens
  misc_RNA (1)...(19): siRNA sense strand
auauagcucuuggacaaua

SEQ ID NO: 1015275 - RNA, 19 nt, Homo sapiens
  misc_RNA (1)...(19): siRNA sense strand
uggcaaauauugugaaagg

SEQ ID NO: 1015276 - RNA, 19 nt, Homo sapiens
  misc_RNA (1)...(19): siRNA sense strand
ccuccaaguucuuaaugaa

SEQ ID NO: 1015277 - RNA, 19 nt, Homo sapiens
  misc_RNA (1)...(19): siRNA sense strand
ucaacuauggcaaauauug

SEQ ID NO: 1015278 - RNA, 19 nt, Homo sapiens
  misc_RNA (1)...(19): siRNA sense strand
aagaugaccuuauaaagcu

SEQ ID NO: 1015279 - RNA, 19 nt, Homo sapiens
  misc_RNA (1)...(19): siRNA sense strand
gaucaacuuuuaacucaga

SEQ ID NO: 1015280 - RNA, 19 nt, Homo sapiens
  misc_RNA (1)...(19): siRNA sense strand
gcacauacuggccaaaauu

SEQ ID NO: 1015281 - RNA, 19 nt, Homo sapiens
  misc_RNA (1)...(19): siRNA sense strand
uccaaguucuuaaugaaug

SEQ ID NO: 1015282 - RNA, 19 nt, Homo sapiens
  misc_RNA (1)...(19): siRNA sense strand
caacuauggcaaauauugu

SEQ ID NO: 1015283 - RNA, 19 nt, Homo sapiens
  misc_RNA (1)...(19): siRNA sense strand
augaacagauauacaguug

SEQ ID NO: 1015284 - RNA, 19 nt, Homo sapiens
  misc_RNA (1)...(19): siRNA sense strand
ccaaguucuuaaugaaugu

SEQ ID NO: 1015285 - RNA, 19 nt, Homo sapiens
  misc_RNA (1)...(19): siRNA sense strand
gcuccaccaucaacaucaa

SEQ ID NO: 1015286 - RNA, 19 nt, Homo sapiens
  misc_RNA (1)...(19): siRNA sense strand
aagcacauuuacagccuaa

SEQ ID NO: 1015287 - RNA, 19 nt, Homo sapiens
  misc_RNA (1)...(19): siRNA sense strand
caagcuuaacagagacuua

SEQ ID NO: 1015288 - RNA, 19 nt, Homo sapiens
  misc_RNA (1)...(19): siRNA sense strand
uacggaacauguugcagaa

SEQ ID NO: 1015289 - RNA, 19 nt, Homo sapiens
  misc_RNA (1)...(19): siRNA sense strand
aaagaugaccuuauaaagc

SEQ ID NO: 1015290 - RNA, 19 nt, Homo sapiens
  misc_RNA (1)...(19): siRNA sense strand
gcucuuggacaauauaugg

SEQ ID NO: 1015291 - RNA, 19 nt, Homo sapiens
  misc_RNA (1)...(19): siRNA sense strand
gaccagaaccacaacaacu

SEQ ID NO: 1015292 - RNA, 19 nt, Homo sapiens
  misc_RNA (1)...(19): siRNA sense strand
cauugugccucuuuucaua

SEQ ID NO: 1015293 - RNA, 19 nt, Homo sapiens
  misc_RNA (1)...(19): siRNA sense strand
gcagcacucggaacagaug

SEQ ID NO: 1015294 - RNA, 19 nt, Homo sapiens
  misc_RNA (1)...(19): siRNA sense strand
gaugauggacgaccagaac

SEQ ID NO: 1015295 - RNA, 19 nt, Homo sapiens
  misc_RNA (1)...(19): siRNA sense strand
gaagcccagucaacaccau

SEQ ID NO: 1015296 - RNA, 19 nt, Homo sapiens
  misc_RNA (1)...(19): siRNA sense strand
cgaaaccaagcuuaacaga

SEQ ID NO: 1015297 - RNA, 19 nt, Homo sapiens
  misc_RNA (1)...(19): siRNA sense strand
gagcauugcagagcauugu

SEQ ID NO: 1015298 - RNA, 19 nt, Homo sapiens
  misc_RNA (1)...(19): siRNA sense strand
gcuacgaggcgaugaugga

SEQ ID NO: 1015299 - RNA, 19 nt, Homo sapiens
  misc_RNA (1)...(19): siRNA sense strand
gcacucggaacagauguau

SEQ ID NO: 1015300 - RNA, 19 nt, Homo sapiens
  misc_RNA (1)...(19): siRNA sense strand
uauagcucuuggacaauau

SEQ ID NO: 1015301 - RNA, 19 nt, Homo sapiens
  misc_RNA (1)...(19): siRNA sense strand
cggaacauguugcagaaaa

SEQ ID NO: 1015302 - RNA, 19 nt, Homo sapiens
  misc_RNA (1)...(19): siRNA sense strand
gggugaucaugauguugaa

SEQ ID NO: 1015303 - RNA, 19 nt, Homo sapiens
  misc_RNA (1)...(19): siRNA sense strand
agccuaaugccuuuacuuu

SEQ ID NO: 1015304 - RNA, 19 nt, Homo sapiens
  misc_RNA (1)...(19): siRNA sense strand
acucggaacagauguauag

SEQ ID NO: 1015305 - RNA, 19 nt, Homo sapiens
  misc_RNA (1)...(19): siRNA sense strand
uuuacagccuaaugccuuu

SEQ ID NO: 1015306 - RNA, 19 nt, Homo sapiens
  misc_RNA (1)...(19): siRNA sense strand
gauuauaagagcacauacu

SEQ ID NO: 1015307 - RNA, 19 nt, Homo sapiens
  misc_RNA (1)...(19): siRNA sense strand
gcuaauggggugaucauga

SEQ ID NO: 1015308 - RNA, 19 nt, Homo sapiens
  misc_RNA (1)...(19): siRNA sense strand
caccuucaacuauggcaaa

SEQ ID NO: 1015309 - RNA, 19 nt, Homo sapiens
  misc_RNA (1)...(19): siRNA sense strand
gugaucaugauguugaaga

SEQ ID NO: 1015310 - RNA, 19 nt, Homo sapiens
  misc_RNA (1)...(19): siRNA sense strand
acagagacuuaaaagauga

SEQ ID NO: 1015311 - RNA, 19 nt, Homo sapiens
  misc_RNA (1)...(19): siRNA sense strand
ccuaugaacagauauacag

SEQ ID NO: 1015312 - RNA, 19 nt, Homo sapiens
  misc_RNA (1)...(19): siRNA sense strand
cagauauacaguugugugu

SEQ ID NO: 1015313 - RNA, 19 nt, Homo sapiens
  misc_RNA (1)...(19): siRNA sense strand
gagaaaggcuuccagauuu

SEQ ID NO: 1015314 - RNA, 19 nt, Homo sapiens
  misc_RNA (1)...(19): siRNA sense strand
ggacaaacacuacuaauaa

SEQ ID NO: 1015315 - RNA, 19 nt, Homo sapiens
  misc_RNA (1)...(19): siRNA sense strand
caaaguggagucagaauua

SEQ ID NO: 1015316 - RNA, 19 nt, Homo sapiens
  misc_RNA (1)...(19): siRNA sense strand
gcaacgaacuucacagaca

SEQ ID NO: 1015317 - RNA, 19 nt, Homo sapiens
  misc_RNA (1)...(19): siRNA sense strand
agagagugcuuaugccuua

SEQ ID NO: 1015318 - RNA, 19 nt, Homo sapiens
  misc_RNA (1)...(19): siRNA sense strand
ucaaaguccuucaaagaaa

SEQ ID NO: 1015319 - RNA, 19 nt, Homo sapiens
  misc_RNA (1)...(19): siRNA sense strand
agacagcuguaacaucuua

SEQ ID NO: 1015320 - RNA, 19 nt, Homo sapiens
  misc_RNA (1)...(19): siRNA sense strand
uggcuuagcuuauguuaug

SEQ ID NO: 1015321 - RNA, 19 nt, Homo sapiens
  misc_RNA (1)...(19): siRNA sense strand
ugucaugacugugaaguua

SEQ ID NO: 1015322 - RNA, 19 nt, Homo sapiens
  misc_RNA (1)...(19): siRNA sense strand
gcauuuggauuaccuggaa

SEQ ID NO: 1015323 - RNA, 19 nt, Homo sapiens
  misc_RNA (1)...(19): siRNA sense strand
guucuuugcucuuguggua

SEQ ID NO: 1015324 - RNA, 19 nt, Homo sapiens
  misc_RNA (1)...(19): siRNA sense strand
gcuaugucaucuuaucuuu

SEQ ID NO: 1015325 - RNA, 19 nt, Homo sapiens
  misc_RNA (1)...(19): siRNA sense strand
uggauuaccuggaaaguug

SEQ ID NO: 1015326 - RNA, 19 nt, Homo sapiens
  misc_RNA (1)...(19): siRNA sense strand
ucagacagcuguaacaucu

SEQ ID NO: 1015327 - RNA, 19 nt, Homo sapiens
  misc_RNA (1)...(19): siRNA sense strand
cagaaaagcuguaacaaug

SEQ ID NO: 1015328 - RNA, 19 nt, Homo sapiens
  misc_RNA (1)...(19): siRNA sense strand
aaucauauguguuggcauu

SEQ ID NO: 1015329 - RNA, 19 nt, Homo sapiens
  misc_RNA (1)...(19): siRNA sense strand
ggagcuaugucaucuuauc

SEQ ID NO: 1015330 - RNA, 19 nt, Homo sapiens
  misc_RNA (1)...(19): siRNA sense strand
ccucugacauuaaauuaug

SEQ ID NO: 1015331 - RNA, 19 nt, Homo sapiens
  misc_RNA (1)...(19): siRNA sense strand
gcaggcaccauaauaauuc

SEQ ID NO: 1015332 - RNA, 19 nt, Homo sapiens
  misc_RNA (1)...(19): siRNA sense strand
agagaaaggcuuccagauu

SEQ ID NO: 1015333 - RNA, 19 nt, Homo sapiens
  misc_RNA (1)...(19): siRNA sense strand
gcuguaacaucuuaugaag

SEQ ID NO: 1015334 - RNA, 19 nt, Homo sapiens
  misc_RNA (1)...(19): siRNA sense strand
ccaggacuauuuuaucuua

SEQ ID NO: 1015335 - RNA, 19 nt, Homo sapiens
  misc_RNA (1)...(19): siRNA sense strand
uuggagcuaugucaucuua

SEQ ID NO: 1015336 - RNA, 19 nt, Homo sapiens
  misc_RNA (1)...(19): siRNA sense strand
uauauucccaggacuauuu

SEQ ID NO: 1015337 - RNA, 19 nt, Homo sapiens
  misc_RNA (1)...(19): siRNA sense strand
gugaaguuaugcauacuau

SEQ ID NO: 1015338 - RNA, 19 nt, Homo sapiens
  misc_RNA (1)...(19): siRNA sense strand
gcaccauaauaauucagaa

SEQ ID NO: 1015339 - RNA, 19 nt, Homo sapiens
  misc_RNA (1)...(19): siRNA sense strand
gcucuuucauuucuccaaa

SEQ ID NO: 1015340 - RNA, 19 nt, Homo sapiens
  misc_RNA (1)...(19): siRNA sense strand
cuuaguauguguauucaga

SEQ ID NO: 1015341 - RNA, 19 nt, Homo sapiens
  misc_RNA (1)...(19): siRNA sense strand
ggcauuguguucccucuug

SEQ ID NO: 1015342 - RNA, 19 nt, Homo sapiens
  misc_RNA (1)...(19): siRNA sense strand
uggacaaacacuacuaaua

SEQ ID NO: 1015343 - RNA, 19 nt, Homo sapiens
  misc_RNA (1)...(19): siRNA sense strand
gcagaauguuaccaauaca

SEQ ID NO: 1015344 - RNA, 19 nt, Homo sapiens
  misc_RNA (1)...(19): siRNA sense strand
ccaaagagagugcuuaugc

SEQ ID NO: 1015345 - RNA, 19 nt, Homo sapiens
  misc_RNA (1)...(19): siRNA sense strand
gauggacaaacacuacuaa

SEQ ID NO: 1015346 - RNA, 19 nt, Homo sapiens
  misc_RNA (1)...(19): siRNA sense strand
uugcucaucuuuggaauuu

SEQ ID NO: 1015347 - RNA, 19 nt, Homo sapiens
  misc_RNA (1)...(19): siRNA sense strand
aaacuuagcagagaggauu

SEQ ID NO: 1015348 - RNA, 19 nt, Homo sapiens
  misc_RNA (1)...(19): siRNA sense strand
acucuagcacucaauauua

SEQ ID NO: 1015349 - RNA, 19 nt, Homo sapiens
  misc_RNA (1)...(19): siRNA sense strand
gaaaagcuguaacaaugau

SEQ ID NO: 1015350 - RNA, 19 nt, Homo sapiens
  misc_RNA (1)...(19): siRNA sense strand
gcccauauacugugaacuu

SEQ ID NO: 1015351 - RNA, 19 nt, Homo sapiens
  misc_RNA (1)...(19): siRNA sense strand
uaauaccggugucuuugga

SEQ ID NO: 1015352 - RNA, 19 nt, Homo sapiens
  misc_RNA (1)...(19): siRNA sense strand
gaauauuggagcuauguca

SEQ ID NO: 1015353 - RNA, 19 nt, Homo sapiens
  misc_RNA (1)...(19): siRNA sense strand
gaguugaguccguugcuaa

SEQ ID NO: 1015354 - RNA, 19 nt, Homo sapiens
  misc_RNA (1)...(19): siRNA sense strand
ccagguguuucauuugguu

SEQ ID NO: 1015355 - RNA, 19 nt, Homo sapiens
  misc_RNA (1)...(19): siRNA sense strand
gaaugcagaauguuaccaa

SEQ ID NO: 1015356 - RNA, 19 nt, Homo sapiens
  misc_RNA (1)...(19): siRNA sense strand
gagacuauaguagauauug

SEQ ID NO: 1015357 - RNA, 19 nt, Homo sapiens
  misc_RNA (1)...(19): siRNA sense strand
gcuaauaccggugucuuug

SEQ ID NO: 1015358 - RNA, 19 nt, Homo sapiens
  misc_RNA (1)...(19): siRNA sense strand
ccacuucccugccagaaaa

SEQ ID NO: 1015359 - RNA, 19 nt, Homo sapiens
  misc_RNA (1)...(19): siRNA sense strand
caaaguccuucaaagaaaa

SEQ ID NO: 1015360 - RNA, 19 nt, Homo sapiens
  misc_RNA (1)...(19): siRNA sense strand
ucucugccauaccucaaua

SEQ ID NO: 1015361 - RNA, 19 nt, Homo sapiens
  misc_RNA (1)...(19): siRNA sense strand
ucuccuggcuucuuacuca

SEQ ID NO: 1015362 - RNA, 19 nt, Homo sapiens
  misc_RNA (1)...(19): siRNA sense strand
gcaauugcuuuaaguuuuc

SEQ ID NO: 1015363 - RNA, 19 nt, Homo sapiens
  misc_RNA (1)...(19): siRNA sense strand
gauguucuuugcucuugug

SEQ ID NO: 1015364 - RNA, 19 nt, Homo sapiens
  misc_RNA (1)...(19): siRNA sense strand
ggcaggcaccauaauaauu

SEQ ID NO: 1015365 - RNA, 19 nt, Homo sapiens
  misc_RNA (1)...(19): siRNA sense strand
caaauguuacagaugauug

SEQ ID NO: 1015366 - RNA, 19 nt, Homo sapiens
  misc_RNA (1)...(19): siRNA sense strand
cuucaaaguccuucaaaga

SEQ ID NO: 1015367 - RNA, 19 nt, Homo sapiens
  misc_RNA (1)...(19): siRNA sense strand
gcuuaugccuuaccaacca

SEQ ID NO: 1015368 - RNA, 19 nt, Homo sapiens
  misc_RNA (1)...(19): siRNA sense strand
acucuuugcauuuggauua

SEQ ID NO: 1015369 - RNA, 19 nt, Homo sapiens
  misc_RNA (1)...(19): siRNA sense strand
uaguuuagcacucaucauu

SEQ ID NO: 1015370 - RNA, 19 nt, Homo sapiens
  misc_RNA (1)...(19): siRNA sense strand
caugggaaguggcauccuu

SEQ ID NO: 1015371 - RNA, 19 nt, Homo sapiens
  misc_RNA (1)...(19): siRNA sense strand
ucauuugguuuaucagugu

SEQ ID NO: 1015372 - RNA, 19 nt, Homo sapiens
  misc_RNA (1)...(19): siRNA sense strand
gaucuuggacucuuugcau

SEQ ID NO: 1015373 - RNA, 19 nt, Homo sapiens
  misc_RNA (1)...(19): siRNA sense strand
caucuucugcuuaguaugu

SEQ ID NO: 1015374 - RNA, 19 nt, Homo sapiens
  misc_RNA (1)...(19): siRNA sense strand
cauacuauuugcugugcuu

SEQ ID NO: 1015375 - RNA, 19 nt, Homo sapiens
  misc_RNA (1)...(19): siRNA sense strand
ucaugacugugaaguuaug

SEQ ID NO: 1015376 - RNA, 19 nt, Homo sapiens
  misc_RNA (1)...(19): siRNA sense strand
ggagucagaauuacuaaaa

SEQ ID NO: 1015377 - RNA, 19 nt, Homo sapiens
  misc_RNA (1)...(19): siRNA sense strand
ugccauaccucaauauugc

SEQ ID NO: 1015378 - RNA, 19 nt, Homo sapiens
  misc_RNA (1)...(19): siRNA sense strand
guggcaggcaccauaauaa

SEQ ID NO: 1015379 - RNA, 19 nt, Homo sapiens
  misc_RNA (1)...(19): siRNA sense strand
gagaggauuuucugucaug

SEQ ID NO: 1015380 - RNA, 19 nt, Homo sapiens
  misc_RNA (1)...(19): siRNA sense strand
gcucaucuuuggaauuuug

SEQ ID NO: 1015381 - RNA, 19 nt, Homo sapiens
  misc_RNA (1)...(19): siRNA sense strand
guuuagcacucaucauuuu

SEQ ID NO: 1015382 - RNA, 19 nt, Homo sapiens
  misc_RNA (1)...(19): siRNA sense strand
uugcucuccuggcuucuua

SEQ ID NO: 1015383 - RNA, 19 nt, Homo sapiens
  misc_RNA (1)...(19): siRNA sense strand
ugcagaauguuaccaauac

SEQ ID NO: 1015384 - RNA, 19 nt, Homo sapiens
  misc_RNA (1)...(19): siRNA sense strand
agaaaagaaugcagaaugu

SEQ ID NO: 1015385 - RNA, 19 nt, Homo sapiens
  misc_RNA (1)...(19): siRNA sense strand
guaucuugauggacaaaca

SEQ ID NO: 1015386 - RNA, 19 nt, Homo sapiens
  misc_RNA (1)...(19): siRNA sense strand
uggagacuauaguagauau

SEQ ID NO: 1015387 - RNA, 19 nt, Homo sapiens
  misc_RNA (1)...(19): siRNA sense strand
guccaucuucugcuuagua

SEQ ID NO: 1015388 - RNA, 19 nt, Homo sapiens
  misc_RNA (1)...(19): siRNA sense strand
acaaaguggagucagaauu

SEQ ID NO: 1015389 - RNA, 19 nt, Homo sapiens
  misc_RNA (1)...(19): siRNA sense strand
gguugggaauuuuaguuua

SEQ ID NO: 1015390 - RNA, 19 nt, Homo sapiens
  misc_RNA (1)...(19): siRNA sense strand
gacuggagacuauaguaga

SEQ ID NO: 1015391 - RNA, 19 nt, Homo sapiens
  misc_RNA (1)...(19): siRNA sense strand
accggugucuuuggauuua

SEQ ID NO: 1015392 - RNA, 19 nt, Homo sapiens
  misc_RNA (1)...(19): siRNA sense strand
cauauguguuggcauugug

SEQ ID NO: 1015393 - RNA, 19 nt, Homo sapiens
  misc_RNA (1)...(19): siRNA sense strand
gguguuucauuugguuuau

SEQ ID NO: 1015394 - RNA, 19 nt, Homo sapiens
  misc_RNA (1)...(19): siRNA sense strand
guccucugacauuaaauua

SEQ ID NO: 1015395 - RNA, 19 nt, Homo sapiens
  misc_RNA (1)...(19): siRNA sense strand
cucuagcacucaauauuau

SEQ ID NO: 1015396 - RNA, 19 nt, Homo sapiens
  misc_RNA (1)...(19): siRNA sense strand
guuguugucaugacuguga

SEQ ID NO: 1015397 - RNA, 19 nt, Homo sapiens
  misc_RNA (1)...(19): siRNA sense strand
ucagaauauuggagcuaug

SEQ ID NO: 1015398 - RNA, 19 nt, Homo sapiens
  misc_RNA (1)...(19): siRNA sense strand
aagcggaggccgaagaguu

SEQ ID NO: 1015399 - RNA, 19 nt, Homo sapiens
  misc_RNA (1)...(19): siRNA sense strand
cagaugauuguaagccaaa

SEQ ID NO: 1015400 - RNA, 19 nt, Homo sapiens
  misc_RNA (1)...(19): siRNA sense strand
uguguucccucuugcacuu

SEQ ID NO: 1015401 - RNA, 19 nt, Homo sapiens
  misc_RNA (1)...(19): siRNA sense strand
ucauauguguuggcauugu

SEQ ID NO: 1015402 - RNA, 19 nt, Homo sapiens
  misc_RNA (1)...(19): siRNA sense strand
aagcaacgaacuucacaga

SEQ ID NO: 1015403 - RNA, 19 nt, Homo sapiens
  misc_RNA (1)...(19): siRNA sense strand
uucaaaguccuucaaagaa

SEQ ID NO: 1015404 - RNA, 19 nt, Homo sapiens
  misc_RNA (1)...(19): siRNA sense strand
ggcuaauaccggugucuuu

SEQ ID NO: 1015405 - RNA, 19 nt, Homo sapiens
  misc_RNA (1)...(19): siRNA sense strand
ggagacuauaguagauauu

SEQ ID NO: 1015406 - RNA, 19 nt, Homo sapiens
  misc_RNA (1)...(19): siRNA sense strand
agaguugaguccguugcua

SEQ ID NO: 1015407 - RNA, 19 nt, Homo sapiens
  misc_RNA (1)...(19): siRNA sense strand
auaccggugucuuuggauu

SEQ ID NO: 1015408 - RNA, 19 nt, Homo sapiens
  misc_RNA (1)...(19): siRNA sense strand
gaaaagaaugcagaauguu

SEQ ID NO: 1015409 - RNA, 19 nt, Homo sapiens
  misc_RNA (1)...(19): siRNA sense strand
cuuggacucuuugcauuug

SEQ ID NO: 1015410 - RNA, 19 nt, Homo sapiens
  misc_RNA (1)...(19): siRNA sense strand
cagcuguaacaucuuauga

SEQ ID NO: 1015411 - RNA, 19 nt, Homo sapiens
  misc_RNA (1)...(19): siRNA sense strand
gcuuauguuauggcuaaua

SEQ ID NO: 1015412 - RNA, 19 nt, Homo sapiens
  misc_RNA (1)...(19): siRNA sense strand
aaaguggagucagaauuac

SEQ ID NO: 1015413 - RNA, 19 nt, Homo sapiens
  misc_RNA (1)...(19): siRNA sense strand
ggacagcacuggcaaugau

SEQ ID NO: 1015414 - RNA, 19 nt, Homo sapiens
  misc_RNA (1)...(19): siRNA sense strand
gaaauccaauguuccagaa

SEQ ID NO: 1015415 - RNA, 19 nt, Homo sapiens
  misc_RNA (1)...(19): siRNA sense strand
caacaaauucugcaccuuu

SEQ ID NO: 1015416 - RNA, 19 nt, Homo sapiens
  misc_RNA (1)...(19): siRNA sense strand
cggacaagcugaagaagaa

SEQ ID NO: 1015417 - RNA, 19 nt, Homo sapiens
  misc_RNA (1)...(19): siRNA sense strand
gaucaggucaaagaaauaa

SEQ ID NO: 1015418 - RNA, 19 nt, Homo sapiens
  misc_RNA (1)...(19): siRNA sense strand
ggacucagaugacgauucc

SEQ ID NO: 1015419 - RNA, 19 nt, Homo sapiens
  misc_RNA (1)...(19): siRNA sense strand
gcaggaccguggaagacuu

SEQ ID NO: 1015420 - RNA, 19 nt, Homo sapiens
  misc_RNA (1)...(19): siRNA sense strand
gcacugcugguaccauuga

SEQ ID NO: 1015421 - RNA, 19 nt, Homo sapiens
  misc_RNA (1)...(19): siRNA sense strand
gagccaagcccaguaacuu

SEQ ID NO: 1015422 - RNA, 19 nt, Homo sapiens
  misc_RNA (1)...(19): siRNA sense strand
aaacggacaagcugaagaa

SEQ ID NO: 1015423 - RNA, 19 nt, Homo sapiens
  misc_RNA (1)...(19): siRNA sense strand
agaagaagaagaagaggaa

SEQ ID NO: 1015424 - RNA, 19 nt, Homo sapiens
  misc_RNA (1)...(19): siRNA sense strand
ggccuaugcuggcuacauc

SEQ ID NO: 1015425 - RNA, 19 nt, Homo sapiens
  misc_RNA (1)...(19): siRNA sense strand
cugaucaggucaaagaaau

SEQ ID NO: 1015426 - RNA, 19 nt, Homo sapiens
  misc_RNA (1)...(19): siRNA sense strand
gaaggcaaacggacuaucg

SEQ ID NO: 1015427 - RNA, 19 nt, Homo sapiens
  misc_RNA (1)...(19): siRNA sense strand
ugaagaagaagaagaagag

SEQ ID NO: 1015428 - RNA, 19 nt, Homo sapiens
  misc_RNA (1)...(19): siRNA sense strand
caauguuccagaaguguuu

SEQ ID NO: 1015429 - RNA, 19 nt, Homo sapiens
  misc_RNA (1)...(19): siRNA sense strand
gugaccugcuucugcauga

SEQ ID NO: 1015430 - RNA, 19 nt, Homo sapiens
  misc_RNA (1)...(19): siRNA sense strand
ucagugcccuugccagucu

SEQ ID NO: 1015431 - RNA, 19 nt, Homo sapiens
  misc_RNA (1)...(19): siRNA sense strand
agucccaccuugcaggaua

SEQ ID NO: 1015432 - RNA, 19 nt, Homo sapiens
  misc_RNA (1)...(19): siRNA sense strand
ggaagcgcagggacaguga

SEQ ID NO: 1015433 - RNA, 19 nt, Homo sapiens
  misc_RNA (1)...(19): siRNA sense strand
gaggacagcacuggcaaug

SEQ ID NO: 1015434 - RNA, 19 nt, Homo sapiens
  misc_RNA (1)...(19): siRNA sense strand
caggugguguuccgagaug

SEQ ID NO: 1015435 - RNA, 19 nt, Homo sapiens
  misc_RNA (1)...(19): siRNA sense strand
gugaugcgccugggaaaga

SEQ ID NO: 1015436 - RNA, 19 nt, Homo sapiens
  misc_RNA (1)...(19): siRNA sense strand
ucaccuguccugugcgaaa

SEQ ID NO: 1015437 - RNA, 19 nt, Homo sapiens
  misc_RNA (1)...(19): siRNA sense strand
gugccgggacuccaaguuu

SEQ ID NO: 1015438 - RNA, 19 nt, Homo sapiens
  misc_RNA (1)...(19): siRNA sense strand
aauccaauguuccagaagu

SEQ ID NO: 1015439 - RNA, 19 nt, Homo sapiens
  misc_RNA (1)...(19): siRNA sense strand
ggacuccaaguuugacauc

SEQ ID NO: 1015440 - RNA, 19 nt, Homo sapiens
  misc_RNA (1)...(19): siRNA sense strand
ugccgggacuccaaguuug

SEQ ID NO: 1015441 - RNA, 19 nt, Homo sapiens
  misc_RNA (1)...(19): siRNA sense strand
gacaagcugaagaagaaga

SEQ ID NO: 1015442 - RNA, 19 nt, Homo sapiens
  misc_RNA (1)...(19): siRNA sense strand
ggacaucaugguggacuca

SEQ ID NO: 1015443 - RNA, 19 nt, Homo sapiens
  misc_RNA (1)...(19): siRNA sense strand
ucaacaaauucugcaccuu

SEQ ID NO: 1015444 - RNA, 19 nt, Homo sapiens
  misc_RNA (1)...(19): siRNA sense strand
gaaagaaaacggacaagcu

SEQ ID NO: 1015445 - RNA, 19 nt, Homo sapiens
  misc_RNA (1)...(19): siRNA sense strand
gaagcuguuccuggacuga

SEQ ID NO: 1015446 - RNA, 19 nt, Homo sapiens
  misc_RNA (1)...(19): siRNA sense strand
ugaucaggucaaagaaaua

SEQ ID NO: 1015447 - RNA, 19 nt, Homo sapiens
  misc_RNA (1)...(19): siRNA sense strand
ccacgagucccaccuugca

SEQ ID NO: 1015448 - RNA, 19 nt, Homo sapiens
  misc_RNA (1)...(19): siRNA sense strand
ccugcagccuacucucuug

SEQ ID NO: 1015449 - RNA, 19 nt, Homo sapiens
  misc_RNA (1)...(19): siRNA sense strand
ccaauguuccagaaguguu

SEQ ID NO: 1015450 - RNA, 19 nt, Homo sapiens
  misc_RNA (1)...(19): siRNA sense strand
cagcgagccaagcccagua

SEQ ID NO: 1015451 - RNA, 19 nt, Homo sapiens
  misc_RNA (1)...(19): siRNA sense strand
gccacugugucaccugauc

SEQ ID NO: 1015452 - RNA, 19 nt, Homo sapiens
  misc_RNA (1)...(19): siRNA sense strand
gcaggugguguuccgagau

SEQ ID NO: 1015453 - RNA, 19 nt, Homo sapiens
  misc_RNA (1)...(19): siRNA sense strand
acacagagauccacaggaa

SEQ ID NO: 1015454 - RNA, 19 nt, Homo sapiens
  misc_RNA (1)...(19): siRNA sense strand
gagaggaggugcaguuggu

SEQ ID NO: 1015455 - RNA, 19 nt, Homo sapiens
  misc_RNA (1)...(19): siRNA sense strand
cagcgcagauguuaacuca

SEQ ID NO: 1015456 - RNA, 19 nt, Homo sapiens
  misc_RNA (1)...(19): siRNA sense strand
ucagcaacgucaacaacua

SEQ ID NO: 1015457 - RNA, 19 nt, Homo sapiens
  misc_RNA (1)...(19): siRNA sense strand
ggaaggacaggaaccagaa

SEQ ID NO: 1015458 - RNA, 19 nt, Homo sapiens
  misc_RNA (1)...(19): siRNA sense strand
gcacaagcgccucuacugu

SEQ ID NO: 1015459 - RNA, 19 nt, Homo sapiens
  misc_RNA (1)...(19): siRNA sense strand
ccgcagugaucaacaaaga

SEQ ID NO: 1015460 - RNA, 19 nt, Homo sapiens
  misc_RNA (1)...(19): siRNA sense strand
caagggacauccucuacag

SEQ ID NO: 1015461 - RNA, 19 nt, Homo sapiens
  misc_RNA (1)...(19): siRNA sense strand
ccaccgcagugaucaacaa

SEQ ID NO: 1015462 - RNA, 19 nt, Homo sapiens
  misc_RNA (1)...(19): siRNA sense strand
caccgguacugccgucuuu

SEQ ID NO: 1015463 - RNA, 19 nt, Homo sapiens
  misc_RNA (1)...(19): siRNA sense strand
acaagcgccucuacuguuc

SEQ ID NO: 1015464 - RNA, 19 nt, Homo sapiens
  misc_RNA (1)...(19): siRNA sense strand
aggcgcaccugcucuacua

SEQ ID NO: 1015465 - RNA, 19 nt, Homo sapiens
  misc_RNA (1)...(19): siRNA sense strand
gacgagaagcccaaagaga

SEQ ID NO: 1015466 - RNA, 19 nt, Homo sapiens
  misc_RNA (1)...(19): siRNA sense strand
ccacaagggacauccucua

SEQ ID NO: 1015467 - RNA, 19 nt, Homo sapiens
  misc_RNA (1)...(19): siRNA sense strand
ccaucgaccugagcaagaa

SEQ ID NO: 1015468 - RNA, 19 nt, Homo sapiens
  misc_RNA (1)...(19): siRNA sense strand
gcuccaagggugagaucua

SEQ ID NO: 1015469 - RNA, 19 nt, Homo sapiens
  misc_RNA (1)...(19): siRNA sense strand
cacaagcgccucuacuguu

SEQ ID NO: 1015470 - RNA, 19 nt, Homo sapiens
  misc_RNA (1)...(19): siRNA sense strand
gcaacgucaacaacuacua

SEQ ID NO: 1015471 - RNA, 19 nt, Homo sapiens
  misc_RNA (1)...(19): siRNA sense strand
gcagacgccgcaagcucua

SEQ ID NO: 1015472 - RNA, 19 nt, Homo sapiens
  misc_RNA (1)...(19): siRNA sense strand
cagacgagaagcccaaaga

SEQ ID NO: 1015473 - RNA, 19 nt, Homo sapiens
  misc_RNA (1)...(19): siRNA sense strand
ggagcuggaaggacaggaa

SEQ ID NO: 1015474 - RNA, 19 nt, Homo sapiens
  misc_RNA (1)...(19): siRNA sense strand
ucagcagccuguccaccuu

SEQ ID NO: 1015475 - RNA, 19 nt, Homo sapiens
  misc_RNA (1)...(19): siRNA sense strand
ggagauccuggccaagaug

SEQ ID NO: 1015476 - RNA, 19 nt, Homo sapiens
  misc_RNA (1)...(19): siRNA sense strand
caacgucaacaacuacuac

SEQ ID NO: 1015477 - RNA, 19 nt, Homo sapiens
  misc_RNA (1)...(19): siRNA sense strand
ggcuucaucuccaccacaa

SEQ ID NO: 1015478 - RNA, 19 nt, Homo sapiens
  misc_RNA (1)...(19): siRNA sense strand
gugcgaggccugcaacauc

SEQ ID NO: 1015479 - RNA, 19 nt, Homo sapiens
  misc_RNA (1)...(19): siRNA sense strand
cggagauccuggccaagau

SEQ ID NO: 1015480 - RNA, 19 nt, Homo sapiens
  misc_RNA (1)...(19): siRNA sense strand
ucgcccacaagaaguauua

SEQ ID NO: 1015481 - RNA, 19 nt, Homo sapiens
  misc_RNA (1)...(19): siRNA sense strand
ccucccagcgcagauguua

SEQ ID NO: 1015482 - RNA, 19 nt, Homo sapiens
  misc_RNA (1)...(19): siRNA sense strand
ccaccuucaucgcccacaa

SEQ ID NO: 1015483 - RNA, 19 nt, Homo sapiens
  misc_RNA (1)...(19): siRNA sense strand
ccaagggcgcuacgugcuu

SEQ ID NO: 1015484 - RNA, 19 nt, Homo sapiens
  misc_RNA (1)...(19): siRNA sense strand
ucaucgcccacaagaagua

SEQ ID NO: 1015485 - RNA, 19 nt, Homo sapiens
  misc_RNA (1)...(19): siRNA sense strand
aggccuaccuggcgcacaa

SEQ ID NO: 1015486 - RNA, 19 nt, Homo sapiens
  misc_RNA (1)...(19): siRNA sense strand
caacuacuacgugcacaag

SEQ ID NO: 1015487 - RNA, 19 nt, Homo sapiens
  misc_RNA (1)...(19): siRNA sense strand
ccggagaggaggugcaguu

SEQ ID NO: 1015488 - RNA, 19 nt, Homo sapiens
  misc_RNA (1)...(19): siRNA sense strand
gaaaccagcucaacaauug

SEQ ID NO: 1015489 - RNA, 19 nt, Homo sapiens
  misc_RNA (1)...(19): siRNA sense strand
gagaagauguccuuugaaa

SEQ ID NO: 1015490 - RNA, 19 nt, Homo sapiens
  misc_RNA (1)...(19): siRNA sense strand
gaaggaauaugaaguagau

SEQ ID NO: 1015491 - RNA, 19 nt, Homo sapiens
  misc_RNA (1)...(19): siRNA sense strand
gaagauaaagggacaagua

SEQ ID NO: 1015492 - RNA, 19 nt, Homo sapiens
  misc_RNA (1)...(19): siRNA sense strand
ggagagagaacgacuagua

SEQ ID NO: 1015493 - RNA, 19 nt, Homo sapiens
  misc_RNA (1)...(19): siRNA sense strand
aaacacagcuuucuuaguc

SEQ ID NO: 1015494 - RNA, 19 nt, Homo sapiens
  misc_RNA (1)...(19): siRNA sense strand
ucagaagcgucaacaguua

SEQ ID NO: 1015495 - RNA, 19 nt, Homo sapiens
  misc_RNA (1)...(19): siRNA sense strand
aaacgaaccuugcuacaga

SEQ ID NO: 1015496 - RNA, 19 nt, Homo sapiens
  misc_RNA (1)...(19): siRNA sense strand
cagagaagauguccuuuga

SEQ ID NO: 1015497 - RNA, 19 nt, Homo sapiens
  misc_RNA (1)...(19): siRNA sense strand
ggaagaaacugcuuaucca

SEQ ID NO: 1015498 - RNA, 19 nt, Homo sapiens
  misc_RNA (1)...(19): siRNA sense strand
ucacugacuuuguuaauga

SEQ ID NO: 1015499 - RNA, 19 nt, Homo sapiens
  misc_RNA (1)...(19): siRNA sense strand
gacaaguacugaauuaguu

SEQ ID NO: 1015500 - RNA, 19 nt, Homo sapiens
  misc_RNA (1)...(19): siRNA sense strand
gaagacaguaucuauauug

SEQ ID NO: 1015501 - RNA, 19 nt, Homo sapiens
  misc_RNA (1)...(19): siRNA sense strand
gacaguaucuauauuggaa

SEQ ID NO: 1015502 - RNA, 19 nt, Homo sapiens
  misc_RNA (1)...(19): siRNA sense strand
aaagauaccaccaagaaua

SEQ ID NO: 1015503 - RNA, 19 nt, Homo sapiens
  misc_RNA (1)...(19): siRNA sense strand
ggaugaauuuagacagaua

SEQ ID NO: 1015504 - RNA, 19 nt, Homo sapiens
  misc_RNA (1)...(19): siRNA sense strand
ggucagauauagaaauguu

SEQ ID NO: 1015505 - RNA, 19 nt, Homo sapiens
  misc_RNA (1)...(19): siRNA sense strand
caaagaugcuaaagagaga

SEQ ID NO: 1015506 - RNA, 19 nt, Homo sapiens
  misc_RNA (1)...(19): siRNA sense strand
ucagaaagauacaugaaga

SEQ ID NO: 1015507 - RNA, 19 nt, Homo sapiens
  misc_RNA (1)...(19): siRNA sense strand
ucaagaaguugucauuguu

SEQ ID NO: 1015508 - RNA, 19 nt, Homo sapiens
  misc_RNA (1)...(19): siRNA sense strand
guuaagugguagucaguua

SEQ ID NO: 1015509 - RNA, 19 nt, Homo sapiens
  misc_RNA (1)...(19): siRNA sense strand
gaaagauacaugaagauga

SEQ ID NO: 1015510 - RNA, 19 nt, Homo sapiens
  misc_RNA (1)...(19): siRNA sense strand
guaguggucucaauaagug

SEQ ID NO: 1015511 - RNA, 19 nt, Homo sapiens
  misc_RNA (1)...(19): siRNA sense strand
gcucuucacugacuuuguu

SEQ ID NO: 1015512 - RNA, 19 nt, Homo sapiens
  misc_RNA (1)...(19): siRNA sense strand
agagagaacuggagagaga

SEQ ID NO: 1015513 - RNA, 19 nt, Homo sapiens
  misc_RNA (1)...(19): siRNA sense strand
gcagauagagcaaggagaa

SEQ ID NO: 1015514 - RNA, 19 nt, Homo sapiens
  misc_RNA (1)...(19): siRNA sense strand
ccaguucacuuuaaagaau

SEQ ID NO: 1015515 - RNA, 19 nt, Homo sapiens
  misc_RNA (1)...(19): siRNA sense strand
gaagauguccuuugaaacu

SEQ ID NO: 1015516 - RNA, 19 nt, Homo sapiens
  misc_RNA (1)...(19): siRNA sense strand
ugggaaagauuguauguug

SEQ ID NO: 1015517 - RNA, 19 nt, Homo sapiens
  misc_RNA (1)...(19): siRNA sense strand
gggcaugauuguagagaaa

SEQ ID NO: 1015518 - RNA, 19 nt, Homo sapiens
  misc_RNA (1)...(19): siRNA sense strand
cccagaauguucaucuuua

SEQ ID NO: 1015519 - RNA, 19 nt, Homo sapiens
  misc_RNA (1)...(19): siRNA sense strand
ugaaguagauaaugaugga

SEQ ID NO: 1015520 - RNA, 19 nt, Homo sapiens
  misc_RNA (1)...(19): siRNA sense strand
gaaacaugaaggaauauga

SEQ ID NO: 1015521 - RNA, 19 nt, Homo sapiens
  misc_RNA (1)...(19): siRNA sense strand
cgaagacaguaucuauauu

SEQ ID NO: 1015522 - RNA, 19 nt, Homo sapiens
  misc_RNA (1)...(19): siRNA sense strand
gauuguauguugaggcaaa

SEQ ID NO: 1015523 - RNA, 19 nt, Homo sapiens
  misc_RNA (1)...(19): siRNA sense strand
ggaaaccagcucaacaauu

SEQ ID NO: 1015524 - RNA, 19 nt, Homo sapiens
  misc_RNA (1)...(19): siRNA sense strand
gacagauaauucaaaggua

SEQ ID NO: 1015525 - RNA, 19 nt, Homo sapiens
  misc_RNA (1)...(19): siRNA sense strand
cuauaaggauggaugaauu

SEQ ID NO: 1015526 - RNA, 19 nt, Homo sapiens
  misc_RNA (1)...(19): siRNA sense strand
gggaaagauuguauguuga

SEQ ID NO: 1015527 - RNA, 19 nt, Homo sapiens
  misc_RNA (1)...(19): siRNA sense strand
gagagagaacgacuaguaa

SEQ ID NO: 1015528 - RNA, 19 nt, Homo sapiens
  misc_RNA (1)...(19): siRNA sense strand
gaacagauuagaauauugg

SEQ ID NO: 1015529 - RNA, 19 nt, Homo sapiens
  misc_RNA (1)...(19): siRNA sense strand
caagucagauucucccaau

SEQ ID NO: 1015530 - RNA, 19 nt, Homo sapiens
  misc_RNA (1)...(19): siRNA sense strand
ucaguuaaauccacuuuca

SEQ ID NO: 1015531 - RNA, 19 nt, Homo sapiens
  misc_RNA (1)...(19): siRNA sense strand
gcacaauucagauucagaa

SEQ ID NO: 1015532 - RNA, 19 nt, Homo sapiens
  misc_RNA (1)...(19): siRNA sense strand
gcacagaguucagaagacu

SEQ ID NO: 1015533 - RNA, 19 nt, Homo sapiens
  misc_RNA (1)...(19): siRNA sense strand
uugagaaguuggaugaaua

SEQ ID NO: 1015534 - RNA, 19 nt, Homo sapiens
  misc_RNA (1)...(19): siRNA sense strand
ggacaaguacugaauuagu

SEQ ID NO: 1015535 - RNA, 19 nt, Homo sapiens
  misc_RNA (1)...(19): siRNA sense strand
gaggaaaccagcucaacaa

SEQ ID NO: 1015536 - RNA, 19 nt, Homo sapiens
  misc_RNA (1)...(19): siRNA sense strand
cagauucucccaauguaua

SEQ ID NO: 1015537 - RNA, 19 nt, Homo sapiens
  misc_RNA (1)...(19): siRNA sense strand
aaacgucaguucaguagug

SEQ ID NO: 1015538 - RNA, 19 nt, Homo sapiens
  misc_RNA (1)...(19): siRNA sense strand
gcagagaagauguccuuug

SEQ ID NO: 1015539 - RNA, 19 nt, Homo sapiens
  misc_RNA (1)...(19): siRNA sense strand
caugaaggaauaugaagua

SEQ ID NO: 1015540 - RNA, 19 nt, Homo sapiens
  misc_RNA (1)...(19): siRNA sense strand
uuaaagauaccaccaagaa

SEQ ID NO: 1015541 - RNA, 19 nt, Homo sapiens
  misc_RNA (1)...(19): siRNA sense strand
ucaguuacauggcaaguca

SEQ ID NO: 1015542 - RNA, 19 nt, Homo sapiens
  misc_RNA (1)...(19): siRNA sense strand
gaagaaauuggaaaucaag

SEQ ID NO: 1015543 - RNA, 19 nt, Homo sapiens
  misc_RNA (1)...(19): siRNA sense strand
caaacuaagagaacagauu

SEQ ID NO: 1015544 - RNA, 19 nt, Homo sapiens
  misc_RNA (1)...(19): siRNA sense strand
aaggauggaugaauuuaga

SEQ ID NO: 1015545 - RNA, 19 nt, Homo sapiens
  misc_RNA (1)...(19): siRNA sense strand
aaauuaagcaggcuaaaga

SEQ ID NO: 1015546 - RNA, 19 nt, Homo sapiens
  misc_RNA (1)...(19): siRNA sense strand
agggacaaguacugaauua

SEQ ID NO: 1015547 - RNA, 19 nt, Homo sapiens
  misc_RNA (1)...(19): siRNA sense strand
ugacagugauucaucuugu

SEQ ID NO: 1015548 - RNA, 19 nt, Homo sapiens
  misc_RNA (1)...(19): siRNA sense strand
gaaauuggaaaucaagaag

SEQ ID NO: 1015549 - RNA, 19 nt, Homo sapiens
  misc_RNA (1)...(19): siRNA sense strand
cuauuuacauccacaguau

SEQ ID NO: 1015550 - RNA, 19 nt, Homo sapiens
  misc_RNA (1)...(19): siRNA sense strand
ggagaaagcagccaaaaug

SEQ ID NO: 1015551 - RNA, 19 nt, Homo sapiens
  misc_RNA (1)...(19): siRNA sense strand
gaaacugcuuauccagcuu

SEQ ID NO: 1015552 - RNA, 19 nt, Homo sapiens
  misc_RNA (1)...(19): siRNA sense strand
gaaauguugaauucuguga

SEQ ID NO: 1015553 - RNA, 19 nt, Homo sapiens
  misc_RNA (1)...(19): siRNA sense strand
ggcuuguucugguguauuu

SEQ ID NO: 1015554 - RNA, 19 nt, Homo sapiens
  misc_RNA (1)...(19): siRNA sense strand
guauaaggcaccuacagaa

SEQ ID NO: 1015555 - RNA, 19 nt, Homo sapiens
  misc_RNA (1)...(19): siRNA sense strand
ccagaauguucaucuuuag

SEQ ID NO: 1015556 - RNA, 19 nt, Homo sapiens
  misc_RNA (1)...(19): siRNA sense strand
gauaaagggacaaguacug

SEQ ID NO: 1015557 - RNA, 19 nt, Homo sapiens
  misc_RNA (1)...(19): siRNA sense strand
caacaguuagucagaaaga

SEQ ID NO: 1015558 - RNA, 19 nt, Homo sapiens
  misc_RNA (1)...(19): siRNA sense strand
aaagauacccgaagacagu

SEQ ID NO: 1015559 - RNA, 19 nt, Homo sapiens
  misc_RNA (1)...(19): siRNA sense strand
gaaccuugcuacagaaaau

SEQ ID NO: 1015560 - RNA, 19 nt, Homo sapiens
  misc_RNA (1)...(19): siRNA sense strand
gaucaguucaucaauaagu

SEQ ID NO: 1015561 - RNA, 19 nt, Homo sapiens
  misc_RNA (1)...(19): siRNA sense strand
guucugguguauuugauug

SEQ ID NO: 1015562 - RNA, 19 nt, Homo sapiens
  misc_RNA (1)...(19): siRNA sense strand
ggaggaaaccagcucaaca

SEQ ID NO: 1015563 - RNA, 19 nt, Homo sapiens
  misc_RNA (1)...(19): siRNA sense strand
gucagauucucccaaugua

SEQ ID NO: 1015564 - RNA, 19 nt, Homo sapiens
  misc_RNA (1)...(19): siRNA sense strand
gaacaagaaacugaaccuu

SEQ ID NO: 1015565 - RNA, 19 nt, Homo sapiens
  misc_RNA (1)...(19): siRNA sense strand
gcccaguccugccuuuaga

SEQ ID NO: 1015566 - RNA, 19 nt, Homo sapiens
  misc_RNA (1)...(19): siRNA sense strand
guagugaugaaaccaguaa

SEQ ID NO: 1015567 - RNA, 19 nt, Homo sapiens
  misc_RNA (1)...(19): siRNA sense strand
ccgaagacaguaucuauau

SEQ ID NO: 1015568 - RNA, 19 nt, Homo sapiens
  misc_RNA (1)...(19): siRNA sense strand
gucaacaguuagucagaaa

SEQ ID NO: 1015569 - RNA, 19 nt, Homo sapiens
  misc_RNA (1)...(19): siRNA sense strand
acaggaagaguuaaacaaa

SEQ ID NO: 1015570 - RNA, 19 nt, Homo sapiens
  misc_RNA (1)...(19): siRNA sense strand
acaguuagucagaaagaua

SEQ ID NO: 1015571 - RNA, 19 nt, Homo sapiens
  misc_RNA (1)...(19): siRNA sense strand
caagaguccaugagccuuu

SEQ ID NO: 1015572 - RNA, 19 nt, Homo sapiens
  misc_RNA (1)...(19): siRNA sense strand
uaaggcaucauaaagagaa

SEQ ID NO: 1015573 - RNA, 19 nt, Homo sapiens
  misc_RNA (1)...(19): siRNA sense strand
ggaaagauuguauguugag

SEQ ID NO: 1015574 - RNA, 19 nt, Homo sapiens
  misc_RNA (1)...(19): siRNA sense strand
auagcaaucuuacgggaaa

SEQ ID NO: 1015575 - RNA, 19 nt, Homo sapiens
  misc_RNA (1)...(19): siRNA sense strand
cccaauguauauacugaaa

SEQ ID NO: 1015576 - RNA, 19 nt, Homo sapiens
  misc_RNA (1)...(19): siRNA sense strand
gauacaugaagaugaauug

SEQ ID NO: 1015577 - RNA, 19 nt, Homo sapiens
  misc_RNA (1)...(19): siRNA sense strand
caagaaguugucauuguug

SEQ ID NO: 1015578 - RNA, 19 nt, Homo sapiens
  misc_RNA (1)...(19): siRNA sense strand
uauaaggcaccuacagaaa

SEQ ID NO: 1015579 - RNA, 19 nt, Homo sapiens
  misc_RNA (1)...(19): siRNA sense strand
guaaacgucaguucaguag

SEQ ID NO: 1015580 - RNA, 19 nt, Homo sapiens
  misc_RNA (1)...(19): siRNA sense strand
aacaugggcucuuccucua

SEQ ID NO: 1015581 - RNA, 19 nt, Homo sapiens
  misc_RNA (1)...(19): siRNA sense strand
ggcaaaagaucaaaaugga

SEQ ID NO: 1015582 - RNA, 19 nt, Homo sapiens
  misc_RNA (1)...(19): siRNA sense strand
uuacauggcaagucagauu

SEQ ID NO: 1015583 - RNA, 19 nt, Homo sapiens
  misc_RNA (1)...(19): siRNA sense strand
ggauuuggccauuucuaug

SEQ ID NO: 1015584 - RNA, 19 nt, Homo sapiens
  misc_RNA (1)...(19): siRNA sense strand
ucaguaguggucucaauaa

SEQ ID NO: 1015585 - RNA, 19 nt, Homo sapiens
  misc_RNA (1)...(19): siRNA sense strand
gaguaaacgucaguucagu

SEQ ID NO: 1015586 - RNA, 19 nt, Homo sapiens
  misc_RNA (1)...(19): siRNA sense strand
aagaaguugucauuguuga

SEQ ID NO: 1015587 - RNA, 19 nt, Homo sapiens
  misc_RNA (1)...(19): siRNA sense strand
ucagacacuuuaaagauac

SEQ ID NO: 1015588 - RNA, 19 nt, Homo sapiens
  misc_RNA (1)...(19): siRNA sense strand
gaaaccagcucaacaauug

SEQ ID NO: 1015589 - RNA, 19 nt, Homo sapiens
  misc_RNA (1)...(19): siRNA sense strand
gagaagauguccuuugaaa

SEQ ID NO: 1015590 - RNA, 19 nt, Homo sapiens
  misc_RNA (1)...(19): siRNA sense strand
gaaggaauaugaaguagau

SEQ ID NO: 1015591 - RNA, 19 nt, Homo sapiens
  misc_RNA (1)...(19): siRNA sense strand
gaagauaaagggacaagua

SEQ ID NO: 1015592 - RNA, 19 nt, Homo sapiens
  misc_RNA (1)...(19): siRNA sense strand
ggagagagaacgacuagua

SEQ ID NO: 1015593 - RNA, 19 nt, Homo sapiens
  misc_RNA (1)...(19): siRNA sense strand
aaacacagcuuucuuaguc

SEQ ID NO: 1015594 - RNA, 19 nt, Homo sapiens
  misc_RNA (1)...(19): siRNA sense strand
ucagaagcgucaacaguua

SEQ ID NO: 1015595 - RNA, 19 nt, Homo sapiens
  misc_RNA (1)...(19): siRNA sense strand
aaacgaaccuugcuacaga

SEQ ID NO: 1015596 - RNA, 19 nt, Homo sapiens
  misc_RNA (1)...(19): siRNA sense strand
cagagaagauguccuuuga

SEQ ID NO: 1015597 - RNA, 19 nt, Homo sapiens
  misc_RNA (1)...(19): siRNA sense strand
ggaagaaacugcuuaucca

SEQ ID NO: 1015598 - RNA, 19 nt, Homo sapiens
  misc_RNA (1)...(19): siRNA sense strand
ucacugacuuuguuaauga

SEQ ID NO: 1015599 - RNA, 19 nt, Homo sapiens
  misc_RNA (1)...(19): siRNA sense strand
gacaaguacugaauuaguu

SEQ ID NO: 1015600 - RNA, 19 nt, Homo sapiens
  misc_RNA (1)...(19): siRNA sense strand
gaagacaguaucuauauug

SEQ ID NO: 1015601 - RNA, 19 nt, Homo sapiens
  misc_RNA (1)...(19): siRNA sense strand
gacaguaucuauauuggaa

SEQ ID NO: 1015602 - RNA, 19 nt, Homo sapiens
  misc_RNA (1)...(19): siRNA sense strand
aaagauaccaccaagaaua

SEQ ID NO: 1015603 - RNA, 19 nt, Homo sapiens
  misc_RNA (1)...(19): siRNA sense strand
ggaugaauuuagacagaua

SEQ ID NO: 1015604 - RNA, 19 nt, Homo sapiens
  misc_RNA (1)...(19): siRNA sense strand
ggucagauauagaaauguu

SEQ ID NO: 1015605 - RNA, 19 nt, Homo sapiens
  misc_RNA (1)...(19): siRNA sense strand
caaagaugcuaaagagaga

SEQ ID NO: 1015606 - RNA, 19 nt, Homo sapiens
  misc_RNA (1)...(19): siRNA sense strand
ucagaaagauacaugaaga

SEQ ID NO: 1015607 - RNA, 19 nt, Homo sapiens
  misc_RNA (1)...(19): siRNA sense strand
ucaagaaguugucauuguu

SEQ ID NO: 1015608 - RNA, 19 nt, Homo sapiens
  misc_RNA (1)...(19): siRNA sense strand
guuaagugguagucaguua

SEQ ID NO: 1015609 - RNA, 19 nt, Homo sapiens
  misc_RNA (1)...(19): siRNA sense strand
gaaagauacaugaagauga

SEQ ID NO: 1015610 - RNA, 19 nt, Homo sapiens
  misc_RNA (1)...(19): siRNA sense strand
guaguggucucaauaagug

SEQ ID NO: 1015611 - RNA, 19 nt, Homo sapiens
  misc_RNA (1)...(19): siRNA sense strand
gcucuucacugacuuuguu

SEQ ID NO: 1015612 - RNA, 19 nt, Homo sapiens
  misc_RNA (1)...(19): siRNA sense strand
agagagaacuggagagaga

SEQ ID NO: 1015613 - RNA, 19 nt, Homo sapiens
  misc_RNA (1)...(19): siRNA sense strand
gcagauagagcaaggagaa

SEQ ID NO: 1015614 - RNA, 19 nt, Homo sapiens
  misc_RNA (1)...(19): siRNA sense strand
ccaguucacuuuaaagaau

SEQ ID NO: 1015615 - RNA, 19 nt, Homo sapiens
  misc_RNA (1)...(19): siRNA sense strand
gaagauguccuuugaaacu

SEQ ID NO: 1015616 - RNA, 19 nt, Homo sapiens
  misc_RNA (1)...(19): siRNA sense strand
ugggaaagauuguauguug

SEQ ID NO: 1015617 - RNA, 19 nt, Homo sapiens
  misc_RNA (1)...(19): siRNA sense strand
gggcaugauuguagagaaa

SEQ ID NO: 1015618 - RNA, 19 nt, Homo sapiens
  misc_RNA (1)...(19): siRNA sense strand
cccagaauguucaucuuua

SEQ ID NO: 1015619 - RNA, 19 nt, Homo sapiens
  misc_RNA (1)...(19): siRNA sense strand
ugaaguagauaaugaugga

SEQ ID NO: 1015620 - RNA, 19 nt, Homo sapiens
  misc_RNA (1)...(19): siRNA sense strand
gaaacaugaaggaauauga

SEQ ID NO: 1015621 - RNA, 19 nt, Homo sapiens
  misc_RNA (1)...(19): siRNA sense strand
cgaagacaguaucuauauu

SEQ ID NO: 1015622 - RNA, 19 nt, Homo sapiens
  misc_RNA (1)...(19): siRNA sense strand
gauuguauguugaggcaaa

SEQ ID NO: 1015623 - RNA, 19 nt, Homo sapiens
  misc_RNA (1)...(19): siRNA sense strand
ggaaaccagcucaacaauu

SEQ ID NO: 1015624 - RNA, 19 nt, Homo sapiens
  misc_RNA (1)...(19): siRNA sense strand
gacagauaauucaaaggua

SEQ ID NO: 1015625 - RNA, 19 nt, Homo sapiens
  misc_RNA (1)...(19): siRNA sense strand
cuauaaggauggaugaauu

SEQ ID NO: 1015626 - RNA, 19 nt, Homo sapiens
  misc_RNA (1)...(19): siRNA sense strand
gggaaagauuguauguuga

SEQ ID NO: 1015627 - RNA, 19 nt, Homo sapiens
  misc_RNA (1)...(19): siRNA sense strand
gagagagaacgacuaguaa

SEQ ID NO: 1015628 - RNA, 19 nt, Homo sapiens
  misc_RNA (1)...(19): siRNA sense strand
gaacagauuagaauauugg

SEQ ID NO: 1015629 - RNA, 19 nt, Homo sapiens
  misc_RNA (1)...(19): siRNA sense strand
caagucagauucucccaau

SEQ ID NO: 1015630 - RNA, 19 nt, Homo sapiens
  misc_RNA (1)...(19): siRNA sense strand
ucaguuaaauccacuuuca

SEQ ID NO: 1015631 - RNA, 19 nt, Homo sapiens
  misc_RNA (1)...(19): siRNA sense strand
gcacaauucagauucagaa

SEQ ID NO: 1015632 - RNA, 19 nt, Homo sapiens
  misc_RNA (1)...(19): siRNA sense strand
gcacagaguucagaagacu

SEQ ID NO: 1015633 - RNA, 19 nt, Homo sapiens
  misc_RNA (1)...(19): siRNA sense strand
uugagaaguuggaugaaua

SEQ ID NO: 1015634 - RNA, 19 nt, Homo sapiens
  misc_RNA (1)...(19): siRNA sense strand
ggacaaguacugaauuagu

SEQ ID NO: 1015635 - RNA, 19 nt, Homo sapiens
  misc_RNA (1)...(19): siRNA sense strand
gaggaaaccagcucaacaa

SEQ ID NO: 1015636 - RNA, 19 nt, Homo sapiens
  misc_RNA (1)...(19): siRNA sense strand
cagauucucccaauguaua

SEQ ID NO: 1015637 - RNA, 19 nt, Homo sapiens
  misc_RNA (1)...(19): siRNA sense strand
aaacgucaguucaguagug

SEQ ID NO: 1015638 - RNA, 19 nt, Homo sapiens
  misc_RNA (1)...(19): siRNA sense strand
gcagagaagauguccuuug

SEQ ID NO: 1015639 - RNA, 19 nt, Homo sapiens
  misc_RNA (1)...(19): siRNA sense strand
caugaaggaauaugaagua

SEQ ID NO: 1015640 - RNA, 19 nt, Homo sapiens
  misc_RNA (1)...(19): siRNA sense strand
uuaaagauaccaccaagaa

SEQ ID NO: 1015641 - RNA, 19 nt, Homo sapiens
  misc_RNA (1)...(19): siRNA sense strand
ucaguuacauggcaaguca

SEQ ID NO: 1015642 - RNA, 19 nt, Homo sapiens
  misc_RNA (1)...(19): siRNA sense strand
gaagaaauuggaaaucaag

SEQ ID NO: 1015643 - RNA, 19 nt, Homo sapiens
  misc_RNA (1)...(19): siRNA sense strand
caaacuaagagaacagauu

SEQ ID NO: 1015644 - RNA, 19 nt, Homo sapiens
  misc_RNA (1)...(19): siRNA sense strand
aaggauggaugaauuuaga

SEQ ID NO: 1015645 - RNA, 19 nt, Homo sapiens
  misc_RNA (1)...(19): siRNA sense strand
aaauuaagcaggcuaaaga

SEQ ID NO: 1015646 - RNA, 19 nt, Homo sapiens
  misc_RNA (1)...(19): siRNA sense strand
agggacaaguacugaauua

SEQ ID NO: 1015647 - RNA, 19 nt, Homo sapiens
  misc_RNA (1)...(19): siRNA sense strand
ugacagugauucaucuugu

SEQ ID NO: 1015648 - RNA, 19 nt, Homo sapiens
  misc_RNA (1)...(19): siRNA sense strand
gaaauuggaaaucaagaag

SEQ ID NO: 1015649 - RNA, 19 nt, Homo sapiens
  misc_RNA (1)...(19): siRNA sense strand
cuauuuacauccacaguau

SEQ ID NO: 1015650 - RNA, 19 nt, Homo sapiens
  misc_RNA (1)...(19): siRNA sense strand
ggagaaagcagccaaaaug

SEQ ID NO: 1015651 - RNA, 19 nt, Homo sapiens
  misc_RNA (1)...(19): siRNA sense strand
gaaacugcuuauccagcuu

SEQ ID NO: 1015652 - RNA, 19 nt, Homo sapiens
  misc_RNA (1)...(19): siRNA sense strand
gaaauguugaauucuguga

SEQ ID NO: 1015653 - RNA, 19 nt, Homo sapiens
  misc_RNA (1)...(19): siRNA sense strand
ggcuuguucugguguauuu

SEQ ID NO: 1015654 - RNA, 19 nt, Homo sapiens
  misc_RNA (1)...(19): siRNA sense strand
guauaaggcaccuacagaa

SEQ ID NO: 1015655 - RNA, 19 nt, Homo sapiens
  misc_RNA (1)...(19): siRNA sense strand
ccagaauguucaucuuuag

SEQ ID NO: 1015656 - RNA, 19 nt, Homo sapiens
  misc_RNA (1)...(19): siRNA sense strand
gauaaagggacaaguacug

SEQ ID NO: 1015657 - RNA, 19 nt, Homo sapiens
  misc_RNA (1)...(19): siRNA sense strand
caacaguuagucagaaaga

SEQ ID NO: 1015658 - RNA, 19 nt, Homo sapiens
  misc_RNA (1)...(19): siRNA sense strand
aaagauacccgaagacagu

SEQ ID NO: 1015659 - RNA, 19 nt, Homo sapiens
  misc_RNA (1)...(19): siRNA sense strand
gaaccuugcuacagaaaau

SEQ ID NO: 1015660 - RNA, 19 nt, Homo sapiens
  misc_RNA (1)...(19): siRNA sense strand
gaucaguucaucaauaagu

SEQ ID NO: 1015661 - RNA, 19 nt, Homo sapiens
  misc_RNA (1)...(19): siRNA sense strand
guucugguguauuugauug

SEQ ID NO: 1015662 - RNA, 19 nt, Homo sapiens
  misc_RNA (1)...(19): siRNA sense strand
ggaggaaaccagcucaaca

SEQ ID NO: 1015663 - RNA, 19 nt, Homo sapiens
  misc_RNA (1)...(19): siRNA sense strand
gucagauucucccaaugua

SEQ ID NO: 1015664 - RNA, 19 nt, Homo sapiens
  misc_RNA (1)...(19): siRNA sense strand
gaacaagaaacugaaccuu

SEQ ID NO: 1015665 - RNA, 19 nt, Homo sapiens
  misc_RNA (1)...(19): siRNA sense strand
gcccaguccugccuuuaga

SEQ ID NO: 1015666 - RNA, 19 nt, Homo sapiens
  misc_RNA (1)...(19): siRNA sense strand
guagugaugaaaccaguaa

SEQ ID NO: 1015667 - RNA, 19 nt, Homo sapiens
  misc_RNA (1)...(19): siRNA sense strand
ccgaagacaguaucuauau

SEQ ID NO: 1015668 - RNA, 19 nt, Homo sapiens
  misc_RNA (1)...(19): siRNA sense strand
gucaacaguuagucagaaa

SEQ ID NO: 1015669 - RNA, 19 nt, Homo sapiens
  misc_RNA (1)...(19): siRNA sense strand
acaggaagaguuaaacaaa

SEQ ID NO: 1015670 - RNA, 19 nt, Homo sapiens
  misc_RNA (1)...(19): siRNA sense strand
acaguuagucagaaagaua

SEQ ID NO: 1015671 - RNA, 19 nt, Homo sapiens
  misc_RNA (1)...(19): siRNA sense strand
caagaguccaugagccuuu

SEQ ID NO: 1015672 - RNA, 19 nt, Homo sapiens
  misc_RNA (1)...(19): siRNA sense strand
uaaggcaucauaaagagaa

SEQ ID NO: 1015673 - RNA, 19 nt, Homo sapiens
  misc_RNA (1)...(19): siRNA sense strand
ggaaagauuguauguugag

SEQ ID NO: 1015674 - RNA, 19 nt, Homo sapiens
  misc_RNA (1)...(19): siRNA sense strand
auagcaaucuuacgggaaa

SEQ ID NO: 1015675 - RNA, 19 nt, Homo sapiens
  misc_RNA (1)...(19): siRNA sense strand
cccaauguauauacugaaa

SEQ ID NO: 1015676 - RNA, 19 nt, Homo sapiens
  misc_RNA (1)...(19): siRNA sense strand
gauacaugaagaugaauug

SEQ ID NO: 1015677 - RNA, 19 nt, Homo sapiens
  misc_RNA (1)...(19): siRNA sense strand
caagaaguugucauuguug

SEQ ID NO: 1015678 - RNA, 19 nt, Homo sapiens
  misc_RNA (1)...(19): siRNA sense strand
uauaaggcaccuacagaaa

SEQ ID NO: 1015679 - RNA, 19 nt, Homo sapiens
  misc_RNA (1)...(19): siRNA sense strand
guaaacgucaguucaguag

SEQ ID NO: 1015680 - RNA, 19 nt, Homo sapiens
  misc_RNA (1)...(19): siRNA sense strand
aacaugggcucuuccucua

SEQ ID NO: 1015681 - RNA, 19 nt, Homo sapiens
  misc_RNA (1)...(19): siRNA sense strand
ggcaaaagaucaaaaugga

SEQ ID NO: 1015682 - RNA, 19 nt, Homo sapiens
  misc_RNA (1)...(19): siRNA sense strand
uuacauggcaagucagauu

SEQ ID NO: 1015683 - RNA, 19 nt, Homo sapiens
  misc_RNA (1)...(19): siRNA sense strand
ggauuuggccauuucuaug

SEQ ID NO: 1015684 - RNA, 19 nt, Homo sapiens
  misc_RNA (1)...(19): siRNA sense strand
ucaguaguggucucaauaa

SEQ ID NO: 1015685 - RNA, 19 nt, Homo sapiens
  misc_RNA (1)...(19): siRNA sense strand
gaguaaacgucaguucagu

SEQ ID NO: 1015686 - RNA, 19 nt, Homo sapiens
  misc_RNA (1)...(19): siRNA sense strand
aagaaguugucauuguuga

SEQ ID NO: 1015687 - RNA, 19 nt, Homo sapiens
  misc_RNA (1)...(19): siRNA sense strand
ucagacacuuuaaagauac

SEQ ID NO: 1015688 - RNA, 19 nt, Homo sapiens
  misc_RNA (1)...(19): siRNA sense strand
gggaaaggcuguuuacuuc

SEQ ID NO: 1015689 - RNA, 19 nt, Homo sapiens
  misc_RNA (1)...(19): siRNA sense strand
gaaaggacccucaagacaa

SEQ ID NO: 1015690 - RNA, 19 nt, Homo sapiens
  misc_RNA (1)...(19): siRNA sense strand
gaagaacacugcucugcau

SEQ ID NO: 1015691 - RNA, 19 nt, Homo sapiens
  misc_RNA (1)...(19): siRNA sense strand
ugcauaaggucacauauuu

SEQ ID NO: 1015692 - RNA, 19 nt, Homo sapiens
  misc_RNA (1)...(19): siRNA sense strand
ggucacauauuuacagaau

SEQ ID NO: 1015693 - RNA, 19 nt, Homo sapiens
  misc_RNA (1)...(19): siRNA sense strand
gcauaaggucacauauuua

SEQ ID NO: 1015694 - RNA, 19 nt, Homo sapiens
  misc_RNA (1)...(19): siRNA sense strand
aaaggacccucaagacaaa

SEQ ID NO: 1015695 - RNA, 19 nt, Homo sapiens
  misc_RNA (1)...(19): siRNA sense strand
ggacuauauuucucuguga

SEQ ID NO: 1015696 - RNA, 19 nt, Homo sapiens
  misc_RNA (1)...(19): siRNA sense strand
ggauaucuuuggugacuug

SEQ ID NO: 1015697 - RNA, 19 nt, Homo sapiens
  misc_RNA (1)...(19): siRNA sense strand
ggacacaggacuauauuuc

SEQ ID NO: 1015698 - RNA, 19 nt, Homo sapiens
  misc_RNA (1)...(19): siRNA sense strand
gaacacugcucugcauaag

SEQ ID NO: 1015699 - RNA, 19 nt, Homo sapiens
  misc_RNA (1)...(19): siRNA sense strand
ggagaaaggacccucaaga

SEQ ID NO: 1015700 - RNA, 19 nt, Homo sapiens
  misc_RNA (1)...(19): siRNA sense strand
gaacaucaccaucacucaa

SEQ ID NO: 1015701 - RNA, 19 nt, Homo sapiens
  misc_RNA (1)...(19): siRNA sense strand
caacugcucugcuacuucu

SEQ ID NO: 1015702 - RNA, 19 nt, Homo sapiens
  misc_RNA (1)...(19): siRNA sense strand
caccaucacucaagguuug

SEQ ID NO: 1015703 - RNA, 19 nt, Homo sapiens
  misc_RNA (1)...(19): siRNA sense strand
ggacugaagaucucccaaa

SEQ ID NO: 1015704 - RNA, 19 nt, Homo sapiens
  misc_RNA (1)...(19): siRNA sense strand
ucacauauuuacagaaugg

SEQ ID NO: 1015705 - RNA, 19 nt, Homo sapiens
  misc_RNA (1)...(19): siRNA sense strand
cacagugguuucacaauga

SEQ ID NO: 1015706 - RNA, 19 nt, Homo sapiens
  misc_RNA (1)...(19): siRNA sense strand
acacagugguuucacaaug

SEQ ID NO: 1015707 - RNA, 19 nt, Homo sapiens
  misc_RNA (1)...(19): siRNA sense strand
ugucaaccaucucaucauu

SEQ ID NO: 1015708 - RNA, 19 nt, Homo sapiens
  misc_RNA (1)...(19): siRNA sense strand
ugucacagcuggaagaaca

SEQ ID NO: 1015709 - RNA, 19 nt, Homo sapiens
  misc_RNA (1)...(19): siRNA sense strand
gaguacaggugccagacaa

SEQ ID NO: 1015710 - RNA, 19 nt, Homo sapiens
  misc_RNA (1)...(19): siRNA sense strand
gcucugcuacuucuaguuu

SEQ ID NO: 1015711 - RNA, 19 nt, Homo sapiens
  misc_RNA (1)...(19): siRNA sense strand
gaaaggcuguuuacuuccu

SEQ ID NO: 1015712 - RNA, 19 nt, Homo sapiens
  misc_RNA (1)...(19): siRNA sense strand
gguacagggugcucgagaa

SEQ ID NO: 1015713 - RNA, 19 nt, Homo sapiens
  misc_RNA (1)...(19): siRNA sense strand
gagacuggaaggaccauaa

SEQ ID NO: 1015714 - RNA, 19 nt, Homo sapiens
  misc_RNA (1)...(19): siRNA sense strand
gacuauauuucucugugaa

SEQ ID NO: 1015715 - RNA, 19 nt, Homo sapiens
  misc_RNA (1)...(19): siRNA sense strand
acacugcucugcauaaggu

SEQ ID NO: 1015716 - RNA, 19 nt, Homo sapiens
  misc_RNA (1)...(19): siRNA sense strand
ucaaccaucucaucauucu

SEQ ID NO: 1015717 - RNA, 19 nt, Homo sapiens
  misc_RNA (1)...(19): siRNA sense strand
gacugaagaucucccaaag

SEQ ID NO: 1015718 - RNA, 19 nt, Homo sapiens
  misc_RNA (1)...(19): siRNA sense strand
gaggacaauuccacacagu

SEQ ID NO: 1015719 - RNA, 19 nt, Homo sapiens
  misc_RNA (1)...(19): siRNA sense strand
cgacgacaguggagaguac

SEQ ID NO: 1015720 - RNA, 19 nt, Homo sapiens
  misc_RNA (1)...(19): siRNA sense strand
gccucgagcuacuucauug

SEQ ID NO: 1015721 - RNA, 19 nt, Homo sapiens
  misc_RNA (1)...(19): siRNA sense strand
gagaaaggacccucaagac

SEQ ID NO: 1015722 - RNA, 19 nt, Homo sapiens
  misc_RNA (1)...(19): siRNA sense strand
acagggugcucgagaagga

SEQ ID NO: 1015723 - RNA, 19 nt, Homo sapiens
  misc_RNA (1)...(19): siRNA sense strand
ccucccaacugcucugcua

SEQ ID NO: 1015724 - RNA, 19 nt, Homo sapiens
  misc_RNA (1)...(19): siRNA sense strand
acacaggacuauauuucuc

SEQ ID NO: 1015725 - RNA, 19 nt, Homo sapiens
  misc_RNA (1)...(19): siRNA sense strand
cccaaaggcugugguguuc

SEQ ID NO: 1015726 - RNA, 19 nt, Homo sapiens
  misc_RNA (1)...(19): siRNA sense strand
caaggaggaagacccuauu

SEQ ID NO: 1015727 - RNA, 19 nt, Homo sapiens
  misc_RNA (1)...(19): siRNA sense strand
gcagcuagaaguccauauc

SEQ ID NO: 1015728 - RNA, 19 nt, Homo sapiens
  misc_RNA (1)...(19): siRNA sense strand
cauaaggucacauauuuac

SEQ ID NO: 1015729 - RNA, 19 nt, Homo sapiens
  misc_RNA (1)...(19): siRNA sense strand
agaaaggacccucaagaca

SEQ ID NO: 1015730 - RNA, 19 nt, Homo sapiens
  misc_RNA (1)...(19): siRNA sense strand
ccuccugucuagucgguuu

SEQ ID NO: 1015731 - RNA, 19 nt, Homo sapiens
  misc_RNA (1)...(19): siRNA sense strand
gcaguggacacaggacuau

SEQ ID NO: 1015732 - RNA, 19 nt, Homo sapiens
  misc_RNA (1)...(19): siRNA sense strand
cagcuggcaugcggacuga

SEQ ID NO: 1015733 - RNA, 19 nt, Homo sapiens
  misc_RNA (1)...(19): siRNA sense strand
caacaagagacuggaagga

SEQ ID NO: 1015734 - RNA, 19 nt, Homo sapiens
  misc_RNA (1)...(19): siRNA sense strand
agaacacugcucugcauaa

SEQ ID NO: 1015735 - RNA, 19 nt, Homo sapiens
  misc_RNA (1)...(19): siRNA sense strand
caagccaggccucgagcua

SEQ ID NO: 1015736 - RNA, 19 nt, Homo sapiens
  misc_RNA (1)...(19): siRNA sense strand
cuauauuucucugugaaga

SEQ ID NO: 1015737 - RNA, 19 nt, Homo sapiens
  misc_RNA (1)...(19): siRNA sense strand
ggaggaagacccuauucac

SEQ ID NO: 1015738 - RNA, 19 nt, Homo sapiens
  misc_RNA (1)...(19): siRNA sense strand
gguaccaagucucuuucug

SEQ ID NO: 1015739 - RNA, 19 nt, Homo sapiens
  misc_RNA (1)...(19): siRNA sense strand
cugcauaaggucacauauu

SEQ ID NO: 1015740 - RNA, 19 nt, Homo sapiens
  misc_RNA (1)...(19): siRNA sense strand
caaaggcugugguguuccu

SEQ ID NO: 1015741 - RNA, 19 nt, Homo sapiens
  misc_RNA (1)...(19): siRNA sense strand
ucaaggaggaagacccuau

SEQ ID NO: 1015742 - RNA, 19 nt, Homo sapiens
  misc_RNA (1)...(19): siRNA sense strand
ccaccuggguaccaagucu

SEQ ID NO: 1015743 - RNA, 19 nt, Homo sapiens
  misc_RNA (1)...(19): siRNA sense strand
gacuuguccucuccagugu

SEQ ID NO: 1015744 - RNA, 19 nt, Homo sapiens
  misc_RNA (1)...(19): siRNA sense strand
ccggauaucuuuggugacu

SEQ ID NO: 1015745 - RNA, 19 nt, Homo sapiens
  misc_RNA (1)...(19): siRNA sense strand
guacagggugcucgagaag

SEQ ID NO: 1015746 - RNA, 19 nt, Homo sapiens
  misc_RNA (1)...(19): siRNA sense strand
ggacccucaagacaaauga

SEQ ID NO: 1015747 - RNA, 19 nt, Homo sapiens
  misc_RNA (1)...(19): siRNA sense strand
agacuggaaggaccauaaa

SEQ ID NO: 1015748 - RNA, 19 nt, Homo sapiens
  misc_RNA (1)...(19): siRNA sense strand
gcucaacaagagacuggaa

SEQ ID NO: 1015749 - RNA, 19 nt, Homo sapiens
  misc_RNA (1)...(19): siRNA sense strand
ucagagacugugaacauca

SEQ ID NO: 1015750 - RNA, 19 nt, Homo sapiens
  misc_RNA (1)...(19): siRNA sense strand
aaggucacauauuuacaga

SEQ ID NO: 1015751 - RNA, 19 nt, Homo sapiens
  misc_RNA (1)...(19): siRNA sense strand
uaaggucacauauuuacag

SEQ ID NO: 1015752 - RNA, 19 nt, Homo sapiens
  misc_RNA (1)...(19): siRNA sense strand
gacacaggacuauauuucu

SEQ ID NO: 1015753 - RNA, 19 nt, Homo sapiens
  misc_RNA (1)...(19): siRNA sense strand
ccauaucggcuggcuguug

SEQ ID NO: 1015754 - RNA, 19 nt, Homo sapiens
  misc_RNA (1)...(19): siRNA sense strand
guggacacaggacuauauu

SEQ ID NO: 1015755 - RNA, 19 nt, Homo sapiens
  misc_RNA (1)...(19): siRNA sense strand
caaaagccacacucaaaga

SEQ ID NO: 1015756 - RNA, 19 nt, Homo sapiens
  misc_RNA (1)...(19): siRNA sense strand
uccuggagccucaauggua

SEQ ID NO: 1015757 - RNA, 19 nt, Homo sapiens
  misc_RNA (1)...(19): siRNA sense strand
ggggaaaggcuguuuacuu

SEQ ID NO: 1015758 - RNA, 19 nt, Homo sapiens
  misc_RNA (1)...(19): siRNA sense strand
cagcugcuccucccaacug

SEQ ID NO: 1015759 - RNA, 19 nt, Homo sapiens
  misc_RNA (1)...(19): siRNA sense strand
gcuauuacauugugcauua

SEQ ID NO: 1015760 - RNA, 19 nt, Homo sapiens
  misc_RNA (1)...(19): siRNA sense strand
ggagguagaugcuuuaaau

SEQ ID NO: 1015761 - RNA, 19 nt, Homo sapiens
  misc_RNA (1)...(19): siRNA sense strand
uaagggaccucauugauaa

SEQ ID NO: 1015762 - RNA, 19 nt, Homo sapiens
  misc_RNA (1)...(19): siRNA sense strand
gcagaaggcuauuucagaa

SEQ ID NO: 1015763 - RNA, 19 nt, Homo sapiens
  misc_RNA (1)...(19): siRNA sense strand
ggaaugaucuuuggcuaaa

SEQ ID NO: 1015764 - RNA, 19 nt, Homo sapiens
  misc_RNA (1)...(19): siRNA sense strand
gaacuuggcucaucuucca

SEQ ID NO: 1015765 - RNA, 19 nt, Homo sapiens
  misc_RNA (1)...(19): siRNA sense strand
gagucaagguuucuguuua

SEQ ID NO: 1015766 - RNA, 19 nt, Homo sapiens
  misc_RNA (1)...(19): siRNA sense strand
gcuacuagaugaaagcuuu

SEQ ID NO: 1015767 - RNA, 19 nt, Homo sapiens
  misc_RNA (1)...(19): siRNA sense strand
gggcaagucucauuaacaa

SEQ ID NO: 1015768 - RNA, 19 nt, Homo sapiens
  misc_RNA (1)...(19): siRNA sense strand
gaaccugccuucaaagcaa

SEQ ID NO: 1015769 - RNA, 19 nt, Homo sapiens
  misc_RNA (1)...(19): siRNA sense strand
caagauaaaucaagcagau

SEQ ID NO: 1015770 - RNA, 19 nt, Homo sapiens
  misc_RNA (1)...(19): siRNA sense strand
gauaguauggcaaguauuu

SEQ ID NO: 1015771 - RNA, 19 nt, Homo sapiens
  misc_RNA (1)...(19): siRNA sense strand
gagagaggcuaucggaaga

SEQ ID NO: 1015772 - RNA, 19 nt, Homo sapiens
  misc_RNA (1)...(19): siRNA sense strand
uaagggagcuuguauucug

SEQ ID NO: 1015773 - RNA, 19 nt, Homo sapiens
  misc_RNA (1)...(19): siRNA sense strand
gaguguggcugcaaaguga

SEQ ID NO: 1015774 - RNA, 19 nt, Homo sapiens
  misc_RNA (1)...(19): siRNA sense strand
gggaagcuguccauugaaa

SEQ ID NO: 1015775 - RNA, 19 nt, Homo sapiens
  misc_RNA (1)...(19): siRNA sense strand
gcaaucaugucauuucuac

SEQ ID NO: 1015776 - RNA, 19 nt, Homo sapiens
  misc_RNA (1)...(19): siRNA sense strand
ggagauguuugaugauguu

SEQ ID NO: 1015777 - RNA, 19 nt, Homo sapiens
  misc_RNA (1)...(19): siRNA sense strand
caauggagguagaugcuuu

SEQ ID NO: 1015778 - RNA, 19 nt, Homo sapiens
  misc_RNA (1)...(19): siRNA sense strand
ugaaugaaguggaaacuca

SEQ ID NO: 1015779 - RNA, 19 nt, Homo sapiens
  misc_RNA (1)...(19): siRNA sense strand
gugaaaagcuugaacauga

SEQ ID NO: 1015780 - RNA, 19 nt, Homo sapiens
  misc_RNA (1)...(19): siRNA sense strand
caaagcaaguuucucaauc

SEQ ID NO: 1015781 - RNA, 19 nt, Homo sapiens
  misc_RNA (1)...(19): siRNA sense strand
gcaggaacccaguaggaua

SEQ ID NO: 1015782 - RNA, 19 nt, Homo sapiens
  misc_RNA (1)...(19): siRNA sense strand
cagaagagguggaauggau

SEQ ID NO: 1015783 - RNA, 19 nt, Homo sapiens
  misc_RNA (1)...(19): siRNA sense strand
aaagugguauuguacagua

SEQ ID NO: 1015784 - RNA, 19 nt, Homo sapiens
  misc_RNA (1)...(19): siRNA sense strand
gaaaaggccuuggauuuau

SEQ ID NO: 1015785 - RNA, 19 nt, Homo sapiens
  misc_RNA (1)...(19): siRNA sense strand
gguaauggguacaacaaau

SEQ ID NO: 1015786 - RNA, 19 nt, Homo sapiens
  misc_RNA (1)...(19): siRNA sense strand
gauaagggagcuuguauuc

SEQ ID NO: 1015787 - RNA, 19 nt, Homo sapiens
  misc_RNA (1)...(19): siRNA sense strand
ccacuggccuggcaauuuc

SEQ ID NO: 1015788 - RNA, 19 nt, Homo sapiens
  misc_RNA (1)...(19): siRNA sense strand
gggauaguauggcaaguau

SEQ ID NO: 1015789 - RNA, 19 nt, Homo sapiens
  misc_RNA (1)...(19): siRNA sense strand
gagcugauuccuauguaua

SEQ ID NO: 1015790 - RNA, 19 nt, Homo sapiens
  misc_RNA (1)...(19): siRNA sense strand
ccagaagcauagcuauaaa

SEQ ID NO: 1015791 - RNA, 19 nt, Homo sapiens
  misc_RNA (1)...(19): siRNA sense strand
gcacagaaggcugggauuu

SEQ ID NO: 1015792 - RNA, 19 nt, Homo sapiens
  misc_RNA (1)...(19): siRNA sense strand
aaagcaaguuucucaauca

SEQ ID NO: 1015793 - RNA, 19 nt, Homo sapiens
  misc_RNA (1)...(19): siRNA sense strand
cuaagggaccucauugaua

SEQ ID NO: 1015794 - RNA, 19 nt, Homo sapiens
  misc_RNA (1)...(19): siRNA sense strand
gaucgggcaagucucauua

SEQ ID NO: 1015795 - RNA, 19 nt, Homo sapiens
  misc_RNA (1)...(19): siRNA sense strand
aaucugcucuguuguuuga

SEQ ID NO: 1015796 - RNA, 19 nt, Homo sapiens
  misc_RNA (1)...(19): siRNA sense strand
gaacugaggauacuagcau

SEQ ID NO: 1015797 - RNA, 19 nt, Homo sapiens
  misc_RNA (1)...(19): siRNA sense strand
ggugaaaucugugacuguu

SEQ ID NO: 1015798 - RNA, 19 nt, Homo sapiens
  misc_RNA (1)...(19): siRNA sense strand
gcaaguuucucaaucaaaa

SEQ ID NO: 1015799 - RNA, 19 nt, Homo sapiens
  misc_RNA (1)...(19): siRNA sense strand
ucuuagcgcugacgcauuu

SEQ ID NO: 1015800 - RNA, 19 nt, Homo sapiens
  misc_RNA (1)...(19): siRNA sense strand
acaaaucaauucuccacaa

SEQ ID NO: 1015801 - RNA, 19 nt, Homo sapiens
  misc_RNA (1)...(19): siRNA sense strand
gaauuugcccucugcagaa

SEQ ID NO: 1015802 - RNA, 19 nt, Homo sapiens
  misc_RNA (1)...(19): siRNA sense strand
gcacugaagcaucuccaaa

SEQ ID NO: 1015803 - RNA, 19 nt, Homo sapiens
  misc_RNA (1)...(19): siRNA sense strand
gaagcaagagcacuacaug

SEQ ID NO: 1015804 - RNA, 19 nt, Homo sapiens
  misc_RNA (1)...(19): siRNA sense strand
gauacuagcaucaacacaa

SEQ ID NO: 1015805 - RNA, 19 nt, Homo sapiens
  misc_RNA (1)...(19): siRNA sense strand
ucacuaugcuggcaaucuu

SEQ ID NO: 1015806 - RNA, 19 nt, Homo sapiens
  misc_RNA (1)...(19): siRNA sense strand
gagguggaauggaucaaau

SEQ ID NO: 1015807 - RNA, 19 nt, Homo sapiens
  misc_RNA (1)...(19): siRNA sense strand
gagaaucugcucuguuguu

SEQ ID NO: 1015808 - RNA, 19 nt, Homo sapiens
  misc_RNA (1)...(19): siRNA sense strand
gacaacauauagagaaucu

SEQ ID NO: 1015809 - RNA, 19 nt, Homo sapiens
  misc_RNA (1)...(19): siRNA sense strand
ggagucaagguuucuguuu

SEQ ID NO: 1015810 - RNA, 19 nt, Homo sapiens
  misc_RNA (1)...(19): siRNA sense strand
gaggaccugugggauagua

SEQ ID NO: 1015811 - RNA, 19 nt, Homo sapiens
  misc_RNA (1)...(19): siRNA sense strand
caaaucaauucuccacaag

SEQ ID NO: 1015812 - RNA, 19 nt, Homo sapiens
  misc_RNA (1)...(19): siRNA sense strand
ccacaaauucuuacacuca

SEQ ID NO: 1015813 - RNA, 19 nt, Homo sapiens
  misc_RNA (1)...(19): siRNA sense strand
acacagcagucagcaguaa

SEQ ID NO: 1015814 - RNA, 19 nt, Homo sapiens
  misc_RNA (1)...(19): siRNA sense strand
aaaccaugaugaacacuug

SEQ ID NO: 1015815 - RNA, 19 nt, Homo sapiens
  misc_RNA (1)...(19): siRNA sense strand
cugaaggacucauagaaga

SEQ ID NO: 1015816 - RNA, 19 nt, Homo sapiens
  misc_RNA (1)...(19): siRNA sense strand
ucaggaguuuccacaaauu

SEQ ID NO: 1015817 - RNA, 19 nt, Homo sapiens
  misc_RNA (1)...(19): siRNA sense strand
gggcaugaauggcuauuac

SEQ ID NO: 1015818 - RNA, 19 nt, Homo sapiens
  misc_RNA (1)...(19): siRNA sense strand
ugaauaugcuaagggagua

SEQ ID NO: 1015819 - RNA, 19 nt, Homo sapiens
  misc_RNA (1)...(19): siRNA sense strand
acacaguugucauucacua

SEQ ID NO: 1015820 - RNA, 19 nt, Homo sapiens
  misc_RNA (1)...(19): siRNA sense strand
uugggaagcuguccauuga

SEQ ID NO: 1015821 - RNA, 19 nt, Homo sapiens
  misc_RNA (1)...(19): siRNA sense strand
ugaggauuauuucagcaua

SEQ ID NO: 1015822 - RNA, 19 nt, Homo sapiens
  misc_RNA (1)...(19): siRNA sense strand
caaauggucccuugcaauc

SEQ ID NO: 1015823 - RNA, 19 nt, Homo sapiens
  misc_RNA (1)...(19): siRNA sense strand
gcaccuagccaucuccaau

SEQ ID NO: 1015824 - RNA, 19 nt, Homo sapiens
  misc_RNA (1)...(19): siRNA sense strand
gcagucagcaguaaugauc

SEQ ID NO: 1015825 - RNA, 19 nt, Homo sapiens
  misc_RNA (1)...(19): siRNA sense strand
ggugacucuucuagaauuu

SEQ ID NO: 1015826 - RNA, 19 nt, Homo sapiens
  misc_RNA (1)...(19): siRNA sense strand
gaguuuccacaaauucuua

SEQ ID NO: 1015827 - RNA, 19 nt, Homo sapiens
  misc_RNA (1)...(19): siRNA sense strand
gaaguggaaacucaauuca

SEQ ID NO: 1015828 - RNA, 19 nt, Homo sapiens
  misc_RNA (1)...(19): siRNA sense strand
gacccauccugaacugaaa

SEQ ID NO: 1015829 - RNA, 19 nt, Homo sapiens
  misc_RNA (1)...(19): siRNA sense strand
ggacugacaacauauagag

SEQ ID NO: 1015830 - RNA, 19 nt, Homo sapiens
  misc_RNA (1)...(19): siRNA sense strand
gauguuugaugauguuucu

SEQ ID NO: 1015831 - RNA, 19 nt, Homo sapiens
  misc_RNA (1)...(19): siRNA sense strand
acugaaaguuggagauuau

SEQ ID NO: 1015832 - RNA, 19 nt, Homo sapiens
  misc_RNA (1)...(19): siRNA sense strand
agaaucugcucuguuguuu

SEQ ID NO: 1015833 - RNA, 19 nt, Homo sapiens
  misc_RNA (1)...(19): siRNA sense strand
uacaguaucuccagaagca

SEQ ID NO: 1015834 - RNA, 19 nt, Homo sapiens
  misc_RNA (1)...(19): siRNA sense strand
gagaaaagccaaauugaau

SEQ ID NO: 1015835 - RNA, 19 nt, Homo sapiens
  misc_RNA (1)...(19): siRNA sense strand
agucaagguuucuguuuau

SEQ ID NO: 1015836 - RNA, 19 nt, Homo sapiens
  misc_RNA (1)...(19): siRNA sense strand
ggcagaaggcuauuucaga

SEQ ID NO: 1015837 - RNA, 19 nt, Homo sapiens
  misc_RNA (1)...(19): siRNA sense strand
gcaccaucauccugcauag

SEQ ID NO: 1015838 - RNA, 19 nt, Homo sapiens
  misc_RNA (1)...(19): siRNA sense strand
acagacaauugaaaccauu

SEQ ID NO: 1015839 - RNA, 19 nt, Homo sapiens
  misc_RNA (1)...(19): siRNA sense strand
caaauucuuacacucauug

SEQ ID NO: 1015840 - RNA, 19 nt, Homo sapiens
  misc_RNA (1)...(19): siRNA sense strand
agauaugaaugaaguggaa

SEQ ID NO: 1015841 - RNA, 19 nt, Homo sapiens
  misc_RNA (1)...(19): siRNA sense strand
ugaaaaggccuuggauuua

SEQ ID NO: 1015842 - RNA, 19 nt, Homo sapiens
  misc_RNA (1)...(19): siRNA sense strand
guggaauggaucaaauuua

SEQ ID NO: 1015843 - RNA, 19 nt, Homo sapiens
  misc_RNA (1)...(19): siRNA sense strand
gguggaauggaucaaauuu

SEQ ID NO: 1015844 - RNA, 19 nt, Homo sapiens
  misc_RNA (1)...(19): siRNA sense strand
cugguggccuucaucauuu

SEQ ID NO: 1015845 - RNA, 19 nt, Homo sapiens
  misc_RNA (1)...(19): siRNA sense strand
gaauggccuuucccugcuu

SEQ ID NO: 1015846 - RNA, 19 nt, Homo sapiens
  misc_RNA (1)...(19): siRNA sense strand
gcuugaacaugauccugaa

SEQ ID NO: 1015847 - RNA, 19 nt, Homo sapiens
  misc_RNA (1)...(19): siRNA sense strand
ucgguuggauggauaagaa

SEQ ID NO: 1015848 - RNA, 19 nt, Homo sapiens
  misc_RNA (1)...(19): siRNA sense strand
uucaauggcuacuagauga

SEQ ID NO: 1015849 - RNA, 19 nt, Homo sapiens
  misc_RNA (1)...(19): siRNA sense strand
gcugcggagugaacuacua

SEQ ID NO: 1015850 - RNA, 19 nt, Homo sapiens
  misc_RNA (1)...(19): siRNA sense strand
guaaugaucgggcaagucu

SEQ ID NO: 1015851 - RNA, 19 nt, Homo sapiens
  misc_RNA (1)...(19): siRNA sense strand
gaugauggaugggacucuu

SEQ ID NO: 1015852 - RNA, 19 nt, Homo sapiens
  misc_RNA (1)...(19): siRNA sense strand
gaaccacgaaaguagaaau

SEQ ID NO: 1015853 - RNA, 19 nt, Homo sapiens
  misc_RNA (1)...(19): siRNA sense strand
ugacauucaucaccagcaa

SEQ ID NO: 1015854 - RNA, 19 nt, Homo sapiens
  misc_RNA (1)...(19): siRNA sense strand
gcaagagcacuacaugaag

SEQ ID NO: 1015855 - RNA, 19 nt, Homo sapiens
  misc_RNA (1)...(19): siRNA sense strand
ggaaaauccugcucagauc

SEQ ID NO: 1015856 - RNA, 19 nt, Homo sapiens
  misc_RNA (1)...(19): siRNA sense strand
gacgugaccuuggcagugu

SEQ ID NO: 1015857 - RNA, 19 nt, Homo sapiens
  misc_RNA (1)...(19): siRNA sense strand
gaagagguggaauggauca

SEQ ID NO: 1015858 - RNA, 19 nt, Homo sapiens
  misc_RNA (1)...(19): siRNA sense strand
gggagauguuugaugaugu

SEQ ID NO: 1015859 - RNA, 19 nt, Homo sapiens
  misc_RNA (1)...(19): siRNA sense strand
gaacagaccugacuauguc

SEQ ID NO: 1015860 - RNA, 19 nt, Homo sapiens
  misc_RNA (1)...(19): siRNA sense strand
gaaauuaucccaagcugua

SEQ ID NO: 1015861 - RNA, 19 nt, Homo sapiens
  misc_RNA (1)...(19): siRNA sense strand
cauauuaccugugguguua

SEQ ID NO: 1015862 - RNA, 19 nt, Homo sapiens
  misc_RNA (1)...(19): siRNA sense strand
cgaaccagcucucagaaua

SEQ ID NO: 1015863 - RNA, 19 nt, Homo sapiens
  misc_RNA (1)...(19): siRNA sense strand
gaauuacagugaagacuuu

SEQ ID NO: 1015864 - RNA, 19 nt, Homo sapiens
  misc_RNA (1)...(19): siRNA sense strand
ggacaagauuugaauacaa

SEQ ID NO: 1015865 - RNA, 19 nt, Homo sapiens
  misc_RNA (1)...(19): siRNA sense strand
caggagggcugcugaagua

SEQ ID NO: 1015866 - RNA, 19 nt, Homo sapiens
  misc_RNA (1)...(19): siRNA sense strand
gggcuaggauugugucuaa

SEQ ID NO: 1015867 - RNA, 19 nt, Homo sapiens
  misc_RNA (1)...(19): siRNA sense strand
gaucacagccucuacauau

SEQ ID NO: 1015868 - RNA, 19 nt, Homo sapiens
  misc_RNA (1)...(19): siRNA sense strand
gcagagauauccaguccuu

SEQ ID NO: 1015869 - RNA, 19 nt, Homo sapiens
  misc_RNA (1)...(19): siRNA sense strand
gcacugaauucaagacugu

SEQ ID NO: 1015870 - RNA, 19 nt, Homo sapiens
  misc_RNA (1)...(19): siRNA sense strand
gccgaacacucuuggcuua

SEQ ID NO: 1015871 - RNA, 19 nt, Homo sapiens
  misc_RNA (1)...(19): siRNA sense strand
agaacgauuucgagauuua

SEQ ID NO: 1015872 - RNA, 19 nt, Homo sapiens
  misc_RNA (1)...(19): siRNA sense strand
agcagaacauuccauauua

SEQ ID NO: 1015873 - RNA, 19 nt, Homo sapiens
  misc_RNA (1)...(19): siRNA sense strand
aggaaucacugaacuauga

SEQ ID NO: 1015874 - RNA, 19 nt, Homo sapiens
  misc_RNA (1)...(19): siRNA sense strand
acagaacgauuucgagauu

SEQ ID NO: 1015875 - RNA, 19 nt, Homo sapiens
  misc_RNA (1)...(19): siRNA sense strand
gaaauucugcccuucauuc

SEQ ID NO: 1015876 - RNA, 19 nt, Homo sapiens
  misc_RNA (1)...(19): siRNA sense strand
gagaugaggauccuagaaa

SEQ ID NO: 1015877 - RNA, 19 nt, Homo sapiens
  misc_RNA (1)...(19): siRNA sense strand
caguguaucugcauuagaa

SEQ ID NO: 1015878 - RNA, 19 nt, Homo sapiens
  misc_RNA (1)...(19): siRNA sense strand
aaacuucucuucacaacug

SEQ ID NO: 1015879 - RNA, 19 nt, Homo sapiens
  misc_RNA (1)...(19): siRNA sense strand
gagcccagauuccaagcua

SEQ ID NO: 1015880 - RNA, 19 nt, Homo sapiens
  misc_RNA (1)...(19): siRNA sense strand
gcccucaacuucucaguga

SEQ ID NO: 1015881 - RNA, 19 nt, Homo sapiens
  misc_RNA (1)...(19): siRNA sense strand
gcagcaagauaccgagaug

SEQ ID NO: 1015882 - RNA, 19 nt, Homo sapiens
  misc_RNA (1)...(19): siRNA sense strand
gcagaacauuccauauuac

SEQ ID NO: 1015883 - RNA, 19 nt, Homo sapiens
  misc_RNA (1)...(19): siRNA sense strand
ccaggagauuguuggauaa

SEQ ID NO: 1015884 - RNA, 19 nt, Homo sapiens
  misc_RNA (1)...(19): siRNA sense strand
ccacagacuuggcuuugga

SEQ ID NO: 1015885 - RNA, 19 nt, Homo sapiens
  misc_RNA (1)...(19): siRNA sense strand
acuaugauaucuucuggua

SEQ ID NO: 1015886 - RNA, 19 nt, Homo sapiens
  misc_RNA (1)...(19): siRNA sense strand
ccucagaugucauggaaau

SEQ ID NO: 1015887 - RNA, 19 nt, Homo sapiens
  misc_RNA (1)...(19): siRNA sense strand
gcaauaagccagucaccau

SEQ ID NO: 1015888 - RNA, 19 nt, Homo sapiens
  misc_RNA (1)...(19): siRNA sense strand
gaugggauacagaagauaa

SEQ ID NO: 1015889 - RNA, 19 nt, Homo sapiens
  misc_RNA (1)...(19): siRNA sense strand
caacucauaugggacaaga

SEQ ID NO: 1015890 - RNA, 19 nt, Homo sapiens
  misc_RNA (1)...(19): siRNA sense strand
guaaccagaacaacucaua

SEQ ID NO: 1015891 - RNA, 19 nt, Homo sapiens
  misc_RNA (1)...(19): siRNA sense strand
gagggcugcugaaguauca

SEQ ID NO: 1015892 - RNA, 19 nt, Homo sapiens
  misc_RNA (1)...(19): siRNA sense strand
uggaaaccauacaagcuua

SEQ ID NO: 1015893 - RNA, 19 nt, Homo sapiens
  misc_RNA (1)...(19): siRNA sense strand
gaaccagcucucagaauau

SEQ ID NO: 1015894 - RNA, 19 nt, Homo sapiens
  misc_RNA (1)...(19): siRNA sense strand
aaccucaacugcagccuua

SEQ ID NO: 1015895 - RNA, 19 nt, Homo sapiens
  misc_RNA (1)...(19): siRNA sense strand
gcugaaguaucaaacuaau

SEQ ID NO: 1015896 - RNA, 19 nt, Homo sapiens
  misc_RNA (1)...(19): siRNA sense strand
agacuuggcuuuggauuuc

SEQ ID NO: 1015897 - RNA, 19 nt, Homo sapiens
  misc_RNA (1)...(19): siRNA sense strand
gcauguggcugcccaucug

SEQ ID NO: 1015898 - RNA, 19 nt, Homo sapiens
  misc_RNA (1)...(19): siRNA sense strand
ggaaguccauuugaggaau

SEQ ID NO: 1015899 - RNA, 19 nt, Homo sapiens
  misc_RNA (1)...(19): siRNA sense strand
cugcugacguugcauguuu

SEQ ID NO: 1015900 - RNA, 19 nt, Homo sapiens
  misc_RNA (1)...(19): siRNA sense strand
aaaccuucuugcuguauaa

SEQ ID NO: 1015901 - RNA, 19 nt, Homo sapiens
  misc_RNA (1)...(19): siRNA sense strand
aaacagaugggauacagaa

SEQ ID NO: 1015902 - RNA, 19 nt, Homo sapiens
  misc_RNA (1)...(19): siRNA sense strand
ucaugaaccuuucccugaa

SEQ ID NO: 1015903 - RNA, 19 nt, Homo sapiens
  misc_RNA (1)...(19): siRNA sense strand
cauaaccucuucuuugucu

SEQ ID NO: 1015904 - RNA, 19 nt, Homo sapiens
  misc_RNA (1)...(19): siRNA sense strand
accaggagauuguuggaua

SEQ ID NO: 1015905 - RNA, 19 nt, Homo sapiens
  misc_RNA (1)...(19): siRNA sense strand
gaaguccauuugaggaauc

SEQ ID NO: 1015906 - RNA, 19 nt, Homo sapiens
  misc_RNA (1)...(19): siRNA sense strand
aagcagaacauuccauauu

SEQ ID NO: 1015907 - RNA, 19 nt, Homo sapiens
  misc_RNA (1)...(19): siRNA sense strand
ggaaaaccuucuugcugua

SEQ ID NO: 1015908 - RNA, 19 nt, Homo sapiens
  misc_RNA (1)...(19): siRNA sense strand
cguccucgguggaaacuuu

SEQ ID NO: 1015909 - RNA, 19 nt, Homo sapiens
  misc_RNA (1)...(19): siRNA sense strand
gcuuagaagacuauacuuu

SEQ ID NO: 1015910 - RNA, 19 nt, Homo sapiens
  misc_RNA (1)...(19): siRNA sense strand
gguguuacuaucuguauuu

SEQ ID NO: 1015911 - RNA, 19 nt, Homo sapiens
  misc_RNA (1)...(19): siRNA sense strand
gcauggugguggugcuauu

SEQ ID NO: 1015912 - RNA, 19 nt, Homo sapiens
  misc_RNA (1)...(19): siRNA sense strand
ucauuucggucauaaguca

SEQ ID NO: 1015913 - RNA, 19 nt, Homo sapiens
  misc_RNA (1)...(19): siRNA sense strand
gggacaagauuugaauaca

SEQ ID NO: 1015914 - RNA, 19 nt, Homo sapiens
  misc_RNA (1)...(19): siRNA sense strand
cagaugggauacagaagau

SEQ ID NO: 1015915 - RNA, 19 nt, Homo sapiens
  misc_RNA (1)...(19): siRNA sense strand
ugaacugaaugcagcaaga

SEQ ID NO: 1015916 - RNA, 19 nt, Homo sapiens
  misc_RNA (1)...(19): siRNA sense strand
ccaauucacuauccaagac

SEQ ID NO: 1015917 - RNA, 19 nt, Homo sapiens
  misc_RNA (1)...(19): siRNA sense strand
guaccucagucaaacagau

SEQ ID NO: 1015918 - RNA, 19 nt, Homo sapiens
  misc_RNA (1)...(19): siRNA sense strand
ccauuugcaucaauacuca

SEQ ID NO: 1015919 - RNA, 19 nt, Homo sapiens
  misc_RNA (1)...(19): siRNA sense strand
uaacuccauuugcaucaau

SEQ ID NO: 1015920 - RNA, 19 nt, Homo sapiens
  misc_RNA (1)...(19): siRNA sense strand
guaggagacuggacagaac

SEQ ID NO: 1015921 - RNA, 19 nt, Homo sapiens
  misc_RNA (1)...(19): siRNA sense strand
cugcugaaguaucaaacua

SEQ ID NO: 1015922 - RNA, 19 nt, Homo sapiens
  misc_RNA (1)...(19): siRNA sense strand
guggugcuauuccucauga

SEQ ID NO: 1015923 - RNA, 19 nt, Homo sapiens
  misc_RNA (1)...(19): siRNA sense strand
uaaccaagggccagaguau

SEQ ID NO: 1015924 - RNA, 19 nt, Homo sapiens
  misc_RNA (1)...(19): siRNA sense strand
agacuggacagaacgauuu

SEQ ID NO: 1015925 - RNA, 19 nt, Homo sapiens
  misc_RNA (1)...(19): siRNA sense strand
guacugugccgaaagacuu

SEQ ID NO: 1015926 - RNA, 19 nt, Homo sapiens
  misc_RNA (1)...(19): siRNA sense strand
ccagauuccaagcuaauuu

SEQ ID NO: 1015927 - RNA, 19 nt, Homo sapiens
  misc_RNA (1)...(19): siRNA sense strand
gauaucuucugguauacuc

SEQ ID NO: 1015928 - RNA, 19 nt, Homo sapiens
  misc_RNA (1)...(19): siRNA sense strand
acucauaaccucuucuuug

SEQ ID NO: 1015929 - RNA, 19 nt, Homo sapiens
  misc_RNA (1)...(19): siRNA sense strand
ugaaaccaaagcaacauuu

SEQ ID NO: 1015930 - RNA, 19 nt, Homo sapiens
  misc_RNA (1)...(19): siRNA sense strand
caccaucauuucggucaua

SEQ ID NO: 1015931 - RNA, 19 nt, Homo sapiens
  misc_RNA (1)...(19): siRNA sense strand
cucauaaccucuucuuugu

SEQ ID NO: 1015932 - RNA, 19 nt, Homo sapiens
  misc_RNA (1)...(19): siRNA sense strand
ccuguuggaugacuggaaa

SEQ ID NO: 1015933 - RNA, 19 nt, Homo sapiens
  misc_RNA (1)...(19): siRNA sense strand
cagaacgauuucgagauuu

SEQ ID NO: 1015934 - RNA, 19 nt, Homo sapiens
  misc_RNA (1)...(19): siRNA sense strand
ggugaaugcccucaacuuc

SEQ ID NO: 1015935 - RNA, 19 nt, Homo sapiens
  misc_RNA (1)...(19): siRNA sense strand
cauacaagcuuagaagacu

SEQ ID NO: 1015936 - RNA, 19 nt, Homo sapiens
  misc_RNA (1)...(19): siRNA sense strand
gaagauuuguauggaagag

SEQ ID NO: 1015937 - RNA, 19 nt, Homo sapiens
  misc_RNA (1)...(19): siRNA sense strand
aaccagcucucagaauauu

SEQ ID NO: 1015938 - RNA, 19 nt, Homo sapiens
  misc_RNA (1)...(19): siRNA sense strand
ugaagacuuuguugaacug

SEQ ID NO: 1015939 - RNA, 19 nt, Homo sapiens
  misc_RNA (1)...(19): siRNA sense strand
ugaaugcccucaacuucuc

SEQ ID NO: 1015940 - RNA, 19 nt, Homo sapiens
  misc_RNA (1)...(19): siRNA sense strand
gugaagacuuuguugaacu

SEQ ID NO: 1015941 - RNA, 19 nt, Homo sapiens
  misc_RNA (1)...(19): siRNA sense strand
cagaagauaauuggagaaa

SEQ ID NO: 1015942 - RNA, 19 nt, Homo sapiens
  misc_RNA (1)...(19): siRNA sense strand
ggauacagaagauaauugg

SEQ ID NO: 1015943 - RNA, 19 nt, Homo sapiens
  misc_RNA (1)...(19): siRNA sense strand
ucaaacagaugggauacag

SEQ ID NO: 1015944 - RNA, 19 nt, Homo sapiens
  misc_RNA (1)...(19): siRNA sense strand
gagaacagaccugacuaug

SEQ ID NO: 1015945 - RNA, 19 nt, Homo sapiens
  misc_RNA (1)...(19): siRNA sense strand
caagagaacagaccugacu

SEQ ID NO: 1015946 - RNA, 19 nt, Homo sapiens
  misc_RNA (1)...(19): siRNA sense strand
cugcguggcuggaggcauu

SEQ ID NO: 1015947 - RNA, 19 nt, Homo sapiens
  misc_RNA (1)...(19): siRNA sense strand
caacugcagccuuauccuu

SEQ ID NO: 1015948 - RNA, 19 nt, Homo sapiens
  misc_RNA (1)...(19): siRNA sense strand
caucuguucuuaaccucaa

SEQ ID NO: 1015949 - RNA, 19 nt, Homo sapiens
  misc_RNA (1)...(19): siRNA sense strand
gaacugaaugcagcaagau

SEQ ID NO: 1015950 - RNA, 19 nt, Homo sapiens
  misc_RNA (1)...(19): siRNA sense strand
agguauauccggagcaaua

SEQ ID NO: 1015951 - RNA, 19 nt, Homo sapiens
  misc_RNA (1)...(19): siRNA sense strand
ccguugguuugcagauuua

SEQ ID NO: 1015952 - RNA, 19 nt, Homo sapiens
  misc_RNA (1)...(19): siRNA sense strand
aagcagagccucagcaucu

SEQ ID NO: 1015953 - RNA, 19 nt, Homo sapiens
  misc_RNA (1)...(19): siRNA sense strand
aucccaagcuguauauuga

SEQ ID NO: 1015954 - RNA, 19 nt, Homo sapiens
  misc_RNA (1)...(19): siRNA sense strand
ggaaauccgaauggucaaa

SEQ ID NO: 1015955 - RNA, 19 nt, Homo sapiens
  misc_RNA (1)...(19): siRNA sense strand
agacuuuguugaacugaau

SEQ ID NO: 1015956 - RNA, 19 nt, Homo sapiens
  misc_RNA (1)...(19): siRNA sense strand
gaaaacuucucuucacaac

SEQ ID NO: 1015957 - RNA, 19 nt, Homo sapiens
  misc_RNA (1)...(19): siRNA sense strand
guaacuccauuugcaucaa

SEQ ID NO: 1015958 - RNA, 19 nt, Homo sapiens
  misc_RNA (1)...(19): siRNA sense strand
cauaagucaucccucagau

SEQ ID NO: 1015959 - RNA, 19 nt, Homo sapiens
  misc_RNA (1)...(19): siRNA sense strand
caacagaacuaaacaaaga

SEQ ID NO: 1015960 - RNA, 19 nt, Homo sapiens
  misc_RNA (1)...(19): siRNA sense strand
gagcagagcuuaaucgaau

SEQ ID NO: 1015961 - RNA, 19 nt, Homo sapiens
  misc_RNA (1)...(19): siRNA sense strand
gagaauagcccuuguguga

SEQ ID NO: 1015962 - RNA, 19 nt, Homo sapiens
  misc_RNA (1)...(19): siRNA sense strand
ggacuuaguuuauggaaau

SEQ ID NO: 1015963 - RNA, 19 nt, Homo sapiens
  misc_RNA (1)...(19): siRNA sense strand
ggaaagggcagaugaaauu

SEQ ID NO: 1015964 - RNA, 19 nt, Homo sapiens
  misc_RNA (1)...(19): siRNA sense strand
gaauuuagaugagcggaua

SEQ ID NO: 1015965 - RNA, 19 nt, Homo sapiens
  misc_RNA (1)...(19): siRNA sense strand
gaacagagacugcugaaag

SEQ ID NO: 1015966 - RNA, 19 nt, Homo sapiens
  misc_RNA (1)...(19): siRNA sense strand
gcaagucccuggucaagug

SEQ ID NO: 1015967 - RNA, 19 nt, Homo sapiens
  misc_RNA (1)...(19): siRNA sense strand
caacaguccuucaaagaga

SEQ ID NO: 1015968 - RNA, 19 nt, Homo sapiens
  misc_RNA (1)...(19): siRNA sense strand
uaacuagaauccugaaaug

SEQ ID NO: 1015969 - RNA, 19 nt, Homo sapiens
  misc_RNA (1)...(19): siRNA sense strand
gaaggcggcuauuuguuga

SEQ ID NO: 1015970 - RNA, 19 nt, Homo sapiens
  misc_RNA (1)...(19): siRNA sense strand
aaacagaguuccuacaugu

SEQ ID NO: 1015971 - RNA, 19 nt, Homo sapiens
  misc_RNA (1)...(19): siRNA sense strand
cggagaugcuuuacuauaa

SEQ ID NO: 1015972 - RNA, 19 nt, Homo sapiens
  misc_RNA (1)...(19): siRNA sense strand
guaaccagcaguaguaaua

SEQ ID NO: 1015973 - RNA, 19 nt, Homo sapiens
  misc_RNA (1)...(19): siRNA sense strand
gaagauggccuuuguagag

SEQ ID NO: 1015974 - RNA, 19 nt, Homo sapiens
  misc_RNA (1)...(19): siRNA sense strand
ucaaagagacugagagaaa

SEQ ID NO: 1015975 - RNA, 19 nt, Homo sapiens
  misc_RNA (1)...(19): siRNA sense strand
gaaggaaacuauguaucuu

SEQ ID NO: 1015976 - RNA, 19 nt, Homo sapiens
  misc_RNA (1)...(19): siRNA sense strand
cgaauacaguugucucaaa

SEQ ID NO: 1015977 - RNA, 19 nt, Homo sapiens
  misc_RNA (1)...(19): siRNA sense strand
ggauuuaucugguauucug

SEQ ID NO: 1015978 - RNA, 19 nt, Homo sapiens
  misc_RNA (1)...(19): siRNA sense strand
ggacuuggaaggagcauaa

SEQ ID NO: 1015979 - RNA, 19 nt, Homo sapiens
  misc_RNA (1)...(19): siRNA sense strand
gggaagacauggcaaaucu

SEQ ID NO: 1015980 - RNA, 19 nt, Homo sapiens
  misc_RNA (1)...(19): siRNA sense strand
gaaacuguguuccuuacau

SEQ ID NO: 1015981 - RNA, 19 nt, Homo sapiens
  misc_RNA (1)...(19): siRNA sense strand
gcuaacagacugaaagaaa

SEQ ID NO: 1015982 - RNA, 19 nt, Homo sapiens
  misc_RNA (1)...(19): siRNA sense strand
gcugugugcuuuggacuua

SEQ ID NO: 1015983 - RNA, 19 nt, Homo sapiens
  misc_RNA (1)...(19): siRNA sense strand
caaagagacugagagaaau

SEQ ID NO: 1015984 - RNA, 19 nt, Homo sapiens
  misc_RNA (1)...(19): siRNA sense strand
gauaaguccuuccagaaca

SEQ ID NO: 1015985 - RNA, 19 nt, Homo sapiens
  misc_RNA (1)...(19): siRNA sense strand
ccaaccacauuauacgaua

SEQ ID NO: 1015986 - RNA, 19 nt, Homo sapiens
  misc_RNA (1)...(19): siRNA sense strand
ggaaggaaacuauguaucu

SEQ ID NO: 1015987 - RNA, 19 nt, Homo sapiens
  misc_RNA (1)...(19): siRNA sense strand
gaauagcccuugugugacu

SEQ ID NO: 1015988 - RNA, 19 nt, Homo sapiens
  misc_RNA (1)...(19): siRNA sense strand
gaaaaucuguuccaacugu

SEQ ID NO: 1015989 - RNA, 19 nt, Homo sapiens
  misc_RNA (1)...(19): siRNA sense strand
caacaacaucuacaucaaa

SEQ ID NO: 1015990 - RNA, 19 nt, Homo sapiens
  misc_RNA (1)...(19): siRNA sense strand
gcagaagccaucagaauuc

SEQ ID NO: 1015991 - RNA, 19 nt, Homo sapiens
  misc_RNA (1)...(19): siRNA sense strand
gacgaggauuucaguaauu

SEQ ID NO: 1015992 - RNA, 19 nt, Homo sapiens
  misc_RNA (1)...(19): siRNA sense strand
uaaaggaacauuucuggaa

SEQ ID NO: 1015993 - RNA, 19 nt, Homo sapiens
  misc_RNA (1)...(19): siRNA sense strand
gaacuugugaacccuaauu

SEQ ID NO: 1015994 - RNA, 19 nt, Homo sapiens
  misc_RNA (1)...(19): siRNA sense strand
uaacaucuccaaccacauu

SEQ ID NO: 1015995 - RNA, 19 nt, Homo sapiens
  misc_RNA (1)...(19): siRNA sense strand
ggugauagaaguauucauu

SEQ ID NO: 1015996 - RNA, 19 nt, Homo sapiens
  misc_RNA (1)...(19): siRNA sense strand
gacauggauuuaucuggua

SEQ ID NO: 1015997 - RNA, 19 nt, Homo sapiens
  misc_RNA (1)...(19): siRNA sense strand
gcuacacgcuggagggaaa

SEQ ID NO: 1015998 - RNA, 19 nt, Homo sapiens
  misc_RNA (1)...(19): siRNA sense strand
guuagcaugugccuuauau

SEQ ID NO: 1015999 - RNA, 19 nt, Homo sapiens
  misc_RNA (1)...(19): siRNA sense strand
uauuugaugugccucuuua

SEQ ID NO: 1016000 - RNA, 19 nt, Homo sapiens
  misc_RNA (1)...(19): siRNA sense strand
caagaugcauuccacagau

SEQ ID NO: 1016001 - RNA, 19 nt, Homo sapiens
  misc_RNA (1)...(19): siRNA sense strand
gcggagaugcuuuacuaua

SEQ ID NO: 1016002 - RNA, 19 nt, Homo sapiens
  misc_RNA (1)...(19): siRNA sense strand
gugagaaacuggaacagau

SEQ ID NO: 1016003 - RNA, 19 nt, Homo sapiens
  misc_RNA (1)...(19): siRNA sense strand
gcagaugaaauuugcauug

SEQ ID NO: 1016004 - RNA, 19 nt, Homo sapiens
  misc_RNA (1)...(19): siRNA sense strand
gugaugauuuggucaauuc

SEQ ID NO: 1016005 - RNA, 19 nt, Homo sapiens
  misc_RNA (1)...(19): siRNA sense strand
gaauacaguugucucaaaa

SEQ ID NO: 1016006 - RNA, 19 nt, Homo sapiens
  misc_RNA (1)...(19): siRNA sense strand
gaacagauucucaggacau

SEQ ID NO: 1016007 - RNA, 19 nt, Homo sapiens
  misc_RNA (1)...(19): siRNA sense strand
gagaaacuguguuccuuac

SEQ ID NO: 1016008 - RNA, 19 nt, Homo sapiens
  misc_RNA (1)...(19): siRNA sense strand
gcuaaagauucuaaaccuu

SEQ ID NO: 1016009 - RNA, 19 nt, Homo sapiens
  misc_RNA (1)...(19): siRNA sense strand
gccuugaggucgucacuuu

SEQ ID NO: 1016010 - RNA, 19 nt, Homo sapiens
  misc_RNA (1)...(19): siRNA sense strand
ucuagaaccugggaacuuu

SEQ ID NO: 1016011 - RNA, 19 nt, Homo sapiens
  misc_RNA (1)...(19): siRNA sense strand
gaaagggcagaugaaauuu

SEQ ID NO: 1016012 - RNA, 19 nt, Homo sapiens
  misc_RNA (1)...(19): siRNA sense strand
ggaucucugugccaaacua

SEQ ID NO: 1016013 - RNA, 19 nt, Homo sapiens
  misc_RNA (1)...(19): siRNA sense strand
gaagaagugggaagacaug

SEQ ID NO: 1016014 - RNA, 19 nt, Homo sapiens
  misc_RNA (1)...(19): siRNA sense strand
ggaaggagcauaacaucuc

SEQ ID NO: 1016015 - RNA, 19 nt, Homo sapiens
  misc_RNA (1)...(19): siRNA sense strand
ccagaagggugacugaagu

SEQ ID NO: 1016016 - RNA, 19 nt, Homo sapiens
  misc_RNA (1)...(19): siRNA sense strand
uugcggagaugcuuuacua

SEQ ID NO: 1016017 - RNA, 19 nt, Homo sapiens
  misc_RNA (1)...(19): siRNA sense strand
caacccaggcuauugcuaa

SEQ ID NO: 1016018 - RNA, 19 nt, Homo sapiens
  misc_RNA (1)...(19): siRNA sense strand
gaugagcggauauuucuug

SEQ ID NO: 1016019 - RNA, 19 nt, Homo sapiens
  misc_RNA (1)...(19): siRNA sense strand
gagauuagaaagaaacuuc

SEQ ID NO: 1016020 - RNA, 19 nt, Homo sapiens
  misc_RNA (1)...(19): siRNA sense strand
cuaacagacugaaagaaau

SEQ ID NO: 1016021 - RNA, 19 nt, Homo sapiens
  misc_RNA (1)...(19): siRNA sense strand
cuagaauccugaaauguuc

SEQ ID NO: 1016022 - RNA, 19 nt, Homo sapiens
  misc_RNA (1)...(19): siRNA sense strand
guccugaacuuaugaugga

SEQ ID NO: 1016023 - RNA, 19 nt, Homo sapiens
  misc_RNA (1)...(19): siRNA sense strand
guagagaggugguaaaaca

SEQ ID NO: 1016024 - RNA, 19 nt, Homo sapiens
  misc_RNA (1)...(19): siRNA sense strand
uuagguacauuaaggagaa

SEQ ID NO: 1016025 - RNA, 19 nt, Homo sapiens
  misc_RNA (1)...(19): siRNA sense strand
gcugaaagggugcagauga

SEQ ID NO: 1016026 - RNA, 19 nt, Homo sapiens
  misc_RNA (1)...(19): siRNA sense strand
gaaauugggacucucucaa

SEQ ID NO: 1016027 - RNA, 19 nt, Homo sapiens
  misc_RNA (1)...(19): siRNA sense strand
gcagagcuuaaucgaauuu

SEQ ID NO: 1016028 - RNA, 19 nt, Homo sapiens
  misc_RNA (1)...(19): siRNA sense strand
uccaagauguagcuaauga

SEQ ID NO: 1016029 - RNA, 19 nt, Homo sapiens
  misc_RNA (1)...(19): siRNA sense strand
acagugacauggaagaaga

SEQ ID NO: 1016030 - RNA, 19 nt, Homo sapiens
  misc_RNA (1)...(19): siRNA sense strand
ggagccagguguauagaag

SEQ ID NO: 1016031 - RNA, 19 nt, Homo sapiens
  misc_RNA (1)...(19): siRNA sense strand
caugauuagugaugauuug

SEQ ID NO: 1016032 - RNA, 19 nt, Homo sapiens
  misc_RNA (1)...(19): siRNA sense strand
gagaacguacugagagauu

SEQ ID NO: 1016033 - RNA, 19 nt, Homo sapiens
  misc_RNA (1)...(19): siRNA sense strand
agaacguacugagagauua

SEQ ID NO: 1016034 - RNA, 19 nt, Homo sapiens
  misc_RNA (1)...(19): siRNA sense strand
gugccaaacuagauauuuc

SEQ ID NO: 1016035 - RNA, 19 nt, Homo sapiens
  misc_RNA (1)...(19): siRNA sense strand
gaagcaaggccagucugua

SEQ ID NO: 1016036 - RNA, 19 nt, Homo sapiens
  misc_RNA (1)...(19): siRNA sense strand
cagagaacguacugagaga

SEQ ID NO: 1016037 - RNA, 19 nt, Homo sapiens
  misc_RNA (1)...(19): siRNA sense strand
uaggagacauggauuuauc

SEQ ID NO: 1016038 - RNA, 19 nt, Homo sapiens
  misc_RNA (1)...(19): siRNA sense strand
agacgaggauuucaguaau

SEQ ID NO: 1016039 - RNA, 19 nt, Homo sapiens
  misc_RNA (1)...(19): siRNA sense strand
gguguuagguacauuaagg

SEQ ID NO: 1016040 - RNA, 19 nt, Homo sapiens
  misc_RNA (1)...(19): siRNA sense strand
ugagaaacuguguuccuua

SEQ ID NO: 1016041 - RNA, 19 nt, Homo sapiens
  misc_RNA (1)...(19): siRNA sense strand
uuuaaaggcuuaucugaag

SEQ ID NO: 1016042 - RNA, 19 nt, Homo sapiens
  misc_RNA (1)...(19): siRNA sense strand
acugagagauuagaaagaa

SEQ ID NO: 1016043 - RNA, 19 nt, Homo sapiens
  misc_RNA (1)...(19): siRNA sense strand
gaaauucuggcagcaguga

SEQ ID NO: 1016044 - RNA, 19 nt, Homo sapiens
  misc_RNA (1)...(19): siRNA sense strand
agaaagguauaccauuuag

SEQ ID NO: 1016045 - RNA, 19 nt, Homo sapiens
  misc_RNA (1)...(19): siRNA sense strand
aagcaaggccagucuguaa

SEQ ID NO: 1016046 - RNA, 19 nt, Homo sapiens
  misc_RNA (1)...(19): siRNA sense strand
gaagacauggcaaaucuac

SEQ ID NO: 1016047 - RNA, 19 nt, Homo sapiens
  misc_RNA (1)...(19): siRNA sense strand
acaacaacaucuacaucaa

SEQ ID NO: 1016048 - RNA, 19 nt, Homo sapiens
  misc_RNA (1)...(19): siRNA sense strand
gcagaagauggccuuugua

SEQ ID NO: 1016049 - RNA, 19 nt, Homo sapiens
  misc_RNA (1)...(19): siRNA sense strand
aaacuguguuccuuacaug

SEQ ID NO: 1016050 - RNA, 19 nt, Homo sapiens
  misc_RNA (1)...(19): siRNA sense strand
agaaagaaacuucacuguu

SEQ ID NO: 1016051 - RNA, 19 nt, Homo sapiens
  misc_RNA (1)...(19): siRNA sense strand
cagcaacaguccuucaaag

SEQ ID NO: 1016052 - RNA, 19 nt, Homo sapiens
  misc_RNA (1)...(19): siRNA sense strand
uaagacauuugccaugaag

SEQ ID NO: 1016053 - RNA, 19 nt, Homo sapiens
  misc_RNA (1)...(19): siRNA sense strand
cagacgaggauuucaguaa

SEQ ID NO: 1016054 - RNA, 19 nt, Homo sapiens
  misc_RNA (1)...(19): siRNA sense strand
uaacagacugaaagaaaug

SEQ ID NO: 1016055 - RNA, 19 nt, Homo sapiens
  misc_RNA (1)...(19): siRNA sense strand
gaaugcaccaagugagaaa

SEQ ID NO: 1016056 - RNA, 19 nt, Homo sapiens
  misc_RNA (1)...(19): siRNA sense strand
cugaaagggugcagaugaa

SEQ ID NO: 1016057 - RNA, 19 nt, Homo sapiens
  misc_RNA (1)...(19): siRNA sense strand
agacauuugccaugaagua

SEQ ID NO: 1016058 - RNA, 19 nt, Homo sapiens
  misc_RNA (1)...(19): siRNA sense strand
gcaacaguccuucaaagag

SEQ ID NO: 1016059 - RNA, 19 nt, Homo sapiens
  misc_RNA (1)...(19): siRNA sense strand
guggaaagcuuaagaguga

SEQ ID NO: 1016060 - RNA, 19 nt, Homo sapiens
  misc_RNA (1)...(19): siRNA sense strand
gcaacagaaucaugucuuu

SEQ ID NO: 1016061 - RNA, 19 nt, Homo sapiens
  misc_RNA (1)...(19): siRNA sense strand
ucagugaccuuaagagauu

SEQ ID NO: 1016062 - RNA, 19 nt, Homo sapiens
  misc_RNA (1)...(19): siRNA sense strand
gaggauaaauuacgaugga

SEQ ID NO: 1016063 - RNA, 19 nt, Homo sapiens
  misc_RNA (1)...(19): siRNA sense strand
uggcugaccugcguaauua

SEQ ID NO: 1016064 - RNA, 19 nt, Homo sapiens
  misc_RNA (1)...(19): siRNA sense strand
gaucugaauuugaccauca

SEQ ID NO: 1016065 - RNA, 19 nt, Homo sapiens
  misc_RNA (1)...(19): siRNA sense strand
gagcugagaauguuggaua

SEQ ID NO: 1016066 - RNA, 19 nt, Homo sapiens
  misc_RNA (1)...(19): siRNA sense strand
gaccugggcuuuauaugug

SEQ ID NO: 1016067 - RNA, 19 nt, Homo sapiens
  misc_RNA (1)...(19): siRNA sense strand
agacggcaauucaguuuaa

SEQ ID NO: 1016068 - RNA, 19 nt, Homo sapiens
  misc_RNA (1)...(19): siRNA sense strand
gaccugggauguggugaua

SEQ ID NO: 1016069 - RNA, 19 nt, Homo sapiens
  misc_RNA (1)...(19): siRNA sense strand
gcuuggauuugacuugaua

SEQ ID NO: 1016070 - RNA, 19 nt, Homo sapiens
  misc_RNA (1)...(19): siRNA sense strand
ggaccagaauggaguuuca

SEQ ID NO: 1016071 - RNA, 19 nt, Homo sapiens
  misc_RNA (1)...(19): siRNA sense strand
cagauuuccugaaguggua

SEQ ID NO: 1016072 - RNA, 19 nt, Homo sapiens
  misc_RNA (1)...(19): siRNA sense strand
ugaauugcuuguuggagua

SEQ ID NO: 1016073 - RNA, 19 nt, Homo sapiens
  misc_RNA (1)...(19): siRNA sense strand
gaauuugaccaucacauug

SEQ ID NO: 1016074 - RNA, 19 nt, Homo sapiens
  misc_RNA (1)...(19): siRNA sense strand
ggagacggcaauucaguuu

SEQ ID NO: 1016075 - RNA, 19 nt, Homo sapiens
  misc_RNA (1)...(19): siRNA sense strand
guuuaaaccuccacuauac

SEQ ID NO: 1016076 - RNA, 19 nt, Homo sapiens
  misc_RNA (1)...(19): siRNA sense strand
ggauuugacuugauaacgu

SEQ ID NO: 1016077 - RNA, 19 nt, Homo sapiens
  misc_RNA (1)...(19): siRNA sense strand
gaaaggcaacagaaucaug

SEQ ID NO: 1016078 - RNA, 19 nt, Homo sapiens
  misc_RNA (1)...(19): siRNA sense strand
aaacuuguguugguuaaug

SEQ ID NO: 1016079 - RNA, 19 nt, Homo sapiens
  misc_RNA (1)...(19): siRNA sense strand
uuaaugaggugucccaaca

SEQ ID NO: 1016080 - RNA, 19 nt, Homo sapiens
  misc_RNA (1)...(19): siRNA sense strand
ccgcuuaugugcuaaugaa

SEQ ID NO: 1016081 - RNA, 19 nt, Homo sapiens
  misc_RNA (1)...(19): siRNA sense strand
gggauucguuagcuccuuu

SEQ ID NO: 1016082 - RNA, 19 nt, Homo sapiens
  misc_RNA (1)...(19): siRNA sense strand
ccaacaaguggaaagcuua

SEQ ID NO: 1016083 - RNA, 19 nt, Homo sapiens
  misc_RNA (1)...(19): siRNA sense strand
gcacaccaaacucugaauu

SEQ ID NO: 1016084 - RNA, 19 nt, Homo sapiens
  misc_RNA (1)...(19): siRNA sense strand
ggccagauuuccugaagug

SEQ ID NO: 1016085 - RNA, 19 nt, Homo sapiens
  misc_RNA (1)...(19): siRNA sense strand
caacaaguggaaagcuuaa

SEQ ID NO: 1016086 - RNA, 19 nt, Homo sapiens
  misc_RNA (1)...(19): siRNA sense strand
gcagagacuccuugcguau

SEQ ID NO: 1016087 - RNA, 19 nt, Homo sapiens
  misc_RNA (1)...(19): siRNA sense strand
cuuaagagauucagaucau

SEQ ID NO: 1016088 - RNA, 19 nt, Homo sapiens
  misc_RNA (1)...(19): siRNA sense strand
uugaaccgcuuaugugcua

SEQ ID NO: 1016089 - RNA, 19 nt, Homo sapiens
  misc_RNA (1)...(19): siRNA sense strand
acaccaaacucugaauuca

SEQ ID NO: 1016090 - RNA, 19 nt, Homo sapiens
  misc_RNA (1)...(19): siRNA sense strand
gaggaaaggcaacagaauc

SEQ ID NO: 1016091 - RNA, 19 nt, Homo sapiens
  misc_RNA (1)...(19): siRNA sense strand
gagacggcaauucaguuua

SEQ ID NO: 1016092 - RNA, 19 nt, Homo sapiens
  misc_RNA (1)...(19): siRNA sense strand
caaguugaaccgcuuaugu

SEQ ID NO: 1016093 - RNA, 19 nt, Homo sapiens
  misc_RNA (1)...(19): siRNA sense strand
gagaaggccaagauagaga

SEQ ID NO: 1016094 - RNA, 19 nt, Homo sapiens
  misc_RNA (1)...(19): siRNA sense strand
gagaauguuggauacugua

SEQ ID NO: 1016095 - RNA, 19 nt, Homo sapiens
  misc_RNA (1)...(19): siRNA sense strand
gggauguggugauacuuca

SEQ ID NO: 1016096 - RNA, 19 nt, Homo sapiens
  misc_RNA (1)...(19): siRNA sense strand
ggaggaaaggcaacagaau

SEQ ID NO: 1016097 - RNA, 19 nt, Homo sapiens
  misc_RNA (1)...(19): siRNA sense strand
ugaauuugaccaucacauu

SEQ ID NO: 1016098 - RNA, 19 nt, Homo sapiens
  misc_RNA (1)...(19): siRNA sense strand
uggauacuguacccagaua

SEQ ID NO: 1016099 - RNA, 19 nt, Homo sapiens
  misc_RNA (1)...(19): siRNA sense strand
caauuccucugagcaguga

SEQ ID NO: 1016100 - RNA, 19 nt, Homo sapiens
  misc_RNA (1)...(19): siRNA sense strand
aaauuugaguggaccagaa

SEQ ID NO: 1016101 - RNA, 19 nt, Homo sapiens
  misc_RNA (1)...(19): siRNA sense strand
augaagagaugaugagauc

SEQ ID NO: 1016102 - RNA, 19 nt, Homo sapiens
  misc_RNA (1)...(19): siRNA sense strand
ugagaauguuggauacugu

SEQ ID NO: 1016103 - RNA, 19 nt, Homo sapiens
  misc_RNA (1)...(19): siRNA sense strand
ccagggagacggcaauuca

SEQ ID NO: 1016104 - RNA, 19 nt, Homo sapiens
  misc_RNA (1)...(19): siRNA sense strand
uuucagaccugggcuuuau

SEQ ID NO: 1016105 - RNA, 19 nt, Homo sapiens
  misc_RNA (1)...(19): siRNA sense strand
accaaacucugaauucaau

SEQ ID NO: 1016106 - RNA, 19 nt, Homo sapiens
  misc_RNA (1)...(19): siRNA sense strand
gugauaagcccaaagacau

SEQ ID NO: 1016107 - RNA, 19 nt, Homo sapiens
  misc_RNA (1)...(19): siRNA sense strand
ugaauucaauccccuguuu

SEQ ID NO: 1016108 - RNA, 19 nt, Homo sapiens
  misc_RNA (1)...(19): siRNA sense strand
gcuaaugaagagaugauga

SEQ ID NO: 1016109 - RNA, 19 nt, Homo sapiens
  misc_RNA (1)...(19): siRNA sense strand
agacauugguggcucaaag

SEQ ID NO: 1016110 - RNA, 19 nt, Homo sapiens
  misc_RNA (1)...(19): siRNA sense strand
gauaagcccaaagacauug

SEQ ID NO: 1016111 - RNA, 19 nt, Homo sapiens
  misc_RNA (1)...(19): siRNA sense strand
gaucagcauguuuauaaag

SEQ ID NO: 1016112 - RNA, 19 nt, Homo sapiens
  misc_RNA (1)...(19): siRNA sense strand
guauuuggguaccuguuuc

SEQ ID NO: 1016113 - RNA, 19 nt, Homo sapiens
  misc_RNA (1)...(19): siRNA sense strand
caucagugaccuuaagaga

SEQ ID NO: 1016114 - RNA, 19 nt, Homo sapiens
  misc_RNA (1)...(19): siRNA sense strand
ugaugaacaguuugaguuu

SEQ ID NO: 1016115 - RNA, 19 nt, Homo sapiens
  misc_RNA (1)...(19): siRNA sense strand
ggugauaagcccaaagaca

SEQ ID NO: 1016116 - RNA, 19 nt, Homo sapiens
  misc_RNA (1)...(19): siRNA sense strand
caccucauacccaagcuua

SEQ ID NO: 1016117 - RNA, 19 nt, Homo sapiens
  misc_RNA (1)...(19): siRNA sense strand
gcuuacagcaggaaagguu

SEQ ID NO: 1016118 - RNA, 19 nt, Homo sapiens
  misc_RNA (1)...(19): siRNA sense strand
ugcauugaauugcuuguug

SEQ ID NO: 1016119 - RNA, 19 nt, Homo sapiens
  misc_RNA (1)...(19): siRNA sense strand
gacuugauaacguguauug

SEQ ID NO: 1016120 - RNA, 19 nt, Homo sapiens
  misc_RNA (1)...(19): siRNA sense strand
gcauguuuauaaagcuguu

SEQ ID NO: 1016121 - RNA, 19 nt, Homo sapiens
  misc_RNA (1)...(19): siRNA sense strand
gaucaacaugagccuaaga

SEQ ID NO: 1016122 - RNA, 19 nt, Homo sapiens
  misc_RNA (1)...(19): siRNA sense strand
ugauaagcccaaagacauu

SEQ ID NO: 1016123 - RNA, 19 nt, Homo sapiens
  misc_RNA (1)...(19): siRNA sense strand
ggaagaaaauaaucuacag

SEQ ID NO: 1016124 - RNA, 19 nt, Homo sapiens
  misc_RNA (1)...(19): siRNA sense strand
acagacagcgguaccaguu

SEQ ID NO: 1016125 - RNA, 19 nt, Homo sapiens
  misc_RNA (1)...(19): siRNA sense strand
gacggcaauucaguuuaaa

SEQ ID NO: 1016126 - RNA, 19 nt, Homo sapiens
  misc_RNA (1)...(19): siRNA sense strand
gaugaacaguuugaguuuu

SEQ ID NO: 1016127 - RNA, 19 nt, Homo sapiens
  misc_RNA (1)...(19): siRNA sense strand
gcugaccugcguaauuauu

SEQ ID NO: 1016128 - RNA, 19 nt, Homo sapiens
  misc_RNA (1)...(19): siRNA sense strand
uuucagagcagcaugauca

SEQ ID NO: 1016129 - RNA, 19 nt, Homo sapiens
  misc_RNA (1)...(19): siRNA sense strand
aauaaucuacagugcagua

SEQ ID NO: 1016130 - RNA, 19 nt, Homo sapiens
  misc_RNA (1)...(19): siRNA sense strand
uggaguagauauuaaugag

SEQ ID NO: 1016131 - RNA, 19 nt, Homo sapiens
  misc_RNA (1)...(19): siRNA sense strand
cagcgguaccaguucguua

SEQ ID NO: 1016132 - RNA, 19 nt, Homo sapiens
  misc_RNA (1)...(19): siRNA sense strand
gcuuaugugcuaaugaaga

SEQ ID NO: 1016133 - RNA, 19 nt, Homo sapiens
  misc_RNA (1)...(19): siRNA sense strand
aaaagucaauccaugcauu

SEQ ID NO: 1016134 - RNA, 19 nt, Homo sapiens
  misc_RNA (1)...(19): siRNA sense strand
gggagacggcaauucaguu

SEQ ID NO: 1016135 - RNA, 19 nt, Homo sapiens
  misc_RNA (1)...(19): siRNA sense strand
ugaggugucccaacaagug

SEQ ID NO: 1016136 - RNA, 19 nt, Homo sapiens
  misc_RNA (1)...(19): siRNA sense strand
cuugauaacguguauugaa

SEQ ID NO: 1016137 - RNA, 19 nt, Homo sapiens
  misc_RNA (1)...(19): siRNA sense strand
gaccuuaagagauucagau

SEQ ID NO: 1016138 - RNA, 19 nt, Homo sapiens
  misc_RNA (1)...(19): siRNA sense strand
cccaacaaguggaaagcuu

SEQ ID NO: 1016139 - RNA, 19 nt, Homo sapiens
  misc_RNA (1)...(19): siRNA sense strand
caacagaaucaugucuuuc

SEQ ID NO: 1016140 - RNA, 19 nt, Homo sapiens
  misc_RNA (1)...(19): siRNA sense strand
aaaggcaacagaaucaugu

SEQ ID NO: 1016141 - RNA, 19 nt, Homo sapiens
  misc_RNA (1)...(19): siRNA sense strand
agaccugggcuuuauaugu

SEQ ID NO: 1016142 - RNA, 19 nt, Homo sapiens
  misc_RNA (1)...(19): siRNA sense strand
caguuuaaaccuccacuau

SEQ ID NO: 1016143 - RNA, 19 nt, Homo sapiens
  misc_RNA (1)...(19): siRNA sense strand
gaugagaucagccauugcu

SEQ ID NO: 1016144 - RNA, 19 nt, Homo sapiens
  misc_RNA (1)...(19): siRNA sense strand
aguuuaaaccuccacuaua

SEQ ID NO: 1016145 - RNA, 19 nt, Homo sapiens
  misc_RNA (1)...(19): siRNA sense strand
aacaugagccuaagaaggu

SEQ ID NO: 1016146 - RNA, 19 nt, Homo sapiens
  misc_RNA (1)...(19): siRNA sense strand
cuucuguguuggagauaaa

SEQ ID NO: 1016147 - RNA, 19 nt, Homo sapiens
  misc_RNA (1)...(19): siRNA sense strand
acaaguggaaagcuuaaga

SEQ ID NO: 1016148 - RNA, 19 nt, Homo sapiens
  misc_RNA (1)...(19): siRNA sense strand
ucuuuaaacuuguguuggu

SEQ ID NO: 1016149 - RNA, 19 nt, Homo sapiens
  misc_RNA (1)...(19): siRNA sense strand
cuuguuggaguagauauua

SEQ ID NO: 1016150 - RNA, 19 nt, Homo sapiens
  misc_RNA (1)...(19): siRNA sense strand
ugaaaccucgggaucugaa

SEQ ID NO: 1016151 - RNA, 19 nt, Homo sapiens
  misc_RNA (1)...(19): siRNA sense strand
guggcugaccugcguaauu

SEQ ID NO: 1016152 - RNA, 19 nt, Homo sapiens
  misc_RNA (1)...(19): siRNA sense strand
uugcguaucccaaguugaa

SEQ ID NO: 1016153 - RNA, 19 nt, Homo sapiens
  misc_RNA (1)...(19): siRNA sense strand
gguugagaaggccaagaua

SEQ ID NO: 1016154 - RNA, 19 nt, Homo sapiens
  misc_RNA (1)...(19): siRNA sense strand
cagaaucaugucuuucaga

SEQ ID NO: 1016155 - RNA, 19 nt, Homo sapiens
  misc_RNA (1)...(19): siRNA sense strand
acagugcaguagugugguu

SEQ ID NO: 1016156 - RNA, 19 nt, Homo sapiens
  misc_RNA (1)...(19): siRNA sense strand
caccaaacucugaauucaa

SEQ ID NO: 1016157 - RNA, 19 nt, Homo sapiens
  misc_RNA (1)...(19): siRNA sense strand
caucagcacaccaaacucu

SEQ ID NO: 1016158 - RNA, 19 nt, Homo sapiens
  misc_RNA (1)...(19): siRNA sense strand
uggaucaacaugagccuaa

SEQ ID NO: 1016159 - RNA, 19 nt, Homo sapiens
  misc_RNA (1)...(19): siRNA sense strand
acaaagagcucaacccuua

SEQ ID NO: 1016160 - RNA, 19 nt, Homo sapiens
  misc_RNA (1)...(19): siRNA sense strand
gcaaacagccuuauagaug

SEQ ID NO: 1016161 - RNA, 19 nt, Homo sapiens
  misc_RNA (1)...(19): siRNA sense strand
ccacagagaagaacuauaa

SEQ ID NO: 1016162 - RNA, 19 nt, Homo sapiens
  misc_RNA (1)...(19): siRNA sense strand
gaaagagccaugaaaugua

SEQ ID NO: 1016163 - RNA, 19 nt, Homo sapiens
  misc_RNA (1)...(19): siRNA sense strand
gcucaacucuuauuaguca

SEQ ID NO: 1016164 - RNA, 19 nt, Homo sapiens
  misc_RNA (1)...(19): siRNA sense strand
aagaagcacucaacguuua

SEQ ID NO: 1016165 - RNA, 19 nt, Homo sapiens
  misc_RNA (1)...(19): siRNA sense strand
ggacaucagagaauucaua

SEQ ID NO: 1016166 - RNA, 19 nt, Homo sapiens
  misc_RNA (1)...(19): siRNA sense strand
gaggauuacugguuugaaa

SEQ ID NO: 1016167 - RNA, 19 nt, Homo sapiens
  misc_RNA (1)...(19): siRNA sense strand
gaacaucagagacuccaua

SEQ ID NO: 1016168 - RNA, 19 nt, Homo sapiens
  misc_RNA (1)...(19): siRNA sense strand
gugggaaagucuucaaaua

SEQ ID NO: 1016169 - RNA, 19 nt, Homo sapiens
  misc_RNA (1)...(19): siRNA sense strand
gaagaagcacucaacguuu

SEQ ID NO: 1016170 - RNA, 19 nt, Homo sapiens
  misc_RNA (1)...(19): siRNA sense strand
gggaaagucuucaaauaca

SEQ ID NO: 1016171 - RNA, 19 nt, Homo sapiens
  misc_RNA (1)...(19): siRNA sense strand
ggcagaagcuccacagaga

SEQ ID NO: 1016172 - RNA, 19 nt, Homo sapiens
  misc_RNA (1)...(19): siRNA sense strand
ggaaagccuucgcucagaa

SEQ ID NO: 1016173 - RNA, 19 nt, Homo sapiens
  misc_RNA (1)...(19): siRNA sense strand
caaacagccuuauagaugu

SEQ ID NO: 1016174 - RNA, 19 nt, Homo sapiens
  misc_RNA (1)...(19): siRNA sense strand
ggaaagucuucaaauacaa

SEQ ID NO: 1016175 - RNA, 19 nt, Homo sapiens
  misc_RNA (1)...(19): siRNA sense strand
gagcucaacucuuauuagu

SEQ ID NO: 1016176 - RNA, 19 nt, Homo sapiens
  misc_RNA (1)...(19): siRNA sense strand
caaauacaauucguccuuu

SEQ ID NO: 1016177 - RNA, 19 nt, Homo sapiens
  misc_RNA (1)...(19): siRNA sense strand
ggaaauaaaccguaucagu

SEQ ID NO: 1016178 - RNA, 19 nt, Homo sapiens
  misc_RNA (1)...(19): siRNA sense strand
gagaagccauaucagugua

SEQ ID NO: 1016179 - RNA, 19 nt, Homo sapiens
  misc_RNA (1)...(19): siRNA sense strand
ggagagcuuucagggauaa

SEQ ID NO: 1016180 - RNA, 19 nt, Homo sapiens
  misc_RNA (1)...(19): siRNA sense strand
cacaugcagucgaggauua

SEQ ID NO: 1016181 - RNA, 19 nt, Homo sapiens
  misc_RNA (1)...(19): siRNA sense strand
aaacagccuuauagaugua

SEQ ID NO: 1016182 - RNA, 19 nt, Homo sapiens
  misc_RNA (1)...(19): siRNA sense strand
acaaagaugucagcccuaa

SEQ ID NO: 1016183 - RNA, 19 nt, Homo sapiens
  misc_RNA (1)...(19): siRNA sense strand
gcacagcucaggccuuguu

SEQ ID NO: 1016184 - RNA, 19 nt, Homo sapiens
  misc_RNA (1)...(19): siRNA sense strand
uaaagaaagagccaugaaa

SEQ ID NO: 1016185 - RNA, 19 nt, Homo sapiens
  misc_RNA (1)...(19): siRNA sense strand
ugaagaagcacucaacguu

SEQ ID NO: 1016186 - RNA, 19 nt, Homo sapiens
  misc_RNA (1)...(19): siRNA sense strand
aaagagccaugaaauguag

SEQ ID NO: 1016187 - RNA, 19 nt, Homo sapiens
  misc_RNA (1)...(19): siRNA sense strand
gagaauucauacuggagaa

SEQ ID NO: 1016188 - RNA, 19 nt, Homo sapiens
  misc_RNA (1)...(19): siRNA sense strand
gagagaagccuuuuaaaug

SEQ ID NO: 1016189 - RNA, 19 nt, Homo sapiens
  misc_RNA (1)...(19): siRNA sense strand
gggaaagccuucgcucaga

SEQ ID NO: 1016190 - RNA, 19 nt, Homo sapiens
  misc_RNA (1)...(19): siRNA sense strand
gggagagcuuucagggaua

SEQ ID NO: 1016191 - RNA, 19 nt, Homo sapiens
  misc_RNA (1)...(19): siRNA sense strand
ccauaucaguguaaugaau

SEQ ID NO: 1016192 - RNA, 19 nt, Homo sapiens
  misc_RNA (1)...(19): siRNA sense strand
gagaagccuuuuaaaugua

SEQ ID NO: 1016193 - RNA, 19 nt, Homo sapiens
  misc_RNA (1)...(19): siRNA sense strand
gaugucagcccuaaagcaa

SEQ ID NO: 1016194 - RNA, 19 nt, Homo sapiens
  misc_RNA (1)...(19): siRNA sense strand
aaagaaagagccaugaaau

SEQ ID NO: 1016195 - RNA, 19 nt, Homo sapiens
  misc_RNA (1)...(19): siRNA sense strand
agguauagcucauccuuug

SEQ ID NO: 1016196 - RNA, 19 nt, Homo sapiens
  misc_RNA (1)...(19): siRNA sense strand
gaacuauaagugcaaggaa

SEQ ID NO: 1016197 - RNA, 19 nt, Homo sapiens
  misc_RNA (1)...(19): siRNA sense strand
agaaagagccaugaaaugu

SEQ ID NO: 1016198 - RNA, 19 nt, Homo sapiens
  misc_RNA (1)...(19): siRNA sense strand
caucagagacuccauacug

SEQ ID NO: 1016199 - RNA, 19 nt, Homo sapiens
  misc_RNA (1)...(19): siRNA sense strand
ccagugagaaaccacauaa

SEQ ID NO: 1016200 - RNA, 19 nt, Homo sapiens
  misc_RNA (1)...(19): siRNA sense strand
caugaaagaauacauagug

SEQ ID NO: 1016201 - RNA, 19 nt, Homo sapiens
  misc_RNA (1)...(19): siRNA sense strand
gggaucgccuuuaugaaca

SEQ ID NO: 1016202 - RNA, 19 nt, Homo sapiens
  misc_RNA (1)...(19): siRNA sense strand
gugagaaaccacauaaaug

SEQ ID NO: 1016203 - RNA, 19 nt, Homo sapiens
  misc_RNA (1)...(19): siRNA sense strand
caaggaaugugggaaaguc

SEQ ID NO: 1016204 - RNA, 19 nt, Homo sapiens
  misc_RNA (1)...(19): siRNA sense strand
gcucuuacucgucaugaaa

SEQ ID NO: 1016205 - RNA, 19 nt, Homo sapiens
  misc_RNA (1)...(19): siRNA sense strand
gcucagaaugcagcucuua

SEQ ID NO: 1016206 - RNA, 19 nt, Homo sapiens
  misc_RNA (1)...(19): siRNA sense strand
guucaucccuuuuaaauca

SEQ ID NO: 1016207 - RNA, 19 nt, Homo sapiens
  misc_RNA (1)...(19): siRNA sense strand
gaaugugggaucgccuuua

SEQ ID NO: 1016208 - RNA, 19 nt, Homo sapiens
  misc_RNA (1)...(19): siRNA sense strand
uaaagcaaagcacuucuga

SEQ ID NO: 1016209 - RNA, 19 nt, Homo sapiens
  misc_RNA (1)...(19): siRNA sense strand
caucagagaauucauacug

SEQ ID NO: 1016210 - RNA, 19 nt, Homo sapiens
  misc_RNA (1)...(19): siRNA sense strand
gggcuucucucuuccaaac

SEQ ID NO: 1016211 - RNA, 19 nt, Homo sapiens
  misc_RNA (1)...(19): siRNA sense strand
cgucaugaaagaauacaua

SEQ ID NO: 1016212 - RNA, 19 nt, Homo sapiens
  misc_RNA (1)...(19): siRNA sense strand
caucagagaauucauacug

SEQ ID NO: 1016213 - RNA, 19 nt, Homo sapiens
  misc_RNA (1)...(19): siRNA sense strand
agucgaggauuacugguuu

SEQ ID NO: 1016214 - RNA, 19 nt, Homo sapiens
  misc_RNA (1)...(19): siRNA sense strand
cagagaagaacuauaagug

SEQ ID NO: 1016215 - RNA, 19 nt, Homo sapiens
  misc_RNA (1)...(19): siRNA sense strand
ggagaacuaugggaaucug

SEQ ID NO: 1016216 - RNA, 19 nt, Homo sapiens
  misc_RNA (1)...(19): siRNA sense strand
gaagccauaucaguguaau

SEQ ID NO: 1016217 - RNA, 19 nt, Homo sapiens
  misc_RNA (1)...(19): siRNA sense strand
gcagaagcuccacagagaa

SEQ ID NO: 1016218 - RNA, 19 nt, Homo sapiens
  misc_RNA (1)...(19): siRNA sense strand
gugggaaggccuuuacaaa

SEQ ID NO: 1016219 - RNA, 19 nt, Homo sapiens
  misc_RNA (1)...(19): siRNA sense strand
aaauaaaccguaucagugu

SEQ ID NO: 1016220 - RNA, 19 nt, Homo sapiens
  misc_RNA (1)...(19): siRNA sense strand
gcacucaacguuuaucaac

SEQ ID NO: 1016221 - RNA, 19 nt, Homo sapiens
  misc_RNA (1)...(19): siRNA sense strand
uaagguucaugcaggcaaa

SEQ ID NO: 1016222 - RNA, 19 nt, Homo sapiens
  misc_RNA (1)...(19): siRNA sense strand
uaaaucaccauaagguuca

SEQ ID NO: 1016223 - RNA, 19 nt, Homo sapiens
  misc_RNA (1)...(19): siRNA sense strand
ucaaauacaauucguccuu

SEQ ID NO: 1016224 - RNA, 19 nt, Homo sapiens
  misc_RNA (1)...(19): siRNA sense strand
ggagagaagccuuuuaaau

SEQ ID NO: 1016225 - RNA, 19 nt, Homo sapiens
  misc_RNA (1)...(19): siRNA sense strand
gaagcuccacagagaagaa

SEQ ID NO: 1016226 - RNA, 19 nt, Homo sapiens
  misc_RNA (1)...(19): siRNA sense strand
aaacucacaguggaaauaa

SEQ ID NO: 1016227 - RNA, 19 nt, Homo sapiens
  misc_RNA (1)...(19): siRNA sense strand
gaacaucagaaaauccaua

SEQ ID NO: 1016228 - RNA, 19 nt, Homo sapiens
  misc_RNA (1)...(19): siRNA sense strand
aaugugggaucgccuuuau

SEQ ID NO: 1016229 - RNA, 19 nt, Homo sapiens
  misc_RNA (1)...(19): siRNA sense strand
gaaagccuucgcucagaau

SEQ ID NO: 1016230 - RNA, 19 nt, Homo sapiens
  misc_RNA (1)...(19): siRNA sense strand
agagaagccuuuuaaaugu

SEQ ID NO: 1016231 - RNA, 19 nt, Homo sapiens
  misc_RNA (1)...(19): siRNA sense strand
gaauacauaguggagagaa

SEQ ID NO: 1016232 - RNA, 19 nt, Homo sapiens
  misc_RNA (1)...(19): siRNA sense strand
cagaaagaacucaauccuu

SEQ ID NO: 1016233 - RNA, 19 nt, Homo sapiens
  misc_RNA (1)...(19): siRNA sense strand
aagaaagagccaugaaaug

SEQ ID NO: 1016234 - RNA, 19 nt, Homo sapiens
  misc_RNA (1)...(19): siRNA sense strand
cccuaucacugcaguaaau

SEQ ID NO: 1016235 - RNA, 19 nt, Homo sapiens
  misc_RNA (1)...(19): siRNA sense strand
ggugagaagccauaucagu

SEQ ID NO: 1016236 - RNA, 19 nt, Homo sapiens
  misc_RNA (1)...(19): siRNA sense strand
aaagaugucagcccuaaag

SEQ ID NO: 1016237 - RNA, 19 nt, Homo sapiens
  misc_RNA (1)...(19): siRNA sense strand
cagcucaggccuuguugaa

SEQ ID NO: 1016238 - RNA, 19 nt, Homo sapiens
  misc_RNA (1)...(19): siRNA sense strand
gugcaaggaaugugggaaa

SEQ ID NO: 1016239 - RNA, 19 nt, Homo sapiens
  misc_RNA (1)...(19): siRNA sense strand
ugagaagccauaucagugu

SEQ ID NO: 1016240 - RNA, 19 nt, Homo sapiens
  misc_RNA (1)...(19): siRNA sense strand
gaauucauacuggccagaa

SEQ ID NO: 1016241 - RNA, 19 nt, Homo sapiens
  misc_RNA (1)...(19): siRNA sense strand
ggaaugugggaaagucuuc

SEQ ID NO: 1016242 - RNA, 19 nt, Homo sapiens
  misc_RNA (1)...(19): siRNA sense strand
uguaagaaaugugggaaag

SEQ ID NO: 1016243 - RNA, 19 nt, Homo sapiens
  misc_RNA (1)...(19): siRNA sense strand
cccuaucacuguaagaaau

SEQ ID NO: 1016244 - RNA, 19 nt, Homo sapiens
  misc_RNA (1)...(19): siRNA sense strand
caguggaaauaaaccguau

SEQ ID NO: 1016245 - RNA, 19 nt, Homo sapiens
  misc_RNA (1)...(19): siRNA sense strand
caccaaagaaugcauacug

SEQ ID NO: 1016246 - RNA, 19 nt, Homo sapiens
  misc_RNA (1)...(19): siRNA sense strand
gagcuuucagggauaauuc

SEQ ID NO: 1016247 - RNA, 19 nt, Homo sapiens
  misc_RNA (1)...(19): siRNA sense strand
agucaucagagaauucaua

SEQ ID NO: 1016248 - RNA, 19 nt, Homo sapiens
  misc_RNA (1)...(19): siRNA sense strand
cgaaaagugucaugaugga

SEQ ID NO: 1016249 - RNA, 19 nt, Homo sapiens
  misc_RNA (1)...(19): siRNA sense strand
ggcaaacagccuuauagau

SEQ ID NO: 1016250 - RNA, 19 nt, Homo sapiens
  misc_RNA (1)...(19): siRNA sense strand
ugugggaucgccuuuauga

SEQ ID NO: 1016251 - RNA, 19 nt, Homo sapiens
  misc_RNA (1)...(19): siRNA sense strand
ugucagcccuaaagcaaag

SEQ ID NO: 1016252 - RNA, 19 nt, Homo sapiens
  misc_RNA (1)...(19): siRNA sense strand
ggagaaaccccacaaaugc

SEQ ID NO: 1016253 - RNA, 19 nt, Homo sapiens
  misc_RNA (1)...(19): siRNA sense strand
acaauucguccuuuauuag

SEQ ID NO: 1016254 - RNA, 19 nt, Homo sapiens
  misc_RNA (1)...(19): siRNA sense strand
agggauaauucaacugugu

SEQ ID NO: 1016255 - RNA, 19 nt, Homo sapiens
  misc_RNA (1)...(19): siRNA sense strand
uguaaugacugugggaaag

SEQ ID NO: 1016256 - RNA, 19 nt, Homo sapiens
  misc_RNA (1)...(19): siRNA sense strand
uuuauuagccaccagagaa

SEQ ID NO: 1016257 - RNA, 19 nt, Homo sapiens
  misc_RNA (1)...(19): siRNA sense strand
cauaucaguguaaugaaug

SEQ ID NO: 1016258 - RNA, 19 nt, Homo sapiens
  misc_RNA (1)...(19): siRNA sense strand
gggagaaaccccacaaaug

SEQ ID NO: 1016259 - RNA, 19 nt, Homo sapiens
  misc_RNA (1)...(19): siRNA sense strand
ggagaaguuucacuacaga

SEQ ID NO: 1016260 - RNA, 19 nt, Homo sapiens
  misc_RNA (1)...(19): siRNA sense strand
gccaacccaucccaaauuu

SEQ ID NO: 1016261 - RNA, 19 nt, Homo sapiens
  misc_RNA (1)...(19): siRNA sense strand
ggaaccuccuguacgagua

SEQ ID NO: 1016262 - RNA, 19 nt, Homo sapiens
  misc_RNA (1)...(19): siRNA sense strand
ccaaggagaaguuucacua

SEQ ID NO: 1016263 - RNA, 19 nt, Homo sapiens
  misc_RNA (1)...(19): siRNA sense strand
gaagagaaggcagcuguga

SEQ ID NO: 1016264 - RNA, 19 nt, Homo sapiens
  misc_RNA (1)...(19): siRNA sense strand
gcugugggaugacaccaaa

SEQ ID NO: 1016265 - RNA, 19 nt, Homo sapiens
  misc_RNA (1)...(19): siRNA sense strand
ugacagagcugggcuugca

SEQ ID NO: 1016266 - RNA, 19 nt, Homo sapiens
  misc_RNA (1)...(19): siRNA sense strand
ccacgugccucuccaguac

SEQ ID NO: 1016267 - RNA, 19 nt, Homo sapiens
  misc_RNA (1)...(19): siRNA sense strand
gaaguuucacuacagagaa

SEQ ID NO: 1016268 - RNA, 19 nt, Homo sapiens
  misc_RNA (1)...(19): siRNA sense strand
ggauaugcccacccaagaa

SEQ ID NO: 1016269 - RNA, 19 nt, Homo sapiens
  misc_RNA (1)...(19): siRNA sense strand
ggcugcaucuccaacgaua

SEQ ID NO: 1016270 - RNA, 19 nt, Homo sapiens
  misc_RNA (1)...(19): siRNA sense strand
caacuucacauucaacaag

SEQ ID NO: 1016271 - RNA, 19 nt, Homo sapiens
  misc_RNA (1)...(19): siRNA sense strand
gauaguccaaggagaaguu

SEQ ID NO: 1016272 - RNA, 19 nt, Homo sapiens
  misc_RNA (1)...(19): siRNA sense strand
ccaggacaguggugaagug

SEQ ID NO: 1016273 - RNA, 19 nt, Homo sapiens
  misc_RNA (1)...(19): siRNA sense strand
gaaaccggaaccuccugua

SEQ ID NO: 1016274 - RNA, 19 nt, Homo sapiens
  misc_RNA (1)...(19): siRNA sense strand
ggagaggucaccagugcuu

SEQ ID NO: 1016275 - RNA, 19 nt, Homo sapiens
  misc_RNA (1)...(19): siRNA sense strand
gacaaacacgggacaggaa

SEQ ID NO: 1016276 - RNA, 19 nt, Homo sapiens
  misc_RNA (1)...(19): siRNA sense strand
ucccucagcuggacauaga

SEQ ID NO: 1016277 - RNA, 19 nt, Homo sapiens
  misc_RNA (1)...(19): siRNA sense strand
caacccaucccaaauuuac

SEQ ID NO: 1016278 - RNA, 19 nt, Homo sapiens
  misc_RNA (1)...(19): siRNA sense strand
ccuggaaauuggcgagaaa

SEQ ID NO: 1016279 - RNA, 19 nt, Homo sapiens
  misc_RNA (1)...(19): siRNA sense strand
gaucucaaccuggcuggaa

SEQ ID NO: 1016280 - RNA, 19 nt, Homo sapiens
  misc_RNA (1)...(19): siRNA sense strand
gaaccuccuguacgaguau

SEQ ID NO: 1016281 - RNA, 19 nt, Homo sapiens
  misc_RNA (1)...(19): siRNA sense strand
aaggagaaguuucacuaca

SEQ ID NO: 1016282 - RNA, 19 nt, Homo sapiens
  misc_RNA (1)...(19): siRNA sense strand
caucccaaauuuacaacau

SEQ ID NO: 1016283 - RNA, 19 nt, Homo sapiens
  misc_RNA (1)...(19): siRNA sense strand
ccaacccaucccaaauuua

SEQ ID NO: 1016284 - RNA, 19 nt, Homo sapiens
  misc_RNA (1)...(19): siRNA sense strand
uuugaaggcugugggauga

SEQ ID NO: 1016285 - RNA, 19 nt, Homo sapiens
  misc_RNA (1)...(19): siRNA sense strand
gaggcugcaucuccaacga

SEQ ID NO: 1016286 - RNA, 19 nt, Homo sapiens
  misc_RNA (1)...(19): siRNA sense strand
gaguuccugucccuucaga

SEQ ID NO: 1016287 - RNA, 19 nt, Homo sapiens
  misc_RNA (1)...(19): siRNA sense strand
cuggucaacuucacauuca

SEQ ID NO: 1016288 - RNA, 19 nt, Homo sapiens
  misc_RNA (1)...(19): siRNA sense strand
agaaggcagcugugacuga

SEQ ID NO: 1016289 - RNA, 19 nt, Homo sapiens
  misc_RNA (1)...(19): siRNA sense strand
agaguaaccagcagaagga

SEQ ID NO: 1016290 - RNA, 19 nt, Homo sapiens
  misc_RNA (1)...(19): siRNA sense strand
ggaaauuggcgagaaacuc

SEQ ID NO: 1016291 - RNA, 19 nt, Homo sapiens
  misc_RNA (1)...(19): siRNA sense strand
ccacauggucggagacaag

SEQ ID NO: 1016292 - RNA, 19 nt, Homo sapiens
  misc_RNA (1)...(19): siRNA sense strand
ggagcuuguucaccuguac

SEQ ID NO: 1016293 - RNA, 19 nt, Homo sapiens
  misc_RNA (1)...(19): siRNA sense strand
gaguacaccacuucaccaa

SEQ ID NO: 1016294 - RNA, 19 nt, Homo sapiens
  misc_RNA (1)...(19): siRNA sense strand
ucacuacagagaaacgaaa

SEQ ID NO: 1016295 - RNA, 19 nt, Homo sapiens
  misc_RNA (1)...(19): siRNA sense strand
gcacggccuggucaacuuc

SEQ ID NO: 1016296 - RNA, 19 nt, Homo sapiens
  misc_RNA (1)...(19): siRNA sense strand
gcacuuccggguccuggau

SEQ ID NO: 1016297 - RNA, 19 nt, Homo sapiens
  misc_RNA (1)...(19): siRNA sense strand
uaccgcaaguuugacauug

SEQ ID NO: 1016298 - RNA, 19 nt, Homo sapiens
  misc_RNA (1)...(19): siRNA sense strand
ugaaggcugugggaugaca

SEQ ID NO: 1016299 - RNA, 19 nt, Homo sapiens
  misc_RNA (1)...(19): siRNA sense strand
aguccuaccucggcacuga

SEQ ID NO: 1016300 - RNA, 19 nt, Homo sapiens
  misc_RNA (1)...(19): siRNA sense strand
gauaugcccacccaagaac

SEQ ID NO: 1016301 - RNA, 19 nt, Homo sapiens
  misc_RNA (1)...(19): siRNA sense strand
ugccaacccaucccaaauu

SEQ ID NO: 1016302 - RNA, 19 nt, Homo sapiens
  misc_RNA (1)...(19): siRNA sense strand
ggucggagacaagccaguu

SEQ ID NO: 1016303 - RNA, 19 nt, Homo sapiens
  misc_RNA (1)...(19): siRNA sense strand
ccgccuaccgcaaguuuga

SEQ ID NO: 1016304 - RNA, 19 nt, Homo sapiens
  misc_RNA (1)...(19): siRNA sense strand
cgacccugcccgcuucaaa

SEQ ID NO: 1016305 - RNA, 19 nt, Homo sapiens
  misc_RNA (1)...(19): siRNA sense strand
cgacaucauccgucagaag

SEQ ID NO: 1016306 - RNA, 19 nt, Homo sapiens
  misc_RNA (1)...(19): siRNA sense strand
caaggagaaguuucacuac

SEQ ID NO: 1016307 - RNA, 19 nt, Homo sapiens
  misc_RNA (1)...(19): siRNA sense strand
gcuugcaggcuacuucaug

SEQ ID NO: 1016308 - RNA, 19 nt, Homo sapiens
  misc_RNA (1)...(19): siRNA sense strand
agaaguuucacuacagaga

SEQ ID NO: 1016309 - RNA, 19 nt, Homo sapiens
  misc_RNA (1)...(19): siRNA sense strand
guuccugucccuucagaug

SEQ ID NO: 1016310 - RNA, 19 nt, Homo sapiens
  misc_RNA (1)...(19): siRNA sense strand
aggagaaguuucacuacag

SEQ ID NO: 1016311 - RNA, 19 nt, Homo sapiens
  misc_RNA (1)...(19): siRNA sense strand
ccgcggagcaguguuugaa

SEQ ID NO: 1016312 - RNA, 19 nt, Homo sapiens
  misc_RNA (1)...(19): siRNA sense strand
ccgcaaguuugacauugag

SEQ ID NO: 1016313 - RNA, 19 nt, Homo sapiens
  misc_RNA (1)...(19): siRNA sense strand
ccgcgaucaucucgacaug

SEQ ID NO: 1016314 - RNA, 19 nt, Homo sapiens
  misc_RNA (1)...(19): siRNA sense strand
ggaauagccucucuucagu

SEQ ID NO: 1016315 - RNA, 19 nt, Homo sapiens
  misc_RNA (1)...(19): siRNA sense strand
ucacagagaugcaaccaau

SEQ ID NO: 1016316 - RNA, 19 nt, Homo sapiens
  misc_RNA (1)...(19): siRNA sense strand
ggauuggccuggaggauau

SEQ ID NO: 1016317 - RNA, 19 nt, Homo sapiens
  misc_RNA (1)...(19): siRNA sense strand
acacaagucucuguacuga

SEQ ID NO: 1016318 - RNA, 19 nt, Homo sapiens
  misc_RNA (1)...(19): siRNA sense strand
ggacacaagucucuguacu

SEQ ID NO: 1016319 - RNA, 19 nt, Homo sapiens
  misc_RNA (1)...(19): siRNA sense strand
gcgggucaguuuacgcuuu

SEQ ID NO: 1016320 - RNA, 19 nt, Homo sapiens
  misc_RNA (1)...(19): siRNA sense strand
ucucagagcaccaccagua

SEQ ID NO: 1016321 - RNA, 19 nt, Homo sapiens
  misc_RNA (1)...(19): siRNA sense strand
acaagucucuguacugaca

SEQ ID NO: 1016322 - RNA, 19 nt, Homo sapiens
  misc_RNA (1)...(19): siRNA sense strand
ggaaacgggucaggauugg

SEQ ID NO: 1016323 - RNA, 19 nt, Homo sapiens
  misc_RNA (1)...(19): siRNA sense strand
gaaaugcagcgggucaguu

SEQ ID NO: 1016324 - RNA, 19 nt, Homo sapiens
  misc_RNA (1)...(19): siRNA sense strand
uagccucucuucaguguuc

SEQ ID NO: 1016325 - RNA, 19 nt, Homo sapiens
  misc_RNA (1)...(19): siRNA sense strand
aaaugcagcgggucaguuu

SEQ ID NO: 1016326 - RNA, 19 nt, Homo sapiens
  misc_RNA (1)...(19): siRNA sense strand
agacagaaaccagagguaa

SEQ ID NO: 1016327 - RNA, 19 nt, Homo sapiens
  misc_RNA (1)...(19): siRNA sense strand
gagaugcaaccaauagaca

SEQ ID NO: 1016328 - RNA, 19 nt, Homo sapiens
  misc_RNA (1)...(19): siRNA sense strand
ucucuucaguguucacaga

SEQ ID NO: 1016329 - RNA, 19 nt, Homo sapiens
  misc_RNA (1)...(19): siRNA sense strand
aauagccucucuucagugu

SEQ ID NO: 1016330 - RNA, 19 nt, Homo sapiens
  misc_RNA (1)...(19): siRNA sense strand
gauuaaugccggaaaggau

SEQ ID NO: 1016331 - RNA, 19 nt, Homo sapiens
  misc_RNA (1)...(19): siRNA sense strand
cgagguuuauagccaauag

SEQ ID NO: 1016332 - RNA, 19 nt, Homo sapiens
  misc_RNA (1)...(19): siRNA sense strand
ggaggaugggucuucagaa

SEQ ID NO: 1016333 - RNA, 19 nt, Homo sapiens
  misc_RNA (1)...(19): siRNA sense strand
ggaguuccagcacgagguu

SEQ ID NO: 1016334 - RNA, 19 nt, Homo sapiens
  misc_RNA (1)...(19): siRNA sense strand
gaugcaaccaauagacaga

SEQ ID NO: 1016335 - RNA, 19 nt, Homo sapiens
  misc_RNA (1)...(19): siRNA sense strand
acagagaugcaaccaauag

SEQ ID NO: 1016336 - RNA, 19 nt, Homo sapiens
  misc_RNA (1)...(19): siRNA sense strand
cgaggaggaugggucuuca

SEQ ID NO: 1016337 - RNA, 19 nt, Homo sapiens
  misc_RNA (1)...(19): siRNA sense strand
ccagugcgacucccaauac

SEQ ID NO: 1016338 - RNA, 19 nt, Homo sapiens
  misc_RNA (1)...(19): siRNA sense strand
cgggucaguuuacgcuuug

SEQ ID NO: 1016339 - RNA, 19 nt, Homo sapiens
  misc_RNA (1)...(19): siRNA sense strand
uugcaccuaucaacaaugu

SEQ ID NO: 1016340 - RNA, 19 nt, Homo sapiens
  misc_RNA (1)...(19): siRNA sense strand
gcaagucgggcaccaugag

SEQ ID NO: 1016341 - RNA, 19 nt, Homo sapiens
  misc_RNA (1)...(19): siRNA sense strand
uggaauagccucucuucag

SEQ ID NO: 1016342 - RNA, 19 nt, Homo sapiens
  misc_RNA (1)...(19): siRNA sense strand
gacacaagucucuguacug

SEQ ID NO: 1016343 - RNA, 19 nt, Homo sapiens
  misc_RNA (1)...(19): siRNA sense strand
uggaaacgggucaggauug

SEQ ID NO: 1016344 - RNA, 19 nt, Homo sapiens
  misc_RNA (1)...(19): siRNA sense strand
guaccaggaccaccacuac

SEQ ID NO: 1016345 - RNA, 19 nt, Homo sapiens
  misc_RNA (1)...(19): siRNA sense strand
auuaaugccggaaaggaua

SEQ ID NO: 1016346 - RNA, 19 nt, Homo sapiens
  misc_RNA (1)...(19): siRNA sense strand
ccuggaggauauuuggaau

SEQ ID NO: 1016347 - RNA, 19 nt, Homo sapiens
  misc_RNA (1)...(19): siRNA sense strand
ugcaaccaauagacagaaa

SEQ ID NO: 1016348 - RNA, 19 nt, Homo sapiens
  misc_RNA (1)...(19): siRNA sense strand
ccuugcaccuaucaacaau

SEQ ID NO: 1016349 - RNA, 19 nt, Homo sapiens
  misc_RNA (1)...(19): siRNA sense strand
cacagagaugcaaccaaua

SEQ ID NO: 1016350 - RNA, 19 nt, Homo sapiens
  misc_RNA (1)...(19): siRNA sense strand
aggauuggccuggaggaua

SEQ ID NO: 1016351 - RNA, 19 nt, Homo sapiens
  misc_RNA (1)...(19): siRNA sense strand
gccggucguccgccauuaa

SEQ ID NO: 1016352 - RNA, 19 nt, Homo sapiens
  misc_RNA (1)...(19): siRNA sense strand
ggaacaaccuuauauuauc

SEQ ID NO: 1016353 - RNA, 19 nt, Homo sapiens
  misc_RNA (1)...(19): siRNA sense strand
guucauaccugauaucuau

SEQ ID NO: 1016354 - RNA, 19 nt, Homo sapiens
  misc_RNA (1)...(19): siRNA sense strand
gaaauaaaccaaacaggaa

SEQ ID NO: 1016355 - RNA, 19 nt, Homo sapiens
  misc_RNA (1)...(19): siRNA sense strand
uuacacagaucacaugaaa

SEQ ID NO: 1016356 - RNA, 19 nt, Homo sapiens
  misc_RNA (1)...(19): siRNA sense strand
gaaugguucucgaauugaa

SEQ ID NO: 1016357 - RNA, 19 nt, Homo sapiens
  misc_RNA (1)...(19): siRNA sense strand
caggaacaaccuuauauua

SEQ ID NO: 1016358 - RNA, 19 nt, Homo sapiens
  misc_RNA (1)...(19): siRNA sense strand
guacgugugucaccucaga

SEQ ID NO: 1016359 - RNA, 19 nt, Homo sapiens
  misc_RNA (1)...(19): siRNA sense strand
ggagcauccucaacaaguu

SEQ ID NO: 1016360 - RNA, 19 nt, Homo sapiens
  misc_RNA (1)...(19): siRNA sense strand
ccaaacaggaacaaccuua

SEQ ID NO: 1016361 - RNA, 19 nt, Homo sapiens
  misc_RNA (1)...(19): siRNA sense strand
aaacaggaacaaccuuaua

SEQ ID NO: 1016362 - RNA, 19 nt, Homo sapiens
  misc_RNA (1)...(19): siRNA sense strand
caagccauguggugaagaa

SEQ ID NO: 1016363 - RNA, 19 nt, Homo sapiens
  misc_RNA (1)...(19): siRNA sense strand
gugcugaacuggccuccaa

SEQ ID NO: 1016364 - RNA, 19 nt, Homo sapiens
  misc_RNA (1)...(19): siRNA sense strand
gaugaccuguguuggcauu

SEQ ID NO: 1016365 - RNA, 19 nt, Homo sapiens
  misc_RNA (1)...(19): siRNA sense strand
guggaucuguggaacauga

SEQ ID NO: 1016366 - RNA, 19 nt, Homo sapiens
  misc_RNA (1)...(19): siRNA sense strand
gaaagauucgggccagaga

SEQ ID NO: 1016367 - RNA, 19 nt, Homo sapiens
  misc_RNA (1)...(19): siRNA sense strand
acgaaugguucucgaauug

SEQ ID NO: 1016368 - RNA, 19 nt, Homo sapiens
  misc_RNA (1)...(19): siRNA sense strand
ucauaaggcuauuggacaa

SEQ ID NO: 1016369 - RNA, 19 nt, Homo sapiens
  misc_RNA (1)...(19): siRNA sense strand
cagaggaccuuggcaggaa

SEQ ID NO: 1016370 - RNA, 19 nt, Homo sapiens
  misc_RNA (1)...(19): siRNA sense strand
uagcaagacccucaaguga

SEQ ID NO: 1016371 - RNA, 19 nt, Homo sapiens
  misc_RNA (1)...(19): siRNA sense strand
gugaaucauuugaacugaa

SEQ ID NO: 1016372 - RNA, 19 nt, Homo sapiens
  misc_RNA (1)...(19): siRNA sense strand
gcaggauguuuccaaaguc

SEQ ID NO: 1016373 - RNA, 19 nt, Homo sapiens
  misc_RNA (1)...(19): siRNA sense strand
uacgaggagugaccaauga

SEQ ID NO: 1016374 - RNA, 19 nt, Homo sapiens
  misc_RNA (1)...(19): siRNA sense strand
ccagggagcagcaguacuu

SEQ ID NO: 1016375 - RNA, 19 nt, Homo sapiens
  misc_RNA (1)...(19): siRNA sense strand
uugcuuggcuccauuuaug

SEQ ID NO: 1016376 - RNA, 19 nt, Homo sapiens
  misc_RNA (1)...(19): siRNA sense strand
cgaaccggauuguggauuc

SEQ ID NO: 1016377 - RNA, 19 nt, Homo sapiens
  misc_RNA (1)...(19): siRNA sense strand
gauggugaaucauuugaac

SEQ ID NO: 1016378 - RNA, 19 nt, Homo sapiens
  misc_RNA (1)...(19): siRNA sense strand
ggugaaucauuugaacuga

SEQ ID NO: 1016379 - RNA, 19 nt, Homo sapiens
  misc_RNA (1)...(19): siRNA sense strand
gggauaaagugcugaugac

SEQ ID NO: 1016380 - RNA, 19 nt, Homo sapiens
  misc_RNA (1)...(19): siRNA sense strand
uggagagucuucuuugcuu

SEQ ID NO: 1016381 - RNA, 19 nt, Homo sapiens
  misc_RNA (1)...(19): siRNA sense strand
acagcaggauguuuccaaa

SEQ ID NO: 1016382 - RNA, 19 nt, Homo sapiens
  misc_RNA (1)...(19): siRNA sense strand
gaggagugaccaaugauca

SEQ ID NO: 1016383 - RNA, 19 nt, Homo sapiens
  misc_RNA (1)...(19): siRNA sense strand
caaacaggaacaaccuuau

SEQ ID NO: 1016384 - RNA, 19 nt, Homo sapiens
  misc_RNA (1)...(19): siRNA sense strand
acacagaucacaugaaagg

SEQ ID NO: 1016385 - RNA, 19 nt, Homo sapiens
  misc_RNA (1)...(19): siRNA sense strand
ggcaacagcacucccuuug

SEQ ID NO: 1016386 - RNA, 19 nt, Homo sapiens
  misc_RNA (1)...(19): siRNA sense strand
uaacgaaugguucucgaau

SEQ ID NO: 1016387 - RNA, 19 nt, Homo sapiens
  misc_RNA (1)...(19): siRNA sense strand
gguugacccuucaguugau

SEQ ID NO: 1016388 - RNA, 19 nt, Homo sapiens
  misc_RNA (1)...(19): siRNA sense strand
gcacucccuuuguugaaac

SEQ ID NO: 1016389 - RNA, 19 nt, Homo sapiens
  misc_RNA (1)...(19): siRNA sense strand
gcaacagcacucccuuugu

SEQ ID NO: 1016390 - RNA, 19 nt, Homo sapiens
  misc_RNA (1)...(19): siRNA sense strand
uuaugaagcacccguuaaa

SEQ ID NO: 1016391 - RNA, 19 nt, Homo sapiens
  misc_RNA (1)...(19): siRNA sense strand
gaagcccauucaacucaca

SEQ ID NO: 1016392 - RNA, 19 nt, Homo sapiens
  misc_RNA (1)...(19): siRNA sense strand
cagguugacccuucaguug

SEQ ID NO: 1016393 - RNA, 19 nt, Homo sapiens
  misc_RNA (1)...(19): siRNA sense strand
guugaaacaauuugggauu

SEQ ID NO: 1016394 - RNA, 19 nt, Homo sapiens
  misc_RNA (1)...(19): siRNA sense strand
acaaguucauaccugauau

SEQ ID NO: 1016395 - RNA, 19 nt, Homo sapiens
  misc_RNA (1)...(19): siRNA sense strand
gaaccggauuguggauucu

SEQ ID NO: 1016396 - RNA, 19 nt, Homo sapiens
  misc_RNA (1)...(19): siRNA sense strand
gaggaauggcguacucugu

SEQ ID NO: 1016397 - RNA, 19 nt, Homo sapiens
  misc_RNA (1)...(19): siRNA sense strand
ggaggaggcgaagugguuu

SEQ ID NO: 1016398 - RNA, 19 nt, Homo sapiens
  misc_RNA (1)...(19): siRNA sense strand
aacgaaugguucucgaauu

SEQ ID NO: 1016399 - RNA, 19 nt, Homo sapiens
  misc_RNA (1)...(19): siRNA sense strand
ucaaacguauuagaggaau

SEQ ID NO: 1016400 - RNA, 19 nt, Homo sapiens
  misc_RNA (1)...(19): siRNA sense strand
acaggaacaaccuuauauu

SEQ ID NO: 1016401 - RNA, 19 nt, Homo sapiens
  misc_RNA (1)...(19): siRNA sense strand
caacgucugguccugucua

SEQ ID NO: 1016402 - RNA, 19 nt, Homo sapiens
  misc_RNA (1)...(19): siRNA sense strand
gagcauccucaacaaguuc

SEQ ID NO: 1016403 - RNA, 19 nt, Homo sapiens
  misc_RNA (1)...(19): siRNA sense strand
aggaauggcguacucugua

SEQ ID NO: 1016404 - RNA, 19 nt, Homo sapiens
  misc_RNA (1)...(19): siRNA sense strand
ggaagucuccgggcuuugg

SEQ ID NO: 1016405 - RNA, 19 nt, Homo sapiens
  misc_RNA (1)...(19): siRNA sense strand
caaacguauuagaggaaug

SEQ ID NO: 1016406 - RNA, 19 nt, Homo sapiens
  misc_RNA (1)...(19): siRNA sense strand
ugggaagucuccgggcuuu

SEQ ID NO: 1016407 - RNA, 19 nt, Homo sapiens
  misc_RNA (1)...(19): siRNA sense strand
ucagauggcgaaccggauu

SEQ ID NO: 1016408 - RNA, 19 nt, Homo sapiens
  misc_RNA (1)...(19): siRNA sense strand
gcgaagugguuuucucaug

SEQ ID NO: 1016409 - RNA, 19 nt, Homo sapiens
  misc_RNA (1)...(19): siRNA sense strand
gugcugaugaccuguguug

SEQ ID NO: 1016410 - RNA, 19 nt, Homo sapiens
  misc_RNA (1)...(19): siRNA sense strand
aacaaguucauaccugaua

SEQ ID NO: 1016411 - RNA, 19 nt, Homo sapiens
  misc_RNA (1)...(19): siRNA sense strand
caacucacagauccaggaa

SEQ ID NO: 1016412 - RNA, 19 nt, Homo sapiens
  misc_RNA (1)...(19): siRNA sense strand
uagcguccuucguggcauu

SEQ ID NO: 1016413 - RNA, 19 nt, Homo sapiens
  misc_RNA (1)...(19): siRNA sense strand
cgaagugguuuucucaugu

SEQ ID NO: 1016414 - RNA, 19 nt, Homo sapiens
  misc_RNA (1)...(19): siRNA sense strand
gacagcaggauguuuccaa

SEQ ID NO: 1016415 - RNA, 19 nt, Homo sapiens
  misc_RNA (1)...(19): siRNA sense strand
ugaccaaugaucagguuga

SEQ ID NO: 1016416 - RNA, 19 nt, Homo sapiens
  misc_RNA (1)...(19): siRNA sense strand
cuacgaggagugaccaaug

SEQ ID NO: 1016417 - RNA, 19 nt, Homo sapiens
  misc_RNA (1)...(19): siRNA sense strand
agcaggauguuuccaaagu

SEQ ID NO: 1016418 - RNA, 19 nt, Homo sapiens
  misc_RNA (1)...(19): siRNA sense strand
cgaaugguucucgaauuga

SEQ ID NO: 1016419 - RNA, 19 nt, Homo sapiens
  misc_RNA (1)...(19): siRNA sense strand
uuagaggaauggcguacuc

SEQ ID NO: 1016420 - RNA, 19 nt, Homo sapiens
  misc_RNA (1)...(19): siRNA sense strand
aacaggaacaaccuuauau

SEQ ID NO: 1016421 - RNA, 19 nt, Homo sapiens
  misc_RNA (1)...(19): siRNA sense strand
cagcacucccuuuguugaa

SEQ ID NO: 1016422 - RNA, 19 nt, Homo sapiens
  misc_RNA (1)...(19): siRNA sense strand
caacaaguucauaccugau

SEQ ID NO: 1016423 - RNA, 19 nt, Homo sapiens
  misc_RNA (1)...(19): siRNA sense strand
gccauguggugaagaacuc

SEQ ID NO: 1016424 - RNA, 19 nt, Homo sapiens
  misc_RNA (1)...(19): siRNA sense strand
acucacagauccaggaaaa

SEQ ID NO: 1016425 - RNA, 19 nt, Homo sapiens
  misc_RNA (1)...(19): siRNA sense strand
cuacgcagggugcaacuuc

SEQ ID NO: 1016426 - RNA, 19 nt, Homo sapiens
  misc_RNA (1)...(19): siRNA sense strand
cagccuggccuccuguaug

SEQ ID NO: 1016427 - RNA, 19 nt, Homo sapiens
  misc_RNA (1)...(19): siRNA sense strand
gguucucgaauugaaauaa

SEQ ID NO: 1016428 - RNA, 19 nt, Homo sapiens
  misc_RNA (1)...(19): siRNA sense strand
gaagugguuuucucauguc

SEQ ID NO: 1016429 - RNA, 19 nt, Homo sapiens
  misc_RNA (1)...(19): siRNA sense strand
uucguggcauuggguauua

SEQ ID NO: 1016430 - RNA, 19 nt, Homo sapiens
  misc_RNA (1)...(19): siRNA sense strand
gcuuggcuccauuuaugaa

SEQ ID NO: 1016431 - RNA, 19 nt, Homo sapiens
  misc_RNA (1)...(19): siRNA sense strand
uuagcaagacccucaagug

SEQ ID NO: 1016432 - RNA, 19 nt, Homo sapiens
  misc_RNA (1)...(19): siRNA sense strand
ucccuacacgauagaauuu

SEQ ID NO: 1016433 - RNA, 19 nt, Homo sapiens
  misc_RNA (1)...(19): siRNA sense strand
ggcccucucucucccuaca

SEQ ID NO: 1016434 - RNA, 19 nt, Homo sapiens
  misc_RNA (1)...(19): siRNA sense strand
gacaaaauaacgaaugguu

SEQ ID NO: 1016435 - RNA, 19 nt, Homo sapiens
  misc_RNA (1)...(19): siRNA sense strand
ggaggaggcuggucuggaa

SEQ ID NO: 1016436 - RNA, 19 nt, Homo sapiens
  misc_RNA (1)...(19): siRNA sense strand
uagagaaaguggaugauuu

SEQ ID NO: 1016437 - RNA, 19 nt, Homo sapiens
  misc_RNA (1)...(19): siRNA sense strand
gcaaauggccuuuuacuuu

SEQ ID NO: 1016438 - RNA, 19 nt, Homo sapiens
  misc_RNA (1)...(19): siRNA sense strand
ggaggucacuggccuuuca

SEQ ID NO: 1016439 - RNA, 19 nt, Homo sapiens
  misc_RNA (1)...(19): siRNA sense strand
ggguagaguuuacuuagaa

SEQ ID NO: 1016440 - RNA, 19 nt, Homo sapiens
  misc_RNA (1)...(19): siRNA sense strand
caaauggccuuuuacuuuu

SEQ ID NO: 1016441 - RNA, 19 nt, Homo sapiens
  misc_RNA (1)...(19): siRNA sense strand
agacaaagacggaaaguau

SEQ ID NO: 1016442 - RNA, 19 nt, Homo sapiens
  misc_RNA (1)...(19): siRNA sense strand
gacaaagacggaaaguaua

SEQ ID NO: 1016443 - RNA, 19 nt, Homo sapiens
  misc_RNA (1)...(19): siRNA sense strand
gcacacacacagacaaaga

SEQ ID NO: 1016444 - RNA, 19 nt, Homo sapiens
  misc_RNA (1)...(19): siRNA sense strand
gaaaugagggguagaguuu

SEQ ID NO: 1016445 - RNA, 19 nt, Homo sapiens
  misc_RNA (1)...(19): siRNA sense strand
ggagauacagccuagagaa

SEQ ID NO: 1016446 - RNA, 19 nt, Homo sapiens
  misc_RNA (1)...(19): siRNA sense strand
gagauacagccuagagaaa

SEQ ID NO: 1016447 - RNA, 19 nt, Homo sapiens
  misc_RNA (1)...(19): siRNA sense strand
gauacagccuagagaaagu

SEQ ID NO: 1016448 - RNA, 19 nt, Homo sapiens
  misc_RNA (1)...(19): siRNA sense strand
gaaacuuaguaugugcuuu

SEQ ID NO: 1016449 - RNA, 19 nt, Homo sapiens
  misc_RNA (1)...(19): siRNA sense strand
gauggcaaauggccuuuua

SEQ ID NO: 1016450 - RNA, 19 nt, Homo sapiens
  misc_RNA (1)...(19): siRNA sense strand
cuuaguaugugcuuuaugu

SEQ ID NO: 1016451 - RNA, 19 nt, Homo sapiens
  misc_RNA (1)...(19): siRNA sense strand
ucacuggccuuucaugucu

SEQ ID NO: 1016452 - RNA, 19 nt, Homo sapiens
  misc_RNA (1)...(19): siRNA sense strand
gagcacacacacagacaaa

SEQ ID NO: 1016453 - RNA, 19 nt, Homo sapiens
  misc_RNA (1)...(19): siRNA sense strand
uuucaugucugucaucuuc

SEQ ID NO: 1016454 - RNA, 19 nt, Homo sapiens
  misc_RNA (1)...(19): siRNA sense strand
acaggaaacuuaguaugug

SEQ ID NO: 1016455 - RNA, 19 nt, Homo sapiens
  misc_RNA (1)...(19): siRNA sense strand
cagcaaguacucacaggaa

SEQ ID NO: 1016456 - RNA, 19 nt, Homo sapiens
  misc_RNA (1)...(19): siRNA sense strand
ggaggcuggucuggaaaug

SEQ ID NO: 1016457 - RNA, 19 nt, Homo sapiens
  misc_RNA (1)...(19): siRNA sense strand
cacaggaaacuuaguaugu

SEQ ID NO: 1016458 - RNA, 19 nt, Homo sapiens
  misc_RNA (1)...(19): siRNA sense strand
acaaagacggaaaguauag

SEQ ID NO: 1016459 - RNA, 19 nt, Homo sapiens
  misc_RNA (1)...(19): siRNA sense strand
gacagaaggaacagggauu

SEQ ID NO: 1016460 - RNA, 19 nt, Homo sapiens
  misc_RNA (1)...(19): siRNA sense strand
gguagaguuuacuuagaag

SEQ ID NO: 1016461 - RNA, 19 nt, Homo sapiens
  misc_RNA (1)...(19): siRNA sense strand
ggaaacuuaguaugugcuu

SEQ ID NO: 1016462 - RNA, 19 nt, Homo sapiens
  misc_RNA (1)...(19): siRNA sense strand
gauggcgggugggagaguu

SEQ ID NO: 1016463 - RNA, 19 nt, Homo sapiens
  misc_RNA (1)...(19): siRNA sense strand
guaugugcuuuauguggau

SEQ ID NO: 1016464 - RNA, 19 nt, Homo sapiens
  misc_RNA (1)...(19): siRNA sense strand
aguacucacaggaaacuua

SEQ ID NO: 1016465 - RNA, 19 nt, Homo sapiens
  misc_RNA (1)...(19): siRNA sense strand
ucacaggaaacuuaguaug

SEQ ID NO: 1016466 - RNA, 19 nt, Homo sapiens
  misc_RNA (1)...(19): siRNA sense strand
uuacaaaguaugacagaag

SEQ ID NO: 1016467 - RNA, 19 nt, Homo sapiens
  misc_RNA (1)...(19): siRNA sense strand
acacagacaaagacggaaa

SEQ ID NO: 1016468 - RNA, 19 nt, Homo sapiens
  misc_RNA (1)...(19): siRNA sense strand
ggagcacacacacagacaa

SEQ ID NO: 1016469 - RNA, 19 nt, Homo sapiens
  misc_RNA (1)...(19): siRNA sense strand
acucacaggaaacuuagua

SEQ ID NO: 1016470 - RNA, 19 nt, Homo sapiens
  misc_RNA (1)...(19): siRNA sense strand
cuagagaaaguggaugauu

SEQ ID NO: 1016471 - RNA, 19 nt, Homo sapiens
  misc_RNA (1)...(19): siRNA sense strand
acagaaggaacagggauuu

SEQ ID NO: 1016472 - RNA, 19 nt, Homo sapiens
  misc_RNA (1)...(19): siRNA sense strand
guacucacaggaaacuuag

SEQ ID NO: 1016473 - RNA, 19 nt, Homo sapiens
  misc_RNA (1)...(19): siRNA sense strand
gcaaguacucacaggaaac

SEQ ID NO: 1016474 - RNA, 19 nt, Homo sapiens
  misc_RNA (1)...(19): siRNA sense strand
agcaaguacucacaggaaa

SEQ ID NO: 1016475 - RNA, 19 nt, Homo sapiens
  misc_RNA (1)...(19): siRNA sense strand
cagacaaagacggaaagua

SEQ ID NO: 1016476 - RNA, 19 nt, Homo sapiens
  misc_RNA (1)...(19): siRNA sense strand
ggucacuggccuuucaugu

SEQ ID NO: 1016477 - RNA, 19 nt, Homo sapiens
  misc_RNA (1)...(19): siRNA sense strand
gggagauacagccuagaga

SEQ ID NO: 1016478 - RNA, 19 nt, Homo sapiens
  misc_RNA (1)...(19): siRNA sense strand
ggaaaugagggguagaguu

SEQ ID NO: 1016479 - RNA, 19 nt, Homo sapiens
  misc_RNA (1)...(19): siRNA sense strand
gccuagagaaaguggauga

SEQ ID NO: 1016480 - RNA, 19 nt, Homo sapiens
  misc_RNA (1)...(19): siRNA sense strand
gaggcuggucuggaaauga

SEQ ID NO: 1016481 - RNA, 19 nt, Homo sapiens
  misc_RNA (1)...(19): siRNA sense strand
gaggaggcuggucuggaaa

SEQ ID NO: 1016482 - RNA, 19 nt, Homo sapiens
  misc_RNA (1)...(19): siRNA sense strand
agaaagggcagcucuauaa

SEQ ID NO: 1016483 - RNA, 19 nt, Homo sapiens
  misc_RNA (1)...(19): siRNA sense strand
gagaaagggcagcucuaua

SEQ ID NO: 1016484 - RNA, 19 nt, Homo sapiens
  misc_RNA (1)...(19): siRNA sense strand
ggacacggacuucauuguu

SEQ ID NO: 1016485 - RNA, 19 nt, Homo sapiens
  misc_RNA (1)...(19): siRNA sense strand
ggacuucauuguucucaag

SEQ ID NO: 1016486 - RNA, 19 nt, Homo sapiens
  misc_RNA (1)...(19): siRNA sense strand
ggaucgcacucauguggaa

SEQ ID NO: 1016487 - RNA, 19 nt, Homo sapiens
  misc_RNA (1)...(19): siRNA sense strand
gacacggacuucauuguuc

SEQ ID NO: 1016488 - RNA, 19 nt, Homo sapiens
  misc_RNA (1)...(19): siRNA sense strand
ggagaaagggcagcucuau

SEQ ID NO: 1016489 - RNA, 19 nt, Homo sapiens
  misc_RNA (1)...(19): siRNA sense strand
caucaucggcuucaaguuc

SEQ ID NO: 1016490 - RNA, 19 nt, Homo sapiens
  misc_RNA (1)...(19): siRNA sense strand
gaaguacuuugaggacauc

SEQ ID NO: 1016491 - RNA, 19 nt, Homo sapiens
  misc_RNA (1)...(19): siRNA sense strand
ccaacuuccuguucaugug

SEQ ID NO: 1016492 - RNA, 19 nt, Homo sapiens
  misc_RNA (1)...(19): siRNA sense strand
uggcaggacuggaagaagu

SEQ ID NO: 1016493 - RNA, 19 nt, Homo sapiens
  misc_RNA (1)...(19): siRNA sense strand
ggacuggaagaaguacuuu

SEQ ID NO: 1016494 - RNA, 19 nt, Homo sapiens
  misc_RNA (1)...(19): siRNA sense strand
cugggcaucucacuucuga

SEQ ID NO: 1016495 - RNA, 19 nt, Homo sapiens
  misc_RNA (1)...(19): siRNA sense strand
gaaagggcagcucuauaac

SEQ ID NO: 1016496 - RNA, 19 nt, Homo sapiens
  misc_RNA (1)...(19): siRNA sense strand
agaaguacuuugaggacau

SEQ ID NO: 1016497 - RNA, 19 nt, Homo sapiens
  misc_RNA (1)...(19): siRNA sense strand
ggcaggacuggaagaagua

SEQ ID NO: 1016498 - RNA, 19 nt, Homo sapiens
  misc_RNA (1)...(19): siRNA sense strand
gcaccugggcaucucacuu

SEQ ID NO: 1016499 - RNA, 19 nt, Homo sapiens
  misc_RNA (1)...(19): siRNA sense strand
acacggacuucauuguucu

SEQ ID NO: 1016500 - RNA, 19 nt, Homo sapiens
  misc_RNA (1)...(19): siRNA sense strand
ucaagaaccugcggaaccu

SEQ ID NO: 1016501 - RNA, 19 nt, Homo sapiens
  misc_RNA (1)...(19): siRNA sense strand
gcugcucagugccaccuau

SEQ ID NO: 1016502 - RNA, 19 nt, Homo sapiens
  misc_RNA (1)...(19): siRNA sense strand
gaucuacuggcacguugug

SEQ ID NO: 1016503 - RNA, 19 nt, Homo sapiens
  misc_RNA (1)...(19): siRNA sense strand
gggagagcccaaggagaaa

SEQ ID NO: 1016504 - RNA, 19 nt, Homo sapiens
  misc_RNA (1)...(19): siRNA sense strand
ugagcugcuucccgaaugu

SEQ ID NO: 1016505 - RNA, 19 nt, Homo sapiens
  misc_RNA (1)...(19): siRNA sense strand
caccugggcaucucacuuc

SEQ ID NO: 1016506 - RNA, 19 nt, Homo sapiens
  misc_RNA (1)...(19): siRNA sense strand
gugcugguccugaugaaag

SEQ ID NO: 1016507 - RNA, 19 nt, Homo sapiens
  misc_RNA (1)...(19): siRNA sense strand
gcacgaggccaugaaaaug

SEQ ID NO: 1016508 - RNA, 19 nt, Homo sapiens
  misc_RNA (1)...(19): siRNA sense strand
acuggaagaaguacuuuga

SEQ ID NO: 1016509 - RNA, 19 nt, Homo sapiens
  misc_RNA (1)...(19): siRNA sense strand
ggaacaaagugaucauuga

SEQ ID NO: 1016510 - RNA, 19 nt, Homo sapiens
  misc_RNA (1)...(19): siRNA sense strand
gaaagaagagccuccgaua

SEQ ID NO: 1016511 - RNA, 19 nt, Homo sapiens
  misc_RNA (1)...(19): siRNA sense strand
gaggcaagguauuaacuua

SEQ ID NO: 1016512 - RNA, 19 nt, Homo sapiens
  misc_RNA (1)...(19): siRNA sense strand
aagcagaacugacauguaa

SEQ ID NO: 1016513 - RNA, 19 nt, Homo sapiens
  misc_RNA (1)...(19): siRNA sense strand
ggagacggauaguaguuua

SEQ ID NO: 1016514 - RNA, 19 nt, Homo sapiens
  misc_RNA (1)...(19): siRNA sense strand
agaaagaaaucguggauga

SEQ ID NO: 1016515 - RNA, 19 nt, Homo sapiens
  misc_RNA (1)...(19): siRNA sense strand
gauaguaguuuagugguaa

SEQ ID NO: 1016516 - RNA, 19 nt, Homo sapiens
  misc_RNA (1)...(19): siRNA sense strand
ggucagaagugaaggaaga

SEQ ID NO: 1016517 - RNA, 19 nt, Homo sapiens
  misc_RNA (1)...(19): siRNA sense strand
aaaugaaucuccuaaguga

SEQ ID NO: 1016518 - RNA, 19 nt, Homo sapiens
  misc_RNA (1)...(19): siRNA sense strand
auacaaaggugaaagaaga

SEQ ID NO: 1016519 - RNA, 19 nt, Homo sapiens
  misc_RNA (1)...(19): siRNA sense strand
ggaaggaaguggacaaagg

SEQ ID NO: 1016520 - RNA, 19 nt, Homo sapiens
  misc_RNA (1)...(19): siRNA sense strand
acaaagugaucauugagua

SEQ ID NO: 1016521 - RNA, 19 nt, Homo sapiens
  misc_RNA (1)...(19): siRNA sense strand
guacagauguccacguugu

SEQ ID NO: 1016522 - RNA, 19 nt, Homo sapiens
  misc_RNA (1)...(19): siRNA sense strand
gaaaugaaucuccuaagug

SEQ ID NO: 1016523 - RNA, 19 nt, Homo sapiens
  misc_RNA (1)...(19): siRNA sense strand
caagaacguuggcaaugaa

SEQ ID NO: 1016524 - RNA, 19 nt, Homo sapiens
  misc_RNA (1)...(19): siRNA sense strand
gaacagcggaccauauuuc

SEQ ID NO: 1016525 - RNA, 19 nt, Homo sapiens
  misc_RNA (1)...(19): siRNA sense strand
ggauaguaguuuaguggua

SEQ ID NO: 1016526 - RNA, 19 nt, Homo sapiens
  misc_RNA (1)...(19): siRNA sense strand
gaccauauuucuagagaug

SEQ ID NO: 1016527 - RNA, 19 nt, Homo sapiens
  misc_RNA (1)...(19): siRNA sense strand
guaauggaguucgagauaa

SEQ ID NO: 1016528 - RNA, 19 nt, Homo sapiens
  misc_RNA (1)...(19): siRNA sense strand
gaagguaaagggagaggua

SEQ ID NO: 1016529 - RNA, 19 nt, Homo sapiens
  misc_RNA (1)...(19): siRNA sense strand
ccuaagugauuaucgauuu

SEQ ID NO: 1016530 - RNA, 19 nt, Homo sapiens
  misc_RNA (1)...(19): siRNA sense strand
ggccugaggugaaggauga

SEQ ID NO: 1016531 - RNA, 19 nt, Homo sapiens
  misc_RNA (1)...(19): siRNA sense strand
uaauggaguucgagauaaa

SEQ ID NO: 1016532 - RNA, 19 nt, Homo sapiens
  misc_RNA (1)...(19): siRNA sense strand
ggacaaaggccagaggaaa

SEQ ID NO: 1016533 - RNA, 19 nt, Homo sapiens
  misc_RNA (1)...(19): siRNA sense strand
guacagaagaagcaaagua

SEQ ID NO: 1016534 - RNA, 19 nt, Homo sapiens
  misc_RNA (1)...(19): siRNA sense strand
aaggauaacuuggagauaa

SEQ ID NO: 1016535 - RNA, 19 nt, Homo sapiens
  misc_RNA (1)...(19): siRNA sense strand
ugaaaugaaucuccuaagu

SEQ ID NO: 1016536 - RNA, 19 nt, Homo sapiens
  misc_RNA (1)...(19): siRNA sense strand
guaauggacuggucagaag

SEQ ID NO: 1016537 - RNA, 19 nt, Homo sapiens
  misc_RNA (1)...(19): siRNA sense strand
gaaaguucuucaccaagug

SEQ ID NO: 1016538 - RNA, 19 nt, Homo sapiens
  misc_RNA (1)...(19): siRNA sense strand
cauugaguauccaacauua

SEQ ID NO: 1016539 - RNA, 19 nt, Homo sapiens
  misc_RNA (1)...(19): siRNA sense strand
aagaagagccuccgauaaa

SEQ ID NO: 1016540 - RNA, 19 nt, Homo sapiens
  misc_RNA (1)...(19): siRNA sense strand
gaagagaccaauaagcaau

SEQ ID NO: 1016541 - RNA, 19 nt, Homo sapiens
  misc_RNA (1)...(19): siRNA sense strand
aaagaaaucguggaugaua

SEQ ID NO: 1016542 - RNA, 19 nt, Homo sapiens
  misc_RNA (1)...(19): siRNA sense strand
gaagaaagaaaucguggau

SEQ ID NO: 1016543 - RNA, 19 nt, Homo sapiens
  misc_RNA (1)...(19): siRNA sense strand
guagugaagcaggaaauua

SEQ ID NO: 1016544 - RNA, 19 nt, Homo sapiens
  misc_RNA (1)...(19): siRNA sense strand
gaacaggagguggaggaua

SEQ ID NO: 1016545 - RNA, 19 nt, Homo sapiens
  misc_RNA (1)...(19): siRNA sense strand
ggaagagaaggauaacuug

SEQ ID NO: 1016546 - RNA, 19 nt, Homo sapiens
  misc_RNA (1)...(19): siRNA sense strand
ggaaauaccgauggaccua

SEQ ID NO: 1016547 - RNA, 19 nt, Homo sapiens
  misc_RNA (1)...(19): siRNA sense strand
gaaaggauccaauaaugac

SEQ ID NO: 1016548 - RNA, 19 nt, Homo sapiens
  misc_RNA (1)...(19): siRNA sense strand
ggagaaguuuguuggucaa

SEQ ID NO: 1016549 - RNA, 19 nt, Homo sapiens
  misc_RNA (1)...(19): siRNA sense strand
ugaaaggauccaauaauga

SEQ ID NO: 1016550 - RNA, 19 nt, Homo sapiens
  misc_RNA (1)...(19): siRNA sense strand
uugaaaggauccaauaaug

SEQ ID NO: 1016551 - RNA, 19 nt, Homo sapiens
  misc_RNA (1)...(19): siRNA sense strand
gcagaacugacauguaaug

SEQ ID NO: 1016552 - RNA, 19 nt, Homo sapiens
  misc_RNA (1)...(19): siRNA sense strand
gaaguuuguuggucaaugc

SEQ ID NO: 1016553 - RNA, 19 nt, Homo sapiens
  misc_RNA (1)...(19): siRNA sense strand
ugaaggaagagaaggauaa

SEQ ID NO: 1016554 - RNA, 19 nt, Homo sapiens
  misc_RNA (1)...(19): siRNA sense strand
aaagucugauccuguaauu

SEQ ID NO: 1016555 - RNA, 19 nt, Homo sapiens
  misc_RNA (1)...(19): siRNA sense strand
gaagagccuccgauaaauc

SEQ ID NO: 1016556 - RNA, 19 nt, Homo sapiens
  misc_RNA (1)...(19): siRNA sense strand
gaagcaaaguacagauguc

SEQ ID NO: 1016557 - RNA, 19 nt, Homo sapiens
  misc_RNA (1)...(19): siRNA sense strand
ugacagggauaaaggagau

SEQ ID NO: 1016558 - RNA, 19 nt, Homo sapiens
  misc_RNA (1)...(19): siRNA sense strand
gaacaaagugaucauugag

SEQ ID NO: 1016559 - RNA, 19 nt, Homo sapiens
  misc_RNA (1)...(19): siRNA sense strand
gcagcaaaauuuaguaaga

SEQ ID NO: 1016560 - RNA, 19 nt, Homo sapiens
  misc_RNA (1)...(19): siRNA sense strand
caagcugaguacauagaaa

SEQ ID NO: 1016561 - RNA, 19 nt, Homo sapiens
  misc_RNA (1)...(19): siRNA sense strand
aaagaagagccuccgauaa

SEQ ID NO: 1016562 - RNA, 19 nt, Homo sapiens
  misc_RNA (1)...(19): siRNA sense strand
gaaggauaacuuggagaua

SEQ ID NO: 1016563 - RNA, 19 nt, Homo sapiens
  misc_RNA (1)...(19): siRNA sense strand
uaaaggaagagaagguaaa

SEQ ID NO: 1016564 - RNA, 19 nt, Homo sapiens
  misc_RNA (1)...(19): siRNA sense strand
gaaauaccgauggaccuaa

SEQ ID NO: 1016565 - RNA, 19 nt, Homo sapiens
  misc_RNA (1)...(19): siRNA sense strand
ugaaaagucugauccugua

SEQ ID NO: 1016566 - RNA, 19 nt, Homo sapiens
  misc_RNA (1)...(19): siRNA sense strand
caagaacagcggaccauau

SEQ ID NO: 1016567 - RNA, 19 nt, Homo sapiens
  misc_RNA (1)...(19): siRNA sense strand
gcaagaacagcggaccaua

SEQ ID NO: 1016568 - RNA, 19 nt, Homo sapiens
  misc_RNA (1)...(19): siRNA sense strand
acacaaagcagaacugaca

SEQ ID NO: 1016569 - RNA, 19 nt, Homo sapiens
  misc_RNA (1)...(19): siRNA sense strand
gacaaaggccagaggaaau

SEQ ID NO: 1016570 - RNA, 19 nt, Homo sapiens
  misc_RNA (1)...(19): siRNA sense strand
ggaguuugcugcugaaaau

SEQ ID NO: 1016571 - RNA, 19 nt, Homo sapiens
  misc_RNA (1)...(19): siRNA sense strand
cccaauggauucaccaaga

SEQ ID NO: 1016572 - RNA, 19 nt, Homo sapiens
  misc_RNA (1)...(19): siRNA sense strand
acaaaggccagaggaaaua

SEQ ID NO: 1016573 - RNA, 19 nt, Homo sapiens
  misc_RNA (1)...(19): siRNA sense strand
guaaaggaagagaagguaa

SEQ ID NO: 1016574 - RNA, 19 nt, Homo sapiens
  misc_RNA (1)...(19): siRNA sense strand
cauuacaugugguauugaa

SEQ ID NO: 1016575 - RNA, 19 nt, Homo sapiens
  misc_RNA (1)...(19): siRNA sense strand
cugcauacauuucaauaca

SEQ ID NO: 1016576 - RNA, 19 nt, Homo sapiens
  misc_RNA (1)...(19): siRNA sense strand
agaagagccuccgauaaau

SEQ ID NO: 1016577 - RNA, 19 nt, Homo sapiens
  misc_RNA (1)...(19): siRNA sense strand
aaccagagguaaaggaaga

SEQ ID NO: 1016578 - RNA, 19 nt, Homo sapiens
  misc_RNA (1)...(19): siRNA sense strand
aaagaguaccagaugauaa

SEQ ID NO: 1016579 - RNA, 19 nt, Homo sapiens
  misc_RNA (1)...(19): siRNA sense strand
aagucaagcugaguacaua

SEQ ID NO: 1016580 - RNA, 19 nt, Homo sapiens
  misc_RNA (1)...(19): siRNA sense strand
gcauacauuucaauacaac

SEQ ID NO: 1016581 - RNA, 19 nt, Homo sapiens
  misc_RNA (1)...(19): siRNA sense strand
uguaauggaguucgagaua

SEQ ID NO: 1016582 - RNA, 19 nt, Homo sapiens
  misc_RNA (1)...(19): siRNA sense strand
gcccggaggcaagguauua

SEQ ID NO: 1016583 - RNA, 19 nt, Homo sapiens
  misc_RNA (1)...(19): siRNA sense strand
ccaauaaugacaugaaagu

SEQ ID NO: 1016584 - RNA, 19 nt, Homo sapiens
  misc_RNA (1)...(19): siRNA sense strand
ccaagaggaaggagaauuc

SEQ ID NO: 1016585 - RNA, 19 nt, Homo sapiens
  misc_RNA (1)...(19): siRNA sense strand
gguaaaggaagagaaggua

SEQ ID NO: 1016586 - RNA, 19 nt, Homo sapiens
  misc_RNA (1)...(19): siRNA sense strand
gauccaauaaugacaugaa

SEQ ID NO: 1016587 - RNA, 19 nt, Homo sapiens
  misc_RNA (1)...(19): siRNA sense strand
ggauaggccugaggugaag

SEQ ID NO: 1016588 - RNA, 19 nt, Homo sapiens
  misc_RNA (1)...(19): siRNA sense strand
aagaacagcggaccauauu

SEQ ID NO: 1016589 - RNA, 19 nt, Homo sapiens
  misc_RNA (1)...(19): siRNA sense strand
aaagaaacacaaagcagaa

SEQ ID NO: 1016590 - RNA, 19 nt, Homo sapiens
  misc_RNA (1)...(19): siRNA sense strand
ggaccuaacgguagugaag

SEQ ID NO: 1016591 - RNA, 19 nt, Homo sapiens
  misc_RNA (1)...(19): siRNA sense strand
gaaagaaaucguggaugau

SEQ ID NO: 1016592 - RNA, 19 nt, Homo sapiens
  misc_RNA (1)...(19): siRNA sense strand
ggacuggucagaagugaag

SEQ ID NO: 1016593 - RNA, 19 nt, Homo sapiens
  misc_RNA (1)...(19): siRNA sense strand
aagaguaccagaugauaaa

SEQ ID NO: 1016594 - RNA, 19 nt, Homo sapiens
  misc_RNA (1)...(19): siRNA sense strand
gcaguuugccuuguguaaa

SEQ ID NO: 1016595 - RNA, 19 nt, Homo sapiens
  misc_RNA (1)...(19): siRNA sense strand
aggauaacuuggagauaaa

SEQ ID NO: 1016596 - RNA, 19 nt, Homo sapiens
  misc_RNA (1)...(19): siRNA sense strand
cagaggaaauaccgaugga

SEQ ID NO: 1016597 - RNA, 19 nt, Homo sapiens
  misc_RNA (1)...(19): siRNA sense strand
gagugaaucuaccaagaac

SEQ ID NO: 1016598 - RNA, 19 nt, Homo sapiens
  misc_RNA (1)...(19): siRNA sense strand
aagagugaaucuaccaaga

SEQ ID NO: 1016599 - RNA, 19 nt, Homo sapiens
  misc_RNA (1)...(19): siRNA sense strand
gcaugugaagcuccaguuu

SEQ ID NO: 1016600 - RNA, 19 nt, Homo sapiens
  misc_RNA (1)...(19): siRNA sense strand
auuauagacuggccaggua

SEQ ID NO: 1016601 - RNA, 19 nt, Homo sapiens
  misc_RNA (1)...(19): siRNA sense strand
gguaauggacuggucagaa

SEQ ID NO: 1016602 - RNA, 19 nt, Homo sapiens
  misc_RNA (1)...(19): siRNA sense strand
caaagugaucauugaguau

SEQ ID NO: 1016603 - RNA, 19 nt, Homo sapiens
  misc_RNA (1)...(19): siRNA sense strand
ggaggcaagguauuaacuu

SEQ ID NO: 1016604 - RNA, 19 nt, Homo sapiens
  misc_RNA (1)...(19): siRNA sense strand
agagaccaauaagcaauaa

SEQ ID NO: 1016605 - RNA, 19 nt, Homo sapiens
  misc_RNA (1)...(19): siRNA sense strand
caguuugccuuguguaaag

SEQ ID NO: 1016606 - RNA, 19 nt, Homo sapiens
  misc_RNA (1)...(19): siRNA sense strand
gauaggggauggagaggaa

SEQ ID NO: 1016607 - RNA, 19 nt, Homo sapiens
  misc_RNA (1)...(19): siRNA sense strand
aaucguggaugauacaaag

SEQ ID NO: 1016608 - RNA, 19 nt, Homo sapiens
  misc_RNA (1)...(19): siRNA sense strand
guuuguuggucaaugcaua

SEQ ID NO: 1016609 - RNA, 19 nt, Homo sapiens
  misc_RNA (1)...(19): siRNA sense strand
gaacccaaguagcuuugug

SEQ ID NO: 1016610 - RNA, 19 nt, Homo sapiens
  misc_RNA (1)...(19): siRNA sense strand
gaaggaggaacccaaguag

SEQ ID NO: 1016611 - RNA, 19 nt, Homo sapiens
  misc_RNA (1)...(19): siRNA sense strand
agaaggaggaacccaagua

SEQ ID NO: 1016612 - RNA, 19 nt, Homo sapiens
  misc_RNA (1)...(19): siRNA sense strand
gaggaacccaaguagcuuu

SEQ ID NO: 1016613 - RNA, 19 nt, Homo sapiens
  misc_RNA (1)...(19): siRNA sense strand
ggaggaacccaaguagcuu

SEQ ID NO: 1016614 - RNA, 19 nt, Homo sapiens
  misc_RNA (1)...(19): siRNA sense strand
ucaugcagcagaagcagaa

SEQ ID NO: 1016615 - RNA, 19 nt, Homo sapiens
  misc_RNA (1)...(19): siRNA sense strand
cggagaucaugcagcagaa

SEQ ID NO: 1016616 - RNA, 19 nt, Homo sapiens
  misc_RNA (1)...(19): siRNA sense strand
gaaauacucugucuagaaa

SEQ ID NO: 1016617 - RNA, 19 nt, Homo sapiens
  misc_RNA (1)...(19): siRNA sense strand
gaacaggacuauaggauga

SEQ ID NO: 1016618 - RNA, 19 nt, Homo sapiens
  misc_RNA (1)...(19): siRNA sense strand
gcaagaagcugaaguaugg

SEQ ID NO: 1016619 - RNA, 19 nt, Homo sapiens
  misc_RNA (1)...(19): siRNA sense strand
gaaagaaaccucaaugauu

SEQ ID NO: 1016620 - RNA, 19 nt, Homo sapiens
  misc_RNA (1)...(19): siRNA sense strand
ggaagauggugcuuacuua

SEQ ID NO: 1016621 - RNA, 19 nt, Homo sapiens
  misc_RNA (1)...(19): siRNA sense strand
gaaguagagucaucuuuaa

SEQ ID NO: 1016622 - RNA, 19 nt, Homo sapiens
  misc_RNA (1)...(19): siRNA sense strand
gaaaugaugccaaagauaa

SEQ ID NO: 1016623 - RNA, 19 nt, Homo sapiens
  misc_RNA (1)...(19): siRNA sense strand
caaaguacaugcagaacaa

SEQ ID NO: 1016624 - RNA, 19 nt, Homo sapiens
  misc_RNA (1)...(19): siRNA sense strand
ggagaaagaaaccaaauuu

SEQ ID NO: 1016625 - RNA, 19 nt, Homo sapiens
  misc_RNA (1)...(19): siRNA sense strand
acaaguagcugaagccaaa

SEQ ID NO: 1016626 - RNA, 19 nt, Homo sapiens
  misc_RNA (1)...(19): siRNA sense strand
ggaaagaacaagugaguga

SEQ ID NO: 1016627 - RNA, 19 nt, Homo sapiens
  misc_RNA (1)...(19): siRNA sense strand
gaugauaacuuggaauuag

SEQ ID NO: 1016628 - RNA, 19 nt, Homo sapiens
  misc_RNA (1)...(19): siRNA sense strand
caacagaagcacaaaguuu

SEQ ID NO: 1016629 - RNA, 19 nt, Homo sapiens
  misc_RNA (1)...(19): siRNA sense strand
gaagaacgguuggagauag

SEQ ID NO: 1016630 - RNA, 19 nt, Homo sapiens
  misc_RNA (1)...(19): siRNA sense strand
gauucaugcugcuaaguua

SEQ ID NO: 1016631 - RNA, 19 nt, Homo sapiens
  misc_RNA (1)...(19): siRNA sense strand
gagcuuacagagcauauua

SEQ ID NO: 1016632 - RNA, 19 nt, Homo sapiens
  misc_RNA (1)...(19): siRNA sense strand
gagcuucuccagauuauuu

SEQ ID NO: 1016633 - RNA, 19 nt, Homo sapiens
  misc_RNA (1)...(19): siRNA sense strand
ugaaguagagucaucuuua

SEQ ID NO: 1016634 - RNA, 19 nt, Homo sapiens
  misc_RNA (1)...(19): siRNA sense strand
cugaagagcuggagaccua

SEQ ID NO: 1016635 - RNA, 19 nt, Homo sapiens
  misc_RNA (1)...(19): siRNA sense strand
guaugaaggcuaugaagua

SEQ ID NO: 1016636 - RNA, 19 nt, Homo sapiens
  misc_RNA (1)...(19): siRNA sense strand
gaaacucuacaggaaauua

SEQ ID NO: 1016637 - RNA, 19 nt, Homo sapiens
  misc_RNA (1)...(19): siRNA sense strand
aaaugaaacucuacaggaa

SEQ ID NO: 1016638 - RNA, 19 nt, Homo sapiens
  misc_RNA (1)...(19): siRNA sense strand
ggacuugauguuccaaaua

SEQ ID NO: 1016639 - RNA, 19 nt, Homo sapiens
  misc_RNA (1)...(19): siRNA sense strand
gcgaaaagcugaacagguu

SEQ ID NO: 1016640 - RNA, 19 nt, Homo sapiens
  misc_RNA (1)...(19): siRNA sense strand
caagagauuucaagcgaau

SEQ ID NO: 1016641 - RNA, 19 nt, Homo sapiens
  misc_RNA (1)...(19): siRNA sense strand
gucaaugccuucagaaaug

SEQ ID NO: 1016642 - RNA, 19 nt, Homo sapiens
  misc_RNA (1)...(19): siRNA sense strand
uaaaguagacgaaaugauc

SEQ ID NO: 1016643 - RNA, 19 nt, Homo sapiens
  misc_RNA (1)...(19): siRNA sense strand
cgagaugcuuggaaagaaa

SEQ ID NO: 1016644 - RNA, 19 nt, Homo sapiens
  misc_RNA (1)...(19): siRNA sense strand
uaauaugccuucuuuggau

SEQ ID NO: 1016645 - RNA, 19 nt, Homo sapiens
  misc_RNA (1)...(19): siRNA sense strand
caaagaaagaggagaauca

SEQ ID NO: 1016646 - RNA, 19 nt, Homo sapiens
  misc_RNA (1)...(19): siRNA sense strand
gauggugcuuacuuagaua

SEQ ID NO: 1016647 - RNA, 19 nt, Homo sapiens
  misc_RNA (1)...(19): siRNA sense strand
ugaaauacucugucuagaa

SEQ ID NO: 1016648 - RNA, 19 nt, Homo sapiens
  misc_RNA (1)...(19): siRNA sense strand
guagaaaugaugccaaaga

SEQ ID NO: 1016649 - RNA, 19 nt, Homo sapiens
  misc_RNA (1)...(19): siRNA sense strand
aagaagauguaacggauga

SEQ ID NO: 1016650 - RNA, 19 nt, Homo sapiens
  misc_RNA (1)...(19): siRNA sense strand
acugaacgcuugcuaaaga

SEQ ID NO: 1016651 - RNA, 19 nt, Homo sapiens
  misc_RNA (1)...(19): siRNA sense strand
gaauugauggcggauauuu

SEQ ID NO: 1016652 - RNA, 19 nt, Homo sapiens
  misc_RNA (1)...(19): siRNA sense strand
ccucaaugauuuaaggaaa

SEQ ID NO: 1016653 - RNA, 19 nt, Homo sapiens
  misc_RNA (1)...(19): siRNA sense strand
ggugauacgugcagcuguu

SEQ ID NO: 1016654 - RNA, 19 nt, Homo sapiens
  misc_RNA (1)...(19): siRNA sense strand
caguagaaaugaugccaaa

SEQ ID NO: 1016655 - RNA, 19 nt, Homo sapiens
  misc_RNA (1)...(19): siRNA sense strand
caaaaucccucaaaucaca

SEQ ID NO: 1016656 - RNA, 19 nt, Homo sapiens
  misc_RNA (1)...(19): siRNA sense strand
guuggaagguccucucaga

SEQ ID NO: 1016657 - RNA, 19 nt, Homo sapiens
  misc_RNA (1)...(19): siRNA sense strand
uacagucgcuagaagauga

SEQ ID NO: 1016658 - RNA, 19 nt, Homo sapiens
  misc_RNA (1)...(19): siRNA sense strand
caaaggaagagcuuacaga

SEQ ID NO: 1016659 - RNA, 19 nt, Homo sapiens
  misc_RNA (1)...(19): siRNA sense strand
gaaggagaaagaaaccaaa

SEQ ID NO: 1016660 - RNA, 19 nt, Homo sapiens
  misc_RNA (1)...(19): siRNA sense strand
auucugaacuugugcauga

SEQ ID NO: 1016661 - RNA, 19 nt, Homo sapiens
  misc_RNA (1)...(19): siRNA sense strand
uagaaaugaugccaaagau

SEQ ID NO: 1016662 - RNA, 19 nt, Homo sapiens
  misc_RNA (1)...(19): siRNA sense strand
ggucaaugccuucagaaau

SEQ ID NO: 1016663 - RNA, 19 nt, Homo sapiens
  misc_RNA (1)...(19): siRNA sense strand
ugugauagguuaacugauc

SEQ ID NO: 1016664 - RNA, 19 nt, Homo sapiens
  misc_RNA (1)...(19): siRNA sense strand
gaacgcuugcuaaagauga

SEQ ID NO: 1016665 - RNA, 19 nt, Homo sapiens
  misc_RNA (1)...(19): siRNA sense strand
aauacgagaugcuuggaaa

SEQ ID NO: 1016666 - RNA, 19 nt, Homo sapiens
  misc_RNA (1)...(19): siRNA sense strand
ggagauagaaauacgagau

SEQ ID NO: 1016667 - RNA, 19 nt, Homo sapiens
  misc_RNA (1)...(19): siRNA sense strand
gaaagaaaaugcucacaac

SEQ ID NO: 1016668 - RNA, 19 nt, Homo sapiens
  misc_RNA (1)...(19): siRNA sense strand
caucaagacucugacugaa

SEQ ID NO: 1016669 - RNA, 19 nt, Homo sapiens
  misc_RNA (1)...(19): siRNA sense strand
agaaacagcuuuugcaaga

SEQ ID NO: 1016670 - RNA, 19 nt, Homo sapiens
  misc_RNA (1)...(19): siRNA sense strand
gaaagaacaagugagugaa

SEQ ID NO: 1016671 - RNA, 19 nt, Homo sapiens
  misc_RNA (1)...(19): siRNA sense strand
gaagauuauucuccaugag

SEQ ID NO: 1016672 - RNA, 19 nt, Homo sapiens
  misc_RNA (1)...(19): siRNA sense strand
ggaugaugauaacuuggaa

SEQ ID NO: 1016673 - RNA, 19 nt, Homo sapiens
  misc_RNA (1)...(19): siRNA sense strand
uaacggaugaugauaacuu

SEQ ID NO: 1016674 - RNA, 19 nt, Homo sapiens
  misc_RNA (1)...(19): siRNA sense strand
ggcacuuucuggacuaauu

SEQ ID NO: 1016675 - RNA, 19 nt, Homo sapiens
  misc_RNA (1)...(19): siRNA sense strand
gauggcggauauuuccaaa

SEQ ID NO: 1016676 - RNA, 19 nt, Homo sapiens
  misc_RNA (1)...(19): siRNA sense strand
gcaaugagaaaugucuauu

SEQ ID NO: 1016677 - RNA, 19 nt, Homo sapiens
  misc_RNA (1)...(19): siRNA sense strand
ggaauccaguagaaaugau

SEQ ID NO: 1016678 - RNA, 19 nt, Homo sapiens
  misc_RNA (1)...(19): siRNA sense strand
ggaauccuccggaccauca

SEQ ID NO: 1016679 - RNA, 19 nt, Homo sapiens
  misc_RNA (1)...(19): siRNA sense strand
ugaaagaaaccucaaugau

SEQ ID NO: 1016680 - RNA, 19 nt, Homo sapiens
  misc_RNA (1)...(19): siRNA sense strand
ugacugaacgcuugcuaaa

SEQ ID NO: 1016681 - RNA, 19 nt, Homo sapiens
  misc_RNA (1)...(19): siRNA sense strand
gaagauggugcuuacuuag

SEQ ID NO: 1016682 - RNA, 19 nt, Homo sapiens
  misc_RNA (1)...(19): siRNA sense strand
aaaggugccugauucaucu

SEQ ID NO: 1016683 - RNA, 19 nt, Homo sapiens
  misc_RNA (1)...(19): siRNA sense strand
gcauuuggcagacagcauu

SEQ ID NO: 1016684 - RNA, 19 nt, Homo sapiens
  misc_RNA (1)...(19): siRNA sense strand
gacuugauguuccaaauac

SEQ ID NO: 1016685 - RNA, 19 nt, Homo sapiens
  misc_RNA (1)...(19): siRNA sense strand
gauaauuggucggcagcuu

SEQ ID NO: 1016686 - RNA, 19 nt, Homo sapiens
  misc_RNA (1)...(19): siRNA sense strand
agacugaacaagcaucuuu

SEQ ID NO: 1016687 - RNA, 19 nt, Homo sapiens
  misc_RNA (1)...(19): siRNA sense strand
gcugcuaaguuaaaugcuu

SEQ ID NO: 1016688 - RNA, 19 nt, Homo sapiens
  misc_RNA (1)...(19): siRNA sense strand
aauaugccuucuuuggaua

SEQ ID NO: 1016689 - RNA, 19 nt, Homo sapiens
  misc_RNA (1)...(19): siRNA sense strand
gcaacagaagcacaaaguu

SEQ ID NO: 1016690 - RNA, 19 nt, Homo sapiens
  misc_RNA (1)...(19): siRNA sense strand
caucagauuaccaaagaaa

SEQ ID NO: 1016691 - RNA, 19 nt, Homo sapiens
  misc_RNA (1)...(19): siRNA sense strand
ggauacagucgcuagaaga

SEQ ID NO: 1016692 - RNA, 19 nt, Homo sapiens
  misc_RNA (1)...(19): siRNA sense strand
gaaggaggcaacagaagca

SEQ ID NO: 1016693 - RNA, 19 nt, Homo sapiens
  misc_RNA (1)...(19): siRNA sense strand
uaaaggugccugauucauc

SEQ ID NO: 1016694 - RNA, 19 nt, Homo sapiens
  misc_RNA (1)...(19): siRNA sense strand
acaaaggcaagacagauuu

SEQ ID NO: 1016695 - RNA, 19 nt, Homo sapiens
  misc_RNA (1)...(19): siRNA sense strand
ugaaggcuaugaaguagag

SEQ ID NO: 1016696 - RNA, 19 nt, Homo sapiens
  misc_RNA (1)...(19): siRNA sense strand
acaagcaucuuugcaguca

SEQ ID NO: 1016697 - RNA, 19 nt, Homo sapiens
  misc_RNA (1)...(19): siRNA sense strand
gaagagcuuacagagcaua

SEQ ID NO: 1016698 - RNA, 19 nt, Homo sapiens
  misc_RNA (1)...(19): siRNA sense strand
gaaaagaacauuugaagac

SEQ ID NO: 1016699 - RNA, 19 nt, Homo sapiens
  misc_RNA (1)...(19): siRNA sense strand
gcuagaagaugagucaaaa

SEQ ID NO: 1016700 - RNA, 19 nt, Homo sapiens
  misc_RNA (1)...(19): siRNA sense strand
agaaaugaugccaaagaua

SEQ ID NO: 1016701 - RNA, 19 nt, Homo sapiens
  misc_RNA (1)...(19): siRNA sense strand
gacccgauucucauccuua

SEQ ID NO: 1016702 - RNA, 19 nt, Homo sapiens
  misc_RNA (1)...(19): siRNA sense strand
gcagacagcauuccccaua

SEQ ID NO: 1016703 - RNA, 19 nt, Homo sapiens
  misc_RNA (1)...(19): siRNA sense strand
gaacagugaaucggaagau

SEQ ID NO: 1016704 - RNA, 19 nt, Homo sapiens
  misc_RNA (1)...(19): siRNA sense strand
aaaaugaccuucaagagau

SEQ ID NO: 1016705 - RNA, 19 nt, Homo sapiens
  misc_RNA (1)...(19): siRNA sense strand
caaaaugaccuucaagaga

SEQ ID NO: 1016706 - RNA, 19 nt, Homo sapiens
  misc_RNA (1)...(19): siRNA sense strand
caugaaauacucugucuag

SEQ ID NO: 1016707 - RNA, 19 nt, Homo sapiens
  misc_RNA (1)...(19): siRNA sense strand
aaaccucaaugauuuaagg

SEQ ID NO: 1016708 - RNA, 19 nt, Homo sapiens
  misc_RNA (1)...(19): siRNA sense strand
gcuuacagagcauauuaaa

SEQ ID NO: 1016709 - RNA, 19 nt, Homo sapiens
  misc_RNA (1)...(19): siRNA sense strand
gaagauguaacggaugaug

SEQ ID NO: 1016710 - RNA, 19 nt, Homo sapiens
  misc_RNA (1)...(19): siRNA sense strand
gaacgguuggagauagaaa

SEQ ID NO: 1016711 - RNA, 19 nt, Homo sapiens
  misc_RNA (1)...(19): siRNA sense strand
gcugaaguauggaaagaac

SEQ ID NO: 1016712 - RNA, 19 nt, Homo sapiens
  misc_RNA (1)...(19): siRNA sense strand
gaagguagaaugaguuucc

SEQ ID NO: 1016713 - RNA, 19 nt, Homo sapiens
  misc_RNA (1)...(19): siRNA sense strand
gcaacuggcccuggcuuug

SEQ ID NO: 1016714 - RNA, 19 nt, Homo sapiens
  misc_RNA (1)...(19): siRNA sense strand
gcugugauagguuaacuga

SEQ ID NO: 1016715 - RNA, 19 nt, Homo sapiens
  misc_RNA (1)...(19): siRNA sense strand
gcacuuucuggacuaauug

SEQ ID NO: 1016716 - RNA, 19 nt, Homo sapiens
  misc_RNA (1)...(19): siRNA sense strand
ggacauacaugaagaauug

SEQ ID NO: 1016717 - RNA, 19 nt, Homo sapiens
  misc_RNA (1)...(19): siRNA sense strand
gcaaacagaauucaaagaa

SEQ ID NO: 1016718 - RNA, 19 nt, Homo sapiens
  misc_RNA (1)...(19): siRNA sense strand
guggacaggugccucauua

SEQ ID NO: 1016719 - RNA, 19 nt, Homo sapiens
  misc_RNA (1)...(19): siRNA sense strand
ccaggaaacuguugaugaa

SEQ ID NO: 1016720 - RNA, 19 nt, Homo sapiens
  misc_RNA (1)...(19): siRNA sense strand
ggacuccuccuccauauuu

SEQ ID NO: 1016721 - RNA, 19 nt, Homo sapiens
  misc_RNA (1)...(19): siRNA sense strand
ggaaacuguugaugaagaa

SEQ ID NO: 1016722 - RNA, 19 nt, Homo sapiens
  misc_RNA (1)...(19): siRNA sense strand
aaucagaucugguaccaaa

SEQ ID NO: 1016723 - RNA, 19 nt, Homo sapiens
  misc_RNA (1)...(19): siRNA sense strand
caucguaucuccacuuaau

SEQ ID NO: 1016724 - RNA, 19 nt, Homo sapiens
  misc_RNA (1)...(19): siRNA sense strand
gauauuaagccaucaaaug

SEQ ID NO: 1016725 - RNA, 19 nt, Homo sapiens
  misc_RNA (1)...(19): siRNA sense strand
caucaaauguggaaccuau

SEQ ID NO: 1016726 - RNA, 19 nt, Homo sapiens
  misc_RNA (1)...(19): siRNA sense strand
uuggagagcuggcuaaauu

SEQ ID NO: 1016727 - RNA, 19 nt, Homo sapiens
  misc_RNA (1)...(19): siRNA sense strand
caaagacagugaccaggaa

SEQ ID NO: 1016728 - RNA, 19 nt, Homo sapiens
  misc_RNA (1)...(19): siRNA sense strand
ggaugaugcuuaugacuuc

SEQ ID NO: 1016729 - RNA, 19 nt, Homo sapiens
  misc_RNA (1)...(19): siRNA sense strand
ggaaacagaggcuugaaga

SEQ ID NO: 1016730 - RNA, 19 nt, Homo sapiens
  misc_RNA (1)...(19): siRNA sense strand
gaaaacagcucaggcaugu

SEQ ID NO: 1016731 - RNA, 19 nt, Homo sapiens
  misc_RNA (1)...(19): siRNA sense strand
ugaagaggaugaugcuuau

SEQ ID NO: 1016732 - RNA, 19 nt, Homo sapiens
  misc_RNA (1)...(19): siRNA sense strand
aaacagugcucccuuuaag

SEQ ID NO: 1016733 - RNA, 19 nt, Homo sapiens
  misc_RNA (1)...(19): siRNA sense strand
gaagagguaugcaccaaaa

SEQ ID NO: 1016734 - RNA, 19 nt, Homo sapiens
  misc_RNA (1)...(19): siRNA sense strand
aaacagaucacaaucauag

SEQ ID NO: 1016735 - RNA, 19 nt, Homo sapiens
  misc_RNA (1)...(19): siRNA sense strand
gagaagagguaugcaccaa

SEQ ID NO: 1016736 - RNA, 19 nt, Homo sapiens
  misc_RNA (1)...(19): siRNA sense strand
gacagguaguacugaaaua

SEQ ID NO: 1016737 - RNA, 19 nt, Homo sapiens
  misc_RNA (1)...(19): siRNA sense strand
caacaaaaccaaaggauaa

SEQ ID NO: 1016738 - RNA, 19 nt, Homo sapiens
  misc_RNA (1)...(19): siRNA sense strand
ggagagggaggaugacaaa

SEQ ID NO: 1016739 - RNA, 19 nt, Homo sapiens
  misc_RNA (1)...(19): siRNA sense strand
cuacaggaauucucuggaa

SEQ ID NO: 1016740 - RNA, 19 nt, Homo sapiens
  misc_RNA (1)...(19): siRNA sense strand
gaagugaagucugcuuugg

SEQ ID NO: 1016741 - RNA, 19 nt, Homo sapiens
  misc_RNA (1)...(19): siRNA sense strand
ccaaacagugcucccuuua

SEQ ID NO: 1016742 - RNA, 19 nt, Homo sapiens
  misc_RNA (1)...(19): siRNA sense strand
gguggaaucccaaauguug

SEQ ID NO: 1016743 - RNA, 19 nt, Homo sapiens
  misc_RNA (1)...(19): siRNA sense strand
gaagaaagaauugccaaca

SEQ ID NO: 1016744 - RNA, 19 nt, Homo sapiens
  misc_RNA (1)...(19): siRNA sense strand
gcagauguccucagguaga

SEQ ID NO: 1016745 - RNA, 19 nt, Homo sapiens
  misc_RNA (1)...(19): siRNA sense strand
caaacagaauucaaagaag

SEQ ID NO: 1016746 - RNA, 19 nt, Homo sapiens
  misc_RNA (1)...(19): siRNA sense strand
ccaaacugcuguggucuga

SEQ ID NO: 1016747 - RNA, 19 nt, Homo sapiens
  misc_RNA (1)...(19): siRNA sense strand
gauugaagccuccgauguu

SEQ ID NO: 1016748 - RNA, 19 nt, Homo sapiens
  misc_RNA (1)...(19): siRNA sense strand
gaaacagaggcuugaagaa

SEQ ID NO: 1016749 - RNA, 19 nt, Homo sapiens
  misc_RNA (1)...(19): siRNA sense strand
acaaggagcaugcaaguug

SEQ ID NO: 1016750 - RNA, 19 nt, Homo sapiens
  misc_RNA (1)...(19): siRNA sense strand
caaacagugcucccuuuaa

SEQ ID NO: 1016751 - RNA, 19 nt, Homo sapiens
  misc_RNA (1)...(19): siRNA sense strand
acaaacagaucacaaucau

SEQ ID NO: 1016752 - RNA, 19 nt, Homo sapiens
  misc_RNA (1)...(19): siRNA sense strand
gauguguaauguuggugua

SEQ ID NO: 1016753 - RNA, 19 nt, Homo sapiens
  misc_RNA (1)...(19): siRNA sense strand
acaagaagccuaggaaaga

SEQ ID NO: 1016754 - RNA, 19 nt, Homo sapiens
  misc_RNA (1)...(19): siRNA sense strand
ugacuucaguacagauuau

SEQ ID NO: 1016755 - RNA, 19 nt, Homo sapiens
  misc_RNA (1)...(19): siRNA sense strand
gaagcuguacugccaagaa

SEQ ID NO: 1016756 - RNA, 19 nt, Homo sapiens
  misc_RNA (1)...(19): siRNA sense strand
uaaugagaguauuguggua

SEQ ID NO: 1016757 - RNA, 19 nt, Homo sapiens
  misc_RNA (1)...(19): siRNA sense strand
ggagagcuggcuaaauuau

SEQ ID NO: 1016758 - RNA, 19 nt, Homo sapiens
  misc_RNA (1)...(19): siRNA sense strand
uugcagauguccucaggua

SEQ ID NO: 1016759 - RNA, 19 nt, Homo sapiens
  misc_RNA (1)...(19): siRNA sense strand
agaaagaauugccaacagu

SEQ ID NO: 1016760 - RNA, 19 nt, Homo sapiens
  misc_RNA (1)...(19): siRNA sense strand
ggacaaacagaucacaauc

SEQ ID NO: 1016761 - RNA, 19 nt, Homo sapiens
  misc_RNA (1)...(19): siRNA sense strand
aagaacagauguguaaugu

SEQ ID NO: 1016762 - RNA, 19 nt, Homo sapiens
  misc_RNA (1)...(19): siRNA sense strand
caagaacagauguguaaug

SEQ ID NO: 1016763 - RNA, 19 nt, Homo sapiens
  misc_RNA (1)...(19): siRNA sense strand
acagaggcuugaagaacua

SEQ ID NO: 1016764 - RNA, 19 nt, Homo sapiens
  misc_RNA (1)...(19): siRNA sense strand
caucaagggcccucauuug

SEQ ID NO: 1016765 - RNA, 19 nt, Homo sapiens
  misc_RNA (1)...(19): siRNA sense strand
ugaaggugcugccaaacug

SEQ ID NO: 1016766 - RNA, 19 nt, Homo sapiens
  misc_RNA (1)...(19): siRNA sense strand
aacaagaacagauguguaa

SEQ ID NO: 1016767 - RNA, 19 nt, Homo sapiens
  misc_RNA (1)...(19): siRNA sense strand
caaggagcaugcaaguugu

SEQ ID NO: 1016768 - RNA, 19 nt, Homo sapiens
  misc_RNA (1)...(19): siRNA sense strand
gaaaaggccuaaguuaaag

SEQ ID NO: 1016769 - RNA, 19 nt, Homo sapiens
  misc_RNA (1)...(19): siRNA sense strand
aaagcagcauuaucaauag

SEQ ID NO: 1016770 - RNA, 19 nt, Homo sapiens
  misc_RNA (1)...(19): siRNA sense strand
guacugccaagaacuuaaa

SEQ ID NO: 1016771 - RNA, 19 nt, Homo sapiens
  misc_RNA (1)...(19): siRNA sense strand
cagguaguacugaaauaua

SEQ ID NO: 1016772 - RNA, 19 nt, Homo sapiens
  misc_RNA (1)...(19): siRNA sense strand
gcaaguauugaaguaguaa

SEQ ID NO: 1016773 - RNA, 19 nt, Homo sapiens
  misc_RNA (1)...(19): siRNA sense strand
cagaucacaaucauagaua

SEQ ID NO: 1016774 - RNA, 19 nt, Homo sapiens
  misc_RNA (1)...(19): siRNA sense strand
ccaagcgugugaaggcaaa

SEQ ID NO: 1016775 - RNA, 19 nt, Homo sapiens
  misc_RNA (1)...(19): siRNA sense strand
uaaaucagaucugguacca

SEQ ID NO: 1016776 - RNA, 19 nt, Homo sapiens
  misc_RNA (1)...(19): siRNA sense strand
uugaagaggaugaugcuua

SEQ ID NO: 1016777 - RNA, 19 nt, Homo sapiens
  misc_RNA (1)...(19): siRNA sense strand
ggugaacagucuacaaggu

SEQ ID NO: 1016778 - RNA, 19 nt, Homo sapiens
  misc_RNA (1)...(19): siRNA sense strand
uggaagaacuggaaaagaa

SEQ ID NO: 1016779 - RNA, 19 nt, Homo sapiens
  misc_RNA (1)...(19): siRNA sense strand
cagcaaguauugaaguagu

SEQ ID NO: 1016780 - RNA, 19 nt, Homo sapiens
  misc_RNA (1)...(19): siRNA sense strand
aaacaagaacagaugugua

SEQ ID NO: 1016781 - RNA, 19 nt, Homo sapiens
  misc_RNA (1)...(19): siRNA sense strand
gacaaacagaucacaauca

SEQ ID NO: 1016782 - RNA, 19 nt, Homo sapiens
  misc_RNA (1)...(19): siRNA sense strand
gagggaggaugacaaagac

SEQ ID NO: 1016783 - RNA, 19 nt, Homo sapiens
  misc_RNA (1)...(19): siRNA sense strand
cgaaguccagcaaguauug

SEQ ID NO: 1016784 - RNA, 19 nt, Homo sapiens
  misc_RNA (1)...(19): siRNA sense strand
aguccgagcuucaucguau

SEQ ID NO: 1016785 - RNA, 19 nt, Homo sapiens
  misc_RNA (1)...(19): siRNA sense strand
caaacagaucacaaucaua

SEQ ID NO: 1016786 - RNA, 19 nt, Homo sapiens
  misc_RNA (1)...(19): siRNA sense strand
gguguuggaugccagagau

SEQ ID NO: 1016787 - RNA, 19 nt, Homo sapiens
  misc_RNA (1)...(19): siRNA sense strand
gagcauaagagccaucaag

SEQ ID NO: 1016788 - RNA, 19 nt, Homo sapiens
  misc_RNA (1)...(19): siRNA sense strand
aaacugcuguggucugagu

SEQ ID NO: 1016789 - RNA, 19 nt, Homo sapiens
  misc_RNA (1)...(19): siRNA sense strand
gggaaaagcagcauuauca

SEQ ID NO: 1016790 - RNA, 19 nt, Homo sapiens
  misc_RNA (1)...(19): siRNA sense strand
guucagagccucaacaaaa

SEQ ID NO: 1016791 - RNA, 19 nt, Homo sapiens
  misc_RNA (1)...(19): siRNA sense strand
agaaggaacuagaaaagaa

SEQ ID NO: 1016792 - RNA, 19 nt, Homo sapiens
  misc_RNA (1)...(19): siRNA sense strand
gcuuaugacuucaguacag

SEQ ID NO: 1016793 - RNA, 19 nt, Homo sapiens
  misc_RNA (1)...(19): siRNA sense strand
aaacagcagcagaaacuug

SEQ ID NO: 1016794 - RNA, 19 nt, Homo sapiens
  misc_RNA (1)...(19): siRNA sense strand
aggaaacuguugaugaaga

SEQ ID NO: 1016795 - RNA, 19 nt, Homo sapiens
  misc_RNA (1)...(19): siRNA sense strand
gcagcauuaucaauagcuu

SEQ ID NO: 1016796 - RNA, 19 nt, Homo sapiens
  misc_RNA (1)...(19): siRNA sense strand
gagagcuggcuaaauuauu

SEQ ID NO: 1016797 - RNA, 19 nt, Homo sapiens
  misc_RNA (1)...(19): siRNA sense strand
uaggaaagacccaggaguu

SEQ ID NO: 1016798 - RNA, 19 nt, Homo sapiens
  misc_RNA (1)...(19): siRNA sense strand
acaggugccucauuagcuu

SEQ ID NO: 1016799 - RNA, 19 nt, Homo sapiens
  misc_RNA (1)...(19): siRNA sense strand
aaggauaaagggaagauaa

SEQ ID NO: 1016800 - RNA, 19 nt, Homo sapiens
  misc_RNA (1)...(19): siRNA sense strand
cagauguccucagguagaa

SEQ ID NO: 1016801 - RNA, 19 nt, Homo sapiens
  misc_RNA (1)...(19): siRNA sense strand
ggcugaugcucgacaggua

SEQ ID NO: 1016802 - RNA, 19 nt, Homo sapiens
  misc_RNA (1)...(19): siRNA sense strand
gaaagacccaggaguucca

SEQ ID NO: 1016803 - RNA, 19 nt, Homo sapiens
  misc_RNA (1)...(19): siRNA sense strand
ggucugacaaauggaauaa

SEQ ID NO: 1016804 - RNA, 19 nt, Homo sapiens
  misc_RNA (1)...(19): siRNA sense strand
ccaagucgggcaaacagaa

SEQ ID NO: 1016805 - RNA, 19 nt, Homo sapiens
  misc_RNA (1)...(19): siRNA sense strand
cauguuugcugcagaagag

SEQ ID NO: 1016806 - RNA, 19 nt, Homo sapiens
  misc_RNA (1)...(19): siRNA sense strand
gaugaagaaguugaugaaa

SEQ ID NO: 1016807 - RNA, 19 nt, Homo sapiens
  misc_RNA (1)...(19): siRNA sense strand
gaaaaggacauacaugaag

SEQ ID NO: 1016808 - RNA, 19 nt, Homo sapiens
  misc_RNA (1)...(19): siRNA sense strand
cucauuagcuuacuauugc

SEQ ID NO: 1016809 - RNA, 19 nt, Homo sapiens
  misc_RNA (1)...(19): siRNA sense strand
cgacagguaguacugaaau

SEQ ID NO: 1016810 - RNA, 19 nt, Homo sapiens
  misc_RNA (1)...(19): siRNA sense strand
uccaaacagugcucccuuu

SEQ ID NO: 1016811 - RNA, 19 nt, Homo sapiens
  misc_RNA (1)...(19): siRNA sense strand
ggguuggaguaauugguuu

SEQ ID NO: 1016812 - RNA, 19 nt, Homo sapiens
  misc_RNA (1)...(19): siRNA sense strand
aagaggaugaugcuuauga

SEQ ID NO: 1016813 - RNA, 19 nt, Homo sapiens
  misc_RNA (1)...(19): siRNA sense strand
guauugugguagacaugaa

SEQ ID NO: 1016814 - RNA, 19 nt, Homo sapiens
  misc_RNA (1)...(19): siRNA sense strand
gucccaggcuacaggaauu

SEQ ID NO: 1016815 - RNA, 19 nt, Homo sapiens
  misc_RNA (1)...(19): siRNA sense strand
ucacaagaagccuaggaaa

SEQ ID NO: 1016816 - RNA, 19 nt, Homo sapiens
  misc_RNA (1)...(19): siRNA sense strand
gagaugagcugcaggguau

SEQ ID NO: 1016817 - RNA, 19 nt, Homo sapiens
  misc_RNA (1)...(19): siRNA sense strand
ggccauaacucuuguagaa

SEQ ID NO: 1016818 - RNA, 19 nt, Homo sapiens
  misc_RNA (1)...(19): siRNA sense strand
ucagauggcuuaaagagaa

SEQ ID NO: 1016819 - RNA, 19 nt, Homo sapiens
  misc_RNA (1)...(19): siRNA sense strand
ugagagagggcacaaauua

SEQ ID NO: 1016820 - RNA, 19 nt, Homo sapiens
  misc_RNA (1)...(19): siRNA sense strand
gcagcagacuucuuguuaa

SEQ ID NO: 1016821 - RNA, 19 nt, Homo sapiens
  misc_RNA (1)...(19): siRNA sense strand
gaaaguguguuagagcauu

SEQ ID NO: 1016822 - RNA, 19 nt, Homo sapiens
  misc_RNA (1)...(19): siRNA sense strand
gcaaagggccuguuuagca

SEQ ID NO: 1016823 - RNA, 19 nt, Homo sapiens
  misc_RNA (1)...(19): siRNA sense strand
aaaugaagcuauucuguug

SEQ ID NO: 1016824 - RNA, 19 nt, Homo sapiens
  misc_RNA (1)...(19): siRNA sense strand
cagcagacuucuuguuaaa

SEQ ID NO: 1016825 - RNA, 19 nt, Homo sapiens
  misc_RNA (1)...(19): siRNA sense strand
ucacaagucuggaaaccaa

SEQ ID NO: 1016826 - RNA, 19 nt, Homo sapiens
  misc_RNA (1)...(19): siRNA sense strand
ugacaaggaccacaaauga

SEQ ID NO: 1016827 - RNA, 19 nt, Homo sapiens
  misc_RNA (1)...(19): siRNA sense strand
ccaaagguaauucguauuu

SEQ ID NO: 1016828 - RNA, 19 nt, Homo sapiens
  misc_RNA (1)...(19): siRNA sense strand
gaccacaaaugaagcuauu

SEQ ID NO: 1016829 - RNA, 19 nt, Homo sapiens
  misc_RNA (1)...(19): siRNA sense strand
gagcaccuuuccgauguua

SEQ ID NO: 1016830 - RNA, 19 nt, Homo sapiens
  misc_RNA (1)...(19): siRNA sense strand
ucugguagcuguaacuaaa

SEQ ID NO: 1016831 - RNA, 19 nt, Homo sapiens
  misc_RNA (1)...(19): siRNA sense strand
ccacagagaacaagaacaa

SEQ ID NO: 1016832 - RNA, 19 nt, Homo sapiens
  misc_RNA (1)...(19): siRNA sense strand
caaauuaucugugcuagcu

SEQ ID NO: 1016833 - RNA, 19 nt, Homo sapiens
  misc_RNA (1)...(19): siRNA sense strand
caaaugaagcuauucuguu

SEQ ID NO: 1016834 - RNA, 19 nt, Homo sapiens
  misc_RNA (1)...(19): siRNA sense strand
uaaaucugauggagacuug

SEQ ID NO: 1016835 - RNA, 19 nt, Homo sapiens
  misc_RNA (1)...(19): siRNA sense strand
ccauaacucuuguagaauc

SEQ ID NO: 1016836 - RNA, 19 nt, Homo sapiens
  misc_RNA (1)...(19): siRNA sense strand
ugacugaguuaucaagaga

SEQ ID NO: 1016837 - RNA, 19 nt, Homo sapiens
  misc_RNA (1)...(19): siRNA sense strand
ccacuagcauuucgaguag

SEQ ID NO: 1016838 - RNA, 19 nt, Homo sapiens
  misc_RNA (1)...(19): siRNA sense strand
gaaggauacaagcggaaua

SEQ ID NO: 1016839 - RNA, 19 nt, Homo sapiens
  misc_RNA (1)...(19): siRNA sense strand
ggagcugacugccaaacga

SEQ ID NO: 1016840 - RNA, 19 nt, Homo sapiens
  misc_RNA (1)...(19): siRNA sense strand
ggacuccauuguacaaagu

SEQ ID NO: 1016841 - RNA, 19 nt, Homo sapiens
  misc_RNA (1)...(19): siRNA sense strand
ccgaaugacugaguuauca

SEQ ID NO: 1016842 - RNA, 19 nt, Homo sapiens
  misc_RNA (1)...(19): siRNA sense strand
gcugucagauggcuuaaag

SEQ ID NO: 1016843 - RNA, 19 nt, Homo sapiens
  misc_RNA (1)...(19): siRNA sense strand
gauacaagcggaauaugug

SEQ ID NO: 1016844 - RNA, 19 nt, Homo sapiens
  misc_RNA (1)...(19): siRNA sense strand
gugcucagccguuuaauuc

SEQ ID NO: 1016845 - RNA, 19 nt, Homo sapiens
  misc_RNA (1)...(19): siRNA sense strand
ggauacaagcggaauaugu

SEQ ID NO: 1016846 - RNA, 19 nt, Homo sapiens
  misc_RNA (1)...(19): siRNA sense strand
ggaguuagcccaggugcuu

SEQ ID NO: 1016847 - RNA, 19 nt, Homo sapiens
  misc_RNA (1)...(19): siRNA sense strand
ucucugaaaugugggauaa

SEQ ID NO: 1016848 - RNA, 19 nt, Homo sapiens
  misc_RNA (1)...(19): siRNA sense strand
gaaauuacuccgcaaacgu

SEQ ID NO: 1016849 - RNA, 19 nt, Homo sapiens
  misc_RNA (1)...(19): siRNA sense strand
gagaacaagaacaaucaaa

SEQ ID NO: 1016850 - RNA, 19 nt, Homo sapiens
  misc_RNA (1)...(19): siRNA sense strand
gagagagggcacaaauuau

SEQ ID NO: 1016851 - RNA, 19 nt, Homo sapiens
  misc_RNA (1)...(19): siRNA sense strand
caaagguaauucguauuuc

SEQ ID NO: 1016852 - RNA, 19 nt, Homo sapiens
  misc_RNA (1)...(19): siRNA sense strand
aaccaaagguaauucguau

SEQ ID NO: 1016853 - RNA, 19 nt, Homo sapiens
  misc_RNA (1)...(19): siRNA sense strand
ccgcaaacguucacaaguc

SEQ ID NO: 1016854 - RNA, 19 nt, Homo sapiens
  misc_RNA (1)...(19): siRNA sense strand
gcuauucuguugugugaag

SEQ ID NO: 1016855 - RNA, 19 nt, Homo sapiens
  misc_RNA (1)...(19): siRNA sense strand
aagcuauucuguuguguga

SEQ ID NO: 1016856 - RNA, 19 nt, Homo sapiens
  misc_RNA (1)...(19): siRNA sense strand
gacaaggaccacaaaugaa

SEQ ID NO: 1016857 - RNA, 19 nt, Homo sapiens
  misc_RNA (1)...(19): siRNA sense strand
aaaccaaagguaauucgua

SEQ ID NO: 1016858 - RNA, 19 nt, Homo sapiens
  misc_RNA (1)...(19): siRNA sense strand
gcagaucugguagcuguaa

SEQ ID NO: 1016859 - RNA, 19 nt, Homo sapiens
  misc_RNA (1)...(19): siRNA sense strand
gggcaaagggccuguuuag

SEQ ID NO: 1016860 - RNA, 19 nt, Homo sapiens
  misc_RNA (1)...(19): siRNA sense strand
aaaguguguuagagcauuu

SEQ ID NO: 1016861 - RNA, 19 nt, Homo sapiens
  misc_RNA (1)...(19): siRNA sense strand
aagagcaccuuuccgaugu

SEQ ID NO: 1016862 - RNA, 19 nt, Homo sapiens
  misc_RNA (1)...(19): siRNA sense strand
ugugccagcucgaaggaua

SEQ ID NO: 1016863 - RNA, 19 nt, Homo sapiens
  misc_RNA (1)...(19): siRNA sense strand
gcucagccguuuaauucuc

SEQ ID NO: 1016864 - RNA, 19 nt, Homo sapiens
  misc_RNA (1)...(19): siRNA sense strand
cagauggcuuaaagagaaa

SEQ ID NO: 1016865 - RNA, 19 nt, Homo sapiens
  misc_RNA (1)...(19): siRNA sense strand
cagagaacaagaacaauca

SEQ ID NO: 1016866 - RNA, 19 nt, Homo sapiens
  misc_RNA (1)...(19): siRNA sense strand
gaauaugugagugcacuga

SEQ ID NO: 1016867 - RNA, 19 nt, Homo sapiens
  misc_RNA (1)...(19): siRNA sense strand
ugagugcacugaaauuacu

SEQ ID NO: 1016868 - RNA, 19 nt, Homo sapiens
  misc_RNA (1)...(19): siRNA sense strand
cauaacucuuguagaauca

SEQ ID NO: 1016869 - RNA, 19 nt, Homo sapiens
  misc_RNA (1)...(19): siRNA sense strand
guuuggauguggaaucuca

SEQ ID NO: 1016870 - RNA, 19 nt, Homo sapiens
  misc_RNA (1)...(19): siRNA sense strand
ggaccacacagaaggacuu

SEQ ID NO: 1016871 - RNA, 19 nt, Homo sapiens
  misc_RNA (1)...(19): siRNA sense strand
aaacccgaaugacugaguu

SEQ ID NO: 1016872 - RNA, 19 nt, Homo sapiens
  misc_RNA (1)...(19): siRNA sense strand
caugugcucagccguuuaa

SEQ ID NO: 1016873 - RNA, 19 nt, Homo sapiens
  misc_RNA (1)...(19): siRNA sense strand
gcugcugucagauggcuua

SEQ ID NO: 1016874 - RNA, 19 nt, Homo sapiens
  misc_RNA (1)...(19): siRNA sense strand
gaggggaucucugaaaugu

SEQ ID NO: 1016875 - RNA, 19 nt, Homo sapiens
  misc_RNA (1)...(19): siRNA sense strand
ugugagugcacugaaauua

SEQ ID NO: 1016876 - RNA, 19 nt, Homo sapiens
  misc_RNA (1)...(19): siRNA sense strand
gaucugguagcuguaacua

SEQ ID NO: 1016877 - RNA, 19 nt, Homo sapiens
  misc_RNA (1)...(19): siRNA sense strand
gaaggagcgggauaugaca

SEQ ID NO: 1016878 - RNA, 19 nt, Homo sapiens
  misc_RNA (1)...(19): siRNA sense strand
ggaccacaaaugaagcuau

SEQ ID NO: 1016879 - RNA, 19 nt, Homo sapiens
  misc_RNA (1)...(19): siRNA sense strand
gacccuucuucuuguacua

SEQ ID NO: 1016880 - RNA, 19 nt, Homo sapiens
  misc_RNA (1)...(19): siRNA sense strand
guggacccuucuucuugua

SEQ ID NO: 1016881 - RNA, 19 nt, Homo sapiens
  misc_RNA (1)...(19): siRNA sense strand
gaaaugugggauaaaauga

SEQ ID NO: 1016882 - RNA, 19 nt, Homo sapiens
  misc_RNA (1)...(19): siRNA sense strand
gcagacuucuuguuaaaag

SEQ ID NO: 1016883 - RNA, 19 nt, Homo sapiens
  misc_RNA (1)...(19): siRNA sense strand
agcagcagacuucuuguua

SEQ ID NO: 1016884 - RNA, 19 nt, Homo sapiens
  misc_RNA (1)...(19): siRNA sense strand
aaauuacuccgcaaacguu

SEQ ID NO: 1016885 - RNA, 19 nt, Homo sapiens
  misc_RNA (1)...(19): siRNA sense strand
agagagggcacaaauuauc

SEQ ID NO: 1016886 - RNA, 19 nt, Homo sapiens
  misc_RNA (1)...(19): siRNA sense strand
ucaggaaaguguguuagag

SEQ ID NO: 1016887 - RNA, 19 nt, Homo sapiens
  misc_RNA (1)...(19): siRNA sense strand
ccacuucaucuuucacuca

SEQ ID NO: 1016888 - RNA, 19 nt, Homo sapiens
  misc_RNA (1)...(19): siRNA sense strand
acaaaugaagcuauucugu

SEQ ID NO: 1016889 - RNA, 19 nt, Homo sapiens
  misc_RNA (1)...(19): siRNA sense strand
caggccaucuccuacuaga

SEQ ID NO: 1016890 - RNA, 19 nt, Homo sapiens
  misc_RNA (1)...(19): siRNA sense strand
cuuaaaggaccacacagaa

SEQ ID NO: 1016891 - RNA, 19 nt, Homo sapiens
  misc_RNA (1)...(19): siRNA sense strand
ccacaaaugaagcuauucu

SEQ ID NO: 1016892 - RNA, 19 nt, Homo sapiens
  misc_RNA (1)...(19): siRNA sense strand
acaaggaccacaaaugaag

SEQ ID NO: 1016893 - RNA, 19 nt, Homo sapiens
  misc_RNA (1)...(19): siRNA sense strand
gugacaaggaccacaaaug

SEQ ID NO: 1016894 - RNA, 19 nt, Homo sapiens
  misc_RNA (1)...(19): siRNA sense strand
gaaugacugaguuaucaag

SEQ ID NO: 1016895 - RNA, 19 nt, Homo sapiens
  misc_RNA (1)...(19): siRNA sense strand
gagagggcacaaauuaucu

SEQ ID NO: 1016896 - RNA, 19 nt, Homo sapiens
  misc_RNA (1)...(19): siRNA sense strand
ucaccagcauuuccuaaaa

SEQ ID NO: 1016897 - RNA, 19 nt, Homo sapiens
  misc_RNA (1)...(19): siRNA sense strand
gugaaggagcgggauauga

SEQ ID NO: 1016898 - RNA, 19 nt, Homo sapiens
  misc_RNA (1)...(19): siRNA sense strand
uagcccaggugcuucuuca

SEQ ID NO: 1016899 - RNA, 19 nt, Homo sapiens
  misc_RNA (1)...(19): siRNA sense strand
guuaccacuucaucuuuca

SEQ ID NO: 1016900 - RNA, 19 nt, Homo sapiens
  misc_RNA (1)...(19): siRNA sense strand
auaugugagugcacugaaa

SEQ ID NO: 1016901 - RNA, 19 nt, Homo sapiens
  misc_RNA (1)...(19): siRNA sense strand
gcccaggugcuucuucaga

SEQ ID NO: 1016902 - RNA, 19 nt, Homo sapiens
  misc_RNA (1)...(19): siRNA sense strand
gcuguggacccuucuucuu

SEQ ID NO: 1016903 - RNA, 19 nt, Homo sapiens
  misc_RNA (1)...(19): siRNA sense strand
ggaaaguguguuagagcau

SEQ ID NO: 1016904 - RNA, 19 nt, Homo sapiens
  misc_RNA (1)...(19): siRNA sense strand
ugaaauuacuccgcaaacg

SEQ ID NO: 1016905 - RNA, 19 nt, Homo sapiens
  misc_RNA (1)...(19): siRNA sense strand
gauggcagaucugguagcu

SEQ ID NO: 1016906 - RNA, 19 nt, Homo sapiens
  misc_RNA (1)...(19): siRNA sense strand
acagagaacaagaacaauc

SEQ ID NO: 1016907 - RNA, 19 nt, Homo sapiens
  misc_RNA (1)...(19): siRNA sense strand
ggaaaccaaagguaauucg

SEQ ID NO: 1016908 - RNA, 19 nt, Homo sapiens
  misc_RNA (1)...(19): siRNA sense strand
uagcuguaacuaaaucuga

SEQ ID NO: 1016909 - RNA, 19 nt, Homo sapiens
  misc_RNA (1)...(19): siRNA sense strand
ugaaggagcgggauaugac

SEQ ID NO: 1016910 - RNA, 19 nt, Homo sapiens
  misc_RNA (1)...(19): siRNA sense strand
uguggacccuucuucuugu

SEQ ID NO: 1016911 - RNA, 19 nt, Homo sapiens
  misc_RNA (1)...(19): siRNA sense strand
acuagcagcagacuucuug

SEQ ID NO: 1016912 - RNA, 19 nt, Homo sapiens
  misc_RNA (1)...(19): siRNA sense strand
gaaaccaaagguaauucgu

SEQ ID NO: 1016913 - RNA, 19 nt, Homo sapiens
  misc_RNA (1)...(19): siRNA sense strand
cgcaaacguucacaagucu

SEQ ID NO: 1016914 - RNA, 19 nt, Homo sapiens
  misc_RNA (1)...(19): siRNA sense strand
ggacccuucuucuuguacu

SEQ ID NO: 1016915 - RNA, 19 nt, Homo sapiens
  misc_RNA (1)...(19): siRNA sense strand
cugauaaagagcaaagauu

SEQ ID NO: 1016916 - RNA, 19 nt, Homo sapiens
  misc_RNA (1)...(19): siRNA sense strand
ggagagaguucaggaaauu

SEQ ID NO: 1016917 - RNA, 19 nt, Homo sapiens
  misc_RNA (1)...(19): siRNA sense strand
gagaaucuaugauaccaaa

SEQ ID NO: 1016918 - RNA, 19 nt, Homo sapiens
  misc_RNA (1)...(19): siRNA sense strand
gcucuaagcagaauaaauu

SEQ ID NO: 1016919 - RNA, 19 nt, Homo sapiens
  misc_RNA (1)...(19): siRNA sense strand
ggaaaagucugcaauuaaa

SEQ ID NO: 1016920 - RNA, 19 nt, Homo sapiens
  misc_RNA (1)...(19): siRNA sense strand
gaagaaaguuuagguuaca

SEQ ID NO: 1016921 - RNA, 19 nt, Homo sapiens
  misc_RNA (1)...(19): siRNA sense strand
uaaagucacuggaagaaau

SEQ ID NO: 1016922 - RNA, 19 nt, Homo sapiens
  misc_RNA (1)...(19): siRNA sense strand
gaacacaaagcaaagacua

SEQ ID NO: 1016923 - RNA, 19 nt, Homo sapiens
  misc_RNA (1)...(19): siRNA sense strand
uaauguaucuucagggaaa

SEQ ID NO: 1016924 - RNA, 19 nt, Homo sapiens
  misc_RNA (1)...(19): siRNA sense strand
caaaggagaaggagacaaa

SEQ ID NO: 1016925 - RNA, 19 nt, Homo sapiens
  misc_RNA (1)...(19): siRNA sense strand
cuaauaaggccgauucuaa

SEQ ID NO: 1016926 - RNA, 19 nt, Homo sapiens
  misc_RNA (1)...(19): siRNA sense strand
uaaggccgauucuaaugua

SEQ ID NO: 1016927 - RNA, 19 nt, Homo sapiens
  misc_RNA (1)...(19): siRNA sense strand
gaauauggcacuccuacaa

SEQ ID NO: 1016928 - RNA, 19 nt, Homo sapiens
  misc_RNA (1)...(19): siRNA sense strand
ugaggaagaggaaacauua

SEQ ID NO: 1016929 - RNA, 19 nt, Homo sapiens
  misc_RNA (1)...(19): siRNA sense strand
gaagaaauaauggcuuuga

SEQ ID NO: 1016930 - RNA, 19 nt, Homo sapiens
  misc_RNA (1)...(19): siRNA sense strand
gaacuuacacaaauaccuu

SEQ ID NO: 1016931 - RNA, 19 nt, Homo sapiens
  misc_RNA (1)...(19): siRNA sense strand
cacaagagaaucuaugaua

SEQ ID NO: 1016932 - RNA, 19 nt, Homo sapiens
  misc_RNA (1)...(19): siRNA sense strand
uagaagauauauccaagga

SEQ ID NO: 1016933 - RNA, 19 nt, Homo sapiens
  misc_RNA (1)...(19): siRNA sense strand
ggaaauggaagacacacaa

SEQ ID NO: 1016934 - RNA, 19 nt, Homo sapiens
  misc_RNA (1)...(19): siRNA sense strand
aaagagcguuccucaucua

SEQ ID NO: 1016935 - RNA, 19 nt, Homo sapiens
  misc_RNA (1)...(19): siRNA sense strand
gagcguuccucaucuaaag

SEQ ID NO: 1016936 - RNA, 19 nt, Homo sapiens
  misc_RNA (1)...(19): siRNA sense strand
gaacgucuagugaaggaaa

SEQ ID NO: 1016937 - RNA, 19 nt, Homo sapiens
  misc_RNA (1)...(19): siRNA sense strand
aauaauggcuuugaacuuc

SEQ ID NO: 1016938 - RNA, 19 nt, Homo sapiens
  misc_RNA (1)...(19): siRNA sense strand
gaagaggaaacauuaaagu

SEQ ID NO: 1016939 - RNA, 19 nt, Homo sapiens
  misc_RNA (1)...(19): siRNA sense strand
uggaagaaauaauggcuuu

SEQ ID NO: 1016940 - RNA, 19 nt, Homo sapiens
  misc_RNA (1)...(19): siRNA sense strand
gaaauggaagacacacaaa

SEQ ID NO: 1016941 - RNA, 19 nt, Homo sapiens
  misc_RNA (1)...(19): siRNA sense strand
guuacaaccuagacaguga

SEQ ID NO: 1016942 - RNA, 19 nt, Homo sapiens
  misc_RNA (1)...(19): siRNA sense strand
gagaguccuuccuugagaa

SEQ ID NO: 1016943 - RNA, 19 nt, Homo sapiens
  misc_RNA (1)...(19): siRNA sense strand
gaaauaauggcuuugaacu

SEQ ID NO: 1016944 - RNA, 19 nt, Homo sapiens
  misc_RNA (1)...(19): siRNA sense strand
gcuuagaucucagucauca

SEQ ID NO: 1016945 - RNA, 19 nt, Homo sapiens
  misc_RNA (1)...(19): siRNA sense strand
ugaagaaaguuuagguuac

SEQ ID NO: 1016946 - RNA, 19 nt, Homo sapiens
  misc_RNA (1)...(19): siRNA sense strand
guguugcgcuuagaagaua

SEQ ID NO: 1016947 - RNA, 19 nt, Homo sapiens
  misc_RNA (1)...(19): siRNA sense strand
ccuggaacuuacacaaaua

SEQ ID NO: 1016948 - RNA, 19 nt, Homo sapiens
  misc_RNA (1)...(19): siRNA sense strand
aaauggacaucucucaaga

SEQ ID NO: 1016949 - RNA, 19 nt, Homo sapiens
  misc_RNA (1)...(19): siRNA sense strand
ccaaggaaccgagugauga

SEQ ID NO: 1016950 - RNA, 19 nt, Homo sapiens
  misc_RNA (1)...(19): siRNA sense strand
gaccuuugcgcucagaaua

SEQ ID NO: 1016951 - RNA, 19 nt, Homo sapiens
  misc_RNA (1)...(19): siRNA sense strand
caggaaaagucugcaauua

SEQ ID NO: 1016952 - RNA, 19 nt, Homo sapiens
  misc_RNA (1)...(19): siRNA sense strand
gggcuuagaucucagucau

SEQ ID NO: 1016953 - RNA, 19 nt, Homo sapiens
  misc_RNA (1)...(19): siRNA sense strand
uaaagagcguuccucaucu

SEQ ID NO: 1016954 - RNA, 19 nt, Homo sapiens
  misc_RNA (1)...(19): siRNA sense strand
gaauagugaccaaauccaa

SEQ ID NO: 1016955 - RNA, 19 nt, Homo sapiens
  misc_RNA (1)...(19): siRNA sense strand
aaauugugcucuuccaguu

SEQ ID NO: 1016956 - RNA, 19 nt, Homo sapiens
  misc_RNA (1)...(19): siRNA sense strand
uaauaaggccgauucuaau

SEQ ID NO: 1016957 - RNA, 19 nt, Homo sapiens
  misc_RNA (1)...(19): siRNA sense strand
gcacugaaaagaaaacuaa

SEQ ID NO: 1016958 - RNA, 19 nt, Homo sapiens
  misc_RNA (1)...(19): siRNA sense strand
gaaggagagaguucaggaa

SEQ ID NO: 1016959 - RNA, 19 nt, Homo sapiens
  misc_RNA (1)...(19): siRNA sense strand
ggaagaggaaacauuaaag

SEQ ID NO: 1016960 - RNA, 19 nt, Homo sapiens
  misc_RNA (1)...(19): siRNA sense strand
agagaguccuuccuugaga

SEQ ID NO: 1016961 - RNA, 19 nt, Homo sapiens
  misc_RNA (1)...(19): siRNA sense strand
gaggaagaggaaacauuaa

SEQ ID NO: 1016962 - RNA, 19 nt, Homo sapiens
  misc_RNA (1)...(19): siRNA sense strand
acaaggaacacaaagcaaa

SEQ ID NO: 1016963 - RNA, 19 nt, Homo sapiens
  misc_RNA (1)...(19): siRNA sense strand
aaacauauugcacugaaga

SEQ ID NO: 1016964 - RNA, 19 nt, Homo sapiens
  misc_RNA (1)...(19): siRNA sense strand
gaugaagaaaguuuagguu

SEQ ID NO: 1016965 - RNA, 19 nt, Homo sapiens
  misc_RNA (1)...(19): siRNA sense strand
ggacauguucauccuggaa

SEQ ID NO: 1016966 - RNA, 19 nt, Homo sapiens
  misc_RNA (1)...(19): siRNA sense strand
acaagagaaucuaugauac

SEQ ID NO: 1016967 - RNA, 19 nt, Homo sapiens
  misc_RNA (1)...(19): siRNA sense strand
gcaauucuggccaccauuc

SEQ ID NO: 1016968 - RNA, 19 nt, Homo sapiens
  misc_RNA (1)...(19): siRNA sense strand
ugauagugaugaagaaagu

SEQ ID NO: 1016969 - RNA, 19 nt, Homo sapiens
  misc_RNA (1)...(19): siRNA sense strand
ugcagcaccuucagauaaa

SEQ ID NO: 1016970 - RNA, 19 nt, Homo sapiens
  misc_RNA (1)...(19): siRNA sense strand
cugcagcaccuucagauaa

SEQ ID NO: 1016971 - RNA, 19 nt, Homo sapiens
  misc_RNA (1)...(19): siRNA sense strand
ccaaggagacuaagaugca

SEQ ID NO: 1016972 - RNA, 19 nt, Homo sapiens
  misc_RNA (1)...(19): siRNA sense strand
ugagaagcguccugaugga

SEQ ID NO: 1016973 - RNA, 19 nt, Homo sapiens
  misc_RNA (1)...(19): siRNA sense strand
gaaggaaauggaagacaca

SEQ ID NO: 1016974 - RNA, 19 nt, Homo sapiens
  misc_RNA (1)...(19): siRNA sense strand
caaacacaaggaacacaaa

SEQ ID NO: 1016975 - RNA, 19 nt, Homo sapiens
  misc_RNA (1)...(19): siRNA sense strand
guaccaaggagacuaagau

SEQ ID NO: 1016976 - RNA, 19 nt, Homo sapiens
  misc_RNA (1)...(19): siRNA sense strand
caaggaaccgagugaugaa

SEQ ID NO: 1016977 - RNA, 19 nt, Homo sapiens
  misc_RNA (1)...(19): siRNA sense strand
ggugauguguugcgcuuag

SEQ ID NO: 1016978 - RNA, 19 nt, Homo sapiens
  misc_RNA (1)...(19): siRNA sense strand
agacuaagaugcagaaacc

SEQ ID NO: 1016979 - RNA, 19 nt, Homo sapiens
  misc_RNA (1)...(19): siRNA sense strand
aaagucacuggaagaaaua

SEQ ID NO: 1016980 - RNA, 19 nt, Homo sapiens
  misc_RNA (1)...(19): siRNA sense strand
ccuagacagugaugaggaa

SEQ ID NO: 1016981 - RNA, 19 nt, Homo sapiens
  misc_RNA (1)...(19): siRNA sense strand
auaaagagcguuccucauc

SEQ ID NO: 1016982 - RNA, 19 nt, Homo sapiens
  misc_RNA (1)...(19): siRNA sense strand
ggaaccgagugaugaaacu

SEQ ID NO: 1016983 - RNA, 19 nt, Homo sapiens
  misc_RNA (1)...(19): siRNA sense strand
auggacaucucucaagaaa

SEQ ID NO: 1016984 - RNA, 19 nt, Homo sapiens
  misc_RNA (1)...(19): siRNA sense strand
cacaaagcaaagacuaaua

SEQ ID NO: 1016985 - RNA, 19 nt, Homo sapiens
  misc_RNA (1)...(19): siRNA sense strand
caggaauagugaccaaauc

SEQ ID NO: 1016986 - RNA, 19 nt, Homo sapiens
  misc_RNA (1)...(19): siRNA sense strand
agaggaaacauuaaaguca

SEQ ID NO: 1016987 - RNA, 19 nt, Homo sapiens
  misc_RNA (1)...(19): siRNA sense strand
gcacaagagaaucuaugau

SEQ ID NO: 1016988 - RNA, 19 nt, Homo sapiens
  misc_RNA (1)...(19): siRNA sense strand
cuacagaauccaccaaaca

SEQ ID NO: 1016989 - RNA, 19 nt, Homo sapiens
  misc_RNA (1)...(19): siRNA sense strand
guuccucucuaguaccauu

SEQ ID NO: 1016990 - RNA, 19 nt, Homo sapiens
  misc_RNA (1)...(19): siRNA sense strand
ggagacaaaacuaccuuua

SEQ ID NO: 1016991 - RNA, 19 nt, Homo sapiens
  misc_RNA (1)...(19): siRNA sense strand
ggaccacaucagaaagaaa

SEQ ID NO: 1016992 - RNA, 19 nt, Homo sapiens
  misc_RNA (1)...(19): siRNA sense strand
gaaguugugccauguaucc

SEQ ID NO: 1016993 - RNA, 19 nt, Homo sapiens
  misc_RNA (1)...(19): siRNA sense strand
uggaaguugugccauguau

SEQ ID NO: 1016994 - RNA, 19 nt, Homo sapiens
  misc_RNA (1)...(19): siRNA sense strand
ccaaacacaaggaacacaa

SEQ ID NO: 1016995 - RNA, 19 nt, Homo sapiens
  misc_RNA (1)...(19): siRNA sense strand
gcagguaccaaggagacua

SEQ ID NO: 1016996 - RNA, 19 nt, Homo sapiens
  misc_RNA (1)...(19): siRNA sense strand
gcuuggcaccuucaaauuc

SEQ ID NO: 1016997 - RNA, 19 nt, Homo sapiens
  misc_RNA (1)...(19): siRNA sense strand
cagaauccaccaaacacaa

SEQ ID NO: 1016998 - RNA, 19 nt, Homo sapiens
  misc_RNA (1)...(19): siRNA sense strand
gcugguuccucucuaguac

SEQ ID NO: 1016999 - RNA, 19 nt, Homo sapiens
  misc_RNA (1)...(19): siRNA sense strand
ccaccaaacacaaggaaca

SEQ ID NO: 1017000 - RNA, 19 nt, Homo sapiens
  misc_RNA (1)...(19): siRNA sense strand
ccaggaauagugaccaaau

SEQ ID NO: 1017001 - RNA, 19 nt, Homo sapiens
  misc_RNA (1)...(19): siRNA sense strand
gaaaauggacaucucucaa

SEQ ID NO: 1017002 - RNA, 19 nt, Homo sapiens
  misc_RNA (1)...(19): siRNA sense strand
caaggaacacaaagcaaag

SEQ ID NO: 1017003 - RNA, 19 nt, Homo sapiens
  misc_RNA (1)...(19): siRNA sense strand
gaaaagcacaagagaaucu

SEQ ID NO: 1017004 - RNA, 19 nt, Homo sapiens
  misc_RNA (1)...(19): siRNA sense strand
gaaaccccacuuaccuuua

SEQ ID NO: 1017005 - RNA, 19 nt, Homo sapiens
  misc_RNA (1)...(19): siRNA sense strand
aaagcuagcaaccuucaga

SEQ ID NO: 1017006 - RNA, 19 nt, Homo sapiens
  misc_RNA (1)...(19): siRNA sense strand
aggaagaggaaacauuaaa

SEQ ID NO: 1017007 - RNA, 19 nt, Homo sapiens
  misc_RNA (1)...(19): siRNA sense strand
aaggaacucuguggacuca

SEQ ID NO: 1017008 - RNA, 19 nt, Homo sapiens
  misc_RNA (1)...(19): siRNA sense strand
aaggagagaguucaggaaa

SEQ ID NO: 1017009 - RNA, 19 nt, Homo sapiens
  misc_RNA (1)...(19): siRNA sense strand
ggccgauucuaauguaucu

SEQ ID NO: 1017010 - RNA, 19 nt, Homo sapiens
  misc_RNA (1)...(19): siRNA sense strand
gauaaagagcguuccucau

SEQ ID NO: 1017011 - RNA, 19 nt, Homo sapiens
  misc_RNA (1)...(19): siRNA sense strand
gcuuagaagauauauccaa

SEQ ID NO: 1017012 - RNA, 19 nt, Homo sapiens
  misc_RNA (1)...(19): siRNA sense strand
uuagaucucagucaucaga

SEQ ID NO: 1017013 - RNA, 19 nt, Homo sapiens
  misc_RNA (1)...(19): siRNA sense strand
ccaaggggcuuagaucuca

SEQ ID NO: 1017014 - RNA, 19 nt, Homo sapiens
  misc_RNA (1)...(19): siRNA sense strand
agacuaauaaggccgauuc

SEQ ID NO: 1017015 - RNA, 19 nt, Homo sapiens
  misc_RNA (1)...(19): siRNA sense strand
gcgcuuagaagauauaucc

SEQ ID NO: 1017016 - RNA, 19 nt, Homo sapiens
  misc_RNA (1)...(19): siRNA sense strand
ggagagaguucaggaaauu

SEQ ID NO: 1017017 - RNA, 19 nt, Homo sapiens
  misc_RNA (1)...(19): siRNA sense strand
ggaaaagucugcaauuaaa

SEQ ID NO: 1017018 - RNA, 19 nt, Homo sapiens
  misc_RNA (1)...(19): siRNA sense strand
gaagaaaguuuagguuaca

SEQ ID NO: 1017019 - RNA, 19 nt, Homo sapiens
  misc_RNA (1)...(19): siRNA sense strand
uaaagucacuggaagaaau

SEQ ID NO: 1017020 - RNA, 19 nt, Homo sapiens
  misc_RNA (1)...(19): siRNA sense strand
gaacacaaagcaaagacua

SEQ ID NO: 1017021 - RNA, 19 nt, Homo sapiens
  misc_RNA (1)...(19): siRNA sense strand
uaauguaucuucagggaaa

SEQ ID NO: 1017022 - RNA, 19 nt, Homo sapiens
  misc_RNA (1)...(19): siRNA sense strand
caaaggagaaggagacaaa

SEQ ID NO: 1017023 - RNA, 19 nt, Homo sapiens
  misc_RNA (1)...(19): siRNA sense strand
cuaauaaggccgauucuaa

SEQ ID NO: 1017024 - RNA, 19 nt, Homo sapiens
  misc_RNA (1)...(19): siRNA sense strand
uaaggccgauucuaaugua

SEQ ID NO: 1017025 - RNA, 19 nt, Homo sapiens
  misc_RNA (1)...(19): siRNA sense strand
gaauauggcacuccuacaa

SEQ ID NO: 1017026 - RNA, 19 nt, Homo sapiens
  misc_RNA (1)...(19): siRNA sense strand
ugaggaagaggaaacauua

SEQ ID NO: 1017027 - RNA, 19 nt, Homo sapiens
  misc_RNA (1)...(19): siRNA sense strand
gaagaaauaauggcuuuga

SEQ ID NO: 1017028 - RNA, 19 nt, Homo sapiens
  misc_RNA (1)...(19): siRNA sense strand
gaacuuacacaaauaccuu

SEQ ID NO: 1017029 - RNA, 19 nt, Homo sapiens
  misc_RNA (1)...(19): siRNA sense strand
uagaagauauauccaagga

SEQ ID NO: 1017030 - RNA, 19 nt, Homo sapiens
  misc_RNA (1)...(19): siRNA sense strand
ggaaauggaagacacacaa

SEQ ID NO: 1017031 - RNA, 19 nt, Homo sapiens
  misc_RNA (1)...(19): siRNA sense strand
aaagagcguuccucaucua

SEQ ID NO: 1017032 - RNA, 19 nt, Homo sapiens
  misc_RNA (1)...(19): siRNA sense strand
gagcguuccucaucuaaag

SEQ ID NO: 1017033 - RNA, 19 nt, Homo sapiens
  misc_RNA (1)...(19): siRNA sense strand
gaacgucuagugaaggaaa

SEQ ID NO: 1017034 - RNA, 19 nt, Homo sapiens
  misc_RNA (1)...(19): siRNA sense strand
aauaauggcuuugaacuuc

SEQ ID NO: 1017035 - RNA, 19 nt, Homo sapiens
  misc_RNA (1)...(19): siRNA sense strand
gaagaggaaacauuaaagu

SEQ ID NO: 1017036 - RNA, 19 nt, Homo sapiens
  misc_RNA (1)...(19): siRNA sense strand
uggaagaaauaauggcuuu

SEQ ID NO: 1017037 - RNA, 19 nt, Homo sapiens
  misc_RNA (1)...(19): siRNA sense strand
gaaauggaagacacacaaa

SEQ ID NO: 1017038 - RNA, 19 nt, Homo sapiens
  misc_RNA (1)...(19): siRNA sense strand
guuacaaccuagacaguga

SEQ ID NO: 1017039 - RNA, 19 nt, Homo sapiens
  misc_RNA (1)...(19): siRNA sense strand
gagaguccuuccuugagaa

SEQ ID NO: 1017040 - RNA, 19 nt, Homo sapiens
  misc_RNA (1)...(19): siRNA sense strand
gaaauaauggcuuugaacu

SEQ ID NO: 1017041 - RNA, 19 nt, Homo sapiens
  misc_RNA (1)...(19): siRNA sense strand
gcuuagaucucagucauca

SEQ ID NO: 1017042 - RNA, 19 nt, Homo sapiens
  misc_RNA (1)...(19): siRNA sense strand
ugaagaaaguuuagguuac

SEQ ID NO: 1017043 - RNA, 19 nt, Homo sapiens
  misc_RNA (1)...(19): siRNA sense strand
guguugcgcuuagaagaua

SEQ ID NO: 1017044 - RNA, 19 nt, Homo sapiens
  misc_RNA (1)...(19): siRNA sense strand
ccuggaacuuacacaaaua

SEQ ID NO: 1017045 - RNA, 19 nt, Homo sapiens
  misc_RNA (1)...(19): siRNA sense strand
ccaaggaaccgagugauga

SEQ ID NO: 1017046 - RNA, 19 nt, Homo sapiens
  misc_RNA (1)...(19): siRNA sense strand
gaccuuugcgcucagaaua

SEQ ID NO: 1017047 - RNA, 19 nt, Homo sapiens
  misc_RNA (1)...(19): siRNA sense strand
caggaaaagucugcaauua

SEQ ID NO: 1017048 - RNA, 19 nt, Homo sapiens
  misc_RNA (1)...(19): siRNA sense strand
gggcuuagaucucagucau

SEQ ID NO: 1017049 - RNA, 19 nt, Homo sapiens
  misc_RNA (1)...(19): siRNA sense strand
uaaagagcguuccucaucu

SEQ ID NO: 1017050 - RNA, 19 nt, Homo sapiens
  misc_RNA (1)...(19): siRNA sense strand
gaauagugaccaaauccaa

SEQ ID NO: 1017051 - RNA, 19 nt, Homo sapiens
  misc_RNA (1)...(19): siRNA sense strand
aaauugugcucuuccaguu

SEQ ID NO: 1017052 - RNA, 19 nt, Homo sapiens
  misc_RNA (1)...(19): siRNA sense strand
uaauaaggccgauucuaau

SEQ ID NO: 1017053 - RNA, 19 nt, Homo sapiens
  misc_RNA (1)...(19): siRNA sense strand
gcacugaaaagaaaacuaa

SEQ ID NO: 1017054 - RNA, 19 nt, Homo sapiens
  misc_RNA (1)...(19): siRNA sense strand
gaaggagagaguucaggaa

SEQ ID NO: 1017055 - RNA, 19 nt, Homo sapiens
  misc_RNA (1)...(19): siRNA sense strand
ggaagaggaaacauuaaag

SEQ ID NO: 1017056 - RNA, 19 nt, Homo sapiens
  misc_RNA (1)...(19): siRNA sense strand
aaacauauugcacugaaga

SEQ ID NO: 1017057 - RNA, 19 nt, Homo sapiens
  misc_RNA (1)...(19): siRNA sense strand
gaggaagaggaaacauuaa

SEQ ID NO: 1017058 - RNA, 19 nt, Homo sapiens
  misc_RNA (1)...(19): siRNA sense strand
agagaguccuuccuugaga

SEQ ID NO: 1017059 - RNA, 19 nt, Homo sapiens
  misc_RNA (1)...(19): siRNA sense strand
acaaggaacacaaagcaaa

SEQ ID NO: 1017060 - RNA, 19 nt, Homo sapiens
  misc_RNA (1)...(19): siRNA sense strand
gaugaagaaaguuuagguu

SEQ ID NO: 1017061 - RNA, 19 nt, Homo sapiens
  misc_RNA (1)...(19): siRNA sense strand
ggacauguucauccuggaa

SEQ ID NO: 1017062 - RNA, 19 nt, Homo sapiens
  misc_RNA (1)...(19): siRNA sense strand
gcaauucuggccaccauuc

SEQ ID NO: 1017063 - RNA, 19 nt, Homo sapiens
  misc_RNA (1)...(19): siRNA sense strand
ugauagugaugaagaaagu

SEQ ID NO: 1017064 - RNA, 19 nt, Homo sapiens
  misc_RNA (1)...(19): siRNA sense strand
ugcagcaccuucagauaaa

SEQ ID NO: 1017065 - RNA, 19 nt, Homo sapiens
  misc_RNA (1)...(19): siRNA sense strand
cugcagcaccuucagauaa

SEQ ID NO: 1017066 - RNA, 19 nt, Homo sapiens
  misc_RNA (1)...(19): siRNA sense strand
ccaaggagacuaagaugca

SEQ ID NO: 1017067 - RNA, 19 nt, Homo sapiens
  misc_RNA (1)...(19): siRNA sense strand
guaccaaggagacuaagau

SEQ ID NO: 1017068 - RNA, 19 nt, Homo sapiens
  misc_RNA (1)...(19): siRNA sense strand
gaaggaaauggaagacaca

SEQ ID NO: 1017069 - RNA, 19 nt, Homo sapiens
  misc_RNA (1)...(19): siRNA sense strand
caaggaaccgagugaugaa

SEQ ID NO: 1017070 - RNA, 19 nt, Homo sapiens
  misc_RNA (1)...(19): siRNA sense strand
ugagaagcguccugaugga

SEQ ID NO: 1017071 - RNA, 19 nt, Homo sapiens
  misc_RNA (1)...(19): siRNA sense strand
caaacacaaggaacacaaa

SEQ ID NO: 1017072 - RNA, 19 nt, Homo sapiens
  misc_RNA (1)...(19): siRNA sense strand
ggugauguguugcgcuuag

SEQ ID NO: 1017073 - RNA, 19 nt, Homo sapiens
  misc_RNA (1)...(19): siRNA sense strand
agacuaagaugcagaaacc

SEQ ID NO: 1017074 - RNA, 19 nt, Homo sapiens
  misc_RNA (1)...(19): siRNA sense strand
aaagucacuggaagaaaua

SEQ ID NO: 1017075 - RNA, 19 nt, Homo sapiens
  misc_RNA (1)...(19): siRNA sense strand
ccuagacagugaugaggaa

SEQ ID NO: 1017076 - RNA, 19 nt, Homo sapiens
  misc_RNA (1)...(19): siRNA sense strand
auaaagagcguuccucauc

SEQ ID NO: 1017077 - RNA, 19 nt, Homo sapiens
  misc_RNA (1)...(19): siRNA sense strand
ggaaccgagugaugaaacu

SEQ ID NO: 1017078 - RNA, 19 nt, Homo sapiens
  misc_RNA (1)...(19): siRNA sense strand
cacaaagcaaagacuaaua

SEQ ID NO: 1017079 - RNA, 19 nt, Homo sapiens
  misc_RNA (1)...(19): siRNA sense strand
caggaauagugaccaaauc

SEQ ID NO: 1017080 - RNA, 19 nt, Homo sapiens
  misc_RNA (1)...(19): siRNA sense strand
agaggaaacauuaaaguca

SEQ ID NO: 1017081 - RNA, 19 nt, Homo sapiens
  misc_RNA (1)...(19): siRNA sense strand
cuacagaauccaccaaaca

SEQ ID NO: 1017082 - RNA, 19 nt, Homo sapiens
  misc_RNA (1)...(19): siRNA sense strand
guuccucucuaguaccauu

SEQ ID NO: 1017083 - RNA, 19 nt, Homo sapiens
  misc_RNA (1)...(19): siRNA sense strand
ggagacaaaacuaccuuua

SEQ ID NO: 1017084 - RNA, 19 nt, Homo sapiens
  misc_RNA (1)...(19): siRNA sense strand
gcagguaccaaggagacua

SEQ ID NO: 1017085 - RNA, 19 nt, Homo sapiens
  misc_RNA (1)...(19): siRNA sense strand
ggaccacaucagaaagaaa

SEQ ID NO: 1017086 - RNA, 19 nt, Homo sapiens
  misc_RNA (1)...(19): siRNA sense strand
gcuuggcaccuucaaauuc

SEQ ID NO: 1017087 - RNA, 19 nt, Homo sapiens
  misc_RNA (1)...(19): siRNA sense strand
gaaguugugccauguaucc

SEQ ID NO: 1017088 - RNA, 19 nt, Homo sapiens
  misc_RNA (1)...(19): siRNA sense strand
uggaaguugugccauguau

SEQ ID NO: 1017089 - RNA, 19 nt, Homo sapiens
  misc_RNA (1)...(19): siRNA sense strand
ccaaacacaaggaacacaa

SEQ ID NO: 1017090 - RNA, 19 nt, Homo sapiens
  misc_RNA (1)...(19): siRNA sense strand
cagaauccaccaaacacaa

SEQ ID NO: 1017091 - RNA, 19 nt, Homo sapiens
  misc_RNA (1)...(19): siRNA sense strand
gcugguuccucucuaguac

SEQ ID NO: 1017092 - RNA, 19 nt, Homo sapiens
  misc_RNA (1)...(19): siRNA sense strand
ccaccaaacacaaggaaca

SEQ ID NO: 1017093 - RNA, 19 nt, Homo sapiens
  misc_RNA (1)...(19): siRNA sense strand
gaaaccccacuuaccuuua

SEQ ID NO: 1017094 - RNA, 19 nt, Homo sapiens
  misc_RNA (1)...(19): siRNA sense strand
ccaggaauagugaccaaau

SEQ ID NO: 1017095 - RNA, 19 nt, Homo sapiens
  misc_RNA (1)...(19): siRNA sense strand
caaggaacacaaagcaaag

SEQ ID NO: 1017096 - RNA, 19 nt, Homo sapiens
  misc_RNA (1)...(19): siRNA sense strand
aaagcuagcaaccuucaga

SEQ ID NO: 1017097 - RNA, 19 nt, Homo sapiens
  misc_RNA (1)...(19): siRNA sense strand
aggaagaggaaacauuaaa

SEQ ID NO: 1017098 - RNA, 19 nt, Homo sapiens
  misc_RNA (1)...(19): siRNA sense strand
aaggagagaguucaggaaa

SEQ ID NO: 1017099 - RNA, 19 nt, Homo sapiens
  misc_RNA (1)...(19): siRNA sense strand
ggccgauucuaauguaucu

SEQ ID NO: 1017100 - RNA, 19 nt, Homo sapiens
  misc_RNA (1)...(19): siRNA sense strand
gauaaagagcguuccucau

SEQ ID NO: 1017101 - RNA, 19 nt, Homo sapiens
  misc_RNA (1)...(19): siRNA sense strand
gcuuagaagauauauccaa

SEQ ID NO: 1017102 - RNA, 19 nt, Homo sapiens
  misc_RNA (1)...(19): siRNA sense strand
uuagaucucagucaucaga

SEQ ID NO: 1017103 - RNA, 19 nt, Homo sapiens
  misc_RNA (1)...(19): siRNA sense strand
ccaaggggcuuagaucuca

SEQ ID NO: 1017104 - RNA, 19 nt, Homo sapiens
  misc_RNA (1)...(19): siRNA sense strand
gcgcuuagaagauauaucc

SEQ ID NO: 1017105 - RNA, 19 nt, Homo sapiens
  misc_RNA (1)...(19): siRNA sense strand
agacuaauaaggccgauuc

SEQ ID NO: 1017106 - RNA, 19 nt, Homo sapiens
  misc_RNA (1)...(19): siRNA sense strand
ugaaacugauggcucuucu

SEQ ID NO: 1017107 - RNA, 19 nt, Homo sapiens
  misc_RNA (1)...(19): siRNA sense strand
acacaaggaacacaaagca

SEQ ID NO: 1017108 - RNA, 19 nt, Homo sapiens
  misc_RNA (1)...(19): siRNA sense strand
gacuauacaggacauguuc

SEQ ID NO: 1017109 - RNA, 19 nt, Homo sapiens
  misc_RNA (1)...(19): siRNA sense strand
caaccuagacagugaugag

SEQ ID NO: 1017110 - RNA, 19 nt, Homo sapiens
  misc_RNA (1)...(19): siRNA sense strand
ggggugauuuugauaguga

SEQ ID NO: 1017111 - RNA, 19 nt, Homo sapiens
  misc_RNA (1)...(19): siRNA sense strand
aauauggcacuccuacaaa

SEQ ID NO: 1017112 - RNA, 19 nt, Homo sapiens
  misc_RNA (1)...(19): siRNA sense strand
aauaaggccgauucuaaug

SEQ ID NO: 1017113 - RNA, 19 nt, Homo sapiens
  misc_RNA (1)...(19): siRNA sense strand
acacaaagcaaagacuaau

SEQ ID NO: 1017114 - RNA, 19 nt, Homo sapiens
  misc_RNA (1)...(19): siRNA sense strand
ggaagaaauaauggcuuug

SEQ ID NO: 1017115 - RNA, 19 nt, Homo sapiens
  misc_RNA (1)...(19): siRNA sense strand
uccuggaacuuacacaaau

SEQ ID NO: 1017116 - RNA, 19 nt, Homo sapiens
  misc_RNA (1)...(19): siRNA sense strand
gaacagagagaaagaauua

SEQ ID NO: 1017117 - RNA, 19 nt, Homo sapiens
  misc_RNA (1)...(19): siRNA sense strand
ggaaacagcuggagaagga

SEQ ID NO: 1017118 - RNA, 19 nt, Homo sapiens
  misc_RNA (1)...(19): siRNA sense strand
gaucaaauguggucagaga

SEQ ID NO: 1017119 - RNA, 19 nt, Homo sapiens
  misc_RNA (1)...(19): siRNA sense strand
ggucagagauugcuccaaa

SEQ ID NO: 1017120 - RNA, 19 nt, Homo sapiens
  misc_RNA (1)...(19): siRNA sense strand
ggauaugacuaugauguua

SEQ ID NO: 1017121 - RNA, 19 nt, Homo sapiens
  misc_RNA (1)...(19): siRNA sense strand
gaacauugcuuuggacaag

SEQ ID NO: 1017122 - RNA, 19 nt, Homo sapiens
  misc_RNA (1)...(19): siRNA sense strand
ggaaauggauuggcuaaag

SEQ ID NO: 1017123 - RNA, 19 nt, Homo sapiens
  misc_RNA (1)...(19): siRNA sense strand
gaaauggauuggcuaaagu

SEQ ID NO: 1017124 - RNA, 19 nt, Homo sapiens
  misc_RNA (1)...(19): siRNA sense strand
ggacagcuguggaaagaag

SEQ ID NO: 1017125 - RNA, 19 nt, Homo sapiens
  misc_RNA (1)...(19): siRNA sense strand
ccaaaggguguaugaaaua

SEQ ID NO: 1017126 - RNA, 19 nt, Homo sapiens
  misc_RNA (1)...(19): siRNA sense strand
gaucaagucauuacaguau

SEQ ID NO: 1017127 - RNA, 19 nt, Homo sapiens
  misc_RNA (1)...(19): siRNA sense strand
gagcagcagugaaagugaa

SEQ ID NO: 1017128 - RNA, 19 nt, Homo sapiens
  misc_RNA (1)...(19): siRNA sense strand
cauccuaaguuccacuaua

SEQ ID NO: 1017129 - RNA, 19 nt, Homo sapiens
  misc_RNA (1)...(19): siRNA sense strand
gagaaagaauuaagaagac

SEQ ID NO: 1017130 - RNA, 19 nt, Homo sapiens
  misc_RNA (1)...(19): siRNA sense strand
agacaugauucuuguugua

SEQ ID NO: 1017131 - RNA, 19 nt, Homo sapiens
  misc_RNA (1)...(19): siRNA sense strand
gccaucagaucaagucauu

SEQ ID NO: 1017132 - RNA, 19 nt, Homo sapiens
  misc_RNA (1)...(19): siRNA sense strand
ggaaagaagucgcaaaaca

SEQ ID NO: 1017133 - RNA, 19 nt, Homo sapiens
  misc_RNA (1)...(19): siRNA sense strand
gaagauauccucgguccuu

SEQ ID NO: 1017134 - RNA, 19 nt, Homo sapiens
  misc_RNA (1)...(19): siRNA sense strand
gauacgagcagcagugaaa

SEQ ID NO: 1017135 - RNA, 19 nt, Homo sapiens
  misc_RNA (1)...(19): siRNA sense strand
ugaagaacauugcuuugga

SEQ ID NO: 1017136 - RNA, 19 nt, Homo sapiens
  misc_RNA (1)...(19): siRNA sense strand
gcagaagacagcccauauu

SEQ ID NO: 1017137 - RNA, 19 nt, Homo sapiens
  misc_RNA (1)...(19): siRNA sense strand
gaagaaaugaacagagaga

SEQ ID NO: 1017138 - RNA, 19 nt, Homo sapiens
  misc_RNA (1)...(19): siRNA sense strand
ggacaagaccgaugacagu

SEQ ID NO: 1017139 - RNA, 19 nt, Homo sapiens
  misc_RNA (1)...(19): siRNA sense strand
uaacacaggagacaugauu

SEQ ID NO: 1017140 - RNA, 19 nt, Homo sapiens
  misc_RNA (1)...(19): siRNA sense strand
gagccaacauccucaagau

SEQ ID NO: 1017141 - RNA, 19 nt, Homo sapiens
  misc_RNA (1)...(19): siRNA sense strand
ccucaugccuugccuaugu

SEQ ID NO: 1017142 - RNA, 19 nt, Homo sapiens
  misc_RNA (1)...(19): siRNA sense strand
gaucugggaccgaaauuug

SEQ ID NO: 1017143 - RNA, 19 nt, Homo sapiens
  misc_RNA (1)...(19): siRNA sense strand
caaauguggucagagauug

SEQ ID NO: 1017144 - RNA, 19 nt, Homo sapiens
  misc_RNA (1)...(19): siRNA sense strand
gaccgaaauuugacuguuc

SEQ ID NO: 1017145 - RNA, 19 nt, Homo sapiens
  misc_RNA (1)...(19): siRNA sense strand
caagaccgaugacaguaau

SEQ ID NO: 1017146 - RNA, 19 nt, Homo sapiens
  misc_RNA (1)...(19): siRNA sense strand
gaaaugaacagagagaaag

SEQ ID NO: 1017147 - RNA, 19 nt, Homo sapiens
  misc_RNA (1)...(19): siRNA sense strand
ggcacucucucuuccuaua

SEQ ID NO: 1017148 - RNA, 19 nt, Homo sapiens
  misc_RNA (1)...(19): siRNA sense strand
ccaaggugauugacagaga

SEQ ID NO: 1017149 - RNA, 19 nt, Homo sapiens
  misc_RNA (1)...(19): siRNA sense strand
gcugaagcauggcacuaaa

SEQ ID NO: 1017150 - RNA, 19 nt, Homo sapiens
  misc_RNA (1)...(19): siRNA sense strand
gagcguaggacuuuccaaa

SEQ ID NO: 1017151 - RNA, 19 nt, Homo sapiens
  misc_RNA (1)...(19): siRNA sense strand
gacauccgacaauuuaaua

SEQ ID NO: 1017152 - RNA, 19 nt, Homo sapiens
  misc_RNA (1)...(19): siRNA sense strand
ggaggugacgauucauuaa

SEQ ID NO: 1017153 - RNA, 19 nt, Homo sapiens
  misc_RNA (1)...(19): siRNA sense strand
ggaccgaaauuugacuguu

SEQ ID NO: 1017154 - RNA, 19 nt, Homo sapiens
  misc_RNA (1)...(19): siRNA sense strand
ggagacaugauucuuguug

SEQ ID NO: 1017155 - RNA, 19 nt, Homo sapiens
  misc_RNA (1)...(19): siRNA sense strand
ugacagagaugguuuugaa

SEQ ID NO: 1017156 - RNA, 19 nt, Homo sapiens
  misc_RNA (1)...(19): siRNA sense strand
ggacauccgacaauuuaau

SEQ ID NO: 1017157 - RNA, 19 nt, Homo sapiens
  misc_RNA (1)...(19): siRNA sense strand
ggaagaggaggaagaggaa

SEQ ID NO: 1017158 - RNA, 19 nt, Homo sapiens
  misc_RNA (1)...(19): siRNA sense strand
aggaagaaaugaacagaga

SEQ ID NO: 1017159 - RNA, 19 nt, Homo sapiens
  misc_RNA (1)...(19): siRNA sense strand
cagaagacagcccauauug

SEQ ID NO: 1017160 - RNA, 19 nt, Homo sapiens
  misc_RNA (1)...(19): siRNA sense strand
caaggaaacagcuggagaa

SEQ ID NO: 1017161 - RNA, 19 nt, Homo sapiens
  misc_RNA (1)...(19): siRNA sense strand
gcaaaauuaugugugguua

SEQ ID NO: 1017162 - RNA, 19 nt, Homo sapiens
  misc_RNA (1)...(19): siRNA sense strand
uggauuggcuaaagucuau

SEQ ID NO: 1017163 - RNA, 19 nt, Homo sapiens
  misc_RNA (1)...(19): siRNA sense strand
gguuggaacuggaaaugga

SEQ ID NO: 1017164 - RNA, 19 nt, Homo sapiens
  misc_RNA (1)...(19): siRNA sense strand
caggagacaugauucuugu

SEQ ID NO: 1017165 - RNA, 19 nt, Homo sapiens
  misc_RNA (1)...(19): siRNA sense strand
caaagaaugagccagaaug

SEQ ID NO: 1017166 - RNA, 19 nt, Homo sapiens
  misc_RNA (1)...(19): siRNA sense strand
ugacuuggaagcaauguuu

SEQ ID NO: 1017167 - RNA, 19 nt, Homo sapiens
  misc_RNA (1)...(19): siRNA sense strand
caaaggguguaugaaauag

SEQ ID NO: 1017168 - RNA, 19 nt, Homo sapiens
  misc_RNA (1)...(19): siRNA sense strand
ugggacauccgacaauuua

SEQ ID NO: 1017169 - RNA, 19 nt, Homo sapiens
  misc_RNA (1)...(19): siRNA sense strand
guuaauuggcccuccuuua

SEQ ID NO: 1017170 - RNA, 19 nt, Homo sapiens
  misc_RNA (1)...(19): siRNA sense strand
gaaugagccagaauggaaa

SEQ ID NO: 1017171 - RNA, 19 nt, Homo sapiens
  misc_RNA (1)...(19): siRNA sense strand
agaaugagccagaauggaa

SEQ ID NO: 1017172 - RNA, 19 nt, Homo sapiens
  misc_RNA (1)...(19): siRNA sense strand
caaguugaaucugaugaug

SEQ ID NO: 1017173 - RNA, 19 nt, Homo sapiens
  misc_RNA (1)...(19): siRNA sense strand
gaagucgcauaaaccugaa

SEQ ID NO: 1017174 - RNA, 19 nt, Homo sapiens
  misc_RNA (1)...(19): siRNA sense strand
cauagucacugguacaucu

SEQ ID NO: 1017175 - RNA, 19 nt, Homo sapiens
  misc_RNA (1)...(19): siRNA sense strand
gacaggaggauaugacuau

SEQ ID NO: 1017176 - RNA, 19 nt, Homo sapiens
  misc_RNA (1)...(19): siRNA sense strand
gaggugacgauucauuaaa

SEQ ID NO: 1017177 - RNA, 19 nt, Homo sapiens
  misc_RNA (1)...(19): siRNA sense strand
aaggacagcuguggaaaga

SEQ ID NO: 1017178 - RNA, 19 nt, Homo sapiens
  misc_RNA (1)...(19): siRNA sense strand
ugaaauagacaucacagau

SEQ ID NO: 1017179 - RNA, 19 nt, Homo sapiens
  misc_RNA (1)...(19): siRNA sense strand
gaggauaugacuaugaugu

SEQ ID NO: 1017180 - RNA, 19 nt, Homo sapiens
  misc_RNA (1)...(19): siRNA sense strand
gaauggaugcuucuuuuaa

SEQ ID NO: 1017181 - RNA, 19 nt, Homo sapiens
  misc_RNA (1)...(19): siRNA sense strand
gauuggcuaaagucuauua

SEQ ID NO: 1017182 - RNA, 19 nt, Homo sapiens
  misc_RNA (1)...(19): siRNA sense strand
cccacuacgugcacauaua

SEQ ID NO: 1017183 - RNA, 19 nt, Homo sapiens
  misc_RNA (1)...(19): siRNA sense strand
aaaggagaccaguauauug

SEQ ID NO: 1017184 - RNA, 19 nt, Homo sapiens
  misc_RNA (1)...(19): siRNA sense strand
gagacaugauucuuguugu

SEQ ID NO: 1017185 - RNA, 19 nt, Homo sapiens
  misc_RNA (1)...(19): siRNA sense strand
auccuaaguuccacuauaa

SEQ ID NO: 1017186 - RNA, 19 nt, Homo sapiens
  misc_RNA (1)...(19): siRNA sense strand
ugaaucugaugaugaggaa

SEQ ID NO: 1017187 - RNA, 19 nt, Homo sapiens
  misc_RNA (1)...(19): siRNA sense strand
acugguacaucuauucaaa

SEQ ID NO: 1017188 - RNA, 19 nt, Homo sapiens
  misc_RNA (1)...(19): siRNA sense strand
ucaaauguggucagagauu

SEQ ID NO: 1017189 - RNA, 19 nt, Homo sapiens
  misc_RNA (1)...(19): siRNA sense strand
gcaaagaaugagccagaau

SEQ ID NO: 1017190 - RNA, 19 nt, Homo sapiens
  misc_RNA (1)...(19): siRNA sense strand
gccaacauccucaagauca

SEQ ID NO: 1017191 - RNA, 19 nt, Homo sapiens
  misc_RNA (1)...(19): siRNA sense strand
ucaagucauuacaguauag

SEQ ID NO: 1017192 - RNA, 19 nt, Homo sapiens
  misc_RNA (1)...(19): siRNA sense strand
cagaucaagucauuacagu

SEQ ID NO: 1017193 - RNA, 19 nt, Homo sapiens
  misc_RNA (1)...(19): siRNA sense strand
gauguuaaguuuugggauu

SEQ ID NO: 1017194 - RNA, 19 nt, Homo sapiens
  misc_RNA (1)...(19): siRNA sense strand
agaagaagcagaggaagaa

SEQ ID NO: 1017195 - RNA, 19 nt, Homo sapiens
  misc_RNA (1)...(19): siRNA sense strand
ccaacauccucaagaucaa

SEQ ID NO: 1017196 - RNA, 19 nt, Homo sapiens
  misc_RNA (1)...(19): siRNA sense strand
uggcuaaagucuauuacga

SEQ ID NO: 1017197 - RNA, 19 nt, Homo sapiens
  misc_RNA (1)...(19): siRNA sense strand
ggaaaauccuguucacaag

SEQ ID NO: 1017198 - RNA, 19 nt, Homo sapiens
  misc_RNA (1)...(19): siRNA sense strand
caaggugauugacagagau

SEQ ID NO: 1017199 - RNA, 19 nt, Homo sapiens
  misc_RNA (1)...(19): siRNA sense strand
gacaagaccgaugacagua

SEQ ID NO: 1017200 - RNA, 19 nt, Homo sapiens
  misc_RNA (1)...(19): siRNA sense strand
uccaaaggguguaugaaau

SEQ ID NO: 1017201 - RNA, 19 nt, Homo sapiens
  misc_RNA (1)...(19): siRNA sense strand
gcucaaaugaugcgacugu

SEQ ID NO: 1017202 - RNA, 19 nt, Homo sapiens
  misc_RNA (1)...(19): siRNA sense strand
agggagaauuuaugacuug

SEQ ID NO: 1017203 - RNA, 19 nt, Homo sapiens
  misc_RNA (1)...(19): siRNA sense strand
gaaggacagcuguggaaag

SEQ ID NO: 1017204 - RNA, 19 nt, Homo sapiens
  misc_RNA (1)...(19): siRNA sense strand
cagaauggaagcauacaga

SEQ ID NO: 1017205 - RNA, 19 nt, Homo sapiens
  misc_RNA (1)...(19): siRNA sense strand
gugaggacgugggaaguug

SEQ ID NO: 1017206 - RNA, 19 nt, Homo sapiens
  misc_RNA (1)...(19): siRNA sense strand
gaauuuaugacuugcucaa

SEQ ID NO: 1017207 - RNA, 19 nt, Homo sapiens
  misc_RNA (1)...(19): siRNA sense strand
ugaagaagaagaagaagca

SEQ ID NO: 1017208 - RNA, 19 nt, Homo sapiens
  misc_RNA (1)...(19): siRNA sense strand
agaaaugaacagagagaaa

SEQ ID NO: 1017209 - RNA, 19 nt, Homo sapiens
  misc_RNA (1)...(19): siRNA sense strand
cagcauauuccaagacuca

SEQ ID NO: 1017210 - RNA, 19 nt, Homo sapiens
  misc_RNA (1)...(19): siRNA sense strand
ggagaaggacagacuggau

SEQ ID NO: 1017211 - RNA, 19 nt, Homo sapiens
  misc_RNA (1)...(19): siRNA sense strand
ugguacaucuauucaaaga

SEQ ID NO: 1017212 - RNA, 19 nt, Homo sapiens
  misc_RNA (1)...(19): siRNA sense strand
gaauggaagcauacagauc

SEQ ID NO: 1017213 - RNA, 19 nt, Homo sapiens
  misc_RNA (1)...(19): siRNA sense strand
gaagauauugagccaacau

SEQ ID NO: 1017214 - RNA, 19 nt, Homo sapiens
  misc_RNA (1)...(19): siRNA sense strand
ggaagaagaagaggaagag

SEQ ID NO: 1017215 - RNA, 19 nt, Homo sapiens
  misc_RNA (1)...(19): siRNA sense strand
agaagaagaagcagaggaa

SEQ ID NO: 1017216 - RNA, 19 nt, Homo sapiens
  misc_RNA (1)...(19): siRNA sense strand
uagaagagguggagaagua

SEQ ID NO: 1017217 - RNA, 19 nt, Homo sapiens
  misc_RNA (1)...(19): siRNA sense strand
ccaaucagcugcucuacua

SEQ ID NO: 1017218 - RNA, 19 nt, Homo sapiens
  misc_RNA (1)...(19): siRNA sense strand
ggacagaauccuuaaauga

SEQ ID NO: 1017219 - RNA, 19 nt, Homo sapiens
  misc_RNA (1)...(19): siRNA sense strand
caauagaguucaagcaauu

SEQ ID NO: 1017220 - RNA, 19 nt, Homo sapiens
  misc_RNA (1)...(19): siRNA sense strand
gaaaagaccuauuaugaga

SEQ ID NO: 1017221 - RNA, 19 nt, Homo sapiens
  misc_RNA (1)...(19): siRNA sense strand
aaagguaucuucacuggaa

SEQ ID NO: 1017222 - RNA, 19 nt, Homo sapiens
  misc_RNA (1)...(19): siRNA sense strand
cagcagaggugguagaaga

SEQ ID NO: 1017223 - RNA, 19 nt, Homo sapiens
  misc_RNA (1)...(19): siRNA sense strand
gcuaauggaugcagcagaa

SEQ ID NO: 1017224 - RNA, 19 nt, Homo sapiens
  misc_RNA (1)...(19): siRNA sense strand
cauuaaagaugccuucauu

SEQ ID NO: 1017225 - RNA, 19 nt, Homo sapiens
  misc_RNA (1)...(19): siRNA sense strand
ucaagaaaguuccuauuca

SEQ ID NO: 1017226 - RNA, 19 nt, Homo sapiens
  misc_RNA (1)...(19): siRNA sense strand
aaaggaggcuuaucugaug

SEQ ID NO: 1017227 - RNA, 19 nt, Homo sapiens
  misc_RNA (1)...(19): siRNA sense strand
gaaaguuccuauucagaca

SEQ ID NO: 1017228 - RNA, 19 nt, Homo sapiens
  misc_RNA (1)...(19): siRNA sense strand
agauagagcuguuggaaau

SEQ ID NO: 1017229 - RNA, 19 nt, Homo sapiens
  misc_RNA (1)...(19): siRNA sense strand
gaaaccauaucauucuaca

SEQ ID NO: 1017230 - RNA, 19 nt, Homo sapiens
  misc_RNA (1)...(19): siRNA sense strand
gcaggaagcauccauagga

SEQ ID NO: 1017231 - RNA, 19 nt, Homo sapiens
  misc_RNA (1)...(19): siRNA sense strand
uguacaaccucccaguuua

SEQ ID NO: 1017232 - RNA, 19 nt, Homo sapiens
  misc_RNA (1)...(19): siRNA sense strand
cgagggaaaugguguguug

SEQ ID NO: 1017233 - RNA, 19 nt, Homo sapiens
  misc_RNA (1)...(19): siRNA sense strand
agaaucagccugucaguuu

SEQ ID NO: 1017234 - RNA, 19 nt, Homo sapiens
  misc_RNA (1)...(19): siRNA sense strand
gaucugcuguuguguguag

SEQ ID NO: 1017235 - RNA, 19 nt, Homo sapiens
  misc_RNA (1)...(19): siRNA sense strand
gaacuugacacaggagaaa

SEQ ID NO: 1017236 - RNA, 19 nt, Homo sapiens
  misc_RNA (1)...(19): siRNA sense strand
ggaaaugguguguuguauu

SEQ ID NO: 1017237 - RNA, 19 nt, Homo sapiens
  misc_RNA (1)...(19): siRNA sense strand
caagaaaguuccuauucag

SEQ ID NO: 1017238 - RNA, 19 nt, Homo sapiens
  misc_RNA (1)...(19): siRNA sense strand
gaagccauccuuaauguuc

SEQ ID NO: 1017239 - RNA, 19 nt, Homo sapiens
  misc_RNA (1)...(19): siRNA sense strand
gugaagccauccuuaaugu

SEQ ID NO: 1017240 - RNA, 19 nt, Homo sapiens
  misc_RNA (1)...(19): siRNA sense strand
guggagauguugaaggaaa

SEQ ID NO: 1017241 - RNA, 19 nt, Homo sapiens
  misc_RNA (1)...(19): siRNA sense strand
guacaaccucccaguuuaa

SEQ ID NO: 1017242 - RNA, 19 nt, Homo sapiens
  misc_RNA (1)...(19): siRNA sense strand
gaagagguggagaaguaua

SEQ ID NO: 1017243 - RNA, 19 nt, Homo sapiens
  misc_RNA (1)...(19): siRNA sense strand
gaaauuauaagagccauca

SEQ ID NO: 1017244 - RNA, 19 nt, Homo sapiens
  misc_RNA (1)...(19): siRNA sense strand
guauaagacuggcaucaag

SEQ ID NO: 1017245 - RNA, 19 nt, Homo sapiens
  misc_RNA (1)...(19): siRNA sense strand
ugaaaacccuuacagaaaa

SEQ ID NO: 1017246 - RNA, 19 nt, Homo sapiens
  misc_RNA (1)...(19): siRNA sense strand
ccaaggaugugucuucucu

SEQ ID NO: 1017247 - RNA, 19 nt, Homo sapiens
  misc_RNA (1)...(19): siRNA sense strand
ggaugcagcagaacuggua

SEQ ID NO: 1017248 - RNA, 19 nt, Homo sapiens
  misc_RNA (1)...(19): siRNA sense strand
ggaugugaauuagcugaaa

SEQ ID NO: 1017249 - RNA, 19 nt, Homo sapiens
  misc_RNA (1)...(19): siRNA sense strand
guugauaucuugcucacau

SEQ ID NO: 1017250 - RNA, 19 nt, Homo sapiens
  misc_RNA (1)...(19): siRNA sense strand
gggacagaauccuuaaaug

SEQ ID NO: 1017251 - RNA, 19 nt, Homo sapiens
  misc_RNA (1)...(19): siRNA sense strand
cauaugugcuuggugcuaa

SEQ ID NO: 1017252 - RNA, 19 nt, Homo sapiens
  misc_RNA (1)...(19): siRNA sense strand
ccaggaugcugauggaugu

SEQ ID NO: 1017253 - RNA, 19 nt, Homo sapiens
  misc_RNA (1)...(19): siRNA sense strand
gcagauagagcuguuggaa

SEQ ID NO: 1017254 - RNA, 19 nt, Homo sapiens
  misc_RNA (1)...(19): siRNA sense strand
ggucauuccugucccaauc

SEQ ID NO: 1017255 - RNA, 19 nt, Homo sapiens
  misc_RNA (1)...(19): siRNA sense strand
gggaaaugguguguuguau

SEQ ID NO: 1017256 - RNA, 19 nt, Homo sapiens
  misc_RNA (1)...(19): siRNA sense strand
caaaggaggcuuaucugau

SEQ ID NO: 1017257 - RNA, 19 nt, Homo sapiens
  misc_RNA (1)...(19): siRNA sense strand
uagcaaaucuucuccucau

SEQ ID NO: 1017258 - RNA, 19 nt, Homo sapiens
  misc_RNA (1)...(19): siRNA sense strand
guuuauagcucuggcaaau

SEQ ID NO: 1017259 - RNA, 19 nt, Homo sapiens
  misc_RNA (1)...(19): siRNA sense strand
uaaggguguugauaucuug

SEQ ID NO: 1017260 - RNA, 19 nt, Homo sapiens
  misc_RNA (1)...(19): siRNA sense strand
ucaauagaguucaagcaau

SEQ ID NO: 1017261 - RNA, 19 nt, Homo sapiens
  misc_RNA (1)...(19): siRNA sense strand
uuauagcucuggcaaaugu

SEQ ID NO: 1017262 - RNA, 19 nt, Homo sapiens
  misc_RNA (1)...(19): siRNA sense strand
cagcaugccacccgguuua

SEQ ID NO: 1017263 - RNA, 19 nt, Homo sapiens
  misc_RNA (1)...(19): siRNA sense strand
gcugauggaugugaauuag

SEQ ID NO: 1017264 - RNA, 19 nt, Homo sapiens
  misc_RNA (1)...(19): siRNA sense strand
caggaagcauccauaggaa

SEQ ID NO: 1017265 - RNA, 19 nt, Homo sapiens
  misc_RNA (1)...(19): siRNA sense strand
aaacuuugaucugcuguug

SEQ ID NO: 1017266 - RNA, 19 nt, Homo sapiens
  misc_RNA (1)...(19): siRNA sense strand
cagcagaacugguaaaaca

SEQ ID NO: 1017267 - RNA, 19 nt, Homo sapiens
  misc_RNA (1)...(19): siRNA sense strand
ccagugaagccauccuuaa

SEQ ID NO: 1017268 - RNA, 19 nt, Homo sapiens
  misc_RNA (1)...(19): siRNA sense strand
ccucuuggcuuguggagau

SEQ ID NO: 1017269 - RNA, 19 nt, Homo sapiens
  misc_RNA (1)...(19): siRNA sense strand
acucugagacgguucuuua

SEQ ID NO: 1017270 - RNA, 19 nt, Homo sapiens
  misc_RNA (1)...(19): siRNA sense strand
ccaaaggaggcuuaucuga

SEQ ID NO: 1017271 - RNA, 19 nt, Homo sapiens
  misc_RNA (1)...(19): siRNA sense strand
aaggaugugucuucucuga

SEQ ID NO: 1017272 - RNA, 19 nt, Homo sapiens
  misc_RNA (1)...(19): siRNA sense strand
ccauaucauucuacaggaa

SEQ ID NO: 1017273 - RNA, 19 nt, Homo sapiens
  misc_RNA (1)...(19): siRNA sense strand
gcuguuguguguaggaaau

SEQ ID NO: 1017274 - RNA, 19 nt, Homo sapiens
  misc_RNA (1)...(19): siRNA sense strand
ggaagcauccauaggaaag

SEQ ID NO: 1017275 - RNA, 19 nt, Homo sapiens
  misc_RNA (1)...(19): siRNA sense strand
cuacugaugacauuaaaga

SEQ ID NO: 1017276 - RNA, 19 nt, Homo sapiens
  misc_RNA (1)...(19): siRNA sense strand
agacuggcaucaagaaagu

SEQ ID NO: 1017277 - RNA, 19 nt, Homo sapiens
  misc_RNA (1)...(19): siRNA sense strand
guauaaggccacucugaga

SEQ ID NO: 1017278 - RNA, 19 nt, Homo sapiens
  misc_RNA (1)...(19): siRNA sense strand
guaccagguuauaguuuua

SEQ ID NO: 1017279 - RNA, 19 nt, Homo sapiens
  misc_RNA (1)...(19): siRNA sense strand
gacagaauccuuaaaugag

SEQ ID NO: 1017280 - RNA, 19 nt, Homo sapiens
  misc_RNA (1)...(19): siRNA sense strand
ucaagcaauucagaagaaa

SEQ ID NO: 1017281 - RNA, 19 nt, Homo sapiens
  misc_RNA (1)...(19): siRNA sense strand
gaaugaugcuguguacaac

SEQ ID NO: 1017282 - RNA, 19 nt, Homo sapiens
  misc_RNA (1)...(19): siRNA sense strand
gcacaggagcagcagauag

SEQ ID NO: 1017283 - RNA, 19 nt, Homo sapiens
  misc_RNA (1)...(19): siRNA sense strand
aaugguguguuguauuuga

SEQ ID NO: 1017284 - RNA, 19 nt, Homo sapiens
  misc_RNA (1)...(19): siRNA sense strand
gaaucagccugucaguuuu

SEQ ID NO: 1017285 - RNA, 19 nt, Homo sapiens
  misc_RNA (1)...(19): siRNA sense strand
ucgaaaccauaucauucua

SEQ ID NO: 1017286 - RNA, 19 nt, Homo sapiens
  misc_RNA (1)...(19): siRNA sense strand
gccacgggcuugaaaccaa

SEQ ID NO: 1017287 - RNA, 19 nt, Homo sapiens
  misc_RNA (1)...(19): siRNA sense strand
uaauaaccaggaaacagua

SEQ ID NO: 1017288 - RNA, 19 nt, Homo sapiens
  misc_RNA (1)...(19): siRNA sense strand
uaucgaaaccauaucauuc

SEQ ID NO: 1017289 - RNA, 19 nt, Homo sapiens
  misc_RNA (1)...(19): siRNA sense strand
agaaugaugcuguguacaa

SEQ ID NO: 1017290 - RNA, 19 nt, Homo sapiens
  misc_RNA (1)...(19): siRNA sense strand
ugagaaugaugcuguguac

SEQ ID NO: 1017291 - RNA, 19 nt, Homo sapiens
  misc_RNA (1)...(19): siRNA sense strand
guugaaggaaaguuugaua

SEQ ID NO: 1017292 - RNA, 19 nt, Homo sapiens
  misc_RNA (1)...(19): siRNA sense strand
cuacuacugaugacauuaa

SEQ ID NO: 1017293 - RNA, 19 nt, Homo sapiens
  misc_RNA (1)...(19): siRNA sense strand
gaaaacccuuacagaaaau

SEQ ID NO: 1017294 - RNA, 19 nt, Homo sapiens
  misc_RNA (1)...(19): siRNA sense strand
cacccaagaugcugaaugg

SEQ ID NO: 1017295 - RNA, 19 nt, Homo sapiens
  misc_RNA (1)...(19): siRNA sense strand
uuaaggguguugauaucuu

SEQ ID NO: 1017296 - RNA, 19 nt, Homo sapiens
  misc_RNA (1)...(19): siRNA sense strand
guuuaaggguguugauauc

SEQ ID NO: 1017297 - RNA, 19 nt, Homo sapiens
  misc_RNA (1)...(19): siRNA sense strand
cugaaugggaggaguauaa

SEQ ID NO: 1017298 - RNA, 19 nt, Homo sapiens
  misc_RNA (1)...(19): siRNA sense strand
gaauuuuccuuugcaguuu

SEQ ID NO: 1017299 - RNA, 19 nt, Homo sapiens
  misc_RNA (1)...(19): siRNA sense strand
guguacaaccucccaguuu

SEQ ID NO: 1017300 - RNA, 19 nt, Homo sapiens
  misc_RNA (1)...(19): siRNA sense strand
ggaaggaagcguucaucca

SEQ ID NO: 1017301 - RNA, 19 nt, Homo sapiens
  misc_RNA (1)...(19): siRNA sense strand
cggcacacauugcuaccuu

SEQ ID NO: 1017302 - RNA, 19 nt, Homo sapiens
  misc_RNA (1)...(19): siRNA sense strand
uccuuaauguuccugauaa

SEQ ID NO: 1017303 - RNA, 19 nt, Homo sapiens
  misc_RNA (1)...(19): siRNA sense strand
aaaccaagauaccauuuug

SEQ ID NO: 1017304 - RNA, 19 nt, Homo sapiens
  misc_RNA (1)...(19): siRNA sense strand
uaauguuccugauaagucu

SEQ ID NO: 1017305 - RNA, 19 nt, Homo sapiens
  misc_RNA (1)...(19): siRNA sense strand
cacaggagcagcagauaga

SEQ ID NO: 1017306 - RNA, 19 nt, Homo sapiens
  misc_RNA (1)...(19): siRNA sense strand
uuaaagaugccuucauuac

SEQ ID NO: 1017307 - RNA, 19 nt, Homo sapiens
  misc_RNA (1)...(19): siRNA sense strand
ucaguauuguucccaugaa

SEQ ID NO: 1017308 - RNA, 19 nt, Homo sapiens
  misc_RNA (1)...(19): siRNA sense strand
guaccucagugggacagaa

SEQ ID NO: 1017309 - RNA, 19 nt, Homo sapiens
  misc_RNA (1)...(19): siRNA sense strand
gaaugggaggaguauaaga

SEQ ID NO: 1017310 - RNA, 19 nt, Homo sapiens
  misc_RNA (1)...(19): siRNA sense strand
guccucauccugccuauug

SEQ ID NO: 1017311 - RNA, 19 nt, Homo sapiens
  misc_RNA (1)...(19): siRNA sense strand
caaaucuucuccucaucca

SEQ ID NO: 1017312 - RNA, 19 nt, Homo sapiens
  misc_RNA (1)...(19): siRNA sense strand
caucaagaaaguuccuauu

SEQ ID NO: 1017313 - RNA, 19 nt, Homo sapiens
  misc_RNA (1)...(19): siRNA sense strand
gcaugccacccgguuuaua

SEQ ID NO: 1017314 - RNA, 19 nt, Homo sapiens
  misc_RNA (1)...(19): siRNA sense strand
gagaggcuuccauaucgaa

SEQ ID NO: 1017315 - RNA, 19 nt, Homo sapiens
  misc_RNA (1)...(19): siRNA sense strand
gagccaguaccagguuaua

SEQ ID NO: 1017316 - RNA, 19 nt, Homo sapiens
  misc_RNA (1)...(19): siRNA sense strand
uggaagagcugacauaugg

SEQ ID NO: 1017317 - RNA, 19 nt, Homo sapiens
  misc_RNA (1)...(19): siRNA sense strand
gaagcgacaugguccacuu

SEQ ID NO: 1017318 - RNA, 19 nt, Homo sapiens
  misc_RNA (1)...(19): siRNA sense strand
gcgcauggaccaaguauug

SEQ ID NO: 1017319 - RNA, 19 nt, Homo sapiens
  misc_RNA (1)...(19): siRNA sense strand
ccgaguaccuugaggaugu

SEQ ID NO: 1017320 - RNA, 19 nt, Homo sapiens
  misc_RNA (1)...(19): siRNA sense strand
gcacaacgggacacaguau

SEQ ID NO: 1017321 - RNA, 19 nt, Homo sapiens
  misc_RNA (1)...(19): siRNA sense strand
ccacugcuuugauguccua

SEQ ID NO: 1017322 - RNA, 19 nt, Homo sapiens
  misc_RNA (1)...(19): siRNA sense strand
gcucagacacucagagaga

SEQ ID NO: 1017323 - RNA, 19 nt, Homo sapiens
  misc_RNA (1)...(19): siRNA sense strand
agagacugauccacacaua

SEQ ID NO: 1017324 - RNA, 19 nt, Homo sapiens
  misc_RNA (1)...(19): siRNA sense strand
acaaggaccuggugcucuu

SEQ ID NO: 1017325 - RNA, 19 nt, Homo sapiens
  misc_RNA (1)...(19): siRNA sense strand
uauggucgcugcucaaugg

SEQ ID NO: 1017326 - RNA, 19 nt, Homo sapiens
  misc_RNA (1)...(19): siRNA sense strand
gaaccuggagcggguguuu

SEQ ID NO: 1017327 - RNA, 19 nt, Homo sapiens
  misc_RNA (1)...(19): siRNA sense strand
gggaacuucuacagugcua

SEQ ID NO: 1017328 - RNA, 19 nt, Homo sapiens
  misc_RNA (1)...(19): siRNA sense strand
ucagagggcuguguacaag

SEQ ID NO: 1017329 - RNA, 19 nt, Homo sapiens
  misc_RNA (1)...(19): siRNA sense strand
ggacugggcagagaugaau

SEQ ID NO: 1017330 - RNA, 19 nt, Homo sapiens
  misc_RNA (1)...(19): siRNA sense strand
gaaagacucacugcucaca

SEQ ID NO: 1017331 - RNA, 19 nt, Homo sapiens
  misc_RNA (1)...(19): siRNA sense strand
gaccaaguauugccagacu

SEQ ID NO: 1017332 - RNA, 19 nt, Homo sapiens
  misc_RNA (1)...(19): siRNA sense strand
ggauguggcccuggaguga

SEQ ID NO: 1017333 - RNA, 19 nt, Homo sapiens
  misc_RNA (1)...(19): siRNA sense strand
gcccuggagugaacuuugu

SEQ ID NO: 1017334 - RNA, 19 nt, Homo sapiens
  misc_RNA (1)...(19): siRNA sense strand
uugaggauguucuggaaga

SEQ ID NO: 1017335 - RNA, 19 nt, Homo sapiens
  misc_RNA (1)...(19): siRNA sense strand
uguccuagaccuccacuuu

SEQ ID NO: 1017336 - RNA, 19 nt, Homo sapiens
  misc_RNA (1)...(19): siRNA sense strand
agagggcuguguacaagga

SEQ ID NO: 1017337 - RNA, 19 nt, Homo sapiens
  misc_RNA (1)...(19): siRNA sense strand
ccuugaggauguucuggaa

SEQ ID NO: 1017338 - RNA, 19 nt, Homo sapiens
  misc_RNA (1)...(19): siRNA sense strand
gauccacacauacaaacug

SEQ ID NO: 1017339 - RNA, 19 nt, Homo sapiens
  misc_RNA (1)...(19): siRNA sense strand
ucacuuccggcaugcagua

SEQ ID NO: 1017340 - RNA, 19 nt, Homo sapiens
  misc_RNA (1)...(19): siRNA sense strand
uccuagaccuccacuuuca

SEQ ID NO: 1017341 - RNA, 19 nt, Homo sapiens
  misc_RNA (1)...(19): siRNA sense strand
agacugauccacacauaca

SEQ ID NO: 1017342 - RNA, 19 nt, Homo sapiens
  misc_RNA (1)...(19): siRNA sense strand
gggaugccacgcuauguuc

SEQ ID NO: 1017343 - RNA, 19 nt, Homo sapiens
  misc_RNA (1)...(19): siRNA sense strand
gauauggucgcugcucaau

SEQ ID NO: 1017344 - RNA, 19 nt, Homo sapiens
  misc_RNA (1)...(19): siRNA sense strand
acaaguucguggucaucuu

SEQ ID NO: 1017345 - RNA, 19 nt, Homo sapiens
  misc_RNA (1)...(19): siRNA sense strand
uccaaucccuggcccuaau

SEQ ID NO: 1017346 - RNA, 19 nt, Homo sapiens
  misc_RNA (1)...(19): siRNA sense strand
ggaccacugcuuugauguc

SEQ ID NO: 1017347 - RNA, 19 nt, Homo sapiens
  misc_RNA (1)...(19): siRNA sense strand
cgaguaccuugaggauguu

SEQ ID NO: 1017348 - RNA, 19 nt, Homo sapiens
  misc_RNA (1)...(19): siRNA sense strand
caacaaguucguggucauc

SEQ ID NO: 1017349 - RNA, 19 nt, Homo sapiens
  misc_RNA (1)...(19): siRNA sense strand
acaacaaguucguggucau

SEQ ID NO: 1017350 - RNA, 19 nt, Homo sapiens
  misc_RNA (1)...(19): siRNA sense strand
gcaguacagcaccgucauc

SEQ ID NO: 1017351 - RNA, 19 nt, Homo sapiens
  misc_RNA (1)...(19): siRNA sense strand
ccauucagagggcugugua

SEQ ID NO: 1017352 - RNA, 19 nt, Homo sapiens
  misc_RNA (1)...(19): siRNA sense strand
gaagaggcauugcgugaaa

SEQ ID NO: 1017353 - RNA, 19 nt, Homo sapiens
  misc_RNA (1)...(19): siRNA sense strand
gagaagagagcugaaauaa

SEQ ID NO: 1017354 - RNA, 19 nt, Homo sapiens
  misc_RNA (1)...(19): siRNA sense strand
gagcagagacagagaagaa

SEQ ID NO: 1017355 - RNA, 19 nt, Homo sapiens
  misc_RNA (1)...(19): siRNA sense strand
ggaaaugauagacaauaug

SEQ ID NO: 1017356 - RNA, 19 nt, Homo sapiens
  misc_RNA (1)...(19): siRNA sense strand
aaaugcagguucacuggaa

SEQ ID NO: 1017357 - RNA, 19 nt, Homo sapiens
  misc_RNA (1)...(19): siRNA sense strand
ggagagaagagagcugaaa

SEQ ID NO: 1017358 - RNA, 19 nt, Homo sapiens
  misc_RNA (1)...(19): siRNA sense strand
agagaagagagcugaaaua

SEQ ID NO: 1017359 - RNA, 19 nt, Homo sapiens
  misc_RNA (1)...(19): siRNA sense strand
gaaggaggaagaggcauug

SEQ ID NO: 1017360 - RNA, 19 nt, Homo sapiens
  misc_RNA (1)...(19): siRNA sense strand
gagagaagagagcugaaau

SEQ ID NO: 1017361 - RNA, 19 nt, Homo sapiens
  misc_RNA (1)...(19): siRNA sense strand
cagguucacuggaaaugau

SEQ ID NO: 1017362 - RNA, 19 nt, Homo sapiens
  misc_RNA (1)...(19): siRNA sense strand
ggaagaggcauugcgugaa

SEQ ID NO: 1017363 - RNA, 19 nt, Homo sapiens
  misc_RNA (1)...(19): siRNA sense strand
gcagguucacuggaaauga

SEQ ID NO: 1017364 - RNA, 19 nt, Homo sapiens
  misc_RNA (1)...(19): siRNA sense strand
gaaagaucgagcagagaca

SEQ ID NO: 1017365 - RNA, 19 nt, Homo sapiens
  misc_RNA (1)...(19): siRNA sense strand
ugaaggaggaagaggcauu

SEQ ID NO: 1017366 - RNA, 19 nt, Homo sapiens
  misc_RNA (1)...(19): siRNA sense strand
cacuggaaaugauagacaa

SEQ ID NO: 1017367 - RNA, 19 nt, Homo sapiens
  misc_RNA (1)...(19): siRNA sense strand
gcagagacagagaagaaaa

SEQ ID NO: 1017368 - RNA, 19 nt, Homo sapiens
  misc_RNA (1)...(19): siRNA sense strand
gaucgagcagagacagaga

SEQ ID NO: 1017369 - RNA, 19 nt, Homo sapiens
  misc_RNA (1)...(19): siRNA sense strand
acacacaaagagaaccaaa

SEQ ID NO: 1017370 - RNA, 19 nt, Homo sapiens
  misc_RNA (1)...(19): siRNA sense strand
cuggaaaugauagacaaua

SEQ ID NO: 1017371 - RNA, 19 nt, Homo sapiens
  misc_RNA (1)...(19): siRNA sense strand
gaagcucucugacaaagau

SEQ ID NO: 1017372 - RNA, 19 nt, Homo sapiens
  misc_RNA (1)...(19): siRNA sense strand
ggacaaugccaaugagaaa

SEQ ID NO: 1017373 - RNA, 19 nt, Homo sapiens
  misc_RNA (1)...(19): siRNA sense strand
gaaggaacccucaaaagaa

SEQ ID NO: 1017374 - RNA, 19 nt, Homo sapiens
  misc_RNA (1)...(19): siRNA sense strand
aaaagaagcucucugacaa

SEQ ID NO: 1017375 - RNA, 19 nt, Homo sapiens
  misc_RNA (1)...(19): siRNA sense strand
ggagaugccaacccauuug

SEQ ID NO: 1017376 - RNA, 19 nt, Homo sapiens
  misc_RNA (1)...(19): siRNA sense strand
ggacucagggccuugcauu

SEQ ID NO: 1017377 - RNA, 19 nt, Homo sapiens
  misc_RNA (1)...(19): siRNA sense strand
gccaacccauuuguccuua

SEQ ID NO: 1017378 - RNA, 19 nt, Homo sapiens
  misc_RNA (1)...(19): siRNA sense strand
ggccuugcauugugacaga

SEQ ID NO: 1017379 - RNA, 19 nt, Homo sapiens
  misc_RNA (1)...(19): siRNA sense strand
ccucagugccugcaucauu

SEQ ID NO: 1017380 - RNA, 19 nt, Homo sapiens
  misc_RNA (1)...(19): siRNA sense strand
ggagugggcagcagucaca

SEQ ID NO: 1017381 - RNA, 19 nt, Homo sapiens
  misc_RNA (1)...(19): siRNA sense strand
ucagggccuugcauuguga

SEQ ID NO: 1017382 - RNA, 19 nt, Homo sapiens
  misc_RNA (1)...(19): siRNA sense strand
aaagaagcucucugacaaa

SEQ ID NO: 1017383 - RNA, 19 nt, Homo sapiens
  misc_RNA (1)...(19): siRNA sense strand
gcugauacuguccaagauu

SEQ ID NO: 1017384 - RNA, 19 nt, Homo sapiens
  misc_RNA (1)...(19): siRNA sense strand
cgaaggaacccucaaaaga

SEQ ID NO: 1017385 - RNA, 19 nt, Homo sapiens
  misc_RNA (1)...(19): siRNA sense strand
caaugccaaugagaaauca

SEQ ID NO: 1017386 - RNA, 19 nt, Homo sapiens
  misc_RNA (1)...(19): siRNA sense strand
agucaaaggcagaggcuaa

SEQ ID NO: 1017387 - RNA, 19 nt, Homo sapiens
  misc_RNA (1)...(19): siRNA sense strand
agacgaaggaacccucaaa

SEQ ID NO: 1017388 - RNA, 19 nt, Homo sapiens
  misc_RNA (1)...(19): siRNA sense strand
aagaagcucucugacaaag

SEQ ID NO: 1017389 - RNA, 19 nt, Homo sapiens
  misc_RNA (1)...(19): siRNA sense strand
cugauacuguccaagauuc

SEQ ID NO: 1017390 - RNA, 19 nt, Homo sapiens
  misc_RNA (1)...(19): siRNA sense strand
gagaugccaacccauuugu

SEQ ID NO: 1017391 - RNA, 19 nt, Homo sapiens
  misc_RNA (1)...(19): siRNA sense strand
caacccauuuguccuuagg

SEQ ID NO: 1017392 - RNA, 19 nt, Homo sapiens
  misc_RNA (1)...(19): siRNA sense strand
caucaagggccaguacaga

SEQ ID NO: 1017393 - RNA, 19 nt, Homo sapiens
  misc_RNA (1)...(19): siRNA sense strand
caaaagaagcucucugaca

SEQ ID NO: 1017394 - RNA, 19 nt, Homo sapiens
  misc_RNA (1)...(19): siRNA sense strand
cggcugauacuguccaaga

SEQ ID NO: 1017395 - RNA, 19 nt, Homo sapiens
  misc_RNA (1)...(19): siRNA sense strand
gcauugugacagaguguau

SEQ ID NO: 1017396 - RNA, 19 nt, Homo sapiens
  misc_RNA (1)...(19): siRNA sense strand
gccaaugagaaaucagaaa

SEQ ID NO: 1017397 - RNA, 19 nt, Homo sapiens
  misc_RNA (1)...(19): siRNA sense strand
aagauacgguagccaccaa

SEQ ID NO: 1017398 - RNA, 19 nt, Homo sapiens
  misc_RNA (1)...(19): siRNA sense strand
agacacagacaguggacaa

SEQ ID NO: 1017399 - RNA, 19 nt, Homo sapiens
  misc_RNA (1)...(19): siRNA sense strand
cagaguguauucccuucuc

SEQ ID NO: 1017400 - RNA, 19 nt, Homo sapiens
  misc_RNA (1)...(19): siRNA sense strand
cucagugccugcaucauuc

SEQ ID NO: 1017401 - RNA, 19 nt, Homo sapiens
  misc_RNA (1)...(19): siRNA sense strand
caguggacaaugccaauga

SEQ ID NO: 1017402 - RNA, 19 nt, Homo sapiens
  misc_RNA (1)...(19): siRNA sense strand
gagaagcagccccaaaaga

SEQ ID NO: 1017403 - RNA, 19 nt, Homo sapiens
  misc_RNA (1)...(19): siRNA sense strand
aaggagaugccaacccauu

SEQ ID NO: 1017404 - RNA, 19 nt, Homo sapiens
  misc_RNA (1)...(19): siRNA sense strand
cacagacaguggacaaugc

SEQ ID NO: 1017405 - RNA, 19 nt, Homo sapiens
  misc_RNA (1)...(19): siRNA sense strand
ccaaugagaaaucagaaaa

SEQ ID NO: 1017406 - RNA, 19 nt, Homo sapiens
  misc_RNA (1)...(19): siRNA sense strand
gauacgguagccaccaaga

SEQ ID NO: 1017407 - RNA, 19 nt, Homo sapiens
  misc_RNA (1)...(19): siRNA sense strand
gacaguggacaaugccaau

SEQ ID NO: 1017408 - RNA, 19 nt, Homo sapiens
  misc_RNA (1)...(19): siRNA sense strand
acacagacaguggacaaug

SEQ ID NO: 1017409 - RNA, 19 nt, Homo sapiens
  misc_RNA (1)...(19): siRNA sense strand
gcuauugccaggugcucaa

SEQ ID NO: 1017410 - RNA, 19 nt, Homo sapiens
  misc_RNA (1)...(19): siRNA sense strand
gcgcauccgcagacgcuau

SEQ ID NO: 1017411 - RNA, 19 nt, Homo sapiens
  misc_RNA (1)...(19): siRNA sense strand
ggcugauacuguccaagau

SEQ ID NO: 1017412 - RNA, 19 nt, Homo sapiens
  misc_RNA (1)...(19): siRNA sense strand
acaaugccaaugagaaauc

SEQ ID NO: 1017413 - RNA, 19 nt, Homo sapiens
  misc_RNA (1)...(19): siRNA sense strand
gacaaugccaaugagaaau

SEQ ID NO: 1017414 - RNA, 19 nt, Homo sapiens
  misc_RNA (1)...(19): siRNA sense strand
gaaggaaccggaaguuuaa

SEQ ID NO: 1017415 - RNA, 19 nt, Homo sapiens
  misc_RNA (1)...(19): siRNA sense strand
cgaaggaaccggaaguuua

SEQ ID NO: 1017416 - RNA, 19 nt, Homo sapiens
  misc_RNA (1)...(19): siRNA sense strand
ggaagacacucagauguau

SEQ ID NO: 1017417 - RNA, 19 nt, Homo sapiens
  misc_RNA (1)...(19): siRNA sense strand
gaagugggacggaaaguga

SEQ ID NO: 1017418 - RNA, 19 nt, Homo sapiens
  misc_RNA (1)...(19): siRNA sense strand
cgucuggcauguuugauua

SEQ ID NO: 1017419 - RNA, 19 nt, Homo sapiens
  misc_RNA (1)...(19): siRNA sense strand
gcggaaacauuggcaaauu

SEQ ID NO: 1017420 - RNA, 19 nt, Homo sapiens
  misc_RNA (1)...(19): siRNA sense strand
gauuaugacuuugagauug

SEQ ID NO: 1017421 - RNA, 19 nt, Homo sapiens
  misc_RNA (1)...(19): siRNA sense strand
ucagauguauggcaauauu

SEQ ID NO: 1017422 - RNA, 19 nt, Homo sapiens
  misc_RNA (1)...(19): siRNA sense strand
cggaaacauuggcaaauuu

SEQ ID NO: 1017423 - RNA, 19 nt, Homo sapiens
  misc_RNA (1)...(19): siRNA sense strand
ggaaacauuggcaaauuug

SEQ ID NO: 1017424 - RNA, 19 nt, Homo sapiens
  misc_RNA (1)...(19): siRNA sense strand
ggagcuggcggaaacauug

SEQ ID NO: 1017425 - RNA, 19 nt, Homo sapiens
  misc_RNA (1)...(19): siRNA sense strand
gaaccggaaguuuaaggaa

SEQ ID NO: 1017426 - RNA, 19 nt, Homo sapiens
  misc_RNA (1)...(19): siRNA sense strand
ugacacuucuccagacuuc

SEQ ID NO: 1017427 - RNA, 19 nt, Homo sapiens
  misc_RNA (1)...(19): siRNA sense strand
uucaguaaauccucgguua

SEQ ID NO: 1017428 - RNA, 19 nt, Homo sapiens
  misc_RNA (1)...(19): siRNA sense strand
cagcccgucuggcauguuu

SEQ ID NO: 1017429 - RNA, 19 nt, Homo sapiens
  misc_RNA (1)...(19): siRNA sense strand
uggaagacacucagaugua

SEQ ID NO: 1017430 - RNA, 19 nt, Homo sapiens
  misc_RNA (1)...(19): siRNA sense strand
acucagauguauggcaaua

SEQ ID NO: 1017431 - RNA, 19 nt, Homo sapiens
  misc_RNA (1)...(19): siRNA sense strand
cgacagaucuaugcuuuug

SEQ ID NO: 1017432 - RNA, 19 nt, Homo sapiens
  misc_RNA (1)...(19): siRNA sense strand
gaagacacucagauguaug

SEQ ID NO: 1017433 - RNA, 19 nt, Homo sapiens
  misc_RNA (1)...(19): siRNA sense strand
ggaggacccugaggaucug

SEQ ID NO: 1017434 - RNA, 19 nt, Homo sapiens
  misc_RNA (1)...(19): siRNA sense strand
gaaaagagggagccaggaa

SEQ ID NO: 1017435 - RNA, 19 nt, Homo sapiens
  misc_RNA (1)...(19): siRNA sense strand
cagauguauggcaauauua

SEQ ID NO: 1017436 - RNA, 19 nt, Homo sapiens
  misc_RNA (1)...(19): siRNA sense strand
guucaggaccagcucauug

SEQ ID NO: 1017437 - RNA, 19 nt, Homo sapiens
  misc_RNA (1)...(19): siRNA sense strand
aaccacgagcugacuauua

SEQ ID NO: 1017438 - RNA, 19 nt, Homo sapiens
  misc_RNA (1)...(19): siRNA sense strand
agcgacagaucuaugcuuu

SEQ ID NO: 1017439 - RNA, 19 nt, Homo sapiens
  misc_RNA (1)...(19): siRNA sense strand
ggaaccggaaguuuaagga

SEQ ID NO: 1017440 - RNA, 19 nt, Homo sapiens
  misc_RNA (1)...(19): siRNA sense strand
ggaagugggacggaaagug

SEQ ID NO: 1017441 - RNA, 19 nt, Homo sapiens
  misc_RNA (1)...(19): siRNA sense strand
gcaaauuuggagcgacaga

SEQ ID NO: 1017442 - RNA, 19 nt, Homo sapiens
  misc_RNA (1)...(19): siRNA sense strand
accacgagcugacuauuag

SEQ ID NO: 1017443 - RNA, 19 nt, Homo sapiens
  misc_RNA (1)...(19): siRNA sense strand
cuccagacuuccacaauca

SEQ ID NO: 1017444 - RNA, 19 nt, Homo sapiens
  misc_RNA (1)...(19): siRNA sense strand
ugagggaagcuaccuggaa

SEQ ID NO: 1017445 - RNA, 19 nt, Homo sapiens
  misc_RNA (1)...(19): siRNA sense strand
aaacauuggcaaauuugga

SEQ ID NO: 1017446 - RNA, 19 nt, Homo sapiens
  misc_RNA (1)...(19): siRNA sense strand
gaucgaaggaaccggaagu

SEQ ID NO: 1017447 - RNA, 19 nt, Homo sapiens
  misc_RNA (1)...(19): siRNA sense strand
gagcgacagaucuaugcuu

SEQ ID NO: 1017448 - RNA, 19 nt, Homo sapiens
  misc_RNA (1)...(19): siRNA sense strand
gaaacauuggcaaauuugg

SEQ ID NO: 1017449 - RNA, 19 nt, Homo sapiens
  misc_RNA (1)...(19): siRNA sense strand
ccaggaagugggacggaaa

SEQ ID NO: 1017450 - RNA, 19 nt, Homo sapiens
  misc_RNA (1)...(19): siRNA sense strand
ucuccagacuuccacaauc

SEQ ID NO: 1017451 - RNA, 19 nt, Homo sapiens
  misc_RNA (1)...(19): siRNA sense strand
caggaccagcucauugaaa

SEQ ID NO: 1017452 - RNA, 19 nt, Homo sapiens
  misc_RNA (1)...(19): siRNA sense strand
aaagagggagccaggaagu

SEQ ID NO: 1017453 - RNA, 19 nt, Homo sapiens
  misc_RNA (1)...(19): siRNA sense strand
gggaaagucugcuugagua

SEQ ID NO: 1017454 - RNA, 19 nt, Homo sapiens
  misc_RNA (1)...(19): siRNA sense strand
ugacuaagauucaugcauu

SEQ ID NO: 1017455 - RNA, 19 nt, Homo sapiens
  misc_RNA (1)...(19): siRNA sense strand
gaaauggacucugauagca

SEQ ID NO: 1017456 - RNA, 19 nt, Homo sapiens
  misc_RNA (1)...(19): siRNA sense strand
ggacagagacagaccuuca

SEQ ID NO: 1017457 - RNA, 19 nt, Homo sapiens
  misc_RNA (1)...(19): siRNA sense strand
ccucagugcucaucucuau

SEQ ID NO: 1017458 - RNA, 19 nt, Homo sapiens
  misc_RNA (1)...(19): siRNA sense strand
gcaauaacacagugagguu

SEQ ID NO: 1017459 - RNA, 19 nt, Homo sapiens
  misc_RNA (1)...(19): siRNA sense strand
uaaugagaaugcagaaaug

SEQ ID NO: 1017460 - RNA, 19 nt, Homo sapiens
  misc_RNA (1)...(19): siRNA sense strand
aaagucugcuugaguauuc

SEQ ID NO: 1017461 - RNA, 19 nt, Homo sapiens
  misc_RNA (1)...(19): siRNA sense strand
gaaagucugcuugaguauu

SEQ ID NO: 1017462 - RNA, 19 nt, Homo sapiens
  misc_RNA (1)...(19): siRNA sense strand
gagguggccugcaaagauc

SEQ ID NO: 1017463 - RNA, 19 nt, Homo sapiens
  misc_RNA (1)...(19): siRNA sense strand
gcacgagaccaucagaguu

SEQ ID NO: 1017464 - RNA, 19 nt, Homo sapiens
  misc_RNA (1)...(19): siRNA sense strand
caugggagccugaggguuu

SEQ ID NO: 1017465 - RNA, 19 nt, Homo sapiens
  misc_RNA (1)...(19): siRNA sense strand
aguccuuucuggaguauua

SEQ ID NO: 1017466 - RNA, 19 nt, Homo sapiens
  misc_RNA (1)...(19): siRNA sense strand
uaagauucaugcauugauc

SEQ ID NO: 1017467 - RNA, 19 nt, Homo sapiens
  misc_RNA (1)...(19): siRNA sense strand
gacuaagauucaugcauug

SEQ ID NO: 1017468 - RNA, 19 nt, Homo sapiens
  misc_RNA (1)...(19): siRNA sense strand
gaaguccuuucuggaguau

SEQ ID NO: 1017469 - RNA, 19 nt, Homo sapiens
  misc_RNA (1)...(19): siRNA sense strand
gagaggcuccauaaugaga

SEQ ID NO: 1017470 - RNA, 19 nt, Homo sapiens
  misc_RNA (1)...(19): siRNA sense strand
ggaguauuacgacuucuau

SEQ ID NO: 1017471 - RNA, 19 nt, Homo sapiens
  misc_RNA (1)...(19): siRNA sense strand
aaacuaugcaggacccuuu

SEQ ID NO: 1017472 - RNA, 19 nt, Homo sapiens
  misc_RNA (1)...(19): siRNA sense strand
ucuaugagguggccugcaa

SEQ ID NO: 1017473 - RNA, 19 nt, Homo sapiens
  misc_RNA (1)...(19): siRNA sense strand
aauaacacagugagguuua

SEQ ID NO: 1017474 - RNA, 19 nt, Homo sapiens
  misc_RNA (1)...(19): siRNA sense strand
ggacucugauagcaguuca

SEQ ID NO: 1017475 - RNA, 19 nt, Homo sapiens
  misc_RNA (1)...(19): siRNA sense strand
cauuugacacuccuuauga

SEQ ID NO: 1017476 - RNA, 19 nt, Homo sapiens
  misc_RNA (1)...(19): siRNA sense strand
ggaaagucugcuugaguau

SEQ ID NO: 1017477 - RNA, 19 nt, Homo sapiens
  misc_RNA (1)...(19): siRNA sense strand
cguuguaccugauacuguu

SEQ ID NO: 1017478 - RNA, 19 nt, Homo sapiens
  misc_RNA (1)...(19): siRNA sense strand
caauaacacagugagguuu

SEQ ID NO: 1017479 - RNA, 19 nt, Homo sapiens
  misc_RNA (1)...(19): siRNA sense strand
gcaaugggaaagucugcuu

SEQ ID NO: 1017480 - RNA, 19 nt, Homo sapiens
  misc_RNA (1)...(19): siRNA sense strand
ugagguggccugcaaagau

SEQ ID NO: 1017481 - RNA, 19 nt, Homo sapiens
  misc_RNA (1)...(19): siRNA sense strand
ccaggaauguucguuguac

SEQ ID NO: 1017482 - RNA, 19 nt, Homo sapiens
  misc_RNA (1)...(19): siRNA sense strand
cacgagaccaucagaguug

SEQ ID NO: 1017483 - RNA, 19 nt, Homo sapiens
  misc_RNA (1)...(19): siRNA sense strand
gugacaugauggaaggaaa

SEQ ID NO: 1017484 - RNA, 19 nt, Homo sapiens
  misc_RNA (1)...(19): siRNA sense strand
gaucacaggcccauuugac

SEQ ID NO: 1017485 - RNA, 19 nt, Homo sapiens
  misc_RNA (1)...(19): siRNA sense strand
gaggcuccauaaugagaau

SEQ ID NO: 1017486 - RNA, 19 nt, Homo sapiens
  misc_RNA (1)...(19): siRNA sense strand
ccaccucgggucaaacuga

SEQ ID NO: 1017487 - RNA, 19 nt, Homo sapiens
  misc_RNA (1)...(19): siRNA sense strand
aguauuacgacuucuauga

SEQ ID NO: 1017488 - RNA, 19 nt, Homo sapiens
  misc_RNA (1)...(19): siRNA sense strand
gagaaccccuaucacaaug

SEQ ID NO: 1017489 - RNA, 19 nt, Homo sapiens
  misc_RNA (1)...(19): siRNA sense strand
auaacacagugagguuuaa

SEQ ID NO: 1017490 - RNA, 19 nt, Homo sapiens
  misc_RNA (1)...(19): siRNA sense strand
gcccauuugacacuccuua

SEQ ID NO: 1017491 - RNA, 19 nt, Homo sapiens
  misc_RNA (1)...(19): siRNA sense strand
guugcagucugugacauga

SEQ ID NO: 1017492 - RNA, 19 nt, Homo sapiens
  misc_RNA (1)...(19): siRNA sense strand
ucuauccagucccugauga

SEQ ID NO: 1017493 - RNA, 19 nt, Homo sapiens
  misc_RNA (1)...(19): siRNA sense strand
gaugacaacgggcaauaac

SEQ ID NO: 1017494 - RNA, 19 nt, Homo sapiens
  misc_RNA (1)...(19): siRNA sense strand
caugauggaaggaaagugu

SEQ ID NO: 1017495 - RNA, 19 nt, Homo sapiens
  misc_RNA (1)...(19): siRNA sense strand
caacgggcaauaacacagu

SEQ ID NO: 1017496 - RNA, 19 nt, Homo sapiens
  misc_RNA (1)...(19): siRNA sense strand
ucuggaguauuacgacuuc

SEQ ID NO: 1017497 - RNA, 19 nt, Homo sapiens
  misc_RNA (1)...(19): siRNA sense strand
cuaccagucccucuugaug

SEQ ID NO: 1017498 - RNA, 19 nt, Homo sapiens
  misc_RNA (1)...(19): siRNA sense strand
ccauuugacacuccuuaug

SEQ ID NO: 1017499 - RNA, 19 nt, Homo sapiens
  misc_RNA (1)...(19): siRNA sense strand
aagaucgccugcaccuuca

SEQ ID NO: 1017500 - RNA, 19 nt, Homo sapiens
  misc_RNA (1)...(19): siRNA sense strand
ugaguauucuagguacaug

SEQ ID NO: 1017501 - RNA, 19 nt, Homo sapiens
  misc_RNA (1)...(19): siRNA sense strand
ucugauagcaguucaucug

SEQ ID NO: 1017502 - RNA, 19 nt, Homo sapiens
  misc_RNA (1)...(19): siRNA sense strand
ugaugacaacgggcaauaa

SEQ ID NO: 1017503 - RNA, 19 nt, Homo sapiens
  misc_RNA (1)...(19): siRNA sense strand
guauuacgacuucuaugag

SEQ ID NO: 1017504 - RNA, 19 nt, Homo sapiens
  misc_RNA (1)...(19): siRNA sense strand
ugcagucugugacaugaug

SEQ ID NO: 1017505 - RNA, 19 nt, Homo sapiens
  misc_RNA (1)...(19): siRNA sense strand
cuguugacaugacuaagau

SEQ ID NO: 1017506 - RNA, 19 nt, Homo sapiens
  misc_RNA (1)...(19): siRNA sense strand
gacaacgggcaauaacaca

SEQ ID NO: 1017507 - RNA, 19 nt, Homo sapiens
  misc_RNA (1)...(19): siRNA sense strand
gcuuugaacaggagagaca

SEQ ID NO: 1017508 - RNA, 19 nt, Homo sapiens
  misc_RNA (1)...(19): siRNA sense strand
agaaauggacucugauagc

SEQ ID NO: 1017509 - RNA, 19 nt, Homo sapiens
  misc_RNA (1)...(19): siRNA sense strand
guugacaugacuaagauuc

SEQ ID NO: 1017510 - RNA, 19 nt, Homo sapiens
  misc_RNA (1)...(19): siRNA sense strand
ucaauaagcucauuaaugg

SEQ ID NO: 1017511 - RNA, 19 nt, Homo sapiens
  misc_RNA (1)...(19): siRNA sense strand
gcaaagccauugacaggaa

SEQ ID NO: 1017512 - RNA, 19 nt, Homo sapiens
  misc_RNA (1)...(19): siRNA sense strand
gaacuucgacucugagauc

SEQ ID NO: 1017513 - RNA, 19 nt, Homo sapiens
  misc_RNA (1)...(19): siRNA sense strand
agagagagcuggacaaggu

SEQ ID NO: 1017514 - RNA, 19 nt, Homo sapiens
  misc_RNA (1)...(19): siRNA sense strand
ucacagugcugccggaaga

SEQ ID NO: 1017515 - RNA, 19 nt, Homo sapiens
  misc_RNA (1)...(19): siRNA sense strand
uggaggagcugcugcacua

SEQ ID NO: 1017516 - RNA, 19 nt, Homo sapiens
  misc_RNA (1)...(19): siRNA sense strand
ggaaacgcaucauauucug

SEQ ID NO: 1017517 - RNA, 19 nt, Homo sapiens
  misc_RNA (1)...(19): siRNA sense strand
gaucugugguguuguguca

SEQ ID NO: 1017518 - RNA, 19 nt, Homo sapiens
  misc_RNA (1)...(19): siRNA sense strand
gcucaucuguggccauguu

SEQ ID NO: 1017519 - RNA, 19 nt, Homo sapiens
  misc_RNA (1)...(19): siRNA sense strand
gagaugcacucaauaagcu

SEQ ID NO: 1017520 - RNA, 19 nt, Homo sapiens
  misc_RNA (1)...(19): siRNA sense strand
gaaacuggcuucggaccau

SEQ ID NO: 1017521 - RNA, 19 nt, Homo sapiens
  misc_RNA (1)...(19): siRNA sense strand
gcacucaauaagcucauua

SEQ ID NO: 1017522 - RNA, 19 nt, Homo sapiens
  misc_RNA (1)...(19): siRNA sense strand
ucaaagauacggugcagaa

SEQ ID NO: 1017523 - RNA, 19 nt, Homo sapiens
  misc_RNA (1)...(19): siRNA sense strand
gaaucacaaggacgaguua

SEQ ID NO: 1017524 - RNA, 19 nt, Homo sapiens
  misc_RNA (1)...(19): siRNA sense strand
gagcagaacccggcagaug

SEQ ID NO: 1017525 - RNA, 19 nt, Homo sapiens
  misc_RNA (1)...(19): siRNA sense strand
acaagguccugcagaaguu

SEQ ID NO: 1017526 - RNA, 19 nt, Homo sapiens
  misc_RNA (1)...(19): siRNA sense strand
gcugaagugucccuacugu

SEQ ID NO: 1017527 - RNA, 19 nt, Homo sapiens
  misc_RNA (1)...(19): siRNA sense strand
gaacccggcagaugggaaa

SEQ ID NO: 1017528 - RNA, 19 nt, Homo sapiens
  misc_RNA (1)...(19): siRNA sense strand
ucugagaucugugguguug

SEQ ID NO: 1017529 - RNA, 19 nt, Homo sapiens
  misc_RNA (1)...(19): siRNA sense strand
gaaacgcaucauauucuga

SEQ ID NO: 1017530 - RNA, 19 nt, Homo sapiens
  misc_RNA (1)...(19): siRNA sense strand
gaggagcugugccaggaau

SEQ ID NO: 1017531 - RNA, 19 nt, Homo sapiens
  misc_RNA (1)...(19): siRNA sense strand
gccggaagaucaaagauac

SEQ ID NO: 1017532 - RNA, 19 nt, Homo sapiens
  misc_RNA (1)...(19): siRNA sense strand
gcacuucauccgccucuug

SEQ ID NO: 1017533 - RNA, 19 nt, Homo sapiens
  misc_RNA (1)...(19): siRNA sense strand
caagcagccuuuccuagag

SEQ ID NO: 1017534 - RNA, 19 nt, Homo sapiens
  misc_RNA (1)...(19): siRNA sense strand
ucaagcagccuuuccuaga

SEQ ID NO: 1017535 - RNA, 19 nt, Homo sapiens
  misc_RNA (1)...(19): siRNA sense strand
acaggaacuucgacucuga

SEQ ID NO: 1017536 - RNA, 19 nt, Homo sapiens
  misc_RNA (1)...(19): siRNA sense strand
ggaaucacaaggacgaguu

SEQ ID NO: 1017537 - RNA, 19 nt, Homo sapiens
  misc_RNA (1)...(19): siRNA sense strand
gggaaacgcaucauauucu

SEQ ID NO: 1017538 - RNA, 19 nt, Homo sapiens
  misc_RNA (1)...(19): siRNA sense strand
ggacauucacagcagugua

SEQ ID NO: 1017539 - RNA, 19 nt, Homo sapiens
  misc_RNA (1)...(19): siRNA sense strand
gcucauuaauggaggaaag

SEQ ID NO: 1017540 - RNA, 19 nt, Homo sapiens
  misc_RNA (1)...(19): siRNA sense strand
ugagaucugugguguugug

SEQ ID NO: 1017541 - RNA, 19 nt, Homo sapiens
  misc_RNA (1)...(19): siRNA sense strand
cgaguuaccgauugagauu

SEQ ID NO: 1017542 - RNA, 19 nt, Homo sapiens
  misc_RNA (1)...(19): siRNA sense strand
gacauucacagcaguguau

SEQ ID NO: 1017543 - RNA, 19 nt, Homo sapiens
  misc_RNA (1)...(19): siRNA sense strand
aaacuggcuucggaccaua

SEQ ID NO: 1017544 - RNA, 19 nt, Homo sapiens
  misc_RNA (1)...(19): siRNA sense strand
gagauugaacuaggcauga

SEQ ID NO: 1017545 - RNA, 19 nt, Homo sapiens
  misc_RNA (1)...(19): siRNA sense strand
agagaucugugagaccuuu

SEQ ID NO: 1017546 - RNA, 19 nt, Homo sapiens
  misc_RNA (1)...(19): siRNA sense strand
gaauguggacuuggauuuc

SEQ ID NO: 1017547 - RNA, 19 nt, Homo sapiens
  misc_RNA (1)...(19): siRNA sense strand
gacaagguccugcagaagu

SEQ ID NO: 1017548 - RNA, 19 nt, Homo sapiens
  misc_RNA (1)...(19): siRNA sense strand
caaggacgaguuaccgauu

SEQ ID NO: 1017549 - RNA, 19 nt, Homo sapiens
  misc_RNA (1)...(19): siRNA sense strand
gggaacagcagcagcagau

SEQ ID NO: 1017550 - RNA, 19 nt, Homo sapiens
  misc_RNA (1)...(19): siRNA sense strand
ugaauguggacuuggauuu

SEQ ID NO: 1017551 - RNA, 19 nt, Homo sapiens
  misc_RNA (1)...(19): siRNA sense strand
uggaagcccugcacgaaca

SEQ ID NO: 1017552 - RNA, 19 nt, Homo sapiens
  misc_RNA (1)...(19): siRNA sense strand
gcacuggggucuggaauca

SEQ ID NO: 1017553 - RNA, 19 nt, Homo sapiens
  misc_RNA (1)...(19): siRNA sense strand
ugcagaaguuccugaccua

SEQ ID NO: 1017554 - RNA, 19 nt, Homo sapiens
  misc_RNA (1)...(19): siRNA sense strand
gugcgugcguggagagaga

SEQ ID NO: 1017555 - RNA, 19 nt, Homo sapiens
  misc_RNA (1)...(19): siRNA sense strand
cagcuaugcucggcacuuc

SEQ ID NO: 1017556 - RNA, 19 nt, Homo sapiens
  misc_RNA (1)...(19): siRNA sense strand
ggaaucaacgcugaaugug

SEQ ID NO: 1017557 - RNA, 19 nt, Homo sapiens
  misc_RNA (1)...(19): siRNA sense strand
ggagagagagcuggacaag

SEQ ID NO: 1017558 - RNA, 19 nt, Homo sapiens
  misc_RNA (1)...(19): siRNA sense strand
aagauacggugcagaaacu

SEQ ID NO: 1017559 - RNA, 19 nt, Homo sapiens
  misc_RNA (1)...(19): siRNA sense strand
caaagauacggugcagaaa

SEQ ID NO: 1017560 - RNA, 19 nt, Homo sapiens
  misc_RNA (1)...(19): siRNA sense strand
cucaauaagcucauuaaug

SEQ ID NO: 1017561 - RNA, 19 nt, Homo sapiens
  misc_RNA (1)...(19): siRNA sense strand
caucguggaacaccuguau

SEQ ID NO: 1017562 - RNA, 19 nt, Homo sapiens
  misc_RNA (1)...(19): siRNA sense strand
aaggacgaguuaccgauug

SEQ ID NO: 1017563 - RNA, 19 nt, Homo sapiens
  misc_RNA (1)...(19): siRNA sense strand
cccgagaugcacucaauaa

SEQ ID NO: 1017564 - RNA, 19 nt, Homo sapiens
  misc_RNA (1)...(19): siRNA sense strand
guguggcgcugccuguguu

SEQ ID NO: 1017565 - RNA, 19 nt, Homo sapiens
  misc_RNA (1)...(19): siRNA sense strand
agauugaacuaggcaugaa

SEQ ID NO: 1017566 - RNA, 19 nt, Homo sapiens
  misc_RNA (1)...(19): siRNA sense strand
ggagauccaggugaugaug

SEQ ID NO: 1017567 - RNA, 19 nt, Homo sapiens
  misc_RNA (1)...(19): siRNA sense strand
gccagcagacgucagauuc

SEQ ID NO: 1017568 - RNA, 19 nt, Homo sapiens
  misc_RNA (1)...(19): siRNA sense strand
gaccauaaggacauucaca

SEQ ID NO: 1017569 - RNA, 19 nt, Homo sapiens
  misc_RNA (1)...(19): siRNA sense strand
aguuaccgauugagauuga

SEQ ID NO: 1017570 - RNA, 19 nt, Homo sapiens
  misc_RNA (1)...(19): siRNA sense strand
ugacaggaacuucgacucu

SEQ ID NO: 1017571 - RNA, 19 nt, Homo sapiens
  misc_RNA (1)...(19): siRNA sense strand
aauguggacuuggauuuca

SEQ ID NO: 1017572 - RNA, 19 nt, Homo sapiens
  misc_RNA (1)...(19): siRNA sense strand
cggcugggcuuggagaagu

SEQ ID NO: 1017573 - RNA, 19 nt, Homo sapiens
  misc_RNA (1)...(19): siRNA sense strand
cagcagacgucagauucca

SEQ ID NO: 1017574 - RNA, 19 nt, Homo sapiens
  misc_RNA (1)...(19): siRNA sense strand
gcugguaccacuccguguu

SEQ ID NO: 1017575 - RNA, 19 nt, Homo sapiens
  misc_RNA (1)...(19): siRNA sense strand
ugccggaagaucaaagaua

SEQ ID NO: 1017576 - RNA, 19 nt, Homo sapiens
  misc_RNA (1)...(19): siRNA sense strand
aagcagccuuuccuagagu

SEQ ID NO: 1017577 - RNA, 19 nt, Homo sapiens
  misc_RNA (1)...(19): siRNA sense strand
aggacgaguuaccgauuga

SEQ ID NO: 1017578 - RNA, 19 nt, Homo sapiens
  misc_RNA (1)...(19): siRNA sense strand
gagaucugugagaccuuua

SEQ ID NO: 1017579 - RNA, 19 nt, Homo sapiens
  misc_RNA (1)...(19): siRNA sense strand
gcaccgacugcacuucauc

SEQ ID NO: 1017580 - RNA, 19 nt, Homo sapiens
  misc_RNA (1)...(19): siRNA sense strand
cuucgacucugagaucugu

SEQ ID NO: 1017581 - RNA, 19 nt, Homo sapiens
  misc_RNA (1)...(19): siRNA sense strand
ugggaaacgcaucauauuc

SEQ ID NO: 1017582 - RNA, 19 nt, Homo sapiens
  misc_RNA (1)...(19): siRNA sense strand
gauuccaacccucccauca

SEQ ID NO: 1017583 - RNA, 19 nt, Homo sapiens
  misc_RNA (1)...(19): siRNA sense strand
gacgaguuaccgauugaga

SEQ ID NO: 1017584 - RNA, 19 nt, Homo sapiens
  misc_RNA (1)...(19): siRNA sense strand
aggaaucaacgcugaaugu

SEQ ID NO: 1017585 - RNA, 19 nt, Homo sapiens
  misc_RNA (1)...(19): siRNA sense strand
cgagaugcacucaauaagc

SEQ ID NO: 1017586 - RNA, 19 nt, Homo sapiens
  misc_RNA (1)...(19): siRNA sense strand
aaagauacggugcagaaac

SEQ ID NO: 1017587 - RNA, 19 nt, Homo sapiens
  misc_RNA (1)...(19): siRNA sense strand
ggaaagauaucucucaaag

SEQ ID NO: 1017588 - RNA, 19 nt, Homo sapiens
  misc_RNA (1)...(19): siRNA sense strand
ggccauaucuucaugaauu

SEQ ID NO: 1017589 - RNA, 19 nt, Homo sapiens
  misc_RNA (1)...(19): siRNA sense strand
gcaccuaaaucgugauaaa

SEQ ID NO: 1017590 - RNA, 19 nt, Homo sapiens
  misc_RNA (1)...(19): siRNA sense strand
caacaaauaugaaguggau

SEQ ID NO: 1017591 - RNA, 19 nt, Homo sapiens
  misc_RNA (1)...(19): siRNA sense strand
gagcacaaaugcaaauuau

SEQ ID NO: 1017592 - RNA, 19 nt, Homo sapiens
  misc_RNA (1)...(19): siRNA sense strand
ggacaggaguauucaguga

SEQ ID NO: 1017593 - RNA, 19 nt, Homo sapiens
  misc_RNA (1)...(19): siRNA sense strand
ugaaguaguugaaguagaa

SEQ ID NO: 1017594 - RNA, 19 nt, Homo sapiens
  misc_RNA (1)...(19): siRNA sense strand
ugaaguggauugaagcuaa

SEQ ID NO: 1017595 - RNA, 19 nt, Homo sapiens
  misc_RNA (1)...(19): siRNA sense strand
gaggagagcuugggagaug

SEQ ID NO: 1017596 - RNA, 19 nt, Homo sapiens
  misc_RNA (1)...(19): siRNA sense strand
ucacaaauauugggaaaga

SEQ ID NO: 1017597 - RNA, 19 nt, Homo sapiens
  misc_RNA (1)...(19): siRNA sense strand
gaaguggauugaagcuaaa

SEQ ID NO: 1017598 - RNA, 19 nt, Homo sapiens
  misc_RNA (1)...(19): siRNA sense strand
gaagaaaaccuacugaaaa

SEQ ID NO: 1017599 - RNA, 19 nt, Homo sapiens
  misc_RNA (1)...(19): siRNA sense strand
cagaauggacuaaagauaa

SEQ ID NO: 1017600 - RNA, 19 nt, Homo sapiens
  misc_RNA (1)...(19): siRNA sense strand
gagcuugggagaugucuua

SEQ ID NO: 1017601 - RNA, 19 nt, Homo sapiens
  misc_RNA (1)...(19): siRNA sense strand
ggugcuagauguugauuau

SEQ ID NO: 1017602 - RNA, 19 nt, Homo sapiens
  misc_RNA (1)...(19): siRNA sense strand
ggagugagcacaaaugcaa

SEQ ID NO: 1017603 - RNA, 19 nt, Homo sapiens
  misc_RNA (1)...(19): siRNA sense strand
gaaagaguacaaaguggaa

SEQ ID NO: 1017604 - RNA, 19 nt, Homo sapiens
  misc_RNA (1)...(19): siRNA sense strand
ucuaacaucugccuaugaa

SEQ ID NO: 1017605 - RNA, 19 nt, Homo sapiens
  misc_RNA (1)...(19): siRNA sense strand
caaagaagcaaggacagua

SEQ ID NO: 1017606 - RNA, 19 nt, Homo sapiens
  misc_RNA (1)...(19): siRNA sense strand
gcuuggagcucucaaacug

SEQ ID NO: 1017607 - RNA, 19 nt, Homo sapiens
  misc_RNA (1)...(19): siRNA sense strand
gaaagauaucucucaaaga

SEQ ID NO: 1017608 - RNA, 19 nt, Homo sapiens
  misc_RNA (1)...(19): siRNA sense strand
ugaccacacuuucagaaga

SEQ ID NO: 1017609 - RNA, 19 nt, Homo sapiens
  misc_RNA (1)...(19): siRNA sense strand
ccaaggagaggauuaauag

SEQ ID NO: 1017610 - RNA, 19 nt, Homo sapiens
  misc_RNA (1)...(19): siRNA sense strand
uaacaucugccuaugaaga

SEQ ID NO: 1017611 - RNA, 19 nt, Homo sapiens
  misc_RNA (1)...(19): siRNA sense strand
guaaagccucuugguguua

SEQ ID NO: 1017612 - RNA, 19 nt, Homo sapiens
  misc_RNA (1)...(19): siRNA sense strand
gaugacauagggagaaauu

SEQ ID NO: 1017613 - RNA, 19 nt, Homo sapiens
  misc_RNA (1)...(19): siRNA sense strand
gccauaucuucaugaauuu

SEQ ID NO: 1017614 - RNA, 19 nt, Homo sapiens
  misc_RNA (1)...(19): siRNA sense strand
uaugaaagcgcaccuaaau

SEQ ID NO: 1017615 - RNA, 19 nt, Homo sapiens
  misc_RNA (1)...(19): siRNA sense strand
cuaaugaacccacagaaug

SEQ ID NO: 1017616 - RNA, 19 nt, Homo sapiens
  misc_RNA (1)...(19): siRNA sense strand
cguaaagccucuugguguu

SEQ ID NO: 1017617 - RNA, 19 nt, Homo sapiens
  misc_RNA (1)...(19): siRNA sense strand
gaccacacuuucagaagau

SEQ ID NO: 1017618 - RNA, 19 nt, Homo sapiens
  misc_RNA (1)...(19): siRNA sense strand
ucaaggagauagcaaaauu

SEQ ID NO: 1017619 - RNA, 19 nt, Homo sapiens
  misc_RNA (1)...(19): siRNA sense strand
gaggauuaauagacguaaa

SEQ ID NO: 1017620 - RNA, 19 nt, Homo sapiens
  misc_RNA (1)...(19): siRNA sense strand
ccacagaauggacuaaaga

SEQ ID NO: 1017621 - RNA, 19 nt, Homo sapiens
  misc_RNA (1)...(19): siRNA sense strand
gaauuaaugcggccauauc

SEQ ID NO: 1017622 - RNA, 19 nt, Homo sapiens
  misc_RNA (1)...(19): siRNA sense strand
uaaagccucuugguguuau

SEQ ID NO: 1017623 - RNA, 19 nt, Homo sapiens
  misc_RNA (1)...(19): siRNA sense strand
ggaagaaaaccuacugaaa

SEQ ID NO: 1017624 - RNA, 19 nt, Homo sapiens
  misc_RNA (1)...(19): siRNA sense strand
acucaaaguuaaaggcaaa

SEQ ID NO: 1017625 - RNA, 19 nt, Homo sapiens
  misc_RNA (1)...(19): siRNA sense strand
aauaugaaguggauugaag

SEQ ID NO: 1017626 - RNA, 19 nt, Homo sapiens
  misc_RNA (1)...(19): siRNA sense strand
agaauggacuaaagauaag

SEQ ID NO: 1017627 - RNA, 19 nt, Homo sapiens
  misc_RNA (1)...(19): siRNA sense strand
ugagcacaaaugcaaauua

SEQ ID NO: 1017628 - RNA, 19 nt, Homo sapiens
  misc_RNA (1)...(19): siRNA sense strand
gcuagauguugauuauaca

SEQ ID NO: 1017629 - RNA, 19 nt, Homo sapiens
  misc_RNA (1)...(19): siRNA sense strand
gagaggauuaauagacgua

SEQ ID NO: 1017630 - RNA, 19 nt, Homo sapiens
  misc_RNA (1)...(19): siRNA sense strand
acaaauaugaaguggauug

SEQ ID NO: 1017631 - RNA, 19 nt, Homo sapiens
  misc_RNA (1)...(19): siRNA sense strand
gaguacaaaguggaaauuu

SEQ ID NO: 1017632 - RNA, 19 nt, Homo sapiens
  misc_RNA (1)...(19): siRNA sense strand
ggagauagcaaaauuagau

SEQ ID NO: 1017633 - RNA, 19 nt, Homo sapiens
  misc_RNA (1)...(19): siRNA sense strand
acagaauggacuaaagaua

SEQ ID NO: 1017634 - RNA, 19 nt, Homo sapiens
  misc_RNA (1)...(19): siRNA sense strand
acaccauuauguuugauga

SEQ ID NO: 1017635 - RNA, 19 nt, Homo sapiens
  misc_RNA (1)...(19): siRNA sense strand
uagaauuaaugcggccaua

SEQ ID NO: 1017636 - RNA, 19 nt, Homo sapiens
  misc_RNA (1)...(19): siRNA sense strand
ugaaagcgcaccuaaaucg

SEQ ID NO: 1017637 - RNA, 19 nt, Homo sapiens
  misc_RNA (1)...(19): siRNA sense strand
gggaaagauaucucucaaa

SEQ ID NO: 1017638 - RNA, 19 nt, Homo sapiens
  misc_RNA (1)...(19): siRNA sense strand
gaacccacagaauggacua

SEQ ID NO: 1017639 - RNA, 19 nt, Homo sapiens
  misc_RNA (1)...(19): siRNA sense strand
gcggccauaucuucaugaa

SEQ ID NO: 1017640 - RNA, 19 nt, Homo sapiens
  misc_RNA (1)...(19): siRNA sense strand
gugcugcuaugauaacagu

SEQ ID NO: 1017641 - RNA, 19 nt, Homo sapiens
  misc_RNA (1)...(19): siRNA sense strand
caagacccuuacaggaguu

SEQ ID NO: 1017642 - RNA, 19 nt, Homo sapiens
  misc_RNA (1)...(19): siRNA sense strand
caaauaugaaguggauuga

SEQ ID NO: 1017643 - RNA, 19 nt, Homo sapiens
  misc_RNA (1)...(19): siRNA sense strand
gaagaugaaguaguugaag

SEQ ID NO: 1017644 - RNA, 19 nt, Homo sapiens
  misc_RNA (1)...(19): siRNA sense strand
agaugaaguaguugaagua

SEQ ID NO: 1017645 - RNA, 19 nt, Homo sapiens
  misc_RNA (1)...(19): siRNA sense strand
ugggaaagauaucucucaa

SEQ ID NO: 1017646 - RNA, 19 nt, Homo sapiens
  misc_RNA (1)...(19): siRNA sense strand
uaaaggcaaaccugcagaa

SEQ ID NO: 1017647 - RNA, 19 nt, Homo sapiens
  misc_RNA (1)...(19): siRNA sense strand
uaacucaguaccucaagga

SEQ ID NO: 1017648 - RNA, 19 nt, Homo sapiens
  misc_RNA (1)...(19): siRNA sense strand
gcagagugaaagaguacaa

SEQ ID NO: 1017649 - RNA, 19 nt, Homo sapiens
  misc_RNA (1)...(19): siRNA sense strand
aagaugaaguaguugaagu

SEQ ID NO: 1017650 - RNA, 19 nt, Homo sapiens
  misc_RNA (1)...(19): siRNA sense strand
uuacuuucauguuggauag

SEQ ID NO: 1017651 - RNA, 19 nt, Homo sapiens
  misc_RNA (1)...(19): siRNA sense strand
gcucucaaacugaaaccaa

SEQ ID NO: 1017652 - RNA, 19 nt, Homo sapiens
  misc_RNA (1)...(19): siRNA sense strand
uaaugaacccacagaaugg

SEQ ID NO: 1017653 - RNA, 19 nt, Homo sapiens
  misc_RNA (1)...(19): siRNA sense strand
gagcugggagugagcacaa

SEQ ID NO: 1017654 - RNA, 19 nt, Homo sapiens
  misc_RNA (1)...(19): siRNA sense strand
guuauuuggucugcaacaa

SEQ ID NO: 1017655 - RNA, 19 nt, Homo sapiens
  misc_RNA (1)...(19): siRNA sense strand
uuaaugcggccauaucuuc

SEQ ID NO: 1017656 - RNA, 19 nt, Homo sapiens
  misc_RNA (1)...(19): siRNA sense strand
gaacucgugaggagagcuu

SEQ ID NO: 1017657 - RNA, 19 nt, Homo sapiens
  misc_RNA (1)...(19): siRNA sense strand
ggucugcaacaaauaugaa

SEQ ID NO: 1017658 - RNA, 19 nt, Homo sapiens
  misc_RNA (1)...(19): siRNA sense strand
gcgcaccuaaaucgugaua

SEQ ID NO: 1017659 - RNA, 19 nt, Homo sapiens
  misc_RNA (1)...(19): siRNA sense strand
ugacauagggagaaauuuu

SEQ ID NO: 1017660 - RNA, 19 nt, Homo sapiens
  misc_RNA (1)...(19): siRNA sense strand
auacugugcucgaucucaa

SEQ ID NO: 1017661 - RNA, 19 nt, Homo sapiens
  misc_RNA (1)...(19): siRNA sense strand
uccaaggagaggauuaaua

SEQ ID NO: 1017662 - RNA, 19 nt, Homo sapiens
  misc_RNA (1)...(19): siRNA sense strand
aggcaaaccugcagaaaau

SEQ ID NO: 1017663 - RNA, 19 nt, Homo sapiens
  misc_RNA (1)...(19): siRNA sense strand
cuugggagaugucuuaggu

SEQ ID NO: 1017664 - RNA, 19 nt, Homo sapiens
  misc_RNA (1)...(19): siRNA sense strand
caaggagauagcaaaauua

SEQ ID NO: 1017665 - RNA, 19 nt, Homo sapiens
  misc_RNA (1)...(19): siRNA sense strand
cucaguaccucaaggagau

SEQ ID NO: 1017666 - RNA, 19 nt, Homo sapiens
  misc_RNA (1)...(19): siRNA sense strand
uuggagcucucaaacugaa

SEQ ID NO: 1017667 - RNA, 19 nt, Homo sapiens
  misc_RNA (1)...(19): siRNA sense strand
ugaagaugaaguaguugaa

SEQ ID NO: 1017668 - RNA, 19 nt, Homo sapiens
  misc_RNA (1)...(19): siRNA sense strand
gcaaaccugcagaaaauga

SEQ ID NO: 1017669 - RNA, 19 nt, Homo sapiens
  misc_RNA (1)...(19): siRNA sense strand
gagugaaagaguacaaagu

SEQ ID NO: 1017670 - RNA, 19 nt, Homo sapiens
  misc_RNA (1)...(19): siRNA sense strand
gaaguaguugaaguagaaa

SEQ ID NO: 1017671 - RNA, 19 nt, Homo sapiens
  misc_RNA (1)...(19): siRNA sense strand
ugcuagauguugauuauac

SEQ ID NO: 1017672 - RNA, 19 nt, Homo sapiens
  misc_RNA (1)...(19): siRNA sense strand
ggcucucccuaucauugua

SEQ ID NO: 1017673 - RNA, 19 nt, Homo sapiens
  misc_RNA (1)...(19): siRNA sense strand
gaaagcgcaccuaaaucgu

SEQ ID NO: 1017674 - RNA, 19 nt, Homo sapiens
  misc_RNA (1)...(19): siRNA sense strand
caaggagaggauuaauaga

SEQ ID NO: 1017675 - RNA, 19 nt, Homo sapiens
  misc_RNA (1)...(19): siRNA sense strand
aaagccucuugguguuaua

SEQ ID NO: 1017676 - RNA, 19 nt, Homo sapiens
  misc_RNA (1)...(19): siRNA sense strand
gaugaaguaguugaaguag

SEQ ID NO: 1017677 - RNA, 19 nt, Homo sapiens
  misc_RNA (1)...(19): siRNA sense strand
aaagaagcaaggacaguag

SEQ ID NO: 1017678 - RNA, 19 nt, Homo sapiens
  misc_RNA (1)...(19): siRNA sense strand
ccuaaaucgugauaaagac

SEQ ID NO: 1017679 - RNA, 19 nt, Homo sapiens
  misc_RNA (1)...(19): siRNA sense strand
ggauugaagcuaaaaugaa

SEQ ID NO: 1017680 - RNA, 19 nt, Homo sapiens
  misc_RNA (1)...(19): siRNA sense strand
gcucucccuaucauuguaa

SEQ ID NO: 1017681 - RNA, 19 nt, Homo sapiens
  misc_RNA (1)...(19): siRNA sense strand
agugaaagaguacaaagug

SEQ ID NO: 1017682 - RNA, 19 nt, Homo sapiens
  misc_RNA (1)...(19): siRNA sense strand
caguuucucaagacccuua

SEQ ID NO: 1017683 - RNA, 19 nt, Homo sapiens
  misc_RNA (1)...(19): siRNA sense strand
ucuaaugaacccacagaau

SEQ ID NO: 1017684 - RNA, 19 nt, Homo sapiens
  misc_RNA (1)...(19): siRNA sense strand
aaaggcaaaccugcagaaa

SEQ ID NO: 1017685 - RNA, 19 nt, Homo sapiens
  misc_RNA (1)...(19): siRNA sense strand
ggacacagguuaugaagaa

SEQ ID NO: 1017686 - RNA, 19 nt, Homo sapiens
  misc_RNA (1)...(19): siRNA sense strand
guagagaguuugaagauca

SEQ ID NO: 1017687 - RNA, 19 nt, Homo sapiens
  misc_RNA (1)...(19): siRNA sense strand
gagcuaagaucauguagag

SEQ ID NO: 1017688 - RNA, 19 nt, Homo sapiens
  misc_RNA (1)...(19): siRNA sense strand
caagagccauugaauaugu

SEQ ID NO: 1017689 - RNA, 19 nt, Homo sapiens
  misc_RNA (1)...(19): siRNA sense strand
aaacuuuggugucugauuu

SEQ ID NO: 1017690 - RNA, 19 nt, Homo sapiens
  misc_RNA (1)...(19): siRNA sense strand
acagaaagaugcaagguau

SEQ ID NO: 1017691 - RNA, 19 nt, Homo sapiens
  misc_RNA (1)...(19): siRNA sense strand
caaggauucucaccucuga

SEQ ID NO: 1017692 - RNA, 19 nt, Homo sapiens
  misc_RNA (1)...(19): siRNA sense strand
ggaacaagaggcucagaaa

SEQ ID NO: 1017693 - RNA, 19 nt, Homo sapiens
  misc_RNA (1)...(19): siRNA sense strand
gcaagguauuccaguguga

SEQ ID NO: 1017694 - RNA, 19 nt, Homo sapiens
  misc_RNA (1)...(19): siRNA sense strand
gaguauguguuucgagaga

SEQ ID NO: 1017695 - RNA, 19 nt, Homo sapiens
  misc_RNA (1)...(19): siRNA sense strand
gaugggaccagaucauauu

SEQ ID NO: 1017696 - RNA, 19 nt, Homo sapiens
  misc_RNA (1)...(19): siRNA sense strand
gaagaagaggagaaacuga

SEQ ID NO: 1017697 - RNA, 19 nt, Homo sapiens
  misc_RNA (1)...(19): siRNA sense strand
agugugaucugacuaaaga

SEQ ID NO: 1017698 - RNA, 19 nt, Homo sapiens
  misc_RNA (1)...(19): siRNA sense strand
ccgaauaucuuugccuaug

SEQ ID NO: 1017699 - RNA, 19 nt, Homo sapiens
  misc_RNA (1)...(19): siRNA sense strand
gaucaaaaguuaacaaugc

SEQ ID NO: 1017700 - RNA, 19 nt, Homo sapiens
  misc_RNA (1)...(19): siRNA sense strand
uagaagaagauccgaauau

SEQ ID NO: 1017701 - RNA, 19 nt, Homo sapiens
  misc_RNA (1)...(19): siRNA sense strand
gaggagcuaagaucaugua

SEQ ID NO: 1017702 - RNA, 19 nt, Homo sapiens
  misc_RNA (1)...(19): siRNA sense strand
agaagaagauccgaauauc

SEQ ID NO: 1017703 - RNA, 19 nt, Homo sapiens
  misc_RNA (1)...(19): siRNA sense strand
aagaucauguagagaguuu

SEQ ID NO: 1017704 - RNA, 19 nt, Homo sapiens
  misc_RNA (1)...(19): siRNA sense strand
aagaagugguaaacgagua

SEQ ID NO: 1017705 - RNA, 19 nt, Homo sapiens
  misc_RNA (1)...(19): siRNA sense strand
uggcucagcucuuuaugga

SEQ ID NO: 1017706 - RNA, 19 nt, Homo sapiens
  misc_RNA (1)...(19): siRNA sense strand
uccaagagccauugaauau

SEQ ID NO: 1017707 - RNA, 19 nt, Homo sapiens
  misc_RNA (1)...(19): siRNA sense strand
gaucauguagagaguuuga

SEQ ID NO: 1017708 - RNA, 19 nt, Homo sapiens
  misc_RNA (1)...(19): siRNA sense strand
cagcagaaauuggaacaag

SEQ ID NO: 1017709 - RNA, 19 nt, Homo sapiens
  misc_RNA (1)...(19): siRNA sense strand
ggauguuguuauguugaua

SEQ ID NO: 1017710 - RNA, 19 nt, Homo sapiens
  misc_RNA (1)...(19): siRNA sense strand
uuaaacagcagaaauugga

SEQ ID NO: 1017711 - RNA, 19 nt, Homo sapiens
  misc_RNA (1)...(19): siRNA sense strand
gauaagaugcaccuugucu

SEQ ID NO: 1017712 - RNA, 19 nt, Homo sapiens
  misc_RNA (1)...(19): siRNA sense strand
gaacaagaggcucagaaaa

SEQ ID NO: 1017713 - RNA, 19 nt, Homo sapiens
  misc_RNA (1)...(19): siRNA sense strand
gcagcaaacuuggagaaaa

SEQ ID NO: 1017714 - RNA, 19 nt, Homo sapiens
  misc_RNA (1)...(19): siRNA sense strand
cugauaagaugcaccuugu

SEQ ID NO: 1017715 - RNA, 19 nt, Homo sapiens
  misc_RNA (1)...(19): siRNA sense strand
gcagaaauuggaacaagag

SEQ ID NO: 1017716 - RNA, 19 nt, Homo sapiens
  misc_RNA (1)...(19): siRNA sense strand
gaucauguaccgccagagu

SEQ ID NO: 1017717 - RNA, 19 nt, Homo sapiens
  misc_RNA (1)...(19): siRNA sense strand
guuuaaagccagcagcaaa

SEQ ID NO: 1017718 - RNA, 19 nt, Homo sapiens
  misc_RNA (1)...(19): siRNA sense strand
ccagugugaucugacuaaa

SEQ ID NO: 1017719 - RNA, 19 nt, Homo sapiens
  misc_RNA (1)...(19): siRNA sense strand
cagcuguucauccugauaa

SEQ ID NO: 1017720 - RNA, 19 nt, Homo sapiens
  misc_RNA (1)...(19): siRNA sense strand
guugauauuugugcuguca

SEQ ID NO: 1017721 - RNA, 19 nt, Homo sapiens
  misc_RNA (1)...(19): siRNA sense strand
gcaaaagugucuuguuucg

SEQ ID NO: 1017722 - RNA, 19 nt, Homo sapiens
  misc_RNA (1)...(19): siRNA sense strand
uucgagagacggugaauaa

SEQ ID NO: 1017723 - RNA, 19 nt, Homo sapiens
  misc_RNA (1)...(19): siRNA sense strand
cuuccuggcucagcucuuu

SEQ ID NO: 1017724 - RNA, 19 nt, Homo sapiens
  misc_RNA (1)...(19): siRNA sense strand
ggagcuaagaucauguaga

SEQ ID NO: 1017725 - RNA, 19 nt, Homo sapiens
  misc_RNA (1)...(19): siRNA sense strand
augaagaagugguaaacga

SEQ ID NO: 1017726 - RNA, 19 nt, Homo sapiens
  misc_RNA (1)...(19): siRNA sense strand
gacaagaugggaccagauc

SEQ ID NO: 1017727 - RNA, 19 nt, Homo sapiens
  misc_RNA (1)...(19): siRNA sense strand
aaagccagcagcaaacuug

SEQ ID NO: 1017728 - RNA, 19 nt, Homo sapiens
  misc_RNA (1)...(19): siRNA sense strand
aggcaaaagugucuuguuu

SEQ ID NO: 1017729 - RNA, 19 nt, Homo sapiens
  misc_RNA (1)...(19): siRNA sense strand
aagaagaggagaaacugaa

SEQ ID NO: 1017730 - RNA, 19 nt, Homo sapiens
  misc_RNA (1)...(19): siRNA sense strand
agaaagaugcaagguauuc

SEQ ID NO: 1017731 - RNA, 19 nt, Homo sapiens
  misc_RNA (1)...(19): siRNA sense strand
agaugcaccuugucuuaca

SEQ ID NO: 1017732 - RNA, 19 nt, Homo sapiens
  misc_RNA (1)...(19): siRNA sense strand
uugaggagcuaagaucaug

SEQ ID NO: 1017733 - RNA, 19 nt, Homo sapiens
  misc_RNA (1)...(19): siRNA sense strand
aagaugggaccagaucaua

SEQ ID NO: 1017734 - RNA, 19 nt, Homo sapiens
  misc_RNA (1)...(19): siRNA sense strand
guauuccagugugaucuga

SEQ ID NO: 1017735 - RNA, 19 nt, Homo sapiens
  misc_RNA (1)...(19): siRNA sense strand
cuaagaucauguagagagu

SEQ ID NO: 1017736 - RNA, 19 nt, Homo sapiens
  misc_RNA (1)...(19): siRNA sense strand
ggaccaccagagaguuuga

SEQ ID NO: 1017737 - RNA, 19 nt, Homo sapiens
  misc_RNA (1)...(19): siRNA sense strand
acuacggacuguaugauca

SEQ ID NO: 1017738 - RNA, 19 nt, Homo sapiens
  misc_RNA (1)...(19): siRNA sense strand
uacagaaagaugcaaggua

SEQ ID NO: 1017739 - RNA, 19 nt, Homo sapiens
  misc_RNA (1)...(19): siRNA sense strand
cgaauaucuuugccuaugc

SEQ ID NO: 1017740 - RNA, 19 nt, Homo sapiens
  misc_RNA (1)...(19): siRNA sense strand
agaagaggagaaacugaaa

SEQ ID NO: 1017741 - RNA, 19 nt, Homo sapiens
  misc_RNA (1)...(19): siRNA sense strand
uuagaagaagauccgaaua

SEQ ID NO: 1017742 - RNA, 19 nt, Homo sapiens
  misc_RNA (1)...(19): siRNA sense strand
cacagguuaugaagaagug

SEQ ID NO: 1017743 - RNA, 19 nt, Homo sapiens
  misc_RNA (1)...(19): siRNA sense strand
caagaugggaccagaucau

SEQ ID NO: 1017744 - RNA, 19 nt, Homo sapiens
  misc_RNA (1)...(19): siRNA sense strand
cagcagcaaacuuggagaa

SEQ ID NO: 1017745 - RNA, 19 nt, Homo sapiens
  misc_RNA (1)...(19): siRNA sense strand
cagagaguuugaggagcua

SEQ ID NO: 1017746 - RNA, 19 nt, Homo sapiens
  misc_RNA (1)...(19): siRNA sense strand
ccaagagccauugaauaug

SEQ ID NO: 1017747 - RNA, 19 nt, Homo sapiens
  misc_RNA (1)...(19): siRNA sense strand
cuccaagagccauugaaua

SEQ ID NO: 1017748 - RNA, 19 nt, Homo sapiens
  misc_RNA (1)...(19): siRNA sense strand
gucuguggauguuguuaug

SEQ ID NO: 1017749 - RNA, 19 nt, Homo sapiens
  misc_RNA (1)...(19): siRNA sense strand
cgagagacggugaauaaaa

SEQ ID NO: 1017750 - RNA, 19 nt, Homo sapiens
  misc_RNA (1)...(19): siRNA sense strand
gaagaggagaaacugaaaa

SEQ ID NO: 1017751 - RNA, 19 nt, Homo sapiens
  misc_RNA (1)...(19): siRNA sense strand
uguggauguuguuauguug

SEQ ID NO: 1017752 - RNA, 19 nt, Homo sapiens
  misc_RNA (1)...(19): siRNA sense strand
cuguggauguuguuauguu

SEQ ID NO: 1017753 - RNA, 19 nt, Homo sapiens
  misc_RNA (1)...(19): siRNA sense strand
ugaagaagaggagaaacug

SEQ ID NO: 1017754 - RNA, 19 nt, Homo sapiens
  misc_RNA (1)...(19): siRNA sense strand
guuaugaagaagugguaaa

SEQ ID NO: 1017755 - RNA, 19 nt, Homo sapiens
  misc_RNA (1)...(19): siRNA sense strand
agcagaaauuggaacaaga

SEQ ID NO: 1017756 - RNA, 19 nt, Homo sapiens
  misc_RNA (1)...(19): siRNA sense strand
cagaaagaugcaagguauu

SEQ ID NO: 1017757 - RNA, 19 nt, Homo sapiens
  misc_RNA (1)...(19): siRNA sense strand
aggagaaacugaaaagaga

SEQ ID NO: 1017758 - RNA, 19 nt, Homo sapiens
  misc_RNA (1)...(19): siRNA sense strand
aagagccauugaauauguu

SEQ ID NO: 1017759 - RNA, 19 nt, Homo sapiens
  misc_RNA (1)...(19): siRNA sense strand
uaaagccagcagcaaacuu

SEQ ID NO: 1017760 - RNA, 19 nt, Homo sapiens
  misc_RNA (1)...(19): siRNA sense strand
uauggacacagguuaugaa

SEQ ID NO: 1017761 - RNA, 19 nt, Homo sapiens
  misc_RNA (1)...(19): siRNA sense strand
uaaacagcagaaauuggaa

SEQ ID NO: 1017762 - RNA, 19 nt, Homo sapiens
  misc_RNA (1)...(19): siRNA sense strand
cagcuguucuuacugcuua

SEQ ID NO: 1017763 - RNA, 19 nt, Homo sapiens
  misc_RNA (1)...(19): siRNA sense strand
gcaugcccagcuguucuua

SEQ ID NO: 1017764 - RNA, 19 nt, Homo sapiens
  misc_RNA (1)...(19): siRNA sense strand
cccaagaacaaaccauuuc

SEQ ID NO: 1017765 - RNA, 19 nt, Homo sapiens
  misc_RNA (1)...(19): siRNA sense strand
gcacaucauuguccaagag

SEQ ID NO: 1017766 - RNA, 19 nt, Homo sapiens
  misc_RNA (1)...(19): siRNA sense strand
gagaagcaccugcacuuug

SEQ ID NO: 1017767 - RNA, 19 nt, Homo sapiens
  misc_RNA (1)...(19): siRNA sense strand
agaagcaccugcacuuugu

SEQ ID NO: 1017768 - RNA, 19 nt, Homo sapiens
  misc_RNA (1)...(19): siRNA sense strand
gcuggucuaugccaaggaa

SEQ ID NO: 1017769 - RNA, 19 nt, Homo sapiens
  misc_RNA (1)...(19): siRNA sense strand
cagccagcgucucucacua

SEQ ID NO: 1017770 - RNA, 19 nt, Homo sapiens
  misc_RNA (1)...(19): siRNA sense strand
cgagaagcaccugcacuuu

SEQ ID NO: 1017771 - RNA, 19 nt, Homo sapiens
  misc_RNA (1)...(19): siRNA sense strand
gggcgucaccguguucauu

SEQ ID NO: 1017772 - RNA, 19 nt, Homo sapiens
  misc_RNA (1)...(19): siRNA sense strand
ccgagaagcaccugcacuu

SEQ ID NO: 1017773 - RNA, 19 nt, Homo sapiens
  misc_RNA (1)...(19): siRNA sense strand
gcucagccagcgucucuca

SEQ ID NO: 1017774 - RNA, 19 nt, Homo sapiens
  misc_RNA (1)...(19): siRNA sense strand
ggaacgccacggacuggau

SEQ ID NO: 1017775 - RNA, 19 nt, Homo sapiens
  misc_RNA (1)...(19): siRNA sense strand
ggccagagcgcaucgucau

SEQ ID NO: 1017776 - RNA, 19 nt, Homo sapiens
  misc_RNA (1)...(19): siRNA sense strand
ggcgucaccguguucauug

SEQ ID NO: 1017777 - RNA, 19 nt, Homo sapiens
  misc_RNA (1)...(19): siRNA sense strand
gcacagacauggaacagua

SEQ ID NO: 1017778 - RNA, 19 nt, Homo sapiens
  misc_RNA (1)...(19): siRNA sense strand
gcacaggacagaaggaauu

SEQ ID NO: 1017779 - RNA, 19 nt, Homo sapiens
  misc_RNA (1)...(19): siRNA sense strand
gagcaugccuccagaacca

SEQ ID NO: 1017780 - RNA, 19 nt, Homo sapiens
  misc_RNA (1)...(19): siRNA sense strand
agaaagagauccuuaagcu

SEQ ID NO: 1017781 - RNA, 19 nt, Homo sapiens
  misc_RNA (1)...(19): siRNA sense strand
gcacgggcacucaucagua

SEQ ID NO: 1017782 - RNA, 19 nt, Homo sapiens
  misc_RNA (1)...(19): siRNA sense strand
gcaaguguguggcuaucga

SEQ ID NO: 1017783 - RNA, 19 nt, Homo sapiens
  misc_RNA (1)...(19): siRNA sense strand
cgacagccauggagcucua

SEQ ID NO: 1017784 - RNA, 19 nt, Homo sapiens
  misc_RNA (1)...(19): siRNA sense strand
ccaccuaugucccaaacuu

SEQ ID NO: 1017785 - RNA, 19 nt, Homo sapiens
  misc_RNA (1)...(19): siRNA sense strand
gcacucaucaguagaagau

SEQ ID NO: 1017786 - RNA, 19 nt, Homo sapiens
  misc_RNA (1)...(19): siRNA sense strand
ggaagaggcacaagagaag

SEQ ID NO: 1017787 - RNA, 19 nt, Homo sapiens
  misc_RNA (1)...(19): siRNA sense strand
gcuguuccauugugagcua

SEQ ID NO: 1017788 - RNA, 19 nt, Homo sapiens
  misc_RNA (1)...(19): siRNA sense strand
ccauggcgauguccucuau

SEQ ID NO: 1017789 - RNA, 19 nt, Homo sapiens
  misc_RNA (1)...(19): siRNA sense strand
gcccagaaagagauccuua

SEQ ID NO: 1017790 - RNA, 19 nt, Homo sapiens
  misc_RNA (1)...(19): siRNA sense strand
gagcuaccauggcgauguc

SEQ ID NO: 1017791 - RNA, 19 nt, Homo sapiens
  misc_RNA (1)...(19): siRNA sense strand
uccaggcgcucaaguaugu

SEQ ID NO: 1017792 - RNA, 19 nt, Homo sapiens
  misc_RNA (1)...(19): siRNA sense strand
gggcagcgacagcaacuga

SEQ ID NO: 1017793 - RNA, 19 nt, Homo sapiens
  misc_RNA (1)...(19): siRNA sense strand
cagcagcacagacauggaa

SEQ ID NO: 1017794 - RNA, 19 nt, Homo sapiens
  misc_RNA (1)...(19): siRNA sense strand
cggaagaggcacaagagaa

SEQ ID NO: 1017795 - RNA, 19 nt, Homo sapiens
  misc_RNA (1)...(19): siRNA sense strand
gacccgggauaccaccuau

SEQ ID NO: 1017796 - RNA, 19 nt, Homo sapiens
  misc_RNA (1)...(19): siRNA sense strand
ccagaaagagauccuuaag

SEQ ID NO: 1017797 - RNA, 19 nt, Homo sapiens
  misc_RNA (1)...(19): siRNA sense strand
cacgggcacucaucaguag

SEQ ID NO: 1017798 - RNA, 19 nt, Homo sapiens
  misc_RNA (1)...(19): siRNA sense strand
guguggcuaucgacuguga

SEQ ID NO: 1017799 - RNA, 19 nt, Homo sapiens
  misc_RNA (1)...(19): siRNA sense strand
cgacagcaccagcgguuca

SEQ ID NO: 1017800 - RNA, 19 nt, Homo sapiens
  misc_RNA (1)...(19): siRNA sense strand
guguguggcuaucgacugu

SEQ ID NO: 1017801 - RNA, 19 nt, Homo sapiens
  misc_RNA (1)...(19): siRNA sense strand
gcagugggaagcagugucu

SEQ ID NO: 1017802 - RNA, 19 nt, Homo sapiens
  misc_RNA (1)...(19): siRNA sense strand
ugacagcagcacagacaug

SEQ ID NO: 1017803 - RNA, 19 nt, Homo sapiens
  misc_RNA (1)...(19): siRNA sense strand
cagcaaguguguggcuauc

SEQ ID NO: 1017804 - RNA, 19 nt, Homo sapiens
  misc_RNA (1)...(19): siRNA sense strand
gcccgcuguuccauuguga

SEQ ID NO: 1017805 - RNA, 19 nt, Homo sapiens
  misc_RNA (1)...(19): siRNA sense strand
gaggacagagaaccugaca

SEQ ID NO: 1017806 - RNA, 19 nt, Homo sapiens
  misc_RNA (1)...(19): siRNA sense strand
gcagcgacagcaacugaag

SEQ ID NO: 1017807 - RNA, 19 nt, Homo sapiens
  misc_RNA (1)...(19): siRNA sense strand
cccagaaagagauccuuaa

SEQ ID NO: 1017808 - RNA, 19 nt, Homo sapiens
  misc_RNA (1)...(19): siRNA sense strand
auggcgauguccucuauga

SEQ ID NO: 1017809 - RNA, 19 nt, Homo sapiens
  misc_RNA (1)...(19): siRNA sense strand
ggcuaucgacugugagaug

SEQ ID NO: 1017810 - RNA, 19 nt, Homo sapiens
  misc_RNA (1)...(19): siRNA sense strand
gugauaaacugaacccuaa

SEQ ID NO: 1017811 - RNA, 19 nt, Homo sapiens
  misc_RNA (1)...(19): siRNA sense strand
ggucaaaggugcuccugaa

SEQ ID NO: 1017812 - RNA, 19 nt, Homo sapiens
  misc_RNA (1)...(19): siRNA sense strand
ggaagcaaauccucauugu

SEQ ID NO: 1017813 - RNA, 19 nt, Homo sapiens
  misc_RNA (1)...(19): siRNA sense strand
caaaggacaucaucaagca

SEQ ID NO: 1017814 - RNA, 19 nt, Homo sapiens
  misc_RNA (1)...(19): siRNA sense strand
ggaauguccuccugaaagu

SEQ ID NO: 1017815 - RNA, 19 nt, Homo sapiens
  misc_RNA (1)...(19): siRNA sense strand
gagcaacagguaacuauga

SEQ ID NO: 1017816 - RNA, 19 nt, Homo sapiens
  misc_RNA (1)...(19): siRNA sense strand
gaucaaaggacaucaucaa

SEQ ID NO: 1017817 - RNA, 19 nt, Homo sapiens
  misc_RNA (1)...(19): siRNA sense strand
cauccuagaccaagugaua

SEQ ID NO: 1017818 - RNA, 19 nt, Homo sapiens
  misc_RNA (1)...(19): siRNA sense strand
uugcagcuauuuacucuaa

SEQ ID NO: 1017819 - RNA, 19 nt, Homo sapiens
  misc_RNA (1)...(19): siRNA sense strand
ccaacauacugcuccauau

SEQ ID NO: 1017820 - RNA, 19 nt, Homo sapiens
  misc_RNA (1)...(19): siRNA sense strand
gcuauuccuuugcuaccua

SEQ ID NO: 1017821 - RNA, 19 nt, Homo sapiens
  misc_RNA (1)...(19): siRNA sense strand
gaugaugaaguguuugaaa

SEQ ID NO: 1017822 - RNA, 19 nt, Homo sapiens
  misc_RNA (1)...(19): siRNA sense strand
caacagguaacuaugauca

SEQ ID NO: 1017823 - RNA, 19 nt, Homo sapiens
  misc_RNA (1)...(19): siRNA sense strand
acgagugccuucugcauuu

SEQ ID NO: 1017824 - RNA, 19 nt, Homo sapiens
  misc_RNA (1)...(19): siRNA sense strand
acagguaacuaugaucaaa

SEQ ID NO: 1017825 - RNA, 19 nt, Homo sapiens
  misc_RNA (1)...(19): siRNA sense strand
aagcaaauccucauuguca

SEQ ID NO: 1017826 - RNA, 19 nt, Homo sapiens
  misc_RNA (1)...(19): siRNA sense strand
gagagacuaagcauccaua

SEQ ID NO: 1017827 - RNA, 19 nt, Homo sapiens
  misc_RNA (1)...(19): siRNA sense strand
cuaagcauccauacacuuu

SEQ ID NO: 1017828 - RNA, 19 nt, Homo sapiens
  misc_RNA (1)...(19): siRNA sense strand
gaugaaguguuugaaagag

SEQ ID NO: 1017829 - RNA, 19 nt, Homo sapiens
  misc_RNA (1)...(19): siRNA sense strand
ucagcuaagugucguuguu

SEQ ID NO: 1017830 - RNA, 19 nt, Homo sapiens
  misc_RNA (1)...(19): siRNA sense strand
gcaagaaaacuucauccua

SEQ ID NO: 1017831 - RNA, 19 nt, Homo sapiens
  misc_RNA (1)...(19): siRNA sense strand
gggaagcaaauccucauug

SEQ ID NO: 1017832 - RNA, 19 nt, Homo sapiens
  misc_RNA (1)...(19): siRNA sense strand
gggaauguccuccugaaag

SEQ ID NO: 1017833 - RNA, 19 nt, Homo sapiens
  misc_RNA (1)...(19): siRNA sense strand
ggaggguuuuagagaauua

SEQ ID NO: 1017834 - RNA, 19 nt, Homo sapiens
  misc_RNA (1)...(19): siRNA sense strand
aggcagcucugguccauuc

SEQ ID NO: 1017835 - RNA, 19 nt, Homo sapiens
  misc_RNA (1)...(19): siRNA sense strand
caucaagcacacaguuaaa

SEQ ID NO: 1017836 - RNA, 19 nt, Homo sapiens
  misc_RNA (1)...(19): siRNA sense strand
aggauugaaugcucuaguu

SEQ ID NO: 1017837 - RNA, 19 nt, Homo sapiens
  misc_RNA (1)...(19): siRNA sense strand
ccauucggaugaugaagug

SEQ ID NO: 1017838 - RNA, 19 nt, Homo sapiens
  misc_RNA (1)...(19): siRNA sense strand
ucaucaagcacacaguuaa

SEQ ID NO: 1017839 - RNA, 19 nt, Homo sapiens
  misc_RNA (1)...(19): siRNA sense strand
ucauuugauccacuucuua

SEQ ID NO: 1017840 - RNA, 19 nt, Homo sapiens
  misc_RNA (1)...(19): siRNA sense strand
ggagguauuccuugcagau

SEQ ID NO: 1017841 - RNA, 19 nt, Homo sapiens
  misc_RNA (1)...(19): siRNA sense strand
cuuacaagcgggagccuua

SEQ ID NO: 1017842 - RNA, 19 nt, Homo sapiens
  misc_RNA (1)...(19): siRNA sense strand
uaaacgaccaucugaagca

SEQ ID NO: 1017843 - RNA, 19 nt, Homo sapiens
  misc_RNA (1)...(19): siRNA sense strand
cagagcaacagguaacuau

SEQ ID NO: 1017844 - RNA, 19 nt, Homo sapiens
  misc_RNA (1)...(19): siRNA sense strand
gugggaauguccuccugaa

SEQ ID NO: 1017845 - RNA, 19 nt, Homo sapiens
  misc_RNA (1)...(19): siRNA sense strand
gguauuccuugcagauugg

SEQ ID NO: 1017846 - RNA, 19 nt, Homo sapiens
  misc_RNA (1)...(19): siRNA sense strand
gagaauuacuuuuggucaa

SEQ ID NO: 1017847 - RNA, 19 nt, Homo sapiens
  misc_RNA (1)...(19): siRNA sense strand
auugguacaugguucagua

SEQ ID NO: 1017848 - RNA, 19 nt, Homo sapiens
  misc_RNA (1)...(19): siRNA sense strand
gcaguucagggaagcaaau

SEQ ID NO: 1017849 - RNA, 19 nt, Homo sapiens
  misc_RNA (1)...(19): siRNA sense strand
guuguugguccuucucuaa

SEQ ID NO: 1017850 - RNA, 19 nt, Homo sapiens
  misc_RNA (1)...(19): siRNA sense strand
aaacugaacccuaaaacaa

SEQ ID NO: 1017851 - RNA, 19 nt, Homo sapiens
  misc_RNA (1)...(19): siRNA sense strand
gaagcaaauccucauuguc

SEQ ID NO: 1017852 - RNA, 19 nt, Homo sapiens
  misc_RNA (1)...(19): siRNA sense strand
gaccaagugauaaacugaa

SEQ ID NO: 1017853 - RNA, 19 nt, Homo sapiens
  misc_RNA (1)...(19): siRNA sense strand
gauccacuucuuauuacuu

SEQ ID NO: 1017854 - RNA, 19 nt, Homo sapiens
  misc_RNA (1)...(19): siRNA sense strand
aaacagagcaacagguaac

SEQ ID NO: 1017855 - RNA, 19 nt, Homo sapiens
  misc_RNA (1)...(19): siRNA sense strand
caucaucaagcacacaguu

SEQ ID NO: 1017856 - RNA, 19 nt, Homo sapiens
  misc_RNA (1)...(19): siRNA sense strand
ggauugaaugcucuaguuc

SEQ ID NO: 1017857 - RNA, 19 nt, Homo sapiens
  misc_RNA (1)...(19): siRNA sense strand
ugaugaaguguuugaaaga

SEQ ID NO: 1017858 - RNA, 19 nt, Homo sapiens
  misc_RNA (1)...(19): siRNA sense strand
caaaggaggguuuuagaga

SEQ ID NO: 1017859 - RNA, 19 nt, Homo sapiens
  misc_RNA (1)...(19): siRNA sense strand
ucaaccaguucuccagagu

SEQ ID NO: 1017860 - RNA, 19 nt, Homo sapiens
  misc_RNA (1)...(19): siRNA sense strand
aaaggcagcucugguccau

SEQ ID NO: 1017861 - RNA, 19 nt, Homo sapiens
  misc_RNA (1)...(19): siRNA sense strand
aaaggaggguuuuagagaa

SEQ ID NO: 1017862 - RNA, 19 nt, Homo sapiens
  misc_RNA (1)...(19): siRNA sense strand
gcugagggucugagagaga

SEQ ID NO: 1017863 - RNA, 19 nt, Homo sapiens
  misc_RNA (1)...(19): siRNA sense strand
uagcugagggucugagaga

SEQ ID NO: 1017864 - RNA, 19 nt, Homo sapiens
  misc_RNA (1)...(19): siRNA sense strand
gguacaugguucaguaaaa

SEQ ID NO: 1017865 - RNA, 19 nt, Homo sapiens
  misc_RNA (1)...(19): siRNA sense strand
uagaccaagugauaaacug

SEQ ID NO: 1017866 - RNA, 19 nt, Homo sapiens
  misc_RNA (1)...(19): siRNA sense strand
gagguauuccuugcagauu

SEQ ID NO: 1017867 - RNA, 19 nt, Homo sapiens
  misc_RNA (1)...(19): siRNA sense strand
cgagugccuucugcauuug

SEQ ID NO: 1017868 - RNA, 19 nt, Homo sapiens
  misc_RNA (1)...(19): siRNA sense strand
gcaaauccucauugucaac

SEQ ID NO: 1017869 - RNA, 19 nt, Homo sapiens
  misc_RNA (1)...(19): siRNA sense strand
gccuuagcaucaucaaauc

SEQ ID NO: 1017870 - RNA, 19 nt, Homo sapiens
  misc_RNA (1)...(19): siRNA sense strand
uagacugauuccugugcua

SEQ ID NO: 1017871 - RNA, 19 nt, Homo sapiens
  misc_RNA (1)...(19): siRNA sense strand
acacaggaaugcaguucag

SEQ ID NO: 1017872 - RNA, 19 nt, Homo sapiens
  misc_RNA (1)...(19): siRNA sense strand
gagagagacuaagcaucca

SEQ ID NO: 1017873 - RNA, 19 nt, Homo sapiens
  misc_RNA (1)...(19): siRNA sense strand
ucucuaaacgaccaucuga

SEQ ID NO: 1017874 - RNA, 19 nt, Homo sapiens
  misc_RNA (1)...(19): siRNA sense strand
gagacuaagcauccauaca

SEQ ID NO: 1017875 - RNA, 19 nt, Homo sapiens
  misc_RNA (1)...(19): siRNA sense strand
cauuugauccacuucuuau

SEQ ID NO: 1017876 - RNA, 19 nt, Homo sapiens
  misc_RNA (1)...(19): siRNA sense strand
uuugcuaccuagacugauu

SEQ ID NO: 1017877 - RNA, 19 nt, Homo sapiens
  misc_RNA (1)...(19): siRNA sense strand
gacuaagcauccauacacu

SEQ ID NO: 1017878 - RNA, 19 nt, Homo sapiens
  misc_RNA (1)...(19): siRNA sense strand
agguauuccuugcagauug

SEQ ID NO: 1017879 - RNA, 19 nt, Homo sapiens
  misc_RNA (1)...(19): siRNA sense strand
ggagguacacaguugaaaa

SEQ ID NO: 1017880 - RNA, 19 nt, Homo sapiens
  misc_RNA (1)...(19): siRNA sense strand
uccaacauacugcuccaua

SEQ ID NO: 1017881 - RNA, 19 nt, Homo sapiens
  misc_RNA (1)...(19): siRNA sense strand
agacuaagcauccauacac

SEQ ID NO: 1017882 - RNA, 19 nt, Homo sapiens
  misc_RNA (1)...(19): siRNA sense strand
ccacuucuuauuacuuuag

SEQ ID NO: 1017883 - RNA, 19 nt, Homo sapiens
  misc_RNA (1)...(19): siRNA sense strand
aaacuucauccuagaccaa

SEQ ID NO: 1017884 - RNA, 19 nt, Homo sapiens
  misc_RNA (1)...(19): siRNA sense strand
aaacgaccaucugaagcau

SEQ ID NO: 1017885 - RNA, 19 nt, Homo sapiens
  misc_RNA (1)...(19): siRNA sense strand
augaugaaguguuugaaag

SEQ ID NO: 1017886 - RNA, 19 nt, Homo sapiens
  misc_RNA (1)...(19): siRNA sense strand
gcucuggagguacacaguu

SEQ ID NO: 1017887 - RNA, 19 nt, Homo sapiens
  misc_RNA (1)...(19): siRNA sense strand
gauaaacugaacccuaaaa

SEQ ID NO: 1017888 - RNA, 19 nt, Homo sapiens
  misc_RNA (1)...(19): siRNA sense strand
cacgagugccuucugcauu

SEQ ID NO: 1017889 - RNA, 19 nt, Homo sapiens
  misc_RNA (1)...(19): siRNA sense strand
cuuagcaucaucaaaucua

SEQ ID NO: 1017890 - RNA, 19 nt, Homo sapiens
  misc_RNA (1)...(19): siRNA sense strand
ucuaaacgaccaucugaag

SEQ ID NO: 1017891 - RNA, 19 nt, Homo sapiens
  misc_RNA (1)...(19): siRNA sense strand
cagcuaagugucguuguug

SEQ ID NO: 1017892 - RNA, 19 nt, Homo sapiens
  misc_RNA (1)...(19): siRNA sense strand
agacugauuccugugcuaa

SEQ ID NO: 1017893 - RNA, 19 nt, Homo sapiens
  misc_RNA (1)...(19): siRNA sense strand
cagauuacagugggaaugu

SEQ ID NO: 1017894 - RNA, 19 nt, Homo sapiens
  misc_RNA (1)...(19): siRNA sense strand
uuugaaagaggauugaaug

SEQ ID NO: 1017895 - RNA, 19 nt, Homo sapiens
  misc_RNA (1)...(19): siRNA sense strand
agaccaagugauaaacuga

SEQ ID NO: 1017896 - RNA, 19 nt, Homo sapiens
  misc_RNA (1)...(19): siRNA sense strand
gagccuuagcaucaucaaa

SEQ ID NO: 1017897 - RNA, 19 nt, Homo sapiens
  misc_RNA (1)...(19): siRNA sense strand
cggaugaugaaguguuuga

SEQ ID NO: 1017898 - RNA, 19 nt, Homo sapiens
  misc_RNA (1)...(19): siRNA sense strand
gucaaaggugcuccugaaa

SEQ ID NO: 1017899 - RNA, 19 nt, Homo sapiens
  misc_RNA (1)...(19): siRNA sense strand
gauuccagcucaucacuag

SEQ ID NO: 1017900 - RNA, 19 nt, Homo sapiens
  misc_RNA (1)...(19): siRNA sense strand
cuggagaauuccuuuauug

SEQ ID NO: 1017901 - RNA, 19 nt, Homo sapiens
  misc_RNA (1)...(19): siRNA sense strand
gcugcagucuggcucuauu

SEQ ID NO: 1017902 - RNA, 19 nt, Homo sapiens
  misc_RNA (1)...(19): siRNA sense strand
ccuggagaauuccuuuauu

SEQ ID NO: 1017903 - RNA, 19 nt, Homo sapiens
  misc_RNA (1)...(19): siRNA sense strand
gcagaugcgcuucgaugga

SEQ ID NO: 1017904 - RNA, 19 nt, Homo sapiens
  misc_RNA (1)...(19): siRNA sense strand
cuaccuuccuggagaauuc

SEQ ID NO: 1017905 - RNA, 19 nt, Homo sapiens
  misc_RNA (1)...(19): siRNA sense strand
gcgcuacgccauacugaug

SEQ ID NO: 1017906 - RNA, 19 nt, Homo sapiens
  misc_RNA (1)...(19): siRNA sense strand
gcguggagcgcacugacua

SEQ ID NO: 1017907 - RNA, 19 nt, Homo sapiens
  misc_RNA (1)...(19): siRNA sense strand
uugaagcucuccaggacuu

SEQ ID NO: 1017908 - RNA, 19 nt, Homo sapiens
  misc_RNA (1)...(19): siRNA sense strand
gcagucuggcucuauuuca

SEQ ID NO: 1017909 - RNA, 19 nt, Homo sapiens
  misc_RNA (1)...(19): siRNA sense strand
uauuucaggccuuaagauu

SEQ ID NO: 1017910 - RNA, 19 nt, Homo sapiens
  misc_RNA (1)...(19): siRNA sense strand
cgggagcaguuacuugaag

SEQ ID NO: 1017911 - RNA, 19 nt, Homo sapiens
  misc_RNA (1)...(19): siRNA sense strand
ccugcgggaugguguagga

SEQ ID NO: 1017912 - RNA, 19 nt, Homo sapiens
  misc_RNA (1)...(19): siRNA sense strand
ggcucuauuucaggccuua

SEQ ID NO: 1017913 - RNA, 19 nt, Homo sapiens
  misc_RNA (1)...(19): siRNA sense strand
gaagaaguguuuacaucaa

SEQ ID NO: 1017914 - RNA, 19 nt, Homo sapiens
  misc_RNA (1)...(19): siRNA sense strand
gcaggaauauucagcuaaa

SEQ ID NO: 1017915 - RNA, 19 nt, Homo sapiens
  misc_RNA (1)...(19): siRNA sense strand
gagaagaaguguuuacauc

SEQ ID NO: 1017916 - RNA, 19 nt, Homo sapiens
  misc_RNA (1)...(19): siRNA sense strand
gaagaacuuugcaauuaug

SEQ ID NO: 1017917 - RNA, 19 nt, Homo sapiens
  misc_RNA (1)...(19): siRNA sense strand
gaaagagagugcaaugaag

SEQ ID NO: 1017918 - RNA, 19 nt, Homo sapiens
  misc_RNA (1)...(19): siRNA sense strand
uuacuuggcuacuaucuuu

SEQ ID NO: 1017919 - RNA, 19 nt, Homo sapiens
  misc_RNA (1)...(19): siRNA sense strand
cauagacgccuucuguaua

SEQ ID NO: 1017920 - RNA, 19 nt, Homo sapiens
  misc_RNA (1)...(19): siRNA sense strand
auagacgccuucuguauaa

SEQ ID NO: 1017921 - RNA, 19 nt, Homo sapiens
  misc_RNA (1)...(19): siRNA sense strand
uguggaggaugcaggauua

SEQ ID NO: 1017922 - RNA, 19 nt, Homo sapiens
  misc_RNA (1)...(19): siRNA sense strand
aggauuaccuucuuaugaa

SEQ ID NO: 1017923 - RNA, 19 nt, Homo sapiens
  misc_RNA (1)...(19): siRNA sense strand
gauuugaucuggagcucuu

SEQ ID NO: 1017924 - RNA, 19 nt, Homo sapiens
  misc_RNA (1)...(19): siRNA sense strand
gcacacucccuccaucauu

SEQ ID NO: 1017925 - RNA, 19 nt, Homo sapiens
  misc_RNA (1)...(19): siRNA sense strand
cacacucccuccaucauuu

SEQ ID NO: 1017926 - RNA, 19 nt, Homo sapiens
  misc_RNA (1)...(19): siRNA sense strand
agaaagagagugcaaugaa

SEQ ID NO: 1017927 - RNA, 19 nt, Homo sapiens
  misc_RNA (1)...(19): siRNA sense strand
caguggcgcugaccagaaa

SEQ ID NO: 1017928 - RNA, 19 nt, Homo sapiens
  misc_RNA (1)...(19): siRNA sense strand
ggaauauucagcuaaagga

SEQ ID NO: 1017929 - RNA, 19 nt, Homo sapiens
  misc_RNA (1)...(19): siRNA sense strand
ugaggaagccagagagauu

SEQ ID NO: 1017930 - RNA, 19 nt, Homo sapiens
  misc_RNA (1)...(19): siRNA sense strand
caacauccaugcucuucag

SEQ ID NO: 1017931 - RNA, 19 nt, Homo sapiens
  misc_RNA (1)...(19): siRNA sense strand
auuaauugcugcuggagua

SEQ ID NO: 1017932 - RNA, 19 nt, Homo sapiens
  misc_RNA (1)...(19): siRNA sense strand
gaugcaggauuaccuucuu

SEQ ID NO: 1017933 - RNA, 19 nt, Homo sapiens
  misc_RNA (1)...(19): siRNA sense strand
caggauuaccuucuuauga

SEQ ID NO: 1017934 - RNA, 19 nt, Homo sapiens
  misc_RNA (1)...(19): siRNA sense strand
gcuaaaggaccaaccacaa

SEQ ID NO: 1017935 - RNA, 19 nt, Homo sapiens
  misc_RNA (1)...(19): siRNA sense strand
gcucuucagccgucuauga

SEQ ID NO: 1017936 - RNA, 19 nt, Homo sapiens
  misc_RNA (1)...(19): siRNA sense strand
cuaaaggaccaaccacaaa

SEQ ID NO: 1017937 - RNA, 19 nt, Homo sapiens
  misc_RNA (1)...(19): siRNA sense strand
gauguuaugggccuucuga

SEQ ID NO: 1017938 - RNA, 19 nt, Homo sapiens
  misc_RNA (1)...(19): siRNA sense strand
gaggaagccagagagauuu

SEQ ID NO: 1017939 - RNA, 19 nt, Homo sapiens
  misc_RNA (1)...(19): siRNA sense strand
aaagagagugcaaugaaga

SEQ ID NO: 1017940 - RNA, 19 nt, Homo sapiens
  misc_RNA (1)...(19): siRNA sense strand
uggauuacuuggcuacuau

SEQ ID NO: 1017941 - RNA, 19 nt, Homo sapiens
  misc_RNA (1)...(19): siRNA sense strand
ggaugaagauaaaacgauu

SEQ ID NO: 1017942 - RNA, 19 nt, Homo sapiens
  misc_RNA (1)...(19): siRNA sense strand
auacauagacgccuucugu

SEQ ID NO: 1017943 - RNA, 19 nt, Homo sapiens
  misc_RNA (1)...(19): siRNA sense strand
agagugcaaugaagaacuu

SEQ ID NO: 1017944 - RNA, 19 nt, Homo sapiens
  misc_RNA (1)...(19): siRNA sense strand
ggagaagaaguguuuacau

SEQ ID NO: 1017945 - RNA, 19 nt, Homo sapiens
  misc_RNA (1)...(19): siRNA sense strand
ccuucugacuggauuaauu

SEQ ID NO: 1017946 - RNA, 19 nt, Homo sapiens
  misc_RNA (1)...(19): siRNA sense strand
aauugcugcuggaguauuu

SEQ ID NO: 1017947 - RNA, 19 nt, Homo sapiens
  misc_RNA (1)...(19): siRNA sense strand
aaaaucagauggcaacaga

SEQ ID NO: 1017948 - RNA, 19 nt, Homo sapiens
  misc_RNA (1)...(19): siRNA sense strand
cuaugucucucccaucuca

SEQ ID NO: 1017949 - RNA, 19 nt, Homo sapiens
  misc_RNA (1)...(19): siRNA sense strand
caaugaagaacuuugcaau

SEQ ID NO: 1017950 - RNA, 19 nt, Homo sapiens
  misc_RNA (1)...(19): siRNA sense strand
acaaaaggauuuaggguau

SEQ ID NO: 1017951 - RNA, 19 nt, Homo sapiens
  misc_RNA (1)...(19): siRNA sense strand
gcaguggcgcugaccagaa

SEQ ID NO: 1017952 - RNA, 19 nt, Homo sapiens
  misc_RNA (1)...(19): siRNA sense strand
uggcaggaauauucagcua

SEQ ID NO: 1017953 - RNA, 19 nt, Homo sapiens
  misc_RNA (1)...(19): siRNA sense strand
agacgccuucuguauaaua

SEQ ID NO: 1017954 - RNA, 19 nt, Homo sapiens
  misc_RNA (1)...(19): siRNA sense strand
gcaggauuaccuucuuaug

SEQ ID NO: 1017955 - RNA, 19 nt, Homo sapiens
  misc_RNA (1)...(19): siRNA sense strand
agaagaaguguuuacauca

SEQ ID NO: 1017956 - RNA, 19 nt, Homo sapiens
  misc_RNA (1)...(19): siRNA sense strand
augcaggauuaccuucuua

SEQ ID NO: 1017957 - RNA, 19 nt, Homo sapiens
  misc_RNA (1)...(19): siRNA sense strand
ggauuaccuucuuaugaac

SEQ ID NO: 1017958 - RNA, 19 nt, Homo sapiens
  misc_RNA (1)...(19): siRNA sense strand
ucagauggcaacagagaga

SEQ ID NO: 1017959 - RNA, 19 nt, Homo sapiens
  misc_RNA (1)...(19): siRNA sense strand
acauagacgccuucuguau

SEQ ID NO: 1017960 - RNA, 19 nt, Homo sapiens
  misc_RNA (1)...(19): siRNA sense strand
cuagaaagagagugcaaug

SEQ ID NO: 1017961 - RNA, 19 nt, Homo sapiens
  misc_RNA (1)...(19): siRNA sense strand
ccggcaaccuagaaagaga

SEQ ID NO: 1017962 - RNA, 19 nt, Homo sapiens
  misc_RNA (1)...(19): siRNA sense strand
caacagagagaaaauagau

SEQ ID NO: 1017963 - RNA, 19 nt, Homo sapiens
  misc_RNA (1)...(19): siRNA sense strand
gagguccaaaggcuucuaa

SEQ ID NO: 1017964 - RNA, 19 nt, Homo sapiens
  misc_RNA (1)...(19): siRNA sense strand
gacgccuucuguauaauag

SEQ ID NO: 1017965 - RNA, 19 nt, Homo sapiens
  misc_RNA (1)...(19): siRNA sense strand
aaucagauggcaacagaga

SEQ ID NO: 1017966 - RNA, 19 nt, Homo sapiens
  misc_RNA (1)...(19): siRNA sense strand
ggcaggaauauucagcuaa

SEQ ID NO: 1017967 - RNA, 19 nt, Homo sapiens
  misc_RNA (1)...(19): siRNA sense strand
caaaaggauuuaggguauu

SEQ ID NO: 1017968 - RNA, 19 nt, Homo sapiens
  misc_RNA (1)...(19): siRNA sense strand
gaggaugcaggauuaccuu

SEQ ID NO: 1017969 - RNA, 19 nt, Homo sapiens
  misc_RNA (1)...(19): siRNA sense strand
uaagcaugcgggagaagaa

SEQ ID NO: 1017970 - RNA, 19 nt, Homo sapiens
  misc_RNA (1)...(19): siRNA sense strand
uagaaagagagugcaauga

SEQ ID NO: 1017971 - RNA, 19 nt, Homo sapiens
  misc_RNA (1)...(19): siRNA sense strand
gcuacuaucuuuguaucac

SEQ ID NO: 1017972 - RNA, 19 nt, Homo sapiens
  misc_RNA (1)...(19): siRNA sense strand
gggagaagaaguguuuaca

SEQ ID NO: 1017973 - RNA, 19 nt, Homo sapiens
  misc_RNA (1)...(19): siRNA sense strand
gaagauaaaacgauugcau

SEQ ID NO: 1017974 - RNA, 19 nt, Homo sapiens
  misc_RNA (1)...(19): siRNA sense strand
uggcuacuaucuuuguauc

SEQ ID NO: 1017975 - RNA, 19 nt, Homo sapiens
  misc_RNA (1)...(19): siRNA sense strand
uaaaggaccaaccacaaaa

SEQ ID NO: 1017976 - RNA, 19 nt, Homo sapiens
  misc_RNA (1)...(19): siRNA sense strand
caaaagaagaagcaaacuu

SEQ ID NO: 1017977 - RNA, 19 nt, Homo sapiens
  misc_RNA (1)...(19): siRNA sense strand
uuggauuacuuggcuacua

SEQ ID NO: 1017978 - RNA, 19 nt, Homo sapiens
  misc_RNA (1)...(19): siRNA sense strand
cuucugacuggauuaauug

SEQ ID NO: 1017979 - RNA, 19 nt, Homo sapiens
  misc_RNA (1)...(19): siRNA sense strand
cgccuucuguauaauagau

SEQ ID NO: 1017980 - RNA, 19 nt, Homo sapiens
  misc_RNA (1)...(19): siRNA sense strand
gagcugcaguccaccuuua

SEQ ID NO: 1017981 - RNA, 19 nt, Homo sapiens
  misc_RNA (1)...(19): siRNA sense strand
ggagguggaugaggacuuu

SEQ ID NO: 1017982 - RNA, 19 nt, Homo sapiens
  misc_RNA (1)...(19): siRNA sense strand
ggaagcagaucaaggacau

SEQ ID NO: 1017983 - RNA, 19 nt, Homo sapiens
  misc_RNA (1)...(19): siRNA sense strand
ucaaggacauggagaagau

SEQ ID NO: 1017984 - RNA, 19 nt, Homo sapiens
  misc_RNA (1)...(19): siRNA sense strand
ccaggaagcagaucaagga

SEQ ID NO: 1017985 - RNA, 19 nt, Homo sapiens
  misc_RNA (1)...(19): siRNA sense strand
agaagauguucaagcagua

SEQ ID NO: 1017986 - RNA, 19 nt, Homo sapiens
  misc_RNA (1)...(19): siRNA sense strand
uggagaagauguucaagca

SEQ ID NO: 1017987 - RNA, 19 nt, Homo sapiens
  misc_RNA (1)...(19): siRNA sense strand
acaccgaguucaaggaguu

SEQ ID NO: 1017988 - RNA, 19 nt, Homo sapiens
  misc_RNA (1)...(19): siRNA sense strand
gcaguccaccuuuaaguag

SEQ ID NO: 1017989 - RNA, 19 nt, Homo sapiens
  misc_RNA (1)...(19): siRNA sense strand
gcggaaagcggccuucaag

SEQ ID NO: 1017990 - RNA, 19 nt, Homo sapiens
  misc_RNA (1)...(19): siRNA sense strand
gaagauguucaagcaguau

SEQ ID NO: 1017991 - RNA, 19 nt, Homo sapiens
  misc_RNA (1)...(19): siRNA sense strand
gaagcaggcggaggagaug

SEQ ID NO: 1017992 - RNA, 19 nt, Homo sapiens
  misc_RNA (1)...(19): siRNA sense strand
agaucgacgucuccaguga

SEQ ID NO: 1017993 - RNA, 19 nt, Homo sapiens
  misc_RNA (1)...(19): siRNA sense strand
gagcaggaggaaaggaaga

SEQ ID NO: 1017994 - RNA, 19 nt, Homo sapiens
  misc_RNA (1)...(19): siRNA sense strand
gagaugaagcagcggaaag

SEQ ID NO: 1017995 - RNA, 19 nt, Homo sapiens
  misc_RNA (1)...(19): siRNA sense strand
ggagaugaagcagcggaaa

SEQ ID NO: 1017996 - RNA, 19 nt, Homo sapiens
  misc_RNA (1)...(19): siRNA sense strand
ggagcugcaguccaccuuu

SEQ ID NO: 1017997 - RNA, 19 nt, Homo sapiens
  misc_RNA (1)...(19): siRNA sense strand
gaucaaggacauggagaag

SEQ ID NO: 1017998 - RNA, 19 nt, Homo sapiens
  misc_RNA (1)...(19): siRNA sense strand
cagagcaggaggaaaggaa

SEQ ID NO: 1017999 - RNA, 19 nt, Homo sapiens
  misc_RNA (1)...(19): siRNA sense strand
uaaaacucaugauggagaa

SEQ ID NO: 1018000 - RNA, 19 nt, Homo sapiens
  misc_RNA (1)...(19): siRNA sense strand
ugcaguccaccuuuaagua

SEQ ID NO: 1018001 - RNA, 19 nt, Homo sapiens
  misc_RNA (1)...(19): siRNA sense strand
ugaucaaggagguggauga

SEQ ID NO: 1018002 - RNA, 19 nt, Homo sapiens
  misc_RNA (1)...(19): siRNA sense strand
gaaggaaacacaacuguau

SEQ ID NO: 1018003 - RNA, 19 nt, Homo sapiens
  misc_RNA (1)...(19): siRNA sense strand
ucaguuggcuuuagcaauu

SEQ ID NO: 1018004 - RNA, 19 nt, Homo sapiens
  misc_RNA (1)...(19): siRNA sense strand
agaaagcucuggagacuug

SEQ ID NO: 1018005 - RNA, 19 nt, Homo sapiens
  misc_RNA (1)...(19): siRNA sense strand
gaaccaugaugcauuguca

SEQ ID NO: 1018006 - RNA, 19 nt, Homo sapiens
  misc_RNA (1)...(19): siRNA sense strand
gcucacgccuguaaaccua

SEQ ID NO: 1018007 - RNA, 19 nt, Homo sapiens
  misc_RNA (1)...(19): siRNA sense strand
caagaaagcucuggagacu

SEQ ID NO: 1018008 - RNA, 19 nt, Homo sapiens
  misc_RNA (1)...(19): siRNA sense strand
guggaucacuugaggguuu

SEQ ID NO: 1018009 - RNA, 19 nt, Homo sapiens
  misc_RNA (1)...(19): siRNA sense strand
ggaaggaaacacaacugua

SEQ ID NO: 1018010 - RNA, 19 nt, Homo sapiens
  misc_RNA (1)...(19): siRNA sense strand
gaaaacaggcuacuccuuu

SEQ ID NO: 1018011 - RNA, 19 nt, Homo sapiens
  misc_RNA (1)...(19): siRNA sense strand
gaucaacccucugcauaca

SEQ ID NO: 1018012 - RNA, 19 nt, Homo sapiens
  misc_RNA (1)...(19): siRNA sense strand
gaccaaagaaggccugauu

SEQ ID NO: 1018013 - RNA, 19 nt, Homo sapiens
  misc_RNA (1)...(19): siRNA sense strand
gcuacuccuuuguaaauug

SEQ ID NO: 1018014 - RNA, 19 nt, Homo sapiens
  misc_RNA (1)...(19): siRNA sense strand
uaguagagguaaacuguga

SEQ ID NO: 1018015 - RNA, 19 nt, Homo sapiens
  misc_RNA (1)...(19): siRNA sense strand
ucaaggaucaguuggcuuu

SEQ ID NO: 1018016 - RNA, 19 nt, Homo sapiens
  misc_RNA (1)...(19): siRNA sense strand
ugaagcagguggaucacuu

SEQ ID NO: 1018017 - RNA, 19 nt, Homo sapiens
  misc_RNA (1)...(19): siRNA sense strand
gaaacacaacuguauuagu

SEQ ID NO: 1018018 - RNA, 19 nt, Homo sapiens
  misc_RNA (1)...(19): siRNA sense strand
cagagucccucacuucaca

SEQ ID NO: 1018019 - RNA, 19 nt, Homo sapiens
  misc_RNA (1)...(19): siRNA sense strand
aggaaacacaacuguauua

SEQ ID NO: 1018020 - RNA, 19 nt, Homo sapiens
  misc_RNA (1)...(19): siRNA sense strand
gguucuacguuggcucuua

SEQ ID NO: 1018021 - RNA, 19 nt, Homo sapiens
  misc_RNA (1)...(19): siRNA sense strand
acacaacuguauuaguaga

SEQ ID NO: 1018022 - RNA, 19 nt, Homo sapiens
  misc_RNA (1)...(19): siRNA sense strand
gaaggagggcuggagcaaa

SEQ ID NO: 1018023 - RNA, 19 nt, Homo sapiens
  misc_RNA (1)...(19): siRNA sense strand
acaggcuacuccuuuguaa

SEQ ID NO: 1018024 - RNA, 19 nt, Homo sapiens
  misc_RNA (1)...(19): siRNA sense strand
guucuacguuggcucuuau

SEQ ID NO: 1018025 - RNA, 19 nt, Homo sapiens
  misc_RNA (1)...(19): siRNA sense strand
ggaaacacaacuguauuag

SEQ ID NO: 1018026 - RNA, 19 nt, Homo sapiens
  misc_RNA (1)...(19): siRNA sense strand
cagcugggccugacagaga

SEQ ID NO: 1018027 - RNA, 19 nt, Homo sapiens
  misc_RNA (1)...(19): siRNA sense strand
cuugaggguuucuugaauu

SEQ ID NO: 1018028 - RNA, 19 nt, Homo sapiens
  misc_RNA (1)...(19): siRNA sense strand
acaaggaggcccagaagga

SEQ ID NO: 1018029 - RNA, 19 nt, Homo sapiens
  misc_RNA (1)...(19): siRNA sense strand
ggagaggcagagacuaaga

SEQ ID NO: 1018030 - RNA, 19 nt, Homo sapiens
  misc_RNA (1)...(19): siRNA sense strand
gaauuccucugagcuuucu

SEQ ID NO: 1018031 - RNA, 19 nt, Homo sapiens
  misc_RNA (1)...(19): siRNA sense strand
gaagcagguggaucacuug

SEQ ID NO: 1018032 - RNA, 19 nt, Homo sapiens
  misc_RNA (1)...(19): siRNA sense strand
aaggagggcuggagcaaag

SEQ ID NO: 1018033 - RNA, 19 nt, Homo sapiens
  misc_RNA (1)...(19): siRNA sense strand
ccuguaaaccuagcacuuu

SEQ ID NO: 1018034 - RNA, 19 nt, Homo sapiens
  misc_RNA (1)...(19): siRNA sense strand
agaucuggcuccacaagga

SEQ ID NO: 1018035 - RNA, 19 nt, Homo sapiens
  misc_RNA (1)...(19): siRNA sense strand
cagagaaggcucacucaag

SEQ ID NO: 1018036 - RNA, 19 nt, Homo sapiens
  misc_RNA (1)...(19): siRNA sense strand
gucagacccuaaaggauca

SEQ ID NO: 1018037 - RNA, 19 nt, Homo sapiens
  misc_RNA (1)...(19): siRNA sense strand
ggaucaacccucugcauac

SEQ ID NO: 1018038 - RNA, 19 nt, Homo sapiens
  misc_RNA (1)...(19): siRNA sense strand
cuguaaaccuagcacuuug

SEQ ID NO: 1018039 - RNA, 19 nt, Homo sapiens
  misc_RNA (1)...(19): siRNA sense strand
uuggaaccaugaugcauug

SEQ ID NO: 1018040 - RNA, 19 nt, Homo sapiens
  misc_RNA (1)...(19): siRNA sense strand
ucaacccucugcauacagu

SEQ ID NO: 1018041 - RNA, 19 nt, Homo sapiens
  misc_RNA (1)...(19): siRNA sense strand
gagaaggcucacucaagga

SEQ ID NO: 1018042 - RNA, 19 nt, Homo sapiens
  misc_RNA (1)...(19): siRNA sense strand
gagaggcagagacuaagau

SEQ ID NO: 1018043 - RNA, 19 nt, Homo sapiens
  misc_RNA (1)...(19): siRNA sense strand
gggcccuggucaucuguga

SEQ ID NO: 1018044 - RNA, 19 nt, Homo sapiens
  misc_RNA (1)...(19): siRNA sense strand
agacagauuuuguuucuag

SEQ ID NO: 1018045 - RNA, 19 nt, Homo sapiens
  misc_RNA (1)...(19): siRNA sense strand
gaagaggcagcagaaacug

SEQ ID NO: 1018046 - RNA, 19 nt, Homo sapiens
  misc_RNA (1)...(19): siRNA sense strand
ugaagaggcagcagaaacu

SEQ ID NO: 1018047 - RNA, 19 nt, Homo sapiens
  misc_RNA (1)...(19): siRNA sense strand
aacaaaccuugaagacguu

SEQ ID NO: 1018048 - RNA, 19 nt, Homo sapiens
  misc_RNA (1)...(19): siRNA sense strand
aggaucaacccucugcaua

SEQ ID NO: 1018049 - RNA, 19 nt, Homo sapiens
  misc_RNA (1)...(19): siRNA sense strand
gaucaguuggcuuuagcaa

SEQ ID NO: 1018050 - RNA, 19 nt, Homo sapiens
  misc_RNA (1)...(19): siRNA sense strand
ccacaaggaggcccagaag

SEQ ID NO: 1018051 - RNA, 19 nt, Homo sapiens
  misc_RNA (1)...(19): siRNA sense strand
guuugaauguggagaaggu

SEQ ID NO: 1018052 - RNA, 19 nt, Homo sapiens
  misc_RNA (1)...(19): siRNA sense strand
gaaaacaaaccuugaagac

SEQ ID NO: 1018053 - RNA, 19 nt, Homo sapiens
  misc_RNA (1)...(19): siRNA sense strand
ggcuacuccuuuguaaauu

SEQ ID NO: 1018054 - RNA, 19 nt, Homo sapiens
  misc_RNA (1)...(19): siRNA sense strand
uugaauuccucugagcuuu

SEQ ID NO: 1018055 - RNA, 19 nt, Homo sapiens
  misc_RNA (1)...(19): siRNA sense strand
ucacuugaggguuucuuga

SEQ ID NO: 1018056 - RNA, 19 nt, Homo sapiens
  misc_RNA (1)...(19): siRNA sense strand
guagagguaaacugugaga

SEQ ID NO: 1018057 - RNA, 19 nt, Homo sapiens
  misc_RNA (1)...(19): siRNA sense strand
gcaggaaggaaacacaacu

SEQ ID NO: 1018058 - RNA, 19 nt, Homo sapiens
  misc_RNA (1)...(19): siRNA sense strand
aggcuacuccuuuguaaau

SEQ ID NO: 1018059 - RNA, 19 nt, Homo sapiens
  misc_RNA (1)...(19): siRNA sense strand
aaggcucacucaaggauca

SEQ ID NO: 1018060 - RNA, 19 nt, Homo sapiens
  misc_RNA (1)...(19): siRNA sense strand
ugagacagauuuuguuucu

SEQ ID NO: 1018061 - RNA, 19 nt, Homo sapiens
  misc_RNA (1)...(19): siRNA sense strand
gggugucgguaguagacuu

SEQ ID NO: 1018062 - RNA, 19 nt, Homo sapiens
  misc_RNA (1)...(19): siRNA sense strand
aaaacaggcuacuccuuug

SEQ ID NO: 1018063 - RNA, 19 nt, Homo sapiens
  misc_RNA (1)...(19): siRNA sense strand
caagggaggaagaccaaag

SEQ ID NO: 1018064 - RNA, 19 nt, Homo sapiens
  misc_RNA (1)...(19): siRNA sense strand
uugaggguuucuugaauuc

SEQ ID NO: 1018065 - RNA, 19 nt, Homo sapiens
  misc_RNA (1)...(19): siRNA sense strand
caaggaucaguuggcuuua

SEQ ID NO: 1018066 - RNA, 19 nt, Homo sapiens
  misc_RNA (1)...(19): siRNA sense strand
aaggaaacacaacuguauu

SEQ ID NO: 1018067 - RNA, 19 nt, Homo sapiens
  misc_RNA (1)...(19): siRNA sense strand
gggaggaagaccaaagaag

SEQ ID NO: 1018068 - RNA, 19 nt, Homo sapiens
  misc_RNA (1)...(19): siRNA sense strand
gaggguuucuugaauuccu

SEQ ID NO: 1018069 - RNA, 19 nt, Homo sapiens
  misc_RNA (1)...(19): siRNA sense strand
agagguaaacugugagaca

SEQ ID NO: 1018070 - RNA, 19 nt, Homo sapiens
  misc_RNA (1)...(19): siRNA sense strand
agaggcagcagaaacugaa

SEQ ID NO: 1018071 - RNA, 19 nt, Homo sapiens
  misc_RNA (1)...(19): siRNA sense strand
ggggagaggcagagacuaa

SEQ ID NO: 1018072 - RNA, 19 nt, Homo sapiens
  misc_RNA (1)...(19): siRNA sense strand
gcccuggucaucugugaga

SEQ ID NO: 1018073 - RNA, 19 nt, Homo sapiens
  misc_RNA (1)...(19): siRNA sense strand
aaacaggcuacuccuuugu

SEQ ID NO: 1018074 - RNA, 19 nt, Homo sapiens
  misc_RNA (1)...(19): siRNA sense strand
caguuggcuuuagcaauug

SEQ ID NO: 1018075 - RNA, 19 nt, Homo sapiens
  misc_RNA (1)...(19): siRNA sense strand
ccagccaaggcacacauuu

SEQ ID NO: 1018076 - RNA, 19 nt, Homo sapiens
  misc_RNA (1)...(19): siRNA sense strand
ggcugaagcagguggauca

SEQ ID NO: 1018077 - RNA, 19 nt, Homo sapiens
  misc_RNA (1)...(19): siRNA sense strand
gugaagaggcagcagaaac

SEQ ID NO: 1018078 - RNA, 19 nt, Homo sapiens
  misc_RNA (1)...(19): siRNA sense strand
ggugucgguaguagacuuu

SEQ ID NO: 1018079 - RNA, 19 nt, Homo sapiens
  misc_RNA (1)...(19): siRNA sense strand
gacagagaaggcucacuca

SEQ ID NO: 1018080 - RNA, 19 nt, Homo sapiens
  misc_RNA (1)...(19): siRNA sense strand
gaaacuaacuggugcauug

SEQ ID NO: 1018081 - RNA, 19 nt, Homo sapiens
  misc_RNA (1)...(19): siRNA sense strand
ugacugaaaugaaucgaua

SEQ ID NO: 1018082 - RNA, 19 nt, Homo sapiens
  misc_RNA (1)...(19): siRNA sense strand
gaaugaagguagaaucaga

SEQ ID NO: 1018083 - RNA, 19 nt, Homo sapiens
  misc_RNA (1)...(19): siRNA sense strand
gacaacagaugaaaggaaa

SEQ ID NO: 1018084 - RNA, 19 nt, Homo sapiens
  misc_RNA (1)...(19): siRNA sense strand
gagaagaugaugaugauuu

SEQ ID NO: 1018085 - RNA, 19 nt, Homo sapiens
  misc_RNA (1)...(19): siRNA sense strand
cacaugagcuuacccaaga

SEQ ID NO: 1018086 - RNA, 19 nt, Homo sapiens
  misc_RNA (1)...(19): siRNA sense strand
uuggaaaucuugcaacuaa

SEQ ID NO: 1018087 - RNA, 19 nt, Homo sapiens
  misc_RNA (1)...(19): siRNA sense strand
ggagagcuguccaccauca

SEQ ID NO: 1018088 - RNA, 19 nt, Homo sapiens
  misc_RNA (1)...(19): siRNA sense strand
gaagguagaaucagagaca

SEQ ID NO: 1018089 - RNA, 19 nt, Homo sapiens
  misc_RNA (1)...(19): siRNA sense strand
caagucuccucaucugaaa

SEQ ID NO: 1018090 - RNA, 19 nt, Homo sapiens
  misc_RNA (1)...(19): siRNA sense strand
caacuaaagcccggaauga

SEQ ID NO: 1018091 - RNA, 19 nt, Homo sapiens
  misc_RNA (1)...(19): siRNA sense strand
caucggcauuccaugauaa

SEQ ID NO: 1018092 - RNA, 19 nt, Homo sapiens
  misc_RNA (1)...(19): siRNA sense strand
ccauucaucugguuuggaa

SEQ ID NO: 1018093 - RNA, 19 nt, Homo sapiens
  misc_RNA (1)...(19): siRNA sense strand
aggaguggcugugggauua

SEQ ID NO: 1018094 - RNA, 19 nt, Homo sapiens
  misc_RNA (1)...(19): siRNA sense strand
ugacagcuccauguucuua

SEQ ID NO: 1018095 - RNA, 19 nt, Homo sapiens
  misc_RNA (1)...(19): siRNA sense strand
caacagaugaaaggaaauu

SEQ ID NO: 1018096 - RNA, 19 nt, Homo sapiens
  misc_RNA (1)...(19): siRNA sense strand
gaaauccugcuucccagaa

SEQ ID NO: 1018097 - RNA, 19 nt, Homo sapiens
  misc_RNA (1)...(19): siRNA sense strand
gaaauuugcaggucucucu

SEQ ID NO: 1018098 - RNA, 19 nt, Homo sapiens
  misc_RNA (1)...(19): siRNA sense strand
gaaaugcacaugagcuuac

SEQ ID NO: 1018099 - RNA, 19 nt, Homo sapiens
  misc_RNA (1)...(19): siRNA sense strand
agaugaagaaggacauuua

SEQ ID NO: 1018100 - RNA, 19 nt, Homo sapiens
  misc_RNA (1)...(19): siRNA sense strand
cuccucaucugaaauauug

SEQ ID NO: 1018101 - RNA, 19 nt, Homo sapiens
  misc_RNA (1)...(19): siRNA sense strand
gaaauauuggguuccauuc

SEQ ID NO: 1018102 - RNA, 19 nt, Homo sapiens
  misc_RNA (1)...(19): siRNA sense strand
ucacccaccuggaagaaau

SEQ ID NO: 1018103 - RNA, 19 nt, Homo sapiens
  misc_RNA (1)...(19): siRNA sense strand
ggaaaucuugcaacuaaag

SEQ ID NO: 1018104 - RNA, 19 nt, Homo sapiens
  misc_RNA (1)...(19): siRNA sense strand
ccaucggcauuccaugaua

SEQ ID NO: 1018105 - RNA, 19 nt, Homo sapiens
  misc_RNA (1)...(19): siRNA sense strand
uggagaagaugaugaugau

SEQ ID NO: 1018106 - RNA, 19 nt, Homo sapiens
  misc_RNA (1)...(19): siRNA sense strand
uagcagagcagcuuaucaa

SEQ ID NO: 1018107 - RNA, 19 nt, Homo sapiens
  misc_RNA (1)...(19): siRNA sense strand
gcugugggauuaugagaag

SEQ ID NO: 1018108 - RNA, 19 nt, Homo sapiens
  misc_RNA (1)...(19): siRNA sense strand
cgaaaugcacaugagcuua

SEQ ID NO: 1018109 - RNA, 19 nt, Homo sapiens
  misc_RNA (1)...(19): siRNA sense strand
uacccaagaugaagaagga

SEQ ID NO: 1018110 - RNA, 19 nt, Homo sapiens
  misc_RNA (1)...(19): siRNA sense strand
gcaacuaaagcccggaaug

SEQ ID NO: 1018111 - RNA, 19 nt, Homo sapiens
  misc_RNA (1)...(19): siRNA sense strand
ugaaauauuggguuccauu

SEQ ID NO: 1018112 - RNA, 19 nt, Homo sapiens
  misc_RNA (1)...(19): siRNA sense strand
ccucaagucuccucaucug

SEQ ID NO: 1018113 - RNA, 19 nt, Homo sapiens
  misc_RNA (1)...(19): siRNA sense strand
ugaagaaggacauuuacug

SEQ ID NO: 1018114 - RNA, 19 nt, Homo sapiens
  misc_RNA (1)...(19): siRNA sense strand
gacauuuacugggacgauu

SEQ ID NO: 1018115 - RNA, 19 nt, Homo sapiens
  misc_RNA (1)...(19): siRNA sense strand
caagugacagcuccauguu

SEQ ID NO: 1018116 - RNA, 19 nt, Homo sapiens
  misc_RNA (1)...(19): siRNA sense strand
ugggagagcuguccaccau

SEQ ID NO: 1018117 - RNA, 19 nt, Homo sapiens
  misc_RNA (1)...(19): siRNA sense strand
ucaagucuccucaucugaa

SEQ ID NO: 1018118 - RNA, 19 nt, Homo sapiens
  misc_RNA (1)...(19): siRNA sense strand
agacaguguugaucugcaa

SEQ ID NO: 1018119 - RNA, 19 nt, Homo sapiens
  misc_RNA (1)...(19): siRNA sense strand
ggcauuccaugauaagaag

SEQ ID NO: 1018120 - RNA, 19 nt, Homo sapiens
  misc_RNA (1)...(19): siRNA sense strand
ggauuccgcugguuuacac

SEQ ID NO: 1018121 - RNA, 19 nt, Homo sapiens
  misc_RNA (1)...(19): siRNA sense strand
caucugguuuggaaaucuu

SEQ ID NO: 1018122 - RNA, 19 nt, Homo sapiens
  misc_RNA (1)...(19): siRNA sense strand
gccagacaagcacuuuaua

SEQ ID NO: 1018123 - RNA, 19 nt, Homo sapiens
  misc_RNA (1)...(19): siRNA sense strand
gaugugcccucaagaaacc

SEQ ID NO: 1018124 - RNA, 19 nt, Homo sapiens
  misc_RNA (1)...(19): siRNA sense strand
uaucaacccuuuuggagaa

SEQ ID NO: 1018125 - RNA, 19 nt, Homo sapiens
  misc_RNA (1)...(19): siRNA sense strand
aauauuggguuccauucau

SEQ ID NO: 1018126 - RNA, 19 nt, Homo sapiens
  misc_RNA (1)...(19): siRNA sense strand
ccagacaagcacuuuauag

SEQ ID NO: 1018127 - RNA, 19 nt, Homo sapiens
  misc_RNA (1)...(19): siRNA sense strand
ggccaucggcauuccauga

SEQ ID NO: 1018128 - RNA, 19 nt, Homo sapiens
  misc_RNA (1)...(19): siRNA sense strand
gaggaguggcugugggauu

SEQ ID NO: 1018129 - RNA, 19 nt, Homo sapiens
  misc_RNA (1)...(19): siRNA sense strand
uaacuggugcauugacaga

SEQ ID NO: 1018130 - RNA, 19 nt, Homo sapiens
  misc_RNA (1)...(19): siRNA sense strand
acaggaggcagacaaguga

SEQ ID NO: 1018131 - RNA, 19 nt, Homo sapiens
  misc_RNA (1)...(19): siRNA sense strand
gcagccucuuauucgguua

SEQ ID NO: 1018132 - RNA, 19 nt, Homo sapiens
  misc_RNA (1)...(19): siRNA sense strand
gugcauugacagaaauuug

SEQ ID NO: 1018133 - RNA, 19 nt, Homo sapiens
  misc_RNA (1)...(19): siRNA sense strand
gagcuuacccaagaugaag

SEQ ID NO: 1018134 - RNA, 19 nt, Homo sapiens
  misc_RNA (1)...(19): siRNA sense strand
aagcauggccaucggcauu

SEQ ID NO: 1018135 - RNA, 19 nt, Homo sapiens
  misc_RNA (1)...(19): siRNA sense strand
gaugaagaaggacauuuac

SEQ ID NO: 1018136 - RNA, 19 nt, Homo sapiens
  misc_RNA (1)...(19): siRNA sense strand
gagaccagccagacaagca

SEQ ID NO: 1018137 - RNA, 19 nt, Homo sapiens
  misc_RNA (1)...(19): siRNA sense strand
agucuccucaucugaaaua

SEQ ID NO: 1018138 - RNA, 19 nt, Homo sapiens
  misc_RNA (1)...(19): siRNA sense strand
uggaugugcccucaagaaa

SEQ ID NO: 1018139 - RNA, 19 nt, Homo sapiens
  misc_RNA (1)...(19): siRNA sense strand
guuccugagugcccacgaa

SEQ ID NO: 1018140 - RNA, 19 nt, Homo sapiens
  misc_RNA (1)...(19): siRNA sense strand
cggcauuccaugauaagaa

SEQ ID NO: 1018141 - RNA, 19 nt, Homo sapiens
  misc_RNA (1)...(19): siRNA sense strand
uggaaaucuugcaacuaaa

SEQ ID NO: 1018142 - RNA, 19 nt, Homo sapiens
  misc_RNA (1)...(19): siRNA sense strand
cggaaugaagguagaauca

SEQ ID NO: 1018143 - RNA, 19 nt, Homo sapiens
  misc_RNA (1)...(19): siRNA sense strand
acuggugcauugacagaaa

SEQ ID NO: 1018144 - RNA, 19 nt, Homo sapiens
  misc_RNA (1)...(19): siRNA sense strand
caccucaagucuccucauc

SEQ ID NO: 1018145 - RNA, 19 nt, Homo sapiens
  misc_RNA (1)...(19): siRNA sense strand
cagccagacaagcacuuua

SEQ ID NO: 1018146 - RNA, 19 nt, Homo sapiens
  misc_RNA (1)...(19): siRNA sense strand
agugacagcuccauguucu

SEQ ID NO: 1018147 - RNA, 19 nt, Homo sapiens
  misc_RNA (1)...(19): siRNA sense strand
gcaggucucucuuuuagcu

SEQ ID NO: 1018148 - RNA, 19 nt, Homo sapiens
  misc_RNA (1)...(19): siRNA sense strand
ggaugugcccucaagaaac

SEQ ID NO: 1018149 - RNA, 19 nt, Homo sapiens
  misc_RNA (1)...(19): siRNA sense strand
gaguggcugugggauuaug

SEQ ID NO: 1018150 - RNA, 19 nt, Homo sapiens
  misc_RNA (1)...(19): siRNA sense strand
agaaucagagacaguguug

SEQ ID NO: 1018151 - RNA, 19 nt, Homo sapiens
  misc_RNA (1)...(19): siRNA sense strand
caagaugaagaaggacauu

SEQ ID NO: 1018152 - RNA, 19 nt, Homo sapiens
  misc_RNA (1)...(19): siRNA sense strand
aaacuaacuggugcauuga

SEQ ID NO: 1018153 - RNA, 19 nt, Homo sapiens
  misc_RNA (1)...(19): siRNA sense strand
cuacugcauacccucauuu

SEQ ID NO: 1018154 - RNA, 19 nt, Homo sapiens
  misc_RNA (1)...(19): siRNA sense strand
ggacauuuacugggacgau

SEQ ID NO: 1018155 - RNA, 19 nt, Homo sapiens
  misc_RNA (1)...(19): siRNA sense strand
ccagguagcagagcagcuu

SEQ ID NO: 1018156 - RNA, 19 nt, Homo sapiens
  misc_RNA (1)...(19): siRNA sense strand
acaagugacagcuccaugu

SEQ ID NO: 1018157 - RNA, 19 nt, Homo sapiens
  misc_RNA (1)...(19): siRNA sense strand
cugcauacccucauuucug

SEQ ID NO: 1018158 - RNA, 19 nt, Homo sapiens
  misc_RNA (1)...(19): siRNA sense strand
gcugcugacuacugcauac

SEQ ID NO: 1018159 - RNA, 19 nt, Homo sapiens
  misc_RNA (1)...(19): siRNA sense strand
ucagagacaguguugaucu

SEQ ID NO: 1018160 - RNA, 19 nt, Homo sapiens
  misc_RNA (1)...(19): siRNA sense strand
ggagaagaugaugaugauu

SEQ ID NO: 1018161 - RNA, 19 nt, Homo sapiens
  misc_RNA (1)...(19): siRNA sense strand
guuuggaaaucuugcaacu

SEQ ID NO: 1018162 - RNA, 19 nt, Homo sapiens
  misc_RNA (1)...(19): siRNA sense strand
guugggauuccgcugguuu

SEQ ID NO: 1018163 - RNA, 19 nt, Homo sapiens
  misc_RNA (1)...(19): siRNA sense strand
gaacgaccauggagcagaa

SEQ ID NO: 1018164 - RNA, 19 nt, Homo sapiens
  misc_RNA (1)...(19): siRNA sense strand
auacuuagcuagguucuua

SEQ ID NO: 1018165 - RNA, 19 nt, Homo sapiens
  misc_RNA (1)...(19): siRNA sense strand
ucaaggaaguuguucaaga

SEQ ID NO: 1018166 - RNA, 19 nt, Homo sapiens
  misc_RNA (1)...(19): siRNA sense strand
uuacauguccuuccacuuu

SEQ ID NO: 1018167 - RNA, 19 nt, Homo sapiens
  misc_RNA (1)...(19): siRNA sense strand
gagcagaagagcacagcua

SEQ ID NO: 1018168 - RNA, 19 nt, Homo sapiens
  misc_RNA (1)...(19): siRNA sense strand
caaggaaguuguucaagac

SEQ ID NO: 1018169 - RNA, 19 nt, Homo sapiens
  misc_RNA (1)...(19): siRNA sense strand
gccaggaucucaaggaagu

SEQ ID NO: 1018170 - RNA, 19 nt, Homo sapiens
  misc_RNA (1)...(19): siRNA sense strand
guccaacucuguaucuaga

SEQ ID NO: 1018171 - RNA, 19 nt, Homo sapiens
  misc_RNA (1)...(19): siRNA sense strand
ggcaauacuuagcuagguu

SEQ ID NO: 1018172 - RNA, 19 nt, Homo sapiens
  misc_RNA (1)...(19): siRNA sense strand
gcgauuacauguccuucca

SEQ ID NO: 1018173 - RNA, 19 nt, Homo sapiens
  misc_RNA (1)...(19): siRNA sense strand
cagaagagcacagcuagug

SEQ ID NO: 1018174 - RNA, 19 nt, Homo sapiens
  misc_RNA (1)...(19): siRNA sense strand
gugaggcaauacuuagcua

SEQ ID NO: 1018175 - RNA, 19 nt, Homo sapiens
  misc_RNA (1)...(19): siRNA sense strand
cgguaaaccugcagaaagg

SEQ ID NO: 1018176 - RNA, 19 nt, Homo sapiens
  misc_RNA (1)...(19): siRNA sense strand
ccaggagagccaccacuuu

SEQ ID NO: 1018177 - RNA, 19 nt, Homo sapiens
  misc_RNA (1)...(19): siRNA sense strand
uucaagacccgaacaguuu

SEQ ID NO: 1018178 - RNA, 19 nt, Homo sapiens
  misc_RNA (1)...(19): siRNA sense strand
gagauccucaggcgccuaa

SEQ ID NO: 1018179 - RNA, 19 nt, Homo sapiens
  misc_RNA (1)...(19): siRNA sense strand
gcgguaaaccugcagaaag

SEQ ID NO: 1018180 - RNA, 19 nt, Homo sapiens
  misc_RNA (1)...(19): siRNA sense strand
caggagagccaccacuuuc

SEQ ID NO: 1018181 - RNA, 19 nt, Homo sapiens
  misc_RNA (1)...(19): siRNA sense strand
gcuacuggaccgcuucuug

SEQ ID NO: 1018182 - RNA, 19 nt, Homo sapiens
  misc_RNA (1)...(19): siRNA sense strand
uacauguccuuccacuuug

SEQ ID NO: 1018183 - RNA, 19 nt, Homo sapiens
  misc_RNA (1)...(19): siRNA sense strand
gaacaguuuugcugaguac

SEQ ID NO: 1018184 - RNA, 19 nt, Homo sapiens
  misc_RNA (1)...(19): siRNA sense strand
ccacaccugucccuagacu

SEQ ID NO: 1018185 - RNA, 19 nt, Homo sapiens
  misc_RNA (1)...(19): siRNA sense strand
ccaacucuguaucuagaag

SEQ ID NO: 1018186 - RNA, 19 nt, Homo sapiens
  misc_RNA (1)...(19): siRNA sense strand
ucugggcagccgccaauua

SEQ ID NO: 1018187 - RNA, 19 nt, Homo sapiens
  misc_RNA (1)...(19): siRNA sense strand
caagccugguccuguggaa

SEQ ID NO: 1018188 - RNA, 19 nt, Homo sapiens
  misc_RNA (1)...(19): siRNA sense strand
gacccaggcaccuuugaug

SEQ ID NO: 1018189 - RNA, 19 nt, Homo sapiens
  misc_RNA (1)...(19): siRNA sense strand
cugcccaguucuacaugua

SEQ ID NO: 1018190 - RNA, 19 nt, Homo sapiens
  misc_RNA (1)...(19): siRNA sense strand
acauguccuuccacuuuga

SEQ ID NO: 1018191 - RNA, 19 nt, Homo sapiens
  misc_RNA (1)...(19): siRNA sense strand
gcacuaucaggacaacauc

SEQ ID NO: 1018192 - RNA, 19 nt, Homo sapiens
  misc_RNA (1)...(19): siRNA sense strand
gaaaacagaggaggagguu

SEQ ID NO: 1018193 - RNA, 19 nt, Homo sapiens
  misc_RNA (1)...(19): siRNA sense strand
ggguccaacucuguaucua

SEQ ID NO: 1018194 - RNA, 19 nt, Homo sapiens
  misc_RNA (1)...(19): siRNA sense strand
cugccaggaucucaaggaa

SEQ ID NO: 1018195 - RNA, 19 nt, Homo sapiens
  misc_RNA (1)...(19): siRNA sense strand
gcucagacccaggcaccuu

SEQ ID NO: 1018196 - RNA, 19 nt, Homo sapiens
  misc_RNA (1)...(19): siRNA sense strand
gggcagccgccaauuaugc

SEQ ID NO: 1018197 - RNA, 19 nt, Homo sapiens
  misc_RNA (1)...(19): siRNA sense strand
uguggugaggcaauacuua

SEQ ID NO: 1018198 - RNA, 19 nt, Homo sapiens
  misc_RNA (1)...(19): siRNA sense strand
cagcugggcgauuacaugu

SEQ ID NO: 1018199 - RNA, 19 nt, Homo sapiens
  misc_RNA (1)...(19): siRNA sense strand
ccagcugggcgauuacaug

SEQ ID NO: 1018200 - RNA, 19 nt, Homo sapiens
  misc_RNA (1)...(19): siRNA sense strand
gcagaagagcacagcuagu

SEQ ID NO: 1018201 - RNA, 19 nt, Homo sapiens
  misc_RNA (1)...(19): siRNA sense strand
gguccaacucuguaucuag

SEQ ID NO: 1018202 - RNA, 19 nt, Homo sapiens
  misc_RNA (1)...(19): siRNA sense strand
cauggcagcagauggacaa

SEQ ID NO: 1018203 - RNA, 19 nt, Homo sapiens
  misc_RNA (1)...(19): siRNA sense strand
cgaacaguuuugcugagua

SEQ ID NO: 1018204 - RNA, 19 nt, Homo sapiens
  misc_RNA (1)...(19): siRNA sense strand
gaaagguucuggagauaua

SEQ ID NO: 1018205 - RNA, 19 nt, Homo sapiens
  misc_RNA (1)...(19): siRNA sense strand
gaagaaggcuaaacaaagg

SEQ ID NO: 1018206 - RNA, 19 nt, Homo sapiens
  misc_RNA (1)...(19): siRNA sense strand
ggaaucagcuuagucaaug

SEQ ID NO: 1018207 - RNA, 19 nt, Homo sapiens
  misc_RNA (1)...(19): siRNA sense strand
gagaagagcugacuuuuga

SEQ ID NO: 1018208 - RNA, 19 nt, Homo sapiens
  misc_RNA (1)...(19): siRNA sense strand
gcaaagcaauaacuccaaa

SEQ ID NO: 1018209 - RNA, 19 nt, Homo sapiens
  misc_RNA (1)...(19): siRNA sense strand
gaacucaacagaagaaaga

SEQ ID NO: 1018210 - RNA, 19 nt, Homo sapiens
  misc_RNA (1)...(19): siRNA sense strand
ggaauauguuggagaggua

SEQ ID NO: 1018211 - RNA, 19 nt, Homo sapiens
  misc_RNA (1)...(19): siRNA sense strand
gaagcuaccuuugguuguu

SEQ ID NO: 1018212 - RNA, 19 nt, Homo sapiens
  misc_RNA (1)...(19): siRNA sense strand
uaaagacccuugugaagau

SEQ ID NO: 1018213 - RNA, 19 nt, Homo sapiens
  misc_RNA (1)...(19): siRNA sense strand
gaagaaagaaucauaaagg

SEQ ID NO: 1018214 - RNA, 19 nt, Homo sapiens
  misc_RNA (1)...(19): siRNA sense strand
gcaauucucuaaugacaag

SEQ ID NO: 1018215 - RNA, 19 nt, Homo sapiens
  misc_RNA (1)...(19): siRNA sense strand
aaagaaaggcaaagcaaua

SEQ ID NO: 1018216 - RNA, 19 nt, Homo sapiens
  misc_RNA (1)...(19): siRNA sense strand
acagauugcuucuuucaaa

SEQ ID NO: 1018217 - RNA, 19 nt, Homo sapiens
  misc_RNA (1)...(19): siRNA sense strand
ggaaucacguaucucuuug

SEQ ID NO: 1018218 - RNA, 19 nt, Homo sapiens
  misc_RNA (1)...(19): siRNA sense strand
ucacguaucucuuugaucu

SEQ ID NO: 1018219 - RNA, 19 nt, Homo sapiens
  misc_RNA (1)...(19): siRNA sense strand
gggaaucacguaucucuuu

SEQ ID NO: 1018220 - RNA, 19 nt, Homo sapiens
  misc_RNA (1)...(19): siRNA sense strand
guaaagacccuugugaaga

SEQ ID NO: 1018221 - RNA, 19 nt, Homo sapiens
  misc_RNA (1)...(19): siRNA sense strand
ggucagaacaguauguaaa

SEQ ID NO: 1018222 - RNA, 19 nt, Homo sapiens
  misc_RNA (1)...(19): siRNA sense strand
gaggacaguucuaugacaa

SEQ ID NO: 1018223 - RNA, 19 nt, Homo sapiens
  misc_RNA (1)...(19): siRNA sense strand
cauaaaugcuggagaagag

SEQ ID NO: 1018224 - RNA, 19 nt, Homo sapiens
  misc_RNA (1)...(19): siRNA sense strand
uggaaaggauggccagauu

SEQ ID NO: 1018225 - RNA, 19 nt, Homo sapiens
  misc_RNA (1)...(19): siRNA sense strand
cuucagguguucaauguuu

SEQ ID NO: 1018226 - RNA, 19 nt, Homo sapiens
  misc_RNA (1)...(19): siRNA sense strand
ucuuugaucuggacuauga

SEQ ID NO: 1018227 - RNA, 19 nt, Homo sapiens
  misc_RNA (1)...(19): siRNA sense strand
gcacagauugcuucuuuca

SEQ ID NO: 1018228 - RNA, 19 nt, Homo sapiens
  misc_RNA (1)...(19): siRNA sense strand
gcagagauggcaagaugaa

SEQ ID NO: 1018229 - RNA, 19 nt, Homo sapiens
  misc_RNA (1)...(19): siRNA sense strand
guacucccaucuaugaaug

SEQ ID NO: 1018230 - RNA, 19 nt, Homo sapiens
  misc_RNA (1)...(19): siRNA sense strand
caagaugaacucaacagaa

SEQ ID NO: 1018231 - RNA, 19 nt, Homo sapiens
  misc_RNA (1)...(19): siRNA sense strand
ggacguggcugggguguaa

SEQ ID NO: 1018232 - RNA, 19 nt, Homo sapiens
  misc_RNA (1)...(19): siRNA sense strand
caaugaagcuaccuuuggu

SEQ ID NO: 1018233 - RNA, 19 nt, Homo sapiens
  misc_RNA (1)...(19): siRNA sense strand
gaaucagcuuagucaauga

SEQ ID NO: 1018234 - RNA, 19 nt, Homo sapiens
  misc_RNA (1)...(19): siRNA sense strand
cagcaauucucuaaugaca

SEQ ID NO: 1018235 - RNA, 19 nt, Homo sapiens
  misc_RNA (1)...(19): siRNA sense strand
gcacacaguauucgcuuug

SEQ ID NO: 1018236 - RNA, 19 nt, Homo sapiens
  misc_RNA (1)...(19): siRNA sense strand
cugcagagauggcaagaug

SEQ ID NO: 1018237 - RNA, 19 nt, Homo sapiens
  misc_RNA (1)...(19): siRNA sense strand
guaaagaaaggcaaagcaa

SEQ ID NO: 1018238 - RNA, 19 nt, Homo sapiens
  misc_RNA (1)...(19): siRNA sense strand
cugaguacauugugaagaa

SEQ ID NO: 1018239 - RNA, 19 nt, Homo sapiens
  misc_RNA (1)...(19): siRNA sense strand
cuaugagucugaugaauuc

SEQ ID NO: 1018240 - RNA, 19 nt, Homo sapiens
  misc_RNA (1)...(19): siRNA sense strand
augcacagauugcuucuuu

SEQ ID NO: 1018241 - RNA, 19 nt, Homo sapiens
  misc_RNA (1)...(19): siRNA sense strand
aagaugaacucaacagaag

SEQ ID NO: 1018242 - RNA, 19 nt, Homo sapiens
  misc_RNA (1)...(19): siRNA sense strand
gaaaggauggccagauucu

SEQ ID NO: 1018243 - RNA, 19 nt, Homo sapiens
  misc_RNA (1)...(19): siRNA sense strand
ggacaguucuaugacaaca

SEQ ID NO: 1018244 - RNA, 19 nt, Homo sapiens
  misc_RNA (1)...(19): siRNA sense strand
gacgaggacaguucuauga

SEQ ID NO: 1018245 - RNA, 19 nt, Homo sapiens
  misc_RNA (1)...(19): siRNA sense strand
aaugaaagguucuggagau

SEQ ID NO: 1018246 - RNA, 19 nt, Homo sapiens
  misc_RNA (1)...(19): siRNA sense strand
aaccauaaaugcuggagaa

SEQ ID NO: 1018247 - RNA, 19 nt, Homo sapiens
  misc_RNA (1)...(19): siRNA sense strand
cuucagcaauucucuaaug

SEQ ID NO: 1018248 - RNA, 19 nt, Homo sapiens
  misc_RNA (1)...(19): siRNA sense strand
gaugaacucaacagaagaa

SEQ ID NO: 1018249 - RNA, 19 nt, Homo sapiens
  misc_RNA (1)...(19): siRNA sense strand
gugaagaaggcuaaacaaa

SEQ ID NO: 1018250 - RNA, 19 nt, Homo sapiens
  misc_RNA (1)...(19): siRNA sense strand
ugaagaaggcuaaacaaag

SEQ ID NO: 1018251 - RNA, 19 nt, Homo sapiens
  misc_RNA (1)...(19): siRNA sense strand
gaagugcccguuacugcuu

SEQ ID NO: 1018252 - RNA, 19 nt, Homo sapiens
  misc_RNA (1)...(19): siRNA sense strand
gggcccaccuucagacuuc

SEQ ID NO: 1018253 - RNA, 19 nt, Homo sapiens
  misc_RNA (1)...(19): siRNA sense strand
gaaaggcaaagcaauaacu

SEQ ID NO: 1018254 - RNA, 19 nt, Homo sapiens
  misc_RNA (1)...(19): siRNA sense strand
caccuucagacuucuauua

SEQ ID NO: 1018255 - RNA, 19 nt, Homo sapiens
  misc_RNA (1)...(19): siRNA sense strand
gcaagaugaacucaacaga

SEQ ID NO: 1018256 - RNA, 19 nt, Homo sapiens
  misc_RNA (1)...(19): siRNA sense strand
ggagagguaaucacaagug

SEQ ID NO: 1018257 - RNA, 19 nt, Homo sapiens
  misc_RNA (1)...(19): siRNA sense strand
gcugugacuugcagagguu

SEQ ID NO: 1018258 - RNA, 19 nt, Homo sapiens
  misc_RNA (1)...(19): siRNA sense strand
caacaagggaaucacguau

SEQ ID NO: 1018259 - RNA, 19 nt, Homo sapiens
  misc_RNA (1)...(19): siRNA sense strand
guauucgcuuugcaucuuu

SEQ ID NO: 1018260 - RNA, 19 nt, Homo sapiens
  misc_RNA (1)...(19): siRNA sense strand
gaaagacgaggacaguucu

SEQ ID NO: 1018261 - RNA, 19 nt, Homo sapiens
  misc_RNA (1)...(19): siRNA sense strand
uggccagauucuacaaaua

SEQ ID NO: 1018262 - RNA, 19 nt, Homo sapiens
  misc_RNA (1)...(19): siRNA sense strand
caaauacuugggaaccuuu

SEQ ID NO: 1018263 - RNA, 19 nt, Homo sapiens
  misc_RNA (1)...(19): siRNA sense strand
ggaaaggauggccagauuc

SEQ ID NO: 1018264 - RNA, 19 nt, Homo sapiens
  misc_RNA (1)...(19): siRNA sense strand
ucagaacaguauguaaaug

SEQ ID NO: 1018265 - RNA, 19 nt, Homo sapiens
  misc_RNA (1)...(19): siRNA sense strand
acccaaaucuucagguguu

SEQ ID NO: 1018266 - RNA, 19 nt, Homo sapiens
  misc_RNA (1)...(19): siRNA sense strand
acaagggaaucacguaucu

SEQ ID NO: 1018267 - RNA, 19 nt, Homo sapiens
  misc_RNA (1)...(19): siRNA sense strand
cgaggacaguucuaugaca

SEQ ID NO: 1018268 - RNA, 19 nt, Homo sapiens
  misc_RNA (1)...(19): siRNA sense strand
ugaaagacgaggacaguuc

SEQ ID NO: 1018269 - RNA, 19 nt, Homo sapiens
  misc_RNA (1)...(19): siRNA sense strand
uaaagaaaggcaaagcaau

SEQ ID NO: 1018270 - RNA, 19 nt, Homo sapiens
  misc_RNA (1)...(19): siRNA sense strand
gaaggcuaaacaaaggaua

SEQ ID NO: 1018271 - RNA, 19 nt, Homo sapiens
  misc_RNA (1)...(19): siRNA sense strand
cagaacaguauguaaaugu

SEQ ID NO: 1018272 - RNA, 19 nt, Homo sapiens
  misc_RNA (1)...(19): siRNA sense strand
ccacaagaaccauaaaugc

SEQ ID NO: 1018273 - RNA, 19 nt, Homo sapiens
  misc_RNA (1)...(19): siRNA sense strand
aagaaaggcaaagcaauaa

SEQ ID NO: 1018274 - RNA, 19 nt, Homo sapiens
  misc_RNA (1)...(19): siRNA sense strand
acaaauacuugggaaccuu

SEQ ID NO: 1018275 - RNA, 19 nt, Homo sapiens
  misc_RNA (1)...(19): siRNA sense strand
cuuugcaucuuucgaacua

SEQ ID NO: 1018276 - RNA, 19 nt, Homo sapiens
  misc_RNA (1)...(19): siRNA sense strand
aaagagggucagaacagua

SEQ ID NO: 1018277 - RNA, 19 nt, Homo sapiens
  misc_RNA (1)...(19): siRNA sense strand
gaaucacguaucucuuuga

SEQ ID NO: 1018278 - RNA, 19 nt, Homo sapiens
  misc_RNA (1)...(19): siRNA sense strand
ucucuaaugacaagcauaa

SEQ ID NO: 1018279 - RNA, 19 nt, Homo sapiens
  misc_RNA (1)...(19): siRNA sense strand
gguguaaagacccuuguga

SEQ ID NO: 1018280 - RNA, 19 nt, Homo sapiens
  misc_RNA (1)...(19): siRNA sense strand
agaacaguauguaaaugug

SEQ ID NO: 1018281 - RNA, 19 nt, Homo sapiens
  misc_RNA (1)...(19): siRNA sense strand
uaaccucgauacucgucuu

SEQ ID NO: 1018282 - RNA, 19 nt, Homo sapiens
  misc_RNA (1)...(19): siRNA sense strand
aaccugccauugcugagua

SEQ ID NO: 1018283 - RNA, 19 nt, Homo sapiens
  misc_RNA (1)...(19): siRNA sense strand
uaucucagguaaagaaagg

SEQ ID NO: 1018284 - RNA, 19 nt, Homo sapiens
  misc_RNA (1)...(19): siRNA sense strand
caacucaaggugucagugu

SEQ ID NO: 1018285 - RNA, 19 nt, Homo sapiens
  misc_RNA (1)...(19): siRNA sense strand
cuucagacuucuauuacau

SEQ ID NO: 1018286 - RNA, 19 nt, Homo sapiens
  misc_RNA (1)...(19): siRNA sense strand
ucaaugaagcuaccuuugg

SEQ ID NO: 1018287 - RNA, 19 nt, Homo sapiens
  misc_RNA (1)...(19): siRNA sense strand
gaagagcugacuuuugauu

SEQ ID NO: 1018288 - RNA, 19 nt, Homo sapiens
  misc_RNA (1)...(19): siRNA sense strand
gaauauguuggagagguaa

SEQ ID NO: 1018289 - RNA, 19 nt, Homo sapiens
  misc_RNA (1)...(19): siRNA sense strand
cagauucuacaaauacuug

SEQ ID NO: 1018290 - RNA, 19 nt, Homo sapiens
  misc_RNA (1)...(19): siRNA sense strand
ugccauugcugaguacauu

SEQ ID NO: 1018291 - RNA, 19 nt, Homo sapiens
  misc_RNA (1)...(19): siRNA sense strand
ggccagauucuacaaauac

SEQ ID NO: 1018292 - RNA, 19 nt, Homo sapiens
  misc_RNA (1)...(19): siRNA sense strand
ggaguucuuuuggcuuaua

SEQ ID NO: 1018293 - RNA, 19 nt, Homo sapiens
  misc_RNA (1)...(19): siRNA sense strand
gguuguucaugcacagauu

SEQ ID NO: 1018294 - RNA, 19 nt, Homo sapiens
  misc_RNA (1)...(19): siRNA sense strand
acaguucuaugacaacaag

SEQ ID NO: 1018295 - RNA, 19 nt, Homo sapiens
  misc_RNA (1)...(19): siRNA sense strand
augaaagguucuggagaua

SEQ ID NO: 1018296 - RNA, 19 nt, Homo sapiens
  misc_RNA (1)...(19): siRNA sense strand
acuaugagucugaugaauu

SEQ ID NO: 1018297 - RNA, 19 nt, Homo sapiens
  misc_RNA (1)...(19): siRNA sense strand
ggcacacaguauucgcuuu

SEQ ID NO: 1018298 - RNA, 19 nt, Homo sapiens
  misc_RNA (1)...(19): siRNA sense strand
agacccuugugaagauuaa

SEQ ID NO: 1018299 - RNA, 19 nt, Homo sapiens
  misc_RNA (1)...(19): siRNA sense strand
aaagacccuugugaagauu

SEQ ID NO: 1018300 - RNA, 19 nt, Homo sapiens
  misc_RNA (1)...(19): siRNA sense strand
aguauucgcuuugcaucuu

SEQ ID NO: 1018301 - RNA, 19 nt, Homo sapiens
  misc_RNA (1)...(19): siRNA sense strand
gcugugacccaaaucuuca

SEQ ID NO: 1018302 - RNA, 19 nt, Homo sapiens
  misc_RNA (1)...(19): siRNA sense strand
acaacaagggaaucacgua

SEQ ID NO: 1018303 - RNA, 19 nt, Homo sapiens
  misc_RNA (1)...(19): siRNA sense strand
guguaaagacccuugugaa

SEQ ID NO: 1018304 - RNA, 19 nt, Homo sapiens
  misc_RNA (1)...(19): siRNA sense strand
caaaggagcugcuacaaug

SEQ ID NO: 1018305 - RNA, 19 nt, Homo sapiens
  misc_RNA (1)...(19): siRNA sense strand
uaaggaagcugcagagaau

SEQ ID NO: 1018306 - RNA, 19 nt, Homo sapiens
  misc_RNA (1)...(19): siRNA sense strand
gaaagaaguuccaaaacaa

SEQ ID NO: 1018307 - RNA, 19 nt, Homo sapiens
  misc_RNA (1)...(19): siRNA sense strand
ccaccuagaugaaguuguu

SEQ ID NO: 1018308 - RNA, 19 nt, Homo sapiens
  misc_RNA (1)...(19): siRNA sense strand
gcuguuagcaucacucaua

SEQ ID NO: 1018309 - RNA, 19 nt, Homo sapiens
  misc_RNA (1)...(19): siRNA sense strand
gcuacaauguggaagaauu

SEQ ID NO: 1018310 - RNA, 19 nt, Homo sapiens
  misc_RNA (1)...(19): siRNA sense strand
ggaagaauggauagaaauu

SEQ ID NO: 1018311 - RNA, 19 nt, Homo sapiens
  misc_RNA (1)...(19): siRNA sense strand
gcaaaguccuauuccaaca

SEQ ID NO: 1018312 - RNA, 19 nt, Homo sapiens
  misc_RNA (1)...(19): siRNA sense strand
caaccucgauccugagaga

SEQ ID NO: 1018313 - RNA, 19 nt, Homo sapiens
  misc_RNA (1)...(19): siRNA sense strand
ggaagcauuuggcgauuuc

SEQ ID NO: 1018314 - RNA, 19 nt, Homo sapiens
  misc_RNA (1)...(19): siRNA sense strand
gacaagaauuugcuaugga

SEQ ID NO: 1018315 - RNA, 19 nt, Homo sapiens
  misc_RNA (1)...(19): siRNA sense strand
ccacauauccaaccaccua

SEQ ID NO: 1018316 - RNA, 19 nt, Homo sapiens
  misc_RNA (1)...(19): siRNA sense strand
caacagucaugaguacaaa

SEQ ID NO: 1018317 - RNA, 19 nt, Homo sapiens
  misc_RNA (1)...(19): siRNA sense strand
cggaucagauuaucauuug

SEQ ID NO: 1018318 - RNA, 19 nt, Homo sapiens
  misc_RNA (1)...(19): siRNA sense strand
ugaaacaagucgugagugu

SEQ ID NO: 1018319 - RNA, 19 nt, Homo sapiens
  misc_RNA (1)...(19): siRNA sense strand
gcuuuacucucccuucaaa

SEQ ID NO: 1018320 - RNA, 19 nt, Homo sapiens
  misc_RNA (1)...(19): siRNA sense strand
gaagaauggauagaaauug

SEQ ID NO: 1018321 - RNA, 19 nt, Homo sapiens
  misc_RNA (1)...(19): siRNA sense strand
uagcaucacucauagaaag

SEQ ID NO: 1018322 - RNA, 19 nt, Homo sapiens
  misc_RNA (1)...(19): siRNA sense strand
gaaauugaagcacggauca

SEQ ID NO: 1018323 - RNA, 19 nt, Homo sapiens
  misc_RNA (1)...(19): siRNA sense strand
cuacaauguggaagaauua

SEQ ID NO: 1018324 - RNA, 19 nt, Homo sapiens
  misc_RNA (1)...(19): siRNA sense strand
ugauguagcugagcaguau

SEQ ID NO: 1018325 - RNA, 19 nt, Homo sapiens
  misc_RNA (1)...(19): siRNA sense strand
gagcuuuacucucccuuca

SEQ ID NO: 1018326 - RNA, 19 nt, Homo sapiens
  misc_RNA (1)...(19): siRNA sense strand
guacccauauugagagaau

SEQ ID NO: 1018327 - RNA, 19 nt, Homo sapiens
  misc_RNA (1)...(19): siRNA sense strand
guggaagaauuauaaagga

SEQ ID NO: 1018328 - RNA, 19 nt, Homo sapiens
  misc_RNA (1)...(19): siRNA sense strand
caguaaaggugaaacaagu

SEQ ID NO: 1018329 - RNA, 19 nt, Homo sapiens
  misc_RNA (1)...(19): siRNA sense strand
gcguagcacugacaagaau

SEQ ID NO: 1018330 - RNA, 19 nt, Homo sapiens
  misc_RNA (1)...(19): siRNA sense strand
gaugggaagaaccaaauuu

SEQ ID NO: 1018331 - RNA, 19 nt, Homo sapiens
  misc_RNA (1)...(19): siRNA sense strand
aaggaagaauggauagaaa

SEQ ID NO: 1018332 - RNA, 19 nt, Homo sapiens
  misc_RNA (1)...(19): siRNA sense strand
gcacggaucagauuaucau

SEQ ID NO: 1018333 - RNA, 19 nt, Homo sapiens
  misc_RNA (1)...(19): siRNA sense strand
gaaguuguugcugcuguua

SEQ ID NO: 1018334 - RNA, 19 nt, Homo sapiens
  misc_RNA (1)...(19): siRNA sense strand
uagcagaggcacauguuaa

SEQ ID NO: 1018335 - RNA, 19 nt, Homo sapiens
  misc_RNA (1)...(19): siRNA sense strand
gaagcacggaucagauuau

SEQ ID NO: 1018336 - RNA, 19 nt, Homo sapiens
  misc_RNA (1)...(19): siRNA sense strand
gaauacagauguuuucaag

SEQ ID NO: 1018337 - RNA, 19 nt, Homo sapiens
  misc_RNA (1)...(19): siRNA sense strand
gaaaggacugucacugcaa

SEQ ID NO: 1018338 - RNA, 19 nt, Homo sapiens
  misc_RNA (1)...(19): siRNA sense strand
acaaacaggccguccauga

SEQ ID NO: 1018339 - RNA, 19 nt, Homo sapiens
  misc_RNA (1)...(19): siRNA sense strand
ugacaagaauuugcuaugg

SEQ ID NO: 1018340 - RNA, 19 nt, Homo sapiens
  misc_RNA (1)...(19): siRNA sense strand
agacucacauuggaaacua

SEQ ID NO: 1018341 - RNA, 19 nt, Homo sapiens
  misc_RNA (1)...(19): siRNA sense strand
uggcucaucuuaaggauuc

SEQ ID NO: 1018342 - RNA, 19 nt, Homo sapiens
  misc_RNA (1)...(19): siRNA sense strand
ggagacacgagcaccauga

SEQ ID NO: 1018343 - RNA, 19 nt, Homo sapiens
  misc_RNA (1)...(19): siRNA sense strand
gacugucacugcaagcaaa

SEQ ID NO: 1018344 - RNA, 19 nt, Homo sapiens
  misc_RNA (1)...(19): siRNA sense strand
gaaacuccaccucugugaa

SEQ ID NO: 1018345 - RNA, 19 nt, Homo sapiens
  misc_RNA (1)...(19): siRNA sense strand
gaauauguugagaucagua

SEQ ID NO: 1018346 - RNA, 19 nt, Homo sapiens
  misc_RNA (1)...(19): siRNA sense strand
caagaugaauuuugccauu

SEQ ID NO: 1018347 - RNA, 19 nt, Homo sapiens
  misc_RNA (1)...(19): siRNA sense strand
aaacaagucgugagugugu

SEQ ID NO: 1018348 - RNA, 19 nt, Homo sapiens
  misc_RNA (1)...(19): siRNA sense strand
caaaacaacaugcagaaaa

SEQ ID NO: 1018349 - RNA, 19 nt, Homo sapiens
  misc_RNA (1)...(19): siRNA sense strand
gagagaauuagcaggugua

SEQ ID NO: 1018350 - RNA, 19 nt, Homo sapiens
  misc_RNA (1)...(19): siRNA sense strand
ggaauauguugagaucagu

SEQ ID NO: 1018351 - RNA, 19 nt, Homo sapiens
  misc_RNA (1)...(19): siRNA sense strand
gacaaauccucgccaacuc

SEQ ID NO: 1018352 - RNA, 19 nt, Homo sapiens
  misc_RNA (1)...(19): siRNA sense strand
gaaacuagcagaggcacau

SEQ ID NO: 1018353 - RNA, 19 nt, Homo sapiens
  misc_RNA (1)...(19): siRNA sense strand
gugaguguguacccauauu

SEQ ID NO: 1018354 - RNA, 19 nt, Homo sapiens
  misc_RNA (1)...(19): siRNA sense strand
guagcacugacaagaauuu

SEQ ID NO: 1018355 - RNA, 19 nt, Homo sapiens
  misc_RNA (1)...(19): siRNA sense strand
ugagaucaguaaaggugaa

SEQ ID NO: 1018356 - RNA, 19 nt, Homo sapiens
  misc_RNA (1)...(19): siRNA sense strand
aagaagcuuugucccacua

SEQ ID NO: 1018357 - RNA, 19 nt, Homo sapiens
  misc_RNA (1)...(19): siRNA sense strand
ugaagcacggaucagauua

SEQ ID NO: 1018358 - RNA, 19 nt, Homo sapiens
  misc_RNA (1)...(19): siRNA sense strand
uauggagacucacauugga

SEQ ID NO: 1018359 - RNA, 19 nt, Homo sapiens
  misc_RNA (1)...(19): siRNA sense strand
guuagcaucacucauagaa

SEQ ID NO: 1018360 - RNA, 19 nt, Homo sapiens
  misc_RNA (1)...(19): siRNA sense strand
ccaggcacaucucaucauc

SEQ ID NO: 1018361 - RNA, 19 nt, Homo sapiens
  misc_RNA (1)...(19): siRNA sense strand
agaauuagcagguguagag

SEQ ID NO: 1018362 - RNA, 19 nt, Homo sapiens
  misc_RNA (1)...(19): siRNA sense strand
agaaagaaguuccaaaaca

SEQ ID NO: 1018363 - RNA, 19 nt, Homo sapiens
  misc_RNA (1)...(19): siRNA sense strand
ccaaccaccuagaugaagu

SEQ ID NO: 1018364 - RNA, 19 nt, Homo sapiens
  misc_RNA (1)...(19): siRNA sense strand
gcauggcucaucuuaagga

SEQ ID NO: 1018365 - RNA, 19 nt, Homo sapiens
  misc_RNA (1)...(19): siRNA sense strand
gacacgagcaccaugaugu

SEQ ID NO: 1018366 - RNA, 19 nt, Homo sapiens
  misc_RNA (1)...(19): siRNA sense strand
ucaaaggagcugcuacaau

SEQ ID NO: 1018367 - RNA, 19 nt, Homo sapiens
  misc_RNA (1)...(19): siRNA sense strand
aagcagagagacuuucaaa

SEQ ID NO: 1018368 - RNA, 19 nt, Homo sapiens
  misc_RNA (1)...(19): siRNA sense strand
aagccaaaguggaagcauu

SEQ ID NO: 1018369 - RNA, 19 nt, Homo sapiens
  misc_RNA (1)...(19): siRNA sense strand
gaagggaugggaagaacca

SEQ ID NO: 1018370 - RNA, 19 nt, Homo sapiens
  misc_RNA (1)...(19): siRNA sense strand
gaucagauuaucauuugca

SEQ ID NO: 1018371 - RNA, 19 nt, Homo sapiens
  misc_RNA (1)...(19): siRNA sense strand
aaaggaagaauggauagaa

SEQ ID NO: 1018372 - RNA, 19 nt, Homo sapiens
  misc_RNA (1)...(19): siRNA sense strand
gagaaagcaaaguccuauu

SEQ ID NO: 1018373 - RNA, 19 nt, Homo sapiens
  misc_RNA (1)...(19): siRNA sense strand
agaaagcaaaguccuauuc

SEQ ID NO: 1018374 - RNA, 19 nt, Homo sapiens
  misc_RNA (1)...(19): siRNA sense strand
gaagcuuugucccacuauc

SEQ ID NO: 1018375 - RNA, 19 nt, Homo sapiens
  misc_RNA (1)...(19): siRNA sense strand
ucacaggaaacccacauau

SEQ ID NO: 1018376 - RNA, 19 nt, Homo sapiens
  misc_RNA (1)...(19): siRNA sense strand
uaccaugggcagagcuuua

SEQ ID NO: 1018377 - RNA, 19 nt, Homo sapiens
  misc_RNA (1)...(19): siRNA sense strand
cuacaaaugacuggacaaa

SEQ ID NO: 1018378 - RNA, 19 nt, Homo sapiens
  misc_RNA (1)...(19): siRNA sense strand
acacgagcaccaugaugua

SEQ ID NO: 1018379 - RNA, 19 nt, Homo sapiens
  misc_RNA (1)...(19): siRNA sense strand
gaguguguacccauauuga

SEQ ID NO: 1018380 - RNA, 19 nt, Homo sapiens
  misc_RNA (1)...(19): siRNA sense strand
gaagcugcagagaauuuga

SEQ ID NO: 1018381 - RNA, 19 nt, Homo sapiens
  misc_RNA (1)...(19): siRNA sense strand
uauccaaccaccuagauga

SEQ ID NO: 1018382 - RNA, 19 nt, Homo sapiens
  misc_RNA (1)...(19): siRNA sense strand
gcagcagacucggcacaca

SEQ ID NO: 1018383 - RNA, 19 nt, Homo sapiens
  misc_RNA (1)...(19): siRNA sense strand
gaucaguaaaggugaaaca

SEQ ID NO: 1018384 - RNA, 19 nt, Homo sapiens
  misc_RNA (1)...(19): siRNA sense strand
gaauggauagaaauugaag

SEQ ID NO: 1018385 - RNA, 19 nt, Homo sapiens
  misc_RNA (1)...(19): siRNA sense strand
gagcugcuacaauguggaa

SEQ ID NO: 1018386 - RNA, 19 nt, Homo sapiens
  misc_RNA (1)...(19): siRNA sense strand
ggaagcugcagagaauuug

SEQ ID NO: 1018387 - RNA, 19 nt, Homo sapiens
  misc_RNA (1)...(19): siRNA sense strand
uuaaggaagcugcagagaa

SEQ ID NO: 1018388 - RNA, 19 nt, Homo sapiens
  misc_RNA (1)...(19): siRNA sense strand
ugaaguuguugcugcuguu

SEQ ID NO: 1018389 - RNA, 19 nt, Homo sapiens
  misc_RNA (1)...(19): siRNA sense strand
caaacaggccguccaugag

SEQ ID NO: 1018390 - RNA, 19 nt, Homo sapiens
  misc_RNA (1)...(19): siRNA sense strand
uggaagcauuuggcgauuu

SEQ ID NO: 1018391 - RNA, 19 nt, Homo sapiens
  misc_RNA (1)...(19): siRNA sense strand
aagcaaaguccuauuccaa

SEQ ID NO: 1018392 - RNA, 19 nt, Homo sapiens
  misc_RNA (1)...(19): siRNA sense strand
ccaacagucaugaguacaa

SEQ ID NO: 1018393 - RNA, 19 nt, Homo sapiens
  misc_RNA (1)...(19): siRNA sense strand
gcuauggagacucacauug

SEQ ID NO: 1018394 - RNA, 19 nt, Homo sapiens
  misc_RNA (1)...(19): siRNA sense strand
guacaaacaggccguccau

SEQ ID NO: 1018395 - RNA, 19 nt, Homo sapiens
  misc_RNA (1)...(19): siRNA sense strand
ggaugggaagaaccaaauu

SEQ ID NO: 1018396 - RNA, 19 nt, Homo sapiens
  misc_RNA (1)...(19): siRNA sense strand
uggaauauguugagaucag

SEQ ID NO: 1018397 - RNA, 19 nt, Homo sapiens
  misc_RNA (1)...(19): siRNA sense strand
ccauugagcuuuuccauac

SEQ ID NO: 1018398 - RNA, 19 nt, Homo sapiens
  misc_RNA (1)...(19): siRNA sense strand
gugccucccuauagugaga

SEQ ID NO: 1018399 - RNA, 19 nt, Homo sapiens
  misc_RNA (1)...(19): siRNA sense strand
ggacugucacugcaagcaa

SEQ ID NO: 1018400 - RNA, 19 nt, Homo sapiens
  misc_RNA (1)...(19): siRNA sense strand
guaucaaggucagaagaag

SEQ ID NO: 1018401 - RNA, 19 nt, Homo sapiens
  misc_RNA (1)...(19): siRNA sense strand
ucucagcgacacuuccaua

SEQ ID NO: 1018402 - RNA, 19 nt, Homo sapiens
  misc_RNA (1)...(19): siRNA sense strand
gggaugggaagaaccaaau

SEQ ID NO: 1018403 - RNA, 19 nt, Homo sapiens
  misc_RNA (1)...(19): siRNA sense strand
cagaagaagucaaaagaag

SEQ ID NO: 1018404 - RNA, 19 nt, Homo sapiens
  misc_RNA (1)...(19): siRNA sense strand
cguaaacagucaaaucuua

SEQ ID NO: 1018405 - RNA, 19 nt, Homo sapiens
  misc_RNA (1)...(19): siRNA sense strand
gagagaaaccuuauaaaug

SEQ ID NO: 1018406 - RNA, 19 nt, Homo sapiens
  misc_RNA (1)...(19): siRNA sense strand
gagagaaacccuauaaaug

SEQ ID NO: 1018407 - RNA, 19 nt, Homo sapiens
  misc_RNA (1)...(19): siRNA sense strand
ggagagaaaccuuauaaau

SEQ ID NO: 1018408 - RNA, 19 nt, Homo sapiens
  misc_RNA (1)...(19): siRNA sense strand
gguaaagccuucacucaga

SEQ ID NO: 1018409 - RNA, 19 nt, Homo sapiens
  misc_RNA (1)...(19): siRNA sense strand
ggagagaaaccauauaaau

SEQ ID NO: 1018410 - RNA, 19 nt, Homo sapiens
  misc_RNA (1)...(19): siRNA sense strand
caacaucugagaauucaua

SEQ ID NO: 1018411 - RNA, 19 nt, Homo sapiens
  misc_RNA (1)...(19): siRNA sense strand
ggagagaaacccuauaaau

SEQ ID NO: 1018412 - RNA, 19 nt, Homo sapiens
  misc_RNA (1)...(19): siRNA sense strand
gagagaagcccuacacaug

SEQ ID NO: 1018413 - RNA, 19 nt, Homo sapiens
  misc_RNA (1)...(19): siRNA sense strand
gagagaaaccauauaaaug

SEQ ID NO: 1018414 - RNA, 19 nt, Homo sapiens
  misc_RNA (1)...(19): siRNA sense strand
cagagcccaucccuuauua

SEQ ID NO: 1018415 - RNA, 19 nt, Homo sapiens
  misc_RNA (1)...(19): siRNA sense strand
gagcauuacagaauucaua

SEQ ID NO: 1018416 - RNA, 19 nt, Homo sapiens
  misc_RNA (1)...(19): siRNA sense strand
ugucagagcccaucccuua

SEQ ID NO: 1018417 - RNA, 19 nt, Homo sapiens
  misc_RNA (1)...(19): siRNA sense strand
gggaaguucuuuacucaga

SEQ ID NO: 1018418 - RNA, 19 nt, Homo sapiens
  misc_RNA (1)...(19): siRNA sense strand
gcccaucccuuauuaaaca

SEQ ID NO: 1018419 - RNA, 19 nt, Homo sapiens
  misc_RNA (1)...(19): siRNA sense strand
guaaagccuucacucagaa

SEQ ID NO: 1018420 - RNA, 19 nt, Homo sapiens
  misc_RNA (1)...(19): siRNA sense strand
ucagaacucuucccuuguu

SEQ ID NO: 1018421 - RNA, 19 nt, Homo sapiens
  misc_RNA (1)...(19): siRNA sense strand
gagaaacccuauaaaugca

SEQ ID NO: 1018422 - RNA, 19 nt, Homo sapiens
  misc_RNA (1)...(19): siRNA sense strand
ggcaaagccuucagucaga

SEQ ID NO: 1018423 - RNA, 19 nt, Homo sapiens
  misc_RNA (1)...(19): siRNA sense strand
gaaguucuuuacucagaga

SEQ ID NO: 1018424 - RNA, 19 nt, Homo sapiens
  misc_RNA (1)...(19): siRNA sense strand
ggagagaagcccuaugugu

SEQ ID NO: 1018425 - RNA, 19 nt, Homo sapiens
  misc_RNA (1)...(19): siRNA sense strand
agucagagcauaugccuua

SEQ ID NO: 1018426 - RNA, 19 nt, Homo sapiens
  misc_RNA (1)...(19): siRNA sense strand
agucaaaucuuacucaaca

SEQ ID NO: 1018427 - RNA, 19 nt, Homo sapiens
  misc_RNA (1)...(19): siRNA sense strand
gaaugugggaaguucuuua

SEQ ID NO: 1018428 - RNA, 19 nt, Homo sapiens
  misc_RNA (1)...(19): siRNA sense strand
gaacaugaaaggacucaca

SEQ ID NO: 1018429 - RNA, 19 nt, Homo sapiens
  misc_RNA (1)...(19): siRNA sense strand
aaacaccagcgaauucaua

SEQ ID NO: 1018430 - RNA, 19 nt, Homo sapiens
  misc_RNA (1)...(19): siRNA sense strand
gaggagagaagcccuaugu

SEQ ID NO: 1018431 - RNA, 19 nt, Homo sapiens
  misc_RNA (1)...(19): siRNA sense strand
gaacucuucccuuguugaa

SEQ ID NO: 1018432 - RNA, 19 nt, Homo sapiens
  misc_RNA (1)...(19): siRNA sense strand
gagaagcccuacacaugca

SEQ ID NO: 1018433 - RNA, 19 nt, Homo sapiens
  misc_RNA (1)...(19): siRNA sense strand
gagcccaucccuuauuaaa

SEQ ID NO: 1018434 - RNA, 19 nt, Homo sapiens
  misc_RNA (1)...(19): siRNA sense strand
cagcaucugagaauucaua

SEQ ID NO: 1018435 - RNA, 19 nt, Homo sapiens
  misc_RNA (1)...(19): siRNA sense strand
gaagucauucuggagauaa

SEQ ID NO: 1018436 - RNA, 19 nt, Homo sapiens
  misc_RNA (1)...(19): siRNA sense strand
gaaacccuauaaaugcaau

SEQ ID NO: 1018437 - RNA, 19 nt, Homo sapiens
  misc_RNA (1)...(19): siRNA sense strand
caaacaagcacaccuuagu

SEQ ID NO: 1018438 - RNA, 19 nt, Homo sapiens
  misc_RNA (1)...(19): siRNA sense strand
gcuucaugcuggagaguaa

SEQ ID NO: 1018439 - RNA, 19 nt, Homo sapiens
  misc_RNA (1)...(19): siRNA sense strand
gugggaaguucuuuacuca

SEQ ID NO: 1018440 - RNA, 19 nt, Homo sapiens
  misc_RNA (1)...(19): siRNA sense strand
aagaaaccuucaaagugua

SEQ ID NO: 1018441 - RNA, 19 nt, Homo sapiens
  misc_RNA (1)...(19): siRNA sense strand
gcacuucuucgacaucaga

SEQ ID NO: 1018442 - RNA, 19 nt, Homo sapiens
  misc_RNA (1)...(19): siRNA sense strand
caaaagcaauucuuguuca

SEQ ID NO: 1018443 - RNA, 19 nt, Homo sapiens
  misc_RNA (1)...(19): siRNA sense strand
ccggagagaaaccuuauaa

SEQ ID NO: 1018444 - RNA, 19 nt, Homo sapiens
  misc_RNA (1)...(19): siRNA sense strand
gcacaguucagcacuucuu

SEQ ID NO: 1018445 - RNA, 19 nt, Homo sapiens
  misc_RNA (1)...(19): siRNA sense strand
ggagagaagcccuacacau

SEQ ID NO: 1018446 - RNA, 19 nt, Homo sapiens
  misc_RNA (1)...(19): siRNA sense strand
agagaaacccuauaaaugc

SEQ ID NO: 1018447 - RNA, 19 nt, Homo sapiens
  misc_RNA (1)...(19): siRNA sense strand
gacucacacuggagagaaa

SEQ ID NO: 1018448 - RNA, 19 nt, Homo sapiens
  misc_RNA (1)...(19): siRNA sense strand
gcaaacaagcacaccuuag

SEQ ID NO: 1018449 - RNA, 19 nt, Homo sapiens
  misc_RNA (1)...(19): siRNA sense strand
cagaauucauacuggagaa

SEQ ID NO: 1018450 - RNA, 19 nt, Homo sapiens
  misc_RNA (1)...(19): siRNA sense strand
cagcaucagagaauucauu

SEQ ID NO: 1018451 - RNA, 19 nt, Homo sapiens
  misc_RNA (1)...(19): siRNA sense strand
acacuggagagaaacuuua

SEQ ID NO: 1018452 - RNA, 19 nt, Homo sapiens
  misc_RNA (1)...(19): siRNA sense strand
ucagagcccaucccuuauu

SEQ ID NO: 1018453 - RNA, 19 nt, Homo sapiens
  misc_RNA (1)...(19): siRNA sense strand
uuagugagcauuacagaau

SEQ ID NO: 1018454 - RNA, 19 nt, Homo sapiens
  misc_RNA (1)...(19): siRNA sense strand
cuggagagaaacuuuauaa

SEQ ID NO: 1018455 - RNA, 19 nt, Homo sapiens
  misc_RNA (1)...(19): siRNA sense strand
caucugagaauucauacug

SEQ ID NO: 1018456 - RNA, 19 nt, Homo sapiens
  misc_RNA (1)...(19): siRNA sense strand
uagugagcauuacagaauu

SEQ ID NO: 1018457 - RNA, 19 nt, Homo sapiens
  misc_RNA (1)...(19): siRNA sense strand
ggacucacacuggagagaa

SEQ ID NO: 1018458 - RNA, 19 nt, Homo sapiens
  misc_RNA (1)...(19): siRNA sense strand
gaauucauacuggagagaa

SEQ ID NO: 1018459 - RNA, 19 nt, Homo sapiens
  misc_RNA (1)...(19): siRNA sense strand
gaauucauacuggagagaa

SEQ ID NO: 1018460 - RNA, 19 nt, Homo sapiens
  misc_RNA (1)...(19): siRNA sense strand
cuggagagaaaccauauaa

SEQ ID NO: 1018461 - RNA, 19 nt, Homo sapiens
  misc_RNA (1)...(19): siRNA sense strand
cccuauaaaugcaaugaau

SEQ ID NO: 1018462 - RNA, 19 nt, Homo sapiens
  misc_RNA (1)...(19): siRNA sense strand
cgacaucagaggcuucaug

SEQ ID NO: 1018463 - RNA, 19 nt, Homo sapiens
  misc_RNA (1)...(19): siRNA sense strand
aaacaagcacaccuuagug

SEQ ID NO: 1018464 - RNA, 19 nt, Homo sapiens
  misc_RNA (1)...(19): siRNA sense strand
gaauucauaccggagagaa

SEQ ID NO: 1018465 - RNA, 19 nt, Homo sapiens
  misc_RNA (1)...(19): siRNA sense strand
cagagcauaugccuuacuc

SEQ ID NO: 1018466 - RNA, 19 nt, Homo sapiens
  misc_RNA (1)...(19): siRNA sense strand
guucuuuacucagagauca

SEQ ID NO: 1018467 - RNA, 19 nt, Homo sapiens
  misc_RNA (1)...(19): siRNA sense strand
cuggagagaaacccuauaa

SEQ ID NO: 1018468 - RNA, 19 nt, Homo sapiens
  misc_RNA (1)...(19): siRNA sense strand
acagucaaaucuuacucaa

SEQ ID NO: 1018469 - RNA, 19 nt, Homo sapiens
  misc_RNA (1)...(19): siRNA sense strand
cagugaauguggaaguugu

SEQ ID NO: 1018470 - RNA, 19 nt, Homo sapiens
  misc_RNA (1)...(19): siRNA sense strand
cagaacucuucccuuguug

SEQ ID NO: 1018471 - RNA, 19 nt, Homo sapiens
  misc_RNA (1)...(19): siRNA sense strand
gcagugaauguggaaguug

SEQ ID NO: 1018472 - RNA, 19 nt, Homo sapiens
  misc_RNA (1)...(19): siRNA sense strand
gaaauccuuuaggcacagu

SEQ ID NO: 1018473 - RNA, 19 nt, Homo sapiens
  misc_RNA (1)...(19): siRNA sense strand
cagcacuucuucgacauca

SEQ ID NO: 1018474 - RNA, 19 nt, Homo sapiens
  misc_RNA (1)...(19): siRNA sense strand
cgucaucagagaagucauu

SEQ ID NO: 1018475 - RNA, 19 nt, Homo sapiens
  misc_RNA (1)...(19): siRNA sense strand
cgcaaacaagcacaccuua

SEQ ID NO: 1018476 - RNA, 19 nt, Homo sapiens
  misc_RNA (1)...(19): siRNA sense strand
aaucagagugcaugucuca

SEQ ID NO: 1018477 - RNA, 19 nt, Homo sapiens
  misc_RNA (1)...(19): siRNA sense strand
cuuuauaaguguagugagu

SEQ ID NO: 1018478 - RNA, 19 nt, Homo sapiens
  misc_RNA (1)...(19): siRNA sense strand
aacaagcacaccuuaguga

SEQ ID NO: 1018479 - RNA, 19 nt, Homo sapiens
  misc_RNA (1)...(19): siRNA sense strand
uguaaugaaugugagaaag

SEQ ID NO: 1018480 - RNA, 19 nt, Homo sapiens
  misc_RNA (1)...(19): siRNA sense strand
uuauaaguguagugagugu

SEQ ID NO: 1018481 - RNA, 19 nt, Homo sapiens
  misc_RNA (1)...(19): siRNA sense strand
gugguaaagccuucacuca

SEQ ID NO: 1018482 - RNA, 19 nt, Homo sapiens
  misc_RNA (1)...(19): siRNA sense strand
guaaugaaugugagaaagc

SEQ ID NO: 1018483 - RNA, 19 nt, Homo sapiens
  misc_RNA (1)...(19): siRNA sense strand
gaugugggaaauccuuuag

SEQ ID NO: 1018484 - RNA, 19 nt, Homo sapiens
  misc_RNA (1)...(19): siRNA sense strand
uuaugaguguguuggaugu

SEQ ID NO: 1018485 - RNA, 19 nt, Homo sapiens
  misc_RNA (1)...(19): siRNA sense strand
uaaguguagugagugugaa

SEQ ID NO: 1018486 - RNA, 19 nt, Homo sapiens
  misc_RNA (1)...(19): siRNA sense strand
caaacaaaagcaauucuug

SEQ ID NO: 1018487 - RNA, 19 nt, Homo sapiens
  misc_RNA (1)...(19): siRNA sense strand
gcaccagaggauucacaga

SEQ ID NO: 1018488 - RNA, 19 nt, Homo sapiens
  misc_RNA (1)...(19): siRNA sense strand
aaucuuacucaacaucuga

SEQ ID NO: 1018489 - RNA, 19 nt, Homo sapiens
  misc_RNA (1)...(19): siRNA sense strand
ugugggaaguucuuuacuc

SEQ ID NO: 1018490 - RNA, 19 nt, Homo sapiens
  misc_RNA (1)...(19): siRNA sense strand
cggagagaaaccuuauaaa

SEQ ID NO: 1018491 - RNA, 19 nt, Homo sapiens
  misc_RNA (1)...(19): siRNA sense strand
ucaaaucuuacucaacauc

SEQ ID NO: 1018492 - RNA, 19 nt, Homo sapiens
  misc_RNA (1)...(19): siRNA sense strand
ccuauaaaugcaaugaaug

SEQ ID NO: 1018493 - RNA, 19 nt, Homo sapiens
  misc_RNA (1)...(19): siRNA sense strand
guagugaaugugggaaguu

SEQ ID NO: 1018494 - RNA, 19 nt, Homo sapiens
  misc_RNA (1)...(19): siRNA sense strand
uguaaugaaugugggaaag

SEQ ID NO: 1018495 - RNA, 19 nt, Homo sapiens
  misc_RNA (1)...(19): siRNA sense strand
gaauguggcaaagccuuca

SEQ ID NO: 1018496 - RNA, 19 nt, Homo sapiens
  misc_RNA (1)...(19): siRNA sense strand
auacuggagagaaaccaua

SEQ ID NO: 1018497 - RNA, 19 nt, Homo sapiens
  misc_RNA (1)...(19): siRNA sense strand
uauuaaacaccagcgaauu

SEQ ID NO: 1018498 - RNA, 19 nt, Homo sapiens
  misc_RNA (1)...(19): siRNA sense strand
aauucauacuggagagaaa

SEQ ID NO: 1018499 - RNA, 19 nt, Homo sapiens
  misc_RNA (1)...(19): siRNA sense strand
caaaucuuacucaacaucu

SEQ ID NO: 1018500 - RNA, 19 nt, Homo sapiens
  misc_RNA (1)...(19): siRNA sense strand
uagugaaugugggaaguuc

SEQ ID NO: 1018501 - RNA, 19 nt, Homo sapiens
  misc_RNA (1)...(19): siRNA sense strand
aauucauacuggagagaaa

SEQ ID NO: 1018502 - RNA, 19 nt, Homo sapiens
  misc_RNA (1)...(19): siRNA sense strand
ggaaaggccuucagcguua

SEQ ID NO: 1018503 - RNA, 19 nt, Homo sapiens
  misc_RNA (1)...(19): siRNA sense strand
ggaaauggcuucagcugua

SEQ ID NO: 1018504 - RNA, 19 nt, Homo sapiens
  misc_RNA (1)...(19): siRNA sense strand
ggaaaaggcuucaauaaua

SEQ ID NO: 1018505 - RNA, 19 nt, Homo sapiens
  misc_RNA (1)...(19): siRNA sense strand
ggaaagcguucaauguuaa

SEQ ID NO: 1018506 - RNA, 19 nt, Homo sapiens
  misc_RNA (1)...(19): siRNA sense strand
gggaaagcguucaauguua

SEQ ID NO: 1018507 - RNA, 19 nt, Homo sapiens
  misc_RNA (1)...(19): siRNA sense strand
gaagaaacccuauaugugu

SEQ ID NO: 1018508 - RNA, 19 nt, Homo sapiens
  misc_RNA (1)...(19): siRNA sense strand
gggaaagccuucagaugua

SEQ ID NO: 1018509 - RNA, 19 nt, Homo sapiens
  misc_RNA (1)...(19): siRNA sense strand
ggagaugcuuuacuucuaa

SEQ ID NO: 1018510 - RNA, 19 nt, Homo sapiens
  misc_RNA (1)...(19): siRNA sense strand
gggaaagcauucagguuua

SEQ ID NO: 1018511 - RNA, 19 nt, Homo sapiens
  misc_RNA (1)...(19): siRNA sense strand
ggagaaacccuucaaaugu

SEQ ID NO: 1018512 - RNA, 19 nt, Homo sapiens
  misc_RNA (1)...(19): siRNA sense strand
gcauucagcuguaguucua

SEQ ID NO: 1018513 - RNA, 19 nt, Homo sapiens
  misc_RNA (1)...(19): siRNA sense strand
gggaaagccuucaguauca

SEQ ID NO: 1018514 - RNA, 19 nt, Homo sapiens
  misc_RNA (1)...(19): siRNA sense strand
gagaaacccuucaaaugug

SEQ ID NO: 1018515 - RNA, 19 nt, Homo sapiens
  misc_RNA (1)...(19): siRNA sense strand
gagaaagcauucagcugua

SEQ ID NO: 1018516 - RNA, 19 nt, Homo sapiens
  misc_RNA (1)...(19): siRNA sense strand
agagaaaccuuaugaaugu

SEQ ID NO: 1018517 - RNA, 19 nt, Homo sapiens
  misc_RNA (1)...(19): siRNA sense strand
ggaaauccaucagcuuuga

SEQ ID NO: 1018518 - RNA, 19 nt, Homo sapiens
  misc_RNA (1)...(19): siRNA sense strand
gaucaucaccgaauccaua

SEQ ID NO: 1018519 - RNA, 19 nt, Homo sapiens
  misc_RNA (1)...(19): siRNA sense strand
gcaaagcuuucagcauuaa

SEQ ID NO: 1018520 - RNA, 19 nt, Homo sapiens
  misc_RNA (1)...(19): siRNA sense strand
gagaagcccuaucagugua

SEQ ID NO: 1018521 - RNA, 19 nt, Homo sapiens
  misc_RNA (1)...(19): siRNA sense strand
ucaaauguauggaauguga

SEQ ID NO: 1018522 - RNA, 19 nt, Homo sapiens
  misc_RNA (1)...(19): siRNA sense strand
gaaaagcccuaucaaugua

SEQ ID NO: 1018523 - RNA, 19 nt, Homo sapiens
  misc_RNA (1)...(19): siRNA sense strand
ggaaagccuucagauguaa

SEQ ID NO: 1018524 - RNA, 19 nt, Homo sapiens
  misc_RNA (1)...(19): siRNA sense strand
gagaaacccuucagaugug

SEQ ID NO: 1018525 - RNA, 19 nt, Homo sapiens
  misc_RNA (1)...(19): siRNA sense strand
uggcaaagcuuucagcauu

SEQ ID NO: 1018526 - RNA, 19 nt, Homo sapiens
  misc_RNA (1)...(19): siRNA sense strand
ggagaaaccuuuugaaugu

SEQ ID NO: 1018527 - RNA, 19 nt, Homo sapiens
  misc_RNA (1)...(19): siRNA sense strand
aaagaaaccuacuugauca

SEQ ID NO: 1018528 - RNA, 19 nt, Homo sapiens
  misc_RNA (1)...(19): siRNA sense strand
ggagaaacccuucagaugu

SEQ ID NO: 1018529 - RNA, 19 nt, Homo sapiens
  misc_RNA (1)...(19): siRNA sense strand
ggcaaagcuuucagcauua

SEQ ID NO: 1018530 - RNA, 19 nt, Homo sapiens
  misc_RNA (1)...(19): siRNA sense strand
ggaagaaacccuauaugug

SEQ ID NO: 1018531 - RNA, 19 nt, Homo sapiens
  misc_RNA (1)...(19): siRNA sense strand
gagagaaaccuuaugaaug

SEQ ID NO: 1018532 - RNA, 19 nt, Homo sapiens
  misc_RNA (1)...(19): siRNA sense strand
gagaagagcaacaccauug

SEQ ID NO: 1018533 - RNA, 19 nt, Homo sapiens
  misc_RNA (1)...(19): siRNA sense strand
ccacucagcaggaaauaua

SEQ ID NO: 1018534 - RNA, 19 nt, Homo sapiens
  misc_RNA (1)...(19): siRNA sense strand
gggagaugcuuuacuucua

SEQ ID NO: 1018535 - RNA, 19 nt, Homo sapiens
  misc_RNA (1)...(19): siRNA sense strand
ggaaauguaugaaggaaaa

SEQ ID NO: 1018536 - RNA, 19 nt, Homo sapiens
  misc_RNA (1)...(19): siRNA sense strand
gaaaagcccuaucagugua

SEQ ID NO: 1018537 - RNA, 19 nt, Homo sapiens
  misc_RNA (1)...(19): siRNA sense strand
agagaaaccuuacgagugu

SEQ ID NO: 1018538 - RNA, 19 nt, Homo sapiens
  misc_RNA (1)...(19): siRNA sense strand
ggagagaaaccuuaugaau

SEQ ID NO: 1018539 - RNA, 19 nt, Homo sapiens
  misc_RNA (1)...(19): siRNA sense strand
gagaaacccuaugagugua

SEQ ID NO: 1018540 - RNA, 19 nt, Homo sapiens
  misc_RNA (1)...(19): siRNA sense strand
gaaaggccuucagcguuaa

SEQ ID NO: 1018541 - RNA, 19 nt, Homo sapiens
  misc_RNA (1)...(19): siRNA sense strand
gagcagcccucugggugua

SEQ ID NO: 1018542 - RNA, 19 nt, Homo sapiens
  misc_RNA (1)...(19): siRNA sense strand
gaaaagccuuccauguuaa

SEQ ID NO: 1018543 - RNA, 19 nt, Homo sapiens
  misc_RNA (1)...(19): siRNA sense strand
ugacaaaggaaauguauga

SEQ ID NO: 1018544 - RNA, 19 nt, Homo sapiens
  misc_RNA (1)...(19): siRNA sense strand
caacaucagagaauccaua

SEQ ID NO: 1018545 - RNA, 19 nt, Homo sapiens
  misc_RNA (1)...(19): siRNA sense strand
gggagaaacccuucaaaug

SEQ ID NO: 1018546 - RNA, 19 nt, Homo sapiens
  misc_RNA (1)...(19): siRNA sense strand
ggaaaagccuuaucagugu

SEQ ID NO: 1018547 - RNA, 19 nt, Homo sapiens
  misc_RNA (1)...(19): siRNA sense strand
gagaagcccuaugagugua

SEQ ID NO: 1018548 - RNA, 19 nt, Homo sapiens
  misc_RNA (1)...(19): siRNA sense strand
cgugaagcaugaaauaauu

SEQ ID NO: 1018549 - RNA, 19 nt, Homo sapiens
  misc_RNA (1)...(19): siRNA sense strand
ggaaaagccuucaguguca

SEQ ID NO: 1018550 - RNA, 19 nt, Homo sapiens
  misc_RNA (1)...(19): siRNA sense strand
ggagaagcccuaucagugu

SEQ ID NO: 1018551 - RNA, 19 nt, Homo sapiens
  misc_RNA (1)...(19): siRNA sense strand
ggagaagcccuaugagugu

SEQ ID NO: 1018552 - RNA, 19 nt, Homo sapiens
  misc_RNA (1)...(19): siRNA sense strand
gaaguccacucagcaggaa

SEQ ID NO: 1018553 - RNA, 19 nt, Homo sapiens
  misc_RNA (1)...(19): siRNA sense strand
caggaaauauaaagaagga

SEQ ID NO: 1018554 - RNA, 19 nt, Homo sapiens
  misc_RNA (1)...(19): siRNA sense strand
gagaaaccuuaugaaugua

SEQ ID NO: 1018555 - RNA, 19 nt, Homo sapiens
  misc_RNA (1)...(19): siRNA sense strand
ggaaagcauucagguuuag

SEQ ID NO: 1018556 - RNA, 19 nt, Homo sapiens
  misc_RNA (1)...(19): siRNA sense strand
aagaaacccuauaugugua

SEQ ID NO: 1018557 - RNA, 19 nt, Homo sapiens
  misc_RNA (1)...(19): siRNA sense strand
cgagaaacccuaugagugu

SEQ ID NO: 1018558 - RNA, 19 nt, Homo sapiens
  misc_RNA (1)...(19): siRNA sense strand
guuaauggaagccuaagua

SEQ ID NO: 1018559 - RNA, 19 nt, Homo sapiens
  misc_RNA (1)...(19): siRNA sense strand
gaacaacacugaggaaaag

SEQ ID NO: 1018560 - RNA, 19 nt, Homo sapiens
  misc_RNA (1)...(19): siRNA sense strand
gagaaaagcccuaucaaug

SEQ ID NO: 1018561 - RNA, 19 nt, Homo sapiens
  misc_RNA (1)...(19): siRNA sense strand
cugcauauauuacacauca

SEQ ID NO: 1018562 - RNA, 19 nt, Homo sapiens
  misc_RNA (1)...(19): siRNA sense strand
gaaauggcuucagcuguag

SEQ ID NO: 1018563 - RNA, 19 nt, Homo sapiens
  misc_RNA (1)...(19): siRNA sense strand
ucucaaaccugcugugauc

SEQ ID NO: 1018564 - RNA, 19 nt, Homo sapiens
  misc_RNA (1)...(19): siRNA sense strand
ggaaagccuucaguaucaa

SEQ ID NO: 1018565 - RNA, 19 nt, Homo sapiens
  misc_RNA (1)...(19): siRNA sense strand
gggagaaacccuucagaug

SEQ ID NO: 1018566 - RNA, 19 nt, Homo sapiens
  misc_RNA (1)...(19): siRNA sense strand
caguaucaaugccaaacua

SEQ ID NO: 1018567 - RNA, 19 nt, Homo sapiens
  misc_RNA (1)...(19): siRNA sense strand
cagcuacaguucccauuau

SEQ ID NO: 1018568 - RNA, 19 nt, Homo sapiens
  misc_RNA (1)...(19): siRNA sense strand
agauguaacucccaauuuc

SEQ ID NO: 1018569 - RNA, 19 nt, Homo sapiens
  misc_RNA (1)...(19): siRNA sense strand
ggagagaagcccuaucagu

SEQ ID NO: 1018570 - RNA, 19 nt, Homo sapiens
  misc_RNA (1)...(19): siRNA sense strand
uaaagaaggagaagagcaa

SEQ ID NO: 1018571 - RNA, 19 nt, Homo sapiens
  misc_RNA (1)...(19): siRNA sense strand
gaauuaguagagcccuuua

SEQ ID NO: 1018572 - RNA, 19 nt, Homo sapiens
  misc_RNA (1)...(19): siRNA sense strand
gugagaaacccuaugaaug

SEQ ID NO: 1018573 - RNA, 19 nt, Homo sapiens
  misc_RNA (1)...(19): siRNA sense strand
gugugacucucaacuuauu

SEQ ID NO: 1018574 - RNA, 19 nt, Homo sapiens
  misc_RNA (1)...(19): siRNA sense strand
aggugugacucucaacuua

SEQ ID NO: 1018575 - RNA, 19 nt, Homo sapiens
  misc_RNA (1)...(19): siRNA sense strand
gcauauauuacacaucaga

SEQ ID NO: 1018576 - RNA, 19 nt, Homo sapiens
  misc_RNA (1)...(19): siRNA sense strand
ugugggagaugcuuuacuu

SEQ ID NO: 1018577 - RNA, 19 nt, Homo sapiens
  misc_RNA (1)...(19): siRNA sense strand
gagaaacccuaugaaugca

SEQ ID NO: 1018578 - RNA, 19 nt, Homo sapiens
  misc_RNA (1)...(19): siRNA sense strand
ugagaaacccuaugaaugc

SEQ ID NO: 1018579 - RNA, 19 nt, Homo sapiens
  misc_RNA (1)...(19): siRNA sense strand
cccauuauaucacacauca

SEQ ID NO: 1018580 - RNA, 19 nt, Homo sapiens
  misc_RNA (1)...(19): siRNA sense strand
ugggaaagcauucagguuu

SEQ ID NO: 1018581 - RNA, 19 nt, Homo sapiens
  misc_RNA (1)...(19): siRNA sense strand
cgggaaagccuucagaugu

SEQ ID NO: 1018582 - RNA, 19 nt, Homo sapiens
  misc_RNA (1)...(19): siRNA sense strand
ggugagaaacccuaugaau

SEQ ID NO: 1018583 - RNA, 19 nt, Homo sapiens
  misc_RNA (1)...(19): siRNA sense strand
gagaaaccuuacgagugua

SEQ ID NO: 1018584 - RNA, 19 nt, Homo sapiens
  misc_RNA (1)...(19): siRNA sense strand
uaaguaggcaucagagaau

SEQ ID NO: 1018585 - RNA, 19 nt, Homo sapiens
  misc_RNA (1)...(19): siRNA sense strand
gagaacaacacugaggaaa

SEQ ID NO: 1018586 - RNA, 19 nt, Homo sapiens
  misc_RNA (1)...(19): siRNA sense strand
uaacuaggcaucagaggau

SEQ ID NO: 1018587 - RNA, 19 nt, Homo sapiens
  misc_RNA (1)...(19): siRNA sense strand
cagcaggaaauauaaagaa

SEQ ID NO: 1018588 - RNA, 19 nt, Homo sapiens
  misc_RNA (1)...(19): siRNA sense strand
gaagagcaacaccauugau

SEQ ID NO: 1018589 - RNA, 19 nt, Homo sapiens
  misc_RNA (1)...(19): siRNA sense strand
ggagaagagcaacaccauu

SEQ ID NO: 1018590 - RNA, 19 nt, Homo sapiens
  misc_RNA (1)...(19): siRNA sense strand
ucagcuacaguucccauua

SEQ ID NO: 1018591 - RNA, 19 nt, Homo sapiens
  misc_RNA (1)...(19): siRNA sense strand
caucagaggauacauacug

SEQ ID NO: 1018592 - RNA, 19 nt, Homo sapiens
  misc_RNA (1)...(19): siRNA sense strand
gagugugggagaugcuuua

SEQ ID NO: 1018593 - RNA, 19 nt, Homo sapiens
  misc_RNA (1)...(19): siRNA sense strand
caucagagaauccauacug

SEQ ID NO: 1018594 - RNA, 19 nt, Homo sapiens
  misc_RNA (1)...(19): siRNA sense strand
ggagaauuaugggaaugug

SEQ ID NO: 1018595 - RNA, 19 nt, Homo sapiens
  misc_RNA (1)...(19): siRNA sense strand
cagcuguaguucugcauau

SEQ ID NO: 1018596 - RNA, 19 nt, Homo sapiens
  misc_RNA (1)...(19): siRNA sense strand
cagauguaacucccaauuu

SEQ ID NO: 1018597 - RNA, 19 nt, Homo sapiens
  misc_RNA (1)...(19): siRNA sense strand
gaaacccuaugaguguaau

SEQ ID NO: 1018598 - RNA, 19 nt, Homo sapiens
  misc_RNA (1)...(19): siRNA sense strand
cauuauaucacacaucaga

SEQ ID NO: 1018599 - RNA, 19 nt, Homo sapiens
  misc_RNA (1)...(19): siRNA sense strand
uggaagaaacccuauaugu

SEQ ID NO: 1018600 - RNA, 19 nt, Homo sapiens
  misc_RNA (1)...(19): siRNA sense strand
gauggaacagugaaagaug

SEQ ID NO: 1018601 - RNA, 19 nt, Homo sapiens
  misc_RNA (1)...(19): siRNA sense strand
cuaaguaggcaucagagaa

SEQ ID NO: 1018602 - RNA, 19 nt, Homo sapiens
  misc_RNA (1)...(19): siRNA sense strand
uauagcaucuucacuguaa

SEQ ID NO: 1018603 - RNA, 19 nt, Homo sapiens
  misc_RNA (1)...(19): siRNA sense strand
ggaauacccugcagguuca

SEQ ID NO: 1018604 - RNA, 19 nt, Homo sapiens
  misc_RNA (1)...(19): siRNA sense strand
guaaagaagagaacaugaa

SEQ ID NO: 1018605 - RNA, 19 nt, Homo sapiens
  misc_RNA (1)...(19): siRNA sense strand
guuccuaucuaucuguaaa

SEQ ID NO: 1018606 - RNA, 19 nt, Homo sapiens
  misc_RNA (1)...(19): siRNA sense strand
gagcagcuguauagcaucu

SEQ ID NO: 1018607 - RNA, 19 nt, Homo sapiens
  misc_RNA (1)...(19): siRNA sense strand
uagagcagcuguauagcau

SEQ ID NO: 1018608 - RNA, 19 nt, Homo sapiens
  misc_RNA (1)...(19): siRNA sense strand
ggaguuaacaaauaagaag

SEQ ID NO: 1018609 - RNA, 19 nt, Homo sapiens
  misc_RNA (1)...(19): siRNA sense strand
gaagcagcauuuugaagaa

SEQ ID NO: 1018610 - RNA, 19 nt, Homo sapiens
  misc_RNA (1)...(19): siRNA sense strand
gcagcuguauagcaucuuc

SEQ ID NO: 1018611 - RNA, 19 nt, Homo sapiens
  misc_RNA (1)...(19): siRNA sense strand
gaguuccuaucuaucugua

SEQ ID NO: 1018612 - RNA, 19 nt, Homo sapiens
  misc_RNA (1)...(19): siRNA sense strand
gcacuggguguaaggauuc

SEQ ID NO: 1018613 - RNA, 19 nt, Homo sapiens
  misc_RNA (1)...(19): siRNA sense strand
ggaacuggccagaagaaca

SEQ ID NO: 1018614 - RNA, 19 nt, Homo sapiens
  misc_RNA (1)...(19): siRNA sense strand
ucacaugauggaacuguuu

SEQ ID NO: 1018615 - RNA, 19 nt, Homo sapiens
  misc_RNA (1)...(19): siRNA sense strand
ggcacuggguguaaggauu

SEQ ID NO: 1018616 - RNA, 19 nt, Homo sapiens
  misc_RNA (1)...(19): siRNA sense strand
guguaaggauucccacugu

SEQ ID NO: 1018617 - RNA, 19 nt, Homo sapiens
  misc_RNA (1)...(19): siRNA sense strand
cuaucuaucuguaaagaag

SEQ ID NO: 1018618 - RNA, 19 nt, Homo sapiens
  misc_RNA (1)...(19): siRNA sense strand
ggaacuguuugacacaacu

SEQ ID NO: 1018619 - RNA, 19 nt, Homo sapiens
  misc_RNA (1)...(19): siRNA sense strand
gggcaaacagaauuacaau

SEQ ID NO: 1018620 - RNA, 19 nt, Homo sapiens
  misc_RNA (1)...(19): siRNA sense strand
agaacacuaugccaugguu

SEQ ID NO: 1018621 - RNA, 19 nt, Homo sapiens
  misc_RNA (1)...(19): siRNA sense strand
gaacuggccagaagaacac

SEQ ID NO: 1018622 - RNA, 19 nt, Homo sapiens
  misc_RNA (1)...(19): siRNA sense strand
uguauagcaucuucacugu

SEQ ID NO: 1018623 - RNA, 19 nt, Homo sapiens
  misc_RNA (1)...(19): siRNA sense strand
guagagcagcuguauagca

SEQ ID NO: 1018624 - RNA, 19 nt, Homo sapiens
  misc_RNA (1)...(19): siRNA sense strand
guauagcaucuucacugua

SEQ ID NO: 1018625 - RNA, 19 nt, Homo sapiens
  misc_RNA (1)...(19): siRNA sense strand
ucuagggcaaacagaauua

SEQ ID NO: 1018626 - RNA, 19 nt, Homo sapiens
  misc_RNA (1)...(19): siRNA sense strand
caacuguagagcagcugua

SEQ ID NO: 1018627 - RNA, 19 nt, Homo sapiens
  misc_RNA (1)...(19): siRNA sense strand
guuggcagaagcagcauuu

SEQ ID NO: 1018628 - RNA, 19 nt, Homo sapiens
  misc_RNA (1)...(19): siRNA sense strand
ugugggaacuggccagaag

SEQ ID NO: 1018629 - RNA, 19 nt, Homo sapiens
  misc_RNA (1)...(19): siRNA sense strand
ggaguuccuaucuaucugu

SEQ ID NO: 1018630 - RNA, 19 nt, Homo sapiens
  misc_RNA (1)...(19): siRNA sense strand
ugccaugguugcacugaau

SEQ ID NO: 1018631 - RNA, 19 nt, Homo sapiens
  misc_RNA (1)...(19): siRNA sense strand
cuguaaaggaguuaacaaa

SEQ ID NO: 1018632 - RNA, 19 nt, Homo sapiens
  misc_RNA (1)...(19): siRNA sense strand
caacccaggaauugacugu

SEQ ID NO: 1018633 - RNA, 19 nt, Homo sapiens
  misc_RNA (1)...(19): siRNA sense strand
ggcagaagcagcauuuuga

SEQ ID NO: 1018634 - RNA, 19 nt, Homo sapiens
  misc_RNA (1)...(19): siRNA sense strand
uauggcaacccaggaauug

SEQ ID NO: 1018635 - RNA, 19 nt, Homo sapiens
  misc_RNA (1)...(19): siRNA sense strand
aaauggagaugugggaacu

SEQ ID NO: 1018636 - RNA, 19 nt, Homo sapiens
  misc_RNA (1)...(19): siRNA sense strand
cuguagagcagcuguauag

SEQ ID NO: 1018637 - RNA, 19 nt, Homo sapiens
  misc_RNA (1)...(19): siRNA sense strand
gauggaacuguuugacaca

SEQ ID NO: 1018638 - RNA, 19 nt, Homo sapiens
  misc_RNA (1)...(19): siRNA sense strand
uaaagagccuucaccagaa

SEQ ID NO: 1018639 - RNA, 19 nt, Homo sapiens
  misc_RNA (1)...(19): siRNA sense strand
uugaagaacugaccaauau

SEQ ID NO: 1018640 - RNA, 19 nt, Homo sapiens
  misc_RNA (1)...(19): siRNA sense strand
cagagaagacagaagauga

SEQ ID NO: 1018641 - RNA, 19 nt, Homo sapiens
  misc_RNA (1)...(19): siRNA sense strand
gacagaagaugaggucuac

SEQ ID NO: 1018642 - RNA, 19 nt, Homo sapiens
  misc_RNA (1)...(19): siRNA sense strand
cagcaucacccucauuguu

SEQ ID NO: 1018643 - RNA, 19 nt, Homo sapiens
  misc_RNA (1)...(19): siRNA sense strand
ugucaucgguucccucaau

SEQ ID NO: 1018644 - RNA, 19 nt, Homo sapiens
  misc_RNA (1)...(19): siRNA sense strand
ucauuguucugucaucuga

SEQ ID NO: 1018645 - RNA, 19 nt, Homo sapiens
  misc_RNA (1)...(19): siRNA sense strand
ggaccgagaacacgacugu

SEQ ID NO: 1018646 - RNA, 19 nt, Homo sapiens
  misc_RNA (1)...(19): siRNA sense strand
uggagagacugaagaagga

SEQ ID NO: 1018647 - RNA, 19 nt, Homo sapiens
  misc_RNA (1)...(19): siRNA sense strand
ccaguuguauccacagcuu

SEQ ID NO: 1018648 - RNA, 19 nt, Homo sapiens
  misc_RNA (1)...(19): siRNA sense strand
gagagacuacuccaaaugg

SEQ ID NO: 1018649 - RNA, 19 nt, Homo sapiens
  misc_RNA (1)...(19): siRNA sense strand
gacagcaucacccucauug

SEQ ID NO: 1018650 - RNA, 19 nt, Homo sapiens
  misc_RNA (1)...(19): siRNA sense strand
ccacauguuugggcagaau

SEQ ID NO: 1018651 - RNA, 19 nt, Homo sapiens
  misc_RNA (1)...(19): siRNA sense strand
ggacuugagggccaguuau

SEQ ID NO: 1018652 - RNA, 19 nt, Homo sapiens
  misc_RNA (1)...(19): siRNA sense strand
caccagagaagacagaaga

SEQ ID NO: 1018653 - RNA, 19 nt, Homo sapiens
  misc_RNA (1)...(19): siRNA sense strand
gcaucacccucauuguucu

SEQ ID NO: 1018654 - RNA, 19 nt, Homo sapiens
  misc_RNA (1)...(19): siRNA sense strand
gaagaacugaccaauaucc

SEQ ID NO: 1018655 - RNA, 19 nt, Homo sapiens
  misc_RNA (1)...(19): siRNA sense strand
gagccaugguccuucuugu

SEQ ID NO: 1018656 - RNA, 19 nt, Homo sapiens
  misc_RNA (1)...(19): siRNA sense strand
cuugaagaacugaccaaua

SEQ ID NO: 1018657 - RNA, 19 nt, Homo sapiens
  misc_RNA (1)...(19): siRNA sense strand
gacuugagggccaguuauu

SEQ ID NO: 1018658 - RNA, 19 nt, Homo sapiens
  misc_RNA (1)...(19): siRNA sense strand
cagcucccguucucuguca

SEQ ID NO: 1018659 - RNA, 19 nt, Homo sapiens
  misc_RNA (1)...(19): siRNA sense strand
ggccaguuauugccucauc

SEQ ID NO: 1018660 - RNA, 19 nt, Homo sapiens
  misc_RNA (1)...(19): siRNA sense strand
ggagccaugguccuucuug

SEQ ID NO: 1018661 - RNA, 19 nt, Homo sapiens
  misc_RNA (1)...(19): siRNA sense strand
gcucugcgaggaccgagaa

SEQ ID NO: 1018662 - RNA, 19 nt, Homo sapiens
  misc_RNA (1)...(19): siRNA sense strand
ugacagcaucacccucauu

SEQ ID NO: 1018663 - RNA, 19 nt, Homo sapiens
  misc_RNA (1)...(19): siRNA sense strand
aaagagccuucaccagaac

SEQ ID NO: 1018664 - RNA, 19 nt, Homo sapiens
  misc_RNA (1)...(19): siRNA sense strand
caucugaggugggcaucuc

SEQ ID NO: 1018665 - RNA, 19 nt, Homo sapiens
  misc_RNA (1)...(19): siRNA sense strand
ccagagaagacagaagaug

SEQ ID NO: 1018666 - RNA, 19 nt, Homo sapiens
  misc_RNA (1)...(19): siRNA sense strand
caacguggagagacugaag

SEQ ID NO: 1018667 - RNA, 19 nt, Homo sapiens
  misc_RNA (1)...(19): siRNA sense strand
gucagcagcucccguucuc

SEQ ID NO: 1018668 - RNA, 19 nt, Homo sapiens
  misc_RNA (1)...(19): siRNA sense strand
cagaagaugaggucuacca

SEQ ID NO: 1018669 - RNA, 19 nt, Homo sapiens
  misc_RNA (1)...(19): siRNA sense strand
cagcagagaucguuacaga

SEQ ID NO: 1018670 - RNA, 19 nt, Homo sapiens
  misc_RNA (1)...(19): siRNA sense strand
gaugaguguuggucagaua

SEQ ID NO: 1018671 - RNA, 19 nt, Homo sapiens
  misc_RNA (1)...(19): siRNA sense strand
gaauaugugcgguggauga

SEQ ID NO: 1018672 - RNA, 19 nt, Homo sapiens
  misc_RNA (1)...(19): siRNA sense strand
gcagagaucguuacagaca

SEQ ID NO: 1018673 - RNA, 19 nt, Homo sapiens
  misc_RNA (1)...(19): siRNA sense strand
ccucagacguggacagcua

SEQ ID NO: 1018674 - RNA, 19 nt, Homo sapiens
  misc_RNA (1)...(19): siRNA sense strand
agagaucguuacagacauu

SEQ ID NO: 1018675 - RNA, 19 nt, Homo sapiens
  misc_RNA (1)...(19): siRNA sense strand
uggaugauguacuggauug

SEQ ID NO: 1018676 - RNA, 19 nt, Homo sapiens
  misc_RNA (1)...(19): siRNA sense strand
ggacagcgacaccgaggau

SEQ ID NO: 1018677 - RNA, 19 nt, Homo sapiens
  misc_RNA (1)...(19): siRNA sense strand
uaugugcgguggaugaugu

SEQ ID NO: 1018678 - RNA, 19 nt, Homo sapiens
  misc_RNA (1)...(19): siRNA sense strand
gugaagaccaagaacauuc

SEQ ID NO: 1018679 - RNA, 19 nt, Homo sapiens
  misc_RNA (1)...(19): siRNA sense strand
cugguucccuuucuacuau

SEQ ID NO: 1018680 - RNA, 19 nt, Homo sapiens
  misc_RNA (1)...(19): siRNA sense strand
gugaauaugugcgguggau

SEQ ID NO: 1018681 - RNA, 19 nt, Homo sapiens
  misc_RNA (1)...(19): siRNA sense strand
augauguacuggauuguuu

SEQ ID NO: 1018682 - RNA, 19 nt, Homo sapiens
  misc_RNA (1)...(19): siRNA sense strand
ggagaucgacgcguacauc

SEQ ID NO: 1018683 - RNA, 19 nt, Homo sapiens
  misc_RNA (1)...(19): siRNA sense strand
gaugauguacuggauuguu

SEQ ID NO: 1018684 - RNA, 19 nt, Homo sapiens
  misc_RNA (1)...(19): siRNA sense strand
gguggaugauguacuggau

SEQ ID NO: 1018685 - RNA, 19 nt, Homo sapiens
  misc_RNA (1)...(19): siRNA sense strand
ccaaggagcgcagcuacga

SEQ ID NO: 1018686 - RNA, 19 nt, Homo sapiens
  misc_RNA (1)...(19): siRNA sense strand
auaaggcugugaagaccaa

SEQ ID NO: 1018687 - RNA, 19 nt, Homo sapiens
  misc_RNA (1)...(19): siRNA sense strand
ggaugaguguuggucagau

SEQ ID NO: 1018688 - RNA, 19 nt, Homo sapiens
  misc_RNA (1)...(19): siRNA sense strand
gaccaagaacauucgugaa

SEQ ID NO: 1018689 - RNA, 19 nt, Homo sapiens
  misc_RNA (1)...(19): siRNA sense strand
ucuccugguucccuuucua

SEQ ID NO: 1018690 - RNA, 19 nt, Homo sapiens
  misc_RNA (1)...(19): siRNA sense strand
gguucccuuucuacuauga

SEQ ID NO: 1018691 - RNA, 19 nt, Homo sapiens
  misc_RNA (1)...(19): siRNA sense strand
aaaagacugugcccucaga

SEQ ID NO: 1018692 - RNA, 19 nt, Homo sapiens
  misc_RNA (1)...(19): siRNA sense strand
uggcugcucucacccuaca

SEQ ID NO: 1018693 - RNA, 19 nt, Homo sapiens
  misc_RNA (1)...(19): siRNA sense strand
ggaccugcgcuccaucucu

SEQ ID NO: 1018694 - RNA, 19 nt, Homo sapiens
  misc_RNA (1)...(19): siRNA sense strand
ccuauaaggcugugaagac

SEQ ID NO: 1018695 - RNA, 19 nt, Homo sapiens
  misc_RNA (1)...(19): siRNA sense strand
cagagaucguuacagacau

SEQ ID NO: 1018696 - RNA, 19 nt, Homo sapiens
  misc_RNA (1)...(19): siRNA sense strand
ccugguucccuuucuacua

SEQ ID NO: 1018697 - RNA, 19 nt, Homo sapiens
  misc_RNA (1)...(19): siRNA sense strand
caacaaaucuggauauugg

SEQ ID NO: 1018698 - RNA, 19 nt, Homo sapiens
  misc_RNA (1)...(19): siRNA sense strand
gaaacugacucuggauaua

SEQ ID NO: 1018699 - RNA, 19 nt, Homo sapiens
  misc_RNA (1)...(19): siRNA sense strand
gcaaauagcugugguagag

SEQ ID NO: 1018700 - RNA, 19 nt, Homo sapiens
  misc_RNA (1)...(19): siRNA sense strand
gaaaucaugugaaaugugu

SEQ ID NO: 1018701 - RNA, 19 nt, Homo sapiens
  misc_RNA (1)...(19): siRNA sense strand
gaauguguguucucgauuu

SEQ ID NO: 1018702 - RNA, 19 nt, Homo sapiens
  misc_RNA (1)...(19): siRNA sense strand
gaacaccucugcuuuaugc

SEQ ID NO: 1018703 - RNA, 19 nt, Homo sapiens
  misc_RNA (1)...(19): siRNA sense strand
gguggcaucuguccuauuu

SEQ ID NO: 1018704 - RNA, 19 nt, Homo sapiens
  misc_RNA (1)...(19): siRNA sense strand
ggacccaaauucagaagaa

SEQ ID NO: 1018705 - RNA, 19 nt, Homo sapiens
  misc_RNA (1)...(19): siRNA sense strand
cuacacagauauugucaaa

SEQ ID NO: 1018706 - RNA, 19 nt, Homo sapiens
  misc_RNA (1)...(19): siRNA sense strand
cauauugccuaaccgauuu

SEQ ID NO: 1018707 - RNA, 19 nt, Homo sapiens
  misc_RNA (1)...(19): siRNA sense strand
aguaaaggcuacacagaua

SEQ ID NO: 1018708 - RNA, 19 nt, Homo sapiens
  misc_RNA (1)...(19): siRNA sense strand
ccacaccucuguuagcaaa

SEQ ID NO: 1018709 - RNA, 19 nt, Homo sapiens
  misc_RNA (1)...(19): siRNA sense strand
gauauuggagcccagcuua

SEQ ID NO: 1018710 - RNA, 19 nt, Homo sapiens
  misc_RNA (1)...(19): siRNA sense strand
aagcauuucucacccauaa

SEQ ID NO: 1018711 - RNA, 19 nt, Homo sapiens
  misc_RNA (1)...(19): siRNA sense strand
uggcaucuguccuauuuaa

SEQ ID NO: 1018712 - RNA, 19 nt, Homo sapiens
  misc_RNA (1)...(19): siRNA sense strand
ucacacggaugaagaagga

SEQ ID NO: 1018713 - RNA, 19 nt, Homo sapiens
  misc_RNA (1)...(19): siRNA sense strand
caacaaacacagaggaaau

SEQ ID NO: 1018714 - RNA, 19 nt, Homo sapiens
  misc_RNA (1)...(19): siRNA sense strand
ggagguggcaucuguccua

SEQ ID NO: 1018715 - RNA, 19 nt, Homo sapiens
  misc_RNA (1)...(19): siRNA sense strand
gggcugauccaacaauuga

SEQ ID NO: 1018716 - RNA, 19 nt, Homo sapiens
  misc_RNA (1)...(19): siRNA sense strand
ccuaaccgauuugauauga

SEQ ID NO: 1018717 - RNA, 19 nt, Homo sapiens
  misc_RNA (1)...(19): siRNA sense strand
caugugaaauguguaaaga

SEQ ID NO: 1018718 - RNA, 19 nt, Homo sapiens
  misc_RNA (1)...(19): siRNA sense strand
gcccuaggcuauagaagug

SEQ ID NO: 1018719 - RNA, 19 nt, Homo sapiens
  misc_RNA (1)...(19): siRNA sense strand
ugugaaauguguaaagaug

SEQ ID NO: 1018720 - RNA, 19 nt, Homo sapiens
  misc_RNA (1)...(19): siRNA sense strand
aaacugacucuggauauaa

SEQ ID NO: 1018721 - RNA, 19 nt, Homo sapiens
  misc_RNA (1)...(19): siRNA sense strand
guccuuaaaugaagaagau

SEQ ID NO: 1018722 - RNA, 19 nt, Homo sapiens
  misc_RNA (1)...(19): siRNA sense strand
guuauugagucacauuugu

SEQ ID NO: 1018723 - RNA, 19 nt, Homo sapiens
  misc_RNA (1)...(19): siRNA sense strand
aaauagcugugguagaguu

SEQ ID NO: 1018724 - RNA, 19 nt, Homo sapiens
  misc_RNA (1)...(19): siRNA sense strand
gugaaguccuuaaaugaag

SEQ ID NO: 1018725 - RNA, 19 nt, Homo sapiens
  misc_RNA (1)...(19): siRNA sense strand
gcacugucguuggccugua

SEQ ID NO: 1018726 - RNA, 19 nt, Homo sapiens
  misc_RNA (1)...(19): siRNA sense strand
uaaaggcuacacagauauu

SEQ ID NO: 1018727 - RNA, 19 nt, Homo sapiens
  misc_RNA (1)...(19): siRNA sense strand
ggaaaucaugugaaaugug

SEQ ID NO: 1018728 - RNA, 19 nt, Homo sapiens
  misc_RNA (1)...(19): siRNA sense strand
aaacagucaaccacuuuaa

SEQ ID NO: 1018729 - RNA, 19 nt, Homo sapiens
  misc_RNA (1)...(19): siRNA sense strand
caaccacuuuaaccaacaa

SEQ ID NO: 1018730 - RNA, 19 nt, Homo sapiens
  misc_RNA (1)...(19): siRNA sense strand
ugaaguccuuaaaugaaga

SEQ ID NO: 1018731 - RNA, 19 nt, Homo sapiens
  misc_RNA (1)...(19): siRNA sense strand
gcuuuaugcuguacaugga

SEQ ID NO: 1018732 - RNA, 19 nt, Homo sapiens
  misc_RNA (1)...(19): siRNA sense strand
guaaaggcuacacagauau

SEQ ID NO: 1018733 - RNA, 19 nt, Homo sapiens
  misc_RNA (1)...(19): siRNA sense strand
gagaaagugcacugucguu

SEQ ID NO: 1018734 - RNA, 19 nt, Homo sapiens
  misc_RNA (1)...(19): siRNA sense strand
gaauucaaguaaggcaugu

SEQ ID NO: 1018735 - RNA, 19 nt, Homo sapiens
  misc_RNA (1)...(19): siRNA sense strand
gcugaaugcaauauccaua

SEQ ID NO: 1018736 - RNA, 19 nt, Homo sapiens
  misc_RNA (1)...(19): siRNA sense strand
ugaaugcaauauccauaca

SEQ ID NO: 1018737 - RNA, 19 nt, Homo sapiens
  misc_RNA (1)...(19): siRNA sense strand
cuacucguaucgaacaaga

SEQ ID NO: 1018738 - RNA, 19 nt, Homo sapiens
  misc_RNA (1)...(19): siRNA sense strand
caucaacaaaucuggauau

SEQ ID NO: 1018739 - RNA, 19 nt, Homo sapiens
  misc_RNA (1)...(19): siRNA sense strand
gcugauccaacaauugaaa

SEQ ID NO: 1018740 - RNA, 19 nt, Homo sapiens
  misc_RNA (1)...(19): siRNA sense strand
uuugugaaguccuuaaaug

SEQ ID NO: 1018741 - RNA, 19 nt, Homo sapiens
  misc_RNA (1)...(19): siRNA sense strand
uggaguugauguaaaugaa

SEQ ID NO: 1018742 - RNA, 19 nt, Homo sapiens
  misc_RNA (1)...(19): siRNA sense strand
acaccucuguuagcaaauu

SEQ ID NO: 1018743 - RNA, 19 nt, Homo sapiens
  misc_RNA (1)...(19): siRNA sense strand
ggaaaugaggucucuacca

SEQ ID NO: 1018744 - RNA, 19 nt, Homo sapiens
  misc_RNA (1)...(19): siRNA sense strand
gcaucuguccuauuuaaag

SEQ ID NO: 1018745 - RNA, 19 nt, Homo sapiens
  misc_RNA (1)...(19): siRNA sense strand
uugccuaaccgauuugaua

SEQ ID NO: 1018746 - RNA, 19 nt, Homo sapiens
  misc_RNA (1)...(19): siRNA sense strand
aggaacaccucugcuuuau

SEQ ID NO: 1018747 - RNA, 19 nt, Homo sapiens
  misc_RNA (1)...(19): siRNA sense strand
ugaauaugauuggaaugga

SEQ ID NO: 1018748 - RNA, 19 nt, Homo sapiens
  misc_RNA (1)...(19): siRNA sense strand
uagaguuccuacuucagaa

SEQ ID NO: 1018749 - RNA, 19 nt, Homo sapiens
  misc_RNA (1)...(19): siRNA sense strand
ggauuuacuccucugaugu

SEQ ID NO: 1018750 - RNA, 19 nt, Homo sapiens
  misc_RNA (1)...(19): siRNA sense strand
ucaaucacacggaugaaga

SEQ ID NO: 1018751 - RNA, 19 nt, Homo sapiens
  misc_RNA (1)...(19): siRNA sense strand
gacucuggauauaauucua

SEQ ID NO: 1018752 - RNA, 19 nt, Homo sapiens
  misc_RNA (1)...(19): siRNA sense strand
ugaaacugacucuggauau

SEQ ID NO: 1018753 - RNA, 19 nt, Homo sapiens
  misc_RNA (1)...(19): siRNA sense strand
ucauauugccuaaccgauu

SEQ ID NO: 1018754 - RNA, 19 nt, Homo sapiens
  misc_RNA (1)...(19): siRNA sense strand
gcagcacacgggcaaauag

SEQ ID NO: 1018755 - RNA, 19 nt, Homo sapiens
  misc_RNA (1)...(19): siRNA sense strand
gagguggcaucuguccuau

SEQ ID NO: 1018756 - RNA, 19 nt, Homo sapiens
  misc_RNA (1)...(19): siRNA sense strand
gaggaaaugaggucucuac

SEQ ID NO: 1018757 - RNA, 19 nt, Homo sapiens
  misc_RNA (1)...(19): siRNA sense strand
ugugaaguccuuaaaugaa

SEQ ID NO: 1018758 - RNA, 19 nt, Homo sapiens
  misc_RNA (1)...(19): siRNA sense strand
ggaacaccucugcuuuaug

SEQ ID NO: 1018759 - RNA, 19 nt, Homo sapiens
  misc_RNA (1)...(19): siRNA sense strand
ggaguugauguaaaugaau

SEQ ID NO: 1018760 - RNA, 19 nt, Homo sapiens
  misc_RNA (1)...(19): siRNA sense strand
gcugcuugauuguggaguu

SEQ ID NO: 1018761 - RNA, 19 nt, Homo sapiens
  misc_RNA (1)...(19): siRNA sense strand
gauuuacuccucugaugug

SEQ ID NO: 1018762 - RNA, 19 nt, Homo sapiens
  misc_RNA (1)...(19): siRNA sense strand
gauuguggaguugauguaa

SEQ ID NO: 1018763 - RNA, 19 nt, Homo sapiens
  misc_RNA (1)...(19): siRNA sense strand
gaaguccuuaaaugaagaa

SEQ ID NO: 1018764 - RNA, 19 nt, Homo sapiens
  misc_RNA (1)...(19): siRNA sense strand
ugaaauguguaaagaugcu

SEQ ID NO: 1018765 - RNA, 19 nt, Homo sapiens
  misc_RNA (1)...(19): siRNA sense strand
ggaugaagaaggauuuacu

SEQ ID NO: 1018766 - RNA, 19 nt, Homo sapiens
  misc_RNA (1)...(19): siRNA sense strand
caaucacacggaugaagaa

SEQ ID NO: 1018767 - RNA, 19 nt, Homo sapiens
  misc_RNA (1)...(19): siRNA sense strand
ccacuuuaaccaacaaaca

SEQ ID NO: 1018768 - RNA, 19 nt, Homo sapiens
  misc_RNA (1)...(19): siRNA sense strand
auccaacaauugaaacuga

SEQ ID NO: 1018769 - RNA, 19 nt, Homo sapiens
  misc_RNA (1)...(19): siRNA sense strand
ucaacaaaucuggauauug

SEQ ID NO: 1018770 - RNA, 19 nt, Homo sapiens
  misc_RNA (1)...(19): siRNA sense strand
ccaacaaacacagaggaaa

SEQ ID NO: 1018771 - RNA, 19 nt, Homo sapiens
  misc_RNA (1)...(19): siRNA sense strand
ccucuacaacaaagcauuu

SEQ ID NO: 1018772 - RNA, 19 nt, Homo sapiens
  misc_RNA (1)...(19): siRNA sense strand
ucaaccacuuuaaccaaca

SEQ ID NO: 1018773 - RNA, 19 nt, Homo sapiens
  misc_RNA (1)...(19): siRNA sense strand
uaaaacagucaaccacuuu

SEQ ID NO: 1018774 - RNA, 19 nt, Homo sapiens
  misc_RNA (1)...(19): siRNA sense strand
gauuugugaaguccuuaaa

SEQ ID NO: 1018775 - RNA, 19 nt, Homo sapiens
  misc_RNA (1)...(19): siRNA sense strand
aaugcaauauccauacauc

SEQ ID NO: 1018776 - RNA, 19 nt, Homo sapiens
  misc_RNA (1)...(19): siRNA sense strand
uaccacaccucuguuagca

SEQ ID NO: 1018777 - RNA, 19 nt, Homo sapiens
  misc_RNA (1)...(19): siRNA sense strand
ggauacaucaacaaaucug

SEQ ID NO: 1018778 - RNA, 19 nt, Homo sapiens
  misc_RNA (1)...(19): siRNA sense strand
ugauuggaauggaggaaca

SEQ ID NO: 1018779 - RNA, 19 nt, Homo sapiens
  misc_RNA (1)...(19): siRNA sense strand
gaugaagaaggauuuacuc

SEQ ID NO: 1018780 - RNA, 19 nt, Homo sapiens
  misc_RNA (1)...(19): siRNA sense strand
ucaaguaaggcaugucuac

SEQ ID NO: 1018781 - RNA, 19 nt, Homo sapiens
  misc_RNA (1)...(19): siRNA sense strand
gguuauugagucacauuug

SEQ ID NO: 1018782 - RNA, 19 nt, Homo sapiens
  misc_RNA (1)...(19): siRNA sense strand
gguguugccaugggaauga

SEQ ID NO: 1018783 - RNA, 19 nt, Homo sapiens
  misc_RNA (1)...(19): siRNA sense strand
uggaaaucaugugaaaugu

SEQ ID NO: 1018784 - RNA, 19 nt, Homo sapiens
  misc_RNA (1)...(19): siRNA sense strand
uaguaaaggcuacacagau

SEQ ID NO: 1018785 - RNA, 19 nt, Homo sapiens
  misc_RNA (1)...(19): siRNA sense strand
gucguuggccuguaguaaa

SEQ ID NO: 1018786 - RNA, 19 nt, Homo sapiens
  misc_RNA (1)...(19): siRNA sense strand
aauguguguucucgauuug

SEQ ID NO: 1018787 - RNA, 19 nt, Homo sapiens
  misc_RNA (1)...(19): siRNA sense strand
cuaaccgauuugauaugaa

SEQ ID NO: 1018788 - RNA, 19 nt, Homo sapiens
  misc_RNA (1)...(19): siRNA sense strand
gcauuucucacccauaaaa

SEQ ID NO: 1018789 - RNA, 19 nt, Homo sapiens
  misc_RNA (1)...(19): siRNA sense strand
caucuguccuauuuaaagc

SEQ ID NO: 1018790 - RNA, 19 nt, Homo sapiens
  misc_RNA (1)...(19): siRNA sense strand
ccuaggcuauagaaguguu

SEQ ID NO: 1018791 - RNA, 19 nt, Homo sapiens
  misc_RNA (1)...(19): siRNA sense strand
uuguggaguugauguaaau

SEQ ID NO: 1018792 - RNA, 19 nt, Homo sapiens
  misc_RNA (1)...(19): siRNA sense strand
ugagucacauuuguugaag

SEQ ID NO: 1018793 - RNA, 19 nt, Homo sapiens
  misc_RNA (1)...(19): siRNA sense strand
gaaugcaauauccauacau

SEQ ID NO: 1018794 - RNA, 19 nt, Homo sapiens
  misc_RNA (1)...(19): siRNA sense strand
auggaaaucaugugaaaug

SEQ ID NO: 1018795 - RNA, 19 nt, Homo sapiens
  misc_RNA (1)...(19): siRNA sense strand
guggaguugauguaaauga

SEQ ID NO: 1018796 - RNA, 19 nt, Homo sapiens
  misc_RNA (1)...(19): siRNA sense strand
acucguaucgaacaagaaa

SEQ ID NO: 1018797 - RNA, 19 nt, Homo sapiens
  misc_RNA (1)...(19): siRNA sense strand
gaaguuccaucgaggacaa

SEQ ID NO: 1018798 - RNA, 19 nt, Homo sapiens
  misc_RNA (1)...(19): siRNA sense strand
gauuugaucuagaugaaga

SEQ ID NO: 1018799 - RNA, 19 nt, Homo sapiens
  misc_RNA (1)...(19): siRNA sense strand
guacagagcugggauccau

SEQ ID NO: 1018800 - RNA, 19 nt, Homo sapiens
  misc_RNA (1)...(19): siRNA sense strand
gaaugaagccuuguacaga

SEQ ID NO: 1018801 - RNA, 19 nt, Homo sapiens
  misc_RNA (1)...(19): siRNA sense strand
acacacaggucuaccagaa

SEQ ID NO: 1018802 - RNA, 19 nt, Homo sapiens
  misc_RNA (1)...(19): siRNA sense strand
uagggaacaucauuaagaa

SEQ ID NO: 1018803 - RNA, 19 nt, Homo sapiens
  misc_RNA (1)...(19): siRNA sense strand
ccagguccauggaaagaaa

SEQ ID NO: 1018804 - RNA, 19 nt, Homo sapiens
  misc_RNA (1)...(19): siRNA sense strand
ugaucuagaugaagaaaug

SEQ ID NO: 1018805 - RNA, 19 nt, Homo sapiens
  misc_RNA (1)...(19): siRNA sense strand
gcagaagacccuugaugga

SEQ ID NO: 1018806 - RNA, 19 nt, Homo sapiens
  misc_RNA (1)...(19): siRNA sense strand
cgaggaugauucugaguau

SEQ ID NO: 1018807 - RNA, 19 nt, Homo sapiens
  misc_RNA (1)...(19): siRNA sense strand
ggaugauucugaguauuug

SEQ ID NO: 1018808 - RNA, 19 nt, Homo sapiens
  misc_RNA (1)...(19): siRNA sense strand
ugucagcuuugguuuguuu

SEQ ID NO: 1018809 - RNA, 19 nt, Homo sapiens
  misc_RNA (1)...(19): siRNA sense strand
gggcuagggaacaucauua

SEQ ID NO: 1018810 - RNA, 19 nt, Homo sapiens
  misc_RNA (1)...(19): siRNA sense strand
gcgaggaugauucugagua

SEQ ID NO: 1018811 - RNA, 19 nt, Homo sapiens
  misc_RNA (1)...(19): siRNA sense strand
gaggaugauucugaguauu

SEQ ID NO: 1018812 - RNA, 19 nt, Homo sapiens
  misc_RNA (1)...(19): siRNA sense strand
cuagggaacaucauuaaga

SEQ ID NO: 1018813 - RNA, 19 nt, Homo sapiens
  misc_RNA (1)...(19): siRNA sense strand
gggagguccugguggauca

SEQ ID NO: 1018814 - RNA, 19 nt, Homo sapiens
  misc_RNA (1)...(19): siRNA sense strand
acacaggucuaccagaaag

SEQ ID NO: 1018815 - RNA, 19 nt, Homo sapiens
  misc_RNA (1)...(19): siRNA sense strand
gcagugccaguucuccuaa

SEQ ID NO: 1018816 - RNA, 19 nt, Homo sapiens
  misc_RNA (1)...(19): siRNA sense strand
acacccagguccauggaaa

SEQ ID NO: 1018817 - RNA, 19 nt, Homo sapiens
  misc_RNA (1)...(19): siRNA sense strand
gggcagcaguaagaagcua

SEQ ID NO: 1018818 - RNA, 19 nt, Homo sapiens
  misc_RNA (1)...(19): siRNA sense strand
gggcagaagacccuugaug

SEQ ID NO: 1018819 - RNA, 19 nt, Homo sapiens
  misc_RNA (1)...(19): siRNA sense strand
gccaccaggucaugaagga

SEQ ID NO: 1018820 - RNA, 19 nt, Homo sapiens
  misc_RNA (1)...(19): siRNA sense strand
ccaagaaagccaacaagag

SEQ ID NO: 1018821 - RNA, 19 nt, Homo sapiens
  misc_RNA (1)...(19): siRNA sense strand
gcagaccgcagcacacaca

SEQ ID NO: 1018822 - RNA, 19 nt, Homo sapiens
  misc_RNA (1)...(19): siRNA sense strand
aggaugauucugaguauuu

SEQ ID NO: 1018823 - RNA, 19 nt, Homo sapiens
  misc_RNA (1)...(19): siRNA sense strand
ggccguuggugaggaaauu

SEQ ID NO: 1018824 - RNA, 19 nt, Homo sapiens
  misc_RNA (1)...(19): siRNA sense strand
gccaagaaagccaacaaga

SEQ ID NO: 1018825 - RNA, 19 nt, Homo sapiens
  misc_RNA (1)...(19): siRNA sense strand
ccaucgaggacaagccuua

SEQ ID NO: 1018826 - RNA, 19 nt, Homo sapiens
  misc_RNA (1)...(19): siRNA sense strand
cauccugucugagaaguuc

SEQ ID NO: 1018827 - RNA, 19 nt, Homo sapiens
  misc_RNA (1)...(19): siRNA sense strand
cagaagacccuugauggau

SEQ ID NO: 1018828 - RNA, 19 nt, Homo sapiens
  misc_RNA (1)...(19): siRNA sense strand
gcucagccugucugcuaua

SEQ ID NO: 1018829 - RNA, 19 nt, Homo sapiens
  misc_RNA (1)...(19): siRNA sense strand
cgagguugguccugcacuu

SEQ ID NO: 1018830 - RNA, 19 nt, Homo sapiens
  misc_RNA (1)...(19): siRNA sense strand
gagccaagaaagccaacaa

SEQ ID NO: 1018831 - RNA, 19 nt, Homo sapiens
  misc_RNA (1)...(19): siRNA sense strand
cgugucagcuuugguuugu

SEQ ID NO: 1018832 - RNA, 19 nt, Homo sapiens
  misc_RNA (1)...(19): siRNA sense strand
cugaguauuuggagagaga

SEQ ID NO: 1018833 - RNA, 19 nt, Homo sapiens
  misc_RNA (1)...(19): siRNA sense strand
auaauugucaguugucuug

SEQ ID NO: 1018834 - RNA, 19 nt, Homo sapiens
  misc_RNA (1)...(19): siRNA sense strand
ccagagcagugccaguucu

SEQ ID NO: 1018835 - RNA, 19 nt, Homo sapiens
  misc_RNA (1)...(19): siRNA sense strand
gagguugguccugcacuuu

SEQ ID NO: 1018836 - RNA, 19 nt, Homo sapiens
  misc_RNA (1)...(19): siRNA sense strand
ggcuagggaacaucauuaa

SEQ ID NO: 1018837 - RNA, 19 nt, Homo sapiens
  misc_RNA (1)...(19): siRNA sense strand
caccagagccuccacaaaa

SEQ ID NO: 1018838 - RNA, 19 nt, Homo sapiens
  misc_RNA (1)...(19): siRNA sense strand
uuaagaaugaagccuugua

SEQ ID NO: 1018839 - RNA, 19 nt, Homo sapiens
  misc_RNA (1)...(19): siRNA sense strand
uggaucacgugguggaguu

SEQ ID NO: 1018840 - RNA, 19 nt, Homo sapiens
  misc_RNA (1)...(19): siRNA sense strand
ccauggaaagaaauuauuc

SEQ ID NO: 1018841 - RNA, 19 nt, Homo sapiens
  misc_RNA (1)...(19): siRNA sense strand
gguccauggaaagaaauua

SEQ ID NO: 1018842 - RNA, 19 nt, Homo sapiens
  misc_RNA (1)...(19): siRNA sense strand
ggucaugaaggaggcguuu

SEQ ID NO: 1018843 - RNA, 19 nt, Homo sapiens
  misc_RNA (1)...(19): siRNA sense strand
guccauggaaagaaauuau

SEQ ID NO: 1018844 - RNA, 19 nt, Homo sapiens
  misc_RNA (1)...(19): siRNA sense strand
uaagaaugaagccuuguac

SEQ ID NO: 1018845 - RNA, 19 nt, Homo sapiens
  misc_RNA (1)...(19): siRNA sense strand
ucucagggcuagggaacau

SEQ ID NO: 1018846 - RNA, 19 nt, Homo sapiens
  misc_RNA (1)...(19): siRNA sense strand
ucgaggacaagccuuagaa

SEQ ID NO: 1018847 - RNA, 19 nt, Homo sapiens
  misc_RNA (1)...(19): siRNA sense strand
agaaugaagccuuguacag

SEQ ID NO: 1018848 - RNA, 19 nt, Homo sapiens
  misc_RNA (1)...(19): siRNA sense strand
cagccugucugcuauacac

SEQ ID NO: 1018849 - RNA, 19 nt, Homo sapiens
  misc_RNA (1)...(19): siRNA sense strand
gcaaggagcugcagagaau

SEQ ID NO: 1018850 - RNA, 19 nt, Homo sapiens
  misc_RNA (1)...(19): siRNA sense strand
gaaauccuccgcugcauua

SEQ ID NO: 1018851 - RNA, 19 nt, Homo sapiens
  misc_RNA (1)...(19): siRNA sense strand
ccacaaagccucuggacua

SEQ ID NO: 1018852 - RNA, 19 nt, Homo sapiens
  misc_RNA (1)...(19): siRNA sense strand
gaaaggagcagcccaggaa

SEQ ID NO: 1018853 - RNA, 19 nt, Homo sapiens
  misc_RNA (1)...(19): siRNA sense strand
gaaggagagucaaagcaaa

SEQ ID NO: 1018854 - RNA, 19 nt, Homo sapiens
  misc_RNA (1)...(19): siRNA sense strand
gcaagaagcacaaggcaaa

SEQ ID NO: 1018855 - RNA, 19 nt, Homo sapiens
  misc_RNA (1)...(19): siRNA sense strand
ggaagagccugaaccuguu

SEQ ID NO: 1018856 - RNA, 19 nt, Homo sapiens
  misc_RNA (1)...(19): siRNA sense strand
ggaaaguacuggagagcaa

SEQ ID NO: 1018857 - RNA, 19 nt, Homo sapiens
  misc_RNA (1)...(19): siRNA sense strand
gaauaacuccgaccagauu

SEQ ID NO: 1018858 - RNA, 19 nt, Homo sapiens
  misc_RNA (1)...(19): siRNA sense strand
ggcaaaggaugacaagaaa

SEQ ID NO: 1018859 - RNA, 19 nt, Homo sapiens
  misc_RNA (1)...(19): siRNA sense strand
uaaagaagccagugaguga

SEQ ID NO: 1018860 - RNA, 19 nt, Homo sapiens
  misc_RNA (1)...(19): siRNA sense strand
agaaggagaccaucuauuu

SEQ ID NO: 1018861 - RNA, 19 nt, Homo sapiens
  misc_RNA (1)...(19): siRNA sense strand
gaaugugccugaagagcaa

SEQ ID NO: 1018862 - RNA, 19 nt, Homo sapiens
  misc_RNA (1)...(19): siRNA sense strand
ggagucgacuggaauacuu

SEQ ID NO: 1018863 - RNA, 19 nt, Homo sapiens
  misc_RNA (1)...(19): siRNA sense strand
gagaaggccucugugaaug

SEQ ID NO: 1018864 - RNA, 19 nt, Homo sapiens
  misc_RNA (1)...(19): siRNA sense strand
gaacccauccuacucuauu

SEQ ID NO: 1018865 - RNA, 19 nt, Homo sapiens
  misc_RNA (1)...(19): siRNA sense strand
caacacauuccucgccuua

SEQ ID NO: 1018866 - RNA, 19 nt, Homo sapiens
  misc_RNA (1)...(19): siRNA sense strand
gaaggagaccaucuauuug

SEQ ID NO: 1018867 - RNA, 19 nt, Homo sapiens
  misc_RNA (1)...(19): siRNA sense strand
ugaagacacagcauacuua

SEQ ID NO: 1018868 - RNA, 19 nt, Homo sapiens
  misc_RNA (1)...(19): siRNA sense strand
gaacaacccacacccacaa

SEQ ID NO: 1018869 - RNA, 19 nt, Homo sapiens
  misc_RNA (1)...(19): siRNA sense strand
gaagauaaacgugucauca

SEQ ID NO: 1018870 - RNA, 19 nt, Homo sapiens
  misc_RNA (1)...(19): siRNA sense strand
acaaggagaugacauucuu

SEQ ID NO: 1018871 - RNA, 19 nt, Homo sapiens
  misc_RNA (1)...(19): siRNA sense strand
gaucggagucuguuucuga

SEQ ID NO: 1018872 - RNA, 19 nt, Homo sapiens
  misc_RNA (1)...(19): siRNA sense strand
gagaccaucuauuugaaug

SEQ ID NO: 1018873 - RNA, 19 nt, Homo sapiens
  misc_RNA (1)...(19): siRNA sense strand
agacaaagaagacaagaaa

SEQ ID NO: 1018874 - RNA, 19 nt, Homo sapiens
  misc_RNA (1)...(19): siRNA sense strand
gaagagccugaaccuguua

SEQ ID NO: 1018875 - RNA, 19 nt, Homo sapiens
  misc_RNA (1)...(19): siRNA sense strand
ugaagucucuaaagaagga

SEQ ID NO: 1018876 - RNA, 19 nt, Homo sapiens
  misc_RNA (1)...(19): siRNA sense strand
ccucaucucugcugaagga

SEQ ID NO: 1018877 - RNA, 19 nt, Homo sapiens
  misc_RNA (1)...(19): siRNA sense strand
caugaagucucuaaagaag

SEQ ID NO: 1018878 - RNA, 19 nt, Homo sapiens
  misc_RNA (1)...(19): siRNA sense strand
uaucauccguaaacucaaa

SEQ ID NO: 1018879 - RNA, 19 nt, Homo sapiens
  misc_RNA (1)...(19): siRNA sense strand
cagggaagcuccucugaag

SEQ ID NO: 1018880 - RNA, 19 nt, Homo sapiens
  misc_RNA (1)...(19): siRNA sense strand
ugugaaugcugagcuguua

SEQ ID NO: 1018881 - RNA, 19 nt, Homo sapiens
  misc_RNA (1)...(19): siRNA sense strand
acacagcccugcggaagaa

SEQ ID NO: 1018882 - RNA, 19 nt, Homo sapiens
  misc_RNA (1)...(19): siRNA sense strand
gcaguaauccacaggacaa

SEQ ID NO: 1018883 - RNA, 19 nt, Homo sapiens
  misc_RNA (1)...(19): siRNA sense strand
caaagccucuggacuacuc

SEQ ID NO: 1018884 - RNA, 19 nt, Homo sapiens
  misc_RNA (1)...(19): siRNA sense strand
caaaggaugacaagaaagu

SEQ ID NO: 1018885 - RNA, 19 nt, Homo sapiens
  misc_RNA (1)...(19): siRNA sense strand
gaucaaagacaaagaagac

SEQ ID NO: 1018886 - RNA, 19 nt, Homo sapiens
  misc_RNA (1)...(19): siRNA sense strand
ccucagagaaugucaaaga

SEQ ID NO: 1018887 - RNA, 19 nt, Homo sapiens
  misc_RNA (1)...(19): siRNA sense strand
caaagaagacaagaaagga

SEQ ID NO: 1018888 - RNA, 19 nt, Homo sapiens
  misc_RNA (1)...(19): siRNA sense strand
gagcuguuaccacgcuuua

SEQ ID NO: 1018889 - RNA, 19 nt, Homo sapiens
  misc_RNA (1)...(19): siRNA sense strand
acauuuaccuucuucuuca

SEQ ID NO: 1018890 - RNA, 19 nt, Homo sapiens
  misc_RNA (1)...(19): siRNA sense strand
ggagucuguuucugaucua

SEQ ID NO: 1018891 - RNA, 19 nt, Homo sapiens
  misc_RNA (1)...(19): siRNA sense strand
gaaggauucccgccucaga

SEQ ID NO: 1018892 - RNA, 19 nt, Homo sapiens
  misc_RNA (1)...(19): siRNA sense strand
gaagguaccuguggggaaa

SEQ ID NO: 1018893 - RNA, 19 nt, Homo sapiens
  misc_RNA (1)...(19): siRNA sense strand
uggaagagcuggauuucag

SEQ ID NO: 1018894 - RNA, 19 nt, Homo sapiens
  misc_RNA (1)...(19): siRNA sense strand
gaagacacagcauacuuag

SEQ ID NO: 1018895 - RNA, 19 nt, Homo sapiens
  misc_RNA (1)...(19): siRNA sense strand
gauuucagccagcaggaua

SEQ ID NO: 1018896 - RNA, 19 nt, Homo sapiens
  misc_RNA (1)...(19): siRNA sense strand
gcaccguggccauuuggua

SEQ ID NO: 1018897 - RNA, 19 nt, Homo sapiens
  misc_RNA (1)...(19): siRNA sense strand
ggacagguuuucuuuggaa

SEQ ID NO: 1018898 - RNA, 19 nt, Homo sapiens
  misc_RNA (1)...(19): siRNA sense strand
gaccaucuauuugaaugug

SEQ ID NO: 1018899 - RNA, 19 nt, Homo sapiens
  misc_RNA (1)...(19): siRNA sense strand
ugauggugcucccugauga

SEQ ID NO: 1018900 - RNA, 19 nt, Homo sapiens
  misc_RNA (1)...(19): siRNA sense strand
gucaucacccagaaauuua

SEQ ID NO: 1018901 - RNA, 19 nt, Homo sapiens
  misc_RNA (1)...(19): siRNA sense strand
gagaaggagaccaucuauu

SEQ ID NO: 1018902 - RNA, 19 nt, Homo sapiens
  misc_RNA (1)...(19): siRNA sense strand
gagaaaaccuccucagaac

SEQ ID NO: 1018903 - RNA, 19 nt, Homo sapiens
  misc_RNA (1)...(19): siRNA sense strand
gcugcucacuugaccuuug

SEQ ID NO: 1018904 - RNA, 19 nt, Homo sapiens
  misc_RNA (1)...(19): siRNA sense strand
ugggauugcugcucacuug

SEQ ID NO: 1018905 - RNA, 19 nt, Homo sapiens
  misc_RNA (1)...(19): siRNA sense strand
ugucaucacccagaaauuu

SEQ ID NO: 1018906 - RNA, 19 nt, Homo sapiens
  misc_RNA (1)...(19): siRNA sense strand
ccaugaagucucuaaagaa

SEQ ID NO: 1018907 - RNA, 19 nt, Homo sapiens
  misc_RNA (1)...(19): siRNA sense strand
cagagaaugucaaagaaaa

SEQ ID NO: 1018908 - RNA, 19 nt, Homo sapiens
  misc_RNA (1)...(19): siRNA sense strand
gcaagcugacugcccauga

SEQ ID NO: 1018909 - RNA, 19 nt, Homo sapiens
  misc_RNA (1)...(19): siRNA sense strand
ccaagcugcucgggaaaga

SEQ ID NO: 1018910 - RNA, 19 nt, Homo sapiens
  misc_RNA (1)...(19): siRNA sense strand
ggaggaaagcccagaugug

SEQ ID NO: 1018911 - RNA, 19 nt, Homo sapiens
  misc_RNA (1)...(19): siRNA sense strand
guucuggagucgacuggaa

SEQ ID NO: 1018912 - RNA, 19 nt, Homo sapiens
  misc_RNA (1)...(19): siRNA sense strand
cagcauacuuaggcacauu

SEQ ID NO: 1018913 - RNA, 19 nt, Homo sapiens
  misc_RNA (1)...(19): siRNA sense strand
ucagagaaugucaaagaaa

SEQ ID NO: 1018914 - RNA, 19 nt, Homo sapiens
  misc_RNA (1)...(19): siRNA sense strand
aaggagaccaucuauuuga

SEQ ID NO: 1018915 - RNA, 19 nt, Homo sapiens
  misc_RNA (1)...(19): siRNA sense strand
auucuugccuuggccauua

SEQ ID NO: 1018916 - RNA, 19 nt, Homo sapiens
  misc_RNA (1)...(19): siRNA sense strand
accaugaagucucuaaaga

SEQ ID NO: 1018917 - RNA, 19 nt, Homo sapiens
  misc_RNA (1)...(19): siRNA sense strand
aaaaucaccuccuaucaug

SEQ ID NO: 1018918 - RNA, 19 nt, Homo sapiens
  misc_RNA (1)...(19): siRNA sense strand
cagagaggaugcguugaug

SEQ ID NO: 1018919 - RNA, 19 nt, Homo sapiens
  misc_RNA (1)...(19): siRNA sense strand
ucuauuaggaggugcuaua

SEQ ID NO: 1018920 - RNA, 19 nt, Homo sapiens
  misc_RNA (1)...(19): siRNA sense strand
aacccauccuacucuauua

SEQ ID NO: 1018921 - RNA, 19 nt, Homo sapiens
  misc_RNA (1)...(19): siRNA sense strand
caaccgggaaggugugauu

SEQ ID NO: 1018922 - RNA, 19 nt, Homo sapiens
  misc_RNA (1)...(19): siRNA sense strand
caacccacacccacaauuc

SEQ ID NO: 1018923 - RNA, 19 nt, Homo sapiens
  misc_RNA (1)...(19): siRNA sense strand
ugaaggagagucaaagcaa

SEQ ID NO: 1018924 - RNA, 19 nt, Homo sapiens
  misc_RNA (1)...(19): siRNA sense strand
uaagagaauugcacuugcu

SEQ ID NO: 1018925 - RNA, 19 nt, Homo sapiens
  misc_RNA (1)...(19): siRNA sense strand
uggaauacuugggagauga

SEQ ID NO: 1018926 - RNA, 19 nt, Homo sapiens
  misc_RNA (1)...(19): siRNA sense strand
gaucagaggcaguaaucca

SEQ ID NO: 1018927 - RNA, 19 nt, Homo sapiens
  misc_RNA (1)...(19): siRNA sense strand
gccugaaccuguuagcaau

SEQ ID NO: 1018928 - RNA, 19 nt, Homo sapiens
  misc_RNA (1)...(19): siRNA sense strand
gagcucagccccauaaaga

SEQ ID NO: 1018929 - RNA, 19 nt, Homo sapiens
  misc_RNA (1)...(19): siRNA sense strand
ggaagcuccucugaagaca

SEQ ID NO: 1018930 - RNA, 19 nt, Homo sapiens
  misc_RNA (1)...(19): siRNA sense strand
ugaugguccuggcugauga

SEQ ID NO: 1018931 - RNA, 19 nt, Homo sapiens
  misc_RNA (1)...(19): siRNA sense strand
ccuggugacugaccugaug

SEQ ID NO: 1018932 - RNA, 19 nt, Homo sapiens
  misc_RNA (1)...(19): siRNA sense strand
ggagaccaucuauuugaau

SEQ ID NO: 1018933 - RNA, 19 nt, Homo sapiens
  misc_RNA (1)...(19): siRNA sense strand
ccauguggcugaggucugu

SEQ ID NO: 1018934 - RNA, 19 nt, Homo sapiens
  misc_RNA (1)...(19): siRNA sense strand
uuagaggccucagagaaug

SEQ ID NO: 1018935 - RNA, 19 nt, Homo sapiens
  misc_RNA (1)...(19): siRNA sense strand
gcaaagggaccugaacaac

SEQ ID NO: 1018936 - RNA, 19 nt, Homo sapiens
  misc_RNA (1)...(19): siRNA sense strand
ucagcgaacaccuaaagaa

SEQ ID NO: 1018937 - RNA, 19 nt, Homo sapiens
  misc_RNA (1)...(19): siRNA sense strand
aggcaaaggaugacaagaa

SEQ ID NO: 1018938 - RNA, 19 nt, Homo sapiens
  misc_RNA (1)...(19): siRNA sense strand
gaaggaggagcggaaagga

SEQ ID NO: 1018939 - RNA, 19 nt, Homo sapiens
  misc_RNA (1)...(19): siRNA sense strand
uaacuccgaccagauuauu

SEQ ID NO: 1018940 - RNA, 19 nt, Homo sapiens
  misc_RNA (1)...(19): siRNA sense strand
gauguggacagcaccaaga

SEQ ID NO: 1018941 - RNA, 19 nt, Homo sapiens
  misc_RNA (1)...(19): siRNA sense strand
caagcugacugcccaugag

SEQ ID NO: 1018942 - RNA, 19 nt, Homo sapiens
  misc_RNA (1)...(19): siRNA sense strand
caagaggcagguugggauu

SEQ ID NO: 1018943 - RNA, 19 nt, Homo sapiens
  misc_RNA (1)...(19): siRNA sense strand
gcccuucucugcuguucug

SEQ ID NO: 1018944 - RNA, 19 nt, Homo sapiens
  misc_RNA (1)...(19): siRNA sense strand
uaagaaggaagacuugaag

SEQ ID NO: 1018945 - RNA, 19 nt, Homo sapiens
  misc_RNA (1)...(19): siRNA sense strand
gcaccaugaagucucuaaa

SEQ ID NO: 1018946 - RNA, 19 nt, Homo sapiens
  misc_RNA (1)...(19): siRNA sense strand
gcuuggaggacuucagaaa

SEQ ID NO: 1018947 - RNA, 19 nt, Homo sapiens
  misc_RNA (1)...(19): siRNA sense strand
uauuagaggccucagagaa

SEQ ID NO: 1018948 - RNA, 19 nt, Homo sapiens
  misc_RNA (1)...(19): siRNA sense strand
caaagacaaagaagacaag

SEQ ID NO: 1018949 - RNA, 19 nt, Homo sapiens
  misc_RNA (1)...(19): siRNA sense strand
caauggagcugauauauau

SEQ ID NO: 1018950 - RNA, 19 nt, Homo sapiens
  misc_RNA (1)...(19): siRNA sense strand
gaacacccuucuucguuua

SEQ ID NO: 1018951 - RNA, 19 nt, Homo sapiens
  misc_RNA (1)...(19): siRNA sense strand
ggacuacacuaaaccauau

SEQ ID NO: 1018952 - RNA, 19 nt, Homo sapiens
  misc_RNA (1)...(19): siRNA sense strand
agaaugggcucucgagaua

SEQ ID NO: 1018953 - RNA, 19 nt, Homo sapiens
  misc_RNA (1)...(19): siRNA sense strand
ucacacaccuuaauaaugu

SEQ ID NO: 1018954 - RNA, 19 nt, Homo sapiens
  misc_RNA (1)...(19): siRNA sense strand
aaacauagauagugccaaa

SEQ ID NO: 1018955 - RNA, 19 nt, Homo sapiens
  misc_RNA (1)...(19): siRNA sense strand
guacagcacugguagaaau

SEQ ID NO: 1018956 - RNA, 19 nt, Homo sapiens
  misc_RNA (1)...(19): siRNA sense strand
caccugaacuuguugcuua

SEQ ID NO: 1018957 - RNA, 19 nt, Homo sapiens
  misc_RNA (1)...(19): siRNA sense strand
gaaaugggauacaagcaau

SEQ ID NO: 1018958 - RNA, 19 nt, Homo sapiens
  misc_RNA (1)...(19): siRNA sense strand
ggccaagcaucuaagaaua

SEQ ID NO: 1018959 - RNA, 19 nt, Homo sapiens
  misc_RNA (1)...(19): siRNA sense strand
aauaaucgcuuuacaagug

SEQ ID NO: 1018960 - RNA, 19 nt, Homo sapiens
  misc_RNA (1)...(19): siRNA sense strand
agaaaugggugaugaguau

SEQ ID NO: 1018961 - RNA, 19 nt, Homo sapiens
  misc_RNA (1)...(19): siRNA sense strand
ggaaaagacuuaauguuug

SEQ ID NO: 1018962 - RNA, 19 nt, Homo sapiens
  misc_RNA (1)...(19): siRNA sense strand
ccaagcaucuaagaauaua

SEQ ID NO: 1018963 - RNA, 19 nt, Homo sapiens
  misc_RNA (1)...(19): siRNA sense strand
caagagaaaugggauacaa

SEQ ID NO: 1018964 - RNA, 19 nt, Homo sapiens
  misc_RNA (1)...(19): siRNA sense strand
gggacaauaugcuauguga

SEQ ID NO: 1018965 - RNA, 19 nt, Homo sapiens
  misc_RNA (1)...(19): siRNA sense strand
caacuauucuacaagcaaa

SEQ ID NO: 1018966 - RNA, 19 nt, Homo sapiens
  misc_RNA (1)...(19): siRNA sense strand
ggaaugacaaugacaguug

SEQ ID NO: 1018967 - RNA, 19 nt, Homo sapiens
  misc_RNA (1)...(19): siRNA sense strand
gacauuugcugcagaugaa

SEQ ID NO: 1018968 - RNA, 19 nt, Homo sapiens
  misc_RNA (1)...(19): siRNA sense strand
ugaguaugcuguagaaaga

SEQ ID NO: 1018969 - RNA, 19 nt, Homo sapiens
  misc_RNA (1)...(19): siRNA sense strand
gcagguggaagucaucaua

SEQ ID NO: 1018970 - RNA, 19 nt, Homo sapiens
  misc_RNA (1)...(19): siRNA sense strand
caacucgucuaaauguuau

SEQ ID NO: 1018971 - RNA, 19 nt, Homo sapiens
  misc_RNA (1)...(19): siRNA sense strand
ggaaauauugagaagguaa

SEQ ID NO: 1018972 - RNA, 19 nt, Homo sapiens
  misc_RNA (1)...(19): siRNA sense strand
guacauugcuggucaacag

SEQ ID NO: 1018973 - RNA, 19 nt, Homo sapiens
  misc_RNA (1)...(19): siRNA sense strand
gacaggcucuaguggaauu

SEQ ID NO: 1018974 - RNA, 19 nt, Homo sapiens
  misc_RNA (1)...(19): siRNA sense strand
aaagugcaacguauuguua

SEQ ID NO: 1018975 - RNA, 19 nt, Homo sapiens
  misc_RNA (1)...(19): siRNA sense strand
ccaacucgucuaaauguua

SEQ ID NO: 1018976 - RNA, 19 nt, Homo sapiens
  misc_RNA (1)...(19): siRNA sense strand
ggaagcagaccucguggaa

SEQ ID NO: 1018977 - RNA, 19 nt, Homo sapiens
  misc_RNA (1)...(19): siRNA sense strand
uuacggcacugaaucacua

SEQ ID NO: 1018978 - RNA, 19 nt, Homo sapiens
  misc_RNA (1)...(19): siRNA sense strand
gaagucaucauaaaguuuc

SEQ ID NO: 1018979 - RNA, 19 nt, Homo sapiens
  misc_RNA (1)...(19): siRNA sense strand
gacaauaugcuaugugaug

SEQ ID NO: 1018980 - RNA, 19 nt, Homo sapiens
  misc_RNA (1)...(19): siRNA sense strand
ggaagucaucauaaaguuu

SEQ ID NO: 1018981 - RNA, 19 nt, Homo sapiens
  misc_RNA (1)...(19): siRNA sense strand
ugauauauaugcuggaugu

SEQ ID NO: 1018982 - RNA, 19 nt, Homo sapiens
  misc_RNA (1)...(19): siRNA sense strand
ucaauggagcugauauaua

SEQ ID NO: 1018983 - RNA, 19 nt, Homo sapiens
  misc_RNA (1)...(19): siRNA sense strand
gcaacguauuguuauauuc

SEQ ID NO: 1018984 - RNA, 19 nt, Homo sapiens
  misc_RNA (1)...(19): siRNA sense strand
cagccacccuccuguguuu

SEQ ID NO: 1018985 - RNA, 19 nt, Homo sapiens
  misc_RNA (1)...(19): siRNA sense strand
ccaugaaguucuuacauuc

SEQ ID NO: 1018986 - RNA, 19 nt, Homo sapiens
  misc_RNA (1)...(19): siRNA sense strand
gugaugaugaugccauuua

SEQ ID NO: 1018987 - RNA, 19 nt, Homo sapiens
  misc_RNA (1)...(19): siRNA sense strand
gggaaaagacuuaauguuu

SEQ ID NO: 1018988 - RNA, 19 nt, Homo sapiens
  misc_RNA (1)...(19): siRNA sense strand
gaugaacccguguacauug

SEQ ID NO: 1018989 - RNA, 19 nt, Homo sapiens
  misc_RNA (1)...(19): siRNA sense strand
aagcaaugguugaguuuga

SEQ ID NO: 1018990 - RNA, 19 nt, Homo sapiens
  misc_RNA (1)...(19): siRNA sense strand
gcacggccaacucgucuaa

SEQ ID NO: 1018991 - RNA, 19 nt, Homo sapiens
  misc_RNA (1)...(19): siRNA sense strand
ugaugaugaugccauuuaa

SEQ ID NO: 1018992 - RNA, 19 nt, Homo sapiens
  misc_RNA (1)...(19): siRNA sense strand
cuacaucaucccauuuaua

SEQ ID NO: 1018993 - RNA, 19 nt, Homo sapiens
  misc_RNA (1)...(19): siRNA sense strand
agaauccgcuuuauccaau

SEQ ID NO: 1018994 - RNA, 19 nt, Homo sapiens
  misc_RNA (1)...(19): siRNA sense strand
ggaaaucccucugguucag

SEQ ID NO: 1018995 - RNA, 19 nt, Homo sapiens
  misc_RNA (1)...(19): siRNA sense strand
agauacaccugaacuuguu

SEQ ID NO: 1018996 - RNA, 19 nt, Homo sapiens
  misc_RNA (1)...(19): siRNA sense strand
gaaagggucgccagagaca

SEQ ID NO: 1018997 - RNA, 19 nt, Homo sapiens
  misc_RNA (1)...(19): siRNA sense strand
gggacuacacuaaaccaua

SEQ ID NO: 1018998 - RNA, 19 nt, Homo sapiens
  misc_RNA (1)...(19): siRNA sense strand
uuacaugcauggaggaaau

SEQ ID NO: 1018999 - RNA, 19 nt, Homo sapiens
  misc_RNA (1)...(19): siRNA sense strand
acuuguugcuuauccauua

SEQ ID NO: 1019000 - RNA, 19 nt, Homo sapiens
  misc_RNA (1)...(19): siRNA sense strand
cauagauagugccaaagaa

SEQ ID NO: 1019001 - RNA, 19 nt, Homo sapiens
  misc_RNA (1)...(19): siRNA sense strand
gcuggauguugcacacuaa

SEQ ID NO: 1019002 - RNA, 19 nt, Homo sapiens
  misc_RNA (1)...(19): siRNA sense strand
uaaagcagcacucaaugga

SEQ ID NO: 1019003 - RNA, 19 nt, Homo sapiens
  misc_RNA (1)...(19): siRNA sense strand
guuccaaucccuauacauu

SEQ ID NO: 1019004 - RNA, 19 nt, Homo sapiens
  misc_RNA (1)...(19): siRNA sense strand
gagauacaccugaacuugu

SEQ ID NO: 1019005 - RNA, 19 nt, Homo sapiens
  misc_RNA (1)...(19): siRNA sense strand
guuuagacaugauggcuau

SEQ ID NO: 1019006 - RNA, 19 nt, Homo sapiens
  misc_RNA (1)...(19): siRNA sense strand
gaugaugccauuuaaacga

SEQ ID NO: 1019007 - RNA, 19 nt, Homo sapiens
  misc_RNA (1)...(19): siRNA sense strand
ugaugaguaugcuguagaa

SEQ ID NO: 1019008 - RNA, 19 nt, Homo sapiens
  misc_RNA (1)...(19): siRNA sense strand
ggaagacgagauagaggaa

SEQ ID NO: 1019009 - RNA, 19 nt, Homo sapiens
  misc_RNA (1)...(19): siRNA sense strand
acaauaugcuaugugauga

SEQ ID NO: 1019010 - RNA, 19 nt, Homo sapiens
  misc_RNA (1)...(19): siRNA sense strand
ccaauuacaguggauguuu

SEQ ID NO: 1019011 - RNA, 19 nt, Homo sapiens
  misc_RNA (1)...(19): siRNA sense strand
gaauccgcuuuauccaauu

SEQ ID NO: 1019012 - RNA, 19 nt, Homo sapiens
  misc_RNA (1)...(19): siRNA sense strand
aauccgcuuuauccaauua

SEQ ID NO: 1019013 - RNA, 19 nt, Homo sapiens
  misc_RNA (1)...(19): siRNA sense strand
ccaagucguuacagaaugg

SEQ ID NO: 1019014 - RNA, 19 nt, Homo sapiens
  misc_RNA (1)...(19): siRNA sense strand
uaaaccauauuugggaaga

SEQ ID NO: 1019015 - RNA, 19 nt, Homo sapiens
  misc_RNA (1)...(19): siRNA sense strand
uacaagcaaugguugaguu

SEQ ID NO: 1019016 - RNA, 19 nt, Homo sapiens
  misc_RNA (1)...(19): siRNA sense strand
ggaggcagguggaagucau

SEQ ID NO: 1019017 - RNA, 19 nt, Homo sapiens
  misc_RNA (1)...(19): siRNA sense strand
gaaguucuuacauucauca

SEQ ID NO: 1019018 - RNA, 19 nt, Homo sapiens
  misc_RNA (1)...(19): siRNA sense strand
gcugucacacaccuuaaua

SEQ ID NO: 1019019 - RNA, 19 nt, Homo sapiens
  misc_RNA (1)...(19): siRNA sense strand
uggaagucaucauaaaguu

SEQ ID NO: 1019020 - RNA, 19 nt, Homo sapiens
  misc_RNA (1)...(19): siRNA sense strand
gaguuugaaucaguccuuu

SEQ ID NO: 1019021 - RNA, 19 nt, Homo sapiens
  misc_RNA (1)...(19): siRNA sense strand
caaagugcaacguauuguu

SEQ ID NO: 1019022 - RNA, 19 nt, Homo sapiens
  misc_RNA (1)...(19): siRNA sense strand
cccuauacauugaagcuuu

SEQ ID NO: 1019023 - RNA, 19 nt, Homo sapiens
  misc_RNA (1)...(19): siRNA sense strand
caaccuguucugcuuauau

SEQ ID NO: 1019024 - RNA, 19 nt, Homo sapiens
  misc_RNA (1)...(19): siRNA sense strand
gaugaugaugccauuuaaa

SEQ ID NO: 1019025 - RNA, 19 nt, Homo sapiens
  misc_RNA (1)...(19): siRNA sense strand
accaugaaguucuuacauu

SEQ ID NO: 1019026 - RNA, 19 nt, Homo sapiens
  misc_RNA (1)...(19): siRNA sense strand
uaaugaccaugaaguucuu

SEQ ID NO: 1019027 - RNA, 19 nt, Homo sapiens
  misc_RNA (1)...(19): siRNA sense strand
guaaugaccaugaaguucu

SEQ ID NO: 1019028 - RNA, 19 nt, Homo sapiens
  misc_RNA (1)...(19): siRNA sense strand
gaaaagacuuaauguuugc

SEQ ID NO: 1019029 - RNA, 19 nt, Homo sapiens
  misc_RNA (1)...(19): siRNA sense strand
guuaguggauuacaucaac

SEQ ID NO: 1019030 - RNA, 19 nt, Homo sapiens
  misc_RNA (1)...(19): siRNA sense strand
cgagauacaccugaacuug

SEQ ID NO: 1019031 - RNA, 19 nt, Homo sapiens
  misc_RNA (1)...(19): siRNA sense strand
gcacucaauggagcugaua

SEQ ID NO: 1019032 - RNA, 19 nt, Homo sapiens
  misc_RNA (1)...(19): siRNA sense strand
cagauaagagugccgaaug

SEQ ID NO: 1019033 - RNA, 19 nt, Homo sapiens
  misc_RNA (1)...(19): siRNA sense strand
gccaagcaucuaagaauau

SEQ ID NO: 1019034 - RNA, 19 nt, Homo sapiens
  misc_RNA (1)...(19): siRNA sense strand
ccacaggcuucuuccucuu

SEQ ID NO: 1019035 - RNA, 19 nt, Homo sapiens
  misc_RNA (1)...(19): siRNA sense strand
ggccaacucgucuaaaugu

SEQ ID NO: 1019036 - RNA, 19 nt, Homo sapiens
  misc_RNA (1)...(19): siRNA sense strand
ugacauuugcugcagauga

SEQ ID NO: 1019037 - RNA, 19 nt, Homo sapiens
  misc_RNA (1)...(19): siRNA sense strand
aggaaagggucgccagaga

SEQ ID NO: 1019038 - RNA, 19 nt, Homo sapiens
  misc_RNA (1)...(19): siRNA sense strand
cagaugaacccguguacau

SEQ ID NO: 1019039 - RNA, 19 nt, Homo sapiens
  misc_RNA (1)...(19): siRNA sense strand
ggauacaagcaaugguuga

SEQ ID NO: 1019040 - RNA, 19 nt, Homo sapiens
  misc_RNA (1)...(19): siRNA sense strand
gcaaaaccuucagccaaaa

SEQ ID NO: 1019041 - RNA, 19 nt, Homo sapiens
  misc_RNA (1)...(19): siRNA sense strand
aagagaccuucacaaaguu

SEQ ID NO: 1019042 - RNA, 19 nt, Homo sapiens
  misc_RNA (1)...(19): siRNA sense strand
gccaggaaauacugaugau

SEQ ID NO: 1019043 - RNA, 19 nt, Homo sapiens
  misc_RNA (1)...(19): siRNA sense strand
ccuauacauugaagcuuug

SEQ ID NO: 1019044 - RNA, 19 nt, Homo sapiens
  misc_RNA (1)...(19): siRNA sense strand
gcugauauauaugcuggau

SEQ ID NO: 1019045 - RNA, 19 nt, Homo sapiens
  misc_RNA (1)...(19): siRNA sense strand
ggcaaagugcaacguauug

SEQ ID NO: 1019046 - RNA, 19 nt, Homo sapiens
  misc_RNA (1)...(19): siRNA sense strand
uagaaaugggugaugagua

SEQ ID NO: 1019047 - RNA, 19 nt, Homo sapiens
  misc_RNA (1)...(19): siRNA sense strand
aacacuuucugggcuauua

SEQ ID NO: 1019048 - RNA, 19 nt, Homo sapiens
  misc_RNA (1)...(19): siRNA sense strand
accagcagcuacaaagauu

SEQ ID NO: 1019049 - RNA, 19 nt, Homo sapiens
  misc_RNA (1)...(19): siRNA sense strand
gaaaugaagugguuaaugg

SEQ ID NO: 1019050 - RNA, 19 nt, Homo sapiens
  misc_RNA (1)...(19): siRNA sense strand
auucaaagcugaugcauua

SEQ ID NO: 1019051 - RNA, 19 nt, Homo sapiens
  misc_RNA (1)...(19): siRNA sense strand
caaagcugaugcauuauuu

SEQ ID NO: 1019052 - RNA, 19 nt, Homo sapiens
  misc_RNA (1)...(19): siRNA sense strand
gaccgaaaguucaguguaa

SEQ ID NO: 1019053 - RNA, 19 nt, Homo sapiens
  misc_RNA (1)...(19): siRNA sense strand
gaaggagacgauuaaguua

SEQ ID NO: 1019054 - RNA, 19 nt, Homo sapiens
  misc_RNA (1)...(19): siRNA sense strand
gcagcuacaucaagaggua

SEQ ID NO: 1019055 - RNA, 19 nt, Homo sapiens
  misc_RNA (1)...(19): siRNA sense strand
gaaacuauauugagcaaac

SEQ ID NO: 1019056 - RNA, 19 nt, Homo sapiens
  misc_RNA (1)...(19): siRNA sense strand
guucugaauuugucaagua

SEQ ID NO: 1019057 - RNA, 19 nt, Homo sapiens
  misc_RNA (1)...(19): siRNA sense strand
gcugaugcauuauuugauu

SEQ ID NO: 1019058 - RNA, 19 nt, Homo sapiens
  misc_RNA (1)...(19): siRNA sense strand
gcaaaccaauguuguucuu

SEQ ID NO: 1019059 - RNA, 19 nt, Homo sapiens
  misc_RNA (1)...(19): siRNA sense strand
gaauuaccauuuccaagug

SEQ ID NO: 1019060 - RNA, 19 nt, Homo sapiens
  misc_RNA (1)...(19): siRNA sense strand
caaguguucuggaaucuga

SEQ ID NO: 1019061 - RNA, 19 nt, Homo sapiens
  misc_RNA (1)...(19): siRNA sense strand
caagauaagaagacagaua

SEQ ID NO: 1019062 - RNA, 19 nt, Homo sapiens
  misc_RNA (1)...(19): siRNA sense strand
gcucaguaauuccguugua

SEQ ID NO: 1019063 - RNA, 19 nt, Homo sapiens
  misc_RNA (1)...(19): siRNA sense strand
gaaaagaaggagacgauua

SEQ ID NO: 1019064 - RNA, 19 nt, Homo sapiens
  misc_RNA (1)...(19): siRNA sense strand
gaagagacacccaaccaau

SEQ ID NO: 1019065 - RNA, 19 nt, Homo sapiens
  misc_RNA (1)...(19): siRNA sense strand
ggucaucuccucagugauu

SEQ ID NO: 1019066 - RNA, 19 nt, Homo sapiens
  misc_RNA (1)...(19): siRNA sense strand
uauaaagacuacagggaaa

SEQ ID NO: 1019067 - RNA, 19 nt, Homo sapiens
  misc_RNA (1)...(19): siRNA sense strand
aagaggcagugaagaauuu

SEQ ID NO: 1019068 - RNA, 19 nt, Homo sapiens
  misc_RNA (1)...(19): siRNA sense strand
ggagacgauuaaguuauuu

SEQ ID NO: 1019069 - RNA, 19 nt, Homo sapiens
  misc_RNA (1)...(19): siRNA sense strand
agaaggagacgauuaaguu

SEQ ID NO: 1019070 - RNA, 19 nt, Homo sapiens
  misc_RNA (1)...(19): siRNA sense strand
gaaggagcaguuucucuga

SEQ ID NO: 1019071 - RNA, 19 nt, Homo sapiens
  misc_RNA (1)...(19): siRNA sense strand
gggaaacuauauugagcaa

SEQ ID NO: 1019072 - RNA, 19 nt, Homo sapiens
  misc_RNA (1)...(19): siRNA sense strand
gaaaaguucugaauuuguc

SEQ ID NO: 1019073 - RNA, 19 nt, Homo sapiens
  misc_RNA (1)...(19): siRNA sense strand
ggagaaaauuuaagcuuug

SEQ ID NO: 1019074 - RNA, 19 nt, Homo sapiens
  misc_RNA (1)...(19): siRNA sense strand
ggaaaugaagugguuaaug

SEQ ID NO: 1019075 - RNA, 19 nt, Homo sapiens
  misc_RNA (1)...(19): siRNA sense strand
gagacacccaaccaauuua

SEQ ID NO: 1019076 - RNA, 19 nt, Homo sapiens
  misc_RNA (1)...(19): siRNA sense strand
ccaacuacugugauuauaa

SEQ ID NO: 1019077 - RNA, 19 nt, Homo sapiens
  misc_RNA (1)...(19): siRNA sense strand
guuaccggcuucaguuuga

SEQ ID NO: 1019078 - RNA, 19 nt, Homo sapiens
  misc_RNA (1)...(19): siRNA sense strand
gaaaguuaccggcuucagu

SEQ ID NO: 1019079 - RNA, 19 nt, Homo sapiens
  misc_RNA (1)...(19): siRNA sense strand
ggacguacgcguuucuugu

SEQ ID NO: 1019080 - RNA, 19 nt, Homo sapiens
  misc_RNA (1)...(19): siRNA sense strand
gaccaacuacugugauuau

SEQ ID NO: 1019081 - RNA, 19 nt, Homo sapiens
  misc_RNA (1)...(19): siRNA sense strand
aggagacgauuaaguuauu

SEQ ID NO: 1019082 - RNA, 19 nt, Homo sapiens
  misc_RNA (1)...(19): siRNA sense strand
aaagacaccucaaaagaaa

SEQ ID NO: 1019083 - RNA, 19 nt, Homo sapiens
  misc_RNA (1)...(19): siRNA sense strand
agagacacccaaccaauuu

SEQ ID NO: 1019084 - RNA, 19 nt, Homo sapiens
  misc_RNA (1)...(19): siRNA sense strand
gacguacgcguuucuugua

SEQ ID NO: 1019085 - RNA, 19 nt, Homo sapiens
  misc_RNA (1)...(19): siRNA sense strand
gagguucaauagaugaugu

SEQ ID NO: 1019086 - RNA, 19 nt, Homo sapiens
  misc_RNA (1)...(19): siRNA sense strand
ugaagugguuaauggagaa

SEQ ID NO: 1019087 - RNA, 19 nt, Homo sapiens
  misc_RNA (1)...(19): siRNA sense strand
caagaggcagugaagaauu

SEQ ID NO: 1019088 - RNA, 19 nt, Homo sapiens
  misc_RNA (1)...(19): siRNA sense strand
ucaaguacaaguccagaaa

SEQ ID NO: 1019089 - RNA, 19 nt, Homo sapiens
  misc_RNA (1)...(19): siRNA sense strand
cuacagggaaacuauauug

SEQ ID NO: 1019090 - RNA, 19 nt, Homo sapiens
  misc_RNA (1)...(19): siRNA sense strand
ucaaagcugaugcauuauu

SEQ ID NO: 1019091 - RNA, 19 nt, Homo sapiens
  misc_RNA (1)...(19): siRNA sense strand
caagagguauguggaacug

SEQ ID NO: 1019092 - RNA, 19 nt, Homo sapiens
  misc_RNA (1)...(19): siRNA sense strand
agaaaggacguacgcguuu

SEQ ID NO: 1019093 - RNA, 19 nt, Homo sapiens
  misc_RNA (1)...(19): siRNA sense strand
gagcaaaccaauguuguuc

SEQ ID NO: 1019094 - RNA, 19 nt, Homo sapiens
  misc_RNA (1)...(19): siRNA sense strand
aaaguuaccggcuucaguu

SEQ ID NO: 1019095 - RNA, 19 nt, Homo sapiens
  misc_RNA (1)...(19): siRNA sense strand
ggaacugaccaacuacugu

SEQ ID NO: 1019096 - RNA, 19 nt, Homo sapiens
  misc_RNA (1)...(19): siRNA sense strand
gcagaauuaccauuuccaa

SEQ ID NO: 1019097 - RNA, 19 nt, Homo sapiens
  misc_RNA (1)...(19): siRNA sense strand
uuccagagguucaauagau

SEQ ID NO: 1019098 - RNA, 19 nt, Homo sapiens
  misc_RNA (1)...(19): siRNA sense strand
ucuggaaucugaagagaca

SEQ ID NO: 1019099 - RNA, 19 nt, Homo sapiens
  misc_RNA (1)...(19): siRNA sense strand
cccaggaaaugaagugguu

SEQ ID NO: 1019100 - RNA, 19 nt, Homo sapiens
  misc_RNA (1)...(19): siRNA sense strand
guaauuccguuguaaaagu

SEQ ID NO: 1019101 - RNA, 19 nt, Homo sapiens
  misc_RNA (1)...(19): siRNA sense strand
agaauuaccauuuccaagu

SEQ ID NO: 1019102 - RNA, 19 nt, Homo sapiens
  misc_RNA (1)...(19): siRNA sense strand
cuacugugauuauaaagac

SEQ ID NO: 1019103 - RNA, 19 nt, Homo sapiens
  misc_RNA (1)...(19): siRNA sense strand
aagagacacccaaccaauu

SEQ ID NO: 1019104 - RNA, 19 nt, Homo sapiens
  misc_RNA (1)...(19): siRNA sense strand
aaaagaaggagacgauuaa

SEQ ID NO: 1019105 - RNA, 19 nt, Homo sapiens
  misc_RNA (1)...(19): siRNA sense strand
gguucgggcucaguaauuc

SEQ ID NO: 1019106 - RNA, 19 nt, Homo sapiens
  misc_RNA (1)...(19): siRNA sense strand
gauaagaagacagauagag

SEQ ID NO: 1019107 - RNA, 19 nt, Homo sapiens
  misc_RNA (1)...(19): siRNA sense strand
guacaaguccagaaaagaa

SEQ ID NO: 1019108 - RNA, 19 nt, Homo sapiens
  misc_RNA (1)...(19): siRNA sense strand
agacuacagggaaacuaua

SEQ ID NO: 1019109 - RNA, 19 nt, Homo sapiens
  misc_RNA (1)...(19): siRNA sense strand
guucuggaaucugaagaga

SEQ ID NO: 1019110 - RNA, 19 nt, Homo sapiens
  misc_RNA (1)...(19): siRNA sense strand
ucaguaauuccguuguaaa

SEQ ID NO: 1019111 - RNA, 19 nt, Homo sapiens
  misc_RNA (1)...(19): siRNA sense strand
cguacgcguuucuuguaaa

SEQ ID NO: 1019112 - RNA, 19 nt, Homo sapiens
  misc_RNA (1)...(19): siRNA sense strand
caucaagagguauguggaa

SEQ ID NO: 1019113 - RNA, 19 nt, Homo sapiens
  misc_RNA (1)...(19): siRNA sense strand
caggaaaugaagugguuaa

SEQ ID NO: 1019114 - RNA, 19 nt, Homo sapiens
  misc_RNA (1)...(19): siRNA sense strand
aagauaagaagacagauag

SEQ ID NO: 1019115 - RNA, 19 nt, Homo sapiens
  misc_RNA (1)...(19): siRNA sense strand
auguggaacugaccaacua

SEQ ID NO: 1019116 - RNA, 19 nt, Homo sapiens
  misc_RNA (1)...(19): siRNA sense strand
aagcugaugcauuauuuga

SEQ ID NO: 1019117 - RNA, 19 nt, Homo sapiens
  misc_RNA (1)...(19): siRNA sense strand
ugaccgaaaguucagugua

SEQ ID NO: 1019118 - RNA, 19 nt, Homo sapiens
  misc_RNA (1)...(19): siRNA sense strand
aaaagacaccucaaaagaa

SEQ ID NO: 1019119 - RNA, 19 nt, Homo sapiens
  misc_RNA (1)...(19): siRNA sense strand
ccagagguucaauagauga

SEQ ID NO: 1019120 - RNA, 19 nt, Homo sapiens
  misc_RNA (1)...(19): siRNA sense strand
aagcuuugcauaugaauuc

SEQ ID NO: 1019121 - RNA, 19 nt, Homo sapiens
  misc_RNA (1)...(19): siRNA sense strand
ugaccaacuacugugauua

SEQ ID NO: 1019122 - RNA, 19 nt, Homo sapiens
  misc_RNA (1)...(19): siRNA sense strand
ugagcaaaccaauguuguu

SEQ ID NO: 1019123 - RNA, 19 nt, Homo sapiens
  misc_RNA (1)...(19): siRNA sense strand
cucagcagcuacaucaaga

SEQ ID NO: 1019124 - RNA, 19 nt, Homo sapiens
  misc_RNA (1)...(19): siRNA sense strand
gacuacagggaaacuauau

SEQ ID NO: 1019125 - RNA, 19 nt, Homo sapiens
  misc_RNA (1)...(19): siRNA sense strand
cugaccaacuacugugauu

SEQ ID NO: 1019126 - RNA, 19 nt, Homo sapiens
  misc_RNA (1)...(19): siRNA sense strand
caaaccaauguuguucuuu

SEQ ID NO: 1019127 - RNA, 19 nt, Homo sapiens
  misc_RNA (1)...(19): siRNA sense strand
ugaagagacacccaaccaa

SEQ ID NO: 1019128 - RNA, 19 nt, Homo sapiens
  misc_RNA (1)...(19): siRNA sense strand
ggaaaaguucugaauuugu

SEQ ID NO: 1019129 - RNA, 19 nt, Homo sapiens
  misc_RNA (1)...(19): siRNA sense strand
ucaagaggcagugaagaau

SEQ ID NO: 1019130 - RNA, 19 nt, Homo sapiens
  misc_RNA (1)...(19): siRNA sense strand
auggucaucuccucaguga

SEQ ID NO: 1019131 - RNA, 19 nt, Homo sapiens
  misc_RNA (1)...(19): siRNA sense strand
cucaguaauuccguuguaa

SEQ ID NO: 1019132 - RNA, 19 nt, Homo sapiens
  misc_RNA (1)...(19): siRNA sense strand
uccagagguucaauagaug

SEQ ID NO: 1019133 - RNA, 19 nt, Homo sapiens
  misc_RNA (1)...(19): siRNA sense strand
gaagugguuaauggagaaa

SEQ ID NO: 1019134 - RNA, 19 nt, Homo sapiens
  misc_RNA (1)...(19): siRNA sense strand
accaacuacugugauuaua

SEQ ID NO: 1019135 - RNA, 19 nt, Homo sapiens
  misc_RNA (1)...(19): siRNA sense strand
cccaagauaagaagacaga

SEQ ID NO: 1019136 - RNA, 19 nt, Homo sapiens
  misc_RNA (1)...(19): siRNA sense strand
acguacgcguuucuuguaa

SEQ ID NO: 1019137 - RNA, 19 nt, Homo sapiens
  misc_RNA (1)...(19): siRNA sense strand
gagacgauuaaguuauuuc

SEQ ID NO: 1019138 - RNA, 19 nt, Homo sapiens
  misc_RNA (1)...(19): siRNA sense strand
aguguaacuuccagagguu

SEQ ID NO: 1019139 - RNA, 19 nt, Homo sapiens
  misc_RNA (1)...(19): siRNA sense strand
agacacccaaccaauuuau

SEQ ID NO: 1019140 - RNA, 19 nt, Homo sapiens
  misc_RNA (1)...(19): siRNA sense strand
uggaaaaguucugaauuug

SEQ ID NO: 1019141 - RNA, 19 nt, Homo sapiens
  misc_RNA (1)...(19): siRNA sense strand
aaggagacgauuaaguuau

SEQ ID NO: 1019142 - RNA, 19 nt, Homo sapiens
  misc_RNA (1)...(19): siRNA sense strand
agaaagagcuagguuauaa

SEQ ID NO: 1019143 - RNA, 19 nt, Homo sapiens
  misc_RNA (1)...(19): siRNA sense strand
uaacagagaugguucacuu

SEQ ID NO: 1019144 - RNA, 19 nt, Homo sapiens
  misc_RNA (1)...(19): siRNA sense strand
caaaagaucucaaaaggaa

SEQ ID NO: 1019145 - RNA, 19 nt, Homo sapiens
  misc_RNA (1)...(19): siRNA sense strand
ggagaagggugcccagguu

SEQ ID NO: 1019146 - RNA, 19 nt, Homo sapiens
  misc_RNA (1)...(19): siRNA sense strand
ggaaucaaguuuauacaag

SEQ ID NO: 1019147 - RNA, 19 nt, Homo sapiens
  misc_RNA (1)...(19): siRNA sense strand
gaggucaaguuaucagaaa

SEQ ID NO: 1019148 - RNA, 19 nt, Homo sapiens
  misc_RNA (1)...(19): siRNA sense strand
cagaaggaaucaaguuuau

SEQ ID NO: 1019149 - RNA, 19 nt, Homo sapiens
  misc_RNA (1)...(19): siRNA sense strand
gggagcaacucaaucgaaa

SEQ ID NO: 1019150 - RNA, 19 nt, Homo sapiens
  misc_RNA (1)...(19): siRNA sense strand
agaagggucuguucaaguu

SEQ ID NO: 1019151 - RNA, 19 nt, Homo sapiens
  misc_RNA (1)...(19): siRNA sense strand
gcaguggaaugguuuaaag

SEQ ID NO: 1019152 - RNA, 19 nt, Homo sapiens
  misc_RNA (1)...(19): siRNA sense strand
ccagaaggaaucaaguuua

SEQ ID NO: 1019153 - RNA, 19 nt, Homo sapiens
  misc_RNA (1)...(19): siRNA sense strand
gaaggaaucaaguuuauac

SEQ ID NO: 1019154 - RNA, 19 nt, Homo sapiens
  misc_RNA (1)...(19): siRNA sense strand
gauuauagcaguucucaug

SEQ ID NO: 1019155 - RNA, 19 nt, Homo sapiens
  misc_RNA (1)...(19): siRNA sense strand
ccaagaaagagcuagguua

SEQ ID NO: 1019156 - RNA, 19 nt, Homo sapiens
  misc_RNA (1)...(19): siRNA sense strand
ucacuuguguguuccauau

SEQ ID NO: 1019157 - RNA, 19 nt, Homo sapiens
  misc_RNA (1)...(19): siRNA sense strand
caagaaagagcuagguuau

SEQ ID NO: 1019158 - RNA, 19 nt, Homo sapiens
  misc_RNA (1)...(19): siRNA sense strand
gacaacauccuccagguuu

SEQ ID NO: 1019159 - RNA, 19 nt, Homo sapiens
  misc_RNA (1)...(19): siRNA sense strand
gcagacccgugaacaacuu

SEQ ID NO: 1019160 - RNA, 19 nt, Homo sapiens
  misc_RNA (1)...(19): siRNA sense strand
gaaaguguccucauuacag

SEQ ID NO: 1019161 - RNA, 19 nt, Homo sapiens
  misc_RNA (1)...(19): siRNA sense strand
agagaugguucacuucauu

SEQ ID NO: 1019162 - RNA, 19 nt, Homo sapiens
  misc_RNA (1)...(19): siRNA sense strand
agacgucacuuguguguuc

SEQ ID NO: 1019163 - RNA, 19 nt, Homo sapiens
  misc_RNA (1)...(19): siRNA sense strand
cagaggcgacggugucuua

SEQ ID NO: 1019164 - RNA, 19 nt, Homo sapiens
  misc_RNA (1)...(19): siRNA sense strand
gagaagggugcccagguua

SEQ ID NO: 1019165 - RNA, 19 nt, Homo sapiens
  misc_RNA (1)...(19): siRNA sense strand
ggaaguggcuauuuugguu

SEQ ID NO: 1019166 - RNA, 19 nt, Homo sapiens
  misc_RNA (1)...(19): siRNA sense strand
uuaagaaccugcgcucuga

SEQ ID NO: 1019167 - RNA, 19 nt, Homo sapiens
  misc_RNA (1)...(19): siRNA sense strand
uauagcaguucucauguga

SEQ ID NO: 1019168 - RNA, 19 nt, Homo sapiens
  misc_RNA (1)...(19): siRNA sense strand
gaaaccugaucaaagaagu

SEQ ID NO: 1019169 - RNA, 19 nt, Homo sapiens
  misc_RNA (1)...(19): siRNA sense strand
aaagacaccuucccaggau

SEQ ID NO: 1019170 - RNA, 19 nt, Homo sapiens
  misc_RNA (1)...(19): siRNA sense strand
gaucacuacucucggacaa

SEQ ID NO: 1019171 - RNA, 19 nt, Homo sapiens
  misc_RNA (1)...(19): siRNA sense strand
ggaagcaguggaaugguuu

SEQ ID NO: 1019172 - RNA, 19 nt, Homo sapiens
  misc_RNA (1)...(19): siRNA sense strand
gggaugggcuauuggucuu

SEQ ID NO: 1019173 - RNA, 19 nt, Homo sapiens
  misc_RNA (1)...(19): siRNA sense strand
gcucaaaccauuccagaag

SEQ ID NO: 1019174 - RNA, 19 nt, Homo sapiens
  misc_RNA (1)...(19): siRNA sense strand
gaagcaguggaaugguuua

SEQ ID NO: 1019175 - RNA, 19 nt, Homo sapiens
  misc_RNA (1)...(19): siRNA sense strand
agagaaagccuuccaggau

SEQ ID NO: 1019176 - RNA, 19 nt, Homo sapiens
  misc_RNA (1)...(19): siRNA sense strand
uagagaaagccaagaaaga

SEQ ID NO: 1019177 - RNA, 19 nt, Homo sapiens
  misc_RNA (1)...(19): siRNA sense strand
ucaaaccauuccagaagga

SEQ ID NO: 1019178 - RNA, 19 nt, Homo sapiens
  misc_RNA (1)...(19): siRNA sense strand
ggaaaguguccucauuaca

SEQ ID NO: 1019179 - RNA, 19 nt, Homo sapiens
  misc_RNA (1)...(19): siRNA sense strand
gagaugguucacuucauuu

SEQ ID NO: 1019180 - RNA, 19 nt, Homo sapiens
  misc_RNA (1)...(19): siRNA sense strand
ccaccugucugacguagag

SEQ ID NO: 1019181 - RNA, 19 nt, Homo sapiens
  misc_RNA (1)...(19): siRNA sense strand
caccagcacuuucaauguc

SEQ ID NO: 1019182 - RNA, 19 nt, Homo sapiens
  misc_RNA (1)...(19): siRNA sense strand
cacuuucaaugucaucuuu

SEQ ID NO: 1019183 - RNA, 19 nt, Homo sapiens
  misc_RNA (1)...(19): siRNA sense strand
ucacucgcacugaaguuua

SEQ ID NO: 1019184 - RNA, 19 nt, Homo sapiens
  misc_RNA (1)...(19): siRNA sense strand
gagaagggucuguucaagu

SEQ ID NO: 1019185 - RNA, 19 nt, Homo sapiens
  misc_RNA (1)...(19): siRNA sense strand
ggaggucaaguuaucagaa

SEQ ID NO: 1019186 - RNA, 19 nt, Homo sapiens
  misc_RNA (1)...(19): siRNA sense strand
gaagggucuguucaaguuu

SEQ ID NO: 1019187 - RNA, 19 nt, Homo sapiens
  misc_RNA (1)...(19): siRNA sense strand
gaaagccaagaaagagcua

SEQ ID NO: 1019188 - RNA, 19 nt, Homo sapiens
  misc_RNA (1)...(19): siRNA sense strand
gcagacgucacuugugugu

SEQ ID NO: 1019189 - RNA, 19 nt, Homo sapiens
  misc_RNA (1)...(19): siRNA sense strand
cgagaagggucuguucaag

SEQ ID NO: 1019190 - RNA, 19 nt, Homo sapiens
  misc_RNA (1)...(19): siRNA sense strand
aggcgacggugucuuaaga

SEQ ID NO: 1019191 - RNA, 19 nt, Homo sapiens
  misc_RNA (1)...(19): siRNA sense strand
aucgaaaccugaucaaaga

SEQ ID NO: 1019192 - RNA, 19 nt, Homo sapiens
  misc_RNA (1)...(19): siRNA sense strand
gaaagagcuagguuauaag

SEQ ID NO: 1019193 - RNA, 19 nt, Homo sapiens
  misc_RNA (1)...(19): siRNA sense strand
ggucaaguuaucagaaaug

SEQ ID NO: 1019194 - RNA, 19 nt, Homo sapiens
  misc_RNA (1)...(19): siRNA sense strand
gcugacaagggccauauug

SEQ ID NO: 1019195 - RNA, 19 nt, Homo sapiens
  misc_RNA (1)...(19): siRNA sense strand
ucacuacucucggacaaag

SEQ ID NO: 1019196 - RNA, 19 nt, Homo sapiens
  misc_RNA (1)...(19): siRNA sense strand
cuaugggccuggagaacaa

SEQ ID NO: 1019197 - RNA, 19 nt, Homo sapiens
  misc_RNA (1)...(19): siRNA sense strand
uuacaaaacuggugucaca

SEQ ID NO: 1019198 - RNA, 19 nt, Homo sapiens
  misc_RNA (1)...(19): siRNA sense strand
ggugcaggcucacauucug

SEQ ID NO: 1019199 - RNA, 19 nt, Homo sapiens
  misc_RNA (1)...(19): siRNA sense strand
uguuccauauugccucuua

SEQ ID NO: 1019200 - RNA, 19 nt, Homo sapiens
  misc_RNA (1)...(19): siRNA sense strand
aggaagcaguggaaugguu

SEQ ID NO: 1019201 - RNA, 19 nt, Homo sapiens
  misc_RNA (1)...(19): siRNA sense strand
aagaaagagcuagguuaua

SEQ ID NO: 1019202 - RNA, 19 nt, Homo sapiens
  misc_RNA (1)...(19): siRNA sense strand
ggagccugguugaguuugu

SEQ ID NO: 1019203 - RNA, 19 nt, Homo sapiens
  misc_RNA (1)...(19): siRNA sense strand
acaacauccuccagguuug

SEQ ID NO: 1019204 - RNA, 19 nt, Homo sapiens
  misc_RNA (1)...(19): siRNA sense strand
aaucgaaaccugaucaaag

SEQ ID NO: 1019205 - RNA, 19 nt, Homo sapiens
  misc_RNA (1)...(19): siRNA sense strand
cagcccugcucaaaccauu

SEQ ID NO: 1019206 - RNA, 19 nt, Homo sapiens
  misc_RNA (1)...(19): siRNA sense strand
uccaugugauucuguuuga

SEQ ID NO: 1019207 - RNA, 19 nt, Homo sapiens
  misc_RNA (1)...(19): siRNA sense strand
ggaugcagacgucacuugu

SEQ ID NO: 1019208 - RNA, 19 nt, Homo sapiens
  misc_RNA (1)...(19): siRNA sense strand
ggucuuccuccugauuaua

SEQ ID NO: 1019209 - RNA, 19 nt, Homo sapiens
  misc_RNA (1)...(19): siRNA sense strand
gcugugcccugaaccaaaa

SEQ ID NO: 1019210 - RNA, 19 nt, Homo sapiens
  misc_RNA (1)...(19): siRNA sense strand
augcagacgucacuugugu

SEQ ID NO: 1019211 - RNA, 19 nt, Homo sapiens
  misc_RNA (1)...(19): siRNA sense strand
gagcugacaagggccauau

SEQ ID NO: 1019212 - RNA, 19 nt, Homo sapiens
  misc_RNA (1)...(19): siRNA sense strand
gaguccaugugauucuguu

SEQ ID NO: 1019213 - RNA, 19 nt, Homo sapiens
  misc_RNA (1)...(19): siRNA sense strand
gcacuuucaaugucaucuu

SEQ ID NO: 1019214 - RNA, 19 nt, Homo sapiens
  misc_RNA (1)...(19): siRNA sense strand
gaagggugcccagguuagu

SEQ ID NO: 1019215 - RNA, 19 nt, Homo sapiens
  misc_RNA (1)...(19): siRNA sense strand
gacggugucuuaagaaccu

SEQ ID NO: 1019216 - RNA, 19 nt, Homo sapiens
  misc_RNA (1)...(19): siRNA sense strand
cagagaugguucacuucau

SEQ ID NO: 1019217 - RNA, 19 nt, Homo sapiens
  misc_RNA (1)...(19): siRNA sense strand
aagggucuguucaaguuug

SEQ ID NO: 1019218 - RNA, 19 nt, Homo sapiens
  misc_RNA (1)...(19): siRNA sense strand
ggcuacacauucccgucua

SEQ ID NO: 1019219 - RNA, 19 nt, Homo sapiens
  misc_RNA (1)...(19): siRNA sense strand
uuauagcaguucucaugug

SEQ ID NO: 1019220 - RNA, 19 nt, Homo sapiens
  misc_RNA (1)...(19): siRNA sense strand
ccaggaagcaguggaaugg

SEQ ID NO: 1019221 - RNA, 19 nt, Homo sapiens
  misc_RNA (1)...(19): siRNA sense strand
acuuguguguuccauauug

SEQ ID NO: 1019222 - RNA, 19 nt, Homo sapiens
  misc_RNA (1)...(19): siRNA sense strand
caaucgaaaccugaucaaa

SEQ ID NO: 1019223 - RNA, 19 nt, Homo sapiens
  misc_RNA (1)...(19): siRNA sense strand
aagacaccuucccaggaua

SEQ ID NO: 1019224 - RNA, 19 nt, Homo sapiens
  misc_RNA (1)...(19): siRNA sense strand
caggaggaaguggcuauuu

SEQ ID NO: 1019225 - RNA, 19 nt, Homo sapiens
  misc_RNA (1)...(19): siRNA sense strand
gccaagaaagagcuagguu

SEQ ID NO: 1019226 - RNA, 19 nt, Homo sapiens
  misc_RNA (1)...(19): siRNA sense strand
gggccugggcuacacauuc

SEQ ID NO: 1019227 - RNA, 19 nt, Homo sapiens
  misc_RNA (1)...(19): siRNA sense strand
caucuuuggaggucaaguu

SEQ ID NO: 1019228 - RNA, 19 nt, Homo sapiens
  misc_RNA (1)...(19): siRNA sense strand
agacaacauccuccagguu

SEQ ID NO: 1019229 - RNA, 19 nt, Homo sapiens
  misc_RNA (1)...(19): siRNA sense strand
agagaaagccaagaaagag

SEQ ID NO: 1019230 - RNA, 19 nt, Homo sapiens
  misc_RNA (1)...(19): siRNA sense strand
gcgacggugucuuaagaac

SEQ ID NO: 1019231 - RNA, 19 nt, Homo sapiens
  misc_RNA (1)...(19): siRNA sense strand
ccuccacccugaucacuac

SEQ ID NO: 1019232 - RNA, 19 nt, Homo sapiens
  misc_RNA (1)...(19): siRNA sense strand
cuuuggaggucaaguuauc

SEQ ID NO: 1019233 - RNA, 19 nt, Homo sapiens
  misc_RNA (1)...(19): siRNA sense strand
ggaggaaguggcuauuuug

SEQ ID NO: 1019234 - RNA, 19 nt, Homo sapiens
  misc_RNA (1)...(19): siRNA sense strand
guuuaaagcccauggucau

SEQ ID NO: 1019235 - RNA, 19 nt, Homo sapiens
  misc_RNA (1)...(19): siRNA sense strand
gaaauggggaugaaucucu

SEQ ID NO: 1019236 - RNA, 19 nt, Homo sapiens
  misc_RNA (1)...(19): siRNA sense strand
uguuugggaugggcuauug

SEQ ID NO: 1019237 - RNA, 19 nt, Homo sapiens
  misc_RNA (1)...(19): siRNA sense strand
acagagaugguucacuuca

SEQ ID NO: 1019238 - RNA, 19 nt, Homo sapiens
  misc_RNA (1)...(19): siRNA sense strand
gcuacacauucccgucuac

SEQ ID NO: 1019239 - RNA, 19 nt, Homo sapiens
  misc_RNA (1)...(19): siRNA sense strand
uauugccucuuaugguaug

SEQ ID NO: 1019240 - RNA, 19 nt, Homo sapiens
  misc_RNA (1)...(19): siRNA sense strand
uccagaaggaaucaaguuu

SEQ ID NO: 1019241 - RNA, 19 nt, Homo sapiens
  misc_RNA (1)...(19): siRNA sense strand
aaagagcuagguuauaagg

SEQ ID NO: 1019242 - RNA, 19 nt, Homo sapiens
  misc_RNA (1)...(19): siRNA sense strand
gaugaagaguuuaaagaug

SEQ ID NO: 1019243 - RNA, 19 nt, Homo sapiens
  misc_RNA (1)...(19): siRNA sense strand
aggcggagcugcaguaauu

SEQ ID NO: 1019244 - RNA, 19 nt, Homo sapiens
  misc_RNA (1)...(19): siRNA sense strand
gcagagaguucgccugucu

SEQ ID NO: 1019245 - RNA, 19 nt, Homo sapiens
  misc_RNA (1)...(19): siRNA sense strand
gcaggaagagcaugccuuu

SEQ ID NO: 1019246 - RNA, 19 nt, Homo sapiens
  misc_RNA (1)...(19): siRNA sense strand
guaggugcccugaugauuu

SEQ ID NO: 1019247 - RNA, 19 nt, Homo sapiens
  misc_RNA (1)...(19): siRNA sense strand
ugagccagaugaagaguuu

SEQ ID NO: 1019248 - RNA, 19 nt, Homo sapiens
  misc_RNA (1)...(19): siRNA sense strand
ugaaugagggugcauggua

SEQ ID NO: 1019249 - RNA, 19 nt, Homo sapiens
  misc_RNA (1)...(19): siRNA sense strand
ggaagagcaugccuuugag

SEQ ID NO: 1019250 - RNA, 19 nt, Homo sapiens
  misc_RNA (1)...(19): siRNA sense strand
guggaguucuuccgaguug

SEQ ID NO: 1019251 - RNA, 19 nt, Homo sapiens
  misc_RNA (1)...(19): siRNA sense strand
ggaaggauggucugaugga

SEQ ID NO: 1019252 - RNA, 19 nt, Homo sapiens
  misc_RNA (1)...(19): siRNA sense strand
gaagagcaugccuuugaga

SEQ ID NO: 1019253 - RNA, 19 nt, Homo sapiens
  misc_RNA (1)...(19): siRNA sense strand
cagaugaagaguuuaaaga

SEQ ID NO: 1019254 - RNA, 19 nt, Homo sapiens
  misc_RNA (1)...(19): siRNA sense strand
aggaagagcaugccuuuga

SEQ ID NO: 1019255 - RNA, 19 nt, Homo sapiens
  misc_RNA (1)...(19): siRNA sense strand
uaggugcccugaugauuuc

SEQ ID NO: 1019256 - RNA, 19 nt, Homo sapiens
  misc_RNA (1)...(19): siRNA sense strand
uggcugaggugaagagcuu

SEQ ID NO: 1019257 - RNA, 19 nt, Homo sapiens
  misc_RNA (1)...(19): siRNA sense strand
gagggagacuguguuugug

SEQ ID NO: 1019258 - RNA, 19 nt, Homo sapiens
  misc_RNA (1)...(19): siRNA sense strand
cagucugcaugcuguauuu

SEQ ID NO: 1019259 - RNA, 19 nt, Homo sapiens
  misc_RNA (1)...(19): siRNA sense strand
ccagagggagacuguguuu

SEQ ID NO: 1019260 - RNA, 19 nt, Homo sapiens
  misc_RNA (1)...(19): siRNA sense strand
gagcugaugcggaggaagu

SEQ ID NO: 1019261 - RNA, 19 nt, Homo sapiens
  misc_RNA (1)...(19): siRNA sense strand
uuaaacagcacgcucuuuc

SEQ ID NO: 1019262 - RNA, 19 nt, Homo sapiens
  misc_RNA (1)...(19): siRNA sense strand
guaaccagaccuugagcaa

SEQ ID NO: 1019263 - RNA, 19 nt, Homo sapiens
  misc_RNA (1)...(19): siRNA sense strand
ccacucugcuggguucuca

SEQ ID NO: 1019264 - RNA, 19 nt, Homo sapiens
  misc_RNA (1)...(19): siRNA sense strand
agagggagacuguguuugu

SEQ ID NO: 1019265 - RNA, 19 nt, Homo sapiens
  misc_RNA (1)...(19): siRNA sense strand
aggaggaccugcagagagu

SEQ ID NO: 1019266 - RNA, 19 nt, Homo sapiens
  misc_RNA (1)...(19): siRNA sense strand
aaacagcacgcucuuucug

SEQ ID NO: 1019267 - RNA, 19 nt, Homo sapiens
  misc_RNA (1)...(19): siRNA sense strand
ucucgaugcugcuccuuca

SEQ ID NO: 1019268 - RNA, 19 nt, Homo sapiens
  misc_RNA (1)...(19): siRNA sense strand
ucaaggugcccaagucauc

SEQ ID NO: 1019269 - RNA, 19 nt, Homo sapiens
  misc_RNA (1)...(19): siRNA sense strand
ggggaaggauggucugaug

SEQ ID NO: 1019270 - RNA, 19 nt, Homo sapiens
  misc_RNA (1)...(19): siRNA sense strand
guuuaaagaugcgauugag

SEQ ID NO: 1019271 - RNA, 19 nt, Homo sapiens
  misc_RNA (1)...(19): siRNA sense strand
ggaguucuuccgaguugug

SEQ ID NO: 1019272 - RNA, 19 nt, Homo sapiens
  misc_RNA (1)...(19): siRNA sense strand
agcagaggaugaacccaaa

SEQ ID NO: 1019273 - RNA, 19 nt, Homo sapiens
  misc_RNA (1)...(19): siRNA sense strand
cgucguguccucacaguuc

SEQ ID NO: 1019274 - RNA, 19 nt, Homo sapiens
  misc_RNA (1)...(19): siRNA sense strand
acaacggguuccugagcaa

SEQ ID NO: 1019275 - RNA, 19 nt, Homo sapiens
  misc_RNA (1)...(19): siRNA sense strand
ugguggugcuggaggauga

SEQ ID NO: 1019276 - RNA, 19 nt, Homo sapiens
  misc_RNA (1)...(19): siRNA sense strand
ccaacaacuucgggaacug

SEQ ID NO: 1019277 - RNA, 19 nt, Homo sapiens
  misc_RNA (1)...(19): siRNA sense strand
guaauuguggaaacagcuu

SEQ ID NO: 1019278 - RNA, 19 nt, Homo sapiens
  misc_RNA (1)...(19): siRNA sense strand
gaugaacccaaagcaggaa

SEQ ID NO: 1019279 - RNA, 19 nt, Homo sapiens
  misc_RNA (1)...(19): siRNA sense strand
gcccagagggagacugugu

SEQ ID NO: 1019280 - RNA, 19 nt, Homo sapiens
  misc_RNA (1)...(19): siRNA sense strand
ccagaugaagaguuuaaag

SEQ ID NO: 1019281 - RNA, 19 nt, Homo sapiens
  misc_RNA (1)...(19): siRNA sense strand
uccgaguugugucugagua

SEQ ID NO: 1019282 - RNA, 19 nt, Homo sapiens
  misc_RNA (1)...(19): siRNA sense strand
cgcagccuguccuacaaua

SEQ ID NO: 1019283 - RNA, 19 nt, Homo sapiens
  misc_RNA (1)...(19): siRNA sense strand
cgacucaggcgucuaugau

SEQ ID NO: 1019284 - RNA, 19 nt, Homo sapiens
  misc_RNA (1)...(19): siRNA sense strand
gcagccuguccuacaauaa

SEQ ID NO: 1019285 - RNA, 19 nt, Homo sapiens
  misc_RNA (1)...(19): siRNA sense strand
gcacugcccaaccacaauc

SEQ ID NO: 1019286 - RNA, 19 nt, Homo sapiens
  misc_RNA (1)...(19): siRNA sense strand
ugcuacagcucuacagaug

SEQ ID NO: 1019287 - RNA, 19 nt, Homo sapiens
  misc_RNA (1)...(19): siRNA sense strand
caguuggcguggccggaua

SEQ ID NO: 1019288 - RNA, 19 nt, Homo sapiens
  misc_RNA (1)...(19): siRNA sense strand
cuacagcucuacagaugac

SEQ ID NO: 1019289 - RNA, 19 nt, Homo sapiens
  misc_RNA (1)...(19): siRNA sense strand
cagccuguccuacaauaau

SEQ ID NO: 1019290 - RNA, 19 nt, Homo sapiens
  misc_RNA (1)...(19): siRNA sense strand
gagggcuucugagguccua

SEQ ID NO: 1019291 - RNA, 19 nt, Homo sapiens
  misc_RNA (1)...(19): siRNA sense strand
gcgacucaggcgucuauga

SEQ ID NO: 1019292 - RNA, 19 nt, Homo sapiens
  misc_RNA (1)...(19): siRNA sense strand
gcuacagcucuacagauga

SEQ ID NO: 1019293 - RNA, 19 nt, Homo sapiens
  misc_RNA (1)...(19): siRNA sense strand
gagguccuacgcugugcua

SEQ ID NO: 1019294 - RNA, 19 nt, Homo sapiens
  misc_RNA (1)...(19): siRNA sense strand
ccaagaggguggacaguuu

SEQ ID NO: 1019295 - RNA, 19 nt, Homo sapiens
  misc_RNA (1)...(19): siRNA sense strand
ccaccgagcuaacaucuga

SEQ ID NO: 1019296 - RNA, 19 nt, Homo sapiens
  misc_RNA (1)...(19): siRNA sense strand
gcaagcugcugaaagaaga

SEQ ID NO: 1019297 - RNA, 19 nt, Homo sapiens
  misc_RNA (1)...(19): siRNA sense strand
gggaugaggucuacacaau

SEQ ID NO: 1019298 - RNA, 19 nt, Homo sapiens
  misc_RNA (1)...(19): siRNA sense strand
gaacugaccauaucauagu

SEQ ID NO: 1019299 - RNA, 19 nt, Homo sapiens
  misc_RNA (1)...(19): siRNA sense strand
gagcagccaucuaaagaag

SEQ ID NO: 1019300 - RNA, 19 nt, Homo sapiens
  misc_RNA (1)...(19): siRNA sense strand
gggaacagugccuugauua

SEQ ID NO: 1019301 - RNA, 19 nt, Homo sapiens
  misc_RNA (1)...(19): siRNA sense strand
ggaacagugccuugauuaa

SEQ ID NO: 1019302 - RNA, 19 nt, Homo sapiens
  misc_RNA (1)...(19): siRNA sense strand
cgagcaaccucagcaaauu

SEQ ID NO: 1019303 - RNA, 19 nt, Homo sapiens
  misc_RNA (1)...(19): siRNA sense strand
gcagaaggcauuugagauc

SEQ ID NO: 1019304 - RNA, 19 nt, Homo sapiens
  misc_RNA (1)...(19): siRNA sense strand
caagugguauaauuccauu

SEQ ID NO: 1019305 - RNA, 19 nt, Homo sapiens
  misc_RNA (1)...(19): siRNA sense strand
gaccgaaggugcagagaag

SEQ ID NO: 1019306 - RNA, 19 nt, Homo sapiens
  misc_RNA (1)...(19): siRNA sense strand
ggccaucaaugaguucuuu

SEQ ID NO: 1019307 - RNA, 19 nt, Homo sapiens
  misc_RNA (1)...(19): siRNA sense strand
caaagucacccaguucaaa

SEQ ID NO: 1019308 - RNA, 19 nt, Homo sapiens
  misc_RNA (1)...(19): siRNA sense strand
caguucaagugguauaauu

SEQ ID NO: 1019309 - RNA, 19 nt, Homo sapiens
  misc_RNA (1)...(19): siRNA sense strand
uuacgaaagccaugucuaa

SEQ ID NO: 1019310 - RNA, 19 nt, Homo sapiens
  misc_RNA (1)...(19): siRNA sense strand
gcaugcagaugaccaagag

SEQ ID NO: 1019311 - RNA, 19 nt, Homo sapiens
  misc_RNA (1)...(19): siRNA sense strand
ggacuaucauggaggagau

SEQ ID NO: 1019312 - RNA, 19 nt, Homo sapiens
  misc_RNA (1)...(19): siRNA sense strand
ugacuaacagcacuuuaaa

SEQ ID NO: 1019313 - RNA, 19 nt, Homo sapiens
  misc_RNA (1)...(19): siRNA sense strand
gaacagugccuugauuaac

SEQ ID NO: 1019314 - RNA, 19 nt, Homo sapiens
  misc_RNA (1)...(19): siRNA sense strand
agaaggccaucaaugaguu

SEQ ID NO: 1019315 - RNA, 19 nt, Homo sapiens
  misc_RNA (1)...(19): siRNA sense strand
gcuaagagugugacuaaca

SEQ ID NO: 1019316 - RNA, 19 nt, Homo sapiens
  misc_RNA (1)...(19): siRNA sense strand
auuaugaacugcaggacua

SEQ ID NO: 1019317 - RNA, 19 nt, Homo sapiens
  misc_RNA (1)...(19): siRNA sense strand
cagaacugaccauaucaua

SEQ ID NO: 1019318 - RNA, 19 nt, Homo sapiens
  misc_RNA (1)...(19): siRNA sense strand
gugacuaacagcacuuuaa

SEQ ID NO: 1019319 - RNA, 19 nt, Homo sapiens
  misc_RNA (1)...(19): siRNA sense strand
gagcaaccucagcaaauug

SEQ ID NO: 1019320 - RNA, 19 nt, Homo sapiens
  misc_RNA (1)...(19): siRNA sense strand
ccgcuaagagugugacuaa

SEQ ID NO: 1019321 - RNA, 19 nt, Homo sapiens
  misc_RNA (1)...(19): siRNA sense strand
caucaucaccuccgccaaa

SEQ ID NO: 1019322 - RNA, 19 nt, Homo sapiens
  misc_RNA (1)...(19): siRNA sense strand
ugaaagaagaagaggauga

SEQ ID NO: 1019323 - RNA, 19 nt, Homo sapiens
  misc_RNA (1)...(19): siRNA sense strand
gaugaggucuacacaaucc

SEQ ID NO: 1019324 - RNA, 19 nt, Homo sapiens
  misc_RNA (1)...(19): siRNA sense strand
ugccagaacugaccauauc

SEQ ID NO: 1019325 - RNA, 19 nt, Homo sapiens
  misc_RNA (1)...(19): siRNA sense strand
gaacugcaggacuaucaug

SEQ ID NO: 1019326 - RNA, 19 nt, Homo sapiens
  misc_RNA (1)...(19): siRNA sense strand
gagaaggccaucaaugagu

SEQ ID NO: 1019327 - RNA, 19 nt, Homo sapiens
  misc_RNA (1)...(19): siRNA sense strand
gaaagaagaagaggaugag

SEQ ID NO: 1019328 - RNA, 19 nt, Homo sapiens
  misc_RNA (1)...(19): siRNA sense strand
cugagaaggccaucaauga

SEQ ID NO: 1019329 - RNA, 19 nt, Homo sapiens
  misc_RNA (1)...(19): siRNA sense strand
acuaacagcacuuuaaaug

SEQ ID NO: 1019330 - RNA, 19 nt, Homo sapiens
  misc_RNA (1)...(19): siRNA sense strand
uuggcaagcugcugaaaga

SEQ ID NO: 1019331 - RNA, 19 nt, Homo sapiens
  misc_RNA (1)...(19): siRNA sense strand
ccaucaaggugucaguuca

SEQ ID NO: 1019332 - RNA, 19 nt, Homo sapiens
  misc_RNA (1)...(19): siRNA sense strand
ggaccgaaggugcagagaa

SEQ ID NO: 1019333 - RNA, 19 nt, Homo sapiens
  misc_RNA (1)...(19): siRNA sense strand
gcugaaagaagaagaggau

SEQ ID NO: 1019334 - RNA, 19 nt, Homo sapiens
  misc_RNA (1)...(19): siRNA sense strand
gcacuuuaaauggcacuaa

SEQ ID NO: 1019335 - RNA, 19 nt, Homo sapiens
  misc_RNA (1)...(19): siRNA sense strand
ccucugccgccucucauua

SEQ ID NO: 1019336 - RNA, 19 nt, Homo sapiens
  misc_RNA (1)...(19): siRNA sense strand
gcagccaucuaaagaagac

SEQ ID NO: 1019337 - RNA, 19 nt, Homo sapiens
  misc_RNA (1)...(19): siRNA sense strand
guguguggcuucuaacauc

SEQ ID NO: 1019338 - RNA, 19 nt, Homo sapiens
  misc_RNA (1)...(19): siRNA sense strand
aagaagaggaugagaagga

SEQ ID NO: 1019339 - RNA, 19 nt, Homo sapiens
  misc_RNA (1)...(19): siRNA sense strand
gaacaucaccaagguaucc

SEQ ID NO: 1019340 - RNA, 19 nt, Homo sapiens
  misc_RNA (1)...(19): siRNA sense strand
ggagagaggaggaggaaaa

SEQ ID NO: 1019341 - RNA, 19 nt, Homo sapiens
  misc_RNA (1)...(19): siRNA sense strand
ucucagaccgagguaaaua

SEQ ID NO: 1019342 - RNA, 19 nt, Homo sapiens
  misc_RNA (1)...(19): siRNA sense strand
cuguugagguaccagauaa

SEQ ID NO: 1019343 - RNA, 19 nt, Homo sapiens
  misc_RNA (1)...(19): siRNA sense strand
caagaggguggacaguuug

SEQ ID NO: 1019344 - RNA, 19 nt, Homo sapiens
  misc_RNA (1)...(19): siRNA sense strand
ggaggaaaauggcaaaugc

SEQ ID NO: 1019345 - RNA, 19 nt, Homo sapiens
  misc_RNA (1)...(19): siRNA sense strand
acaccugcauuauuuacga

SEQ ID NO: 1019346 - RNA, 19 nt, Homo sapiens
  misc_RNA (1)...(19): siRNA sense strand
cucuagagcuugccaaagu

SEQ ID NO: 1019347 - RNA, 19 nt, Homo sapiens
  misc_RNA (1)...(19): siRNA sense strand
ccaucugacugugugcuuu

SEQ ID NO: 1019348 - RNA, 19 nt, Homo sapiens
  misc_RNA (1)...(19): siRNA sense strand
gucaugguccucaauauca

SEQ ID NO: 1019349 - RNA, 19 nt, Homo sapiens
  misc_RNA (1)...(19): siRNA sense strand
agggaacagugccuugauu

SEQ ID NO: 1019350 - RNA, 19 nt, Homo sapiens
  misc_RNA (1)...(19): siRNA sense strand
gcacgagcaaccucagcaa

SEQ ID NO: 1019351 - RNA, 19 nt, Homo sapiens
  misc_RNA (1)...(19): siRNA sense strand
cuaagagugugacuaacag

SEQ ID NO: 1019352 - RNA, 19 nt, Homo sapiens
  misc_RNA (1)...(19): siRNA sense strand
aagaagaagaggaugagaa

SEQ ID NO: 1019353 - RNA, 19 nt, Homo sapiens
  misc_RNA (1)...(19): siRNA sense strand
gguggacaguuugaaguca

SEQ ID NO: 1019354 - RNA, 19 nt, Homo sapiens
  misc_RNA (1)...(19): siRNA sense strand
ugaagagccaucugacugu

SEQ ID NO: 1019355 - RNA, 19 nt, Homo sapiens
  misc_RNA (1)...(19): siRNA sense strand
gaacugucggcggaacauu

SEQ ID NO: 1019356 - RNA, 19 nt, Homo sapiens
  misc_RNA (1)...(19): siRNA sense strand
gugccuugauuaacuguag

SEQ ID NO: 1019357 - RNA, 19 nt, Homo sapiens
  misc_RNA (1)...(19): siRNA sense strand
cgauugaagagccaucuga

SEQ ID NO: 1019358 - RNA, 19 nt, Homo sapiens
  misc_RNA (1)...(19): siRNA sense strand
agccagcagugacacauga

SEQ ID NO: 1019359 - RNA, 19 nt, Homo sapiens
  misc_RNA (1)...(19): siRNA sense strand
agaagaagaggaugagaag

SEQ ID NO: 1019360 - RNA, 19 nt, Homo sapiens
  misc_RNA (1)...(19): siRNA sense strand
aacagugccuugauuaacu

SEQ ID NO: 1019361 - RNA, 19 nt, Homo sapiens
  misc_RNA (1)...(19): siRNA sense strand
ggaugaggucuacacaauc

SEQ ID NO: 1019362 - RNA, 19 nt, Homo sapiens
  misc_RNA (1)...(19): siRNA sense strand
agacugagaaggccaucaa

SEQ ID NO: 1019363 - RNA, 19 nt, Homo sapiens
  misc_RNA (1)...(19): siRNA sense strand
gaccuugcgcgucaucuuc

SEQ ID NO: 1019364 - RNA, 19 nt, Homo sapiens
  misc_RNA (1)...(19): siRNA sense strand
ccaaagucacccaguucaa

SEQ ID NO: 1019365 - RNA, 19 nt, Homo sapiens
  misc_RNA (1)...(19): siRNA sense strand
gacagcggccuccugaaca

SEQ ID NO: 1019366 - RNA, 19 nt, Homo sapiens
  misc_RNA (1)...(19): siRNA sense strand
caucuaaagaagacugaga

SEQ ID NO: 1019367 - RNA, 19 nt, Homo sapiens
  misc_RNA (1)...(19): siRNA sense strand
cuucacuucuggagacaug

SEQ ID NO: 1019368 - RNA, 19 nt, Homo sapiens
  misc_RNA (1)...(19): siRNA sense strand
caccugcauuauuuacgaa

SEQ ID NO: 1019369 - RNA, 19 nt, Homo sapiens
  misc_RNA (1)...(19): siRNA sense strand
ugagcagccaucuaaagaa

SEQ ID NO: 1019370 - RNA, 19 nt, Homo sapiens
  misc_RNA (1)...(19): siRNA sense strand
gacuaacagcacuuuaaau

SEQ ID NO: 1019371 - RNA, 19 nt, Homo sapiens
  misc_RNA (1)...(19): siRNA sense strand
gccaaagucacccaguuca

SEQ ID NO: 1019372 - RNA, 19 nt, Homo sapiens
  misc_RNA (1)...(19): siRNA sense strand
gaagcugcagaaggcauuu

SEQ ID NO: 1019373 - RNA, 19 nt, Homo sapiens
  misc_RNA (1)...(19): siRNA sense strand
gaaggccaucaaugaguuc

SEQ ID NO: 1019374 - RNA, 19 nt, Homo sapiens
  misc_RNA (1)...(19): siRNA sense strand
ugagaaggccaucaaugag

SEQ ID NO: 1019375 - RNA, 19 nt, Homo sapiens
  misc_RNA (1)...(19): siRNA sense strand
ugaacaacacggugaccuu

SEQ ID NO: 1019376 - RNA, 19 nt, Homo sapiens
  misc_RNA (1)...(19): siRNA sense strand
aucaaugaguucuuuagga

SEQ ID NO: 1019377 - RNA, 19 nt, Homo sapiens
  misc_RNA (1)...(19): siRNA sense strand
gagcaggggcagaauuuug

SEQ ID NO: 1019378 - RNA, 19 nt, Homo sapiens
  misc_RNA (1)...(19): siRNA sense strand
gcucugugcccguaaucau

SEQ ID NO: 1019379 - RNA, 19 nt, Homo sapiens
  misc_RNA (1)...(19): siRNA sense strand
cguaaucauugccagaacu

SEQ ID NO: 1019380 - RNA, 19 nt, Homo sapiens
  misc_RNA (1)...(19): siRNA sense strand
cgagcuaacaucugaagag

SEQ ID NO: 1019381 - RNA, 19 nt, Homo sapiens
  misc_RNA (1)...(19): siRNA sense strand
acugugugcuuucuaccuu

SEQ ID NO: 1019382 - RNA, 19 nt, Homo sapiens
  misc_RNA (1)...(19): siRNA sense strand
gccaucaaugaguucuuua

SEQ ID NO: 1019383 - RNA, 19 nt, Homo sapiens
  misc_RNA (1)...(19): siRNA sense strand
ccuguugagguaccagaua

SEQ ID NO: 1019384 - RNA, 19 nt, Homo sapiens
  misc_RNA (1)...(19): siRNA sense strand
gaggguggacaguuugaag

SEQ ID NO: 1019385 - RNA, 19 nt, Homo sapiens
  misc_RNA (1)...(19): siRNA sense strand
uaucauggaggagauuaug

SEQ ID NO: 1019386 - RNA, 19 nt, Homo sapiens
  misc_RNA (1)...(19): siRNA sense strand
uugccaaagucacccaguu

SEQ ID NO: 1019387 - RNA, 19 nt, Homo sapiens
  misc_RNA (1)...(19): siRNA sense strand
guaaucauugccagaacug

SEQ ID NO: 1019388 - RNA, 19 nt, Homo sapiens
  misc_RNA (1)...(19): siRNA sense strand
cgccaaaacucuagagcuu

SEQ ID NO: 1019389 - RNA, 19 nt, Homo sapiens
  misc_RNA (1)...(19): siRNA sense strand
gaagggcaaucucaacaua

SEQ ID NO: 1019390 - RNA, 19 nt, Homo sapiens
  misc_RNA (1)...(19): siRNA sense strand
gaaaggagccugcugaguu

SEQ ID NO: 1019391 - RNA, 19 nt, Homo sapiens
  misc_RNA (1)...(19): siRNA sense strand
cgagagagcucacaaagga

SEQ ID NO: 1019392 - RNA, 19 nt, Homo sapiens
  misc_RNA (1)...(19): siRNA sense strand
gaacaaaugccuacggaaa

SEQ ID NO: 1019393 - RNA, 19 nt, Homo sapiens
  misc_RNA (1)...(19): siRNA sense strand
gagcauaagagaauucaua

SEQ ID NO: 1019394 - RNA, 19 nt, Homo sapiens
  misc_RNA (1)...(19): siRNA sense strand
ccagaagucuugccuugua

SEQ ID NO: 1019395 - RNA, 19 nt, Homo sapiens
  misc_RNA (1)...(19): siRNA sense strand
gagagaaacccuauaaaug

SEQ ID NO: 1019396 - RNA, 19 nt, Homo sapiens
  misc_RNA (1)...(19): siRNA sense strand
gcacaucagagauaucaua

SEQ ID NO: 1019397 - RNA, 19 nt, Homo sapiens
  misc_RNA (1)...(19): siRNA sense strand
gggaaagccuucuacaaga

SEQ ID NO: 1019398 - RNA, 19 nt, Homo sapiens
  misc_RNA (1)...(19): siRNA sense strand
gaaaagcccuguuaauaug

SEQ ID NO: 1019399 - RNA, 19 nt, Homo sapiens
  misc_RNA (1)...(19): siRNA sense strand
ggaaaaggcuucauucaga

SEQ ID NO: 1019400 - RNA, 19 nt, Homo sapiens
  misc_RNA (1)...(19): siRNA sense strand
gggaaagccuucuacaaga

SEQ ID NO: 1019401 - RNA, 19 nt, Homo sapiens
  misc_RNA (1)...(19): siRNA sense strand
gagagaagccucauacaug

SEQ ID NO: 1019402 - RNA, 19 nt, Homo sapiens
  misc_RNA (1)...(19): siRNA sense strand
ggagagaaacccuauaaau

SEQ ID NO: 1019403 - RNA, 19 nt, Homo sapiens
  misc_RNA (1)...(19): siRNA sense strand
guacaucagcgaacucaua

SEQ ID NO: 1019404 - RNA, 19 nt, Homo sapiens
  misc_RNA (1)...(19): siRNA sense strand
caacauacaucaacgaacu

SEQ ID NO: 1019405 - RNA, 19 nt, Homo sapiens
  misc_RNA (1)...(19): siRNA sense strand
gaacacggaagaacuuuga

SEQ ID NO: 1019406 - RNA, 19 nt, Homo sapiens
  misc_RNA (1)...(19): siRNA sense strand
aaaggagccugcugaguuu

SEQ ID NO: 1019407 - RNA, 19 nt, Homo sapiens
  misc_RNA (1)...(19): siRNA sense strand
gaaccacuauggacacuag

SEQ ID NO: 1019408 - RNA, 19 nt, Homo sapiens
  misc_RNA (1)...(19): siRNA sense strand
gaacaaggagaaccacuau

SEQ ID NO: 1019409 - RNA, 19 nt, Homo sapiens
  misc_RNA (1)...(19): siRNA sense strand
cggaagaacuuugaaauca

SEQ ID NO: 1019410 - RNA, 19 nt, Homo sapiens
  misc_RNA (1)...(19): siRNA sense strand
ggaagaacuuugaaaucau

SEQ ID NO: 1019411 - RNA, 19 nt, Homo sapiens
  misc_RNA (1)...(19): siRNA sense strand
ggaaaucugagcuuacuga

SEQ ID NO: 1019412 - RNA, 19 nt, Homo sapiens
  misc_RNA (1)...(19): siRNA sense strand
aaucugagcuuacugaaca

SEQ ID NO: 1019413 - RNA, 19 nt, Homo sapiens
  misc_RNA (1)...(19): siRNA sense strand
gagaaacccuauaaaugca

SEQ ID NO: 1019414 - RNA, 19 nt, Homo sapiens
  misc_RNA (1)...(19): siRNA sense strand
ugaauucccugaaaguaga

SEQ ID NO: 1019415 - RNA, 19 nt, Homo sapiens
  misc_RNA (1)...(19): siRNA sense strand
agucacagcuuaaguccua

SEQ ID NO: 1019416 - RNA, 19 nt, Homo sapiens
  misc_RNA (1)...(19): siRNA sense strand
ggaaagccuucuacaagag

SEQ ID NO: 1019417 - RNA, 19 nt, Homo sapiens
  misc_RNA (1)...(19): siRNA sense strand
gaacaucaaaggauucaca

SEQ ID NO: 1019418 - RNA, 19 nt, Homo sapiens
  misc_RNA (1)...(19): siRNA sense strand
ggaacaaggagaaccacua

SEQ ID NO: 1019419 - RNA, 19 nt, Homo sapiens
  misc_RNA (1)...(19): siRNA sense strand
ggaaaagcccuguuaauau

SEQ ID NO: 1019420 - RNA, 19 nt, Homo sapiens
  misc_RNA (1)...(19): siRNA sense strand
acaaaugccuacggaaauu

SEQ ID NO: 1019421 - RNA, 19 nt, Homo sapiens
  misc_RNA (1)...(19): siRNA sense strand
gagcagaagauacaacaga

SEQ ID NO: 1019422 - RNA, 19 nt, Homo sapiens
  misc_RNA (1)...(19): siRNA sense strand
ggagagaaaccuuauggau

SEQ ID NO: 1019423 - RNA, 19 nt, Homo sapiens
  misc_RNA (1)...(19): siRNA sense strand
gaaaaggcuucauucagaa

SEQ ID NO: 1019424 - RNA, 19 nt, Homo sapiens
  misc_RNA (1)...(19): siRNA sense strand
ccucauacaugcagugaau

SEQ ID NO: 1019425 - RNA, 19 nt, Homo sapiens
  misc_RNA (1)...(19): siRNA sense strand
gaagauacaacagaaagga

SEQ ID NO: 1019426 - RNA, 19 nt, Homo sapiens
  misc_RNA (1)...(19): siRNA sense strand
gggaaaagcccuguuaaua

SEQ ID NO: 1019427 - RNA, 19 nt, Homo sapiens
  misc_RNA (1)...(19): siRNA sense strand
cacagcaagucacagcuua

SEQ ID NO: 1019428 - RNA, 19 nt, Homo sapiens
  misc_RNA (1)...(19): siRNA sense strand
gaaaaucacuacucguugu

SEQ ID NO: 1019429 - RNA, 19 nt, Homo sapiens
  misc_RNA (1)...(19): siRNA sense strand
ucacugagcauaagagaau

SEQ ID NO: 1019430 - RNA, 19 nt, Homo sapiens
  misc_RNA (1)...(19): siRNA sense strand
ggauguggcuguggacuuc

SEQ ID NO: 1019431 - RNA, 19 nt, Homo sapiens
  misc_RNA (1)...(19): siRNA sense strand
cagcuuaaguccuagugaa

SEQ ID NO: 1019432 - RNA, 19 nt, Homo sapiens
  misc_RNA (1)...(19): siRNA sense strand
gaaaccuuauggaugcauu

SEQ ID NO: 1019433 - RNA, 19 nt, Homo sapiens
  misc_RNA (1)...(19): siRNA sense strand
gguacaggcucacugaaca

SEQ ID NO: 1019434 - RNA, 19 nt, Homo sapiens
  misc_RNA (1)...(19): siRNA sense strand
caucagagauaucauacag

SEQ ID NO: 1019435 - RNA, 19 nt, Homo sapiens
  misc_RNA (1)...(19): siRNA sense strand
cacaauuccuuaaacauca

SEQ ID NO: 1019436 - RNA, 19 nt, Homo sapiens
  misc_RNA (1)...(19): siRNA sense strand
uauaugucuugccuuguua

SEQ ID NO: 1019437 - RNA, 19 nt, Homo sapiens
  misc_RNA (1)...(19): siRNA sense strand
cuauaugucuugccuuguu

SEQ ID NO: 1019438 - RNA, 19 nt, Homo sapiens
  misc_RNA (1)...(19): siRNA sense strand
ggagagaagccucauacau

SEQ ID NO: 1019439 - RNA, 19 nt, Homo sapiens
  misc_RNA (1)...(19): siRNA sense strand
gggaugugauguuggagaa

SEQ ID NO: 1019440 - RNA, 19 nt, Homo sapiens
  misc_RNA (1)...(19): siRNA sense strand
gagcuuuucuccaugauaa

SEQ ID NO: 1019441 - RNA, 19 nt, Homo sapiens
  misc_RNA (1)...(19): siRNA sense strand
caggagagaaacccuauaa

SEQ ID NO: 1019442 - RNA, 19 nt, Homo sapiens
  misc_RNA (1)...(19): siRNA sense strand
guaccgggaugugauguug

SEQ ID NO: 1019443 - RNA, 19 nt, Homo sapiens
  misc_RNA (1)...(19): siRNA sense strand
gacaaaggcccaggaauca

SEQ ID NO: 1019444 - RNA, 19 nt, Homo sapiens
  misc_RNA (1)...(19): siRNA sense strand
gcagaagauacaacagaaa

SEQ ID NO: 1019445 - RNA, 19 nt, Homo sapiens
  misc_RNA (1)...(19): siRNA sense strand
gcaagucacagcuuaaguc

SEQ ID NO: 1019446 - RNA, 19 nt, Homo sapiens
  misc_RNA (1)...(19): siRNA sense strand
gaacucacacuggagagaa

SEQ ID NO: 1019447 - RNA, 19 nt, Homo sapiens
  misc_RNA (1)...(19): siRNA sense strand
ucagcaaacacacaacaua

SEQ ID NO: 1019448 - RNA, 19 nt, Homo sapiens
  misc_RNA (1)...(19): siRNA sense strand
uauggacacuagaagauga

SEQ ID NO: 1019449 - RNA, 19 nt, Homo sapiens
  misc_RNA (1)...(19): siRNA sense strand
gaaagcuuacuucuauaug

SEQ ID NO: 1019450 - RNA, 19 nt, Homo sapiens
  misc_RNA (1)...(19): siRNA sense strand
guacaucacagaacucaca

SEQ ID NO: 1019451 - RNA, 19 nt, Homo sapiens
  misc_RNA (1)...(19): siRNA sense strand
agagauaucauacaggaaa

SEQ ID NO: 1019452 - RNA, 19 nt, Homo sapiens
  misc_RNA (1)...(19): siRNA sense strand
gaauuaagccccaucaaug

SEQ ID NO: 1019453 - RNA, 19 nt, Homo sapiens
  misc_RNA (1)...(19): siRNA sense strand
gaaaauccuuccacagcaa

SEQ ID NO: 1019454 - RNA, 19 nt, Homo sapiens
  misc_RNA (1)...(19): siRNA sense strand
agagaaagcccaugaaugc

SEQ ID NO: 1019455 - RNA, 19 nt, Homo sapiens
  misc_RNA (1)...(19): siRNA sense strand
gaacuacagcaaccuugug

SEQ ID NO: 1019456 - RNA, 19 nt, Homo sapiens
  misc_RNA (1)...(19): siRNA sense strand
gcagggcagugugaguuug

SEQ ID NO: 1019457 - RNA, 19 nt, Homo sapiens
  misc_RNA (1)...(19): siRNA sense strand
gcaaggccuucagccagaa

SEQ ID NO: 1019458 - RNA, 19 nt, Homo sapiens
  misc_RNA (1)...(19): siRNA sense strand
gagaauucauacaggaaag

SEQ ID NO: 1019459 - RNA, 19 nt, Homo sapiens
  misc_RNA (1)...(19): siRNA sense strand
gcaaacacacaacauagag

SEQ ID NO: 1019460 - RNA, 19 nt, Homo sapiens
  misc_RNA (1)...(19): siRNA sense strand
caagucacaauuccuuaaa

SEQ ID NO: 1019461 - RNA, 19 nt, Homo sapiens
  misc_RNA (1)...(19): siRNA sense strand
ccaagucacaauuccuuaa

SEQ ID NO: 1019462 - RNA, 19 nt, Homo sapiens
  misc_RNA (1)...(19): siRNA sense strand
cccaggaaaucugagcuua

SEQ ID NO: 1019463 - RNA, 19 nt, Homo sapiens
  misc_RNA (1)...(19): siRNA sense strand
caagaagucucagcucacu

SEQ ID NO: 1019464 - RNA, 19 nt, Homo sapiens
  misc_RNA (1)...(19): siRNA sense strand
cugaugcccucaccaaguu

SEQ ID NO: 1019465 - RNA, 19 nt, Homo sapiens
  misc_RNA (1)...(19): siRNA sense strand
uaugguaacuguggcaaug

SEQ ID NO: 1019466 - RNA, 19 nt, Homo sapiens
  misc_RNA (1)...(19): siRNA sense strand
cauaagagaauacacucaa

SEQ ID NO: 1019467 - RNA, 19 nt, Homo sapiens
  misc_RNA (1)...(19): siRNA sense strand
agagaaacccuauaaaugc

SEQ ID NO: 1019468 - RNA, 19 nt, Homo sapiens
  misc_RNA (1)...(19): siRNA sense strand
caaguuggaacaaggagaa

SEQ ID NO: 1019469 - RNA, 19 nt, Homo sapiens
  misc_RNA (1)...(19): siRNA sense strand
aaacacacaacauagagaa

SEQ ID NO: 1019470 - RNA, 19 nt, Homo sapiens
  misc_RNA (1)...(19): siRNA sense strand
uaauggagauggagcuuuu

SEQ ID NO: 1019471 - RNA, 19 nt, Homo sapiens
  misc_RNA (1)...(19): siRNA sense strand
gaacucauacaggagagaa

SEQ ID NO: 1019472 - RNA, 19 nt, Homo sapiens
  misc_RNA (1)...(19): siRNA sense strand
acaaaggagagaaaccaua

SEQ ID NO: 1019473 - RNA, 19 nt, Homo sapiens
  misc_RNA (1)...(19): siRNA sense strand
ccacguguguagcuugugu

SEQ ID NO: 1019474 - RNA, 19 nt, Homo sapiens
  misc_RNA (1)...(19): siRNA sense strand
ucacaauuccuuaaacauc

SEQ ID NO: 1019475 - RNA, 19 nt, Homo sapiens
  misc_RNA (1)...(19): siRNA sense strand
gaaaucugagcuuacugaa

SEQ ID NO: 1019476 - RNA, 19 nt, Homo sapiens
  misc_RNA (1)...(19): siRNA sense strand
caaaggagagaaaccauac

SEQ ID NO: 1019477 - RNA, 19 nt, Homo sapiens
  misc_RNA (1)...(19): siRNA sense strand
ggacgggacaacgcuauga

SEQ ID NO: 1019478 - RNA, 19 nt, Homo sapiens
  misc_RNA (1)...(19): siRNA sense strand
ggacucauuagacaucaga

SEQ ID NO: 1019479 - RNA, 19 nt, Homo sapiens
  misc_RNA (1)...(19): siRNA sense strand
gagcuuacugaacaucaaa

SEQ ID NO: 1019480 - RNA, 19 nt, Homo sapiens
  misc_RNA (1)...(19): siRNA sense strand
ccauacgggugcagugaau

SEQ ID NO: 1019481 - RNA, 19 nt, Homo sapiens
  misc_RNA (1)...(19): siRNA sense strand
gaaguacaggcucacugaa

SEQ ID NO: 1019482 - RNA, 19 nt, Homo sapiens
  misc_RNA (1)...(19): siRNA sense strand
cauaagagaauucauacag

SEQ ID NO: 1019483 - RNA, 19 nt, Homo sapiens
  misc_RNA (1)...(19): siRNA sense strand
gacacuagaagaugaaauc

SEQ ID NO: 1019484 - RNA, 19 nt, Homo sapiens
  misc_RNA (1)...(19): siRNA sense strand
ccacggguguagcuugugu

SEQ ID NO: 1019485 - RNA, 19 nt, Homo sapiens
  misc_RNA (1)...(19): siRNA sense strand
caggaaaucugagcuuacu

SEQ ID NO: 1019486 - RNA, 19 nt, Homo sapiens
  misc_RNA (1)...(19): siRNA sense strand
ccacauccugcauucauga

SEQ ID NO: 1019487 - RNA, 19 nt, Homo sapiens
  misc_RNA (1)...(19): siRNA sense strand
acacuggagagaaaccuua

SEQ ID NO: 1019488 - RNA, 19 nt, Homo sapiens
  misc_RNA (1)...(19): siRNA sense strand
acagcaaccuugugucagu

SEQ ID NO: 1019489 - RNA, 19 nt, Homo sapiens
  misc_RNA (1)...(19): siRNA sense strand
gcaacaaggucacaaagga

SEQ ID NO: 1019490 - RNA, 19 nt, Homo sapiens
  misc_RNA (1)...(19): siRNA sense strand
ggacuugcuugaaaugauu

SEQ ID NO: 1019491 - RNA, 19 nt, Homo sapiens
  misc_RNA (1)...(19): siRNA sense strand
uagaggagaucaacagguu

SEQ ID NO: 1019492 - RNA, 19 nt, Homo sapiens
  misc_RNA (1)...(19): siRNA sense strand
gagaugaccugagaaccuu

SEQ ID NO: 1019493 - RNA, 19 nt, Homo sapiens
  misc_RNA (1)...(19): siRNA sense strand
ccuauggacuugcuugaaa

SEQ ID NO: 1019494 - RNA, 19 nt, Homo sapiens
  misc_RNA (1)...(19): siRNA sense strand
gacccaagguugauucuca

SEQ ID NO: 1019495 - RNA, 19 nt, Homo sapiens
  misc_RNA (1)...(19): siRNA sense strand
ccaaggagguguuguacca

SEQ ID NO: 1019496 - RNA, 19 nt, Homo sapiens
  misc_RNA (1)...(19): siRNA sense strand
cacgagagaugaccugaga

SEQ ID NO: 1019497 - RNA, 19 nt, Homo sapiens
  misc_RNA (1)...(19): siRNA sense strand
ggaugagcuuguugggaaa

SEQ ID NO: 1019498 - RNA, 19 nt, Homo sapiens
  misc_RNA (1)...(19): siRNA sense strand
ggacgcccgugguuuacug

SEQ ID NO: 1019499 - RNA, 19 nt, Homo sapiens
  misc_RNA (1)...(19): siRNA sense strand
gguuuacugugugagguua

SEQ ID NO: 1019500 - RNA, 19 nt, Homo sapiens
  misc_RNA (1)...(19): siRNA sense strand
ggcgugaccuuucccuuca

SEQ ID NO: 1019501 - RNA, 19 nt, Homo sapiens
  misc_RNA (1)...(19): siRNA sense strand
gagacucccaccucuugua

SEQ ID NO: 1019502 - RNA, 19 nt, Homo sapiens
  misc_RNA (1)...(19): siRNA sense strand
gaugacuacugcuguuugg

SEQ ID NO: 1019503 - RNA, 19 nt, Homo sapiens
  misc_RNA (1)...(19): siRNA sense strand
gagauucugcugccaguuc

SEQ ID NO: 1019504 - RNA, 19 nt, Homo sapiens
  misc_RNA (1)...(19): siRNA sense strand
gcuccaggcugccccauaa

SEQ ID NO: 1019505 - RNA, 19 nt, Homo sapiens
  misc_RNA (1)...(19): siRNA sense strand
ugaccgagaagaaucugua

SEQ ID NO: 1019506 - RNA, 19 nt, Homo sapiens
  misc_RNA (1)...(19): siRNA sense strand
gugccgggauccauucaga

SEQ ID NO: 1019507 - RNA, 19 nt, Homo sapiens
  misc_RNA (1)...(19): siRNA sense strand
cuugaaaucaugugcaauu

SEQ ID NO: 1019508 - RNA, 19 nt, Homo sapiens
  misc_RNA (1)...(19): siRNA sense strand
uguaccaccuggacaucua

SEQ ID NO: 1019509 - RNA, 19 nt, Homo sapiens
  misc_RNA (1)...(19): siRNA sense strand
gccaauaggauucuuagag

SEQ ID NO: 1019510 - RNA, 19 nt, Homo sapiens
  misc_RNA (1)...(19): siRNA sense strand
gcaaaccaaggacucuguu

SEQ ID NO: 1019511 - RNA, 19 nt, Homo sapiens
  misc_RNA (1)...(19): siRNA sense strand
gcgcagcccaagagacuga

SEQ ID NO: 1019512 - RNA, 19 nt, Homo sapiens
  misc_RNA (1)...(19): siRNA sense strand
ccacauggucccgcuggua

SEQ ID NO: 1019513 - RNA, 19 nt, Homo sapiens
  misc_RNA (1)...(19): siRNA sense strand
gcaccugaccgagaagaau

SEQ ID NO: 1019514 - RNA, 19 nt, Homo sapiens
  misc_RNA (1)...(19): siRNA sense strand
cuauggacuugcuugaaau

SEQ ID NO: 1019515 - RNA, 19 nt, Homo sapiens
  misc_RNA (1)...(19): siRNA sense strand
ccaauggccaugucagcaa

SEQ ID NO: 1019516 - RNA, 19 nt, Homo sapiens
  misc_RNA (1)...(19): siRNA sense strand
caguucaucaccuccguua

SEQ ID NO: 1019517 - RNA, 19 nt, Homo sapiens
  misc_RNA (1)...(19): siRNA sense strand
ucaggagcuucaacuucuu

SEQ ID NO: 1019518 - RNA, 19 nt, Homo sapiens
  misc_RNA (1)...(19): siRNA sense strand
cggccaaucugccaauagg

SEQ ID NO: 1019519 - RNA, 19 nt, Homo sapiens
  misc_RNA (1)...(19): siRNA sense strand
ccgagaagaaucuguaugg

SEQ ID NO: 1019520 - RNA, 19 nt, Homo sapiens
  misc_RNA (1)...(19): siRNA sense strand
gccgaugacagccggauga

SEQ ID NO: 1019521 - RNA, 19 nt, Homo sapiens
  misc_RNA (1)...(19): siRNA sense strand
uucaggagcuucaacuucu

SEQ ID NO: 1019522 - RNA, 19 nt, Homo sapiens
  misc_RNA (1)...(19): siRNA sense strand
uggacuugcuugaaaugau

SEQ ID NO: 1019523 - RNA, 19 nt, Homo sapiens
  misc_RNA (1)...(19): siRNA sense strand
caacuucuugaaaucaugu

SEQ ID NO: 1019524 - RNA, 19 nt, Homo sapiens
  misc_RNA (1)...(19): siRNA sense strand
ccaccuggacaucuacuuc

SEQ ID NO: 1019525 - RNA, 19 nt, Homo sapiens
  misc_RNA (1)...(19): siRNA sense strand
uggagcugcuggaggaguu

SEQ ID NO: 1019526 - RNA, 19 nt, Homo sapiens
  misc_RNA (1)...(19): siRNA sense strand
ucagcaacaaggucacaaa

SEQ ID NO: 1019527 - RNA, 19 nt, Homo sapiens
  misc_RNA (1)...(19): siRNA sense strand
ugaaggcaccccuggcuua

SEQ ID NO: 1019528 - RNA, 19 nt, Homo sapiens
  misc_RNA (1)...(19): siRNA sense strand
ccgccaaggagguguugua

SEQ ID NO: 1019529 - RNA, 19 nt, Homo sapiens
  misc_RNA (1)...(19): siRNA sense strand
ugaccucauuccaccuaug

SEQ ID NO: 1019530 - RNA, 19 nt, Homo sapiens
  misc_RNA (1)...(19): siRNA sense strand
gccaaucugccaauaggau

SEQ ID NO: 1019531 - RNA, 19 nt, Homo sapiens
  misc_RNA (1)...(19): siRNA sense strand
gcuggaggaguucguguuc

SEQ ID NO: 1019532 - RNA, 19 nt, Homo sapiens
  misc_RNA (1)...(19): siRNA sense strand
gaauucccuucaggagcuu

SEQ ID NO: 1019533 - RNA, 19 nt, Homo sapiens
  misc_RNA (1)...(19): siRNA sense strand
aggcaccccuggcuuauaa

SEQ ID NO: 1019534 - RNA, 19 nt, Homo sapiens
  misc_RNA (1)...(19): siRNA sense strand
gaggacccaagguugauuc

SEQ ID NO: 1019535 - RNA, 19 nt, Homo sapiens
  misc_RNA (1)...(19): siRNA sense strand
gauccucuucgaccacaug

SEQ ID NO: 1019536 - RNA, 19 nt, Homo sapiens
  misc_RNA (1)...(19): siRNA sense strand
gaccgagaagaaucuguau

SEQ ID NO: 1019537 - RNA, 19 nt, Homo sapiens
  misc_RNA (1)...(19): siRNA sense strand
gcagcaagccugagaagau

SEQ ID NO: 1019538 - RNA, 19 nt, Homo sapiens
  misc_RNA (1)...(19): siRNA sense strand
ggacgaggccuccuucaag

SEQ ID NO: 1019539 - RNA, 19 nt, Homo sapiens
  misc_RNA (1)...(19): siRNA sense strand
gcaaagacuccgagagcaa

SEQ ID NO: 1019540 - RNA, 19 nt, Homo sapiens
  misc_RNA (1)...(19): siRNA sense strand
caacaccaccuucgacuuc

SEQ ID NO: 1019541 - RNA, 19 nt, Homo sapiens
  misc_RNA (1)...(19): siRNA sense strand
cgaggagacuggccacuuc

SEQ ID NO: 1019542 - RNA, 19 nt, Homo sapiens
  misc_RNA (1)...(19): siRNA sense strand
gaaagagaccaagcuggaa

SEQ ID NO: 1019543 - RNA, 19 nt, Homo sapiens
  misc_RNA (1)...(19): siRNA sense strand
ccaagaagcagaagaagag

SEQ ID NO: 1019544 - RNA, 19 nt, Homo sapiens
  misc_RNA (1)...(19): siRNA sense strand
gaagggcaccuacgacaag

SEQ ID NO: 1019545 - RNA, 19 nt, Homo sapiens
  misc_RNA (1)...(19): siRNA sense strand
gacgaggccuccuucaagu

SEQ ID NO: 1019546 - RNA, 19 nt, Homo sapiens
  misc_RNA (1)...(19): siRNA sense strand
cacacaaggugaccaagga

SEQ ID NO: 1019547 - RNA, 19 nt, Homo sapiens
  misc_RNA (1)...(19): siRNA sense strand
ccaaggacgccaacaagga

SEQ ID NO: 1019548 - RNA, 19 nt, Homo sapiens
  misc_RNA (1)...(19): siRNA sense strand
cagcaagccugagaagauc

SEQ ID NO: 1019549 - RNA, 19 nt, Homo sapiens
  misc_RNA (1)...(19): siRNA sense strand
ccuacgaccuguuccugaa

SEQ ID NO: 1019550 - RNA, 19 nt, Homo sapiens
  misc_RNA (1)...(19): siRNA sense strand
gagacuggccacuucaaug

SEQ ID NO: 1019551 - RNA, 19 nt, Homo sapiens
  misc_RNA (1)...(19): siRNA sense strand
ccaagauggcccugaaaga

SEQ ID NO: 1019552 - RNA, 19 nt, Homo sapiens
  misc_RNA (1)...(19): siRNA sense strand
gcgccaagaagcagaagaa

SEQ ID NO: 1019553 - RNA, 19 nt, Homo sapiens
  misc_RNA (1)...(19): siRNA sense strand
aaagagaccaagcuggaaa

SEQ ID NO: 1019554 - RNA, 19 nt, Homo sapiens
  misc_RNA (1)...(19): siRNA sense strand
caagauggcccugaaagag

SEQ ID NO: 1019555 - RNA, 19 nt, Homo sapiens
  misc_RNA (1)...(19): siRNA sense strand
ccaucgaggugcacuucaa

SEQ ID NO: 1019556 - RNA, 19 nt, Homo sapiens
  misc_RNA (1)...(19): siRNA sense strand
gccaagaagcagaagaaga

SEQ ID NO: 1019557 - RNA, 19 nt, Homo sapiens
  misc_RNA (1)...(19): siRNA sense strand
cagcucagacucagacuuc

SEQ ID NO: 1019558 - RNA, 19 nt, Homo sapiens
  misc_RNA (1)...(19): siRNA sense strand
guccgagucugcccaguca

SEQ ID NO: 1019559 - RNA, 19 nt, Homo sapiens
  misc_RNA (1)...(19): siRNA sense strand
ucaagaagggcaccuacga

SEQ ID NO: 1019560 - RNA, 19 nt, Homo sapiens
  misc_RNA (1)...(19): siRNA sense strand
ggagacuggccacuucaau

SEQ ID NO: 1019561 - RNA, 19 nt, Homo sapiens
  misc_RNA (1)...(19): siRNA sense strand
acaaggaggagccgaggaa

SEQ ID NO: 1019562 - RNA, 19 nt, Homo sapiens
  misc_RNA (1)...(19): siRNA sense strand
agacuggccacuucaaugu

SEQ ID NO: 1019563 - RNA, 19 nt, Homo sapiens
  misc_RNA (1)...(19): siRNA sense strand
gcuccaaggacgccaacaa

SEQ ID NO: 1019564 - RNA, 19 nt, Homo sapiens
  misc_RNA (1)...(19): siRNA sense strand
gaaggugaaggccgagagu

SEQ ID NO: 1019565 - RNA, 19 nt, Homo sapiens
  misc_RNA (1)...(19): siRNA sense strand
caaagcccagcgccaagaa

SEQ ID NO: 1019566 - RNA, 19 nt, Homo sapiens
  misc_RNA (1)...(19): siRNA sense strand
caucgaggugcacuucaaa

SEQ ID NO: 1019567 - RNA, 19 nt, Homo sapiens
  misc_RNA (1)...(19): siRNA sense strand
aagauggcccugaaagaga

SEQ ID NO: 1019568 - RNA, 19 nt, Homo sapiens
  misc_RNA (1)...(19): siRNA sense strand
gaugguaaugcccgaagga

SEQ ID NO: 1019569 - RNA, 19 nt, Homo sapiens
  misc_RNA (1)...(19): siRNA sense strand
guacgcuggcuucaucaug

SEQ ID NO: 1019570 - RNA, 19 nt, Homo sapiens
  misc_RNA (1)...(19): siRNA sense strand
ccaaagcccagcgccaaga

SEQ ID NO: 1019571 - RNA, 19 nt, Homo sapiens
  misc_RNA (1)...(19): siRNA sense strand
ccagacgcgugugcaagga

SEQ ID NO: 1019572 - RNA, 19 nt, Homo sapiens
  misc_RNA (1)...(19): siRNA sense strand
gcucagacuccagcucaga

SEQ ID NO: 1019573 - RNA, 19 nt, Homo sapiens
  misc_RNA (1)...(19): siRNA sense strand
aacccaagauggcccugaa

SEQ ID NO: 1019574 - RNA, 19 nt, Homo sapiens
  misc_RNA (1)...(19): siRNA sense strand
ccagaaccacagccaagga

SEQ ID NO: 1019575 - RNA, 19 nt, Homo sapiens
  misc_RNA (1)...(19): siRNA sense strand
gacuccagguugagcuuca

SEQ ID NO: 1019576 - RNA, 19 nt, Homo sapiens
  misc_RNA (1)...(19): siRNA sense strand
gaggagacuggccacuuca

SEQ ID NO: 1019577 - RNA, 19 nt, Homo sapiens
  misc_RNA (1)...(19): siRNA sense strand
acgacuggaugguguuugu

SEQ ID NO: 1019578 - RNA, 19 nt, Homo sapiens
  misc_RNA (1)...(19): siRNA sense strand
ggaacuauauuaacagaug

SEQ ID NO: 1019579 - RNA, 19 nt, Homo sapiens
  misc_RNA (1)...(19): siRNA sense strand
gaaccaaccaccaacauuu

SEQ ID NO: 1019580 - RNA, 19 nt, Homo sapiens
  misc_RNA (1)...(19): siRNA sense strand
gcagugaaagcucaguuua

SEQ ID NO: 1019581 - RNA, 19 nt, Homo sapiens
  misc_RNA (1)...(19): siRNA sense strand
gaagcgaaauguggugauu

SEQ ID NO: 1019582 - RNA, 19 nt, Homo sapiens
  misc_RNA (1)...(19): siRNA sense strand
gaagaugacgacccauuga

SEQ ID NO: 1019583 - RNA, 19 nt, Homo sapiens
  misc_RNA (1)...(19): siRNA sense strand
gaaaggugaugguggacau

SEQ ID NO: 1019584 - RNA, 19 nt, Homo sapiens
  misc_RNA (1)...(19): siRNA sense strand
agugaaagcucaguuuaaa

SEQ ID NO: 1019585 - RNA, 19 nt, Homo sapiens
  misc_RNA (1)...(19): siRNA sense strand
cgaauugccuuacaguauc

SEQ ID NO: 1019586 - RNA, 19 nt, Homo sapiens
  misc_RNA (1)...(19): siRNA sense strand
ggagugacagcccgaauug

SEQ ID NO: 1019587 - RNA, 19 nt, Homo sapiens
  misc_RNA (1)...(19): siRNA sense strand
gaauugccuuacaguauca

SEQ ID NO: 1019588 - RNA, 19 nt, Homo sapiens
  misc_RNA (1)...(19): siRNA sense strand
acaaagggcuucuggaacu

SEQ ID NO: 1019589 - RNA, 19 nt, Homo sapiens
  misc_RNA (1)...(19): siRNA sense strand
gaaaagaugcuuauaccaa

SEQ ID NO: 1019590 - RNA, 19 nt, Homo sapiens
  misc_RNA (1)...(19): siRNA sense strand
ucacaaagggcuucuggaa

SEQ ID NO: 1019591 - RNA, 19 nt, Homo sapiens
  misc_RNA (1)...(19): siRNA sense strand
aaaguuaggacuagacauu

SEQ ID NO: 1019592 - RNA, 19 nt, Homo sapiens
  misc_RNA (1)...(19): siRNA sense strand
ggaaccaaccaccaacauu

SEQ ID NO: 1019593 - RNA, 19 nt, Homo sapiens
  misc_RNA (1)...(19): siRNA sense strand
ggauggauuucuucucaag

SEQ ID NO: 1019594 - RNA, 19 nt, Homo sapiens
  misc_RNA (1)...(19): siRNA sense strand
ggguacagcaagcuuuaua

SEQ ID NO: 1019595 - RNA, 19 nt, Homo sapiens
  misc_RNA (1)...(19): siRNA sense strand
ggacuagacauuuguucug

SEQ ID NO: 1019596 - RNA, 19 nt, Homo sapiens
  misc_RNA (1)...(19): siRNA sense strand
ccgaauugccuuacaguau

SEQ ID NO: 1019597 - RNA, 19 nt, Homo sapiens
  misc_RNA (1)...(19): siRNA sense strand
gaugguggacauugcauau

SEQ ID NO: 1019598 - RNA, 19 nt, Homo sapiens
  misc_RNA (1)...(19): siRNA sense strand
ccaaggaaccaaccaccaa

SEQ ID NO: 1019599 - RNA, 19 nt, Homo sapiens
  misc_RNA (1)...(19): siRNA sense strand
ccgcuucgcuuuggacuuc

SEQ ID NO: 1019600 - RNA, 19 nt, Homo sapiens
  misc_RNA (1)...(19): siRNA sense strand
gagggcaccgggacaugua

SEQ ID NO: 1019601 - RNA, 19 nt, Homo sapiens
  misc_RNA (1)...(19): siRNA sense strand
cagugaaagcucaguuuaa

SEQ ID NO: 1019602 - RNA, 19 nt, Homo sapiens
  misc_RNA (1)...(19): siRNA sense strand
cuagacauuuguucugcaa

SEQ ID NO: 1019603 - RNA, 19 nt, Homo sapiens
  misc_RNA (1)...(19): siRNA sense strand
agggauggauuucuucuca

SEQ ID NO: 1019604 - RNA, 19 nt, Homo sapiens
  misc_RNA (1)...(19): siRNA sense strand
ccagaugagagccuucaaa

SEQ ID NO: 1019605 - RNA, 19 nt, Homo sapiens
  misc_RNA (1)...(19): siRNA sense strand
uaaagcuguuauaguggaa

SEQ ID NO: 1019606 - RNA, 19 nt, Homo sapiens
  misc_RNA (1)...(19): siRNA sense strand
gaacagguugacagaaguc

SEQ ID NO: 1019607 - RNA, 19 nt, Homo sapiens
  misc_RNA (1)...(19): siRNA sense strand
gggauggauuucuucucaa

SEQ ID NO: 1019608 - RNA, 19 nt, Homo sapiens
  misc_RNA (1)...(19): siRNA sense strand
gaccagggaccuuguggau

SEQ ID NO: 1019609 - RNA, 19 nt, Homo sapiens
  misc_RNA (1)...(19): siRNA sense strand
ugaacagguugacagaagu

SEQ ID NO: 1019610 - RNA, 19 nt, Homo sapiens
  misc_RNA (1)...(19): siRNA sense strand
uagaagaugacgacccauu

SEQ ID NO: 1019611 - RNA, 19 nt, Homo sapiens
  misc_RNA (1)...(19): siRNA sense strand
ggcgacggcucauguucga

SEQ ID NO: 1019612 - RNA, 19 nt, Homo sapiens
  misc_RNA (1)...(19): siRNA sense strand
caaagggcuucuggaacug

SEQ ID NO: 1019613 - RNA, 19 nt, Homo sapiens
  misc_RNA (1)...(19): siRNA sense strand
ggaacugaaccagaugaga

SEQ ID NO: 1019614 - RNA, 19 nt, Homo sapiens
  misc_RNA (1)...(19): siRNA sense strand
aguuaggacuagacauuug

SEQ ID NO: 1019615 - RNA, 19 nt, Homo sapiens
  misc_RNA (1)...(19): siRNA sense strand
agaagaugacgacccauug

SEQ ID NO: 1019616 - RNA, 19 nt, Homo sapiens
  misc_RNA (1)...(19): siRNA sense strand
ggcagugaaagcucaguuu

SEQ ID NO: 1019617 - RNA, 19 nt, Homo sapiens
  misc_RNA (1)...(19): siRNA sense strand
caaccaccaacauuugugu

SEQ ID NO: 1019618 - RNA, 19 nt, Homo sapiens
  misc_RNA (1)...(19): siRNA sense strand
gaugagagccuucaaaagc

SEQ ID NO: 1019619 - RNA, 19 nt, Homo sapiens
  misc_RNA (1)...(19): siRNA sense strand
caaagaccagggaccuugu

SEQ ID NO: 1019620 - RNA, 19 nt, Homo sapiens
  misc_RNA (1)...(19): siRNA sense strand
uggauuucuucucaaguga

SEQ ID NO: 1019621 - RNA, 19 nt, Homo sapiens
  misc_RNA (1)...(19): siRNA sense strand
gcaucugggcguccuguuc

SEQ ID NO: 1019622 - RNA, 19 nt, Homo sapiens
  misc_RNA (1)...(19): siRNA sense strand
augaacagguugacagaag

SEQ ID NO: 1019623 - RNA, 19 nt, Homo sapiens
  misc_RNA (1)...(19): siRNA sense strand
gaugaacagguugacagaa

SEQ ID NO: 1019624 - RNA, 19 nt, Homo sapiens
  misc_RNA (1)...(19): siRNA sense strand
gcuguuauaguggaaguau

SEQ ID NO: 1019625 - RNA, 19 nt, Homo sapiens
  misc_RNA (1)...(19): siRNA sense strand
gcauauggcggugcauuuu

SEQ ID NO: 1019626 - RNA, 19 nt, Homo sapiens
  misc_RNA (1)...(19): siRNA sense strand
uguuacugcugaaaaguua

SEQ ID NO: 1019627 - RNA, 19 nt, Homo sapiens
  misc_RNA (1)...(19): siRNA sense strand
aaccaaccaccaacauuug

SEQ ID NO: 1019628 - RNA, 19 nt, Homo sapiens
  misc_RNA (1)...(19): siRNA sense strand
auugagggauggauuucuu

SEQ ID NO: 1019629 - RNA, 19 nt, Homo sapiens
  misc_RNA (1)...(19): siRNA sense strand
cagaucucaugguggaugu

SEQ ID NO: 1019630 - RNA, 19 nt, Homo sapiens
  misc_RNA (1)...(19): siRNA sense strand
gcagaugaacagguugaca

SEQ ID NO: 1019631 - RNA, 19 nt, Homo sapiens
  misc_RNA (1)...(19): siRNA sense strand
ugguggacauugcauaugg

SEQ ID NO: 1019632 - RNA, 19 nt, Homo sapiens
  misc_RNA (1)...(19): siRNA sense strand
gaucucaugguggauguuc

SEQ ID NO: 1019633 - RNA, 19 nt, Homo sapiens
  misc_RNA (1)...(19): siRNA sense strand
gaagggaauccuacagaaa

SEQ ID NO: 1019634 - RNA, 19 nt, Homo sapiens
  misc_RNA (1)...(19): siRNA sense strand
ugaagggaauccuacagaa

SEQ ID NO: 1019635 - RNA, 19 nt, Homo sapiens
  misc_RNA (1)...(19): siRNA sense strand
aaaguucugccucccauua

SEQ ID NO: 1019636 - RNA, 19 nt, Homo sapiens
  misc_RNA (1)...(19): siRNA sense strand
gugagucccuuaaauucuu

SEQ ID NO: 1019637 - RNA, 19 nt, Homo sapiens
  misc_RNA (1)...(19): siRNA sense strand
ugaugcacaugguauugaa

SEQ ID NO: 1019638 - RNA, 19 nt, Homo sapiens
  misc_RNA (1)...(19): siRNA sense strand
gggugagucccuuaaauuc

SEQ ID NO: 1019639 - RNA, 19 nt, Homo sapiens
  misc_RNA (1)...(19): siRNA sense strand
gcauucucuuucucuguug

SEQ ID NO: 1019640 - RNA, 19 nt, Homo sapiens
  misc_RNA (1)...(19): siRNA sense strand
gagcauucucuuucucugu

SEQ ID NO: 1019641 - RNA, 19 nt, Homo sapiens
  misc_RNA (1)...(19): siRNA sense strand
gauuaugggagguuagcaa

SEQ ID NO: 1019642 - RNA, 19 nt, Homo sapiens
  misc_RNA (1)...(19): siRNA sense strand
ccuuaaauucuucaacuga

SEQ ID NO: 1019643 - RNA, 19 nt, Homo sapiens
  misc_RNA (1)...(19): siRNA sense strand
caacugauuaugggagguu

SEQ ID NO: 1019644 - RNA, 19 nt, Homo sapiens
  misc_RNA (1)...(19): siRNA sense strand
agcauucucuuucucuguu

SEQ ID NO: 1019645 - RNA, 19 nt, Homo sapiens
  misc_RNA (1)...(19): siRNA sense strand
cauuaguuaugaagggaau

SEQ ID NO: 1019646 - RNA, 19 nt, Homo sapiens
  misc_RNA (1)...(19): siRNA sense strand
ggugagucccuuaaauucu

SEQ ID NO: 1019647 - RNA, 19 nt, Homo sapiens
  misc_RNA (1)...(19): siRNA sense strand
ugucgagcauucucuuucu

SEQ ID NO: 1019648 - RNA, 19 nt, Homo sapiens
  misc_RNA (1)...(19): siRNA sense strand
ucccuuaaauucuucaacu

SEQ ID NO: 1019649 - RNA, 19 nt, Homo sapiens
  misc_RNA (1)...(19): siRNA sense strand
uaaacuuccaagacccuuu

SEQ ID NO: 1019650 - RNA, 19 nt, Homo sapiens
  misc_RNA (1)...(19): siRNA sense strand
gaugcacaugguauugaaa

SEQ ID NO: 1019651 - RNA, 19 nt, Homo sapiens
  misc_RNA (1)...(19): siRNA sense strand
aagggaauccuacagaaag

SEQ ID NO: 1019652 - RNA, 19 nt, Homo sapiens
  misc_RNA (1)...(19): siRNA sense strand
guucugccucccauuaguu

SEQ ID NO: 1019653 - RNA, 19 nt, Homo sapiens
  misc_RNA (1)...(19): siRNA sense strand
gguauaaacuugccuuuga

SEQ ID NO: 1019654 - RNA, 19 nt, Homo sapiens
  misc_RNA (1)...(19): siRNA sense strand
gaaguaacgugcaaccauu

SEQ ID NO: 1019655 - RNA, 19 nt, Homo sapiens
  misc_RNA (1)...(19): siRNA sense strand
gaacaaagaggacaccaaa

SEQ ID NO: 1019656 - RNA, 19 nt, Homo sapiens
  misc_RNA (1)...(19): siRNA sense strand
gaggauaaauugaaggaaa

SEQ ID NO: 1019657 - RNA, 19 nt, Homo sapiens
  misc_RNA (1)...(19): siRNA sense strand
ggcaauggcuuacauaaug

SEQ ID NO: 1019658 - RNA, 19 nt, Homo sapiens
  misc_RNA (1)...(19): siRNA sense strand
gaucccaagucauuaauuu

SEQ ID NO: 1019659 - RNA, 19 nt, Homo sapiens
  misc_RNA (1)...(19): siRNA sense strand
gcaaugcucccacuuaauu

SEQ ID NO: 1019660 - RNA, 19 nt, Homo sapiens
  misc_RNA (1)...(19): siRNA sense strand
gcacagaagcaacuuauga

SEQ ID NO: 1019661 - RNA, 19 nt, Homo sapiens
  misc_RNA (1)...(19): siRNA sense strand
ggaagcaaaugaagaaaca

SEQ ID NO: 1019662 - RNA, 19 nt, Homo sapiens
  misc_RNA (1)...(19): siRNA sense strand
cauccucccuugacaguua

SEQ ID NO: 1019663 - RNA, 19 nt, Homo sapiens
  misc_RNA (1)...(19): siRNA sense strand
caaggacccugaccugaaa

SEQ ID NO: 1019664 - RNA, 19 nt, Homo sapiens
  misc_RNA (1)...(19): siRNA sense strand
gcaauguuguguacucuga

SEQ ID NO: 1019665 - RNA, 19 nt, Homo sapiens
  misc_RNA (1)...(19): siRNA sense strand
gcacaaaggcaucaggaaa

SEQ ID NO: 1019666 - RNA, 19 nt, Homo sapiens
  misc_RNA (1)...(19): siRNA sense strand
ccaaacaggucacaaucaa

SEQ ID NO: 1019667 - RNA, 19 nt, Homo sapiens
  misc_RNA (1)...(19): siRNA sense strand
gcacacacacugucacaaa

SEQ ID NO: 1019668 - RNA, 19 nt, Homo sapiens
  misc_RNA (1)...(19): siRNA sense strand
aaacuuggguauaaacuug

SEQ ID NO: 1019669 - RNA, 19 nt, Homo sapiens
  misc_RNA (1)...(19): siRNA sense strand
gaaaucaagagaacaguga

SEQ ID NO: 1019670 - RNA, 19 nt, Homo sapiens
  misc_RNA (1)...(19): siRNA sense strand
gagaauccaucagcacaaa

SEQ ID NO: 1019671 - RNA, 19 nt, Homo sapiens
  misc_RNA (1)...(19): siRNA sense strand
gguggaagcuuucaacaag

SEQ ID NO: 1019672 - RNA, 19 nt, Homo sapiens
  misc_RNA (1)...(19): siRNA sense strand
ccagaagcaucucaaguga

SEQ ID NO: 1019673 - RNA, 19 nt, Homo sapiens
  misc_RNA (1)...(19): siRNA sense strand
ugaagggccuccaaacuug

SEQ ID NO: 1019674 - RNA, 19 nt, Homo sapiens
  misc_RNA (1)...(19): siRNA sense strand
gcucugaagucucacauuc

SEQ ID NO: 1019675 - RNA, 19 nt, Homo sapiens
  misc_RNA (1)...(19): siRNA sense strand
gcauuaagccugcaacuca

SEQ ID NO: 1019676 - RNA, 19 nt, Homo sapiens
  misc_RNA (1)...(19): siRNA sense strand
ugacagaugccaccaauga

SEQ ID NO: 1019677 - RNA, 19 nt, Homo sapiens
  misc_RNA (1)...(19): siRNA sense strand
uaaagcagcuauugagucu

SEQ ID NO: 1019678 - RNA, 19 nt, Homo sapiens
  misc_RNA (1)...(19): siRNA sense strand
gaagcugccuuaaauacuc

SEQ ID NO: 1019679 - RNA, 19 nt, Homo sapiens
  misc_RNA (1)...(19): siRNA sense strand
gacagaaagugcaaagugu

SEQ ID NO: 1019680 - RNA, 19 nt, Homo sapiens
  misc_RNA (1)...(19): siRNA sense strand
caaauaaagcaggcaauaa

SEQ ID NO: 1019681 - RNA, 19 nt, Homo sapiens
  misc_RNA (1)...(19): siRNA sense strand
cagcaaaucagaacaaaga

SEQ ID NO: 1019682 - RNA, 19 nt, Homo sapiens
  misc_RNA (1)...(19): siRNA sense strand
ucaauccagucccuguuua

SEQ ID NO: 1019683 - RNA, 19 nt, Homo sapiens
  misc_RNA (1)...(19): siRNA sense strand
acaaagcuguuaagagaga

SEQ ID NO: 1019684 - RNA, 19 nt, Homo sapiens
  misc_RNA (1)...(19): siRNA sense strand
gccagaugcugcuuccuaa

SEQ ID NO: 1019685 - RNA, 19 nt, Homo sapiens
  misc_RNA (1)...(19): siRNA sense strand
gcauuugacaucccagaua

SEQ ID NO: 1019686 - RNA, 19 nt, Homo sapiens
  misc_RNA (1)...(19): siRNA sense strand
gcagacagcguccgugaug

SEQ ID NO: 1019687 - RNA, 19 nt, Homo sapiens
  misc_RNA (1)...(19): siRNA sense strand
acacaucccucagcacaaa

SEQ ID NO: 1019688 - RNA, 19 nt, Homo sapiens
  misc_RNA (1)...(19): siRNA sense strand
gaaguuggaagaaccaguu

SEQ ID NO: 1019689 - RNA, 19 nt, Homo sapiens
  misc_RNA (1)...(19): siRNA sense strand
ggugaaagccacggucaua

SEQ ID NO: 1019690 - RNA, 19 nt, Homo sapiens
  misc_RNA (1)...(19): siRNA sense strand
aaacugaagcugccuuaaa

SEQ ID NO: 1019691 - RNA, 19 nt, Homo sapiens
  misc_RNA (1)...(19): siRNA sense strand
gcacaaaucggaugguucu

SEQ ID NO: 1019692 - RNA, 19 nt, Homo sapiens
  misc_RNA (1)...(19): siRNA sense strand
cagauauggucgauccuaa

SEQ ID NO: 1019693 - RNA, 19 nt, Homo sapiens
  misc_RNA (1)...(19): siRNA sense strand
aaacuugccuuugagcauu

SEQ ID NO: 1019694 - RNA, 19 nt, Homo sapiens
  misc_RNA (1)...(19): siRNA sense strand
agaagcaacuuaugaugga

SEQ ID NO: 1019695 - RNA, 19 nt, Homo sapiens
  misc_RNA (1)...(19): siRNA sense strand
agacaucacuggcuacaca

SEQ ID NO: 1019696 - RNA, 19 nt, Homo sapiens
  misc_RNA (1)...(19): siRNA sense strand
gccagcagcgccaucauua

SEQ ID NO: 1019697 - RNA, 19 nt, Homo sapiens
  misc_RNA (1)...(19): siRNA sense strand
ggagcaaaguccuugaaag

SEQ ID NO: 1019698 - RNA, 19 nt, Homo sapiens
  misc_RNA (1)...(19): siRNA sense strand
gagagccgcugacaagucu

SEQ ID NO: 1019699 - RNA, 19 nt, Homo sapiens
  misc_RNA (1)...(19): siRNA sense strand
gcaauggcuuacauaaugg

SEQ ID NO: 1019700 - RNA, 19 nt, Homo sapiens
  misc_RNA (1)...(19): siRNA sense strand
gaaaagaaaucuccaucuc

SEQ ID NO: 1019701 - RNA, 19 nt, Homo sapiens
  misc_RNA (1)...(19): siRNA sense strand
uccaaacuguguagacaua

SEQ ID NO: 1019702 - RNA, 19 nt, Homo sapiens
  misc_RNA (1)...(19): siRNA sense strand
ggacuccuuugcacuugaa

SEQ ID NO: 1019703 - RNA, 19 nt, Homo sapiens
  misc_RNA (1)...(19): siRNA sense strand
gaaggaaagcucugacaag

SEQ ID NO: 1019704 - RNA, 19 nt, Homo sapiens
  misc_RNA (1)...(19): siRNA sense strand
gacaugcgaucaagcuuca

SEQ ID NO: 1019705 - RNA, 19 nt, Homo sapiens
  misc_RNA (1)...(19): siRNA sense strand
gagaugugccugccucuga

SEQ ID NO: 1019706 - RNA, 19 nt, Homo sapiens
  misc_RNA (1)...(19): siRNA sense strand
ggggaaaacuccagcaaaa

SEQ ID NO: 1019707 - RNA, 19 nt, Homo sapiens
  misc_RNA (1)...(19): siRNA sense strand
cggcauggccuucaucaaa

SEQ ID NO: 1019708 - RNA, 19 nt, Homo sapiens
  misc_RNA (1)...(19): siRNA sense strand
gaacuccgccaagugcuaa

SEQ ID NO: 1019709 - RNA, 19 nt, Homo sapiens
  misc_RNA (1)...(19): siRNA sense strand
cagcagcgccaucauuaaa

SEQ ID NO: 1019710 - RNA, 19 nt, Homo sapiens
  misc_RNA (1)...(19): siRNA sense strand
gagaacagcagcaaaggau

SEQ ID NO: 1019711 - RNA, 19 nt, Homo sapiens
  misc_RNA (1)...(19): siRNA sense strand
gaaaagcagaggauaaauu

SEQ ID NO: 1019712 - RNA, 19 nt, Homo sapiens
  misc_RNA (1)...(19): siRNA sense strand
ggcauggccuucaucaaau

SEQ ID NO: 1019713 - RNA, 19 nt, Homo sapiens
  misc_RNA (1)...(19): siRNA sense strand
agacguaccuuuaccaaac

SEQ ID NO: 1019714 - RNA, 19 nt, Homo sapiens
  misc_RNA (1)...(19): siRNA sense strand
gaacagugaccaggguauu

SEQ ID NO: 1019715 - RNA, 19 nt, Homo sapiens
  misc_RNA (1)...(19): siRNA sense strand
gcugacaagucuccugaau

SEQ ID NO: 1019716 - RNA, 19 nt, Homo sapiens
  misc_RNA (1)...(19): siRNA sense strand
ugacaagucuccugaaucc

SEQ ID NO: 1019717 - RNA, 19 nt, Homo sapiens
  misc_RNA (1)...(19): siRNA sense strand
ggagaaagacggccacaac

SEQ ID NO: 1019718 - RNA, 19 nt, Homo sapiens
  misc_RNA (1)...(19): siRNA sense strand
gagcucagccgagaaauag

SEQ ID NO: 1019719 - RNA, 19 nt, Homo sapiens
  misc_RNA (1)...(19): siRNA sense strand
gaugagcucagccgagaaa

SEQ ID NO: 1019720 - RNA, 19 nt, Homo sapiens
  misc_RNA (1)...(19): siRNA sense strand
ggaggaaacagaaauaaaa

SEQ ID NO: 1019721 - RNA, 19 nt, Homo sapiens
  misc_RNA (1)...(19): siRNA sense strand
ccaaugaggaggaaacaga

SEQ ID NO: 1019722 - RNA, 19 nt, Homo sapiens
  misc_RNA (1)...(19): siRNA sense strand
uguccagacuguucucuuu

SEQ ID NO: 1019723 - RNA, 19 nt, Homo sapiens
  misc_RNA (1)...(19): siRNA sense strand
ggcaggaucccaagucauu

SEQ ID NO: 1019724 - RNA, 19 nt, Homo sapiens
  misc_RNA (1)...(19): siRNA sense strand
caguaaagauggagcaaag

SEQ ID NO: 1019725 - RNA, 19 nt, Homo sapiens
  misc_RNA (1)...(19): siRNA sense strand
gaucaagcuucaggucgaa

SEQ ID NO: 1019726 - RNA, 19 nt, Homo sapiens
  misc_RNA (1)...(19): siRNA sense strand
gaaagccacggucauaucu

SEQ ID NO: 1019727 - RNA, 19 nt, Homo sapiens
  misc_RNA (1)...(19): siRNA sense strand
cauuugacaucccagauau

SEQ ID NO: 1019728 - RNA, 19 nt, Homo sapiens
  misc_RNA (1)...(19): siRNA sense strand
cuccagugcugaagaguuu

SEQ ID NO: 1019729 - RNA, 19 nt, Homo sapiens
  misc_RNA (1)...(19): siRNA sense strand
ggaaagagaaauuggaaaa

SEQ ID NO: 1019730 - RNA, 19 nt, Homo sapiens
  misc_RNA (1)...(19): siRNA sense strand
gcagauacgaguggacaaa

SEQ ID NO: 1019731 - RNA, 19 nt, Homo sapiens
  misc_RNA (1)...(19): siRNA sense strand
caacaaaugcagccuccuu

SEQ ID NO: 1019732 - RNA, 19 nt, Homo sapiens
  misc_RNA (1)...(19): siRNA sense strand
acaaauaaagcaggcaaua

SEQ ID NO: 1019733 - RNA, 19 nt, Homo sapiens
  misc_RNA (1)...(19): siRNA sense strand
ggacuacgauaagcugaag

SEQ ID NO: 1019734 - RNA, 19 nt, Homo sapiens
  misc_RNA (1)...(19): siRNA sense strand
gaaggugucuguuuucaag

SEQ ID NO: 1019735 - RNA, 19 nt, Homo sapiens
  misc_RNA (1)...(19): siRNA sense strand
gcaauuccacgaacacauc

SEQ ID NO: 1019736 - RNA, 19 nt, Homo sapiens
  misc_RNA (1)...(19): siRNA sense strand
gaggaggaaacagaaauaa

SEQ ID NO: 1019737 - RNA, 19 nt, Homo sapiens
  misc_RNA (1)...(19): siRNA sense strand
uggcuuacauaauggguuu

SEQ ID NO: 1019738 - RNA, 19 nt, Homo sapiens
  misc_RNA (1)...(19): siRNA sense strand
gacaccaaauccaugaaug

SEQ ID NO: 1019739 - RNA, 19 nt, Homo sapiens
  misc_RNA (1)...(19): siRNA sense strand
acaaagaggacaccaaauc

SEQ ID NO: 1019740 - RNA, 19 nt, Homo sapiens
  misc_RNA (1)...(19): siRNA sense strand
cauggaacauugaaaagua

SEQ ID NO: 1019741 - RNA, 19 nt, Homo sapiens
  misc_RNA (1)...(19): siRNA sense strand
gaagaccccuccaaacugu

SEQ ID NO: 1019742 - RNA, 19 nt, Homo sapiens
  misc_RNA (1)...(19): siRNA sense strand
uaaccaaaccucagcaaca

SEQ ID NO: 1019743 - RNA, 19 nt, Homo sapiens
  misc_RNA (1)...(19): siRNA sense strand
agaaguggaucuugacucu

SEQ ID NO: 1019744 - RNA, 19 nt, Homo sapiens
  misc_RNA (1)...(19): siRNA sense strand
gcauggccuucaucaaauc

SEQ ID NO: 1019745 - RNA, 19 nt, Homo sapiens
  misc_RNA (1)...(19): siRNA sense strand
aacugaagcugccuuaaau

SEQ ID NO: 1019746 - RNA, 19 nt, Homo sapiens
  misc_RNA (1)...(19): siRNA sense strand
ccgaaaaccugcugcaauu

SEQ ID NO: 1019747 - RNA, 19 nt, Homo sapiens
  misc_RNA (1)...(19): siRNA sense strand
gagugugacugccuguuca

SEQ ID NO: 1019748 - RNA, 19 nt, Homo sapiens
  misc_RNA (1)...(19): siRNA sense strand
ccacuuugaccaacacauu

SEQ ID NO: 1019749 - RNA, 19 nt, Homo sapiens
  misc_RNA (1)...(19): siRNA sense strand
caaaagacuugcacuaucu

SEQ ID NO: 1019750 - RNA, 19 nt, Homo sapiens
  misc_RNA (1)...(19): siRNA sense strand
gugcaaccauuguacaaag

SEQ ID NO: 1019751 - RNA, 19 nt, Homo sapiens
  misc_RNA (1)...(19): siRNA sense strand
gagcgugcgcaucgaagua

SEQ ID NO: 1019752 - RNA, 19 nt, Homo sapiens
  misc_RNA (1)...(19): siRNA sense strand
gcaggaucccaagucauua

SEQ ID NO: 1019753 - RNA, 19 nt, Homo sapiens
  misc_RNA (1)...(19): siRNA sense strand
ggaagauguuggauuguua

SEQ ID NO: 1019754 - RNA, 19 nt, Homo sapiens
  misc_RNA (1)...(19): siRNA sense strand
gaauacagaugauuaaugg

SEQ ID NO: 1019755 - RNA, 19 nt, Homo sapiens
  misc_RNA (1)...(19): siRNA sense strand
gcagugaucuuccuaaagu

SEQ ID NO: 1019756 - RNA, 19 nt, Homo sapiens
  misc_RNA (1)...(19): siRNA sense strand
gggaagauguggaugauga

SEQ ID NO: 1019757 - RNA, 19 nt, Homo sapiens
  misc_RNA (1)...(19): siRNA sense strand
uaaagcagcuccaguuuca

SEQ ID NO: 1019758 - RNA, 19 nt, Homo sapiens
  misc_RNA (1)...(19): siRNA sense strand
gaggaugacuuuauucuuc

SEQ ID NO: 1019759 - RNA, 19 nt, Homo sapiens
  misc_RNA (1)...(19): siRNA sense strand
gcaauaugaugaugaugaa

SEQ ID NO: 1019760 - RNA, 19 nt, Homo sapiens
  misc_RNA (1)...(19): siRNA sense strand
gaaauuggagcucuggaua

SEQ ID NO: 1019761 - RNA, 19 nt, Homo sapiens
  misc_RNA (1)...(19): siRNA sense strand
gaucaagaccugccaauga

SEQ ID NO: 1019762 - RNA, 19 nt, Homo sapiens
  misc_RNA (1)...(19): siRNA sense strand
gggaauggauauacagaaa

SEQ ID NO: 1019763 - RNA, 19 nt, Homo sapiens
  misc_RNA (1)...(19): siRNA sense strand
gaagggagauagcaaugau

SEQ ID NO: 1019764 - RNA, 19 nt, Homo sapiens
  misc_RNA (1)...(19): siRNA sense strand
caagaaagcaagcuauaaa

SEQ ID NO: 1019765 - RNA, 19 nt, Homo sapiens
  misc_RNA (1)...(19): siRNA sense strand
gaauuaaguugccuucauc

SEQ ID NO: 1019766 - RNA, 19 nt, Homo sapiens
  misc_RNA (1)...(19): siRNA sense strand
ucacagagcuauagcagau

SEQ ID NO: 1019767 - RNA, 19 nt, Homo sapiens
  misc_RNA (1)...(19): siRNA sense strand
ugaggaagauguuggauug

SEQ ID NO: 1019768 - RNA, 19 nt, Homo sapiens
  misc_RNA (1)...(19): siRNA sense strand
gaaagaagaaacgcuagua

SEQ ID NO: 1019769 - RNA, 19 nt, Homo sapiens
  misc_RNA (1)...(19): siRNA sense strand
gaauggauauacagaaauc

SEQ ID NO: 1019770 - RNA, 19 nt, Homo sapiens
  misc_RNA (1)...(19): siRNA sense strand
ggaauuaaguugccuucau

SEQ ID NO: 1019771 - RNA, 19 nt, Homo sapiens
  misc_RNA (1)...(19): siRNA sense strand
gaagaaacgcuaguaauuc

SEQ ID NO: 1019772 - RNA, 19 nt, Homo sapiens
  misc_RNA (1)...(19): siRNA sense strand
gaagaaaugauuacuguag

SEQ ID NO: 1019773 - RNA, 19 nt, Homo sapiens
  misc_RNA (1)...(19): siRNA sense strand
agaaaggacucacagcaaa

SEQ ID NO: 1019774 - RNA, 19 nt, Homo sapiens
  misc_RNA (1)...(19): siRNA sense strand
gagcagaacagaggaagua

SEQ ID NO: 1019775 - RNA, 19 nt, Homo sapiens
  misc_RNA (1)...(19): siRNA sense strand
gcaagaaagcaagcuauaa

SEQ ID NO: 1019776 - RNA, 19 nt, Homo sapiens
  misc_RNA (1)...(19): siRNA sense strand
gagcuuauucccucaagua

SEQ ID NO: 1019777 - RNA, 19 nt, Homo sapiens
  misc_RNA (1)...(19): siRNA sense strand
ggaagguucuauucaagug

SEQ ID NO: 1019778 - RNA, 19 nt, Homo sapiens
  misc_RNA (1)...(19): siRNA sense strand
ggagagaggagaaagaaga

SEQ ID NO: 1019779 - RNA, 19 nt, Homo sapiens
  misc_RNA (1)...(19): siRNA sense strand
gaauaccucucaaugucuu

SEQ ID NO: 1019780 - RNA, 19 nt, Homo sapiens
  misc_RNA (1)...(19): siRNA sense strand
gaggaaguauggaguguuc

SEQ ID NO: 1019781 - RNA, 19 nt, Homo sapiens
  misc_RNA (1)...(19): siRNA sense strand
gaagauguuggauuguuaa

SEQ ID NO: 1019782 - RNA, 19 nt, Homo sapiens
  misc_RNA (1)...(19): siRNA sense strand
ggacagcaaucgcuuacag

SEQ ID NO: 1019783 - RNA, 19 nt, Homo sapiens
  misc_RNA (1)...(19): siRNA sense strand
gaugagagguuugagaagu

SEQ ID NO: 1019784 - RNA, 19 nt, Homo sapiens
  misc_RNA (1)...(19): siRNA sense strand
agaagaaacgcuaguaauu

SEQ ID NO: 1019785 - RNA, 19 nt, Homo sapiens
  misc_RNA (1)...(19): siRNA sense strand
gaacgaagaguggagaaga

SEQ ID NO: 1019786 - RNA, 19 nt, Homo sapiens
  misc_RNA (1)...(19): siRNA sense strand
ccaacgagauccuuuagca

SEQ ID NO: 1019787 - RNA, 19 nt, Homo sapiens
  misc_RNA (1)...(19): siRNA sense strand
gagaagaaagcuaacaaau

SEQ ID NO: 1019788 - RNA, 19 nt, Homo sapiens
  misc_RNA (1)...(19): siRNA sense strand
gaacagcugacccuacaug

SEQ ID NO: 1019789 - RNA, 19 nt, Homo sapiens
  misc_RNA (1)...(19): siRNA sense strand
ggagaagaaagcuaacaaa

SEQ ID NO: 1019790 - RNA, 19 nt, Homo sapiens
  misc_RNA (1)...(19): siRNA sense strand
gcuugaggaugacuuuauu

SEQ ID NO: 1019791 - RNA, 19 nt, Homo sapiens
  misc_RNA (1)...(19): siRNA sense strand
caacucagccacguucuaa

SEQ ID NO: 1019792 - RNA, 19 nt, Homo sapiens
  misc_RNA (1)...(19): siRNA sense strand
caaccaaagcccaaacaaa

SEQ ID NO: 1019793 - RNA, 19 nt, Homo sapiens
  misc_RNA (1)...(19): siRNA sense strand
auccacagcuuaucaagua

SEQ ID NO: 1019794 - RNA, 19 nt, Homo sapiens
  misc_RNA (1)...(19): siRNA sense strand
uauagcagaucacuuguuc

SEQ ID NO: 1019795 - RNA, 19 nt, Homo sapiens
  misc_RNA (1)...(19): siRNA sense strand
gaggaggaagaaaugauua

SEQ ID NO: 1019796 - RNA, 19 nt, Homo sapiens
  misc_RNA (1)...(19): siRNA sense strand
gaagaauguugagggucua

SEQ ID NO: 1019797 - RNA, 19 nt, Homo sapiens
  misc_RNA (1)...(19): siRNA sense strand
cugcugaacuugaagaaga

SEQ ID NO: 1019798 - RNA, 19 nt, Homo sapiens
  misc_RNA (1)...(19): siRNA sense strand
ccaaacaaauucgaauauc

SEQ ID NO: 1019799 - RNA, 19 nt, Homo sapiens
  misc_RNA (1)...(19): siRNA sense strand
gagccaacgagauccuuua

SEQ ID NO: 1019800 - RNA, 19 nt, Homo sapiens
  misc_RNA (1)...(19): siRNA sense strand
caaagcaaacugaaagaau

SEQ ID NO: 1019801 - RNA, 19 nt, Homo sapiens
  misc_RNA (1)...(19): siRNA sense strand
gcaaagcaaacugaaagaa

SEQ ID NO: 1019802 - RNA, 19 nt, Homo sapiens
  misc_RNA (1)...(19): siRNA sense strand
gaaggcagagaauugugua

SEQ ID NO: 1019803 - RNA, 19 nt, Homo sapiens
  misc_RNA (1)...(19): siRNA sense strand
gcaggccuauugucagaug

SEQ ID NO: 1019804 - RNA, 19 nt, Homo sapiens
  misc_RNA (1)...(19): siRNA sense strand
uugcagcucuugaugauga

SEQ ID NO: 1019805 - RNA, 19 nt, Homo sapiens
  misc_RNA (1)...(19): siRNA sense strand
aaauaaagcagcuccaguu

SEQ ID NO: 1019806 - RNA, 19 nt, Homo sapiens
  misc_RNA (1)...(19): siRNA sense strand
aggaagaaaugauuacugu

SEQ ID NO: 1019807 - RNA, 19 nt, Homo sapiens
  misc_RNA (1)...(19): siRNA sense strand
guucuuugaugacgacuau

SEQ ID NO: 1019808 - RNA, 19 nt, Homo sapiens
  misc_RNA (1)...(19): siRNA sense strand
ccaaagagaagugggauug

SEQ ID NO: 1019809 - RNA, 19 nt, Homo sapiens
  misc_RNA (1)...(19): siRNA sense strand
ggaagaaaugauuacugua

SEQ ID NO: 1019810 - RNA, 19 nt, Homo sapiens
  misc_RNA (1)...(19): siRNA sense strand
ggauaaugcagaauuggaa

SEQ ID NO: 1019811 - RNA, 19 nt, Homo sapiens
  misc_RNA (1)...(19): siRNA sense strand
ggaagagggaauggauaua

SEQ ID NO: 1019812 - RNA, 19 nt, Homo sapiens
  misc_RNA (1)...(19): siRNA sense strand
aaagaagaaacgcuaguaa

SEQ ID NO: 1019813 - RNA, 19 nt, Homo sapiens
  misc_RNA (1)...(19): siRNA sense strand
gaaagcaagcuauaaaaga

SEQ ID NO: 1019814 - RNA, 19 nt, Homo sapiens
  misc_RNA (1)...(19): siRNA sense strand
gcccaaacaaauucgaaua

SEQ ID NO: 1019815 - RNA, 19 nt, Homo sapiens
  misc_RNA (1)...(19): siRNA sense strand
ccaaagcccaaacaaauuc

SEQ ID NO: 1019816 - RNA, 19 nt, Homo sapiens
  misc_RNA (1)...(19): siRNA sense strand
uaucaaguaucaaccaaag

SEQ ID NO: 1019817 - RNA, 19 nt, Homo sapiens
  misc_RNA (1)...(19): siRNA sense strand
gaaacaaagagucgcuuca

SEQ ID NO: 1019818 - RNA, 19 nt, Homo sapiens
  misc_RNA (1)...(19): siRNA sense strand
caucaguguuugcuucaga

SEQ ID NO: 1019819 - RNA, 19 nt, Homo sapiens
  misc_RNA (1)...(19): siRNA sense strand
gaaguauggaguguucuuu

SEQ ID NO: 1019820 - RNA, 19 nt, Homo sapiens
  misc_RNA (1)...(19): siRNA sense strand
gaguggagaagaaagcuaa

SEQ ID NO: 1019821 - RNA, 19 nt, Homo sapiens
  misc_RNA (1)...(19): siRNA sense strand
gaagagcgcaaggaacgaa

SEQ ID NO: 1019822 - RNA, 19 nt, Homo sapiens
  misc_RNA (1)...(19): siRNA sense strand
gaaaggcgagcagaacaga

SEQ ID NO: 1019823 - RNA, 19 nt, Homo sapiens
  misc_RNA (1)...(19): siRNA sense strand
ggacucacagcaaagcaaa

SEQ ID NO: 1019824 - RNA, 19 nt, Homo sapiens
  misc_RNA (1)...(19): siRNA sense strand
gaagaaaggcgagcagaac

SEQ ID NO: 1019825 - RNA, 19 nt, Homo sapiens
  misc_RNA (1)...(19): siRNA sense strand
ugagagguuugagaaguuu

SEQ ID NO: 1019826 - RNA, 19 nt, Homo sapiens
  misc_RNA (1)...(19): siRNA sense strand
cagcugacccuacaugaug

SEQ ID NO: 1019827 - RNA, 19 nt, Homo sapiens
  misc_RNA (1)...(19): siRNA sense strand
gaagagggaauggauauac

SEQ ID NO: 1019828 - RNA, 19 nt, Homo sapiens
  misc_RNA (1)...(19): siRNA sense strand
gaggaagagggaauggaua

SEQ ID NO: 1019829 - RNA, 19 nt, Homo sapiens
  misc_RNA (1)...(19): siRNA sense strand
aguguuugcuucagaguuu

SEQ ID NO: 1019830 - RNA, 19 nt, Homo sapiens
  misc_RNA (1)...(19): siRNA sense strand
aaccaaagcccaaacaaau

SEQ ID NO: 1019831 - RNA, 19 nt, Homo sapiens
  misc_RNA (1)...(19): siRNA sense strand
ggaaccaucugggccuuca

SEQ ID NO: 1019832 - RNA, 19 nt, Homo sapiens
  misc_RNA (1)...(19): siRNA sense strand
auaaucugcuugaggauga

SEQ ID NO: 1019833 - RNA, 19 nt, Homo sapiens
  misc_RNA (1)...(19): siRNA sense strand
gagagaggagaaagaagaa

SEQ ID NO: 1019834 - RNA, 19 nt, Homo sapiens
  misc_RNA (1)...(19): siRNA sense strand
gagaaaagaaggcaagaaa

SEQ ID NO: 1019835 - RNA, 19 nt, Homo sapiens
  misc_RNA (1)...(19): siRNA sense strand
aggaauaccucucaauguc

SEQ ID NO: 1019836 - RNA, 19 nt, Homo sapiens
  misc_RNA (1)...(19): siRNA sense strand
aaagagaagugggauugug

SEQ ID NO: 1019837 - RNA, 19 nt, Homo sapiens
  misc_RNA (1)...(19): siRNA sense strand
ugaagaagccaaagagaag

SEQ ID NO: 1019838 - RNA, 19 nt, Homo sapiens
  misc_RNA (1)...(19): siRNA sense strand
gaaugagcuugaugagucu

SEQ ID NO: 1019839 - RNA, 19 nt, Homo sapiens
  misc_RNA (1)...(19): siRNA sense strand
gagauagcaaugaugacua

SEQ ID NO: 1019840 - RNA, 19 nt, Homo sapiens
  misc_RNA (1)...(19): siRNA sense strand
gaaacgcuaguaauuccaa

SEQ ID NO: 1019841 - RNA, 19 nt, Homo sapiens
  misc_RNA (1)...(19): siRNA sense strand
aaacaggaauaccucucaa

SEQ ID NO: 1019842 - RNA, 19 nt, Homo sapiens
  misc_RNA (1)...(19): siRNA sense strand
caaugaaugagcuugauga

SEQ ID NO: 1019843 - RNA, 19 nt, Homo sapiens
  misc_RNA (1)...(19): siRNA sense strand
gaagaagaaagcugugucu

SEQ ID NO: 1019844 - RNA, 19 nt, Homo sapiens
  misc_RNA (1)...(19): siRNA sense strand
ugacuuugaugauccagau

SEQ ID NO: 1019845 - RNA, 19 nt, Homo sapiens
  misc_RNA (1)...(19): siRNA sense strand
gagaagggagauagcaaug

SEQ ID NO: 1019846 - RNA, 19 nt, Homo sapiens
  misc_RNA (1)...(19): siRNA sense strand
gagcaagaaagcaagcuau

SEQ ID NO: 1019847 - RNA, 19 nt, Homo sapiens
  misc_RNA (1)...(19): siRNA sense strand
gaaaggacucacagcaaag

SEQ ID NO: 1019848 - RNA, 19 nt, Homo sapiens
  misc_RNA (1)...(19): siRNA sense strand
gaaugacuacuauaaagag

SEQ ID NO: 1019849 - RNA, 19 nt, Homo sapiens
  misc_RNA (1)...(19): siRNA sense strand
guaugucugugcccggaaa

SEQ ID NO: 1019850 - RNA, 19 nt, Homo sapiens
  misc_RNA (1)...(19): siRNA sense strand
ucacagcaaagcaaacuga

SEQ ID NO: 1019851 - RNA, 19 nt, Homo sapiens
  misc_RNA (1)...(19): siRNA sense strand
cagcaaagcaaacugaaag

SEQ ID NO: 1019852 - RNA, 19 nt, Homo sapiens
  misc_RNA (1)...(19): siRNA sense strand
uggcagugaucuuccuaaa

SEQ ID NO: 1019853 - RNA, 19 nt, Homo sapiens
  misc_RNA (1)...(19): siRNA sense strand
gaaagacacuuccucucua

SEQ ID NO: 1019854 - RNA, 19 nt, Homo sapiens
  misc_RNA (1)...(19): siRNA sense strand
gcaaugaaguuacuggaaa

SEQ ID NO: 1019855 - RNA, 19 nt, Homo sapiens
  misc_RNA (1)...(19): siRNA sense strand
ucagaaaucuuccagaauu

SEQ ID NO: 1019856 - RNA, 19 nt, Homo sapiens
  misc_RNA (1)...(19): siRNA sense strand
gaacuuaaccggcacuuga

SEQ ID NO: 1019857 - RNA, 19 nt, Homo sapiens
  misc_RNA (1)...(19): siRNA sense strand
gaauggagcugcaacaagu

SEQ ID NO: 1019858 - RNA, 19 nt, Homo sapiens
  misc_RNA (1)...(19): siRNA sense strand
aaacaugggcugaaaguua

SEQ ID NO: 1019859 - RNA, 19 nt, Homo sapiens
  misc_RNA (1)...(19): siRNA sense strand
gcgauuaacuuacagaugu

SEQ ID NO: 1019860 - RNA, 19 nt, Homo sapiens
  misc_RNA (1)...(19): siRNA sense strand
gaacaagcccuccaggaaa

SEQ ID NO: 1019861 - RNA, 19 nt, Homo sapiens
  misc_RNA (1)...(19): siRNA sense strand
caaguuauguccagcauga

SEQ ID NO: 1019862 - RNA, 19 nt, Homo sapiens
  misc_RNA (1)...(19): siRNA sense strand
ggagaaacuuuguccagaa

SEQ ID NO: 1019863 - RNA, 19 nt, Homo sapiens
  misc_RNA (1)...(19): siRNA sense strand
gcucaagccuggagaaaga

SEQ ID NO: 1019864 - RNA, 19 nt, Homo sapiens
  misc_RNA (1)...(19): siRNA sense strand
aaaagaaacuggcagauua

SEQ ID NO: 1019865 - RNA, 19 nt, Homo sapiens
  misc_RNA (1)...(19): siRNA sense strand
cagaaaucuuccagaauua

SEQ ID NO: 1019866 - RNA, 19 nt, Homo sapiens
  misc_RNA (1)...(19): siRNA sense strand
gcaaggagcaugaaagaau

SEQ ID NO: 1019867 - RNA, 19 nt, Homo sapiens
  misc_RNA (1)...(19): siRNA sense strand
ugaaagugcuuauagacaa

SEQ ID NO: 1019868 - RNA, 19 nt, Homo sapiens
  misc_RNA (1)...(19): siRNA sense strand
gaagaagucaaagcgauua

SEQ ID NO: 1019869 - RNA, 19 nt, Homo sapiens
  misc_RNA (1)...(19): siRNA sense strand
ggaaauugcaaugaaguua

SEQ ID NO: 1019870 - RNA, 19 nt, Homo sapiens
  misc_RNA (1)...(19): siRNA sense strand
caaggagcaugaaagaauu

SEQ ID NO: 1019871 - RNA, 19 nt, Homo sapiens
  misc_RNA (1)...(19): siRNA sense strand
gaugaaauguacagugaug

SEQ ID NO: 1019872 - RNA, 19 nt, Homo sapiens
  misc_RNA (1)...(19): siRNA sense strand
ggaacaagcccuccaggaa

SEQ ID NO: 1019873 - RNA, 19 nt, Homo sapiens
  misc_RNA (1)...(19): siRNA sense strand
ucaaagcgauuaacuuaca

SEQ ID NO: 1019874 - RNA, 19 nt, Homo sapiens
  misc_RNA (1)...(19): siRNA sense strand
gaaagugcuuauagacaau

SEQ ID NO: 1019875 - RNA, 19 nt, Homo sapiens
  misc_RNA (1)...(19): siRNA sense strand
gaaaggagaagacuuggau

SEQ ID NO: 1019876 - RNA, 19 nt, Homo sapiens
  misc_RNA (1)...(19): siRNA sense strand
ggagaaagaauugaaauca

SEQ ID NO: 1019877 - RNA, 19 nt, Homo sapiens
  misc_RNA (1)...(19): siRNA sense strand
gaagggauggugauuguug

SEQ ID NO: 1019878 - RNA, 19 nt, Homo sapiens
  misc_RNA (1)...(19): siRNA sense strand
ucacaaagcucagaaugca

SEQ ID NO: 1019879 - RNA, 19 nt, Homo sapiens
  misc_RNA (1)...(19): siRNA sense strand
gaagaacagcagcaguuaa

SEQ ID NO: 1019880 - RNA, 19 nt, Homo sapiens
  misc_RNA (1)...(19): siRNA sense strand
gaaauggaaauugcaauga

SEQ ID NO: 1019881 - RNA, 19 nt, Homo sapiens
  misc_RNA (1)...(19): siRNA sense strand
agucaaagcgauuaacuua

SEQ ID NO: 1019882 - RNA, 19 nt, Homo sapiens
  misc_RNA (1)...(19): siRNA sense strand
aaagacagcugugggaaga

SEQ ID NO: 1019883 - RNA, 19 nt, Homo sapiens
  misc_RNA (1)...(19): siRNA sense strand
ggcaaggucuggaugaaau

SEQ ID NO: 1019884 - RNA, 19 nt, Homo sapiens
  misc_RNA (1)...(19): siRNA sense strand
gcaguucuuuguagugaug

SEQ ID NO: 1019885 - RNA, 19 nt, Homo sapiens
  misc_RNA (1)...(19): siRNA sense strand
gaagaaaguccgguuggaa

SEQ ID NO: 1019886 - RNA, 19 nt, Homo sapiens
  misc_RNA (1)...(19): siRNA sense strand
cgaauuugcucacuucaag

SEQ ID NO: 1019887 - RNA, 19 nt, Homo sapiens
  misc_RNA (1)...(19): siRNA sense strand
aacaugggcugaaaguuaa

SEQ ID NO: 1019888 - RNA, 19 nt, Homo sapiens
  misc_RNA (1)...(19): siRNA sense strand
ugaaacaaauggaagaaag

SEQ ID NO: 1019889 - RNA, 19 nt, Homo sapiens
  misc_RNA (1)...(19): siRNA sense strand
caauaaacaucucuuaagc

SEQ ID NO: 1019890 - RNA, 19 nt, Homo sapiens
  misc_RNA (1)...(19): siRNA sense strand
ugucagaaaucuuccagaa

SEQ ID NO: 1019891 - RNA, 19 nt, Homo sapiens
  misc_RNA (1)...(19): siRNA sense strand
agacuuggauucucagguu

SEQ ID NO: 1019892 - RNA, 19 nt, Homo sapiens
  misc_RNA (1)...(19): siRNA sense strand
uuacagauguuucacaaag

SEQ ID NO: 1019893 - RNA, 19 nt, Homo sapiens
  misc_RNA (1)...(19): siRNA sense strand
ggaagaagucaaagcgauu

SEQ ID NO: 1019894 - RNA, 19 nt, Homo sapiens
  misc_RNA (1)...(19): siRNA sense strand
uggaugaaauguacaguga

SEQ ID NO: 1019895 - RNA, 19 nt, Homo sapiens
  misc_RNA (1)...(19): siRNA sense strand
caucagauauagcgacuag

SEQ ID NO: 1019896 - RNA, 19 nt, Homo sapiens
  misc_RNA (1)...(19): siRNA sense strand
gagaaagaauugaaaucag

SEQ ID NO: 1019897 - RNA, 19 nt, Homo sapiens
  misc_RNA (1)...(19): siRNA sense strand
gagaaacuuuguccagaag

SEQ ID NO: 1019898 - RNA, 19 nt, Homo sapiens
  misc_RNA (1)...(19): siRNA sense strand
ugaaaagaguguagagaua

SEQ ID NO: 1019899 - RNA, 19 nt, Homo sapiens
  misc_RNA (1)...(19): siRNA sense strand
gaagaagggauggugauug

SEQ ID NO: 1019900 - RNA, 19 nt, Homo sapiens
  misc_RNA (1)...(19): siRNA sense strand
gaaacuuuguccagaagca

SEQ ID NO: 1019901 - RNA, 19 nt, Homo sapiens
  misc_RNA (1)...(19): siRNA sense strand
gaccgaauuugcucacuuc

SEQ ID NO: 1019902 - RNA, 19 nt, Homo sapiens
  misc_RNA (1)...(19): siRNA sense strand
cacuugagcugcacaguug

SEQ ID NO: 1019903 - RNA, 19 nt, Homo sapiens
  misc_RNA (1)...(19): siRNA sense strand
gccaaucucugcuugaaag

SEQ ID NO: 1019904 - RNA, 19 nt, Homo sapiens
  misc_RNA (1)...(19): siRNA sense strand
ggccacaucuucugcaaca

SEQ ID NO: 1019905 - RNA, 19 nt, Homo sapiens
  misc_RNA (1)...(19): siRNA sense strand
gcuggagacuuacaagcaa

SEQ ID NO: 1019906 - RNA, 19 nt, Homo sapiens
  misc_RNA (1)...(19): siRNA sense strand
gcaguuugcagcagaagaa

SEQ ID NO: 1019907 - RNA, 19 nt, Homo sapiens
  misc_RNA (1)...(19): siRNA sense strand
cagcaguucuuuguaguga

SEQ ID NO: 1019908 - RNA, 19 nt, Homo sapiens
  misc_RNA (1)...(19): siRNA sense strand
aagaagggauggugauugu

SEQ ID NO: 1019909 - RNA, 19 nt, Homo sapiens
  misc_RNA (1)...(19): siRNA sense strand
cgaauuacagcacgagaaa

SEQ ID NO: 1019910 - RNA, 19 nt, Homo sapiens
  misc_RNA (1)...(19): siRNA sense strand
ccucaaacaugggcugaaa

SEQ ID NO: 1019911 - RNA, 19 nt, Homo sapiens
  misc_RNA (1)...(19): siRNA sense strand
gaaaagaguguagagauaa

SEQ ID NO: 1019912 - RNA, 19 nt, Homo sapiens
  misc_RNA (1)...(19): siRNA sense strand
gcacuugagcugcacaguu

SEQ ID NO: 1019913 - RNA, 19 nt, Homo sapiens
  misc_RNA (1)...(19): siRNA sense strand
ccagaagcaucagauauag

SEQ ID NO: 1019914 - RNA, 19 nt, Homo sapiens
  misc_RNA (1)...(19): siRNA sense strand
gaacagcagcaguuaagag

SEQ ID NO: 1019915 - RNA, 19 nt, Homo sapiens
  misc_RNA (1)...(19): siRNA sense strand
gaagcaggacacacuaguu

SEQ ID NO: 1019916 - RNA, 19 nt, Homo sapiens
  misc_RNA (1)...(19): siRNA sense strand
caugaaagaauuacugaug

SEQ ID NO: 1019917 - RNA, 19 nt, Homo sapiens
  misc_RNA (1)...(19): siRNA sense strand
uaacucaaagcuucaagaa

SEQ ID NO: 1019918 - RNA, 19 nt, Homo sapiens
  misc_RNA (1)...(19): siRNA sense strand
ggaaaagacuaacucaaag

SEQ ID NO: 1019919 - RNA, 19 nt, Homo sapiens
  misc_RNA (1)...(19): siRNA sense strand
uccagaagcaucagauaua

SEQ ID NO: 1019920 - RNA, 19 nt, Homo sapiens
  misc_RNA (1)...(19): siRNA sense strand
gagcacugccucaaacaug

SEQ ID NO: 1019921 - RNA, 19 nt, Homo sapiens
  misc_RNA (1)...(19): siRNA sense strand
ggaagaagggauggugauu

SEQ ID NO: 1019922 - RNA, 19 nt, Homo sapiens
  misc_RNA (1)...(19): siRNA sense strand
gaagccaucacauccuuug

SEQ ID NO: 1019923 - RNA, 19 nt, Homo sapiens
  misc_RNA (1)...(19): siRNA sense strand
ugaaagaauuacugauguc

SEQ ID NO: 1019924 - RNA, 19 nt, Homo sapiens
  misc_RNA (1)...(19): siRNA sense strand
gcaugaaacaaauggaaga

SEQ ID NO: 1019925 - RNA, 19 nt, Homo sapiens
  misc_RNA (1)...(19): siRNA sense strand
gaagaaugaagccaucaca

SEQ ID NO: 1019926 - RNA, 19 nt, Homo sapiens
  misc_RNA (1)...(19): siRNA sense strand
gaaauugcaaugaaguuac

SEQ ID NO: 1019927 - RNA, 19 nt, Homo sapiens
  misc_RNA (1)...(19): siRNA sense strand
aagaauuacugauguccuu

SEQ ID NO: 1019928 - RNA, 19 nt, Homo sapiens
  misc_RNA (1)...(19): siRNA sense strand
ggaguuacaaauuggaaug

SEQ ID NO: 1019929 - RNA, 19 nt, Homo sapiens
  misc_RNA (1)...(19): siRNA sense strand
gcagcuggaagaagucaaa

SEQ ID NO: 1019930 - RNA, 19 nt, Homo sapiens
  misc_RNA (1)...(19): siRNA sense strand
cgaaauggaaauugcaaug

SEQ ID NO: 1019931 - RNA, 19 nt, Homo sapiens
  misc_RNA (1)...(19): siRNA sense strand
gggcugaaaguuaagaaga

SEQ ID NO: 1019932 - RNA, 19 nt, Homo sapiens
  misc_RNA (1)...(19): siRNA sense strand
acgccuggcugaaagauga

SEQ ID NO: 1019933 - RNA, 19 nt, Homo sapiens
  misc_RNA (1)...(19): siRNA sense strand
aaaccgaaauggaaauugc

SEQ ID NO: 1019934 - RNA, 19 nt, Homo sapiens
  misc_RNA (1)...(19): siRNA sense strand
caagcaaacucggcaaggu

SEQ ID NO: 1019935 - RNA, 19 nt, Homo sapiens
  misc_RNA (1)...(19): siRNA sense strand
gaauuacugauguccuuga

SEQ ID NO: 1019936 - RNA, 19 nt, Homo sapiens
  misc_RNA (1)...(19): siRNA sense strand
gagcaugaaagaauuacug

SEQ ID NO: 1019937 - RNA, 19 nt, Homo sapiens
  misc_RNA (1)...(19): siRNA sense strand
cgacuagugucagaaaucu

SEQ ID NO: 1019938 - RNA, 19 nt, Homo sapiens
  misc_RNA (1)...(19): siRNA sense strand
gcugaagauggaagauaua

SEQ ID NO: 1019939 - RNA, 19 nt, Homo sapiens
  misc_RNA (1)...(19): siRNA sense strand
gacacuuccucucuacuca

SEQ ID NO: 1019940 - RNA, 19 nt, Homo sapiens
  misc_RNA (1)...(19): siRNA sense strand
gaaacaaauggaagaaagg

SEQ ID NO: 1019941 - RNA, 19 nt, Homo sapiens
  misc_RNA (1)...(19): siRNA sense strand
gaaauguacagugaugugu

SEQ ID NO: 1019942 - RNA, 19 nt, Homo sapiens
  misc_RNA (1)...(19): siRNA sense strand
agaagaacagcagcaguua

SEQ ID NO: 1019943 - RNA, 19 nt, Homo sapiens
  misc_RNA (1)...(19): siRNA sense strand
uuaaggaugugcaggaucu

SEQ ID NO: 1019944 - RNA, 19 nt, Homo sapiens
  misc_RNA (1)...(19): siRNA sense strand
gauggagcacugccucaaa

SEQ ID NO: 1019945 - RNA, 19 nt, Homo sapiens
  misc_RNA (1)...(19): siRNA sense strand
aacaagcccuccaggaaau

SEQ ID NO: 1019946 - RNA, 19 nt, Homo sapiens
  misc_RNA (1)...(19): siRNA sense strand
cuuuggagcugguggagaa

SEQ ID NO: 1019947 - RNA, 19 nt, Homo sapiens
  misc_RNA (1)...(19): siRNA sense strand
cgauuaacuuacagauguu

SEQ ID NO: 1019948 - RNA, 19 nt, Homo sapiens
  misc_RNA (1)...(19): siRNA sense strand
gaagucaaagcgauuaacu

SEQ ID NO: 1019949 - RNA, 19 nt, Homo sapiens
  misc_RNA (1)...(19): siRNA sense strand
gagcugguggagaaacuuu

SEQ ID NO: 1019950 - RNA, 19 nt, Homo sapiens
  misc_RNA (1)...(19): siRNA sense strand
cagcagcaguuaagagaac

SEQ ID NO: 1019951 - RNA, 19 nt, Homo sapiens
  misc_RNA (1)...(19): siRNA sense strand
aagaagaacagcagcaguu

SEQ ID NO: 1019952 - RNA, 19 nt, Homo sapiens
  misc_RNA (1)...(19): siRNA sense strand
ugacgaagcgacacacugu

SEQ ID NO: 1019953 - RNA, 19 nt, Homo sapiens
  misc_RNA (1)...(19): siRNA sense strand
gcaaauauauguucacaga

SEQ ID NO: 1019954 - RNA, 19 nt, Homo sapiens
  misc_RNA (1)...(19): siRNA sense strand
gugcagagauacauaauua

SEQ ID NO: 1019955 - RNA, 19 nt, Homo sapiens
  misc_RNA (1)...(19): siRNA sense strand
gcauacaaauccauucuua

SEQ ID NO: 1019956 - RNA, 19 nt, Homo sapiens
  misc_RNA (1)...(19): siRNA sense strand
gcacuuaguucauggguaa

SEQ ID NO: 1019957 - RNA, 19 nt, Homo sapiens
  misc_RNA (1)...(19): siRNA sense strand
ggaaggaccugcugaugaa

SEQ ID NO: 1019958 - RNA, 19 nt, Homo sapiens
  misc_RNA (1)...(19): siRNA sense strand
gaaaguaauuccucgaaga

SEQ ID NO: 1019959 - RNA, 19 nt, Homo sapiens
  misc_RNA (1)...(19): siRNA sense strand
gcauaucacugcauacaaa

SEQ ID NO: 1019960 - RNA, 19 nt, Homo sapiens
  misc_RNA (1)...(19): siRNA sense strand
cuacagcuuugguauauua

SEQ ID NO: 1019961 - RNA, 19 nt, Homo sapiens
  misc_RNA (1)...(19): siRNA sense strand
uagaugcucucacuaaaua

SEQ ID NO: 1019962 - RNA, 19 nt, Homo sapiens
  misc_RNA (1)...(19): siRNA sense strand
gaggaaggcugauuuagau

SEQ ID NO: 1019963 - RNA, 19 nt, Homo sapiens
  misc_RNA (1)...(19): siRNA sense strand
gcauuaagcuacuucaaga

SEQ ID NO: 1019964 - RNA, 19 nt, Homo sapiens
  misc_RNA (1)...(19): siRNA sense strand
gcaagaaguggcaaauaua

SEQ ID NO: 1019965 - RNA, 19 nt, Homo sapiens
  misc_RNA (1)...(19): siRNA sense strand
ucaaauagaucacaucaag

SEQ ID NO: 1019966 - RNA, 19 nt, Homo sapiens
  misc_RNA (1)...(19): siRNA sense strand
caucaaagacugcagauaa

SEQ ID NO: 1019967 - RNA, 19 nt, Homo sapiens
  misc_RNA (1)...(19): siRNA sense strand
cuaaagaguugaaugagaa

SEQ ID NO: 1019968 - RNA, 19 nt, Homo sapiens
  misc_RNA (1)...(19): siRNA sense strand
ggcaagaaguggcaaauau

SEQ ID NO: 1019969 - RNA, 19 nt, Homo sapiens
  misc_RNA (1)...(19): siRNA sense strand
gcaaacaguccuagaagaa

SEQ ID NO: 1019970 - RNA, 19 nt, Homo sapiens
  misc_RNA (1)...(19): siRNA sense strand
cagcagagccuacagcuuu

SEQ ID NO: 1019971 - RNA, 19 nt, Homo sapiens
  misc_RNA (1)...(19): siRNA sense strand
gggaugugauuugugauua

SEQ ID NO: 1019972 - RNA, 19 nt, Homo sapiens
  misc_RNA (1)...(19): siRNA sense strand
gaaacaaccaucuuuaucu

SEQ ID NO: 1019973 - RNA, 19 nt, Homo sapiens
  misc_RNA (1)...(19): siRNA sense strand
gaaggcugauuuagaugaa

SEQ ID NO: 1019974 - RNA, 19 nt, Homo sapiens
  misc_RNA (1)...(19): siRNA sense strand
cuaaugacaucacgucuau

SEQ ID NO: 1019975 - RNA, 19 nt, Homo sapiens
  misc_RNA (1)...(19): siRNA sense strand
gaaauuaugcuucacuaca

SEQ ID NO: 1019976 - RNA, 19 nt, Homo sapiens
  misc_RNA (1)...(19): siRNA sense strand
caaagacugcagauaauuu

SEQ ID NO: 1019977 - RNA, 19 nt, Homo sapiens
  misc_RNA (1)...(19): siRNA sense strand
gaaagccucuuccauuacu

SEQ ID NO: 1019978 - RNA, 19 nt, Homo sapiens
  misc_RNA (1)...(19): siRNA sense strand
aaacaguccuagaagaauu

SEQ ID NO: 1019979 - RNA, 19 nt, Homo sapiens
  misc_RNA (1)...(19): siRNA sense strand
gauaugagcagcccauuuc

SEQ ID NO: 1019980 - RNA, 19 nt, Homo sapiens
  misc_RNA (1)...(19): siRNA sense strand
aaagaacaauccaacuuga

SEQ ID NO: 1019981 - RNA, 19 nt, Homo sapiens
  misc_RNA (1)...(19): siRNA sense strand
caauaaaggugggauagau

SEQ ID NO: 1019982 - RNA, 19 nt, Homo sapiens
  misc_RNA (1)...(19): siRNA sense strand
gagaaacaaccaucuuuau

SEQ ID NO: 1019983 - RNA, 19 nt, Homo sapiens
  misc_RNA (1)...(19): siRNA sense strand
acaaauccauucuuacuuc

SEQ ID NO: 1019984 - RNA, 19 nt, Homo sapiens
  misc_RNA (1)...(19): siRNA sense strand
ugggauagaugcaguagaa

SEQ ID NO: 1019985 - RNA, 19 nt, Homo sapiens
  misc_RNA (1)...(19): siRNA sense strand
uaugaugccuuuauugaga

SEQ ID NO: 1019986 - RNA, 19 nt, Homo sapiens
  misc_RNA (1)...(19): siRNA sense strand
gaccugcugaugaauauua

SEQ ID NO: 1019987 - RNA, 19 nt, Homo sapiens
  misc_RNA (1)...(19): siRNA sense strand
uggaaagugugcagagaua

SEQ ID NO: 1019988 - RNA, 19 nt, Homo sapiens
  misc_RNA (1)...(19): siRNA sense strand
gcaggauacuuauaacaag

SEQ ID NO: 1019989 - RNA, 19 nt, Homo sapiens
  misc_RNA (1)...(19): siRNA sense strand
gcaguucucccaccuauca

SEQ ID NO: 1019990 - RNA, 19 nt, Homo sapiens
  misc_RNA (1)...(19): siRNA sense strand
ugagaaacaaccaucuuua

SEQ ID NO: 1019991 - RNA, 19 nt, Homo sapiens
  misc_RNA (1)...(19): siRNA sense strand
gggagcaggauacuuauaa

SEQ ID NO: 1019992 - RNA, 19 nt, Homo sapiens
  misc_RNA (1)...(19): siRNA sense strand
ccaaggcauuguugaagaa

SEQ ID NO: 1019993 - RNA, 19 nt, Homo sapiens
  misc_RNA (1)...(19): siRNA sense strand
uagagcauaucacugcaua

SEQ ID NO: 1019994 - RNA, 19 nt, Homo sapiens
  misc_RNA (1)...(19): siRNA sense strand
ucacuacauugaaagguuu

SEQ ID NO: 1019995 - RNA, 19 nt, Homo sapiens
  misc_RNA (1)...(19): siRNA sense strand
ggaugugauuugugauuau

SEQ ID NO: 1019996 - RNA, 19 nt, Homo sapiens
  misc_RNA (1)...(19): siRNA sense strand
caagaaguggcaaauauau

SEQ ID NO: 1019997 - RNA, 19 nt, Homo sapiens
  misc_RNA (1)...(19): siRNA sense strand
gcaguagaaagucuuauga

SEQ ID NO: 1019998 - RNA, 19 nt, Homo sapiens
  misc_RNA (1)...(19): siRNA sense strand
caauccaacuugaagcaaa

SEQ ID NO: 1019999 - RNA, 19 nt, Homo sapiens
  misc_RNA (1)...(19): siRNA sense strand
gacaucacgucuauucuuc

SEQ ID NO: 1020000 - RNA, 19 nt, Homo sapiens
  misc_RNA (1)...(19): siRNA sense strand
ucacuaaagaguugaauga

SEQ ID NO: 1020001 - RNA, 19 nt, Homo sapiens
  misc_RNA (1)...(19): siRNA sense strand
gcuauucuuugcuugugua

SEQ ID NO: 1020002 - RNA, 19 nt, Homo sapiens
  misc_RNA (1)...(19): siRNA sense strand
ggaaggcugauuuagauga

SEQ ID NO: 1020003 - RNA, 19 nt, Homo sapiens
  misc_RNA (1)...(19): siRNA sense strand
gaaucuagaugcucucacu

SEQ ID NO: 1020004 - RNA, 19 nt, Homo sapiens
  misc_RNA (1)...(19): siRNA sense strand
caucauauaccgaaauguu

SEQ ID NO: 1020005 - RNA, 19 nt, Homo sapiens
  misc_RNA (1)...(19): siRNA sense strand
gcagcaaacaguccuagaa

SEQ ID NO: 1020006 - RNA, 19 nt, Homo sapiens
  misc_RNA (1)...(19): siRNA sense strand
ugaggauuaucgaaaguaa

SEQ ID NO: 1020007 - RNA, 19 nt, Homo sapiens
  misc_RNA (1)...(19): siRNA sense strand
ccaccuaucauuuguagaa

SEQ ID NO: 1020008 - RNA, 19 nt, Homo sapiens
  misc_RNA (1)...(19): siRNA sense strand
gcagagauacauaauuaca

SEQ ID NO: 1020009 - RNA, 19 nt, Homo sapiens
  misc_RNA (1)...(19): siRNA sense strand
gccuacagcuuugguauau

SEQ ID NO: 1020010 - RNA, 19 nt, Homo sapiens
  misc_RNA (1)...(19): siRNA sense strand
aaaggcagcuuguuaugca

SEQ ID NO: 1020011 - RNA, 19 nt, Homo sapiens
  misc_RNA (1)...(19): siRNA sense strand
gggcagaguaugacacaaa

SEQ ID NO: 1020012 - RNA, 19 nt, Homo sapiens
  misc_RNA (1)...(19): siRNA sense strand
aaacagggucagacucaua

SEQ ID NO: 1020013 - RNA, 19 nt, Homo sapiens
  misc_RNA (1)...(19): siRNA sense strand
gaaggaaucaaauguggau

SEQ ID NO: 1020014 - RNA, 19 nt, Homo sapiens
  misc_RNA (1)...(19): siRNA sense strand
aagaaagaccgaagaacua

SEQ ID NO: 1020015 - RNA, 19 nt, Homo sapiens
  misc_RNA (1)...(19): siRNA sense strand
gaaagacugggcuguagug

SEQ ID NO: 1020016 - RNA, 19 nt, Homo sapiens
  misc_RNA (1)...(19): siRNA sense strand
guaaacagggucagacuca

SEQ ID NO: 1020017 - RNA, 19 nt, Homo sapiens
  misc_RNA (1)...(19): siRNA sense strand
uugaagaacuaauggaaga

SEQ ID NO: 1020018 - RNA, 19 nt, Homo sapiens
  misc_RNA (1)...(19): siRNA sense strand
gaucacaucaagcagugua

SEQ ID NO: 1020019 - RNA, 19 nt, Homo sapiens
  misc_RNA (1)...(19): siRNA sense strand
gaaaagaacaauccaacuu

SEQ ID NO: 1020020 - RNA, 19 nt, Homo sapiens
  misc_RNA (1)...(19): siRNA sense strand
uaagcuacuucaagaaauc

SEQ ID NO: 1020021 - RNA, 19 nt, Homo sapiens
  misc_RNA (1)...(19): siRNA sense strand
gaugaccuguugcagcuau

SEQ ID NO: 1020022 - RNA, 19 nt, Homo sapiens
  misc_RNA (1)...(19): siRNA sense strand
gaugugauuugugauuaug

SEQ ID NO: 1020023 - RNA, 19 nt, Homo sapiens
  misc_RNA (1)...(19): siRNA sense strand
gcagaaauuaaacaagcua

SEQ ID NO: 1020024 - RNA, 19 nt, Homo sapiens
  misc_RNA (1)...(19): siRNA sense strand
gauaagguaauagagcaua

SEQ ID NO: 1020025 - RNA, 19 nt, Homo sapiens
  misc_RNA (1)...(19): siRNA sense strand
gcaaaagaagcugaaauua

SEQ ID NO: 1020026 - RNA, 19 nt, Homo sapiens
  misc_RNA (1)...(19): siRNA sense strand
caaauccauucuuacuuca

SEQ ID NO: 1020027 - RNA, 19 nt, Homo sapiens
  misc_RNA (1)...(19): siRNA sense strand
ucuagaugcucucacuaaa

SEQ ID NO: 1020028 - RNA, 19 nt, Homo sapiens
  misc_RNA (1)...(19): siRNA sense strand
aagaauccaugaaucuaga

SEQ ID NO: 1020029 - RNA, 19 nt, Homo sapiens
  misc_RNA (1)...(19): siRNA sense strand
gaaagugugcagagauaca

SEQ ID NO: 1020030 - RNA, 19 nt, Homo sapiens
  misc_RNA (1)...(19): siRNA sense strand
guagaagugacaaggaauu

SEQ ID NO: 1020031 - RNA, 19 nt, Homo sapiens
  misc_RNA (1)...(19): siRNA sense strand
cagcccauuucaagacuuu

SEQ ID NO: 1020032 - RNA, 19 nt, Homo sapiens
  misc_RNA (1)...(19): siRNA sense strand
gauagaugcaguagaaagu

SEQ ID NO: 1020033 - RNA, 19 nt, Homo sapiens
  misc_RNA (1)...(19): siRNA sense strand
acuaaagaguugaaugaga

SEQ ID NO: 1020034 - RNA, 19 nt, Homo sapiens
  misc_RNA (1)...(19): siRNA sense strand
caaauguggauuaucagaa

SEQ ID NO: 1020035 - RNA, 19 nt, Homo sapiens
  misc_RNA (1)...(19): siRNA sense strand
gaagaacuaauggaagaug

SEQ ID NO: 1020036 - RNA, 19 nt, Homo sapiens
  misc_RNA (1)...(19): siRNA sense strand
gagcauaucacugcauaca

SEQ ID NO: 1020037 - RNA, 19 nt, Homo sapiens
  misc_RNA (1)...(19): siRNA sense strand
aaaugaggauuaucgaaag

SEQ ID NO: 1020038 - RNA, 19 nt, Homo sapiens
  misc_RNA (1)...(19): siRNA sense strand
gaaguggcaaauauauguu

SEQ ID NO: 1020039 - RNA, 19 nt, Homo sapiens
  misc_RNA (1)...(19): siRNA sense strand
ccucuuccauuacucuuau

SEQ ID NO: 1020040 - RNA, 19 nt, Homo sapiens
  misc_RNA (1)...(19): siRNA sense strand
gguaauagagcauaucacu

SEQ ID NO: 1020041 - RNA, 19 nt, Homo sapiens
  misc_RNA (1)...(19): siRNA sense strand
caauuggguuacacaggaa

SEQ ID NO: 1020042 - RNA, 19 nt, Homo sapiens
  misc_RNA (1)...(19): siRNA sense strand
uuaguuaccaauuggguua

SEQ ID NO: 1020043 - RNA, 19 nt, Homo sapiens
  misc_RNA (1)...(19): siRNA sense strand
ucaagaauccaugaaucua

SEQ ID NO: 1020044 - RNA, 19 nt, Homo sapiens
  misc_RNA (1)...(19): siRNA sense strand
ugacaucacgucuauucuu

SEQ ID NO: 1020045 - RNA, 19 nt, Homo sapiens
  misc_RNA (1)...(19): siRNA sense strand
gcucuaacccuggaaggaa

SEQ ID NO: 1020046 - RNA, 19 nt, Homo sapiens
  misc_RNA (1)...(19): siRNA sense strand
gaugaagaaaugauugugu

SEQ ID NO: 1020047 - RNA, 19 nt, Homo sapiens
  misc_RNA (1)...(19): siRNA sense strand
aguaauuccucgaagauuc

SEQ ID NO: 1020048 - RNA, 19 nt, Homo sapiens
  misc_RNA (1)...(19): siRNA sense strand
gaauacauuuaaggcuguu

SEQ ID NO: 1020049 - RNA, 19 nt, Homo sapiens
  misc_RNA (1)...(19): siRNA sense strand
ucaaagacugcagauaauu

SEQ ID NO: 1020050 - RNA, 19 nt, Homo sapiens
  misc_RNA (1)...(19): siRNA sense strand
agaggaaggcugauuuaga

SEQ ID NO: 1020051 - RNA, 19 nt, Homo sapiens
  misc_RNA (1)...(19): siRNA sense strand
caagaauccaugaaucuag

SEQ ID NO: 1020052 - RNA, 19 nt, Homo sapiens
  misc_RNA (1)...(19): siRNA sense strand
aaagaaagaccgaagaacu

SEQ ID NO: 1020053 - RNA, 19 nt, Homo sapiens
  misc_RNA (1)...(19): siRNA sense strand
gacaauggcuggaaaauua

SEQ ID NO: 1020054 - RNA, 19 nt, Homo sapiens
  misc_RNA (1)...(19): siRNA sense strand
gaagaacuguacuacuuug

SEQ ID NO: 1020055 - RNA, 19 nt, Homo sapiens
  misc_RNA (1)...(19): siRNA sense strand
gaacuguacuacuuugaau

SEQ ID NO: 1020056 - RNA, 19 nt, Homo sapiens
  misc_RNA (1)...(19): siRNA sense strand
guacaagucuacugucauc

SEQ ID NO: 1020057 - RNA, 19 nt, Homo sapiens
  misc_RNA (1)...(19): siRNA sense strand
cagcagccaucuuguugua

SEQ ID NO: 1020058 - RNA, 19 nt, Homo sapiens
  misc_RNA (1)...(19): siRNA sense strand
ugacgauggugguuucuuu

SEQ ID NO: 1020059 - RNA, 19 nt, Homo sapiens
  misc_RNA (1)...(19): siRNA sense strand
cgaauuauauuugccaaug

SEQ ID NO: 1020060 - RNA, 19 nt, Homo sapiens
  misc_RNA (1)...(19): siRNA sense strand
aaacuuaccacuacuauca

SEQ ID NO: 1020061 - RNA, 19 nt, Homo sapiens
  misc_RNA (1)...(19): siRNA sense strand
cuacaucuuugccacagua

SEQ ID NO: 1020062 - RNA, 19 nt, Homo sapiens
  misc_RNA (1)...(19): siRNA sense strand
ggacuuccaccuagaauuc

SEQ ID NO: 1020063 - RNA, 19 nt, Homo sapiens
  misc_RNA (1)...(19): siRNA sense strand
uugaagaacuguacuacuu

SEQ ID NO: 1020064 - RNA, 19 nt, Homo sapiens
  misc_RNA (1)...(19): siRNA sense strand
gcagccaucuuguuguaug

SEQ ID NO: 1020065 - RNA, 19 nt, Homo sapiens
  misc_RNA (1)...(19): siRNA sense strand
ccauggagaccgaauuaua

SEQ ID NO: 1020066 - RNA, 19 nt, Homo sapiens
  misc_RNA (1)...(19): siRNA sense strand
uaacucagcagccaucuug

SEQ ID NO: 1020067 - RNA, 19 nt, Homo sapiens
  misc_RNA (1)...(19): siRNA sense strand
ucaggaaacuuaccacuac

SEQ ID NO: 1020068 - RNA, 19 nt, Homo sapiens
  misc_RNA (1)...(19): siRNA sense strand
ggagaccgaauuauauuug

SEQ ID NO: 1020069 - RNA, 19 nt, Homo sapiens
  misc_RNA (1)...(19): siRNA sense strand
guacuacuuugaauuugug

SEQ ID NO: 1020070 - RNA, 19 nt, Homo sapiens
  misc_RNA (1)...(19): siRNA sense strand
guagaugacuugccaaucc

SEQ ID NO: 1020071 - RNA, 19 nt, Homo sapiens
  misc_RNA (1)...(19): siRNA sense strand
ggccuuacccacacuuaua

SEQ ID NO: 1020072 - RNA, 19 nt, Homo sapiens
  misc_RNA (1)...(19): siRNA sense strand
ccaccagucucuucucugu

SEQ ID NO: 1020073 - RNA, 19 nt, Homo sapiens
  misc_RNA (1)...(19): siRNA sense strand
guuacgaccugacgaguuc

SEQ ID NO: 1020074 - RNA, 19 nt, Homo sapiens
  misc_RNA (1)...(19): siRNA sense strand
guucuucggcuacuccuua

SEQ ID NO: 1020075 - RNA, 19 nt, Homo sapiens
  misc_RNA (1)...(19): siRNA sense strand
gcacuggcauuauugucau

SEQ ID NO: 1020076 - RNA, 19 nt, Homo sapiens
  misc_RNA (1)...(19): siRNA sense strand
ccgaauggcugagucuuug

SEQ ID NO: 1020077 - RNA, 19 nt, Homo sapiens
  misc_RNA (1)...(19): siRNA sense strand
uaaaguucauccgguauau

SEQ ID NO: 1020078 - RNA, 19 nt, Homo sapiens
  misc_RNA (1)...(19): siRNA sense strand
gaacaacgccagccccuuu

SEQ ID NO: 1020079 - RNA, 19 nt, Homo sapiens
  misc_RNA (1)...(19): siRNA sense strand
ccacacagccacaagauag

SEQ ID NO: 1020080 - RNA, 19 nt, Homo sapiens
  misc_RNA (1)...(19): siRNA sense strand
ccauugcacucaccuacuu

SEQ ID NO: 1020081 - RNA, 19 nt, Homo sapiens
  misc_RNA (1)...(19): siRNA sense strand
ggaaacuuaccacuacuau

SEQ ID NO: 1020082 - RNA, 19 nt, Homo sapiens
  misc_RNA (1)...(19): siRNA sense strand
caacaugucuggggcagua

SEQ ID NO: 1020083 - RNA, 19 nt, Homo sapiens
  misc_RNA (1)...(19): siRNA sense strand
ggaaaauuauccauacaga

SEQ ID NO: 1020084 - RNA, 19 nt, Homo sapiens
  misc_RNA (1)...(19): siRNA sense strand
gaauggcugagucuuugua

SEQ ID NO: 1020085 - RNA, 19 nt, Homo sapiens
  misc_RNA (1)...(19): siRNA sense strand
gaagauacgucacaaaagc

SEQ ID NO: 1020086 - RNA, 19 nt, Homo sapiens
  misc_RNA (1)...(19): siRNA sense strand
guacggcauccucuucuuu

SEQ ID NO: 1020087 - RNA, 19 nt, Homo sapiens
  misc_RNA (1)...(19): siRNA sense strand
ggugguuucuuuccucgaa

SEQ ID NO: 1020088 - RNA, 19 nt, Homo sapiens
  misc_RNA (1)...(19): siRNA sense strand
cauggagaccgaauuauau

SEQ ID NO: 1020089 - RNA, 19 nt, Homo sapiens
  misc_RNA (1)...(19): siRNA sense strand
ugaagaacuguacuacuuu

SEQ ID NO: 1020090 - RNA, 19 nt, Homo sapiens
  misc_RNA (1)...(19): siRNA sense strand
aaagugggacccuaccaua

SEQ ID NO: 1020091 - RNA, 19 nt, Homo sapiens
  misc_RNA (1)...(19): siRNA sense strand
uaccauaacccucaggaaa

SEQ ID NO: 1020092 - RNA, 19 nt, Homo sapiens
  misc_RNA (1)...(19): siRNA sense strand
ccaccggccucuucaucuu

SEQ ID NO: 1020093 - RNA, 19 nt, Homo sapiens
  misc_RNA (1)...(19): siRNA sense strand
gcccugaccugcugcaucu

SEQ ID NO: 1020094 - RNA, 19 nt, Homo sapiens
  misc_RNA (1)...(19): siRNA sense strand
ccacagcuuggauggguua

SEQ ID NO: 1020095 - RNA, 19 nt, Homo sapiens
  misc_RNA (1)...(19): siRNA sense strand
gagaagauacgucacaaaa

SEQ ID NO: 1020096 - RNA, 19 nt, Homo sapiens
  misc_RNA (1)...(19): siRNA sense strand
guggugaacucagugcauu

SEQ ID NO: 1020097 - RNA, 19 nt, Homo sapiens
  misc_RNA (1)...(19): siRNA sense strand
uggaaggcgugacacacua

SEQ ID NO: 1020098 - RNA, 19 nt, Homo sapiens
  misc_RNA (1)...(19): siRNA sense strand
cuaaaguucauccgguaua

SEQ ID NO: 1020099 - RNA, 19 nt, Homo sapiens
  misc_RNA (1)...(19): siRNA sense strand
uggcugagucuuuguauga

SEQ ID NO: 1020100 - RNA, 19 nt, Homo sapiens
  misc_RNA (1)...(19): siRNA sense strand
uccgguauaucuauguuaa

SEQ ID NO: 1020101 - RNA, 19 nt, Homo sapiens
  misc_RNA (1)...(19): siRNA sense strand
gcccuuggcacuggcauua

SEQ ID NO: 1020102 - RNA, 19 nt, Homo sapiens
  misc_RNA (1)...(19): siRNA sense strand
ccagucugcugcccugaga

SEQ ID NO: 1020103 - RNA, 19 nt, Homo sapiens
  misc_RNA (1)...(19): siRNA sense strand
cugcugcccugagaagaua

SEQ ID NO: 1020104 - RNA, 19 nt, Homo sapiens
  misc_RNA (1)...(19): siRNA sense strand
gcgacccuguuauucugua

SEQ ID NO: 1020105 - RNA, 19 nt, Homo sapiens
  misc_RNA (1)...(19): siRNA sense strand
gcugagucuuuguaugaga

SEQ ID NO: 1020106 - RNA, 19 nt, Homo sapiens
  misc_RNA (1)...(19): siRNA sense strand
gucgggagcaguacacuuu

SEQ ID NO: 1020107 - RNA, 19 nt, Homo sapiens
  misc_RNA (1)...(19): siRNA sense strand
ccuuggcacuggcauuauu

SEQ ID NO: 1020108 - RNA, 19 nt, Homo sapiens
  misc_RNA (1)...(19): siRNA sense strand
gcgccaggccauugaagaa

SEQ ID NO: 1020109 - RNA, 19 nt, Homo sapiens
  misc_RNA (1)...(19): siRNA sense strand
acuccuuacucacugguua

SEQ ID NO: 1020110 - RNA, 19 nt, Homo sapiens
  misc_RNA (1)...(19): siRNA sense strand
auaggacucuggacccauu

SEQ ID NO: 1020111 - RNA, 19 nt, Homo sapiens
  misc_RNA (1)...(19): siRNA sense strand
cuacuuugaauuuguggua

SEQ ID NO: 1020112 - RNA, 19 nt, Homo sapiens
  misc_RNA (1)...(19): siRNA sense strand
ggcgaucugugcugagugu

SEQ ID NO: 1020113 - RNA, 19 nt, Homo sapiens
  misc_RNA (1)...(19): siRNA sense strand
uugaauuugugguagauga

SEQ ID NO: 1020114 - RNA, 19 nt, Homo sapiens
  misc_RNA (1)...(19): siRNA sense strand
gggugacaauggcuggaaa

SEQ ID NO: 1020115 - RNA, 19 nt, Homo sapiens
  misc_RNA (1)...(19): siRNA sense strand
cagcuuggauggguuacga

SEQ ID NO: 1020116 - RNA, 19 nt, Homo sapiens
  misc_RNA (1)...(19): siRNA sense strand
guucauccgguauaucuau

SEQ ID NO: 1020117 - RNA, 19 nt, Homo sapiens
  misc_RNA (1)...(19): siRNA sense strand
ggcauccucuucuuugucu

SEQ ID NO: 1020118 - RNA, 19 nt, Homo sapiens
  misc_RNA (1)...(19): siRNA sense strand
gacgaguuccuaggccuua

SEQ ID NO: 1020119 - RNA, 19 nt, Homo sapiens
  misc_RNA (1)...(19): siRNA sense strand
ccaccuagaauuccaugga

SEQ ID NO: 1020120 - RNA, 19 nt, Homo sapiens
  misc_RNA (1)...(19): siRNA sense strand
cauccgguauaucuauguu

SEQ ID NO: 1020121 - RNA, 19 nt, Homo sapiens
  misc_RNA (1)...(19): siRNA sense strand
gaaacuuaccacuacuauc

SEQ ID NO: 1020122 - RNA, 19 nt, Homo sapiens
  misc_RNA (1)...(19): siRNA sense strand
caaccauccugcugcuucu

SEQ ID NO: 1020123 - RNA, 19 nt, Homo sapiens
  misc_RNA (1)...(19): siRNA sense strand
gagaccgaauuauauuugc

SEQ ID NO: 1020124 - RNA, 19 nt, Homo sapiens
  misc_RNA (1)...(19): siRNA sense strand
gggcuugcaucuccauugc

SEQ ID NO: 1020125 - RNA, 19 nt, Homo sapiens
  misc_RNA (1)...(19): siRNA sense strand
gcacugcugggcauguuca

SEQ ID NO: 1020126 - RNA, 19 nt, Homo sapiens
  misc_RNA (1)...(19): siRNA sense strand
ccauaacccucaggaaacu

SEQ ID NO: 1020127 - RNA, 19 nt, Homo sapiens
  misc_RNA (1)...(19): siRNA sense strand
ucaacuccauggugcuugu

SEQ ID NO: 1020128 - RNA, 19 nt, Homo sapiens
  misc_RNA (1)...(19): siRNA sense strand
ccaucucuguggagcugua

SEQ ID NO: 1020129 - RNA, 19 nt, Homo sapiens
  misc_RNA (1)...(19): siRNA sense strand
cggcgacccuguuauucug

SEQ ID NO: 1020130 - RNA, 19 nt, Homo sapiens
  misc_RNA (1)...(19): siRNA sense strand
gggaaaacguggagaagag

SEQ ID NO: 1020131 - RNA, 19 nt, Homo sapiens
  misc_RNA (1)...(19): siRNA sense strand
gcugggcaccaucuccuuu

SEQ ID NO: 1020132 - RNA, 19 nt, Homo sapiens
  misc_RNA (1)...(19): siRNA sense strand
gccacacagccacaagaua

SEQ ID NO: 1020133 - RNA, 19 nt, Homo sapiens
  misc_RNA (1)...(19): siRNA sense strand
ccauugaagaacuguacua

SEQ ID NO: 1020134 - RNA, 19 nt, Homo sapiens
  misc_RNA (1)...(19): siRNA sense strand
ucaccuacuuccaguuguc

SEQ ID NO: 1020135 - RNA, 19 nt, Homo sapiens
  misc_RNA (1)...(19): siRNA sense strand
ccacuucuaccggcagauu

SEQ ID NO: 1020136 - RNA, 19 nt, Homo sapiens
  misc_RNA (1)...(19): siRNA sense strand
auaacccucaggaaacuua

SEQ ID NO: 1020137 - RNA, 19 nt, Homo sapiens
  misc_RNA (1)...(19): siRNA sense strand
ugagaagauacgucacaaa

SEQ ID NO: 1020138 - RNA, 19 nt, Homo sapiens
  misc_RNA (1)...(19): siRNA sense strand
caaagugggacccuaccau

SEQ ID NO: 1020139 - RNA, 19 nt, Homo sapiens
  misc_RNA (1)...(19): siRNA sense strand
ugccaauccugauacuguu

SEQ ID NO: 1020140 - RNA, 19 nt, Homo sapiens
  misc_RNA (1)...(19): siRNA sense strand
gugguugccaauccugaua

SEQ ID NO: 1020141 - RNA, 19 nt, Homo sapiens
  misc_RNA (1)...(19): siRNA sense strand
ugucauuggaggcaucuuu

SEQ ID NO: 1020142 - RNA, 19 nt, Homo sapiens
  misc_RNA (1)...(19): siRNA sense strand
ggcacuggcauuauuguca

SEQ ID NO: 1020143 - RNA, 19 nt, Homo sapiens
  misc_RNA (1)...(19): siRNA sense strand
guucuggugaugacuuuga

SEQ ID NO: 1020144 - RNA, 19 nt, Homo sapiens
  misc_RNA (1)...(19): siRNA sense strand
agaacuguacuacuuugaa

SEQ ID NO: 1020145 - RNA, 19 nt, Homo sapiens
  misc_RNA (1)...(19): siRNA sense strand
acucacugguuaugucuuc

SEQ ID NO: 1020146 - RNA, 19 nt, Homo sapiens
  misc_RNA (1)...(19): siRNA sense strand
gggcaguacagacaguaga

SEQ ID NO: 1020147 - RNA, 19 nt, Homo sapiens
  misc_RNA (1)...(19): siRNA sense strand
ugguacaagucuacuguca

SEQ ID NO: 1020148 - RNA, 19 nt, Homo sapiens
  misc_RNA (1)...(19): siRNA sense strand
uuccauggagaccgaauua

SEQ ID NO: 1020149 - RNA, 19 nt, Homo sapiens
  misc_RNA (1)...(19): siRNA sense strand
gguuacgaccugacgaguu

SEQ ID NO: 1020150 - RNA, 19 nt, Homo sapiens
  misc_RNA (1)...(19): siRNA sense strand
caucuuugccacaguaugg

SEQ ID NO: 1020151 - RNA, 19 nt, Homo sapiens
  misc_RNA (1)...(19): siRNA sense strand
ugacguggaguguggugaa

SEQ ID NO: 1020152 - RNA, 19 nt, Homo sapiens
  misc_RNA (1)...(19): siRNA sense strand
ugaccuggcucgguacaac

SEQ ID NO: 1020153 - RNA, 19 nt, Homo sapiens
  misc_RNA (1)...(19): siRNA sense strand
ggaaaggacucaaauguca

SEQ ID NO: 1020154 - RNA, 19 nt, Homo sapiens
  misc_RNA (1)...(19): siRNA sense strand
aaucagagcucccaaguga

SEQ ID NO: 1020155 - RNA, 19 nt, Homo sapiens
  misc_RNA (1)...(19): siRNA sense strand
gagcagaauucaccagaga

SEQ ID NO: 1020156 - RNA, 19 nt, Homo sapiens
  misc_RNA (1)...(19): siRNA sense strand
gaugagcaauggcaacaaa

SEQ ID NO: 1020157 - RNA, 19 nt, Homo sapiens
  misc_RNA (1)...(19): siRNA sense strand
ucaaguaccugcaggauca

SEQ ID NO: 1020158 - RNA, 19 nt, Homo sapiens
  misc_RNA (1)...(19): siRNA sense strand
gaauacaccuggcgucuac

SEQ ID NO: 1020159 - RNA, 19 nt, Homo sapiens
  misc_RNA (1)...(19): siRNA sense strand
cagaggagcuagugaagga

SEQ ID NO: 1020160 - RNA, 19 nt, Homo sapiens
  misc_RNA (1)...(19): siRNA sense strand
cauccaaggugcacaagaa

SEQ ID NO: 1020161 - RNA, 19 nt, Homo sapiens
  misc_RNA (1)...(19): siRNA sense strand
uggcugagcucacaggaaa

SEQ ID NO: 1020162 - RNA, 19 nt, Homo sapiens
  misc_RNA (1)...(19): siRNA sense strand
agaaugaguugcugaaaca

SEQ ID NO: 1020163 - RNA, 19 nt, Homo sapiens
  misc_RNA (1)...(19): siRNA sense strand
aggaagagcugaagaagca

SEQ ID NO: 1020164 - RNA, 19 nt, Homo sapiens
  misc_RNA (1)...(19): siRNA sense strand
ccaugaagcagcaguauga

SEQ ID NO: 1020165 - RNA, 19 nt, Homo sapiens
  misc_RNA (1)...(19): siRNA sense strand
caacaaggcccuggaggaa

SEQ ID NO: 1020166 - RNA, 19 nt, Homo sapiens
  misc_RNA (1)...(19): siRNA sense strand
gcagaagcagcgugacuuu

SEQ ID NO: 1020167 - RNA, 19 nt, Homo sapiens
  misc_RNA (1)...(19): siRNA sense strand
gagcagcgcaccuccauuc

SEQ ID NO: 1020168 - RNA, 19 nt, Homo sapiens
  misc_RNA (1)...(19): siRNA sense strand
gcauggcccuggaguucaa

SEQ ID NO: 1020169 - RNA, 19 nt, Homo sapiens
  misc_RNA (1)...(19): siRNA sense strand
ccaaggugcacaagaauga

SEQ ID NO: 1020170 - RNA, 19 nt, Homo sapiens
  misc_RNA (1)...(19): siRNA sense strand
ugaaacagcaggugaagau

SEQ ID NO: 1020171 - RNA, 19 nt, Homo sapiens
  misc_RNA (1)...(19): siRNA sense strand
ggaagagucccagauggaa

SEQ ID NO: 1020172 - RNA, 19 nt, Homo sapiens
  misc_RNA (1)...(19): siRNA sense strand
gcagaaggcagaggagcua

SEQ ID NO: 1020173 - RNA, 19 nt, Homo sapiens
  misc_RNA (1)...(19): siRNA sense strand
ugaagaagcaaguggagaa

SEQ ID NO: 1020174 - RNA, 19 nt, Homo sapiens
  misc_RNA (1)...(19): siRNA sense strand
ugaaugaggagaaggaaga

SEQ ID NO: 1020175 - RNA, 19 nt, Homo sapiens
  misc_RNA (1)...(19): siRNA sense strand
caagagaagcccucagaca

SEQ ID NO: 1020176 - RNA, 19 nt, Homo sapiens
  misc_RNA (1)...(19): siRNA sense strand
caggaaaggacucaaaugu

SEQ ID NO: 1020177 - RNA, 19 nt, Homo sapiens
  misc_RNA (1)...(19): siRNA sense strand
ggaauacaccuggcgucua

SEQ ID NO: 1020178 - RNA, 19 nt, Homo sapiens
  misc_RNA (1)...(19): siRNA sense strand
caggagagcguuaccaugu

SEQ ID NO: 1020179 - RNA, 19 nt, Homo sapiens
  misc_RNA (1)...(19): siRNA sense strand
gccaucaucuccaccaaca

SEQ ID NO: 1020180 - RNA, 19 nt, Homo sapiens
  misc_RNA (1)...(19): siRNA sense strand
ccaaggagcugcgccaaaa

SEQ ID NO: 1020181 - RNA, 19 nt, Homo sapiens
  misc_RNA (1)...(19): siRNA sense strand
agaagcagcgugacuuuga

SEQ ID NO: 1020182 - RNA, 19 nt, Homo sapiens
  misc_RNA (1)...(19): siRNA sense strand
ucagacagcagaagaggaa

SEQ ID NO: 1020183 - RNA, 19 nt, Homo sapiens
  misc_RNA (1)...(19): siRNA sense strand
ggagaggcauccgcagcuu

SEQ ID NO: 1020184 - RNA, 19 nt, Homo sapiens
  misc_RNA (1)...(19): siRNA sense strand
gcaagggauaaagauguua

SEQ ID NO: 1020185 - RNA, 19 nt, Homo sapiens
  misc_RNA (1)...(19): siRNA sense strand
cagaaugaguugcugaaac

SEQ ID NO: 1020186 - RNA, 19 nt, Homo sapiens
  misc_RNA (1)...(19): siRNA sense strand
caccuccucugaauuugaa

SEQ ID NO: 1020187 - RNA, 19 nt, Homo sapiens
  misc_RNA (1)...(19): siRNA sense strand
gcaccuccucugaauuuga

SEQ ID NO: 1020188 - RNA, 19 nt, Homo sapiens
  misc_RNA (1)...(19): siRNA sense strand
uggcaccuccucugaauuu

SEQ ID NO: 1020189 - RNA, 19 nt, Homo sapiens
  misc_RNA (1)...(19): siRNA sense strand
ucacaggaaaggacucaaa

SEQ ID NO: 1020190 - RNA, 19 nt, Homo sapiens
  misc_RNA (1)...(19): siRNA sense strand
gaaggaagagcugaagaag

SEQ ID NO: 1020191 - RNA, 19 nt, Homo sapiens
  misc_RNA (1)...(19): siRNA sense strand
gaucgugagcgcaugaaug

SEQ ID NO: 1020192 - RNA, 19 nt, Homo sapiens
  misc_RNA (1)...(19): siRNA sense strand
cagcauuuccgguccauga

SEQ ID NO: 1020193 - RNA, 19 nt, Homo sapiens
  misc_RNA (1)...(19): siRNA sense strand
agaagaaggugaagaugcu

SEQ ID NO: 1020194 - RNA, 19 nt, Homo sapiens
  misc_RNA (1)...(19): siRNA sense strand
auuuggagcucaagaaguu

SEQ ID NO: 1020195 - RNA, 19 nt, Homo sapiens
  misc_RNA (1)...(19): siRNA sense strand
ucagagcucccaagugaug

SEQ ID NO: 1020196 - RNA, 19 nt, Homo sapiens
  misc_RNA (1)...(19): siRNA sense strand
gcuaaaagcauucaaagau

SEQ ID NO: 1020197 - RNA, 19 nt, Homo sapiens
  misc_RNA (1)...(19): siRNA sense strand
gagcuggucacgcagaaug

SEQ ID NO: 1020198 - RNA, 19 nt, Homo sapiens
  misc_RNA (1)...(19): siRNA sense strand
ggaagggacaggcaagaag

SEQ ID NO: 1020199 - RNA, 19 nt, Homo sapiens
  misc_RNA (1)...(19): siRNA sense strand
ggagaacgaggcucugaag

SEQ ID NO: 1020200 - RNA, 19 nt, Homo sapiens
  misc_RNA (1)...(19): siRNA sense strand
ggcaagagaagcccucaga

SEQ ID NO: 1020201 - RNA, 19 nt, Homo sapiens
  misc_RNA (1)...(19): siRNA sense strand
gcagaaugaguugcugaaa

SEQ ID NO: 1020202 - RNA, 19 nt, Homo sapiens
  misc_RNA (1)...(19): siRNA sense strand
gcaugaaugaggagaagga

SEQ ID NO: 1020203 - RNA, 19 nt, Homo sapiens
  misc_RNA (1)...(19): siRNA sense strand
caaaucagagcucccaagu

SEQ ID NO: 1020204 - RNA, 19 nt, Homo sapiens
  misc_RNA (1)...(19): siRNA sense strand
agaaggaagagcugaagaa

SEQ ID NO: 1020205 - RNA, 19 nt, Homo sapiens
  misc_RNA (1)...(19): siRNA sense strand
gagcagcagccaugccaau

SEQ ID NO: 1020206 - RNA, 19 nt, Homo sapiens
  misc_RNA (1)...(19): siRNA sense strand
gcgcaugaaugaggagaag

SEQ ID NO: 1020207 - RNA, 19 nt, Homo sapiens
  misc_RNA (1)...(19): siRNA sense strand
gaagcacugagcauccaaa

SEQ ID NO: 1020208 - RNA, 19 nt, Homo sapiens
  misc_RNA (1)...(19): siRNA sense strand
cagcgugaguaccaggaaa

SEQ ID NO: 1020209 - RNA, 19 nt, Homo sapiens
  misc_RNA (1)...(19): siRNA sense strand
gagaggcauccgcagcuuu

SEQ ID NO: 1020210 - RNA, 19 nt, Homo sapiens
  misc_RNA (1)...(19): siRNA sense strand
gaagcagcgugacuuugac

SEQ ID NO: 1020211 - RNA, 19 nt, Homo sapiens
  misc_RNA (1)...(19): siRNA sense strand
gacagcagcaggcuagugu

SEQ ID NO: 1020212 - RNA, 19 nt, Homo sapiens
  misc_RNA (1)...(19): siRNA sense strand
ugcaagggauaaagauguu

SEQ ID NO: 1020213 - RNA, 19 nt, Homo sapiens
  misc_RNA (1)...(19): siRNA sense strand
ugucaaaugcccagcuaaa

SEQ ID NO: 1020214 - RNA, 19 nt, Homo sapiens
  misc_RNA (1)...(19): siRNA sense strand
gagaaggaagagcugaaga

SEQ ID NO: 1020215 - RNA, 19 nt, Homo sapiens
  misc_RNA (1)...(19): siRNA sense strand
gaaggcagaggagcuagug

SEQ ID NO: 1020216 - RNA, 19 nt, Homo sapiens
  misc_RNA (1)...(19): siRNA sense strand
gcagugggaccagcauuuc

SEQ ID NO: 1020217 - RNA, 19 nt, Homo sapiens
  misc_RNA (1)...(19): siRNA sense strand
cuaaaagcauucaaagaug

SEQ ID NO: 1020218 - RNA, 19 nt, Homo sapiens
  misc_RNA (1)...(19): siRNA sense strand
uaggggagcuuuuggaaga

SEQ ID NO: 1020219 - RNA, 19 nt, Homo sapiens
  misc_RNA (1)...(19): siRNA sense strand
ucaaccgacuggcauccaa

SEQ ID NO: 1020220 - RNA, 19 nt, Homo sapiens
  misc_RNA (1)...(19): siRNA sense strand
guucgaaauccaaaucaga

SEQ ID NO: 1020221 - RNA, 19 nt, Homo sapiens
  misc_RNA (1)...(19): siRNA sense strand
gaggagaaggcaagagaag

SEQ ID NO: 1020222 - RNA, 19 nt, Homo sapiens
  misc_RNA (1)...(19): siRNA sense strand
ccugucaaaugcccagcua

SEQ ID NO: 1020223 - RNA, 19 nt, Homo sapiens
  misc_RNA (1)...(19): siRNA sense strand
gugagcugcuggaagugaa

SEQ ID NO: 1020224 - RNA, 19 nt, Homo sapiens
  misc_RNA (1)...(19): siRNA sense strand
agaaguuguugaugagcaa

SEQ ID NO: 1020225 - RNA, 19 nt, Homo sapiens
  misc_RNA (1)...(19): siRNA sense strand
ccaaguccaagauugaaau

SEQ ID NO: 1020226 - RNA, 19 nt, Homo sapiens
  misc_RNA (1)...(19): siRNA sense strand
cagcagaagaggaaagcaa

SEQ ID NO: 1020227 - RNA, 19 nt, Homo sapiens
  misc_RNA (1)...(19): siRNA sense strand
cagcagcaggcuaguguga

SEQ ID NO: 1020228 - RNA, 19 nt, Homo sapiens
  misc_RNA (1)...(19): siRNA sense strand
ccacagccaggccuacaga

SEQ ID NO: 1020229 - RNA, 19 nt, Homo sapiens
  misc_RNA (1)...(19): siRNA sense strand
ccaguggcaccuccucuga

SEQ ID NO: 1020230 - RNA, 19 nt, Homo sapiens
  misc_RNA (1)...(19): siRNA sense strand
ugcagaagcaggugacuga

SEQ ID NO: 1020231 - RNA, 19 nt, Homo sapiens
  misc_RNA (1)...(19): siRNA sense strand
gagcaauggcaacaaagag

SEQ ID NO: 1020232 - RNA, 19 nt, Homo sapiens
  misc_RNA (1)...(19): siRNA sense strand
gaagaagcaaguggagaag

SEQ ID NO: 1020233 - RNA, 19 nt, Homo sapiens
  misc_RNA (1)...(19): siRNA sense strand
aacagcaggugaagaucuu

SEQ ID NO: 1020234 - RNA, 19 nt, Homo sapiens
  misc_RNA (1)...(19): siRNA sense strand
ggacagcagcaggcuagug

SEQ ID NO: 1020235 - RNA, 19 nt, Homo sapiens
  misc_RNA (1)...(19): siRNA sense strand
gcagcaguaugagcagaag

SEQ ID NO: 1020236 - RNA, 19 nt, Homo sapiens
  misc_RNA (1)...(19): siRNA sense strand
gaucuucgaggaggacuuc

SEQ ID NO: 1020237 - RNA, 19 nt, Homo sapiens
  misc_RNA (1)...(19): siRNA sense strand
uggaggagaccgacaagga

SEQ ID NO: 1020238 - RNA, 19 nt, Homo sapiens
  misc_RNA (1)...(19): siRNA sense strand
ccgagaagaaggugaagau

SEQ ID NO: 1020239 - RNA, 19 nt, Homo sapiens
  misc_RNA (1)...(19): siRNA sense strand
ggagaaggaagagcugaag

SEQ ID NO: 1020240 - RNA, 19 nt, Homo sapiens
  misc_RNA (1)...(19): siRNA sense strand
agaauucccggcugaagga

SEQ ID NO: 1020241 - RNA, 19 nt, Homo sapiens
  misc_RNA (1)...(19): siRNA sense strand
gagcagaagcagcgugacu

SEQ ID NO: 1020242 - RNA, 19 nt, Homo sapiens
  misc_RNA (1)...(19): siRNA sense strand
ugagcaauggcaacaaaga

SEQ ID NO: 1020243 - RNA, 19 nt, Homo sapiens
  misc_RNA (1)...(19): siRNA sense strand
gcagaagaggaaagcaaag

SEQ ID NO: 1020244 - RNA, 19 nt, Homo sapiens
  misc_RNA (1)...(19): siRNA sense strand
caagggauaaagauguuag

SEQ ID NO: 1020245 - RNA, 19 nt, Homo sapiens
  misc_RNA (1)...(19): siRNA sense strand
agaagcaaguggagaagcu

SEQ ID NO: 1020246 - RNA, 19 nt, Homo sapiens
  misc_RNA (1)...(19): siRNA sense strand
gccaaggagcugcgccaaa

SEQ ID NO: 1020247 - RNA, 19 nt, Homo sapiens
  misc_RNA (1)...(19): siRNA sense strand
ugacagcagaggccaagga

SEQ ID NO: 1020248 - RNA, 19 nt, Homo sapiens
  misc_RNA (1)...(19): siRNA sense strand
uggcugauuugcagaagca

SEQ ID NO: 1020249 - RNA, 19 nt, Homo sapiens
  misc_RNA (1)...(19): siRNA sense strand
gagaccacgcugagugugu

SEQ ID NO: 1020250 - RNA, 19 nt, Homo sapiens
  misc_RNA (1)...(19): siRNA sense strand
auucaaagaugaggagaag

SEQ ID NO: 1020251 - RNA, 19 nt, Homo sapiens
  misc_RNA (1)...(19): siRNA sense strand
aaacagcaggugaagaucu

SEQ ID NO: 1020252 - RNA, 19 nt, Homo sapiens
  misc_RNA (1)...(19): siRNA sense strand
gaccacggccagcucuuca

SEQ ID NO: 1020253 - RNA, 19 nt, Homo sapiens
  misc_RNA (1)...(19): siRNA sense strand
gcacgcugcucaucaguaa

SEQ ID NO: 1020254 - RNA, 19 nt, Homo sapiens
  misc_RNA (1)...(19): siRNA sense strand
uggagaggaucaacgugua

SEQ ID NO: 1020255 - RNA, 19 nt, Homo sapiens
  misc_RNA (1)...(19): siRNA sense strand
uuugggagguuaucaguga

SEQ ID NO: 1020256 - RNA, 19 nt, Homo sapiens
  misc_RNA (1)...(19): siRNA sense strand
caagcuggccgucaacaug

SEQ ID NO: 1020257 - RNA, 19 nt, Homo sapiens
  misc_RNA (1)...(19): siRNA sense strand
gcaguucacggccauguuc

SEQ ID NO: 1020258 - RNA, 19 nt, Homo sapiens
  misc_RNA (1)...(19): siRNA sense strand
gcaagaacagcagcuacuu

SEQ ID NO: 1020259 - RNA, 19 nt, Homo sapiens
  misc_RNA (1)...(19): siRNA sense strand
gguuaucagugacgaacau

SEQ ID NO: 1020260 - RNA, 19 nt, Homo sapiens
  misc_RNA (1)...(19): siRNA sense strand
uaucugaguaccagcagua

SEQ ID NO: 1020261 - RNA, 19 nt, Homo sapiens
  misc_RNA (1)...(19): siRNA sense strand
caagaacagcagcuacuuc

SEQ ID NO: 1020262 - RNA, 19 nt, Homo sapiens
  misc_RNA (1)...(19): siRNA sense strand
ggccacaggaggaaauuau

SEQ ID NO: 1020263 - RNA, 19 nt, Homo sapiens
  misc_RNA (1)...(19): siRNA sense strand
gcgagggcauggacgagau

SEQ ID NO: 1020264 - RNA, 19 nt, Homo sapiens
  misc_RNA (1)...(19): siRNA sense strand
gagcucacccagcagaugu

SEQ ID NO: 1020265 - RNA, 19 nt, Homo sapiens
  misc_RNA (1)...(19): siRNA sense strand
ccacaggaggaaauuaugu

SEQ ID NO: 1020266 - RNA, 19 nt, Homo sapiens
  misc_RNA (1)...(19): siRNA sense strand
ccggacaacuucguguuug

SEQ ID NO: 1020267 - RNA, 19 nt, Homo sapiens
  misc_RNA (1)...(19): siRNA sense strand
gcauggacgagauggaguu

SEQ ID NO: 1020268 - RNA, 19 nt, Homo sapiens
  misc_RNA (1)...(19): siRNA sense strand
ggcaacaacugggcaaagg

SEQ ID NO: 1020269 - RNA, 19 nt, Homo sapiens
  misc_RNA (1)...(19): siRNA sense strand
agaauacggaugagaccua

SEQ ID NO: 1020270 - RNA, 19 nt, Homo sapiens
  misc_RNA (1)...(19): siRNA sense strand
cgacaacgaggcacucuac

SEQ ID NO: 1020271 - RNA, 19 nt, Homo sapiens
  misc_RNA (1)...(19): siRNA sense strand
gcgcaucuccgagcaguuc

SEQ ID NO: 1020272 - RNA, 19 nt, Homo sapiens
  misc_RNA (1)...(19): siRNA sense strand
ggagguggacgagcagaug

SEQ ID NO: 1020273 - RNA, 19 nt, Homo sapiens
  misc_RNA (1)...(19): siRNA sense strand
ccagaccgcaucaugaaca

SEQ ID NO: 1020274 - RNA, 19 nt, Homo sapiens
  misc_RNA (1)...(19): siRNA sense strand
gccggacaacuucguguuu

SEQ ID NO: 1020275 - RNA, 19 nt, Homo sapiens
  misc_RNA (1)...(19): siRNA sense strand
ucaccgaggccgagagcaa

SEQ ID NO: 1020276 - RNA, 19 nt, Homo sapiens
  misc_RNA (1)...(19): siRNA sense strand
gcaagcuggccgucaacau

SEQ ID NO: 1020277 - RNA, 19 nt, Homo sapiens
  misc_RNA (1)...(19): siRNA sense strand
ggagaggaucaacguguac

SEQ ID NO: 1020278 - RNA, 19 nt, Homo sapiens
  misc_RNA (1)...(19): siRNA sense strand
ucccagaccgcaucaugaa

SEQ ID NO: 1020279 - RNA, 19 nt, Homo sapiens
  misc_RNA (1)...(19): siRNA sense strand
ggagagcccuucaggaaau

SEQ ID NO: 1020280 - RNA, 19 nt, Homo sapiens
  misc_RNA (1)...(19): siRNA sense strand
ggagaacaaccauuuagua

SEQ ID NO: 1020281 - RNA, 19 nt, Homo sapiens
  misc_RNA (1)...(19): siRNA sense strand
gagaacaaccauuuaguaa

SEQ ID NO: 1020282 - RNA, 19 nt, Homo sapiens
  misc_RNA (1)...(19): siRNA sense strand
uugaggauguugcuauuua

SEQ ID NO: 1020283 - RNA, 19 nt, Homo sapiens
  misc_RNA (1)...(19): siRNA sense strand
acagaaaucaggaaacaua

SEQ ID NO: 1020284 - RNA, 19 nt, Homo sapiens
  misc_RNA (1)...(19): siRNA sense strand
agaaggaacuuuacaagca

SEQ ID NO: 1020285 - RNA, 19 nt, Homo sapiens
  misc_RNA (1)...(19): siRNA sense strand
gaaggaacuuuacaagcau

SEQ ID NO: 1020286 - RNA, 19 nt, Homo sapiens
  misc_RNA (1)...(19): siRNA sense strand
ccaauuagauccugaaagc

SEQ ID NO: 1020287 - RNA, 19 nt, Homo sapiens
  misc_RNA (1)...(19): siRNA sense strand
gcaagggcuuugugaaaca

SEQ ID NO: 1020288 - RNA, 19 nt, Homo sapiens
  misc_RNA (1)...(19): siRNA sense strand
ccaacuguuugcaaugaua

SEQ ID NO: 1020289 - RNA, 19 nt, Homo sapiens
  misc_RNA (1)...(19): siRNA sense strand
ggauguugcuauuuauuuc

SEQ ID NO: 1020290 - RNA, 19 nt, Homo sapiens
  misc_RNA (1)...(19): siRNA sense strand
ucacagaaaucaggaaaca

SEQ ID NO: 1020291 - RNA, 19 nt, Homo sapiens
  misc_RNA (1)...(19): siRNA sense strand
gacaagaacuuuugggaaa

SEQ ID NO: 1020292 - RNA, 19 nt, Homo sapiens
  misc_RNA (1)...(19): siRNA sense strand
ucaaaggaccggacacgua

SEQ ID NO: 1020293 - RNA, 19 nt, Homo sapiens
  misc_RNA (1)...(19): siRNA sense strand
gagaagcaauuaugagacu

SEQ ID NO: 1020294 - RNA, 19 nt, Homo sapiens
  misc_RNA (1)...(19): siRNA sense strand
gaacuuuacaagcauguga

SEQ ID NO: 1020295 - RNA, 19 nt, Homo sapiens
  misc_RNA (1)...(19): siRNA sense strand
auaauuugcuccucuguug

SEQ ID NO: 1020296 - RNA, 19 nt, Homo sapiens
  misc_RNA (1)...(19): siRNA sense strand
gagagaaucacagaaauca

SEQ ID NO: 1020297 - RNA, 19 nt, Homo sapiens
  misc_RNA (1)...(19): siRNA sense strand
gaacgcugacggugaaaug

SEQ ID NO: 1020298 - RNA, 19 nt, Homo sapiens
  misc_RNA (1)...(19): siRNA sense strand
gccaagcaguguaaacuca

SEQ ID NO: 1020299 - RNA, 19 nt, Homo sapiens
  misc_RNA (1)...(19): siRNA sense strand
ugggagaaauucaacaaga

SEQ ID NO: 1020300 - RNA, 19 nt, Homo sapiens
  misc_RNA (1)...(19): siRNA sense strand
gaacuggacauuaagaaaa

SEQ ID NO: 1020301 - RNA, 19 nt, Homo sapiens
  misc_RNA (1)...(19): siRNA sense strand
gcaagggcuucaccagaca

SEQ ID NO: 1020302 - RNA, 19 nt, Homo sapiens
  misc_RNA (1)...(19): siRNA sense strand
gggagaaauucaacaagag

SEQ ID NO: 1020303 - RNA, 19 nt, Homo sapiens
  misc_RNA (1)...(19): siRNA sense strand
ggaaauggagagaaucaca

SEQ ID NO: 1020304 - RNA, 19 nt, Homo sapiens
  misc_RNA (1)...(19): siRNA sense strand
gcagaaggaacuuuacaag

SEQ ID NO: 1020305 - RNA, 19 nt, Homo sapiens
  misc_RNA (1)...(19): siRNA sense strand
ggaaagcuguugggagaac

SEQ ID NO: 1020306 - RNA, 19 nt, Homo sapiens
  misc_RNA (1)...(19): siRNA sense strand
ggagagaaucacagaaauc

SEQ ID NO: 1020307 - RNA, 19 nt, Homo sapiens
  misc_RNA (1)...(19): siRNA sense strand
ccaagugugacaagaguuu

SEQ ID NO: 1020308 - RNA, 19 nt, Homo sapiens
  misc_RNA (1)...(19): siRNA sense strand
gcaagaauggcaggaucua

SEQ ID NO: 1020309 - RNA, 19 nt, Homo sapiens
  misc_RNA (1)...(19): siRNA sense strand
gcacaucagaguacacaca

SEQ ID NO: 1020310 - RNA, 19 nt, Homo sapiens
  misc_RNA (1)...(19): siRNA sense strand
ccggaacgcugacggugaa

SEQ ID NO: 1020311 - RNA, 19 nt, Homo sapiens
  misc_RNA (1)...(19): siRNA sense strand
gaacgcacacgggagagaa

SEQ ID NO: 1020312 - RNA, 19 nt, Homo sapiens
  misc_RNA (1)...(19): siRNA sense strand
gggagagcccuucaggaaa

SEQ ID NO: 1020313 - RNA, 19 nt, Homo sapiens
  misc_RNA (1)...(19): siRNA sense strand
cggcaagggcuuugugaaa

SEQ ID NO: 1020314 - RNA, 19 nt, Homo sapiens
  misc_RNA (1)...(19): siRNA sense strand
ccagagaggccacucaaag

SEQ ID NO: 1020315 - RNA, 19 nt, Homo sapiens
  misc_RNA (1)...(19): siRNA sense strand
ugaggauguugcuauuuau

SEQ ID NO: 1020316 - RNA, 19 nt, Homo sapiens
  misc_RNA (1)...(19): siRNA sense strand
uuacaagcaugugaugaga

SEQ ID NO: 1020317 - RNA, 19 nt, Homo sapiens
  misc_RNA (1)...(19): siRNA sense strand
cauggcagaaggaacuuua

SEQ ID NO: 1020318 - RNA, 19 nt, Homo sapiens
  misc_RNA (1)...(19): siRNA sense strand
gaggauguugcuauuuauu

SEQ ID NO: 1020319 - RNA, 19 nt, Homo sapiens
  misc_RNA (1)...(19): siRNA sense strand
gugaugagaagcaauuaug

SEQ ID NO: 1020320 - RNA, 19 nt, Homo sapiens
  misc_RNA (1)...(19): siRNA sense strand
cagaaaucaggaaacauaa

SEQ ID NO: 1020321 - RNA, 19 nt, Homo sapiens
  misc_RNA (1)...(19): siRNA sense strand
ggcaagggcuuugugaaac

SEQ ID NO: 1020322 - RNA, 19 nt, Homo sapiens
  misc_RNA (1)...(19): siRNA sense strand
acaagcaugugaugagaag

SEQ ID NO: 1020323 - RNA, 19 nt, Homo sapiens
  misc_RNA (1)...(19): siRNA sense strand
cccagugaaucuacccuaa

SEQ ID NO: 1020324 - RNA, 19 nt, Homo sapiens
  misc_RNA (1)...(19): siRNA sense strand
gccagcaggcuaugaauuc

SEQ ID NO: 1020325 - RNA, 19 nt, Homo sapiens
  misc_RNA (1)...(19): siRNA sense strand
gggcuucauuuacaagucu

SEQ ID NO: 1020326 - RNA, 19 nt, Homo sapiens
  misc_RNA (1)...(19): siRNA sense strand
ucagccaacuguuugcaau

SEQ ID NO: 1020327 - RNA, 19 nt, Homo sapiens
  misc_RNA (1)...(19): siRNA sense strand
ugaacuggacauuaagaaa

SEQ ID NO: 1020328 - RNA, 19 nt, Homo sapiens
  misc_RNA (1)...(19): siRNA sense strand
ucucgucucucuagaugau

SEQ ID NO: 1020329 - RNA, 19 nt, Homo sapiens
  misc_RNA (1)...(19): siRNA sense strand
uggagagaaucacagaaau

SEQ ID NO: 1020330 - RNA, 19 nt, Homo sapiens
  misc_RNA (1)...(19): siRNA sense strand
ccagugaaucuacccuaaa

SEQ ID NO: 1020331 - RNA, 19 nt, Homo sapiens
  misc_RNA (1)...(19): siRNA sense strand
aaagccauuuccaauuaga

SEQ ID NO: 1020332 - RNA, 19 nt, Homo sapiens
  misc_RNA (1)...(19): siRNA sense strand
caugugaugagaagcaauu

SEQ ID NO: 1020333 - RNA, 19 nt, Homo sapiens
  misc_RNA (1)...(19): siRNA sense strand
ccagcaggcuaugaauuca

SEQ ID NO: 1020334 - RNA, 19 nt, Homo sapiens
  misc_RNA (1)...(19): siRNA sense strand
gcauuuugauccagguuuu

SEQ ID NO: 1020335 - RNA, 19 nt, Homo sapiens
  misc_RNA (1)...(19): siRNA sense strand
gaugagaagcaauuaugag

SEQ ID NO: 1020336 - RNA, 19 nt, Homo sapiens
  misc_RNA (1)...(19): siRNA sense strand
uccuuuggauccuuuguuu

SEQ ID NO: 1020337 - RNA, 19 nt, Homo sapiens
  misc_RNA (1)...(19): siRNA sense strand
gagagcccuucaggaaaug

SEQ ID NO: 1020338 - RNA, 19 nt, Homo sapiens
  misc_RNA (1)...(19): siRNA sense strand
aagaauggcaggaucuaga

SEQ ID NO: 1020339 - RNA, 19 nt, Homo sapiens
  misc_RNA (1)...(19): siRNA sense strand
gcaaugauagaggccgauu

SEQ ID NO: 1020340 - RNA, 19 nt, Homo sapiens
  misc_RNA (1)...(19): siRNA sense strand
gagcacaucagaguacaca

SEQ ID NO: 1020341 - RNA, 19 nt, Homo sapiens
  misc_RNA (1)...(19): siRNA sense strand
gcccugagugugacaagaa

SEQ ID NO: 1020342 - RNA, 19 nt, Homo sapiens
  misc_RNA (1)...(19): siRNA sense strand
caagcgcuaucgcgugaag

SEQ ID NO: 1020343 - RNA, 19 nt, Homo sapiens
  misc_RNA (1)...(19): siRNA sense strand
gguguggcgugugcgguaa

SEQ ID NO: 1020344 - RNA, 19 nt, Homo sapiens
  misc_RNA (1)...(19): siRNA sense strand
ggaaucccaggucccagaa

SEQ ID NO: 1020345 - RNA, 19 nt, Homo sapiens
  misc_RNA (1)...(19): siRNA sense strand
gcgugaaggccgacaugaa

SEQ ID NO: 1020346 - RNA, 19 nt, Homo sapiens
  misc_RNA (1)...(19): siRNA sense strand
gacgagaagcccuuucagu

SEQ ID NO: 1020347 - RNA, 19 nt, Homo sapiens
  misc_RNA (1)...(19): siRNA sense strand
gcuccucuguugauaugca

SEQ ID NO: 1020348 - RNA, 19 nt, Homo sapiens
  misc_RNA (1)...(19): siRNA sense strand
gaagcaauuaugagacucu

SEQ ID NO: 1020349 - RNA, 19 nt, Homo sapiens
  misc_RNA (1)...(19): siRNA sense strand
aaucccaggucccagaaau

SEQ ID NO: 1020350 - RNA, 19 nt, Homo sapiens
  misc_RNA (1)...(19): siRNA sense strand
cagugaaucuacccuaaaa

SEQ ID NO: 1020351 - RNA, 19 nt, Homo sapiens
  misc_RNA (1)...(19): siRNA sense strand
caggaaauggagagaauca

SEQ ID NO: 1020352 - RNA, 19 nt, Homo sapiens
  misc_RNA (1)...(19): siRNA sense strand
ugaugagaagcaauuauga

SEQ ID NO: 1020353 - RNA, 19 nt, Homo sapiens
  misc_RNA (1)...(19): siRNA sense strand
ggcagaaggaacuuuacaa

SEQ ID NO: 1020354 - RNA, 19 nt, Homo sapiens
  misc_RNA (1)...(19): siRNA sense strand
gggagaacaaccauuuagu

SEQ ID NO: 1020355 - RNA, 19 nt, Homo sapiens
  misc_RNA (1)...(19): siRNA sense strand
ggggagagcccuucaggaa

SEQ ID NO: 1020356 - RNA, 19 nt, Homo sapiens
  misc_RNA (1)...(19): siRNA sense strand
agccaacuguuugcaauga

SEQ ID NO: 1020357 - RNA, 19 nt, Homo sapiens
  misc_RNA (1)...(19): siRNA sense strand
agagaggcccuuccagugu

SEQ ID NO: 1020358 - RNA, 19 nt, Homo sapiens
  misc_RNA (1)...(19): siRNA sense strand
uaaacucacggagcacauu

SEQ ID NO: 1020359 - RNA, 19 nt, Homo sapiens
  misc_RNA (1)...(19): siRNA sense strand
acucucgucucucuagaug

SEQ ID NO: 1020360 - RNA, 19 nt, Homo sapiens
  misc_RNA (1)...(19): siRNA sense strand
cguagggccugggagaaau

SEQ ID NO: 1020361 - RNA, 19 nt, Homo sapiens
  misc_RNA (1)...(19): siRNA sense strand
guagggccugggagaaauu

SEQ ID NO: 1020362 - RNA, 19 nt, Homo sapiens
  misc_RNA (1)...(19): siRNA sense strand
agagaggccacucaaagga

SEQ ID NO: 1020363 - RNA, 19 nt, Homo sapiens
  misc_RNA (1)...(19): siRNA sense strand
uccaaaaccagaacuaaua

SEQ ID NO: 1020364 - RNA, 19 nt, Homo sapiens
  misc_RNA (1)...(19): siRNA sense strand
agagaagccuuuucagugu

SEQ ID NO: 1020365 - RNA, 19 nt, Homo sapiens
  misc_RNA (1)...(19): siRNA sense strand
gaaacacucaaagcucauc

SEQ ID NO: 1020366 - RNA, 19 nt, Homo sapiens
  misc_RNA (1)...(19): siRNA sense strand
uugcuccucuguugauaug

SEQ ID NO: 1020367 - RNA, 19 nt, Homo sapiens
  misc_RNA (1)...(19): siRNA sense strand
cgugaaggccgacaugaag

SEQ ID NO: 1020368 - RNA, 19 nt, Homo sapiens
  misc_RNA (1)...(19): siRNA sense strand
gcaccagagaggccacuca

SEQ ID NO: 1020369 - RNA, 19 nt, Homo sapiens
  misc_RNA (1)...(19): siRNA sense strand
aaauggagagaaucacaga

SEQ ID NO: 1020370 - RNA, 19 nt, Homo sapiens
  misc_RNA (1)...(19): siRNA sense strand
ggagagaagccuuuucagu

SEQ ID NO: 1020371 - RNA, 19 nt, Homo sapiens
  misc_RNA (1)...(19): siRNA sense strand
cagggcuccuccaccacua

SEQ ID NO: 1020372 - RNA, 19 nt, Homo sapiens
  misc_RNA (1)...(19): siRNA sense strand
uucaggaaauggagagaau

SEQ ID NO: 1020373 - RNA, 19 nt, Homo sapiens
  misc_RNA (1)...(19): siRNA sense strand
cauaauuugcuccucuguu

SEQ ID NO: 1020374 - RNA, 19 nt, Homo sapiens
  misc_RNA (1)...(19): siRNA sense strand
aaucacagaaaucaggaaa

SEQ ID NO: 1020375 - RNA, 19 nt, Homo sapiens
  misc_RNA (1)...(19): siRNA sense strand
cuaaaagccauuuccaauu

SEQ ID NO: 1020376 - RNA, 19 nt, Homo sapiens
  misc_RNA (1)...(19): siRNA sense strand
gccaacuguuugcaaugau

SEQ ID NO: 1020377 - RNA, 19 nt, Homo sapiens
  misc_RNA (1)...(19): siRNA sense strand
cagagaggccacucaaagg

SEQ ID NO: 1020378 - RNA, 19 nt, Homo sapiens
  misc_RNA (1)...(19): siRNA sense strand
gcggagcacaucagaguac

SEQ ID NO: 1020379 - RNA, 19 nt, Homo sapiens
  misc_RNA (1)...(19): siRNA sense strand
ggacaaaccuccugacuuu

SEQ ID NO: 1020380 - RNA, 19 nt, Homo sapiens
  misc_RNA (1)...(19): siRNA sense strand
caacagaaguggaugauau

SEQ ID NO: 1020381 - RNA, 19 nt, Homo sapiens
  misc_RNA (1)...(19): siRNA sense strand
gaagagugagccuuaauuu

SEQ ID NO: 1020382 - RNA, 19 nt, Homo sapiens
  misc_RNA (1)...(19): siRNA sense strand
ggaauuaucccucaaagca

SEQ ID NO: 1020383 - RNA, 19 nt, Homo sapiens
  misc_RNA (1)...(19): siRNA sense strand
gaagaggaauugacauagg

SEQ ID NO: 1020384 - RNA, 19 nt, Homo sapiens
  misc_RNA (1)...(19): siRNA sense strand
ggcagaaggaggugaauua

SEQ ID NO: 1020385 - RNA, 19 nt, Homo sapiens
  misc_RNA (1)...(19): siRNA sense strand
gauggaagagugagccuua

SEQ ID NO: 1020386 - RNA, 19 nt, Homo sapiens
  misc_RNA (1)...(19): siRNA sense strand
uaagcagcauguucagaua

SEQ ID NO: 1020387 - RNA, 19 nt, Homo sapiens
  misc_RNA (1)...(19): siRNA sense strand
gaugauauguguuucaacu

SEQ ID NO: 1020388 - RNA, 19 nt, Homo sapiens
  misc_RNA (1)...(19): siRNA sense strand
ggaagagugagccuuaauu

SEQ ID NO: 1020389 - RNA, 19 nt, Homo sapiens
  misc_RNA (1)...(19): siRNA sense strand
caaagagucuggcaauagg

SEQ ID NO: 1020390 - RNA, 19 nt, Homo sapiens
  misc_RNA (1)...(19): siRNA sense strand
gaaaacuccuggauucauu

SEQ ID NO: 1020391 - RNA, 19 nt, Homo sapiens
  misc_RNA (1)...(19): siRNA sense strand
caaaguaacguacacugaa

SEQ ID NO: 1020392 - RNA, 19 nt, Homo sapiens
  misc_RNA (1)...(19): siRNA sense strand
ucaccaggauucugacaaa

SEQ ID NO: 1020393 - RNA, 19 nt, Homo sapiens
  misc_RNA (1)...(19): siRNA sense strand
caugacagucuacaacuua

SEQ ID NO: 1020394 - RNA, 19 nt, Homo sapiens
  misc_RNA (1)...(19): siRNA sense strand
gaaggaauuaucccucaaa

SEQ ID NO: 1020395 - RNA, 19 nt, Homo sapiens
  misc_RNA (1)...(19): siRNA sense strand
ccugauggaugcucuuaaa

SEQ ID NO: 1020396 - RNA, 19 nt, Homo sapiens
  misc_RNA (1)...(19): siRNA sense strand
ggagacggcggaaggcaua

SEQ ID NO: 1020397 - RNA, 19 nt, Homo sapiens
  misc_RNA (1)...(19): siRNA sense strand
gagacuaauucccacaguu

SEQ ID NO: 1020398 - RNA, 19 nt, Homo sapiens
  misc_RNA (1)...(19): siRNA sense strand
agaaggaggugaauuagag

SEQ ID NO: 1020399 - RNA, 19 nt, Homo sapiens
  misc_RNA (1)...(19): siRNA sense strand
gaagaccuccgccuaguuc

SEQ ID NO: 1020400 - RNA, 19 nt, Homo sapiens
  misc_RNA (1)...(19): siRNA sense strand
agaaguggaugauaugugu

SEQ ID NO: 1020401 - RNA, 19 nt, Homo sapiens
  misc_RNA (1)...(19): siRNA sense strand
gguauuuccucgcaacaga

SEQ ID NO: 1020402 - RNA, 19 nt, Homo sapiens
  misc_RNA (1)...(19): siRNA sense strand
gaagucagccuuuuccuaa

SEQ ID NO: 1020403 - RNA, 19 nt, Homo sapiens
  misc_RNA (1)...(19): siRNA sense strand
ggaggugaauuagaguuug

SEQ ID NO: 1020404 - RNA, 19 nt, Homo sapiens
  misc_RNA (1)...(19): siRNA sense strand
gauauguguuucaacuaug

SEQ ID NO: 1020405 - RNA, 19 nt, Homo sapiens
  misc_RNA (1)...(19): siRNA sense strand
ggaggagcuucgcauacaa

SEQ ID NO: 1020406 - RNA, 19 nt, Homo sapiens
  misc_RNA (1)...(19): siRNA sense strand
ccgccuaguucuguuaaua

SEQ ID NO: 1020407 - RNA, 19 nt, Homo sapiens
  misc_RNA (1)...(19): siRNA sense strand
gaaaagagagcgugugaga

SEQ ID NO: 1020408 - RNA, 19 nt, Homo sapiens
  misc_RNA (1)...(19): siRNA sense strand
agagugagccuuaauuuua

SEQ ID NO: 1020409 - RNA, 19 nt, Homo sapiens
  misc_RNA (1)...(19): siRNA sense strand
aaaguaacguacacugaau

SEQ ID NO: 1020410 - RNA, 19 nt, Homo sapiens
  misc_RNA (1)...(19): siRNA sense strand
agaagacacuccugaugga

SEQ ID NO: 1020411 - RNA, 19 nt, Homo sapiens
  misc_RNA (1)...(19): siRNA sense strand
ccgaagaggaauugacaua

SEQ ID NO: 1020412 - RNA, 19 nt, Homo sapiens
  misc_RNA (1)...(19): siRNA sense strand
caagaaauagauacaagga

SEQ ID NO: 1020413 - RNA, 19 nt, Homo sapiens
  misc_RNA (1)...(19): siRNA sense strand
uugcauaucuggcauccaa

SEQ ID NO: 1020414 - RNA, 19 nt, Homo sapiens
  misc_RNA (1)...(19): siRNA sense strand
caacggagcccaggaccaa

SEQ ID NO: 1020415 - RNA, 19 nt, Homo sapiens
  misc_RNA (1)...(19): siRNA sense strand
aaagagagcgugugagaca

SEQ ID NO: 1020416 - RNA, 19 nt, Homo sapiens
  misc_RNA (1)...(19): siRNA sense strand
gaggugaauuagaguuugu

SEQ ID NO: 1020417 - RNA, 19 nt, Homo sapiens
  misc_RNA (1)...(19): siRNA sense strand
caaaaguacucuccgaaga

SEQ ID NO: 1020418 - RNA, 19 nt, Homo sapiens
  misc_RNA (1)...(19): siRNA sense strand
ugagacagcugagagaagu

SEQ ID NO: 1020419 - RNA, 19 nt, Homo sapiens
  misc_RNA (1)...(19): siRNA sense strand
ucaaugcaugcaagaaaua

SEQ ID NO: 1020420 - RNA, 19 nt, Homo sapiens
  misc_RNA (1)...(19): siRNA sense strand
gcauccaaauauccagauu

SEQ ID NO: 1020421 - RNA, 19 nt, Homo sapiens
  misc_RNA (1)...(19): siRNA sense strand
gaaauagauacaaggacaa

SEQ ID NO: 1020422 - RNA, 19 nt, Homo sapiens
  misc_RNA (1)...(19): siRNA sense strand
ccaaaguaacguacacuga

SEQ ID NO: 1020423 - RNA, 19 nt, Homo sapiens
  misc_RNA (1)...(19): siRNA sense strand
ccaaagagucuggcaauag

SEQ ID NO: 1020424 - RNA, 19 nt, Homo sapiens
  misc_RNA (1)...(19): siRNA sense strand
gucacgacauggauugaaa

SEQ ID NO: 1020425 - RNA, 19 nt, Homo sapiens
  misc_RNA (1)...(19): siRNA sense strand
gaugaaaggagugaggaaa

SEQ ID NO: 1020426 - RNA, 19 nt, Homo sapiens
  misc_RNA (1)...(19): siRNA sense strand
gcaacagaaguggaugaua

SEQ ID NO: 1020427 - RNA, 19 nt, Homo sapiens
  misc_RNA (1)...(19): siRNA sense strand
gauuugaagguccagcaua

SEQ ID NO: 1020428 - RNA, 19 nt, Homo sapiens
  misc_RNA (1)...(19): siRNA sense strand
cgagaaaacccauaacauu

SEQ ID NO: 1020429 - RNA, 19 nt, Homo sapiens
  misc_RNA (1)...(19): siRNA sense strand
uaacguacacugaauucug

SEQ ID NO: 1020430 - RNA, 19 nt, Homo sapiens
  misc_RNA (1)...(19): siRNA sense strand
ccaugacagucuacaacuu

SEQ ID NO: 1020431 - RNA, 19 nt, Homo sapiens
  misc_RNA (1)...(19): siRNA sense strand
cccaaagagucuggcaaua

SEQ ID NO: 1020432 - RNA, 19 nt, Homo sapiens
  misc_RNA (1)...(19): siRNA sense strand
acaaugagaugggccuuag

SEQ ID NO: 1020433 - RNA, 19 nt, Homo sapiens
  misc_RNA (1)...(19): siRNA sense strand
gaagguccagcauaaacga

SEQ ID NO: 1020434 - RNA, 19 nt, Homo sapiens
  misc_RNA (1)...(19): siRNA sense strand
aaucaaugcaugcaagaaa

SEQ ID NO: 1020435 - RNA, 19 nt, Homo sapiens
  misc_RNA (1)...(19): siRNA sense strand
uaucuggcauccaaauauc

SEQ ID NO: 1020436 - RNA, 19 nt, Homo sapiens
  misc_RNA (1)...(19): siRNA sense strand
gagaaaacccauaacauuc

SEQ ID NO: 1020437 - RNA, 19 nt, Homo sapiens
  misc_RNA (1)...(19): siRNA sense strand
uuaugaugaugucacagua

SEQ ID NO: 1020438 - RNA, 19 nt, Homo sapiens
  misc_RNA (1)...(19): siRNA sense strand
ggugaauuagaguuuguua

SEQ ID NO: 1020439 - RNA, 19 nt, Homo sapiens
  misc_RNA (1)...(19): siRNA sense strand
guaccaucaccaccaagua

SEQ ID NO: 1020440 - RNA, 19 nt, Homo sapiens
  misc_RNA (1)...(19): siRNA sense strand
ggauucauuuaaggagaaa

SEQ ID NO: 1020441 - RNA, 19 nt, Homo sapiens
  misc_RNA (1)...(19): siRNA sense strand
aaacuccuggauucauuua

SEQ ID NO: 1020442 - RNA, 19 nt, Homo sapiens
  misc_RNA (1)...(19): siRNA sense strand
uaccaucaccaccaaguaa

SEQ ID NO: 1020443 - RNA, 19 nt, Homo sapiens
  misc_RNA (1)...(19): siRNA sense strand
gcagcauguucagauaaau

SEQ ID NO: 1020444 - RNA, 19 nt, Homo sapiens
  misc_RNA (1)...(19): siRNA sense strand
auuugaagguccagcauaa

SEQ ID NO: 1020445 - RNA, 19 nt, Homo sapiens
  misc_RNA (1)...(19): siRNA sense strand
ggccuuagcuuggaguuuu

SEQ ID NO: 1020446 - RNA, 19 nt, Homo sapiens
  misc_RNA (1)...(19): siRNA sense strand
gacaaugagaugggccuua

SEQ ID NO: 1020447 - RNA, 19 nt, Homo sapiens
  misc_RNA (1)...(19): siRNA sense strand
gcagaaggaggugaauuag

SEQ ID NO: 1020448 - RNA, 19 nt, Homo sapiens
  misc_RNA (1)...(19): siRNA sense strand
agacucaacuauauucacu

SEQ ID NO: 1020449 - RNA, 19 nt, Homo sapiens
  misc_RNA (1)...(19): siRNA sense strand
agauuaagaugguauagcu

SEQ ID NO: 1020450 - RNA, 19 nt, Homo sapiens
  misc_RNA (1)...(19): siRNA sense strand
gcauaucuggcauccaaau

SEQ ID NO: 1020451 - RNA, 19 nt, Homo sapiens
  misc_RNA (1)...(19): siRNA sense strand
cauaucuggcauccaaaua

SEQ ID NO: 1020452 - RNA, 19 nt, Homo sapiens
  misc_RNA (1)...(19): siRNA sense strand
gguccagcauaaacgaguu

SEQ ID NO: 1020453 - RNA, 19 nt, Homo sapiens
  misc_RNA (1)...(19): siRNA sense strand
ugaaggaauuaucccucaa

SEQ ID NO: 1020454 - RNA, 19 nt, Homo sapiens
  misc_RNA (1)...(19): siRNA sense strand
gcugcaugcugggaaagaa

SEQ ID NO: 1020455 - RNA, 19 nt, Homo sapiens
  misc_RNA (1)...(19): siRNA sense strand
caggaggcaucacagagau

SEQ ID NO: 1020456 - RNA, 19 nt, Homo sapiens
  misc_RNA (1)...(19): siRNA sense strand
uauauucacuggguagaag

SEQ ID NO: 1020457 - RNA, 19 nt, Homo sapiens
  misc_RNA (1)...(19): siRNA sense strand
uggauucauuuaaggagaa

SEQ ID NO: 1020458 - RNA, 19 nt, Homo sapiens
  misc_RNA (1)...(19): siRNA sense strand
gauaaucuaugacuuuugc

SEQ ID NO: 1020459 - RNA, 19 nt, Homo sapiens
  misc_RNA (1)...(19): siRNA sense strand
cguccgugaugaaggaauu

SEQ ID NO: 1020460 - RNA, 19 nt, Homo sapiens
  misc_RNA (1)...(19): siRNA sense strand
uaaaucaaugcaugcaaga

SEQ ID NO: 1020461 - RNA, 19 nt, Homo sapiens
  misc_RNA (1)...(19): siRNA sense strand
uggugaaggugccacagaa

SEQ ID NO: 1020462 - RNA, 19 nt, Homo sapiens
  misc_RNA (1)...(19): siRNA sense strand
gaauuaucccucaaagcau

SEQ ID NO: 1020463 - RNA, 19 nt, Homo sapiens
  misc_RNA (1)...(19): siRNA sense strand
acaagggguucccaaagua

SEQ ID NO: 1020464 - RNA, 19 nt, Homo sapiens
  misc_RNA (1)...(19): siRNA sense strand
cagaaggaggugaauuaga

SEQ ID NO: 1020465 - RNA, 19 nt, Homo sapiens
  misc_RNA (1)...(19): siRNA sense strand
uggaugauauguguuucaa

SEQ ID NO: 1020466 - RNA, 19 nt, Homo sapiens
  misc_RNA (1)...(19): siRNA sense strand
auagaaaacuccuggauuc

SEQ ID NO: 1020467 - RNA, 19 nt, Homo sapiens
  misc_RNA (1)...(19): siRNA sense strand
gacguguacucuccuaagg

SEQ ID NO: 1020468 - RNA, 19 nt, Homo sapiens
  misc_RNA (1)...(19): siRNA sense strand
gaaggcauagucguuguca

SEQ ID NO: 1020469 - RNA, 19 nt, Homo sapiens
  misc_RNA (1)...(19): siRNA sense strand
gcgaagaaaauuagagaaa

SEQ ID NO: 1020470 - RNA, 19 nt, Homo sapiens
  misc_RNA (1)...(19): siRNA sense strand
acaguaccaucaccaccaa

SEQ ID NO: 1020471 - RNA, 19 nt, Homo sapiens
  misc_RNA (1)...(19): siRNA sense strand
aacguacacugaauucugu

SEQ ID NO: 1020472 - RNA, 19 nt, Homo sapiens
  misc_RNA (1)...(19): siRNA sense strand
aggaggagcuucgcauaca

SEQ ID NO: 1020473 - RNA, 19 nt, Homo sapiens
  misc_RNA (1)...(19): siRNA sense strand
gccuaguucuguuaauaca

SEQ ID NO: 1020474 - RNA, 19 nt, Homo sapiens
  misc_RNA (1)...(19): siRNA sense strand
gaaggugccacagaagaca

SEQ ID NO: 1020475 - RNA, 19 nt, Homo sapiens
  misc_RNA (1)...(19): siRNA sense strand
gugaaggugccacagaaga

SEQ ID NO: 1020476 - RNA, 19 nt, Homo sapiens
  misc_RNA (1)...(19): siRNA sense strand
uguggaacagaauaacuua

SEQ ID NO: 1020477 - RNA, 19 nt, Homo sapiens
  misc_RNA (1)...(19): siRNA sense strand
ggaggcaucacagagauca

SEQ ID NO: 1020478 - RNA, 19 nt, Homo sapiens
  misc_RNA (1)...(19): siRNA sense strand
gauaaaucuggauggaaga

SEQ ID NO: 1020479 - RNA, 19 nt, Homo sapiens
  misc_RNA (1)...(19): siRNA sense strand
acacgacccuggaacauuc

SEQ ID NO: 1020480 - RNA, 19 nt, Homo sapiens
  misc_RNA (1)...(19): siRNA sense strand
gcuacaaccagcugaauga

SEQ ID NO: 1020481 - RNA, 19 nt, Homo sapiens
  misc_RNA (1)...(19): siRNA sense strand
caaagccaccuaugacaug

SEQ ID NO: 1020482 - RNA, 19 nt, Homo sapiens
  misc_RNA (1)...(19): siRNA sense strand
gcaaagccaccuaugacau

SEQ ID NO: 1020483 - RNA, 19 nt, Homo sapiens
  misc_RNA (1)...(19): siRNA sense strand
caacagcaaagccaccuau

SEQ ID NO: 1020484 - RNA, 19 nt, Homo sapiens
  misc_RNA (1)...(19): siRNA sense strand
ugacggagcccuacaacuc

SEQ ID NO: 1020485 - RNA, 19 nt, Homo sapiens
  misc_RNA (1)...(19): siRNA sense strand
cugcagggcuuccucaucu

SEQ ID NO: 1020486 - RNA, 19 nt, Homo sapiens
  misc_RNA (1)...(19): siRNA sense strand
ccuggaacauucugacugu

SEQ ID NO: 1020487 - RNA, 19 nt, Homo sapiens
  misc_RNA (1)...(19): siRNA sense strand
guucgugucucugcucaug

SEQ ID NO: 1020488 - RNA, 19 nt, Homo sapiens
  misc_RNA (1)...(19): siRNA sense strand
gcucuggguucgugucucu

SEQ ID NO: 1020489 - RNA, 19 nt, Homo sapiens
  misc_RNA (1)...(19): siRNA sense strand
aagcuggaguuugccauuu

SEQ ID NO: 1020490 - RNA, 19 nt, Homo sapiens
  misc_RNA (1)...(19): siRNA sense strand
cagaucguguccuccauca

SEQ ID NO: 1020491 - RNA, 19 nt, Homo sapiens
  misc_RNA (1)...(19): siRNA sense strand
acagcaaagccaccuauga

SEQ ID NO: 1020492 - RNA, 19 nt, Homo sapiens
  misc_RNA (1)...(19): siRNA sense strand
gcagggcuuccucaucuuc

SEQ ID NO: 1020493 - RNA, 19 nt, Homo sapiens
  misc_RNA (1)...(19): siRNA sense strand
caagcuggaguuugccauu

SEQ ID NO: 1020494 - RNA, 19 nt, Homo sapiens
  misc_RNA (1)...(19): siRNA sense strand
caaccuggacaucgagugu

SEQ ID NO: 1020495 - RNA, 19 nt, Homo sapiens
  misc_RNA (1)...(19): siRNA sense strand
cagcaaagccaccuaugac

SEQ ID NO: 1020496 - RNA, 19 nt, Homo sapiens
  misc_RNA (1)...(19): siRNA sense strand
ccagcugaaugaccaagca

SEQ ID NO: 1020497 - RNA, 19 nt, Homo sapiens
  misc_RNA (1)...(19): siRNA sense strand
ccucaucuuccacagcuuu

SEQ ID NO: 1020498 - RNA, 19 nt, Homo sapiens
  misc_RNA (1)...(19): siRNA sense strand
ucgugucucugcucaugaa

SEQ ID NO: 1020499 - RNA, 19 nt, Homo sapiens
  misc_RNA (1)...(19): siRNA sense strand
ugaaugaccaagcagaucu

SEQ ID NO: 1020500 - RNA, 19 nt, Homo sapiens
  misc_RNA (1)...(19): siRNA sense strand
cuucauagucaacagcaaa

SEQ ID NO: 1020501 - RNA, 19 nt, Homo sapiens
  misc_RNA (1)...(19): siRNA sense strand
gcugaaugaccaagcagau

SEQ ID NO: 1020502 - RNA, 19 nt, Homo sapiens
  misc_RNA (1)...(19): siRNA sense strand
aaagccaccuaugacaugu

SEQ ID NO: 1020503 - RNA, 19 nt, Homo sapiens
  misc_RNA (1)...(19): siRNA sense strand
gauggaaucuaccucauua

SEQ ID NO: 1020504 - RNA, 19 nt, Homo sapiens
  misc_RNA (1)...(19): siRNA sense strand
gaaucuaccucauuaaaga

SEQ ID NO: 1020505 - RNA, 19 nt, Homo sapiens
  misc_RNA (1)...(19): siRNA sense strand
gcaaaccucuccuuaucga

SEQ ID NO: 1020506 - RNA, 19 nt, Homo sapiens
  misc_RNA (1)...(19): siRNA sense strand
gcacuuaaccaacuauuca

SEQ ID NO: 1020507 - RNA, 19 nt, Homo sapiens
  misc_RNA (1)...(19): siRNA sense strand
ucaagaaggucuggucuga

SEQ ID NO: 1020508 - RNA, 19 nt, Homo sapiens
  misc_RNA (1)...(19): siRNA sense strand
ggucuggucugacaucauc

SEQ ID NO: 1020509 - RNA, 19 nt, Homo sapiens
  misc_RNA (1)...(19): siRNA sense strand
cugcaaaccucuccuuauc

SEQ ID NO: 1020510 - RNA, 19 nt, Homo sapiens
  misc_RNA (1)...(19): siRNA sense strand
uuaaccaacuauucacuga

SEQ ID NO: 1020511 - RNA, 19 nt, Homo sapiens
  misc_RNA (1)...(19): siRNA sense strand
cagcggugguccaggagua

SEQ ID NO: 1020512 - RNA, 19 nt, Homo sapiens
  misc_RNA (1)...(19): siRNA sense strand
aagaaggucuggucugaca

SEQ ID NO: 1020513 - RNA, 19 nt, Homo sapiens
  misc_RNA (1)...(19): siRNA sense strand
ggaaucuaccucauuaaag

SEQ ID NO: 1020514 - RNA, 19 nt, Homo sapiens
  misc_RNA (1)...(19): siRNA sense strand
cuccagagcucaaagucuu

SEQ ID NO: 1020515 - RNA, 19 nt, Homo sapiens
  misc_RNA (1)...(19): siRNA sense strand
caaagucuucuaccaguca

SEQ ID NO: 1020516 - RNA, 19 nt, Homo sapiens
  misc_RNA (1)...(19): siRNA sense strand
ucaucuccguggugauuaa

SEQ ID NO: 1020517 - RNA, 19 nt, Homo sapiens
  misc_RNA (1)...(19): siRNA sense strand
gauauucgucuguaugucu

SEQ ID NO: 1020518 - RNA, 19 nt, Homo sapiens
  misc_RNA (1)...(19): siRNA sense strand
uggaaucuaccucauuaaa

SEQ ID NO: 1020519 - RNA, 19 nt, Homo sapiens
  misc_RNA (1)...(19): siRNA sense strand
aaaccugcaccgcaucuuu

SEQ ID NO: 1020520 - RNA, 19 nt, Homo sapiens
  misc_RNA (1)...(19): siRNA sense strand
aagacggacucucuagguu

SEQ ID NO: 1020521 - RNA, 19 nt, Homo sapiens
  misc_RNA (1)...(19): siRNA sense strand
gaaggucuggucugacauc

SEQ ID NO: 1020522 - RNA, 19 nt, Homo sapiens
  misc_RNA (1)...(19): siRNA sense strand
ccuuagagauuuauauagc

SEQ ID NO: 1020523 - RNA, 19 nt, Homo sapiens
  misc_RNA (1)...(19): siRNA sense strand
aaccugcaccgcaucuuua

SEQ ID NO: 1020524 - RNA, 19 nt, Homo sapiens
  misc_RNA (1)...(19): siRNA sense strand
agacggacucucuagguuu

SEQ ID NO: 1020525 - RNA, 19 nt, Homo sapiens
  misc_RNA (1)...(19): siRNA sense strand
uaucgacaagcucaaguuu

SEQ ID NO: 1020526 - RNA, 19 nt, Homo sapiens
  misc_RNA (1)...(19): siRNA sense strand
ccacagcggcaacuucauc

SEQ ID NO: 1020527 - RNA, 19 nt, Homo sapiens
  misc_RNA (1)...(19): siRNA sense strand
ccaaagacggacucucuag

SEQ ID NO: 1020528 - RNA, 19 nt, Homo sapiens
  misc_RNA (1)...(19): siRNA sense strand
gacggacucucuagguuuu

SEQ ID NO: 1020529 - RNA, 19 nt, Homo sapiens
  misc_RNA (1)...(19): siRNA sense strand
gccaaagacggacucucua

SEQ ID NO: 1020530 - RNA, 19 nt, Homo sapiens
  misc_RNA (1)...(19): siRNA sense strand
ucagggugauggaaucuac

SEQ ID NO: 1020531 - RNA, 19 nt, Homo sapiens
  misc_RNA (1)...(19): siRNA sense strand
ugauggaaucuaccucauu

SEQ ID NO: 1020532 - RNA, 19 nt, Homo sapiens
  misc_RNA (1)...(19): siRNA sense strand
cuguaugucuuacucaagu

SEQ ID NO: 1020533 - RNA, 19 nt, Homo sapiens
  misc_RNA (1)...(19): siRNA sense strand
aaagacggacucucuaggu

SEQ ID NO: 1020534 - RNA, 19 nt, Homo sapiens
  misc_RNA (1)...(19): siRNA sense strand
uuuaugcacuuaaccaacu

SEQ ID NO: 1020535 - RNA, 19 nt, Homo sapiens
  misc_RNA (1)...(19): siRNA sense strand
gugauggaaucuaccucau

SEQ ID NO: 1020536 - RNA, 19 nt, Homo sapiens
  misc_RNA (1)...(19): siRNA sense strand
ccaggaguacaucugcaaa

SEQ ID NO: 1020537 - RNA, 19 nt, Homo sapiens
  misc_RNA (1)...(19): siRNA sense strand
uuaugcacuuaaccaacua

SEQ ID NO: 1020538 - RNA, 19 nt, Homo sapiens
  misc_RNA (1)...(19): siRNA sense strand
gauggaaucuaccucauua

SEQ ID NO: 1020539 - RNA, 19 nt, Homo sapiens
  misc_RNA (1)...(19): siRNA sense strand
gaaucuaccucauuaaaga

SEQ ID NO: 1020540 - RNA, 19 nt, Homo sapiens
  misc_RNA (1)...(19): siRNA sense strand
gcaaaccucuccuuaucga

SEQ ID NO: 1020541 - RNA, 19 nt, Homo sapiens
  misc_RNA (1)...(19): siRNA sense strand
gcacuuaaccaacuauuca

SEQ ID NO: 1020542 - RNA, 19 nt, Homo sapiens
  misc_RNA (1)...(19): siRNA sense strand
ucaagaaggucuggucuga

SEQ ID NO: 1020543 - RNA, 19 nt, Homo sapiens
  misc_RNA (1)...(19): siRNA sense strand
ucacgacaaugacauauuc

SEQ ID NO: 1020544 - RNA, 19 nt, Homo sapiens
  misc_RNA (1)...(19): siRNA sense strand
ggucuggucugacaucauc

SEQ ID NO: 1020545 - RNA, 19 nt, Homo sapiens
  misc_RNA (1)...(19): siRNA sense strand
gcgcuugccuugugacauc

SEQ ID NO: 1020546 - RNA, 19 nt, Homo sapiens
  misc_RNA (1)...(19): siRNA sense strand
cugcaaaccucuccuuauc

SEQ ID NO: 1020547 - RNA, 19 nt, Homo sapiens
  misc_RNA (1)...(19): siRNA sense strand
uuaaccaacuauucacuga

SEQ ID NO: 1020548 - RNA, 19 nt, Homo sapiens
  misc_RNA (1)...(19): siRNA sense strand
cagcggugguccaggagua

SEQ ID NO: 1020549 - RNA, 19 nt, Homo sapiens
  misc_RNA (1)...(19): siRNA sense strand
ggcauggaguuucauuuca

SEQ ID NO: 1020550 - RNA, 19 nt, Homo sapiens
  misc_RNA (1)...(19): siRNA sense strand
aagaaggucuggucugaca

SEQ ID NO: 1020551 - RNA, 19 nt, Homo sapiens
  misc_RNA (1)...(19): siRNA sense strand
cuacuggcauggaguuuca

SEQ ID NO: 1020552 - RNA, 19 nt, Homo sapiens
  misc_RNA (1)...(19): siRNA sense strand
ggaaucuaccucauuaaag

SEQ ID NO: 1020553 - RNA, 19 nt, Homo sapiens
  misc_RNA (1)...(19): siRNA sense strand
cuccagagcucaaagucuu

SEQ ID NO: 1020554 - RNA, 19 nt, Homo sapiens
  misc_RNA (1)...(19): siRNA sense strand
cauauucuccggucaagug

SEQ ID NO: 1020555 - RNA, 19 nt, Homo sapiens
  misc_RNA (1)...(19): siRNA sense strand
caaagucuucuaccaguca

SEQ ID NO: 1020556 - RNA, 19 nt, Homo sapiens
  misc_RNA (1)...(19): siRNA sense strand
ucaucuccguggugauuaa

SEQ ID NO: 1020557 - RNA, 19 nt, Homo sapiens
  misc_RNA (1)...(19): siRNA sense strand
ccggucaagugaacaaguu

SEQ ID NO: 1020558 - RNA, 19 nt, Homo sapiens
  misc_RNA (1)...(19): siRNA sense strand
gauauucgucuguaugucu

SEQ ID NO: 1020559 - RNA, 19 nt, Homo sapiens
  misc_RNA (1)...(19): siRNA sense strand
gcauggaguuucauuucac

SEQ ID NO: 1020560 - RNA, 19 nt, Homo sapiens
  misc_RNA (1)...(19): siRNA sense strand
aaaccugcaccgcaucuuu

SEQ ID NO: 1020561 - RNA, 19 nt, Homo sapiens
  misc_RNA (1)...(19): siRNA sense strand
uggaaucuaccucauuaaa

SEQ ID NO: 1020562 - RNA, 19 nt, Homo sapiens
  misc_RNA (1)...(19): siRNA sense strand
gaguuucauuucacgacaa

SEQ ID NO: 1020563 - RNA, 19 nt, Homo sapiens
  misc_RNA (1)...(19): siRNA sense strand
gaaggucuggucugacauc

SEQ ID NO: 1020564 - RNA, 19 nt, Homo sapiens
  misc_RNA (1)...(19): siRNA sense strand
aagacggacucucuagguu

SEQ ID NO: 1020565 - RNA, 19 nt, Homo sapiens
  misc_RNA (1)...(19): siRNA sense strand
ccuuagagauuuauauagc

SEQ ID NO: 1020566 - RNA, 19 nt, Homo sapiens
  misc_RNA (1)...(19): siRNA sense strand
aaccugcaccgcaucuuua

SEQ ID NO: 1020567 - RNA, 19 nt, Homo sapiens
  misc_RNA (1)...(19): siRNA sense strand
agacggacucucuagguuu

SEQ ID NO: 1020568 - RNA, 19 nt, Homo sapiens
  misc_RNA (1)...(19): siRNA sense strand
uaucgacaagcucaaguuu

SEQ ID NO: 1020569 - RNA, 19 nt, Homo sapiens
  misc_RNA (1)...(19): siRNA sense strand
ccacagcggcaacuucauc

SEQ ID NO: 1020570 - RNA, 19 nt, Homo sapiens
  misc_RNA (1)...(19): siRNA sense strand
ccaaagacggacucucuag

SEQ ID NO: 1020571 - RNA, 19 nt, Homo sapiens
  misc_RNA (1)...(19): siRNA sense strand
ggaacacccagguccuuca

SEQ ID NO: 1020572 - RNA, 19 nt, Homo sapiens
  misc_RNA (1)...(19): siRNA sense strand
gacggacucucuagguuuu

SEQ ID NO: 1020573 - RNA, 19 nt, Homo sapiens
  misc_RNA (1)...(19): siRNA sense strand
gccaaagacggacucucua

SEQ ID NO: 1020574 - RNA, 19 nt, Homo sapiens
  misc_RNA (1)...(19): siRNA sense strand
ucagggugauggaaucuac

SEQ ID NO: 1020575 - RNA, 19 nt, Homo sapiens
  misc_RNA (1)...(19): siRNA sense strand
gacauauucuccggucaag

SEQ ID NO: 1020576 - RNA, 19 nt, Homo sapiens
  misc_RNA (1)...(19): siRNA sense strand
ugauggaaucuaccucauu

SEQ ID NO: 1020577 - RNA, 19 nt, Homo sapiens
  misc_RNA (1)...(19): siRNA sense strand
cuguaugucuuacucaagu

SEQ ID NO: 1020578 - RNA, 19 nt, Homo sapiens
  misc_RNA (1)...(19): siRNA sense strand
uggcauggaguuucauuuc

SEQ ID NO: 1020579 - RNA, 19 nt, Homo sapiens
  misc_RNA (1)...(19): siRNA sense strand
gugauggaaucuaccucau

SEQ ID NO: 1020580 - RNA, 19 nt, Homo sapiens
  misc_RNA (1)...(19): siRNA sense strand
uuuaugcacuuaaccaacu

SEQ ID NO: 1020581 - RNA, 19 nt, Homo sapiens
  misc_RNA (1)...(19): siRNA sense strand
aaagacggacucucuaggu

SEQ ID NO: 1020582 - RNA, 19 nt, Homo sapiens
  misc_RNA (1)...(19): siRNA sense strand
ccaggaguacaucugcaaa

SEQ ID NO: 1020583 - RNA, 19 nt, Homo sapiens
  misc_RNA (1)...(19): siRNA sense strand
gaacacccagguccuucag

SEQ ID NO: 1020584 - RNA, 19 nt, Homo sapiens
  misc_RNA (1)...(19): siRNA sense strand
uuaugcacuuaaccaacua

SEQ ID NO: 1020585 - RNA, 19 nt, Homo sapiens
  misc_RNA (1)...(19): siRNA sense strand
ggaaagguaucagcaguug

SEQ ID NO: 1020586 - RNA, 19 nt, Homo sapiens
  misc_RNA (1)...(19): siRNA sense strand
agaaagaaaugguggugua

SEQ ID NO: 1020587 - RNA, 19 nt, Homo sapiens
  misc_RNA (1)...(19): siRNA sense strand
ccagucagcugaaagaaga

SEQ ID NO: 1020588 - RNA, 19 nt, Homo sapiens
  misc_RNA (1)...(19): siRNA sense strand
gcgaauguauggagacuau

SEQ ID NO: 1020589 - RNA, 19 nt, Homo sapiens
  misc_RNA (1)...(19): siRNA sense strand
caacagaaacagcucuuaa

SEQ ID NO: 1020590 - RNA, 19 nt, Homo sapiens
  misc_RNA (1)...(19): siRNA sense strand
ggagguagcgcaaguugaa

SEQ ID NO: 1020591 - RNA, 19 nt, Homo sapiens
  misc_RNA (1)...(19): siRNA sense strand
ggagugggcugugaucuuc

SEQ ID NO: 1020592 - RNA, 19 nt, Homo sapiens
  misc_RNA (1)...(19): siRNA sense strand
gaaccuaccaggaaacuuc

SEQ ID NO: 1020593 - RNA, 19 nt, Homo sapiens
  misc_RNA (1)...(19): siRNA sense strand
gaaggaggcucuuuuggaa

SEQ ID NO: 1020594 - RNA, 19 nt, Homo sapiens
  misc_RNA (1)...(19): siRNA sense strand
gaacucagccuuggcauca

SEQ ID NO: 1020595 - RNA, 19 nt, Homo sapiens
  misc_RNA (1)...(19): siRNA sense strand
caaagcagguuggacuauu

SEQ ID NO: 1020596 - RNA, 19 nt, Homo sapiens
  misc_RNA (1)...(19): siRNA sense strand
agaaacagcucuuaauacu

SEQ ID NO: 1020597 - RNA, 19 nt, Homo sapiens
  misc_RNA (1)...(19): siRNA sense strand
gaaauugugaugccuucua

SEQ ID NO: 1020598 - RNA, 19 nt, Homo sapiens
  misc_RNA (1)...(19): siRNA sense strand
uagaugacauggugcauug

SEQ ID NO: 1020599 - RNA, 19 nt, Homo sapiens
  misc_RNA (1)...(19): siRNA sense strand
ugaaagaagagaugaacua

SEQ ID NO: 1020600 - RNA, 19 nt, Homo sapiens
  misc_RNA (1)...(19): siRNA sense strand
aaagcagguuggacuauuu

SEQ ID NO: 1020601 - RNA, 19 nt, Homo sapiens
  misc_RNA (1)...(19): siRNA sense strand
acagaaacagcucuuaaua

SEQ ID NO: 1020602 - RNA, 19 nt, Homo sapiens
  misc_RNA (1)...(19): siRNA sense strand
aagaagagaugaacuacau

SEQ ID NO: 1020603 - RNA, 19 nt, Homo sapiens
  misc_RNA (1)...(19): siRNA sense strand
gaccguaccuccugagagu

SEQ ID NO: 1020604 - RNA, 19 nt, Homo sapiens
  misc_RNA (1)...(19): siRNA sense strand
aggcaggacucgugaaauu

SEQ ID NO: 1020605 - RNA, 19 nt, Homo sapiens
  misc_RNA (1)...(19): siRNA sense strand
cauuaaggaucaaaucaga

SEQ ID NO: 1020606 - RNA, 19 nt, Homo sapiens
  misc_RNA (1)...(19): siRNA sense strand
gaauguauggagacuauga

SEQ ID NO: 1020607 - RNA, 19 nt, Homo sapiens
  misc_RNA (1)...(19): siRNA sense strand
ggaguuaaccaugaagaaa

SEQ ID NO: 1020608 - RNA, 19 nt, Homo sapiens
  misc_RNA (1)...(19): siRNA sense strand
aggaguaucuggagaauca

SEQ ID NO: 1020609 - RNA, 19 nt, Homo sapiens
  misc_RNA (1)...(19): siRNA sense strand
gagaugagacagaagauuc

SEQ ID NO: 1020610 - RNA, 19 nt, Homo sapiens
  misc_RNA (1)...(19): siRNA sense strand
aggagaagcugcaggaaga

SEQ ID NO: 1020611 - RNA, 19 nt, Homo sapiens
  misc_RNA (1)...(19): siRNA sense strand
gaagaaaacucugacuuag

SEQ ID NO: 1020612 - RNA, 19 nt, Homo sapiens
  misc_RNA (1)...(19): siRNA sense strand
ugaaaugucuggggaguua

SEQ ID NO: 1020613 - RNA, 19 nt, Homo sapiens
  misc_RNA (1)...(19): siRNA sense strand
acacaagaguccuggaguu

SEQ ID NO: 1020614 - RNA, 19 nt, Homo sapiens
  misc_RNA (1)...(19): siRNA sense strand
cgucugcccuggaucguuu

SEQ ID NO: 1020615 - RNA, 19 nt, Homo sapiens
  misc_RNA (1)...(19): siRNA sense strand
cagcagagaucagccuaga

SEQ ID NO: 1020616 - RNA, 19 nt, Homo sapiens
  misc_RNA (1)...(19): siRNA sense strand
aaaggaacgucaucaacug

SEQ ID NO: 1020617 - RNA, 19 nt, Homo sapiens
  misc_RNA (1)...(19): siRNA sense strand
gaagaaagucaagcagaug

SEQ ID NO: 1020618 - RNA, 19 nt, Homo sapiens
  misc_RNA (1)...(19): siRNA sense strand
agaagaaagucaagcagau

SEQ ID NO: 1020619 - RNA, 19 nt, Homo sapiens
  misc_RNA (1)...(19): siRNA sense strand
gaaagaaauggugguguau

SEQ ID NO: 1020620 - RNA, 19 nt, Homo sapiens
  misc_RNA (1)...(19): siRNA sense strand
ccuagaacaugaaacugaa

SEQ ID NO: 1020621 - RNA, 19 nt, Homo sapiens
  misc_RNA (1)...(19): siRNA sense strand
gaaacuuccucaggguguu

SEQ ID NO: 1020622 - RNA, 19 nt, Homo sapiens
  misc_RNA (1)...(19): siRNA sense strand
ugcgagagaugaccaagaa

SEQ ID NO: 1020623 - RNA, 19 nt, Homo sapiens
  misc_RNA (1)...(19): siRNA sense strand
gaugagaugagacagaaga

SEQ ID NO: 1020624 - RNA, 19 nt, Homo sapiens
  misc_RNA (1)...(19): siRNA sense strand
uaacugauucugacaagga

SEQ ID NO: 1020625 - RNA, 19 nt, Homo sapiens
  misc_RNA (1)...(19): siRNA sense strand
gcaacagaaacagcucuua

SEQ ID NO: 1020626 - RNA, 19 nt, Homo sapiens
  misc_RNA (1)...(19): siRNA sense strand
gcaggaguaucuggagaau

SEQ ID NO: 1020627 - RNA, 19 nt, Homo sapiens
  misc_RNA (1)...(19): siRNA sense strand
caagaguccuggaguuaac

SEQ ID NO: 1020628 - RNA, 19 nt, Homo sapiens
  misc_RNA (1)...(19): siRNA sense strand
cacaagaguccuggaguua

SEQ ID NO: 1020629 - RNA, 19 nt, Homo sapiens
  misc_RNA (1)...(19): siRNA sense strand
gagcuggacaggcugauug

SEQ ID NO: 1020630 - RNA, 19 nt, Homo sapiens
  misc_RNA (1)...(19): siRNA sense strand
guuggacuauuuaacagaa

SEQ ID NO: 1020631 - RNA, 19 nt, Homo sapiens
  misc_RNA (1)...(19): siRNA sense strand
gaaguggaaaccagagaga

SEQ ID NO: 1020632 - RNA, 19 nt, Homo sapiens
  misc_RNA (1)...(19): siRNA sense strand
gaaagaagagaugaacuac

SEQ ID NO: 1020633 - RNA, 19 nt, Homo sapiens
  misc_RNA (1)...(19): siRNA sense strand
ugaagaaaacucugacuua

SEQ ID NO: 1020634 - RNA, 19 nt, Homo sapiens
  misc_RNA (1)...(19): siRNA sense strand
gcaggacucgugaaauugu

SEQ ID NO: 1020635 - RNA, 19 nt, Homo sapiens
  misc_RNA (1)...(19): siRNA sense strand
gaucuucuacccagccaaa

SEQ ID NO: 1020636 - RNA, 19 nt, Homo sapiens
  misc_RNA (1)...(19): siRNA sense strand
ggaacgucaucaacugcaa

SEQ ID NO: 1020637 - RNA, 19 nt, Homo sapiens
  misc_RNA (1)...(19): siRNA sense strand
gguggaaucgucccaagaa

SEQ ID NO: 1020638 - RNA, 19 nt, Homo sapiens
  misc_RNA (1)...(19): siRNA sense strand
uggagaaccuaccaggaaa

SEQ ID NO: 1020639 - RNA, 19 nt, Homo sapiens
  misc_RNA (1)...(19): siRNA sense strand
ggugagaaagcgaauguau

SEQ ID NO: 1020640 - RNA, 19 nt, Homo sapiens
  misc_RNA (1)...(19): siRNA sense strand
uagaaggagagaauaauga

SEQ ID NO: 1020641 - RNA, 19 nt, Homo sapiens
  misc_RNA (1)...(19): siRNA sense strand
ugagaaagcgaauguaugg

SEQ ID NO: 1020642 - RNA, 19 nt, Homo sapiens
  misc_RNA (1)...(19): siRNA sense strand
caacauuaaggaucaaauc

SEQ ID NO: 1020643 - RNA, 19 nt, Homo sapiens
  misc_RNA (1)...(19): siRNA sense strand
gcagauggucgaggagauu

SEQ ID NO: 1020644 - RNA, 19 nt, Homo sapiens
  misc_RNA (1)...(19): siRNA sense strand
acagcaacauuaaggauca

SEQ ID NO: 1020645 - RNA, 19 nt, Homo sapiens
  misc_RNA (1)...(19): siRNA sense strand
guccuggaguuaaccauga

SEQ ID NO: 1020646 - RNA, 19 nt, Homo sapiens
  misc_RNA (1)...(19): siRNA sense strand
gaaacagcucuuaauacug

SEQ ID NO: 1020647 - RNA, 19 nt, Homo sapiens
  misc_RNA (1)...(19): siRNA sense strand
aagaaauggugguguaugg

SEQ ID NO: 1020648 - RNA, 19 nt, Homo sapiens
  misc_RNA (1)...(19): siRNA sense strand
ggccaagaccgaaguggaa

SEQ ID NO: 1020649 - RNA, 19 nt, Homo sapiens
  misc_RNA (1)...(19): siRNA sense strand
gucaucaacugcaacuuca

SEQ ID NO: 1020650 - RNA, 19 nt, Homo sapiens
  misc_RNA (1)...(19): siRNA sense strand
cagaaacagcucuuaauac

SEQ ID NO: 1020651 - RNA, 19 nt, Homo sapiens
  misc_RNA (1)...(19): siRNA sense strand
gagagaauaaugaacuaca

SEQ ID NO: 1020652 - RNA, 19 nt, Homo sapiens
  misc_RNA (1)...(19): siRNA sense strand
gaucagacaccuagaugac

SEQ ID NO: 1020653 - RNA, 19 nt, Homo sapiens
  misc_RNA (1)...(19): siRNA sense strand
ucagacaccuagaugacau

SEQ ID NO: 1020654 - RNA, 19 nt, Homo sapiens
  misc_RNA (1)...(19): siRNA sense strand
gaaaacagcaacauuaagg

SEQ ID NO: 1020655 - RNA, 19 nt, Homo sapiens
  misc_RNA (1)...(19): siRNA sense strand
gaaaagaagauugagagaa

SEQ ID NO: 1020656 - RNA, 19 nt, Homo sapiens
  misc_RNA (1)...(19): siRNA sense strand
gaugcaagcagcagagauc

SEQ ID NO: 1020657 - RNA, 19 nt, Homo sapiens
  misc_RNA (1)...(19): siRNA sense strand
gaggugaugcgagagauga

SEQ ID NO: 1020658 - RNA, 19 nt, Homo sapiens
  misc_RNA (1)...(19): siRNA sense strand
gcagaggcaguuggaggua

SEQ ID NO: 1020659 - RNA, 19 nt, Homo sapiens
  misc_RNA (1)...(19): siRNA sense strand
uggagacuaugaugagaug

SEQ ID NO: 1020660 - RNA, 19 nt, Homo sapiens
  misc_RNA (1)...(19): siRNA sense strand
aagcagguuggacuauuua

SEQ ID NO: 1020661 - RNA, 19 nt, Homo sapiens
  misc_RNA (1)...(19): siRNA sense strand
aggagagaauaaugaacua

SEQ ID NO: 1020662 - RNA, 19 nt, Homo sapiens
  misc_RNA (1)...(19): siRNA sense strand
agaaggagagaauaaugaa

SEQ ID NO: 1020663 - RNA, 19 nt, Homo sapiens
  misc_RNA (1)...(19): siRNA sense strand
ggaucagacaccuagauga

SEQ ID NO: 1020664 - RNA, 19 nt, Homo sapiens
  misc_RNA (1)...(19): siRNA sense strand
ugugagagccacuuuggaa

SEQ ID NO: 1020665 - RNA, 19 nt, Homo sapiens
  misc_RNA (1)...(19): siRNA sense strand
gaacuacaccccauacaca

SEQ ID NO: 1020666 - RNA, 19 nt, Homo sapiens
  misc_RNA (1)...(19): siRNA sense strand
aaauugugaugccuucuag

SEQ ID NO: 1020667 - RNA, 19 nt, Homo sapiens
  misc_RNA (1)...(19): siRNA sense strand
aaagguaucagcaguugga

SEQ ID NO: 1020668 - RNA, 19 nt, Homo sapiens
  misc_RNA (1)...(19): siRNA sense strand
guuaacugauucugacaag

SEQ ID NO: 1020669 - RNA, 19 nt, Homo sapiens
  misc_RNA (1)...(19): siRNA sense strand
ccaccagucagcugaaaga

SEQ ID NO: 1020670 - RNA, 19 nt, Homo sapiens
  misc_RNA (1)...(19): siRNA sense strand
gggaguuaacugauucuga

SEQ ID NO: 1020671 - RNA, 19 nt, Homo sapiens
  misc_RNA (1)...(19): siRNA sense strand
agacuaugaugagaugaga

SEQ ID NO: 1020672 - RNA, 19 nt, Homo sapiens
  misc_RNA (1)...(19): siRNA sense strand
gaugugagagccacuuugg

SEQ ID NO: 1020673 - RNA, 19 nt, Homo sapiens
  misc_RNA (1)...(19): siRNA sense strand
cagguuggacuauuuaaca

SEQ ID NO: 1020674 - RNA, 19 nt, Homo sapiens
  misc_RNA (1)...(19): siRNA sense strand
gcaacuucaacuccuagaa

SEQ ID NO: 1020675 - RNA, 19 nt, Homo sapiens
  misc_RNA (1)...(19): siRNA sense strand
acaagaguccuggaguuaa

SEQ ID NO: 1020676 - RNA, 19 nt, Homo sapiens
  misc_RNA (1)...(19): siRNA sense strand
caacuucaacuccuagaac

SEQ ID NO: 1020677 - RNA, 19 nt, Homo sapiens
  misc_RNA (1)...(19): siRNA sense strand
gcagaaaacccucguggau

SEQ ID NO: 1020678 - RNA, 19 nt, Homo sapiens
  misc_RNA (1)...(19): siRNA sense strand
gaauaaugaacuacaaagc

SEQ ID NO: 1020679 - RNA, 19 nt, Homo sapiens
  misc_RNA (1)...(19): siRNA sense strand
caacuccuagaacaugaaa

SEQ ID NO: 1020680 - RNA, 19 nt, Homo sapiens
  misc_RNA (1)...(19): siRNA sense strand
ccucguggaugugacuuug

SEQ ID NO: 1020681 - RNA, 19 nt, Homo sapiens
  misc_RNA (1)...(19): siRNA sense strand
agaaaacccucguggaugu

SEQ ID NO: 1020682 - RNA, 19 nt, Homo sapiens
  misc_RNA (1)...(19): siRNA sense strand
aguggaaaccagagagaua

SEQ ID NO: 1020683 - RNA, 19 nt, Homo sapiens
  misc_RNA (1)...(19): siRNA sense strand
caaaaucagcagaaagaaa

SEQ ID NO: 1020684 - RNA, 19 nt, Homo sapiens
  misc_RNA (1)...(19): siRNA sense strand
aaacagcaacauuaaggau

SEQ ID NO: 1020685 - RNA, 19 nt, Homo sapiens
  misc_RNA (1)...(19): siRNA sense strand
ucaaguagaugaagaguuu

SEQ ID NO: 1020686 - RNA, 19 nt, Homo sapiens
  misc_RNA (1)...(19): siRNA sense strand
gaagcaaaguuuaaaggaa

SEQ ID NO: 1020687 - RNA, 19 nt, Homo sapiens
  misc_RNA (1)...(19): siRNA sense strand
ggagucaccucgacacuga

SEQ ID NO: 1020688 - RNA, 19 nt, Homo sapiens
  misc_RNA (1)...(19): siRNA sense strand
ggacuugcuucuacgguuu

SEQ ID NO: 1020689 - RNA, 19 nt, Homo sapiens
  misc_RNA (1)...(19): siRNA sense strand
acaagaaccugcagcauca

SEQ ID NO: 1020690 - RNA, 19 nt, Homo sapiens
  misc_RNA (1)...(19): siRNA sense strand
gcacguacaccuucuuaga

SEQ ID NO: 1020691 - RNA, 19 nt, Homo sapiens
  misc_RNA (1)...(19): siRNA sense strand
ccaggaagcccagguguuu

SEQ ID NO: 1020692 - RNA, 19 nt, Homo sapiens
  misc_RNA (1)...(19): siRNA sense strand
gaucagauaccaccaagca

SEQ ID NO: 1020693 - RNA, 19 nt, Homo sapiens
  misc_RNA (1)...(19): siRNA sense strand
gaagcaaaguccaccaaaa

SEQ ID NO: 1020694 - RNA, 19 nt, Homo sapiens
  misc_RNA (1)...(19): siRNA sense strand
ugacaacacuaccuacaag

SEQ ID NO: 1020695 - RNA, 19 nt, Homo sapiens
  misc_RNA (1)...(19): siRNA sense strand
gcagcgugcuauucacaga

SEQ ID NO: 1020696 - RNA, 19 nt, Homo sapiens
  misc_RNA (1)...(19): siRNA sense strand
gacaggcaaucguggaaga

SEQ ID NO: 1020697 - RNA, 19 nt, Homo sapiens
  misc_RNA (1)...(19): siRNA sense strand
ugaugaggcugacguuuca

SEQ ID NO: 1020698 - RNA, 19 nt, Homo sapiens
  misc_RNA (1)...(19): siRNA sense strand
gaagaucagauaccaccaa

SEQ ID NO: 1020699 - RNA, 19 nt, Homo sapiens
  misc_RNA (1)...(19): siRNA sense strand
uaucuucacccaguucuua

SEQ ID NO: 1020700 - RNA, 19 nt, Homo sapiens
  misc_RNA (1)...(19): siRNA sense strand
aaaguucugucuccauuca

SEQ ID NO: 1020701 - RNA, 19 nt, Homo sapiens
  misc_RNA (1)...(19): siRNA sense strand
gaauaagggcaggaaggua

SEQ ID NO: 1020702 - RNA, 19 nt, Homo sapiens
  misc_RNA (1)...(19): siRNA sense strand
gaauagaaggccaccugaa

SEQ ID NO: 1020703 - RNA, 19 nt, Homo sapiens
  misc_RNA (1)...(19): siRNA sense strand
caguuccuguugagaauaa

SEQ ID NO: 1020704 - RNA, 19 nt, Homo sapiens
  misc_RNA (1)...(19): siRNA sense strand
gcagcugaauugucuaaaa

SEQ ID NO: 1020705 - RNA, 19 nt, Homo sapiens
  misc_RNA (1)...(19): siRNA sense strand
cagcuccucugauucugaa

SEQ ID NO: 1020706 - RNA, 19 nt, Homo sapiens
  misc_RNA (1)...(19): siRNA sense strand
gaguuacaguaucagcaaa

SEQ ID NO: 1020707 - RNA, 19 nt, Homo sapiens
  misc_RNA (1)...(19): siRNA sense strand
caagcaauuuggagacagu

SEQ ID NO: 1020708 - RNA, 19 nt, Homo sapiens
  misc_RNA (1)...(19): siRNA sense strand
gaaaacagggcucugauuc

SEQ ID NO: 1020709 - RNA, 19 nt, Homo sapiens
  misc_RNA (1)...(19): siRNA sense strand
cagcacguacaccuucuua

SEQ ID NO: 1020710 - RNA, 19 nt, Homo sapiens
  misc_RNA (1)...(19): siRNA sense strand
aaucguggaagaucagaua

SEQ ID NO: 1020711 - RNA, 19 nt, Homo sapiens
  misc_RNA (1)...(19): siRNA sense strand
cagauaccaccaagcaauu

SEQ ID NO: 1020712 - RNA, 19 nt, Homo sapiens
  misc_RNA (1)...(19): siRNA sense strand
ugguagaguuuccacagaa

SEQ ID NO: 1020713 - RNA, 19 nt, Homo sapiens
  misc_RNA (1)...(19): siRNA sense strand
ucagauaccaccaagcaau

SEQ ID NO: 1020714 - RNA, 19 nt, Homo sapiens
  misc_RNA (1)...(19): siRNA sense strand
ccacaaugcccagaucuca

SEQ ID NO: 1020715 - RNA, 19 nt, Homo sapiens
  misc_RNA (1)...(19): siRNA sense strand
gaaaguucugucuccauuc

SEQ ID NO: 1020716 - RNA, 19 nt, Homo sapiens
  misc_RNA (1)...(19): siRNA sense strand
aaaccacaaugcccagauc

SEQ ID NO: 1020717 - RNA, 19 nt, Homo sapiens
  misc_RNA (1)...(19): siRNA sense strand
gauaccaccaagcaauuug

SEQ ID NO: 1020718 - RNA, 19 nt, Homo sapiens
  misc_RNA (1)...(19): siRNA sense strand
gaaucagggaagagugaaa

SEQ ID NO: 1020719 - RNA, 19 nt, Homo sapiens
  misc_RNA (1)...(19): siRNA sense strand
ugaagcaaaguuuaaagga

SEQ ID NO: 1020720 - RNA, 19 nt, Homo sapiens
  misc_RNA (1)...(19): siRNA sense strand
ucaggugggucggaaagug

SEQ ID NO: 1020721 - RNA, 19 nt, Homo sapiens
  misc_RNA (1)...(19): siRNA sense strand
ggaaaaugcgagaccaaaa

SEQ ID NO: 1020722 - RNA, 19 nt, Homo sapiens
  misc_RNA (1)...(19): siRNA sense strand
gccacaggauuccaagaag

SEQ ID NO: 1020723 - RNA, 19 nt, Homo sapiens
  misc_RNA (1)...(19): siRNA sense strand
ccagguguuucgaggacuu

SEQ ID NO: 1020724 - RNA, 19 nt, Homo sapiens
  misc_RNA (1)...(19): siRNA sense strand
cugcugagccguuugacaa

SEQ ID NO: 1020725 - RNA, 19 nt, Homo sapiens
  misc_RNA (1)...(19): siRNA sense strand
gcugagccguuugacaaca

SEQ ID NO: 1020726 - RNA, 19 nt, Homo sapiens
  misc_RNA (1)...(19): siRNA sense strand
caacacuaccuacaagaac

SEQ ID NO: 1020727 - RNA, 19 nt, Homo sapiens
  misc_RNA (1)...(19): siRNA sense strand
gcuccuagccacccagaca

SEQ ID NO: 1020728 - RNA, 19 nt, Homo sapiens
  misc_RNA (1)...(19): siRNA sense strand
acaacacuaccuacaagaa

SEQ ID NO: 1020729 - RNA, 19 nt, Homo sapiens
  misc_RNA (1)...(19): siRNA sense strand
gaugaugaggcugacguuu

SEQ ID NO: 1020730 - RNA, 19 nt, Homo sapiens
  misc_RNA (1)...(19): siRNA sense strand
aaagugacgucgccuucgu

SEQ ID NO: 1020731 - RNA, 19 nt, Homo sapiens
  misc_RNA (1)...(19): siRNA sense strand
gacaacacuaccuacaaga

SEQ ID NO: 1020732 - RNA, 19 nt, Homo sapiens
  misc_RNA (1)...(19): siRNA sense strand
cuucuacgguuucuuuguc

SEQ ID NO: 1020733 - RNA, 19 nt, Homo sapiens
  misc_RNA (1)...(19): siRNA sense strand
ccuuaccuguccacacaaa

SEQ ID NO: 1020734 - RNA, 19 nt, Homo sapiens
  misc_RNA (1)...(19): siRNA sense strand
acccuuaccuguccacaca

SEQ ID NO: 1020735 - RNA, 19 nt, Homo sapiens
  misc_RNA (1)...(19): siRNA sense strand
cggaaucagggaagaguga

SEQ ID NO: 1020736 - RNA, 19 nt, Homo sapiens
  misc_RNA (1)...(19): siRNA sense strand
ggaaucagggaagagugaa

SEQ ID NO: 1020737 - RNA, 19 nt, Homo sapiens
  misc_RNA (1)...(19): siRNA sense strand
aauagaaggccaccugaag

SEQ ID NO: 1020738 - RNA, 19 nt, Homo sapiens
  misc_RNA (1)...(19): siRNA sense strand
caggugggucggaaaguga

SEQ ID NO: 1020739 - RNA, 19 nt, Homo sapiens
  misc_RNA (1)...(19): siRNA sense strand
ggccucucauuccuuugaa

SEQ ID NO: 1020740 - RNA, 19 nt, Homo sapiens
  misc_RNA (1)...(19): siRNA sense strand
agaagcaaaguccaccaaa

SEQ ID NO: 1020741 - RNA, 19 nt, Homo sapiens
  misc_RNA (1)...(19): siRNA sense strand
cguggaagaucagauacca

SEQ ID NO: 1020742 - RNA, 19 nt, Homo sapiens
  misc_RNA (1)...(19): siRNA sense strand
aggcaaucguggaagauca

SEQ ID NO: 1020743 - RNA, 19 nt, Homo sapiens
  misc_RNA (1)...(19): siRNA sense strand
uugcuucuacgguuucuuu

SEQ ID NO: 1020744 - RNA, 19 nt, Homo sapiens
  misc_RNA (1)...(19): siRNA sense strand
gaaguaguauuccugcaau

SEQ ID NO: 1020745 - RNA, 19 nt, Homo sapiens
  misc_RNA (1)...(19): siRNA sense strand
caaucuccaugacaacuuu

SEQ ID NO: 1020746 - RNA, 19 nt, Homo sapiens
  misc_RNA (1)...(19): siRNA sense strand
gagguuugccggaagauuu

SEQ ID NO: 1020747 - RNA, 19 nt, Homo sapiens
  misc_RNA (1)...(19): siRNA sense strand
gcucggacaucuuuaguac

SEQ ID NO: 1020748 - RNA, 19 nt, Homo sapiens
  misc_RNA (1)...(19): siRNA sense strand
gagaagaagagaugguaug

SEQ ID NO: 1020749 - RNA, 19 nt, Homo sapiens
  misc_RNA (1)...(19): siRNA sense strand
cacugagccugaaguagua

SEQ ID NO: 1020750 - RNA, 19 nt, Homo sapiens
  misc_RNA (1)...(19): siRNA sense strand
ucacugagccugaaguagu

SEQ ID NO: 1020751 - RNA, 19 nt, Homo sapiens
  misc_RNA (1)...(19): siRNA sense strand
cagcugggaucuccaccaa

SEQ ID NO: 1020752 - RNA, 19 nt, Homo sapiens
  misc_RNA (1)...(19): siRNA sense strand
ccagggauccucagaaagu

SEQ ID NO: 1020753 - RNA, 19 nt, Homo sapiens
  misc_RNA (1)...(19): siRNA sense strand
gcaaucccguggaaaugag

SEQ ID NO: 1020754 - RNA, 19 nt, Homo sapiens
  misc_RNA (1)...(19): siRNA sense strand
caaggaggcuuugccaacu

SEQ ID NO: 1020755 - RNA, 19 nt, Homo sapiens
  misc_RNA (1)...(19): siRNA sense strand
caacuuugaugccuuuagc

SEQ ID NO: 1020756 - RNA, 19 nt, Homo sapiens
  misc_RNA (1)...(19): siRNA sense strand
gcagggcuccaucccagaa

SEQ ID NO: 1020757 - RNA, 19 nt, Homo sapiens
  misc_RNA (1)...(19): siRNA sense strand
uuccagggauccucagaaa

SEQ ID NO: 1020758 - RNA, 19 nt, Homo sapiens
  misc_RNA (1)...(19): siRNA sense strand
aauaugagaagaagagaug

SEQ ID NO: 1020759 - RNA, 19 nt, Homo sapiens
  misc_RNA (1)...(19): siRNA sense strand
ugaaguaguauuccugcaa

SEQ ID NO: 1020760 - RNA, 19 nt, Homo sapiens
  misc_RNA (1)...(19): siRNA sense strand
ccaugacaacuuucacuga

SEQ ID NO: 1020761 - RNA, 19 nt, Homo sapiens
  misc_RNA (1)...(19): siRNA sense strand
ugccaacuuugaugccuuu

SEQ ID NO: 1020762 - RNA, 19 nt, Homo sapiens
  misc_RNA (1)...(19): siRNA sense strand
cucagaaagugaaggaguu

SEQ ID NO: 1020763 - RNA, 19 nt, Homo sapiens
  misc_RNA (1)...(19): siRNA sense strand
ucggacaucuuuaguacca

SEQ ID NO: 1020764 - RNA, 19 nt, Homo sapiens
  misc_RNA (1)...(19): siRNA sense strand
aggaggcuuugccaacuuu

SEQ ID NO: 1020765 - RNA, 19 nt, Homo sapiens
  misc_RNA (1)...(19): siRNA sense strand
ugacuggacccucaucaag

SEQ ID NO: 1020766 - RNA, 19 nt, Homo sapiens
  misc_RNA (1)...(19): siRNA sense strand
ucagaaagugaaggaguuu

SEQ ID NO: 1020767 - RNA, 19 nt, Homo sapiens
  misc_RNA (1)...(19): siRNA sense strand
ccaaaccuccaaccaccaa

SEQ ID NO: 1020768 - RNA, 19 nt, Homo sapiens
  misc_RNA (1)...(19): siRNA sense strand
cuuaggaucagccaaguug

SEQ ID NO: 1020769 - RNA, 19 nt, Homo sapiens
  misc_RNA (1)...(19): siRNA sense strand
gagccuucacuaacccuuu

SEQ ID NO: 1020770 - RNA, 19 nt, Homo sapiens
  misc_RNA (1)...(19): siRNA sense strand
ccccagcucuucuguguuu

SEQ ID NO: 1020771 - RNA, 19 nt, Homo sapiens
  misc_RNA (1)...(19): siRNA sense strand
gaagaagagaugguauguc

SEQ ID NO: 1020772 - RNA, 19 nt, Homo sapiens
  misc_RNA (1)...(19): siRNA sense strand
aaugagguuugccggaaga

SEQ ID NO: 1020773 - RNA, 19 nt, Homo sapiens
  misc_RNA (1)...(19): siRNA sense strand
ccaccaaccccuucuugua

SEQ ID NO: 1020774 - RNA, 19 nt, Homo sapiens
  misc_RNA (1)...(19): siRNA sense strand
gauuugguugggucuguuu

SEQ ID NO: 1020775 - RNA, 19 nt, Homo sapiens
  misc_RNA (1)...(19): siRNA sense strand
aaggaggcuuugccaacuu

SEQ ID NO: 1020776 - RNA, 19 nt, Homo sapiens
  misc_RNA (1)...(19): siRNA sense strand
gcaccgucucucucaguug

SEQ ID NO: 1020777 - RNA, 19 nt, Homo sapiens
  misc_RNA (1)...(19): siRNA sense strand
ccagauggcaccagcuuuu

SEQ ID NO: 1020778 - RNA, 19 nt, Homo sapiens
  misc_RNA (1)...(19): siRNA sense strand
cagggauccucagaaagug

SEQ ID NO: 1020779 - RNA, 19 nt, Homo sapiens
  misc_RNA (1)...(19): siRNA sense strand
agaagaagagaugguaugu

SEQ ID NO: 1020780 - RNA, 19 nt, Homo sapiens
  misc_RNA (1)...(19): siRNA sense strand
gggauccucagaaagugaa

SEQ ID NO: 1020781 - RNA, 19 nt, Homo sapiens
  misc_RNA (1)...(19): siRNA sense strand
uaacuucugugccuucaau

SEQ ID NO: 1020782 - RNA, 19 nt, Homo sapiens
  misc_RNA (1)...(19): siRNA sense strand
gaguaccaguccauaaauu

SEQ ID NO: 1020783 - RNA, 19 nt, Homo sapiens
  misc_RNA (1)...(19): siRNA sense strand
gcaccaacguguccgauac

SEQ ID NO: 1020784 - RNA, 19 nt, Homo sapiens
  misc_RNA (1)...(19): siRNA sense strand
guaccaguccauaaauuaa

SEQ ID NO: 1020785 - RNA, 19 nt, Homo sapiens
  misc_RNA (1)...(19): siRNA sense strand
ccaggcugcuugaguuuga

SEQ ID NO: 1020786 - RNA, 19 nt, Homo sapiens
  misc_RNA (1)...(19): siRNA sense strand
uuaccaggcugcuugaguu

SEQ ID NO: 1020787 - RNA, 19 nt, Homo sapiens
  misc_RNA (1)...(19): siRNA sense strand
cagaguaccaguccauaaa

SEQ ID NO: 1020788 - RNA, 19 nt, Homo sapiens
  misc_RNA (1)...(19): siRNA sense strand
gaccauauccuccauacuc

SEQ ID NO: 1020789 - RNA, 19 nt, Homo sapiens
  misc_RNA (1)...(19): siRNA sense strand
gaagaccauauccuccaua

SEQ ID NO: 1020790 - RNA, 19 nt, Homo sapiens
  misc_RNA (1)...(19): siRNA sense strand
ggaagaccauauccuccau

SEQ ID NO: 1020791 - RNA, 19 nt, Homo sapiens
  misc_RNA (1)...(19): siRNA sense strand
ggacucuacuucuguuugc

SEQ ID NO: 1020792 - RNA, 19 nt, Homo sapiens
  misc_RNA (1)...(19): siRNA sense strand
cauacuccuuggccgauuu

SEQ ID NO: 1020793 - RNA, 19 nt, Homo sapiens
  misc_RNA (1)...(19): siRNA sense strand
uaaggacagcauucaguuu

SEQ ID NO: 1020794 - RNA, 19 nt, Homo sapiens
  misc_RNA (1)...(19): siRNA sense strand
ugauggugcucccuaagga

SEQ ID NO: 1020795 - RNA, 19 nt, Homo sapiens
  misc_RNA (1)...(19): siRNA sense strand
cacccugagugccacauuu

SEQ ID NO: 1020796 - RNA, 19 nt, Homo sapiens
  misc_RNA (1)...(19): siRNA sense strand
ucagaguaccaguccauaa

SEQ ID NO: 1020797 - RNA, 19 nt, Homo sapiens
  misc_RNA (1)...(19): siRNA sense strand
aguaccaguccauaaauua

SEQ ID NO: 1020798 - RNA, 19 nt, Homo sapiens
  misc_RNA (1)...(19): siRNA sense strand
gccgauuucucuuggaaca

SEQ ID NO: 1020799 - RNA, 19 nt, Homo sapiens
  misc_RNA (1)...(19): siRNA sense strand
ccaauuccacacugcacua

SEQ ID NO: 1020800 - RNA, 19 nt, Homo sapiens
  misc_RNA (1)...(19): siRNA sense strand
cuaaggacagcauucaguu

SEQ ID NO: 1020801 - RNA, 19 nt, Homo sapiens
  misc_RNA (1)...(19): siRNA sense strand
gggcagugggcaccaauuc

SEQ ID NO: 1020802 - RNA, 19 nt, Homo sapiens
  misc_RNA (1)...(19): siRNA sense strand
gcagugggcaccaauucca

SEQ ID NO: 1020803 - RNA, 19 nt, Homo sapiens
  misc_RNA (1)...(19): siRNA sense strand
ccacuaguccugggcauca

SEQ ID NO: 1020804 - RNA, 19 nt, Homo sapiens
  misc_RNA (1)...(19): siRNA sense strand
gcuagagguggcccugauu

SEQ ID NO: 1020805 - RNA, 19 nt, Homo sapiens
  misc_RNA (1)...(19): siRNA sense strand
cagaaccugcuucauauac

SEQ ID NO: 1020806 - RNA, 19 nt, Homo sapiens
  misc_RNA (1)...(19): siRNA sense strand
gccugauggugcucccuaa

SEQ ID NO: 1020807 - RNA, 19 nt, Homo sapiens
  misc_RNA (1)...(19): siRNA sense strand
cucuggaggucaucccuaa

SEQ ID NO: 1020808 - RNA, 19 nt, Homo sapiens
  misc_RNA (1)...(19): siRNA sense strand
uggccgauuucucuuggaa

SEQ ID NO: 1020809 - RNA, 19 nt, Homo sapiens
  misc_RNA (1)...(19): siRNA sense strand
auuccacacugcacuaugu

SEQ ID NO: 1020810 - RNA, 19 nt, Homo sapiens
  misc_RNA (1)...(19): siRNA sense strand
ccaucaggcuuugcacagu

SEQ ID NO: 1020811 - RNA, 19 nt, Homo sapiens
  misc_RNA (1)...(19): siRNA sense strand
cgauuucucuuggaacaac

SEQ ID NO: 1020812 - RNA, 19 nt, Homo sapiens
  misc_RNA (1)...(19): siRNA sense strand
ggaaaugcauugaucauaa

SEQ ID NO: 1020813 - RNA, 19 nt, Homo sapiens
  misc_RNA (1)...(19): siRNA sense strand
caaaugaacuuuccauaga

SEQ ID NO: 1020814 - RNA, 19 nt, Homo sapiens
  misc_RNA (1)...(19): siRNA sense strand
caacauauacugugaauga

SEQ ID NO: 1020815 - RNA, 19 nt, Homo sapiens
  misc_RNA (1)...(19): siRNA sense strand
agacacagcucacaaugua

SEQ ID NO: 1020816 - RNA, 19 nt, Homo sapiens
  misc_RNA (1)...(19): siRNA sense strand
gaauugagcuaugaggaua

SEQ ID NO: 1020817 - RNA, 19 nt, Homo sapiens
  misc_RNA (1)...(19): siRNA sense strand
gaaauacuacugaccauug

SEQ ID NO: 1020818 - RNA, 19 nt, Homo sapiens
  misc_RNA (1)...(19): siRNA sense strand
gagaugggauccuucuaaa

SEQ ID NO: 1020819 - RNA, 19 nt, Homo sapiens
  misc_RNA (1)...(19): siRNA sense strand
ugaaugaucucucuaugau

SEQ ID NO: 1020820 - RNA, 19 nt, Homo sapiens
  misc_RNA (1)...(19): siRNA sense strand
gugaaugauugcauacaua

SEQ ID NO: 1020821 - RNA, 19 nt, Homo sapiens
  misc_RNA (1)...(19): siRNA sense strand
gcaaaugaacuuuccauag

SEQ ID NO: 1020822 - RNA, 19 nt, Homo sapiens
  misc_RNA (1)...(19): siRNA sense strand
aaugaucucucuaugauga

SEQ ID NO: 1020823 - RNA, 19 nt, Homo sapiens
  misc_RNA (1)...(19): siRNA sense strand
gugagagacuggagugaaa

SEQ ID NO: 1020824 - RNA, 19 nt, Homo sapiens
  misc_RNA (1)...(19): siRNA sense strand
cagaaagggaugccuguua

SEQ ID NO: 1020825 - RNA, 19 nt, Homo sapiens
  misc_RNA (1)...(19): siRNA sense strand
cuaugaaugugucuuguuu

SEQ ID NO: 1020826 - RNA, 19 nt, Homo sapiens
  misc_RNA (1)...(19): siRNA sense strand
gaugggaauggaaagauua

SEQ ID NO: 1020827 - RNA, 19 nt, Homo sapiens
  misc_RNA (1)...(19): siRNA sense strand
gagaagaugggaauggaaa

SEQ ID NO: 1020828 - RNA, 19 nt, Homo sapiens
  misc_RNA (1)...(19): siRNA sense strand
gaugggauccuucuaaagu

SEQ ID NO: 1020829 - RNA, 19 nt, Homo sapiens
  misc_RNA (1)...(19): siRNA sense strand
cauuugacauggauaaguu

SEQ ID NO: 1020830 - RNA, 19 nt, Homo sapiens
  misc_RNA (1)...(19): siRNA sense strand
aaagagagaugggauccuu

SEQ ID NO: 1020831 - RNA, 19 nt, Homo sapiens
  misc_RNA (1)...(19): siRNA sense strand
gaacuuuccauagaauuga

SEQ ID NO: 1020832 - RNA, 19 nt, Homo sapiens
  misc_RNA (1)...(19): siRNA sense strand
gaaucuguauugucaacau

SEQ ID NO: 1020833 - RNA, 19 nt, Homo sapiens
  misc_RNA (1)...(19): siRNA sense strand
gacaagauccggaaaugca

SEQ ID NO: 1020834 - RNA, 19 nt, Homo sapiens
  misc_RNA (1)...(19): siRNA sense strand
gcaguauggauucaaggua

SEQ ID NO: 1020835 - RNA, 19 nt, Homo sapiens
  misc_RNA (1)...(19): siRNA sense strand
ccagguggaauuuggauaa

SEQ ID NO: 1020836 - RNA, 19 nt, Homo sapiens
  misc_RNA (1)...(19): siRNA sense strand
aauccacgcugaaacaguu

SEQ ID NO: 1020837 - RNA, 19 nt, Homo sapiens
  misc_RNA (1)...(19): siRNA sense strand
gaagaugggaauggaaaga

SEQ ID NO: 1020838 - RNA, 19 nt, Homo sapiens
  misc_RNA (1)...(19): siRNA sense strand
cagccaaucauuaaagaaa

SEQ ID NO: 1020839 - RNA, 19 nt, Homo sapiens
  misc_RNA (1)...(19): siRNA sense strand
agaaagggaugccuguuac

SEQ ID NO: 1020840 - RNA, 19 nt, Homo sapiens
  misc_RNA (1)...(19): siRNA sense strand
cauauacugugaaugaucu

SEQ ID NO: 1020841 - RNA, 19 nt, Homo sapiens
  misc_RNA (1)...(19): siRNA sense strand
gagugaaacugggaaagca

SEQ ID NO: 1020842 - RNA, 19 nt, Homo sapiens
  misc_RNA (1)...(19): siRNA sense strand
gugaaugaucucucuauga

SEQ ID NO: 1020843 - RNA, 19 nt, Homo sapiens
  misc_RNA (1)...(19): siRNA sense strand
uugaaaaucuggcaaauga

SEQ ID NO: 1020844 - RNA, 19 nt, Homo sapiens
  misc_RNA (1)...(19): siRNA sense strand
caagccagguggaauuugg

SEQ ID NO: 1020845 - RNA, 19 nt, Homo sapiens
  misc_RNA (1)...(19): siRNA sense strand
ugggauccuucuaaaguaa

SEQ ID NO: 1020846 - RNA, 19 nt, Homo sapiens
  misc_RNA (1)...(19): siRNA sense strand
guuaccagccaaucauuaa

SEQ ID NO: 1020847 - RNA, 19 nt, Homo sapiens
  misc_RNA (1)...(19): siRNA sense strand
agagaugggauccuucuaa

SEQ ID NO: 1020848 - RNA, 19 nt, Homo sapiens
  misc_RNA (1)...(19): siRNA sense strand
gcucuuuucuuccaacuuu

SEQ ID NO: 1020849 - RNA, 19 nt, Homo sapiens
  misc_RNA (1)...(19): siRNA sense strand
agacuggccugggaaauag

SEQ ID NO: 1020850 - RNA, 19 nt, Homo sapiens
  misc_RNA (1)...(19): siRNA sense strand
ggagguggaagugcaguuu

SEQ ID NO: 1020851 - RNA, 19 nt, Homo sapiens
  misc_RNA (1)...(19): siRNA sense strand
ugcaauaccugggacugua

SEQ ID NO: 1020852 - RNA, 19 nt, Homo sapiens
  misc_RNA (1)...(19): siRNA sense strand
ggaagacuggccugggaaa

SEQ ID NO: 1020853 - RNA, 19 nt, Homo sapiens
  misc_RNA (1)...(19): siRNA sense strand
gguucuaacuuuucuauga

SEQ ID NO: 1020854 - RNA, 19 nt, Homo sapiens
  misc_RNA (1)...(19): siRNA sense strand
ucuggaagaucauuaaugc

SEQ ID NO: 1020855 - RNA, 19 nt, Homo sapiens
  misc_RNA (1)...(19): siRNA sense strand
auccaucaguuuagcaaua

SEQ ID NO: 1020856 - RNA, 19 nt, Homo sapiens
  misc_RNA (1)...(19): siRNA sense strand
agaugggaauggaaagauu

SEQ ID NO: 1020857 - RNA, 19 nt, Homo sapiens
  misc_RNA (1)...(19): siRNA sense strand
ggcaaaugaacuuuccaua

SEQ ID NO: 1020858 - RNA, 19 nt, Homo sapiens
  misc_RNA (1)...(19): siRNA sense strand
caucuacauuugacaugga

SEQ ID NO: 1020859 - RNA, 19 nt, Homo sapiens
  misc_RNA (1)...(19): siRNA sense strand
ggagaagaugggaauggaa

SEQ ID NO: 1020860 - RNA, 19 nt, Homo sapiens
  misc_RNA (1)...(19): siRNA sense strand
cgggugaaccgaacagaaa

SEQ ID NO: 1020861 - RNA, 19 nt, Homo sapiens
  misc_RNA (1)...(19): siRNA sense strand
cagguggaauuuggauaaa

SEQ ID NO: 1020862 - RNA, 19 nt, Homo sapiens
  misc_RNA (1)...(19): siRNA sense strand
uccaucaguuuagcaauaa

SEQ ID NO: 1020863 - RNA, 19 nt, Homo sapiens
  misc_RNA (1)...(19): siRNA sense strand
uaugcuagguuaugcuugu

SEQ ID NO: 1020864 - RNA, 19 nt, Homo sapiens
  misc_RNA (1)...(19): siRNA sense strand
gaaacugggaaagcagaaa

SEQ ID NO: 1020865 - RNA, 19 nt, Homo sapiens
  misc_RNA (1)...(19): siRNA sense strand
cuacauuugacauggauaa

SEQ ID NO: 1020866 - RNA, 19 nt, Homo sapiens
  misc_RNA (1)...(19): siRNA sense strand
cggaaaugcauugaucaua

SEQ ID NO: 1020867 - RNA, 19 nt, Homo sapiens
  misc_RNA (1)...(19): siRNA sense strand
gucaacauauacugugaau

SEQ ID NO: 1020868 - RNA, 19 nt, Homo sapiens
  misc_RNA (1)...(19): siRNA sense strand
aaauacuacugaccauugu

SEQ ID NO: 1020869 - RNA, 19 nt, Homo sapiens
  misc_RNA (1)...(19): siRNA sense strand
aaacguuguucugcaguau

SEQ ID NO: 1020870 - RNA, 19 nt, Homo sapiens
  misc_RNA (1)...(19): siRNA sense strand
ucaguuucuucuucacuug

SEQ ID NO: 1020871 - RNA, 19 nt, Homo sapiens
  misc_RNA (1)...(19): siRNA sense strand
aagacuggccugggaaaua

SEQ ID NO: 1020872 - RNA, 19 nt, Homo sapiens
  misc_RNA (1)...(19): siRNA sense strand
ggauccuucuaaaguaaau

SEQ ID NO: 1020873 - RNA, 19 nt, Homo sapiens
  misc_RNA (1)...(19): siRNA sense strand
ccgaacagaaagacaguuu

SEQ ID NO: 1020874 - RNA, 19 nt, Homo sapiens
  misc_RNA (1)...(19): siRNA sense strand
uggacaagauccggaaaug

SEQ ID NO: 1020875 - RNA, 19 nt, Homo sapiens
  misc_RNA (1)...(19): siRNA sense strand
cuaccuguuucuucauaga

SEQ ID NO: 1020876 - RNA, 19 nt, Homo sapiens
  misc_RNA (1)...(19): siRNA sense strand
uucgaucacuuccagcuaa

SEQ ID NO: 1020877 - RNA, 19 nt, Homo sapiens
  misc_RNA (1)...(19): siRNA sense strand
ccuuggauccaucaguuua

SEQ ID NO: 1020878 - RNA, 19 nt, Homo sapiens
  misc_RNA (1)...(19): siRNA sense strand
gcuagguuaugcuugucaa

SEQ ID NO: 1020879 - RNA, 19 nt, Homo sapiens
  misc_RNA (1)...(19): siRNA sense strand
ugaacuuuccauagaauug

SEQ ID NO: 1020880 - RNA, 19 nt, Homo sapiens
  misc_RNA (1)...(19): siRNA sense strand
caacuuuguacucaacaga

SEQ ID NO: 1020881 - RNA, 19 nt, Homo sapiens
  misc_RNA (1)...(19): siRNA sense strand
caagauccggaaaugcauu

SEQ ID NO: 1020882 - RNA, 19 nt, Homo sapiens
  misc_RNA (1)...(19): siRNA sense strand
uggagaagaugggaaugga

SEQ ID NO: 1020883 - RNA, 19 nt, Homo sapiens
  misc_RNA (1)...(19): siRNA sense strand
gcagaaagggaugccuguu

SEQ ID NO: 1020884 - RNA, 19 nt, Homo sapiens
  misc_RNA (1)...(19): siRNA sense strand
acacagcucacaauguaau

SEQ ID NO: 1020885 - RNA, 19 nt, Homo sapiens
  misc_RNA (1)...(19): siRNA sense strand
uuaaugccuuccgcuacua

SEQ ID NO: 1020886 - RNA, 19 nt, Homo sapiens
  misc_RNA (1)...(19): siRNA sense strand
uaaccaacagaaacuacuu

SEQ ID NO: 1020887 - RNA, 19 nt, Homo sapiens
  misc_RNA (1)...(19): siRNA sense strand
ugagcuaugaggauauaaa

SEQ ID NO: 1020888 - RNA, 19 nt, Homo sapiens
  misc_RNA (1)...(19): siRNA sense strand
cauagacacagcucacaau

SEQ ID NO: 1020889 - RNA, 19 nt, Homo sapiens
  misc_RNA (1)...(19): siRNA sense strand
gcaggagauuuucaagaga

SEQ ID NO: 1020890 - RNA, 19 nt, Homo sapiens
  misc_RNA (1)...(19): siRNA sense strand
gguaccuggugcuggacua

SEQ ID NO: 1020891 - RNA, 19 nt, Homo sapiens
  misc_RNA (1)...(19): siRNA sense strand
augggauccuucuaaagua

SEQ ID NO: 1020892 - RNA, 19 nt, Homo sapiens
  misc_RNA (1)...(19): siRNA sense strand
cagaaacuacuuccucagu

SEQ ID NO: 1020893 - RNA, 19 nt, Homo sapiens
  misc_RNA (1)...(19): siRNA sense strand
ugugaaugaucucucuaug

SEQ ID NO: 1020894 - RNA, 19 nt, Homo sapiens
  misc_RNA (1)...(19): siRNA sense strand
augaaugugucuuguuugu

SEQ ID NO: 1020895 - RNA, 19 nt, Homo sapiens
  misc_RNA (1)...(19): siRNA sense strand
cuacuaugaaugugucuug

SEQ ID NO: 1020896 - RNA, 19 nt, Homo sapiens
  misc_RNA (1)...(19): siRNA sense strand
gaaugaucucucuaugaug

SEQ ID NO: 1020897 - RNA, 19 nt, Homo sapiens
  misc_RNA (1)...(19): siRNA sense strand
ugugaaugauugcauacau

SEQ ID NO: 1020898 - RNA, 19 nt, Homo sapiens
  misc_RNA (1)...(19): siRNA sense strand
caaggaaaugaauggaguu

SEQ ID NO: 1020899 - RNA, 19 nt, Homo sapiens
  misc_RNA (1)...(19): siRNA sense strand
gaagacuggccugggaaau

SEQ ID NO: 1020900 - RNA, 19 nt, Homo sapiens
  misc_RNA (1)...(19): siRNA sense strand
gggaauggaaagauuaugc

SEQ ID NO: 1020901 - RNA, 19 nt, Homo sapiens
  misc_RNA (1)...(19): siRNA sense strand
auugagcuaugaggauaua

SEQ ID NO: 1020902 - RNA, 19 nt, Homo sapiens
  misc_RNA (1)...(19): siRNA sense strand
gcagcgaggagguggaagu

SEQ ID NO: 1020903 - RNA, 19 nt, Homo sapiens
  misc_RNA (1)...(19): siRNA sense strand
ccucugcuguaccacuuug

SEQ ID NO: 1020904 - RNA, 19 nt, Homo sapiens
  misc_RNA (1)...(19): siRNA sense strand
gagagaugggauccuucua

SEQ ID NO: 1020905 - RNA, 19 nt, Homo sapiens
  misc_RNA (1)...(19): siRNA sense strand
gguccguaagccacaauaa

SEQ ID NO: 1020906 - RNA, 19 nt, Homo sapiens
  misc_RNA (1)...(19): siRNA sense strand
ugaucucucuaugaugaaa

SEQ ID NO: 1020907 - RNA, 19 nt, Homo sapiens
  misc_RNA (1)...(19): siRNA sense strand
aaagacaguuucgaucacu

SEQ ID NO: 1020908 - RNA, 19 nt, Homo sapiens
  misc_RNA (1)...(19): siRNA sense strand
ggacaagauccggaaaugc

SEQ ID NO: 1020909 - RNA, 19 nt, Homo sapiens
  misc_RNA (1)...(19): siRNA sense strand
ugcuaccuguuucuucaua

SEQ ID NO: 1020910 - RNA, 19 nt, Homo sapiens
  misc_RNA (1)...(19): siRNA sense strand
gagcuaugaggauauaaaa

SEQ ID NO: 1020911 - RNA, 19 nt, Homo sapiens
  misc_RNA (1)...(19): siRNA sense strand
aagaaucuguauugucaac

SEQ ID NO: 1020912 - RNA, 19 nt, Homo sapiens
  misc_RNA (1)...(19): siRNA sense strand
caagugggccuaauccuua

SEQ ID NO: 1020913 - RNA, 19 nt, Homo sapiens
  misc_RNA (1)...(19): siRNA sense strand
gaggaaaacuucugaguaa

SEQ ID NO: 1020914 - RNA, 19 nt, Homo sapiens
  misc_RNA (1)...(19): siRNA sense strand
gcaauucagugcaguagga

SEQ ID NO: 1020915 - RNA, 19 nt, Homo sapiens
  misc_RNA (1)...(19): siRNA sense strand
guauaaagaugaagaugga

SEQ ID NO: 1020916 - RNA, 19 nt, Homo sapiens
  misc_RNA (1)...(19): siRNA sense strand
gugaaucguuuauuggaua

SEQ ID NO: 1020917 - RNA, 19 nt, Homo sapiens
  misc_RNA (1)...(19): siRNA sense strand
caagucaggugaaauaucu

SEQ ID NO: 1020918 - RNA, 19 nt, Homo sapiens
  misc_RNA (1)...(19): siRNA sense strand
cuucucagccuacuaauua

SEQ ID NO: 1020919 - RNA, 19 nt, Homo sapiens
  misc_RNA (1)...(19): siRNA sense strand
gaacugauagaacuucgaa

SEQ ID NO: 1020920 - RNA, 19 nt, Homo sapiens
  misc_RNA (1)...(19): siRNA sense strand
gcaauuauccugcacaaac

SEQ ID NO: 1020921 - RNA, 19 nt, Homo sapiens
  misc_RNA (1)...(19): siRNA sense strand
ccacagcagccaccauaua

SEQ ID NO: 1020922 - RNA, 19 nt, Homo sapiens
  misc_RNA (1)...(19): siRNA sense strand
aaucaagucaggugaaaua

SEQ ID NO: 1020923 - RNA, 19 nt, Homo sapiens
  misc_RNA (1)...(19): siRNA sense strand
cgaaauaaagugaaucguu

SEQ ID NO: 1020924 - RNA, 19 nt, Homo sapiens
  misc_RNA (1)...(19): siRNA sense strand
gaaaacuucugaguaauga

SEQ ID NO: 1020925 - RNA, 19 nt, Homo sapiens
  misc_RNA (1)...(19): siRNA sense strand
gaucuaagugggaagcuaa

SEQ ID NO: 1020926 - RNA, 19 nt, Homo sapiens
  misc_RNA (1)...(19): siRNA sense strand
gcguuuggcuuaacagaug

SEQ ID NO: 1020927 - RNA, 19 nt, Homo sapiens
  misc_RNA (1)...(19): siRNA sense strand
gaguaaugaugaaguaaca

SEQ ID NO: 1020928 - RNA, 19 nt, Homo sapiens
  misc_RNA (1)...(19): siRNA sense strand
gagcaauuauccugcacaa

SEQ ID NO: 1020929 - RNA, 19 nt, Homo sapiens
  misc_RNA (1)...(19): siRNA sense strand
aaacuucucagccuacuaa

SEQ ID NO: 1020930 - RNA, 19 nt, Homo sapiens
  misc_RNA (1)...(19): siRNA sense strand
ccaggaccuuccaccaaua

SEQ ID NO: 1020931 - RNA, 19 nt, Homo sapiens
  misc_RNA (1)...(19): siRNA sense strand
ggaaccaccuggagaacca

SEQ ID NO: 1020932 - RNA, 19 nt, Homo sapiens
  misc_RNA (1)...(19): siRNA sense strand
gaacggacaguuggaucua

SEQ ID NO: 1020933 - RNA, 19 nt, Homo sapiens
  misc_RNA (1)...(19): siRNA sense strand
ggucagauguaccaacagu

SEQ ID NO: 1020934 - RNA, 19 nt, Homo sapiens
  misc_RNA (1)...(19): siRNA sense strand
gugggaagcuaaucaucaa

SEQ ID NO: 1020935 - RNA, 19 nt, Homo sapiens
  misc_RNA (1)...(19): siRNA sense strand
cuuaacagaugaucagguu

SEQ ID NO: 1020936 - RNA, 19 nt, Homo sapiens
  misc_RNA (1)...(19): siRNA sense strand
ugaaucaagucaggugaaa

SEQ ID NO: 1020937 - RNA, 19 nt, Homo sapiens
  misc_RNA (1)...(19): siRNA sense strand
guucugaccuuuccuuugc

SEQ ID NO: 1020938 - RNA, 19 nt, Homo sapiens
  misc_RNA (1)...(19): siRNA sense strand
ccagggauauggccagcaa

SEQ ID NO: 1020939 - RNA, 19 nt, Homo sapiens
  misc_RNA (1)...(19): siRNA sense strand
uaacagaugaucagguuuc

SEQ ID NO: 1020940 - RNA, 19 nt, Homo sapiens
  misc_RNA (1)...(19): siRNA sense strand
gcaaguaugucugcuuuug

SEQ ID NO: 1020941 - RNA, 19 nt, Homo sapiens
  misc_RNA (1)...(19): siRNA sense strand
gaccuuuccuuugcaauuc

SEQ ID NO: 1020942 - RNA, 19 nt, Homo sapiens
  misc_RNA (1)...(19): siRNA sense strand
ucagcagccucaacaguau

SEQ ID NO: 1020943 - RNA, 19 nt, Homo sapiens
  misc_RNA (1)...(19): siRNA sense strand
uaugucagcguuuggcuua

SEQ ID NO: 1020944 - RNA, 19 nt, Homo sapiens
  misc_RNA (1)...(19): siRNA sense strand
ucugaguaaugaugaagua

SEQ ID NO: 1020945 - RNA, 19 nt, Homo sapiens
  misc_RNA (1)...(19): siRNA sense strand
gcagaagaucguucaggaa

SEQ ID NO: 1020946 - RNA, 19 nt, Homo sapiens
  misc_RNA (1)...(19): siRNA sense strand
gcguaaccguccucccuuu

SEQ ID NO: 1020947 - RNA, 19 nt, Homo sapiens
  misc_RNA (1)...(19): siRNA sense strand
gguauucaguauucagcaa

SEQ ID NO: 1020948 - RNA, 19 nt, Homo sapiens
  misc_RNA (1)...(19): siRNA sense strand
ggaucuaagugggaagcua

SEQ ID NO: 1020949 - RNA, 19 nt, Homo sapiens
  misc_RNA (1)...(19): siRNA sense strand
ggauauggccagcaaccaa

SEQ ID NO: 1020950 - RNA, 19 nt, Homo sapiens
  misc_RNA (1)...(19): siRNA sense strand
gauacugaaacugacauua

SEQ ID NO: 1020951 - RNA, 19 nt, Homo sapiens
  misc_RNA (1)...(19): siRNA sense strand
gauugaaggucagauguac

SEQ ID NO: 1020952 - RNA, 19 nt, Homo sapiens
  misc_RNA (1)...(19): siRNA sense strand
cugauagaacuucgaaaua

SEQ ID NO: 1020953 - RNA, 19 nt, Homo sapiens
  misc_RNA (1)...(19): siRNA sense strand
aguaugguauucaguauuc

SEQ ID NO: 1020954 - RNA, 19 nt, Homo sapiens
  misc_RNA (1)...(19): siRNA sense strand
ccaccaauauuccugaaaa

SEQ ID NO: 1020955 - RNA, 19 nt, Homo sapiens
  misc_RNA (1)...(19): siRNA sense strand
ggaccuuccaccaauauuc

SEQ ID NO: 1020956 - RNA, 19 nt, Homo sapiens
  misc_RNA (1)...(19): siRNA sense strand
caauuauccugcacaaacu

SEQ ID NO: 1020957 - RNA, 19 nt, Homo sapiens
  misc_RNA (1)...(19): siRNA sense strand
gucgagaacugauagaacu

SEQ ID NO: 1020958 - RNA, 19 nt, Homo sapiens
  misc_RNA (1)...(19): siRNA sense strand
ggaacacccgacagcauug

SEQ ID NO: 1020959 - RNA, 19 nt, Homo sapiens
  misc_RNA (1)...(19): siRNA sense strand
ccaagugggccuaauccuu

SEQ ID NO: 1020960 - RNA, 19 nt, Homo sapiens
  misc_RNA (1)...(19): siRNA sense strand
guaccaggcgagcaauuau

SEQ ID NO: 1020961 - RNA, 19 nt, Homo sapiens
  misc_RNA (1)...(19): siRNA sense strand
aaagucugcuucugauucu

SEQ ID NO: 1020962 - RNA, 19 nt, Homo sapiens
  misc_RNA (1)...(19): siRNA sense strand
gauggagaucuuauaacaa

SEQ ID NO: 1020963 - RNA, 19 nt, Homo sapiens
  misc_RNA (1)...(19): siRNA sense strand
acaguaugguauucaguau

SEQ ID NO: 1020964 - RNA, 19 nt, Homo sapiens
  misc_RNA (1)...(19): siRNA sense strand
aaacagucuacucagguua

SEQ ID NO: 1020965 - RNA, 19 nt, Homo sapiens
  misc_RNA (1)...(19): siRNA sense strand
ggaaaacuucugaguaaug

SEQ ID NO: 1020966 - RNA, 19 nt, Homo sapiens
  misc_RNA (1)...(19): siRNA sense strand
aaacuucugaguaaugaug

SEQ ID NO: 1020967 - RNA, 19 nt, Homo sapiens
  misc_RNA (1)...(19): siRNA sense strand
uuugauaguucugaccuuu

SEQ ID NO: 1020968 - RNA, 19 nt, Homo sapiens
  misc_RNA (1)...(19): siRNA sense strand
uacaggagcucagacucaa

SEQ ID NO: 1020969 - RNA, 19 nt, Homo sapiens
  misc_RNA (1)...(19): siRNA sense strand
gacucaagcaggucagauu

SEQ ID NO: 1020970 - RNA, 19 nt, Homo sapiens
  misc_RNA (1)...(19): siRNA sense strand
ugaccuuuccuuugcaauu

SEQ ID NO: 1020971 - RNA, 19 nt, Homo sapiens
  misc_RNA (1)...(19): siRNA sense strand
ccucaacaguaugguauuc

SEQ ID NO: 1020972 - RNA, 19 nt, Homo sapiens
  misc_RNA (1)...(19): siRNA sense strand
ggacaguuggaucuaagug

SEQ ID NO: 1020973 - RNA, 19 nt, Homo sapiens
  misc_RNA (1)...(19): siRNA sense strand
uuuauuggauagcuuggaa

SEQ ID NO: 1020974 - RNA, 19 nt, Homo sapiens
  misc_RNA (1)...(19): siRNA sense strand
aaggucagauguaccaaca

SEQ ID NO: 1020975 - RNA, 19 nt, Homo sapiens
  misc_RNA (1)...(19): siRNA sense strand
ccaauauuccugaaaauga

SEQ ID NO: 1020976 - RNA, 19 nt, Homo sapiens
  misc_RNA (1)...(19): siRNA sense strand
gguuauggcagcaaguaug

SEQ ID NO: 1020977 - RNA, 19 nt, Homo sapiens
  misc_RNA (1)...(19): siRNA sense strand
aaacuuacacugcccaaac

SEQ ID NO: 1020978 - RNA, 19 nt, Homo sapiens
  misc_RNA (1)...(19): siRNA sense strand
aauguuaugucagcguuug

SEQ ID NO: 1020979 - RNA, 19 nt, Homo sapiens
  misc_RNA (1)...(19): siRNA sense strand
ucucagccuacuaauuaua

SEQ ID NO: 1020980 - RNA, 19 nt, Homo sapiens
  misc_RNA (1)...(19): siRNA sense strand
ugaaucguuuauuggauag

SEQ ID NO: 1020981 - RNA, 19 nt, Homo sapiens
  misc_RNA (1)...(19): siRNA sense strand
uaaccguccucccuuuggu

SEQ ID NO: 1020982 - RNA, 19 nt, Homo sapiens
  misc_RNA (1)...(19): siRNA sense strand
gggaagcuaaucaucaaag

SEQ ID NO: 1020983 - RNA, 19 nt, Homo sapiens
  misc_RNA (1)...(19): siRNA sense strand
aacaguaugguauucagua

SEQ ID NO: 1020984 - RNA, 19 nt, Homo sapiens
  misc_RNA (1)...(19): siRNA sense strand
cucagcagccucaacagua

SEQ ID NO: 1020985 - RNA, 19 nt, Homo sapiens
  misc_RNA (1)...(19): siRNA sense strand
cucagcaguuccagggaua

SEQ ID NO: 1020986 - RNA, 19 nt, Homo sapiens
  misc_RNA (1)...(19): siRNA sense strand
uaaagaugaagauggagau

SEQ ID NO: 1020987 - RNA, 19 nt, Homo sapiens
  misc_RNA (1)...(19): siRNA sense strand
cuaagugggaagcuaauca

SEQ ID NO: 1020988 - RNA, 19 nt, Homo sapiens
  misc_RNA (1)...(19): siRNA sense strand
agauugaaggucagaugua

SEQ ID NO: 1020989 - RNA, 19 nt, Homo sapiens
  misc_RNA (1)...(19): siRNA sense strand
cagguuauggcagcaagua

SEQ ID NO: 1020990 - RNA, 19 nt, Homo sapiens
  misc_RNA (1)...(19): siRNA sense strand
aaagugaaucguuuauugg

SEQ ID NO: 1020991 - RNA, 19 nt, Homo sapiens
  misc_RNA (1)...(19): siRNA sense strand
accaggaccuuccaccaau

SEQ ID NO: 1020992 - RNA, 19 nt, Homo sapiens
  misc_RNA (1)...(19): siRNA sense strand
cugaaacugacauuauuug

SEQ ID NO: 1020993 - RNA, 19 nt, Homo sapiens
  misc_RNA (1)...(19): siRNA sense strand
ggauacugaaacugacauu

SEQ ID NO: 1020994 - RNA, 19 nt, Homo sapiens
  misc_RNA (1)...(19): siRNA sense strand
aggaacacccgacagcauu

SEQ ID NO: 1020995 - RNA, 19 nt, Homo sapiens
  misc_RNA (1)...(19): siRNA sense strand
gaaaagucugcuucugauu

SEQ ID NO: 1020996 - RNA, 19 nt, Homo sapiens
  misc_RNA (1)...(19): siRNA sense strand
aguaccaggcgagcaauua

SEQ ID NO: 1020997 - RNA, 19 nt, Homo sapiens
  misc_RNA (1)...(19): siRNA sense strand
ucaacaguaugguauucag

SEQ ID NO: 1020998 - RNA, 19 nt, Homo sapiens
  misc_RNA (1)...(19): siRNA sense strand
ucagauugaaggucagaug

SEQ ID NO: 1020999 - RNA, 19 nt, Homo sapiens
  misc_RNA (1)...(19): siRNA sense strand
acugauagaacuucgaaau

SEQ ID NO: 1021000 - RNA, 19 nt, Homo sapiens
  misc_RNA (1)...(19): siRNA sense strand
guuauggcagcaaguaugu

SEQ ID NO: 1021001 - RNA, 19 nt, Homo sapiens
  misc_RNA (1)...(19): siRNA sense strand
gcuucugauucuucuggaa

SEQ ID NO: 1021002 - RNA, 19 nt, Homo sapiens
  misc_RNA (1)...(19): siRNA sense strand
ucaagucaggugaaauauc

SEQ ID NO: 1021003 - RNA, 19 nt, Homo sapiens
  misc_RNA (1)...(19): siRNA sense strand
caacaguaugguauucagu

SEQ ID NO: 1021004 - RNA, 19 nt, Homo sapiens
  misc_RNA (1)...(19): siRNA sense strand
auacaggagcucagacuca

SEQ ID NO: 1021005 - RNA, 19 nt, Homo sapiens
  misc_RNA (1)...(19): siRNA sense strand
cacagcagccaccauauac

SEQ ID NO: 1021006 - RNA, 19 nt, Homo sapiens
  misc_RNA (1)...(19): siRNA sense strand
agccacagcagccaccaua

SEQ ID NO: 1021007 - RNA, 19 nt, Homo sapiens
  misc_RNA (1)...(19): siRNA sense strand
gaaucaagucaggugaaau

SEQ ID NO: 1021008 - RNA, 19 nt, Homo sapiens
  misc_RNA (1)...(19): siRNA sense strand
ggacagugguguacaacaa

SEQ ID NO: 1021009 - RNA, 19 nt, Homo sapiens
  misc_RNA (1)...(19): siRNA sense strand
gcaaaugucagagaugaaa

SEQ ID NO: 1021010 - RNA, 19 nt, Homo sapiens
  misc_RNA (1)...(19): siRNA sense strand
gcacacucuuugucacuga

SEQ ID NO: 1021011 - RNA, 19 nt, Homo sapiens
  misc_RNA (1)...(19): siRNA sense strand
cagcagacguccuucuaug

SEQ ID NO: 1021012 - RNA, 19 nt, Homo sapiens
  misc_RNA (1)...(19): siRNA sense strand
ucagaaagccaacaaguuc

SEQ ID NO: 1021013 - RNA, 19 nt, Homo sapiens
  misc_RNA (1)...(19): siRNA sense strand
ccaauuagagccggagaua

SEQ ID NO: 1021014 - RNA, 19 nt, Homo sapiens
  misc_RNA (1)...(19): siRNA sense strand
ccgcaaaugucagagauga

SEQ ID NO: 1021015 - RNA, 19 nt, Homo sapiens
  misc_RNA (1)...(19): siRNA sense strand
caucagcgccgucuccauu

SEQ ID NO: 1021016 - RNA, 19 nt, Homo sapiens
  misc_RNA (1)...(19): siRNA sense strand
caagcaggcuauucuacau

SEQ ID NO: 1021017 - RNA, 19 nt, Homo sapiens
  misc_RNA (1)...(19): siRNA sense strand
ggacaccaaugagaagauc

SEQ ID NO: 1021018 - RNA, 19 nt, Homo sapiens
  misc_RNA (1)...(19): siRNA sense strand
uguagucggucuucucuug

SEQ ID NO: 1021019 - RNA, 19 nt, Homo sapiens
  misc_RNA (1)...(19): siRNA sense strand
ugaaacaucccaauuagag

SEQ ID NO: 1021020 - RNA, 19 nt, Homo sapiens
  misc_RNA (1)...(19): siRNA sense strand
uuaauguccugguucagaa

SEQ ID NO: 1021021 - RNA, 19 nt, Homo sapiens
  misc_RNA (1)...(19): siRNA sense strand
caaugccugugucaacuau

SEQ ID NO: 1021022 - RNA, 19 nt, Homo sapiens
  misc_RNA (1)...(19): siRNA sense strand
cgaugcaccuccuuuccaa

SEQ ID NO: 1021023 - RNA, 19 nt, Homo sapiens
  misc_RNA (1)...(19): siRNA sense strand
ucaggcacuucuuggauau

SEQ ID NO: 1021024 - RNA, 19 nt, Homo sapiens
  misc_RNA (1)...(19): siRNA sense strand
uucaggcacuucuuggaua

SEQ ID NO: 1021025 - RNA, 19 nt, Homo sapiens
  misc_RNA (1)...(19): siRNA sense strand
gugccaauaucugcaaugu

SEQ ID NO: 1021026 - RNA, 19 nt, Homo sapiens
  misc_RNA (1)...(19): siRNA sense strand
gcacuucuuggauaucauc

SEQ ID NO: 1021027 - RNA, 19 nt, Homo sapiens
  misc_RNA (1)...(19): siRNA sense strand
ucaccugcauccaaguuca

SEQ ID NO: 1021028 - RNA, 19 nt, Homo sapiens
  misc_RNA (1)...(19): siRNA sense strand
gaucuucaugccauuuaga

SEQ ID NO: 1021029 - RNA, 19 nt, Homo sapiens
  misc_RNA (1)...(19): siRNA sense strand
ggagcuggaggaagggauu

SEQ ID NO: 1021030 - RNA, 19 nt, Homo sapiens
  misc_RNA (1)...(19): siRNA sense strand
gccggacagugguguacaa

SEQ ID NO: 1021031 - RNA, 19 nt, Homo sapiens
  misc_RNA (1)...(19): siRNA sense strand
acacuggcauccacugucu

SEQ ID NO: 1021032 - RNA, 19 nt, Homo sapiens
  misc_RNA (1)...(19): siRNA sense strand
gagcgaugcaccuccuuuc

SEQ ID NO: 1021033 - RNA, 19 nt, Homo sapiens
  misc_RNA (1)...(19): siRNA sense strand
ggaggaagggauugauguc

SEQ ID NO: 1021034 - RNA, 19 nt, Homo sapiens
  misc_RNA (1)...(19): siRNA sense strand
gcuguagccagugccaaua

SEQ ID NO: 1021035 - RNA, 19 nt, Homo sapiens
  misc_RNA (1)...(19): siRNA sense strand
gggccuuaauguccugguu

SEQ ID NO: 1021036 - RNA, 19 nt, Homo sapiens
  misc_RNA (1)...(19): siRNA sense strand
ccauugcugugggccuuaa

SEQ ID NO: 1021037 - RNA, 19 nt, Homo sapiens
  misc_RNA (1)...(19): siRNA sense strand
gacccucgcacacucuuug

SEQ ID NO: 1021038 - RNA, 19 nt, Homo sapiens
  misc_RNA (1)...(19): siRNA sense strand
gccuuaauguccugguuca

SEQ ID NO: 1021039 - RNA, 19 nt, Homo sapiens
  misc_RNA (1)...(19): siRNA sense strand
caacuaugcaaaccgcaau

SEQ ID NO: 1021040 - RNA, 19 nt, Homo sapiens
  misc_RNA (1)...(19): siRNA sense strand
ucaagcaggcuauucuaca

SEQ ID NO: 1021041 - RNA, 19 nt, Homo sapiens
  misc_RNA (1)...(19): siRNA sense strand
aagaucuucaugccauuua

SEQ ID NO: 1021042 - RNA, 19 nt, Homo sapiens
  misc_RNA (1)...(19): siRNA sense strand
guucagaaagccaacaagu

SEQ ID NO: 1021043 - RNA, 19 nt, Homo sapiens
  misc_RNA (1)...(19): siRNA sense strand
aaucaagcaggcuauucua

SEQ ID NO: 1021044 - RNA, 19 nt, Homo sapiens
  misc_RNA (1)...(19): siRNA sense strand
ccagcagacguccuucuau

SEQ ID NO: 1021045 - RNA, 19 nt, Homo sapiens
  misc_RNA (1)...(19): siRNA sense strand
cagaaagccaacaaguuca

SEQ ID NO: 1021046 - RNA, 19 nt, Homo sapiens
  misc_RNA (1)...(19): siRNA sense strand
gaaaaucaagcaggcuauu

SEQ ID NO: 1021047 - RNA, 19 nt, Homo sapiens
  misc_RNA (1)...(19): siRNA sense strand
cucgugggcuccuccaaga

SEQ ID NO: 1021048 - RNA, 19 nt, Homo sapiens
  misc_RNA (1)...(19): siRNA sense strand
acaaugccugugucaacua

SEQ ID NO: 1021049 - RNA, 19 nt, Homo sapiens
  misc_RNA (1)...(19): siRNA sense strand
cgagcgaugcaccuccuuu

SEQ ID NO: 1021050 - RNA, 19 nt, Homo sapiens
  misc_RNA (1)...(19): siRNA sense strand
gcaaauaccugccguuuau

SEQ ID NO: 1021051 - RNA, 19 nt, Homo sapiens
  misc_RNA (1)...(19): siRNA sense strand
gguaaacgcugguguggua

SEQ ID NO: 1021052 - RNA, 19 nt, Homo sapiens
  misc_RNA (1)...(19): siRNA sense strand
ccagauagauggaagaaau

SEQ ID NO: 1021053 - RNA, 19 nt, Homo sapiens
  misc_RNA (1)...(19): siRNA sense strand
caacuaauuuccagauaga

SEQ ID NO: 1021054 - RNA, 19 nt, Homo sapiens
  misc_RNA (1)...(19): siRNA sense strand
ggaagagaguuaccaggaa

SEQ ID NO: 1021055 - RNA, 19 nt, Homo sapiens
  misc_RNA (1)...(19): siRNA sense strand
gagcaaauagggaaucuaa

SEQ ID NO: 1021056 - RNA, 19 nt, Homo sapiens
  misc_RNA (1)...(19): siRNA sense strand
cgugauagauaccaguuua

SEQ ID NO: 1021057 - RNA, 19 nt, Homo sapiens
  misc_RNA (1)...(19): siRNA sense strand
ugacagauguuguaaucaa

SEQ ID NO: 1021058 - RNA, 19 nt, Homo sapiens
  misc_RNA (1)...(19): siRNA sense strand
aaacuuggauuugcucuuu

SEQ ID NO: 1021059 - RNA, 19 nt, Homo sapiens
  misc_RNA (1)...(19): siRNA sense strand
caacugggauaucugagaa

SEQ ID NO: 1021060 - RNA, 19 nt, Homo sapiens
  misc_RNA (1)...(19): siRNA sense strand
gugcagggaugacauauuc

SEQ ID NO: 1021061 - RNA, 19 nt, Homo sapiens
  misc_RNA (1)...(19): siRNA sense strand
gaaaagauccugcaaaauc

SEQ ID NO: 1021062 - RNA, 19 nt, Homo sapiens
  misc_RNA (1)...(19): siRNA sense strand
gaugccagcucuauucaau

SEQ ID NO: 1021063 - RNA, 19 nt, Homo sapiens
  misc_RNA (1)...(19): siRNA sense strand
uagaggaaguccaaagaaa

SEQ ID NO: 1021064 - RNA, 19 nt, Homo sapiens
  misc_RNA (1)...(19): siRNA sense strand
gggaggaaauuaucaacug

SEQ ID NO: 1021065 - RNA, 19 nt, Homo sapiens
  misc_RNA (1)...(19): siRNA sense strand
gaaaguaugcuuccaucau

SEQ ID NO: 1021066 - RNA, 19 nt, Homo sapiens
  misc_RNA (1)...(19): siRNA sense strand
ggcugcagaugacuucuua

SEQ ID NO: 1021067 - RNA, 19 nt, Homo sapiens
  misc_RNA (1)...(19): siRNA sense strand
gauagcauggauuugauua

SEQ ID NO: 1021068 - RNA, 19 nt, Homo sapiens
  misc_RNA (1)...(19): siRNA sense strand
ggaggaaauuaucaacugu

SEQ ID NO: 1021069 - RNA, 19 nt, Homo sapiens
  misc_RNA (1)...(19): siRNA sense strand
guccauggauuccguaaug

SEQ ID NO: 1021070 - RNA, 19 nt, Homo sapiens
  misc_RNA (1)...(19): siRNA sense strand
gcaaauagggaaucuaagg

SEQ ID NO: 1021071 - RNA, 19 nt, Homo sapiens
  misc_RNA (1)...(19): siRNA sense strand
cgggaaagauggcaaauac

SEQ ID NO: 1021072 - RNA, 19 nt, Homo sapiens
  misc_RNA (1)...(19): siRNA sense strand
ccucucagaugauaguaaa

SEQ ID NO: 1021073 - RNA, 19 nt, Homo sapiens
  misc_RNA (1)...(19): siRNA sense strand
uaacauucgugauagauac

SEQ ID NO: 1021074 - RNA, 19 nt, Homo sapiens
  misc_RNA (1)...(19): siRNA sense strand
gcagugacaacucguuuga

SEQ ID NO: 1021075 - RNA, 19 nt, Homo sapiens
  misc_RNA (1)...(19): siRNA sense strand
gaaacuaggacuauguaca

SEQ ID NO: 1021076 - RNA, 19 nt, Homo sapiens
  misc_RNA (1)...(19): siRNA sense strand
uaucaacugugcacaagga

SEQ ID NO: 1021077 - RNA, 19 nt, Homo sapiens
  misc_RNA (1)...(19): siRNA sense strand
gcagggaugacauauucua

SEQ ID NO: 1021078 - RNA, 19 nt, Homo sapiens
  misc_RNA (1)...(19): siRNA sense strand
ggacuuaaagacaauggaa

SEQ ID NO: 1021079 - RNA, 19 nt, Homo sapiens
  misc_RNA (1)...(19): siRNA sense strand
aaauauaacuccccaacua

SEQ ID NO: 1021080 - RNA, 19 nt, Homo sapiens
  misc_RNA (1)...(19): siRNA sense strand
aaaguaugcuuccaucauc

SEQ ID NO: 1021081 - RNA, 19 nt, Homo sapiens
  misc_RNA (1)...(19): siRNA sense strand
gcucugagacgaaugcuau

SEQ ID NO: 1021082 - RNA, 19 nt, Homo sapiens
  misc_RNA (1)...(19): siRNA sense strand
gguccaagcuagaggaagu

SEQ ID NO: 1021083 - RNA, 19 nt, Homo sapiens
  misc_RNA (1)...(19): siRNA sense strand
cuaucucuauucaggauua

SEQ ID NO: 1021084 - RNA, 19 nt, Homo sapiens
  misc_RNA (1)...(19): siRNA sense strand
ccaacuaauuuccagauag

SEQ ID NO: 1021085 - RNA, 19 nt, Homo sapiens
  misc_RNA (1)...(19): siRNA sense strand
aaucaagggccuacucuaa

SEQ ID NO: 1021086 - RNA, 19 nt, Homo sapiens
  misc_RNA (1)...(19): siRNA sense strand
guaacauucgugauagaua

SEQ ID NO: 1021087 - RNA, 19 nt, Homo sapiens
  misc_RNA (1)...(19): siRNA sense strand
ucaagggccuacucuaaca

SEQ ID NO: 1021088 - RNA, 19 nt, Homo sapiens
  misc_RNA (1)...(19): siRNA sense strand
gaauggaaacuaggacuau

SEQ ID NO: 1021089 - RNA, 19 nt, Homo sapiens
  misc_RNA (1)...(19): siRNA sense strand
guaaaggauguucuaauuc

SEQ ID NO: 1021090 - RNA, 19 nt, Homo sapiens
  misc_RNA (1)...(19): siRNA sense strand
ucucggugguuagcaauua

SEQ ID NO: 1021091 - RNA, 19 nt, Homo sapiens
  misc_RNA (1)...(19): siRNA sense strand
caauacuucuccucucaga

SEQ ID NO: 1021092 - RNA, 19 nt, Homo sapiens
  misc_RNA (1)...(19): siRNA sense strand
ugggauaucugagaaguau

SEQ ID NO: 1021093 - RNA, 19 nt, Homo sapiens
  misc_RNA (1)...(19): siRNA sense strand
uaauacaacugggauaucu

SEQ ID NO: 1021094 - RNA, 19 nt, Homo sapiens
  misc_RNA (1)...(19): siRNA sense strand
ucugacaucucggugguua

SEQ ID NO: 1021095 - RNA, 19 nt, Homo sapiens
  misc_RNA (1)...(19): siRNA sense strand
cauaugcggaagagaguua

SEQ ID NO: 1021096 - RNA, 19 nt, Homo sapiens
  misc_RNA (1)...(19): siRNA sense strand
gauuugcucuuucugacau

SEQ ID NO: 1021097 - RNA, 19 nt, Homo sapiens
  misc_RNA (1)...(19): siRNA sense strand
gcuaugggcugcagaugac

SEQ ID NO: 1021098 - RNA, 19 nt, Homo sapiens
  misc_RNA (1)...(19): siRNA sense strand
gcuggacccuguaaaggau

SEQ ID NO: 1021099 - RNA, 19 nt, Homo sapiens
  misc_RNA (1)...(19): siRNA sense strand
gugaagaucauauuauugg

SEQ ID NO: 1021100 - RNA, 19 nt, Homo sapiens
  misc_RNA (1)...(19): siRNA sense strand
gaugacuucuuagaggauu

SEQ ID NO: 1021101 - RNA, 19 nt, Homo sapiens
  misc_RNA (1)...(19): siRNA sense strand
uagcauggauuugauuaca

SEQ ID NO: 1021102 - RNA, 19 nt, Homo sapiens
  misc_RNA (1)...(19): siRNA sense strand
ggauaucugagaaguauag

SEQ ID NO: 1021103 - RNA, 19 nt, Homo sapiens
  misc_RNA (1)...(19): siRNA sense strand
gauuauggacuuaaagaca

SEQ ID NO: 1021104 - RNA, 19 nt, Homo sapiens
  misc_RNA (1)...(19): siRNA sense strand
cagauagauggaagaaaua

SEQ ID NO: 1021105 - RNA, 19 nt, Homo sapiens
  misc_RNA (1)...(19): siRNA sense strand
ggacuauguacaccagaaa

SEQ ID NO: 1021106 - RNA, 19 nt, Homo sapiens
  misc_RNA (1)...(19): siRNA sense strand
cuugacagauguuguaauc

SEQ ID NO: 1021107 - RNA, 19 nt, Homo sapiens
  misc_RNA (1)...(19): siRNA sense strand
gcuagaggaaguccaaaga

SEQ ID NO: 1021108 - RNA, 19 nt, Homo sapiens
  misc_RNA (1)...(19): siRNA sense strand
gcgaagauucacuggauga

SEQ ID NO: 1021109 - RNA, 19 nt, Homo sapiens
  misc_RNA (1)...(19): siRNA sense strand
ccaguuuaaucccauggaa

SEQ ID NO: 1021110 - RNA, 19 nt, Homo sapiens
  misc_RNA (1)...(19): siRNA sense strand
aaucuaagggaggaaauua

SEQ ID NO: 1021111 - RNA, 19 nt, Homo sapiens
  misc_RNA (1)...(19): siRNA sense strand
guggauagcauggauuuga

SEQ ID NO: 1021112 - RNA, 19 nt, Homo sapiens
  misc_RNA (1)...(19): siRNA sense strand
cuugagaacuuaugaacca

SEQ ID NO: 1021113 - RNA, 19 nt, Homo sapiens
  misc_RNA (1)...(19): siRNA sense strand
gauagauaccaguuuaauc

SEQ ID NO: 1021114 - RNA, 19 nt, Homo sapiens
  misc_RNA (1)...(19): siRNA sense strand
ggaaagauggcaaauaccu

SEQ ID NO: 1021115 - RNA, 19 nt, Homo sapiens
  misc_RNA (1)...(19): siRNA sense strand
gaaucuaagggaggaaauu

SEQ ID NO: 1021116 - RNA, 19 nt, Homo sapiens
  misc_RNA (1)...(19): siRNA sense strand
cccaacuaauuuccagaua

SEQ ID NO: 1021117 - RNA, 19 nt, Homo sapiens
  misc_RNA (1)...(19): siRNA sense strand
guaauggaguuuugcuuga

SEQ ID NO: 1021118 - RNA, 19 nt, Homo sapiens
  misc_RNA (1)...(19): siRNA sense strand
ggauagcauggauuugauu

SEQ ID NO: 1021119 - RNA, 19 nt, Homo sapiens
  misc_RNA (1)...(19): siRNA sense strand
guucaacaaauacgaauuc

SEQ ID NO: 1021120 - RNA, 19 nt, Homo sapiens
  misc_RNA (1)...(19): siRNA sense strand
gaucccugguucaacaaau

SEQ ID NO: 1021121 - RNA, 19 nt, Homo sapiens
  misc_RNA (1)...(19): siRNA sense strand
ucauugagcucaggaagag

SEQ ID NO: 1021122 - RNA, 19 nt, Homo sapiens
  misc_RNA (1)...(19): siRNA sense strand
uggcuuugcucacucaugu

SEQ ID NO: 1021123 - RNA, 19 nt, Homo sapiens
  misc_RNA (1)...(19): siRNA sense strand
cuaauucuuucugcucuga

SEQ ID NO: 1021124 - RNA, 19 nt, Homo sapiens
  misc_RNA (1)...(19): siRNA sense strand
gcucaaaauuguacuaucu

SEQ ID NO: 1021125 - RNA, 19 nt, Homo sapiens
  misc_RNA (1)...(19): siRNA sense strand
acgaaaagauccugcaaaa

SEQ ID NO: 1021126 - RNA, 19 nt, Homo sapiens
  misc_RNA (1)...(19): siRNA sense strand
gacagauguuguaaucaag

SEQ ID NO: 1021127 - RNA, 19 nt, Homo sapiens
  misc_RNA (1)...(19): siRNA sense strand
ucacucauguggauagcau

SEQ ID NO: 1021128 - RNA, 19 nt, Homo sapiens
  misc_RNA (1)...(19): siRNA sense strand
gaaggacagaauucauugu

SEQ ID NO: 1021129 - RNA, 19 nt, Homo sapiens
  misc_RNA (1)...(19): siRNA sense strand
uaucuugaacgguaacauu

SEQ ID NO: 1021130 - RNA, 19 nt, Homo sapiens
  misc_RNA (1)...(19): siRNA sense strand
ugucugccuugagaacuua

SEQ ID NO: 1021131 - RNA, 19 nt, Homo sapiens
  misc_RNA (1)...(19): siRNA sense strand
aaaagauccugcaaaauca

SEQ ID NO: 1021132 - RNA, 19 nt, Homo sapiens
  misc_RNA (1)...(19): siRNA sense strand
gaccuuauagaaauagaga

SEQ ID NO: 1021133 - RNA, 19 nt, Homo sapiens
  misc_RNA (1)...(19): siRNA sense strand
cuucuccucucagaugaua

SEQ ID NO: 1021134 - RNA, 19 nt, Homo sapiens
  misc_RNA (1)...(19): siRNA sense strand
uuaaucccauggaaucaau

SEQ ID NO: 1021135 - RNA, 19 nt, Homo sapiens
  misc_RNA (1)...(19): siRNA sense strand
ggagcuggacccuguaaag

SEQ ID NO: 1021136 - RNA, 19 nt, Homo sapiens
  misc_RNA (1)...(19): siRNA sense strand
agaguuaccaggaaggaaa

SEQ ID NO: 1021137 - RNA, 19 nt, Homo sapiens
  misc_RNA (1)...(19): siRNA sense strand
uaagggaggaaauuaucaa

SEQ ID NO: 1021138 - RNA, 19 nt, Homo sapiens
  misc_RNA (1)...(19): siRNA sense strand
caagcuagaggaaguccaa

SEQ ID NO: 1021139 - RNA, 19 nt, Homo sapiens
  misc_RNA (1)...(19): siRNA sense strand
agugacaacucguuugaca

SEQ ID NO: 1021140 - RNA, 19 nt, Homo sapiens
  misc_RNA (1)...(19): siRNA sense strand
gaauucauuguguggcauu

SEQ ID NO: 1021141 - RNA, 19 nt, Homo sapiens
  misc_RNA (1)...(19): siRNA sense strand
ccauggaaucaaucaaauu

SEQ ID NO: 1021142 - RNA, 19 nt, Homo sapiens
  misc_RNA (1)...(19): siRNA sense strand
uaaggguaguguccaugga

SEQ ID NO: 1021143 - RNA, 19 nt, Homo sapiens
  misc_RNA (1)...(19): siRNA sense strand
aacgguaacauucgugaua

SEQ ID NO: 1021144 - RNA, 19 nt, Homo sapiens
  misc_RNA (1)...(19): siRNA sense strand
gcuuuggugggcacuaaua

SEQ ID NO: 1021145 - RNA, 19 nt, Homo sapiens
  misc_RNA (1)...(19): siRNA sense strand
gugauuauggacuuaaaga

SEQ ID NO: 1021146 - RNA, 19 nt, Homo sapiens
  misc_RNA (1)...(19): siRNA sense strand
ggaagaaauagaaaaguga

SEQ ID NO: 1021147 - RNA, 19 nt, Homo sapiens
  misc_RNA (1)...(19): siRNA sense strand
gggccuacucuaacaguga

SEQ ID NO: 1021148 - RNA, 19 nt, Homo sapiens
  misc_RNA (1)...(19): siRNA sense strand
cccauggaaucaaucaaau

SEQ ID NO: 1021149 - RNA, 19 nt, Homo sapiens
  misc_RNA (1)...(19): siRNA sense strand
uaccugccguuuauucugu

SEQ ID NO: 1021150 - RNA, 19 nt, Homo sapiens
  misc_RNA (1)...(19): siRNA sense strand
ggccauauccuacaccaaa

SEQ ID NO: 1021151 - RNA, 19 nt, Homo sapiens
  misc_RNA (1)...(19): siRNA sense strand
ccaguaauccuuuccaagu

SEQ ID NO: 1021152 - RNA, 19 nt, Homo sapiens
  misc_RNA (1)...(19): siRNA sense strand
gagcuacccagaccauaug

SEQ ID NO: 1021153 - RNA, 19 nt, Homo sapiens
  misc_RNA (1)...(19): siRNA sense strand
cagaugcacuaccugaaca

SEQ ID NO: 1021154 - RNA, 19 nt, Homo sapiens
  misc_RNA (1)...(19): siRNA sense strand
ccauauccuacaccaaaua

SEQ ID NO: 1021155 - RNA, 19 nt, Homo sapiens
  misc_RNA (1)...(19): siRNA sense strand
caguaauccuuuccaagug

SEQ ID NO: 1021156 - RNA, 19 nt, Homo sapiens
  misc_RNA (1)...(19): siRNA sense strand
ggaccagcaccaacaggaa

SEQ ID NO: 1021157 - RNA, 19 nt, Homo sapiens
  misc_RNA (1)...(19): siRNA sense strand
ccagcacccuuuccuccuu

SEQ ID NO: 1021158 - RNA, 19 nt, Homo sapiens
  misc_RNA (1)...(19): siRNA sense strand
gccaaaaccucugcuguga

SEQ ID NO: 1021159 - RNA, 19 nt, Homo sapiens
  misc_RNA (1)...(19): siRNA sense strand
ggaaugggagggcaguauc

SEQ ID NO: 1021160 - RNA, 19 nt, Homo sapiens
  misc_RNA (1)...(19): siRNA sense strand
gugcaacacccuccacugu

SEQ ID NO: 1021161 - RNA, 19 nt, Homo sapiens
  misc_RNA (1)...(19): siRNA sense strand
gcagaugcacuaccugaac

SEQ ID NO: 1021162 - RNA, 19 nt, Homo sapiens
  misc_RNA (1)...(19): siRNA sense strand
gccauauccuacaccaaau

SEQ ID NO: 1021163 - RNA, 19 nt, Homo sapiens
  misc_RNA (1)...(19): siRNA sense strand
ggacucccaccaagugcaa

SEQ ID NO: 1021164 - RNA, 19 nt, Homo sapiens
  misc_RNA (1)...(19): siRNA sense strand
gcaccaacaggaauguauc

SEQ ID NO: 1021165 - RNA, 19 nt, Homo sapiens
  misc_RNA (1)...(19): siRNA sense strand
gaccagcaccaacaggaau

SEQ ID NO: 1021166 - RNA, 19 nt, Homo sapiens
  misc_RNA (1)...(19): siRNA sense strand
caccaaauaugcccuuucc

SEQ ID NO: 1021167 - RNA, 19 nt, Homo sapiens
  misc_RNA (1)...(19): siRNA sense strand
gggaccaccagcaccauau

SEQ ID NO: 1021168 - RNA, 19 nt, Homo sapiens
  misc_RNA (1)...(19): siRNA sense strand
caagugccuucaggaccuu

SEQ ID NO: 1021169 - RNA, 19 nt, Homo sapiens
  misc_RNA (1)...(19): siRNA sense strand
agagcuacccagaccauau

SEQ ID NO: 1021170 - RNA, 19 nt, Homo sapiens
  misc_RNA (1)...(19): siRNA sense strand
ggaccaccagcaccauauc

SEQ ID NO: 1021171 - RNA, 19 nt, Homo sapiens
  misc_RNA (1)...(19): siRNA sense strand
ggcaguauccuaccccuaa

SEQ ID NO: 1021172 - RNA, 19 nt, Homo sapiens
  misc_RNA (1)...(19): siRNA sense strand
gaacagaaguaaugaaauc

SEQ ID NO: 1021173 - RNA, 19 nt, Homo sapiens
  misc_RNA (1)...(19): siRNA sense strand
ccacagacgucacugauaa

SEQ ID NO: 1021174 - RNA, 19 nt, Homo sapiens
  misc_RNA (1)...(19): siRNA sense strand
guaaugcuguuucugcuua

SEQ ID NO: 1021175 - RNA, 19 nt, Homo sapiens
  misc_RNA (1)...(19): siRNA sense strand
gcaagacacuccaaguuug

SEQ ID NO: 1021176 - RNA, 19 nt, Homo sapiens
  misc_RNA (1)...(19): siRNA sense strand
gaaagucuaucacauuauc

SEQ ID NO: 1021177 - RNA, 19 nt, Homo sapiens
  misc_RNA (1)...(19): siRNA sense strand
caagaucccugucauugaa

SEQ ID NO: 1021178 - RNA, 19 nt, Homo sapiens
  misc_RNA (1)...(19): siRNA sense strand
ggaagcagaucucuugugu

SEQ ID NO: 1021179 - RNA, 19 nt, Homo sapiens
  misc_RNA (1)...(19): siRNA sense strand
gaacaucucucggucuaug

SEQ ID NO: 1021180 - RNA, 19 nt, Homo sapiens
  misc_RNA (1)...(19): siRNA sense strand
ugagaaaucugacaauugu

SEQ ID NO: 1021181 - RNA, 19 nt, Homo sapiens
  misc_RNA (1)...(19): siRNA sense strand
gaaagcagcaagaauauuc

SEQ ID NO: 1021182 - RNA, 19 nt, Homo sapiens
  misc_RNA (1)...(19): siRNA sense strand
aagaugauguugaagcuua

SEQ ID NO: 1021183 - RNA, 19 nt, Homo sapiens
  misc_RNA (1)...(19): siRNA sense strand
gaaggaaagucuaucacau

SEQ ID NO: 1021184 - RNA, 19 nt, Homo sapiens
  misc_RNA (1)...(19): siRNA sense strand
guacagcacugacuacuac

SEQ ID NO: 1021185 - RNA, 19 nt, Homo sapiens
  misc_RNA (1)...(19): siRNA sense strand
aggaaagucuaucacauua

SEQ ID NO: 1021186 - RNA, 19 nt, Homo sapiens
  misc_RNA (1)...(19): siRNA sense strand
gggaacaucucucggucua

SEQ ID NO: 1021187 - RNA, 19 nt, Homo sapiens
  misc_RNA (1)...(19): siRNA sense strand
ugaccaaccuccagcauga

SEQ ID NO: 1021188 - RNA, 19 nt, Homo sapiens
  misc_RNA (1)...(19): siRNA sense strand
gagaacaucaccgaaauuu

SEQ ID NO: 1021189 - RNA, 19 nt, Homo sapiens
  misc_RNA (1)...(19): siRNA sense strand
gguaccagcugucaaacaa

SEQ ID NO: 1021190 - RNA, 19 nt, Homo sapiens
  misc_RNA (1)...(19): siRNA sense strand
gauaaucccacucacauga

SEQ ID NO: 1021191 - RNA, 19 nt, Homo sapiens
  misc_RNA (1)...(19): siRNA sense strand
gcgcuucagugguucuaua

SEQ ID NO: 1021192 - RNA, 19 nt, Homo sapiens
  misc_RNA (1)...(19): siRNA sense strand
aaugaaagcagcaagaaua

SEQ ID NO: 1021193 - RNA, 19 nt, Homo sapiens
  misc_RNA (1)...(19): siRNA sense strand
aaagauuucucaugguuug

SEQ ID NO: 1021194 - RNA, 19 nt, Homo sapiens
  misc_RNA (1)...(19): siRNA sense strand
gcucauaaagcauuucuga

SEQ ID NO: 1021195 - RNA, 19 nt, Homo sapiens
  misc_RNA (1)...(19): siRNA sense strand
aauuguggauucuggauua

SEQ ID NO: 1021196 - RNA, 19 nt, Homo sapiens
  misc_RNA (1)...(19): siRNA sense strand
gcucaagccagacacauuu

SEQ ID NO: 1021197 - RNA, 19 nt, Homo sapiens
  misc_RNA (1)...(19): siRNA sense strand
ugacuugucugaacugauc

SEQ ID NO: 1021198 - RNA, 19 nt, Homo sapiens
  misc_RNA (1)...(19): siRNA sense strand
ccaaacauaugaaugaaac

SEQ ID NO: 1021199 - RNA, 19 nt, Homo sapiens
  misc_RNA (1)...(19): siRNA sense strand
ggcaagacacuccaaguuu

SEQ ID NO: 1021200 - RNA, 19 nt, Homo sapiens
  misc_RNA (1)...(19): siRNA sense strand
gguuagaaaucaucaacga

SEQ ID NO: 1021201 - RNA, 19 nt, Homo sapiens
  misc_RNA (1)...(19): siRNA sense strand
ccacucacaugaacaaugg

SEQ ID NO: 1021202 - RNA, 19 nt, Homo sapiens
  misc_RNA (1)...(19): siRNA sense strand
gugauccgguuccuaauau

SEQ ID NO: 1021203 - RNA, 19 nt, Homo sapiens
  misc_RNA (1)...(19): siRNA sense strand
gauuggagccuaacagugu

SEQ ID NO: 1021204 - RNA, 19 nt, Homo sapiens
  misc_RNA (1)...(19): siRNA sense strand
ggacugagaaaucugacaa

SEQ ID NO: 1021205 - RNA, 19 nt, Homo sapiens
  misc_RNA (1)...(19): siRNA sense strand
gucaaacaaugaggugaua

SEQ ID NO: 1021206 - RNA, 19 nt, Homo sapiens
  misc_RNA (1)...(19): siRNA sense strand
ccacacacagggcuccuua

SEQ ID NO: 1021207 - RNA, 19 nt, Homo sapiens
  misc_RNA (1)...(19): siRNA sense strand
ggugauccgguuccuaaua

SEQ ID NO: 1021208 - RNA, 19 nt, Homo sapiens
  misc_RNA (1)...(19): siRNA sense strand
ggaaggaaagucuaucaca

SEQ ID NO: 1021209 - RNA, 19 nt, Homo sapiens
  misc_RNA (1)...(19): siRNA sense strand
gcauauagcccagcagauc

SEQ ID NO: 1021210 - RNA, 19 nt, Homo sapiens
  misc_RNA (1)...(19): siRNA sense strand
gaagaucaagauucuguca

SEQ ID NO: 1021211 - RNA, 19 nt, Homo sapiens
  misc_RNA (1)...(19): siRNA sense strand
ggaaggaugagaaacagau

SEQ ID NO: 1021212 - RNA, 19 nt, Homo sapiens
  misc_RNA (1)...(19): siRNA sense strand
ggagguguaugagcugaug

SEQ ID NO: 1021213 - RNA, 19 nt, Homo sapiens
  misc_RNA (1)...(19): siRNA sense strand
gaaggaugccagugacaau

SEQ ID NO: 1021214 - RNA, 19 nt, Homo sapiens
  misc_RNA (1)...(19): siRNA sense strand
uagaaaucaucaacgaaga

SEQ ID NO: 1021215 - RNA, 19 nt, Homo sapiens
  misc_RNA (1)...(19): siRNA sense strand
gcaaacagcccugguacca

SEQ ID NO: 1021216 - RNA, 19 nt, Homo sapiens
  misc_RNA (1)...(19): siRNA sense strand
gggagaacuugcuggugaa

SEQ ID NO: 1021217 - RNA, 19 nt, Homo sapiens
  misc_RNA (1)...(19): siRNA sense strand
caggugauccgguuccuaa

SEQ ID NO: 1021218 - RNA, 19 nt, Homo sapiens
  misc_RNA (1)...(19): siRNA sense strand
gauuuguacugccugaaug

SEQ ID NO: 1021219 - RNA, 19 nt, Homo sapiens
  misc_RNA (1)...(19): siRNA sense strand
ugacgaguuugucuaggaa

SEQ ID NO: 1021220 - RNA, 19 nt, Homo sapiens
  misc_RNA (1)...(19): siRNA sense strand
cagcacaucaagcgacaua

SEQ ID NO: 1021221 - RNA, 19 nt, Homo sapiens
  misc_RNA (1)...(19): siRNA sense strand
cccagaugcugucauuauu

SEQ ID NO: 1021222 - RNA, 19 nt, Homo sapiens
  misc_RNA (1)...(19): siRNA sense strand
gcccagaugcugucauuau

SEQ ID NO: 1021223 - RNA, 19 nt, Homo sapiens
  misc_RNA (1)...(19): siRNA sense strand
gauuucugcucacuucaug

SEQ ID NO: 1021224 - RNA, 19 nt, Homo sapiens
  misc_RNA (1)...(19): siRNA sense strand
ucuaucacauuauccugua

SEQ ID NO: 1021225 - RNA, 19 nt, Homo sapiens
  misc_RNA (1)...(19): siRNA sense strand
gauacccaauugugguuug

SEQ ID NO: 1021226 - RNA, 19 nt, Homo sapiens
  misc_RNA (1)...(19): siRNA sense strand
gaaugaaagcagcaagaau

SEQ ID NO: 1021227 - RNA, 19 nt, Homo sapiens
  misc_RNA (1)...(19): siRNA sense strand
guccagacacucaggauuu

SEQ ID NO: 1021228 - RNA, 19 nt, Homo sapiens
  misc_RNA (1)...(19): siRNA sense strand
ggaucaagacucuccaaga

SEQ ID NO: 1021229 - RNA, 19 nt, Homo sapiens
  misc_RNA (1)...(19): siRNA sense strand
gaaggaugagaaacagauu

SEQ ID NO: 1021230 - RNA, 19 nt, Homo sapiens
  misc_RNA (1)...(19): siRNA sense strand
gaacaucaagggcauccau

SEQ ID NO: 1021231 - RNA, 19 nt, Homo sapiens
  misc_RNA (1)...(19): siRNA sense strand
ccagagagcaucauguaca

SEQ ID NO: 1021232 - RNA, 19 nt, Homo sapiens
  misc_RNA (1)...(19): siRNA sense strand
cagaaaagguuagaaauca

SEQ ID NO: 1021233 - RNA, 19 nt, Homo sapiens
  misc_RNA (1)...(19): siRNA sense strand
ccaagaucccugucauuga

SEQ ID NO: 1021234 - RNA, 19 nt, Homo sapiens
  misc_RNA (1)...(19): siRNA sense strand
gaacugcagcgaaugacau

SEQ ID NO: 1021235 - RNA, 19 nt, Homo sapiens
  misc_RNA (1)...(19): siRNA sense strand
gaaugaguccaaauacauc

SEQ ID NO: 1021236 - RNA, 19 nt, Homo sapiens
  misc_RNA (1)...(19): siRNA sense strand
caaacaaugaggugauaga

SEQ ID NO: 1021237 - RNA, 19 nt, Homo sapiens
  misc_RNA (1)...(19): siRNA sense strand
gcacaucgucaaguucuau

SEQ ID NO: 1021238 - RNA, 19 nt, Homo sapiens
  misc_RNA (1)...(19): siRNA sense strand
ugaaugcuauaaccucugu

SEQ ID NO: 1021239 - RNA, 19 nt, Homo sapiens
  misc_RNA (1)...(19): siRNA sense strand
gaaaauccccaguacuuug

SEQ ID NO: 1021240 - RNA, 19 nt, Homo sapiens
  misc_RNA (1)...(19): siRNA sense strand
cagcaaugaugaugacucu

SEQ ID NO: 1021241 - RNA, 19 nt, Homo sapiens
  misc_RNA (1)...(19): siRNA sense strand
ggaaagucuaucacauuau

SEQ ID NO: 1021242 - RNA, 19 nt, Homo sapiens
  misc_RNA (1)...(19): siRNA sense strand
uaucacauuucucgaaucu

SEQ ID NO: 1021243 - RNA, 19 nt, Homo sapiens
  misc_RNA (1)...(19): siRNA sense strand
gaggaaggaaagucuauca

SEQ ID NO: 1021244 - RNA, 19 nt, Homo sapiens
  misc_RNA (1)...(19): siRNA sense strand
uaccagcugucaaacaaug

SEQ ID NO: 1021245 - RNA, 19 nt, Homo sapiens
  misc_RNA (1)...(19): siRNA sense strand
cccaaauuauccugaugua

SEQ ID NO: 1021246 - RNA, 19 nt, Homo sapiens
  misc_RNA (1)...(19): siRNA sense strand
gaaugaguaugggaaggau

SEQ ID NO: 1021247 - RNA, 19 nt, Homo sapiens
  misc_RNA (1)...(19): siRNA sense strand
gugggaagcagaucucuug

SEQ ID NO: 1021248 - RNA, 19 nt, Homo sapiens
  misc_RNA (1)...(19): siRNA sense strand
aaggaaagucuaucacauu

SEQ ID NO: 1021249 - RNA, 19 nt, Homo sapiens
  misc_RNA (1)...(19): siRNA sense strand
cagaugcugucauuauugg

SEQ ID NO: 1021250 - RNA, 19 nt, Homo sapiens
  misc_RNA (1)...(19): siRNA sense strand
gaaugaaacaagccacaca

SEQ ID NO: 1021251 - RNA, 19 nt, Homo sapiens
  misc_RNA (1)...(19): siRNA sense strand
ugaaugaguccaaauacau

SEQ ID NO: 1021252 - RNA, 19 nt, Homo sapiens
  misc_RNA (1)...(19): siRNA sense strand
gggcauccauacccuccuu

SEQ ID NO: 1021253 - RNA, 19 nt, Homo sapiens
  misc_RNA (1)...(19): siRNA sense strand
ggaaauucacgacggaaag

SEQ ID NO: 1021254 - RNA, 19 nt, Homo sapiens
  misc_RNA (1)...(19): siRNA sense strand
caucaagcgacauaacauu

SEQ ID NO: 1021255 - RNA, 19 nt, Homo sapiens
  misc_RNA (1)...(19): siRNA sense strand
caaaucuggccgcaccuaa

SEQ ID NO: 1021256 - RNA, 19 nt, Homo sapiens
  misc_RNA (1)...(19): siRNA sense strand
caaggcaucuccggucuac

SEQ ID NO: 1021257 - RNA, 19 nt, Homo sapiens
  misc_RNA (1)...(19): siRNA sense strand
gagcaucauguacaggaaa

SEQ ID NO: 1021258 - RNA, 19 nt, Homo sapiens
  misc_RNA (1)...(19): siRNA sense strand
cgaagaugauguugaagcu

SEQ ID NO: 1021259 - RNA, 19 nt, Homo sapiens
  misc_RNA (1)...(19): siRNA sense strand
gaccaagaucccugucauu

SEQ ID NO: 1021260 - RNA, 19 nt, Homo sapiens
  misc_RNA (1)...(19): siRNA sense strand
caccaacuaucacauuucu

SEQ ID NO: 1021261 - RNA, 19 nt, Homo sapiens
  misc_RNA (1)...(19): siRNA sense strand
ggugggcaauccauuuaca

SEQ ID NO: 1021262 - RNA, 19 nt, Homo sapiens
  misc_RNA (1)...(19): siRNA sense strand
cugagaacaucaccgaaau

SEQ ID NO: 1021263 - RNA, 19 nt, Homo sapiens
  misc_RNA (1)...(19): siRNA sense strand
acugagaaaucugacaauu

SEQ ID NO: 1021264 - RNA, 19 nt, Homo sapiens
  misc_RNA (1)...(19): siRNA sense strand
ccagaugcugucauuauug

SEQ ID NO: 1021265 - RNA, 19 nt, Homo sapiens
  misc_RNA (1)...(19): siRNA sense strand
gcaccaacuaucacauuuc

SEQ ID NO: 1021266 - RNA, 19 nt, Homo sapiens
  misc_RNA (1)...(19): siRNA sense strand
caaccucacugugcauuuu

SEQ ID NO: 1021267 - RNA, 19 nt, Homo sapiens
  misc_RNA (1)...(19): siRNA sense strand
gcaaaucuggccgcaccua

SEQ ID NO: 1021268 - RNA, 19 nt, Homo sapiens
  misc_RNA (1)...(19): siRNA sense strand
ggauaacuaacauuucauc

SEQ ID NO: 1021269 - RNA, 19 nt, Homo sapiens
  misc_RNA (1)...(19): siRNA sense strand
ucaucauggucuuugagua

SEQ ID NO: 1021270 - RNA, 19 nt, Homo sapiens
  misc_RNA (1)...(19): siRNA sense strand
guaacacuccaucuucuuc

SEQ ID NO: 1021271 - RNA, 19 nt, Homo sapiens
  misc_RNA (1)...(19): siRNA sense strand
ggaaaaucuuguaggagaa

SEQ ID NO: 1021272 - RNA, 19 nt, Homo sapiens
  misc_RNA (1)...(19): siRNA sense strand
caacugaccuggcuuuaua

SEQ ID NO: 1021273 - RNA, 19 nt, Homo sapiens
  misc_RNA (1)...(19): siRNA sense strand
gaaaggaccuguagacgaa

SEQ ID NO: 1021274 - RNA, 19 nt, Homo sapiens
  misc_RNA (1)...(19): siRNA sense strand
ggauuuaucuguaacauga

SEQ ID NO: 1021275 - RNA, 19 nt, Homo sapiens
  misc_RNA (1)...(19): siRNA sense strand
caagagaaguuaaauguug

SEQ ID NO: 1021276 - RNA, 19 nt, Homo sapiens
  misc_RNA (1)...(19): siRNA sense strand
cagcagaacuguacgaauu

SEQ ID NO: 1021277 - RNA, 19 nt, Homo sapiens
  misc_RNA (1)...(19): siRNA sense strand
gaaacugguugggucauua

SEQ ID NO: 1021278 - RNA, 19 nt, Homo sapiens
  misc_RNA (1)...(19): siRNA sense strand
gaaauccacgucuccauua

SEQ ID NO: 1021279 - RNA, 19 nt, Homo sapiens
  misc_RNA (1)...(19): siRNA sense strand
ugaguggucuucagaauaa

SEQ ID NO: 1021280 - RNA, 19 nt, Homo sapiens
  misc_RNA (1)...(19): siRNA sense strand
caaaguaaaugcaucugaa

SEQ ID NO: 1021281 - RNA, 19 nt, Homo sapiens
  misc_RNA (1)...(19): siRNA sense strand
agaaauaccuggaggagaa

SEQ ID NO: 1021282 - RNA, 19 nt, Homo sapiens
  misc_RNA (1)...(19): siRNA sense strand
gagcacggauugauuaaau

SEQ ID NO: 1021283 - RNA, 19 nt, Homo sapiens
  misc_RNA (1)...(19): siRNA sense strand
cgaagaagccagauccuua

SEQ ID NO: 1021284 - RNA, 19 nt, Homo sapiens
  misc_RNA (1)...(19): siRNA sense strand
uaaaugugguggagaaauu

SEQ ID NO: 1021285 - RNA, 19 nt, Homo sapiens
  misc_RNA (1)...(19): siRNA sense strand
gaucauggcaguuaacaaa

SEQ ID NO: 1021286 - RNA, 19 nt, Homo sapiens
  misc_RNA (1)...(19): siRNA sense strand
uaaauaagcggcaguuuga

SEQ ID NO: 1021287 - RNA, 19 nt, Homo sapiens
  misc_RNA (1)...(19): siRNA sense strand
ggaagaagaagccaucaaa

SEQ ID NO: 1021288 - RNA, 19 nt, Homo sapiens
  misc_RNA (1)...(19): siRNA sense strand
caacaacccauuccuauga

SEQ ID NO: 1021289 - RNA, 19 nt, Homo sapiens
  misc_RNA (1)...(19): siRNA sense strand
gaaaugcucaugaaccaaa

SEQ ID NO: 1021290 - RNA, 19 nt, Homo sapiens
  misc_RNA (1)...(19): siRNA sense strand
gcaugugacuugucugcua

SEQ ID NO: 1021291 - RNA, 19 nt, Homo sapiens
  misc_RNA (1)...(19): siRNA sense strand
gaagaagccaucaaauaug

SEQ ID NO: 1021292 - RNA, 19 nt, Homo sapiens
  misc_RNA (1)...(19): siRNA sense strand
acaaagaaaucacaccuau

SEQ ID NO: 1021293 - RNA, 19 nt, Homo sapiens
  misc_RNA (1)...(19): siRNA sense strand
gaagaaaacucauaauguc

SEQ ID NO: 1021294 - RNA, 19 nt, Homo sapiens
  misc_RNA (1)...(19): siRNA sense strand
gcagaccacuggacacuca

SEQ ID NO: 1021295 - RNA, 19 nt, Homo sapiens
  misc_RNA (1)...(19): siRNA sense strand
gaaguuguguuuccauugg

SEQ ID NO: 1021296 - RNA, 19 nt, Homo sapiens
  misc_RNA (1)...(19): siRNA sense strand
aagaagaagccaucaaaua

SEQ ID NO: 1021297 - RNA, 19 nt, Homo sapiens
  misc_RNA (1)...(19): siRNA sense strand
ugaccuggcuuuauauuuc

SEQ ID NO: 1021298 - RNA, 19 nt, Homo sapiens
  misc_RNA (1)...(19): siRNA sense strand
gaaauucaaaguaccugua

SEQ ID NO: 1021299 - RNA, 19 nt, Homo sapiens
  misc_RNA (1)...(19): siRNA sense strand
gauuaaauguggaauacga

SEQ ID NO: 1021300 - RNA, 19 nt, Homo sapiens
  misc_RNA (1)...(19): siRNA sense strand
ccagcuacauguacaauau

SEQ ID NO: 1021301 - RNA, 19 nt, Homo sapiens
  misc_RNA (1)...(19): siRNA sense strand
cuucaugguucuucuauuu

SEQ ID NO: 1021302 - RNA, 19 nt, Homo sapiens
  misc_RNA (1)...(19): siRNA sense strand
gcugaugacaggaagauua

SEQ ID NO: 1021303 - RNA, 19 nt, Homo sapiens
  misc_RNA (1)...(19): siRNA sense strand
gaagccagauccuuaugug

SEQ ID NO: 1021304 - RNA, 19 nt, Homo sapiens
  misc_RNA (1)...(19): siRNA sense strand
ccagauggauguacacugu

SEQ ID NO: 1021305 - RNA, 19 nt, Homo sapiens
  misc_RNA (1)...(19): siRNA sense strand
agaagaagccaucaaauau

SEQ ID NO: 1021306 - RNA, 19 nt, Homo sapiens
  misc_RNA (1)...(19): siRNA sense strand
gaagaagccagauccuuau

SEQ ID NO: 1021307 - RNA, 19 nt, Homo sapiens
  misc_RNA (1)...(19): siRNA sense strand
aaauaaaugugguggagaa

SEQ ID NO: 1021308 - RNA, 19 nt, Homo sapiens
  misc_RNA (1)...(19): siRNA sense strand
guaccgagcugucacuuac

SEQ ID NO: 1021309 - RNA, 19 nt, Homo sapiens
  misc_RNA (1)...(19): siRNA sense strand
gaaggaauucuacgaugaa

SEQ ID NO: 1021310 - RNA, 19 nt, Homo sapiens
  misc_RNA (1)...(19): siRNA sense strand
ggcagaccauguuuacuuu

SEQ ID NO: 1021311 - RNA, 19 nt, Homo sapiens
  misc_RNA (1)...(19): siRNA sense strand
gaagaacucacagauguug

SEQ ID NO: 1021312 - RNA, 19 nt, Homo sapiens
  misc_RNA (1)...(19): siRNA sense strand
ggugggcccugacaaagaa

SEQ ID NO: 1021313 - RNA, 19 nt, Homo sapiens
  misc_RNA (1)...(19): siRNA sense strand
gaagccaucaaauauguaa

SEQ ID NO: 1021314 - RNA, 19 nt, Homo sapiens
  misc_RNA (1)...(19): siRNA sense strand
caagaaagaagauauugug

SEQ ID NO: 1021315 - RNA, 19 nt, Homo sapiens
  misc_RNA (1)...(19): siRNA sense strand
ucgaugagcaugaugaaua

SEQ ID NO: 1021316 - RNA, 19 nt, Homo sapiens
  misc_RNA (1)...(19): siRNA sense strand
ccaauaauuuguaccagau

SEQ ID NO: 1021317 - RNA, 19 nt, Homo sapiens
  misc_RNA (1)...(19): siRNA sense strand
gagcaugaugaauacauua

SEQ ID NO: 1021318 - RNA, 19 nt, Homo sapiens
  misc_RNA (1)...(19): siRNA sense strand
aaucaagcuuggagaagua

SEQ ID NO: 1021319 - RNA, 19 nt, Homo sapiens
  misc_RNA (1)...(19): siRNA sense strand
caagaaagagauuaucaug

SEQ ID NO: 1021320 - RNA, 19 nt, Homo sapiens
  misc_RNA (1)...(19): siRNA sense strand
gaccacagaggcaccaaua

SEQ ID NO: 1021321 - RNA, 19 nt, Homo sapiens
  misc_RNA (1)...(19): siRNA sense strand
gagaaguagagccuuauaa

SEQ ID NO: 1021322 - RNA, 19 nt, Homo sapiens
  misc_RNA (1)...(19): siRNA sense strand
gaaguagagccuuauaaag

SEQ ID NO: 1021323 - RNA, 19 nt, Homo sapiens
  misc_RNA (1)...(19): siRNA sense strand
gaagaagaagccaucaaau

SEQ ID NO: 1021324 - RNA, 19 nt, Homo sapiens
  misc_RNA (1)...(19): siRNA sense strand
gauguacacugugaggaaa

SEQ ID NO: 1021325 - RNA, 19 nt, Homo sapiens
  misc_RNA (1)...(19): siRNA sense strand
acagagcacggauugauua

SEQ ID NO: 1021326 - RNA, 19 nt, Homo sapiens
  misc_RNA (1)...(19): siRNA sense strand
ggagaaguagagccuuaua

SEQ ID NO: 1021327 - RNA, 19 nt, Homo sapiens
  misc_RNA (1)...(19): siRNA sense strand
aagaagccaucaaauaugu

SEQ ID NO: 1021328 - RNA, 19 nt, Homo sapiens
  misc_RNA (1)...(19): siRNA sense strand
caggaagauuaaagaagua

SEQ ID NO: 1021329 - RNA, 19 nt, Homo sapiens
  misc_RNA (1)...(19): siRNA sense strand
acaggaagauuaaagaagu

SEQ ID NO: 1021330 - RNA, 19 nt, Homo sapiens
  misc_RNA (1)...(19): siRNA sense strand
gggcagaccauguuuacuu

SEQ ID NO: 1021331 - RNA, 19 nt, Homo sapiens
  misc_RNA (1)...(19): siRNA sense strand
uugaagaacucacagaugu

SEQ ID NO: 1021332 - RNA, 19 nt, Homo sapiens
  misc_RNA (1)...(19): siRNA sense strand
guuuaaacaucuuccagaa

SEQ ID NO: 1021333 - RNA, 19 nt, Homo sapiens
  misc_RNA (1)...(19): siRNA sense strand
gaauuccgcuucagugacu

SEQ ID NO: 1021334 - RNA, 19 nt, Homo sapiens
  misc_RNA (1)...(19): siRNA sense strand
aaagcgcucuacacgguua

SEQ ID NO: 1021335 - RNA, 19 nt, Homo sapiens
  misc_RNA (1)...(19): siRNA sense strand
cauggcaguuaacaaagua

SEQ ID NO: 1021336 - RNA, 19 nt, Homo sapiens
  misc_RNA (1)...(19): siRNA sense strand
gcugcuuucugccaugaua

SEQ ID NO: 1021337 - RNA, 19 nt, Homo sapiens
  misc_RNA (1)...(19): siRNA sense strand
gagcgacaguuucacaaag

SEQ ID NO: 1021338 - RNA, 19 nt, Homo sapiens
  misc_RNA (1)...(19): siRNA sense strand
agaaguagagccuuauaaa

SEQ ID NO: 1021339 - RNA, 19 nt, Homo sapiens
  misc_RNA (1)...(19): siRNA sense strand
aauauugaaucccgaagaa

SEQ ID NO: 1021340 - RNA, 19 nt, Homo sapiens
  misc_RNA (1)...(19): siRNA sense strand
acaaggagaucuggagaga

SEQ ID NO: 1021341 - RNA, 19 nt, Homo sapiens
  misc_RNA (1)...(19): siRNA sense strand
gcacuuaugguugcaaaug

SEQ ID NO: 1021342 - RNA, 19 nt, Homo sapiens
  misc_RNA (1)...(19): siRNA sense strand
guugaugccugugaacaaa

SEQ ID NO: 1021343 - RNA, 19 nt, Homo sapiens
  misc_RNA (1)...(19): siRNA sense strand
guucgaggucgcaauaaua

SEQ ID NO: 1021344 - RNA, 19 nt, Homo sapiens
  misc_RNA (1)...(19): siRNA sense strand
acagaggcaccaauaauuu

SEQ ID NO: 1021345 - RNA, 19 nt, Homo sapiens
  misc_RNA (1)...(19): siRNA sense strand
ccacagaggcaccaauaau

SEQ ID NO: 1021346 - RNA, 19 nt, Homo sapiens
  misc_RNA (1)...(19): siRNA sense strand
uaaagaaguacuacacaga

SEQ ID NO: 1021347 - RNA, 19 nt, Homo sapiens
  misc_RNA (1)...(19): siRNA sense strand
gcugugaucauggcaguua

SEQ ID NO: 1021348 - RNA, 19 nt, Homo sapiens
  misc_RNA (1)...(19): siRNA sense strand
gagaugaauuaccuaaacu

SEQ ID NO: 1021349 - RNA, 19 nt, Homo sapiens
  misc_RNA (1)...(19): siRNA sense strand
guggagaaauucaaaguac

SEQ ID NO: 1021350 - RNA, 19 nt, Homo sapiens
  misc_RNA (1)...(19): siRNA sense strand
uuucuuggauggucucuuu

SEQ ID NO: 1021351 - RNA, 19 nt, Homo sapiens
  misc_RNA (1)...(19): siRNA sense strand
uuauaaagguccaaagaca

SEQ ID NO: 1021352 - RNA, 19 nt, Homo sapiens
  misc_RNA (1)...(19): siRNA sense strand
gcaguuaacaaaguaaaug

SEQ ID NO: 1021353 - RNA, 19 nt, Homo sapiens
  misc_RNA (1)...(19): siRNA sense strand
gaugacggcaugugacuug

SEQ ID NO: 1021354 - RNA, 19 nt, Homo sapiens
  misc_RNA (1)...(19): siRNA sense strand
cuaaauaagcggcaguuug

SEQ ID NO: 1021355 - RNA, 19 nt, Homo sapiens
  misc_RNA (1)...(19): siRNA sense strand
guacuacacagaucucgaa

SEQ ID NO: 1021356 - RNA, 19 nt, Homo sapiens
  misc_RNA (1)...(19): siRNA sense strand
caaacuggguaugucacua

SEQ ID NO: 1021357 - RNA, 19 nt, Homo sapiens
  misc_RNA (1)...(19): siRNA sense strand
gcaacaacccauuccuaug

SEQ ID NO: 1021358 - RNA, 19 nt, Homo sapiens
  misc_RNA (1)...(19): siRNA sense strand
ucagguagcacuuaugguu

SEQ ID NO: 1021359 - RNA, 19 nt, Homo sapiens
  misc_RNA (1)...(19): siRNA sense strand
caaccaagaaagagauuau

SEQ ID NO: 1021360 - RNA, 19 nt, Homo sapiens
  misc_RNA (1)...(19): siRNA sense strand
gaccuggcuuuauauuuca

SEQ ID NO: 1021361 - RNA, 19 nt, Homo sapiens
  misc_RNA (1)...(19): siRNA sense strand
gcucaugaaccaaaccaaa

SEQ ID NO: 1021362 - RNA, 19 nt, Homo sapiens
  misc_RNA (1)...(19): siRNA sense strand
guggucagccaauaaagua

SEQ ID NO: 1021363 - RNA, 19 nt, Homo sapiens
  misc_RNA (1)...(19): siRNA sense strand
ggauguacacugugaggaa

SEQ ID NO: 1021364 - RNA, 19 nt, Homo sapiens
  misc_RNA (1)...(19): siRNA sense strand
caaucaagcuuggagaagu

SEQ ID NO: 1021365 - RNA, 19 nt, Homo sapiens
  misc_RNA (1)...(19): siRNA sense strand
caaagaaguuguguuucca

SEQ ID NO: 1021366 - RNA, 19 nt, Homo sapiens
  misc_RNA (1)...(19): siRNA sense strand
ugaguaugaugcaaagaug

SEQ ID NO: 1021367 - RNA, 19 nt, Homo sapiens
  misc_RNA (1)...(19): siRNA sense strand
caaaagagaugaauuaccu

SEQ ID NO: 1021368 - RNA, 19 nt, Homo sapiens
  misc_RNA (1)...(19): siRNA sense strand
gcacggauugauuaaaugu

SEQ ID NO: 1021369 - RNA, 19 nt, Homo sapiens
  misc_RNA (1)...(19): siRNA sense strand
gaaaagaagagaucaaagu

SEQ ID NO: 1021370 - RNA, 19 nt, Homo sapiens
  misc_RNA (1)...(19): siRNA sense strand
gaagaggaccauguuucaa

SEQ ID NO: 1021371 - RNA, 19 nt, Homo sapiens
  misc_RNA (1)...(19): siRNA sense strand
cauaaugucccagauguga

SEQ ID NO: 1021372 - RNA, 19 nt, Homo sapiens
  misc_RNA (1)...(19): siRNA sense strand
gcaaggaugaccagcauuu

SEQ ID NO: 1021373 - RNA, 19 nt, Homo sapiens
  misc_RNA (1)...(19): siRNA sense strand
gagugacccugaccuguug

SEQ ID NO: 1021374 - RNA, 19 nt, Homo sapiens
  misc_RNA (1)...(19): siRNA sense strand
gugcaggccuuccuacaug

SEQ ID NO: 1021375 - RNA, 19 nt, Homo sapiens
  misc_RNA (1)...(19): siRNA sense strand
gaucgaggagcgcaacuuu

SEQ ID NO: 1021376 - RNA, 19 nt, Homo sapiens
  misc_RNA (1)...(19): siRNA sense strand
caugaucgaugaccuccuu

SEQ ID NO: 1021377 - RNA, 19 nt, Homo sapiens
  misc_RNA (1)...(19): siRNA sense strand
aggaagagaucaaggagau

SEQ ID NO: 1021378 - RNA, 19 nt, Homo sapiens
  misc_RNA (1)...(19): siRNA sense strand
gagaagcucaaggcugaua

SEQ ID NO: 1021379 - RNA, 19 nt, Homo sapiens
  misc_RNA (1)...(19): siRNA sense strand
cagcaaggaugaccagcau

SEQ ID NO: 1021380 - RNA, 19 nt, Homo sapiens
  misc_RNA (1)...(19): siRNA sense strand
aggagaggcuggugcuuug

SEQ ID NO: 1021381 - RNA, 19 nt, Homo sapiens
  misc_RNA (1)...(19): siRNA sense strand
cgaggacgcccugaauaaa

SEQ ID NO: 1021382 - RNA, 19 nt, Homo sapiens
  misc_RNA (1)...(19): siRNA sense strand
uggagcagcugcaccacuu

SEQ ID NO: 1021383 - RNA, 19 nt, Homo sapiens
  misc_RNA (1)...(19): siRNA sense strand
ggaggcacagcgucugauu

SEQ ID NO: 1021384 - RNA, 19 nt, Homo sapiens
  misc_RNA (1)...(19): siRNA sense strand
ucaacgagcagaacuugga

SEQ ID NO: 1021385 - RNA, 19 nt, Homo sapiens
  misc_RNA (1)...(19): siRNA sense strand
caggagaggcuggugcuuu

SEQ ID NO: 1021386 - RNA, 19 nt, Homo sapiens
  misc_RNA (1)...(19): siRNA sense strand
acagcagcaugaucgauga

SEQ ID NO: 1021387 - RNA, 19 nt, Homo sapiens
  misc_RNA (1)...(19): siRNA sense strand
acgaggacgcccugaauaa

SEQ ID NO: 1021388 - RNA, 19 nt, Homo sapiens
  misc_RNA (1)...(19): siRNA sense strand
acuuggagcuggagcaugu

SEQ ID NO: 1021389 - RNA, 19 nt, Homo sapiens
  misc_RNA (1)...(19): siRNA sense strand
gaggacgcccugaauaaac

SEQ ID NO: 1021390 - RNA, 19 nt, Homo sapiens
  misc_RNA (1)...(19): siRNA sense strand
uggagcaugugcaggaaga

SEQ ID NO: 1021391 - RNA, 19 nt, Homo sapiens
  misc_RNA (1)...(19): siRNA sense strand
caucaacgagcagaacuug

SEQ ID NO: 1021392 - RNA, 19 nt, Homo sapiens
  misc_RNA (1)...(19): siRNA sense strand
uacgaggacgcccugaaua

SEQ ID NO: 1021393 - RNA, 19 nt, Homo sapiens
  misc_RNA (1)...(19): siRNA sense strand
ugguggagcuccugacagu

SEQ ID NO: 1021394 - RNA, 19 nt, Homo sapiens
  misc_RNA (1)...(19): siRNA sense strand
gaacuuggagcuggagcau

SEQ ID NO: 1021395 - RNA, 19 nt, Homo sapiens
  misc_RNA (1)...(19): siRNA sense strand
agagugacccugaccuguu

SEQ ID NO: 1021396 - RNA, 19 nt, Homo sapiens
  misc_RNA (1)...(19): siRNA sense strand
uccucaagcucaagaacaa

SEQ ID NO: 1021397 - RNA, 19 nt, Homo sapiens
  misc_RNA (1)...(19): siRNA sense strand
gaagcucaaggcugauauc

SEQ ID NO: 1021398 - RNA, 19 nt, Homo sapiens
  misc_RNA (1)...(19): siRNA sense strand
caaggaugaccagcauuug

SEQ ID NO: 1021399 - RNA, 19 nt, Homo sapiens
  misc_RNA (1)...(19): siRNA sense strand
gcuggagcaugugcaggaa

SEQ ID NO: 1021400 - RNA, 19 nt, Homo sapiens
  misc_RNA (1)...(19): siRNA sense strand
cuacgaggacgcccugaau

SEQ ID NO: 1021401 - RNA, 19 nt, Homo sapiens
  misc_RNA (1)...(19): siRNA sense strand
uaaacugucccagcugaug

SEQ ID NO: 1021402 - RNA, 19 nt, Homo sapiens
  misc_RNA (1)...(19): siRNA sense strand
gagcaugugcaggaagaga

SEQ ID NO: 1021403 - RNA, 19 nt, Homo sapiens
  misc_RNA (1)...(19): siRNA sense strand
cuacaugcccagagcuuca

SEQ ID NO: 1021404 - RNA, 19 nt, Homo sapiens
  misc_RNA (1)...(19): siRNA sense strand
gauauccagcuccucuuca

SEQ ID NO: 1021405 - RNA, 19 nt, Homo sapiens
  misc_RNA (1)...(19): siRNA sense strand
ggagaugcaggaggcuuug

SEQ ID NO: 1021406 - RNA, 19 nt, Homo sapiens
  misc_RNA (1)...(19): siRNA sense strand
agaggcuggugcuuugcua

SEQ ID NO: 1021407 - RNA, 19 nt, Homo sapiens
  misc_RNA (1)...(19): siRNA sense strand
gacagugcaggccuuccua

SEQ ID NO: 1021408 - RNA, 19 nt, Homo sapiens
  misc_RNA (1)...(19): siRNA sense strand
gcauuugcccagccacauc

SEQ ID NO: 1021409 - RNA, 19 nt, Homo sapiens
  misc_RNA (1)...(19): siRNA sense strand
gaagaguacugcaggaaga

SEQ ID NO: 1021410 - RNA, 19 nt, Homo sapiens
  misc_RNA (1)...(19): siRNA sense strand
gagaauggcccgugaguga

SEQ ID NO: 1021411 - RNA, 19 nt, Homo sapiens
  misc_RNA (1)...(19): siRNA sense strand
gcucuuggcuacagaaaug

SEQ ID NO: 1021412 - RNA, 19 nt, Homo sapiens
  misc_RNA (1)...(19): siRNA sense strand
ggaaaucguugagaagcuu

SEQ ID NO: 1021413 - RNA, 19 nt, Homo sapiens
  misc_RNA (1)...(19): siRNA sense strand
gaaaagaccuacaggaagu

SEQ ID NO: 1021414 - RNA, 19 nt, Homo sapiens
  misc_RNA (1)...(19): siRNA sense strand
cgacaauuaugaugcagaa

SEQ ID NO: 1021415 - RNA, 19 nt, Homo sapiens
  misc_RNA (1)...(19): siRNA sense strand
gaaaaucaguaaagacuca

SEQ ID NO: 1021416 - RNA, 19 nt, Homo sapiens
  misc_RNA (1)...(19): siRNA sense strand
gagaugcuauguggaaauc

SEQ ID NO: 1021417 - RNA, 19 nt, Homo sapiens
  misc_RNA (1)...(19): siRNA sense strand
ggugagaugcuauguggaa

SEQ ID NO: 1021418 - RNA, 19 nt, Homo sapiens
  misc_RNA (1)...(19): siRNA sense strand
agacccagcuaccauugaa

SEQ ID NO: 1021419 - RNA, 19 nt, Homo sapiens
  misc_RNA (1)...(19): siRNA sense strand
gcucagcuaaagcccaaua

SEQ ID NO: 1021420 - RNA, 19 nt, Homo sapiens
  misc_RNA (1)...(19): siRNA sense strand
caauuaugaugcagaagag

SEQ ID NO: 1021421 - RNA, 19 nt, Homo sapiens
  misc_RNA (1)...(19): siRNA sense strand
gcacugguuuuacuuugaa

SEQ ID NO: 1021422 - RNA, 19 nt, Homo sapiens
  misc_RNA (1)...(19): siRNA sense strand
gggagauggugagaugcua

SEQ ID NO: 1021423 - RNA, 19 nt, Homo sapiens
  misc_RNA (1)...(19): siRNA sense strand
gcuaaagcccaauaacuac

SEQ ID NO: 1021424 - RNA, 19 nt, Homo sapiens
  misc_RNA (1)...(19): siRNA sense strand
ggcacacaccguucaauga

SEQ ID NO: 1021425 - RNA, 19 nt, Homo sapiens
  misc_RNA (1)...(19): siRNA sense strand
gaaaugucugcaaggagaa

SEQ ID NO: 1021426 - RNA, 19 nt, Homo sapiens
  misc_RNA (1)...(19): siRNA sense strand
acaauuaugaugcagaaga

SEQ ID NO: 1021427 - RNA, 19 nt, Homo sapiens
  misc_RNA (1)...(19): siRNA sense strand
gaugcuauguggaaaucgu

SEQ ID NO: 1021428 - RNA, 19 nt, Homo sapiens
  misc_RNA (1)...(19): siRNA sense strand
gggaaaagaccuacaggaa

SEQ ID NO: 1021429 - RNA, 19 nt, Homo sapiens
  misc_RNA (1)...(19): siRNA sense strand
agcuaaagcccaauaacua

SEQ ID NO: 1021430 - RNA, 19 nt, Homo sapiens
  misc_RNA (1)...(19): siRNA sense strand
gaauggcccgugagugaca

SEQ ID NO: 1021431 - RNA, 19 nt, Homo sapiens
  misc_RNA (1)...(19): siRNA sense strand
ggagauggugagaugcuau

SEQ ID NO: 1021432 - RNA, 19 nt, Homo sapiens
  misc_RNA (1)...(19): siRNA sense strand
gugagaugcuauguggaaa

SEQ ID NO: 1021433 - RNA, 19 nt, Homo sapiens
  misc_RNA (1)...(19): siRNA sense strand
gagcacugguuuuacuuug

SEQ ID NO: 1021434 - RNA, 19 nt, Homo sapiens
  misc_RNA (1)...(19): siRNA sense strand
gugccuggaugaucuguac

SEQ ID NO: 1021435 - RNA, 19 nt, Homo sapiens
  misc_RNA (1)...(19): siRNA sense strand
gcacuguaggcaugaagau

SEQ ID NO: 1021436 - RNA, 19 nt, Homo sapiens
  misc_RNA (1)...(19): siRNA sense strand
cagcuaaagcccaauaacu

SEQ ID NO: 1021437 - RNA, 19 nt, Homo sapiens
  misc_RNA (1)...(19): siRNA sense strand
gcgaugcucuuggcuacag

SEQ ID NO: 1021438 - RNA, 19 nt, Homo sapiens
  misc_RNA (1)...(19): siRNA sense strand
gagauggugagaugcuaug

SEQ ID NO: 1021439 - RNA, 19 nt, Homo sapiens
  misc_RNA (1)...(19): siRNA sense strand
gaggagaggaaaaucagua

SEQ ID NO: 1021440 - RNA, 19 nt, Homo sapiens
  misc_RNA (1)...(19): siRNA sense strand
gggaagacgaggccacgau

SEQ ID NO: 1021441 - RNA, 19 nt, Homo sapiens
  misc_RNA (1)...(19): siRNA sense strand
ccaccaaggccaugugcau

SEQ ID NO: 1021442 - RNA, 19 nt, Homo sapiens
  misc_RNA (1)...(19): siRNA sense strand
gguuuuacuuugaagcuaa

SEQ ID NO: 1021443 - RNA, 19 nt, Homo sapiens
  misc_RNA (1)...(19): siRNA sense strand
cagaagaguacugcaggaa

SEQ ID NO: 1021444 - RNA, 19 nt, Homo sapiens
  misc_RNA (1)...(19): siRNA sense strand
gaaguggagcucggaaggu

SEQ ID NO: 1021445 - RNA, 19 nt, Homo sapiens
  misc_RNA (1)...(19): siRNA sense strand
guccacagaggagaaguaa

SEQ ID NO: 1021446 - RNA, 19 nt, Homo sapiens
  misc_RNA (1)...(19): siRNA sense strand
caggaggagcugcaacguu

SEQ ID NO: 1021447 - RNA, 19 nt, Homo sapiens
  misc_RNA (1)...(19): siRNA sense strand
accgggagauggugagaug

SEQ ID NO: 1021448 - RNA, 19 nt, Homo sapiens
  misc_RNA (1)...(19): siRNA sense strand
caggaaacagcuggacuga

SEQ ID NO: 1021449 - RNA, 19 nt, Homo sapiens
  misc_RNA (1)...(19): siRNA sense strand
aauuuaaggcugcgauguu

SEQ ID NO: 1021450 - RNA, 19 nt, Homo sapiens
  misc_RNA (1)...(19): siRNA sense strand
auuuaaggcugcgauguug

SEQ ID NO: 1021451 - RNA, 19 nt, Homo sapiens
  misc_RNA (1)...(19): siRNA sense strand
ccagacccagcuaccauug

SEQ ID NO: 1021452 - RNA, 19 nt, Homo sapiens
  misc_RNA (1)...(19): siRNA sense strand
gccagacccagcuaccauu

SEQ ID NO: 1021453 - RNA, 19 nt, Homo sapiens
  misc_RNA (1)...(19): siRNA sense strand
gagggaagauuguggauuu

SEQ ID NO: 1021454 - RNA, 19 nt, Homo sapiens
  misc_RNA (1)...(19): siRNA sense strand
gagcaucacugguaucuuc

SEQ ID NO: 1021455 - RNA, 19 nt, Homo sapiens
  misc_RNA (1)...(19): siRNA sense strand
ucagugagcucaagaagga

SEQ ID NO: 1021456 - RNA, 19 nt, Homo sapiens
  misc_RNA (1)...(19): siRNA sense strand
ugauggugcuggugaauua

SEQ ID NO: 1021457 - RNA, 19 nt, Homo sapiens
  misc_RNA (1)...(19): siRNA sense strand
ucacggaucuguucuccaa

SEQ ID NO: 1021458 - RNA, 19 nt, Homo sapiens
  misc_RNA (1)...(19): siRNA sense strand
ggugagaguugcaguaaca

SEQ ID NO: 1021459 - RNA, 19 nt, Homo sapiens
  misc_RNA (1)...(19): siRNA sense strand
gaaacucgagggaagauug

SEQ ID NO: 1021460 - RNA, 19 nt, Homo sapiens
  misc_RNA (1)...(19): siRNA sense strand
caauccagcuuaucaacga

SEQ ID NO: 1021461 - RNA, 19 nt, Homo sapiens
  misc_RNA (1)...(19): siRNA sense strand
ucaaagcccugugggagaa

SEQ ID NO: 1021462 - RNA, 19 nt, Homo sapiens
  misc_RNA (1)...(19): siRNA sense strand
acaagaagcuagaguugca

SEQ ID NO: 1021463 - RNA, 19 nt, Homo sapiens
  misc_RNA (1)...(19): siRNA sense strand
cuaaugagguggaacaacu

SEQ ID NO: 1021464 - RNA, 19 nt, Homo sapiens
  misc_RNA (1)...(19): siRNA sense strand
gcacaauccagcuuaucaa

SEQ ID NO: 1021465 - RNA, 19 nt, Homo sapiens
  misc_RNA (1)...(19): siRNA sense strand
ggaagauuguggauuuggu

SEQ ID NO: 1021466 - RNA, 19 nt, Homo sapiens
  misc_RNA (1)...(19): siRNA sense strand
gaaguuccuugcaaaauuc

SEQ ID NO: 1021467 - RNA, 19 nt, Homo sapiens
  misc_RNA (1)...(19): siRNA sense strand
gagggagauugaagagguu

SEQ ID NO: 1021468 - RNA, 19 nt, Homo sapiens
  misc_RNA (1)...(19): siRNA sense strand
ggaccacucccaaagacuu

SEQ ID NO: 1021469 - RNA, 19 nt, Homo sapiens
  misc_RNA (1)...(19): siRNA sense strand
ugggagaaaccauucauuu

SEQ ID NO: 1021470 - RNA, 19 nt, Homo sapiens
  misc_RNA (1)...(19): siRNA sense strand
caaggaccacucccaaaga

SEQ ID NO: 1021471 - RNA, 19 nt, Homo sapiens
  misc_RNA (1)...(19): siRNA sense strand
cuaugaggcuaaacucuuc

SEQ ID NO: 1021472 - RNA, 19 nt, Homo sapiens
  misc_RNA (1)...(19): siRNA sense strand
gcuggugaauuacauuuac

SEQ ID NO: 1021473 - RNA, 19 nt, Homo sapiens
  misc_RNA (1)...(19): siRNA sense strand
ugaaguuccuugcaaaauu

SEQ ID NO: 1021474 - RNA, 19 nt, Homo sapiens
  misc_RNA (1)...(19): siRNA sense strand
ucaacgaccacgucaagaa

SEQ ID NO: 1021475 - RNA, 19 nt, Homo sapiens
  misc_RNA (1)...(19): siRNA sense strand
acggauggauuacaaagga

SEQ ID NO: 1021476 - RNA, 19 nt, Homo sapiens
  misc_RNA (1)...(19): siRNA sense strand
gauggugagaguugcagua

SEQ ID NO: 1021477 - RNA, 19 nt, Homo sapiens
  misc_RNA (1)...(19): siRNA sense strand
aagcuagaguugcaucuuc

SEQ ID NO: 1021478 - RNA, 19 nt, Homo sapiens
  misc_RNA (1)...(19): siRNA sense strand
agaaggacgucuugauggu

SEQ ID NO: 1021479 - RNA, 19 nt, Homo sapiens
  misc_RNA (1)...(19): siRNA sense strand
cagcuucgcgaucaaauuc

SEQ ID NO: 1021480 - RNA, 19 nt, Homo sapiens
  misc_RNA (1)...(19): siRNA sense strand
cuacuggcccuuucucaug

SEQ ID NO: 1021481 - RNA, 19 nt, Homo sapiens
  misc_RNA (1)...(19): siRNA sense strand
gaagcuagaguugcaucuu

SEQ ID NO: 1021482 - RNA, 19 nt, Homo sapiens
  misc_RNA (1)...(19): siRNA sense strand
caucacugguaucuucaug

SEQ ID NO: 1021483 - RNA, 19 nt, Homo sapiens
  misc_RNA (1)...(19): siRNA sense strand
cuucccaaguucuccauuu

SEQ ID NO: 1021484 - RNA, 19 nt, Homo sapiens
  misc_RNA (1)...(19): siRNA sense strand
ccagaccaaucgccacauc

SEQ ID NO: 1021485 - RNA, 19 nt, Homo sapiens
  misc_RNA (1)...(19): siRNA sense strand
caacgaccacgucaagaag

SEQ ID NO: 1021486 - RNA, 19 nt, Homo sapiens
  misc_RNA (1)...(19): siRNA sense strand
uuacaagaagcuagaguug

SEQ ID NO: 1021487 - RNA, 19 nt, Homo sapiens
  misc_RNA (1)...(19): siRNA sense strand
caagauagccccugccaau

SEQ ID NO: 1021488 - RNA, 19 nt, Homo sapiens
  misc_RNA (1)...(19): siRNA sense strand
gauuguggauuuggucagu

SEQ ID NO: 1021489 - RNA, 19 nt, Homo sapiens
  misc_RNA (1)...(19): siRNA sense strand
gggcuucacggaucuguuc

SEQ ID NO: 1021490 - RNA, 19 nt, Homo sapiens
  misc_RNA (1)...(19): siRNA sense strand
aaccugaaguuccuugcaa

SEQ ID NO: 1021491 - RNA, 19 nt, Homo sapiens
  misc_RNA (1)...(19): siRNA sense strand
ggcacaauccagcuuauca

SEQ ID NO: 1021492 - RNA, 19 nt, Homo sapiens
  misc_RNA (1)...(19): siRNA sense strand
ucaaggaccacucccaaag

SEQ ID NO: 1021493 - RNA, 19 nt, Homo sapiens
  misc_RNA (1)...(19): siRNA sense strand
gcuucgcgaucaaauucuu

SEQ ID NO: 1021494 - RNA, 19 nt, Homo sapiens
  misc_RNA (1)...(19): siRNA sense strand
gccaccagcuucgcgauca

SEQ ID NO: 1021495 - RNA, 19 nt, Homo sapiens
  misc_RNA (1)...(19): siRNA sense strand
gcaaaaugagggagauuga

SEQ ID NO: 1021496 - RNA, 19 nt, Homo sapiens
  misc_RNA (1)...(19): siRNA sense strand
ucacugguaucuucaugac

SEQ ID NO: 1021497 - RNA, 19 nt, Homo sapiens
  misc_RNA (1)...(19): siRNA sense strand
uaucaacgaccacgucaag

SEQ ID NO: 1021498 - RNA, 19 nt, Homo sapiens
  misc_RNA (1)...(19): siRNA sense strand
uauccggcaucaccaaaca

SEQ ID NO: 1021499 - RNA, 19 nt, Homo sapiens
  misc_RNA (1)...(19): siRNA sense strand
aguugcaucuucccaaguu

SEQ ID NO: 1021500 - RNA, 19 nt, Homo sapiens
  misc_RNA (1)...(19): siRNA sense strand
cuccagagaugcuaaugag

SEQ ID NO: 1021501 - RNA, 19 nt, Homo sapiens
  misc_RNA (1)...(19): siRNA sense strand
ggccgucuaugaggcuaaa

SEQ ID NO: 1021502 - RNA, 19 nt, Homo sapiens
  misc_RNA (1)...(19): siRNA sense strand
ccaccagcuucgcgaucaa

SEQ ID NO: 1021503 - RNA, 19 nt, Homo sapiens
  misc_RNA (1)...(19): siRNA sense strand
ucuaugaggcuaaacucuu

SEQ ID NO: 1021504 - RNA, 19 nt, Homo sapiens
  misc_RNA (1)...(19): siRNA sense strand
gugcuggugaauuacauuu

SEQ ID NO: 1021505 - RNA, 19 nt, Homo sapiens
  misc_RNA (1)...(19): siRNA sense strand
gaccacgucaagaaggaaa

SEQ ID NO: 1021506 - RNA, 19 nt, Homo sapiens
  misc_RNA (1)...(19): siRNA sense strand
gacuuugccuuccgcuucu

SEQ ID NO: 1021507 - RNA, 19 nt, Homo sapiens
  misc_RNA (1)...(19): siRNA sense strand
gcucggugcuacggaugga

SEQ ID NO: 1021508 - RNA, 19 nt, Homo sapiens
  misc_RNA (1)...(19): siRNA sense strand
caccauggccgucuaugag

SEQ ID NO: 1021509 - RNA, 19 nt, Homo sapiens
  misc_RNA (1)...(19): siRNA sense strand
acaccauggccgucuauga

SEQ ID NO: 1021510 - RNA, 19 nt, Homo sapiens
  misc_RNA (1)...(19): siRNA sense strand
cgugggcagugcucuguuc

SEQ ID NO: 1021511 - RNA, 19 nt, Homo sapiens
  misc_RNA (1)...(19): siRNA sense strand
cuccauuucuggcuccuau

SEQ ID NO: 1021512 - RNA, 19 nt, Homo sapiens
  misc_RNA (1)...(19): siRNA sense strand
cccaaguucuccauuucug

SEQ ID NO: 1021513 - RNA, 19 nt, Homo sapiens
  misc_RNA (1)...(19): siRNA sense strand
gagauugaagagguucuga

SEQ ID NO: 1021514 - RNA, 19 nt, Homo sapiens
  misc_RNA (1)...(19): siRNA sense strand
aaaugagggagauugaaga

SEQ ID NO: 1021515 - RNA, 19 nt, Homo sapiens
  misc_RNA (1)...(19): siRNA sense strand
ggugaauuacauuuacuuc

SEQ ID NO: 1021516 - RNA, 19 nt, Homo sapiens
  misc_RNA (1)...(19): siRNA sense strand
ggaaacucgagggaagauu

SEQ ID NO: 1021517 - RNA, 19 nt, Homo sapiens
  misc_RNA (1)...(19): siRNA sense strand
gugggcacaauccagcuua

SEQ ID NO: 1021518 - RNA, 19 nt, Homo sapiens
  misc_RNA (1)...(19): siRNA sense strand
gcacguugagcaugauggu

SEQ ID NO: 1021519 - RNA, 19 nt, Homo sapiens
  misc_RNA (1)...(19): siRNA sense strand
ugaguccgauguccauagg

SEQ ID NO: 1021520 - RNA, 19 nt, Homo sapiens
  misc_RNA (1)...(19): siRNA sense strand
cgccacauccugcgauuca

SEQ ID NO: 1021521 - RNA, 19 nt, Homo sapiens
  misc_RNA (1)...(19): siRNA sense strand
gaaggauggucccaaauaa

SEQ ID NO: 1021522 - RNA, 19 nt, Homo sapiens
  misc_RNA (1)...(19): siRNA sense strand
ggagauaaaugccucuuug

SEQ ID NO: 1021523 - RNA, 19 nt, Homo sapiens
  misc_RNA (1)...(19): siRNA sense strand
gggcugagcagauucaaua

SEQ ID NO: 1021524 - RNA, 19 nt, Homo sapiens
  misc_RNA (1)...(19): siRNA sense strand
gaaauucaucgccauguuu

SEQ ID NO: 1021525 - RNA, 19 nt, Homo sapiens
  misc_RNA (1)...(19): siRNA sense strand
gauauaagcagauuugaca

SEQ ID NO: 1021526 - RNA, 19 nt, Homo sapiens
  misc_RNA (1)...(19): siRNA sense strand
cgaaggauggucccaaaua

SEQ ID NO: 1021527 - RNA, 19 nt, Homo sapiens
  misc_RNA (1)...(19): siRNA sense strand
aaacgccucuccaauguga

SEQ ID NO: 1021528 - RNA, 19 nt, Homo sapiens
  misc_RNA (1)...(19): siRNA sense strand
ccaagugggccaacagaua

SEQ ID NO: 1021529 - RNA, 19 nt, Homo sapiens
  misc_RNA (1)...(19): siRNA sense strand
gaugauauaagcagauuug

SEQ ID NO: 1021530 - RNA, 19 nt, Homo sapiens
  misc_RNA (1)...(19): siRNA sense strand
aaagccagcuacauaagaa

SEQ ID NO: 1021531 - RNA, 19 nt, Homo sapiens
  misc_RNA (1)...(19): siRNA sense strand
ggguggaaguggugauuga

SEQ ID NO: 1021532 - RNA, 19 nt, Homo sapiens
  misc_RNA (1)...(19): siRNA sense strand
ggaaaagccagcuacauaa

SEQ ID NO: 1021533 - RNA, 19 nt, Homo sapiens
  misc_RNA (1)...(19): siRNA sense strand
cgcagcagauucuuccaua

SEQ ID NO: 1021534 - RNA, 19 nt, Homo sapiens
  misc_RNA (1)...(19): siRNA sense strand
cagaaacacuguccaaagc

SEQ ID NO: 1021535 - RNA, 19 nt, Homo sapiens
  misc_RNA (1)...(19): siRNA sense strand
gcaagugauucuaggaaac

SEQ ID NO: 1021536 - RNA, 19 nt, Homo sapiens
  misc_RNA (1)...(19): siRNA sense strand
gucaagauuuccaacagaa

SEQ ID NO: 1021537 - RNA, 19 nt, Homo sapiens
  misc_RNA (1)...(19): siRNA sense strand
agaaugggcuggugagucu

SEQ ID NO: 1021538 - RNA, 19 nt, Homo sapiens
  misc_RNA (1)...(19): siRNA sense strand
uggaaguggugauugauga

SEQ ID NO: 1021539 - RNA, 19 nt, Homo sapiens
  misc_RNA (1)...(19): siRNA sense strand
caacauccaucugcacucu

SEQ ID NO: 1021540 - RNA, 19 nt, Homo sapiens
  misc_RNA (1)...(19): siRNA sense strand
acgggaagauggcgaguuu

SEQ ID NO: 1021541 - RNA, 19 nt, Homo sapiens
  misc_RNA (1)...(19): siRNA sense strand
agagggcgcuggagugaug

SEQ ID NO: 1021542 - RNA, 19 nt, Homo sapiens
  misc_RNA (1)...(19): siRNA sense strand
gaugucgugucaagauuuc

SEQ ID NO: 1021543 - RNA, 19 nt, Homo sapiens
  misc_RNA (1)...(19): siRNA sense strand
agaaauucaucgccauguu

SEQ ID NO: 1021544 - RNA, 19 nt, Homo sapiens
  misc_RNA (1)...(19): siRNA sense strand
aaauucaucgccauguuua

SEQ ID NO: 1021545 - RNA, 19 nt, Homo sapiens
  misc_RNA (1)...(19): siRNA sense strand
gaaagcagaagaugcaaaa

SEQ ID NO: 1021546 - RNA, 19 nt, Homo sapiens
  misc_RNA (1)...(19): siRNA sense strand
cacgaaggauggucccaaa

SEQ ID NO: 1021547 - RNA, 19 nt, Homo sapiens
  misc_RNA (1)...(19): siRNA sense strand
agaccuccaucaucaaguu

SEQ ID NO: 1021548 - RNA, 19 nt, Homo sapiens
  misc_RNA (1)...(19): siRNA sense strand
ggaugucgugucaagauuu

SEQ ID NO: 1021549 - RNA, 19 nt, Homo sapiens
  misc_RNA (1)...(19): siRNA sense strand
ggcagaagauccugauggu

SEQ ID NO: 1021550 - RNA, 19 nt, Homo sapiens
  misc_RNA (1)...(19): siRNA sense strand
aagcagauuugacauccaa

SEQ ID NO: 1021551 - RNA, 19 nt, Homo sapiens
  misc_RNA (1)...(19): siRNA sense strand
gcagcagauucuuccauag

SEQ ID NO: 1021552 - RNA, 19 nt, Homo sapiens
  misc_RNA (1)...(19): siRNA sense strand
gcugucacaccaucaaauu

SEQ ID NO: 1021553 - RNA, 19 nt, Homo sapiens
  misc_RNA (1)...(19): siRNA sense strand
ugacucagaacccacagua

SEQ ID NO: 1021554 - RNA, 19 nt, Homo sapiens
  misc_RNA (1)...(19): siRNA sense strand
gccggacguuuaaggauga

SEQ ID NO: 1021555 - RNA, 19 nt, Homo sapiens
  misc_RNA (1)...(19): siRNA sense strand
cagcacaggcgauggagaa

SEQ ID NO: 1021556 - RNA, 19 nt, Homo sapiens
  misc_RNA (1)...(19): siRNA sense strand
ccaagcugcucggauccua

SEQ ID NO: 1021557 - RNA, 19 nt, Homo sapiens
  misc_RNA (1)...(19): siRNA sense strand
gaagcaagugauucuagga

SEQ ID NO: 1021558 - RNA, 19 nt, Homo sapiens
  misc_RNA (1)...(19): siRNA sense strand
gagauaaaugccucuuugu

SEQ ID NO: 1021559 - RNA, 19 nt, Homo sapiens
  misc_RNA (1)...(19): siRNA sense strand
ugucaagauuuccaacaga

SEQ ID NO: 1021560 - RNA, 19 nt, Homo sapiens
  misc_RNA (1)...(19): siRNA sense strand
cacaggcgauggagaaugg

SEQ ID NO: 1021561 - RNA, 19 nt, Homo sapiens
  misc_RNA (1)...(19): siRNA sense strand
ggaaggcaccaauguuguc

SEQ ID NO: 1021562 - RNA, 19 nt, Homo sapiens
  misc_RNA (1)...(19): siRNA sense strand
ggucccaaauaauguuuag

SEQ ID NO: 1021563 - RNA, 19 nt, Homo sapiens
  misc_RNA (1)...(19): siRNA sense strand
caggaggcgugaucaccaa

SEQ ID NO: 1021564 - RNA, 19 nt, Homo sapiens
  misc_RNA (1)...(19): siRNA sense strand
ugucacaccaucaaauuug

SEQ ID NO: 1021565 - RNA, 19 nt, Homo sapiens
  misc_RNA (1)...(19): siRNA sense strand
cccaaauaauguuuaggaa

SEQ ID NO: 1021566 - RNA, 19 nt, Homo sapiens
  misc_RNA (1)...(19): siRNA sense strand
cauaagaaacgggaagaug

SEQ ID NO: 1021567 - RNA, 19 nt, Homo sapiens
  misc_RNA (1)...(19): siRNA sense strand
cggaaaagccagcuacaua

SEQ ID NO: 1021568 - RNA, 19 nt, Homo sapiens
  misc_RNA (1)...(19): siRNA sense strand
caagugggccaacagauac

SEQ ID NO: 1021569 - RNA, 19 nt, Homo sapiens
  misc_RNA (1)...(19): siRNA sense strand
ccacaguacaggcagaaga

SEQ ID NO: 1021570 - RNA, 19 nt, Homo sapiens
  misc_RNA (1)...(19): siRNA sense strand
caaauuugaaagcagaaga

SEQ ID NO: 1021571 - RNA, 19 nt, Homo sapiens
  misc_RNA (1)...(19): siRNA sense strand
guuuaaggaugagacauuc

SEQ ID NO: 1021572 - RNA, 19 nt, Homo sapiens
  misc_RNA (1)...(19): siRNA sense strand
cgaaggggcugggaagaaa

SEQ ID NO: 1021573 - RNA, 19 nt, Homo sapiens
  misc_RNA (1)...(19): siRNA sense strand
cagaagcugcuccaggaaa

SEQ ID NO: 1021574 - RNA, 19 nt, Homo sapiens
  misc_RNA (1)...(19): siRNA sense strand
uggaugauauaagcagauu

SEQ ID NO: 1021575 - RNA, 19 nt, Homo sapiens
  misc_RNA (1)...(19): siRNA sense strand
agcagaagaugcaaaauuu

SEQ ID NO: 1021576 - RNA, 19 nt, Homo sapiens
  misc_RNA (1)...(19): siRNA sense strand
caauggaaggcaccaaugu

SEQ ID NO: 1021577 - RNA, 19 nt, Homo sapiens
  misc_RNA (1)...(19): siRNA sense strand
aaacacacuccacgaagga

SEQ ID NO: 1021578 - RNA, 19 nt, Homo sapiens
  misc_RNA (1)...(19): siRNA sense strand
gcacaggcgauggagaaug

SEQ ID NO: 1021579 - RNA, 19 nt, Homo sapiens
  misc_RNA (1)...(19): siRNA sense strand
ggaagcggccacaggaucu

SEQ ID NO: 1021580 - RNA, 19 nt, Homo sapiens
  misc_RNA (1)...(19): siRNA sense strand
gauggucccaaauaauguu

SEQ ID NO: 1021581 - RNA, 19 nt, Homo sapiens
  misc_RNA (1)...(19): siRNA sense strand
cuccaugccuacacuguga

SEQ ID NO: 1021582 - RNA, 19 nt, Homo sapiens
  misc_RNA (1)...(19): siRNA sense strand
gaugcucaauucaacuucu

SEQ ID NO: 1021583 - RNA, 19 nt, Homo sapiens
  misc_RNA (1)...(19): siRNA sense strand
gggagauaaaugccucuuu

SEQ ID NO: 1021584 - RNA, 19 nt, Homo sapiens
  misc_RNA (1)...(19): siRNA sense strand
ggauggucccaaauaaugu

SEQ ID NO: 1021585 - RNA, 19 nt, Homo sapiens
  misc_RNA (1)...(19): siRNA sense strand
uggaugucgugucaagauu

SEQ ID NO: 1021586 - RNA, 19 nt, Homo sapiens
  misc_RNA (1)...(19): siRNA sense strand
caagugauucuaggaaaca

SEQ ID NO: 1021587 - RNA, 19 nt, Homo sapiens
  misc_RNA (1)...(19): siRNA sense strand
gaagcggccacaggaucua

SEQ ID NO: 1021588 - RNA, 19 nt, Homo sapiens
  misc_RNA (1)...(19): siRNA sense strand
agcaagugauucuaggaaa

SEQ ID NO: 1021589 - RNA, 19 nt, Homo sapiens
  misc_RNA (1)...(19): siRNA sense strand
ccugaugguccaaagcuuu

SEQ ID NO: 1021590 - RNA, 19 nt, Homo sapiens
  misc_RNA (1)...(19): siRNA sense strand
ugaaagcagaagaugcaaa

SEQ ID NO: 1021591 - RNA, 19 nt, Homo sapiens
  misc_RNA (1)...(19): siRNA sense strand
ccaauggaaggcaccaaug

SEQ ID NO: 1021592 - RNA, 19 nt, Homo sapiens
  misc_RNA (1)...(19): siRNA sense strand
gcagauuugacauccaaca

SEQ ID NO: 1021593 - RNA, 19 nt, Homo sapiens
  misc_RNA (1)...(19): siRNA sense strand
aggauggucccaaauaaug

SEQ ID NO: 1021594 - RNA, 19 nt, Homo sapiens
  misc_RNA (1)...(19): siRNA sense strand
ucaucgccauguuuauaug

SEQ ID NO: 1021595 - RNA, 19 nt, Homo sapiens
  misc_RNA (1)...(19): siRNA sense strand
gaagauggcgaguuuugga

SEQ ID NO: 1021596 - RNA, 19 nt, Homo sapiens
  misc_RNA (1)...(19): siRNA sense strand
gggcugggaagaaauuauc

SEQ ID NO: 1021597 - RNA, 19 nt, Homo sapiens
  misc_RNA (1)...(19): siRNA sense strand
acauccaucugcacucuuc

SEQ ID NO: 1021598 - RNA, 19 nt, Homo sapiens
  misc_RNA (1)...(19): siRNA sense strand
gaggcgugaucaccaacau

SEQ ID NO: 1021599 - RNA, 19 nt, Homo sapiens
  misc_RNA (1)...(19): siRNA sense strand
auucaucgccauguuuaua

SEQ ID NO: 1021600 - RNA, 19 nt, Homo sapiens
  misc_RNA (1)...(19): siRNA sense strand
agauaaaugccucuuugug

SEQ ID NO: 1021601 - RNA, 19 nt, Homo sapiens
  misc_RNA (1)...(19): siRNA sense strand
cguuuaaggaugagacauu

SEQ ID NO: 1021602 - RNA, 19 nt, Homo sapiens
  misc_RNA (1)...(19): siRNA sense strand
uggcagcacugggauccuu

SEQ ID NO: 1021603 - RNA, 19 nt, Homo sapiens
  misc_RNA (1)...(19): siRNA sense strand
ucucaggagugggaggaaa

SEQ ID NO: 1021604 - RNA, 19 nt, Homo sapiens
  misc_RNA (1)...(19): siRNA sense strand
ugggauccuugacucagaa

SEQ ID NO: 1021605 - RNA, 19 nt, Homo sapiens
  misc_RNA (1)...(19): siRNA sense strand
auuccgaucugcacuaugg

SEQ ID NO: 1021606 - RNA, 19 nt, Homo sapiens
  misc_RNA (1)...(19): siRNA sense strand
gaaaagccagcuacauaag

SEQ ID NO: 1021607 - RNA, 19 nt, Homo sapiens
  misc_RNA (1)...(19): siRNA sense strand
gcagcacugggauccuuga

SEQ ID NO: 1021608 - RNA, 19 nt, Homo sapiens
  misc_RNA (1)...(19): siRNA sense strand
uauaagcagauuugacauc

SEQ ID NO: 1021609 - RNA, 19 nt, Homo sapiens
  misc_RNA (1)...(19): siRNA sense strand
ucccaaauaauguuuagga

SEQ ID NO: 1021610 - RNA, 19 nt, Homo sapiens
  misc_RNA (1)...(19): siRNA sense strand
ggugaaggcagugaagaca

SEQ ID NO: 1021611 - RNA, 19 nt, Homo sapiens
  misc_RNA (1)...(19): siRNA sense strand
aagcaagugauucuaggaa

SEQ ID NO: 1021612 - RNA, 19 nt, Homo sapiens
  misc_RNA (1)...(19): siRNA sense strand
cagauuugacauccaacaa

SEQ ID NO: 1021613 - RNA, 19 nt, Homo sapiens
  misc_RNA (1)...(19): siRNA sense strand
acucagaacccacaguaca

SEQ ID NO: 1021614 - RNA, 19 nt, Homo sapiens
  misc_RNA (1)...(19): siRNA sense strand
ccacuggcaucaucuucaa

SEQ ID NO: 1021615 - RNA, 19 nt, Homo sapiens
  misc_RNA (1)...(19): siRNA sense strand
gcuccagccuuccaguuga

SEQ ID NO: 1021616 - RNA, 19 nt, Homo sapiens
  misc_RNA (1)...(19): siRNA sense strand
ccagcucuaugucacaauu

SEQ ID NO: 1021617 - RNA, 19 nt, Homo sapiens
  misc_RNA (1)...(19): siRNA sense strand
gcucagggcucuucauccu

SEQ ID NO: 1021618 - RNA, 19 nt, Homo sapiens
  misc_RNA (1)...(19): siRNA sense strand
acaauuaccaucuccauca

SEQ ID NO: 1021619 - RNA, 19 nt, Homo sapiens
  misc_RNA (1)...(19): siRNA sense strand
ggcaucaucuucaaguucu

SEQ ID NO: 1021620 - RNA, 19 nt, Homo sapiens
  misc_RNA (1)...(19): siRNA sense strand
caugcgaggugauggagau

SEQ ID NO: 1021621 - RNA, 19 nt, Homo sapiens
  misc_RNA (1)...(19): siRNA sense strand
caauuaccaucuccaucau

SEQ ID NO: 1021622 - RNA, 19 nt, Homo sapiens
  misc_RNA (1)...(19): siRNA sense strand
caccgugucucgagaggau

SEQ ID NO: 1021623 - RNA, 19 nt, Homo sapiens
  misc_RNA (1)...(19): siRNA sense strand
uaccaucuccaucaucauu

SEQ ID NO: 1021624 - RNA, 19 nt, Homo sapiens
  misc_RNA (1)...(19): siRNA sense strand
ccggauuucuggacuaugg

SEQ ID NO: 1021625 - RNA, 19 nt, Homo sapiens
  misc_RNA (1)...(19): siRNA sense strand
ugauggagaugggcuuauc

SEQ ID NO: 1021626 - RNA, 19 nt, Homo sapiens
  misc_RNA (1)...(19): siRNA sense strand
gagcgagcaccuccaccaa

SEQ ID NO: 1021627 - RNA, 19 nt, Homo sapiens
  misc_RNA (1)...(19): siRNA sense strand
ccaucuccaucaucauugu

SEQ ID NO: 1021628 - RNA, 19 nt, Homo sapiens
  misc_RNA (1)...(19): siRNA sense strand
ggugauggagaugggcuua

SEQ ID NO: 1021629 - RNA, 19 nt, Homo sapiens
  misc_RNA (1)...(19): siRNA sense strand
gccagcagccacugacaga

SEQ ID NO: 1021630 - RNA, 19 nt, Homo sapiens
  misc_RNA (1)...(19): siRNA sense strand
cagcucuaugucacaauua

SEQ ID NO: 1021631 - RNA, 19 nt, Homo sapiens
  misc_RNA (1)...(19): siRNA sense strand
caagaucacgucggcaagu

SEQ ID NO: 1021632 - RNA, 19 nt, Homo sapiens
  misc_RNA (1)...(19): siRNA sense strand
gagagccagcagccacuga

SEQ ID NO: 1021633 - RNA, 19 nt, Homo sapiens
  misc_RNA (1)...(19): siRNA sense strand
auuaccaucuccaucauca

SEQ ID NO: 1021634 - RNA, 19 nt, Homo sapiens
  misc_RNA (1)...(19): siRNA sense strand
gaaagaagaagaccaauua

SEQ ID NO: 1021635 - RNA, 19 nt, Homo sapiens
  misc_RNA (1)...(19): siRNA sense strand
gaagagaggcuccguaaua

SEQ ID NO: 1021636 - RNA, 19 nt, Homo sapiens
  misc_RNA (1)...(19): siRNA sense strand
gcacaacaauugcaguuua

SEQ ID NO: 1021637 - RNA, 19 nt, Homo sapiens
  misc_RNA (1)...(19): siRNA sense strand
gaagagauauccacagauu

SEQ ID NO: 1021638 - RNA, 19 nt, Homo sapiens
  misc_RNA (1)...(19): siRNA sense strand
gaagaaagcucccaucaca

SEQ ID NO: 1021639 - RNA, 19 nt, Homo sapiens
  misc_RNA (1)...(19): siRNA sense strand
ggaagaaagugaacaaaug

SEQ ID NO: 1021640 - RNA, 19 nt, Homo sapiens
  misc_RNA (1)...(19): siRNA sense strand
aaagaaagcuacugcauuu

SEQ ID NO: 1021641 - RNA, 19 nt, Homo sapiens
  misc_RNA (1)...(19): siRNA sense strand
gaagagaaagccucauuua

SEQ ID NO: 1021642 - RNA, 19 nt, Homo sapiens
  misc_RNA (1)...(19): siRNA sense strand
ccacagaaauuaaauguug

SEQ ID NO: 1021643 - RNA, 19 nt, Homo sapiens
  misc_RNA (1)...(19): siRNA sense strand
acagaaagcuccacagaaa

SEQ ID NO: 1021644 - RNA, 19 nt, Homo sapiens
  misc_RNA (1)...(19): siRNA sense strand
cagaaucccugcauaauga

SEQ ID NO: 1021645 - RNA, 19 nt, Homo sapiens
  misc_RNA (1)...(19): siRNA sense strand
caaaggaaguuacagaaga

SEQ ID NO: 1021646 - RNA, 19 nt, Homo sapiens
  misc_RNA (1)...(19): siRNA sense strand
gaacaaggaagaugucauu

SEQ ID NO: 1021647 - RNA, 19 nt, Homo sapiens
  misc_RNA (1)...(19): siRNA sense strand
uaaaugaguugguagaaga

SEQ ID NO: 1021648 - RNA, 19 nt, Homo sapiens
  misc_RNA (1)...(19): siRNA sense strand
gaagugaccagauguuaaa

SEQ ID NO: 1021649 - RNA, 19 nt, Homo sapiens
  misc_RNA (1)...(19): siRNA sense strand
gaaagaaagcuacugcauu

SEQ ID NO: 1021650 - RNA, 19 nt, Homo sapiens
  misc_RNA (1)...(19): siRNA sense strand
ggugaagacuuuacaguga

SEQ ID NO: 1021651 - RNA, 19 nt, Homo sapiens
  misc_RNA (1)...(19): siRNA sense strand
gaaaaugccugcugcguuu

SEQ ID NO: 1021652 - RNA, 19 nt, Homo sapiens
  misc_RNA (1)...(19): siRNA sense strand
gaggaaaacuguaguaaaa

SEQ ID NO: 1021653 - RNA, 19 nt, Homo sapiens
  misc_RNA (1)...(19): siRNA sense strand
gugaacaaaugcaagauaa

SEQ ID NO: 1021654 - RNA, 19 nt, Homo sapiens
  misc_RNA (1)...(19): siRNA sense strand
ccacaaagaccaugaaguu

SEQ ID NO: 1021655 - RNA, 19 nt, Homo sapiens
  misc_RNA (1)...(19): siRNA sense strand
gagaaagccucauuuaaaa

SEQ ID NO: 1021656 - RNA, 19 nt, Homo sapiens
  misc_RNA (1)...(19): siRNA sense strand
gaauaugacuuggugaaau

SEQ ID NO: 1021657 - RNA, 19 nt, Homo sapiens
  misc_RNA (1)...(19): siRNA sense strand
gaugacagcucggcaagaa

SEQ ID NO: 1021658 - RNA, 19 nt, Homo sapiens
  misc_RNA (1)...(19): siRNA sense strand
caagaaacaucacuagaag

SEQ ID NO: 1021659 - RNA, 19 nt, Homo sapiens
  misc_RNA (1)...(19): siRNA sense strand
caaggaagaugucauugau

SEQ ID NO: 1021660 - RNA, 19 nt, Homo sapiens
  misc_RNA (1)...(19): siRNA sense strand
agagaaagccucauuuaaa

SEQ ID NO: 1021661 - RNA, 19 nt, Homo sapiens
  misc_RNA (1)...(19): siRNA sense strand
caaggaaccugaagacaca

SEQ ID NO: 1021662 - RNA, 19 nt, Homo sapiens
  misc_RNA (1)...(19): siRNA sense strand
ggagacggcuggcggaaau

SEQ ID NO: 1021663 - RNA, 19 nt, Homo sapiens
  misc_RNA (1)...(19): siRNA sense strand
ggagaaaccuggaaaaugu

SEQ ID NO: 1021664 - RNA, 19 nt, Homo sapiens
  misc_RNA (1)...(19): siRNA sense strand
gaaaugaugaagaagguuu

SEQ ID NO: 1021665 - RNA, 19 nt, Homo sapiens
  misc_RNA (1)...(19): siRNA sense strand
ccaauuaucaucugaggua

SEQ ID NO: 1021666 - RNA, 19 nt, Homo sapiens
  misc_RNA (1)...(19): siRNA sense strand
ggacuccagcugaaaguua

SEQ ID NO: 1021667 - RNA, 19 nt, Homo sapiens
  misc_RNA (1)...(19): siRNA sense strand
gauguagccugcccaguga

SEQ ID NO: 1021668 - RNA, 19 nt, Homo sapiens
  misc_RNA (1)...(19): siRNA sense strand
acaagaugaucaagaagua

SEQ ID NO: 1021669 - RNA, 19 nt, Homo sapiens
  misc_RNA (1)...(19): siRNA sense strand
caucugagguaguaacuga

SEQ ID NO: 1021670 - RNA, 19 nt, Homo sapiens
  misc_RNA (1)...(19): siRNA sense strand
aaaggaaacucauaagaca

SEQ ID NO: 1021671 - RNA, 19 nt, Homo sapiens
  misc_RNA (1)...(19): siRNA sense strand
gaaccagauuucucuuguu

SEQ ID NO: 1021672 - RNA, 19 nt, Homo sapiens
  misc_RNA (1)...(19): siRNA sense strand
gaaauucugacacugauga

SEQ ID NO: 1021673 - RNA, 19 nt, Homo sapiens
  misc_RNA (1)...(19): siRNA sense strand
aaacucagcugacaggaau

SEQ ID NO: 1021674 - RNA, 19 nt, Homo sapiens
  misc_RNA (1)...(19): siRNA sense strand
guagaagaauacagacuga

SEQ ID NO: 1021675 - RNA, 19 nt, Homo sapiens
  misc_RNA (1)...(19): siRNA sense strand
uauaagugcuguaaagguu

SEQ ID NO: 1021676 - RNA, 19 nt, Homo sapiens
  misc_RNA (1)...(19): siRNA sense strand
ggagaagagucuggaagaa

SEQ ID NO: 1021677 - RNA, 19 nt, Homo sapiens
  misc_RNA (1)...(19): siRNA sense strand
agagagauguggacucaaa

SEQ ID NO: 1021678 - RNA, 19 nt, Homo sapiens
  misc_RNA (1)...(19): siRNA sense strand
ggaaccagauuucucuugu

SEQ ID NO: 1021679 - RNA, 19 nt, Homo sapiens
  misc_RNA (1)...(19): siRNA sense strand
gagugaagcugcucucauc

SEQ ID NO: 1021680 - RNA, 19 nt, Homo sapiens
  misc_RNA (1)...(19): siRNA sense strand
ggaaagaagaagaccaauu

SEQ ID NO: 1021681 - RNA, 19 nt, Homo sapiens
  misc_RNA (1)...(19): siRNA sense strand
caagacauauuaucagaag

SEQ ID NO: 1021682 - RNA, 19 nt, Homo sapiens
  misc_RNA (1)...(19): siRNA sense strand
auaaggaucuguaugaaga

SEQ ID NO: 1021683 - RNA, 19 nt, Homo sapiens
  misc_RNA (1)...(19): siRNA sense strand
gaaagcuccacagaaauua

SEQ ID NO: 1021684 - RNA, 19 nt, Homo sapiens
  misc_RNA (1)...(19): siRNA sense strand
ucaaaggacuccagcugaa

SEQ ID NO: 1021685 - RNA, 19 nt, Homo sapiens
  misc_RNA (1)...(19): siRNA sense strand
gccacaagaugaucaagaa

SEQ ID NO: 1021686 - RNA, 19 nt, Homo sapiens
  misc_RNA (1)...(19): siRNA sense strand
ugacacaucucuaacucaa

SEQ ID NO: 1021687 - RNA, 19 nt, Homo sapiens
  misc_RNA (1)...(19): siRNA sense strand
ccacagagauacacauuuu

SEQ ID NO: 1021688 - RNA, 19 nt, Homo sapiens
  misc_RNA (1)...(19): siRNA sense strand
gaagaccaauuaucaucug

SEQ ID NO: 1021689 - RNA, 19 nt, Homo sapiens
  misc_RNA (1)...(19): siRNA sense strand
guuaugcgguuccauuuga

SEQ ID NO: 1021690 - RNA, 19 nt, Homo sapiens
  misc_RNA (1)...(19): siRNA sense strand
ggaagagaaagccucauuu

SEQ ID NO: 1021691 - RNA, 19 nt, Homo sapiens
  misc_RNA (1)...(19): siRNA sense strand
agaaguaaaugaguuggua

SEQ ID NO: 1021692 - RNA, 19 nt, Homo sapiens
  misc_RNA (1)...(19): siRNA sense strand
gagaaucaguagaccaugu

SEQ ID NO: 1021693 - RNA, 19 nt, Homo sapiens
  misc_RNA (1)...(19): siRNA sense strand
aaaggaaguuacagaagaa

SEQ ID NO: 1021694 - RNA, 19 nt, Homo sapiens
  misc_RNA (1)...(19): siRNA sense strand
aaagugcacuagaacauga

SEQ ID NO: 1021695 - RNA, 19 nt, Homo sapiens
  misc_RNA (1)...(19): siRNA sense strand
gcugaggacuguacugugu

SEQ ID NO: 1021696 - RNA, 19 nt, Homo sapiens
  misc_RNA (1)...(19): siRNA sense strand
ggcaagaagugaccagaug

SEQ ID NO: 1021697 - RNA, 19 nt, Homo sapiens
  misc_RNA (1)...(19): siRNA sense strand
ucaagaaacaucacuagaa

SEQ ID NO: 1021698 - RNA, 19 nt, Homo sapiens
  misc_RNA (1)...(19): siRNA sense strand
agucauugauccagaauuu

SEQ ID NO: 1021699 - RNA, 19 nt, Homo sapiens
  misc_RNA (1)...(19): siRNA sense strand
uaaagucauugauccagaa

SEQ ID NO: 1021700 - RNA, 19 nt, Homo sapiens
  misc_RNA (1)...(19): siRNA sense strand
gauauuuccuaccacuauu

SEQ ID NO: 1021701 - RNA, 19 nt, Homo sapiens
  misc_RNA (1)...(19): siRNA sense strand
aaagagagauguggacuca

SEQ ID NO: 1021702 - RNA, 19 nt, Homo sapiens
  misc_RNA (1)...(19): siRNA sense strand
aagaagagauauccacaga

SEQ ID NO: 1021703 - RNA, 19 nt, Homo sapiens
  misc_RNA (1)...(19): siRNA sense strand
gaacagaaugaggaaauga

SEQ ID NO: 1021704 - RNA, 19 nt, Homo sapiens
  misc_RNA (1)...(19): siRNA sense strand
gaucagaagacugccuuua

SEQ ID NO: 1021705 - RNA, 19 nt, Homo sapiens
  misc_RNA (1)...(19): siRNA sense strand
agaagaagaccaauuauca

SEQ ID NO: 1021706 - RNA, 19 nt, Homo sapiens
  misc_RNA (1)...(19): siRNA sense strand
auaaagaaaugcccaagga

SEQ ID NO: 1021707 - RNA, 19 nt, Homo sapiens
  misc_RNA (1)...(19): siRNA sense strand
aagaugacauucuccauga

SEQ ID NO: 1021708 - RNA, 19 nt, Homo sapiens
  misc_RNA (1)...(19): siRNA sense strand
gaaacaguugcuugucaua

SEQ ID NO: 1021709 - RNA, 19 nt, Homo sapiens
  misc_RNA (1)...(19): siRNA sense strand
ggugauggcugugaacuuc

SEQ ID NO: 1021710 - RNA, 19 nt, Homo sapiens
  misc_RNA (1)...(19): siRNA sense strand
ccagugaagaggauuauuu

SEQ ID NO: 1021711 - RNA, 19 nt, Homo sapiens
  misc_RNA (1)...(19): siRNA sense strand
gcacaucagugaaaaugaa

SEQ ID NO: 1021712 - RNA, 19 nt, Homo sapiens
  misc_RNA (1)...(19): siRNA sense strand
gaaaagggccacaacauau

SEQ ID NO: 1021713 - RNA, 19 nt, Homo sapiens
  misc_RNA (1)...(19): siRNA sense strand
caggaugaguaugaauuua

SEQ ID NO: 1021714 - RNA, 19 nt, Homo sapiens
  misc_RNA (1)...(19): siRNA sense strand
ugacaggaauguuucaaag

SEQ ID NO: 1021715 - RNA, 19 nt, Homo sapiens
  misc_RNA (1)...(19): siRNA sense strand
gacuccagcugaaaguuaa

SEQ ID NO: 1021716 - RNA, 19 nt, Homo sapiens
  misc_RNA (1)...(19): siRNA sense strand
ggaugaguaugaauuuaca

SEQ ID NO: 1021717 - RNA, 19 nt, Homo sapiens
  misc_RNA (1)...(19): siRNA sense strand
caacucauguucaagaaac

SEQ ID NO: 1021718 - RNA, 19 nt, Homo sapiens
  misc_RNA (1)...(19): siRNA sense strand
agaagcaguuggagagaaa

SEQ ID NO: 1021719 - RNA, 19 nt, Homo sapiens
  misc_RNA (1)...(19): siRNA sense strand
ccauaccacucccugauga

SEQ ID NO: 1021720 - RNA, 19 nt, Homo sapiens
  misc_RNA (1)...(19): siRNA sense strand
gaagaagaccaauuaucau

SEQ ID NO: 1021721 - RNA, 19 nt, Homo sapiens
  misc_RNA (1)...(19): siRNA sense strand
acaggaauguuucaaagga

SEQ ID NO: 1021722 - RNA, 19 nt, Homo sapiens
  misc_RNA (1)...(19): siRNA sense strand
ucagaagacugccuuuagu

SEQ ID NO: 1021723 - RNA, 19 nt, Homo sapiens
  misc_RNA (1)...(19): siRNA sense strand
gugaaacaguugcuuguca

SEQ ID NO: 1021724 - RNA, 19 nt, Homo sapiens
  misc_RNA (1)...(19): siRNA sense strand
agaaagcuccacagaaauu

SEQ ID NO: 1021725 - RNA, 19 nt, Homo sapiens
  misc_RNA (1)...(19): siRNA sense strand
ugaaggcugugagauauug

SEQ ID NO: 1021726 - RNA, 19 nt, Homo sapiens
  misc_RNA (1)...(19): siRNA sense strand
ugacuucguuugaggaaau

SEQ ID NO: 1021727 - RNA, 19 nt, Homo sapiens
  misc_RNA (1)...(19): siRNA sense strand
ggaaagugcacuagaacau

SEQ ID NO: 1021728 - RNA, 19 nt, Homo sapiens
  misc_RNA (1)...(19): siRNA sense strand
gauggaacaggaauauauu

SEQ ID NO: 1021729 - RNA, 19 nt, Homo sapiens
  misc_RNA (1)...(19): siRNA sense strand
gcugaaaguuaaccuccaa

SEQ ID NO: 1021730 - RNA, 19 nt, Homo sapiens
  misc_RNA (1)...(19): siRNA sense strand
guaaaugaguugguagaag

SEQ ID NO: 1021731 - RNA, 19 nt, Homo sapiens
  misc_RNA (1)...(19): siRNA sense strand
gaagugaagaagaagaaga

SEQ ID NO: 1021732 - RNA, 19 nt, Homo sapiens
  misc_RNA (1)...(19): siRNA sense strand
agaaacaucacuagaagaa

SEQ ID NO: 1021733 - RNA, 19 nt, Homo sapiens
  misc_RNA (1)...(19): siRNA sense strand
caaucugaaugucccagua

SEQ ID NO: 1021734 - RNA, 19 nt, Homo sapiens
  misc_RNA (1)...(19): siRNA sense strand
guacuggcgugguggcuuu

SEQ ID NO: 1021735 - RNA, 19 nt, Homo sapiens
  misc_RNA (1)...(19): siRNA sense strand
gcaucuacauguucaacug

SEQ ID NO: 1021736 - RNA, 19 nt, Homo sapiens
  misc_RNA (1)...(19): siRNA sense strand
ggcccaaacugcccuggaa

SEQ ID NO: 1021737 - RNA, 19 nt, Homo sapiens
  misc_RNA (1)...(19): siRNA sense strand
gaaggacugccaaccucua

SEQ ID NO: 1021738 - RNA, 19 nt, Homo sapiens
  misc_RNA (1)...(19): siRNA sense strand
gcauggugguauucuaugg

SEQ ID NO: 1021739 - RNA, 19 nt, Homo sapiens
  misc_RNA (1)...(19): siRNA sense strand
gggcaucaccacugucuuc

SEQ ID NO: 1021740 - RNA, 19 nt, Homo sapiens
  misc_RNA (1)...(19): siRNA sense strand
ggcagcaucuacauguuca

SEQ ID NO: 1021741 - RNA, 19 nt, Homo sapiens
  misc_RNA (1)...(19): siRNA sense strand
guccaucgcauccgucauu

SEQ ID NO: 1021742 - RNA, 19 nt, Homo sapiens
  misc_RNA (1)...(19): siRNA sense strand
ggaauggcagcaucuacau

SEQ ID NO: 1021743 - RNA, 19 nt, Homo sapiens
  misc_RNA (1)...(19): siRNA sense strand
gaauggcagcaucuacaug

SEQ ID NO: 1021744 - RNA, 19 nt, Homo sapiens
  misc_RNA (1)...(19): siRNA sense strand
guugcugucuuuacguuuc

SEQ ID NO: 1021745 - RNA, 19 nt, Homo sapiens
  misc_RNA (1)...(19): siRNA sense strand
gggcauuaaugagaagcuu

SEQ ID NO: 1021746 - RNA, 19 nt, Homo sapiens
  misc_RNA (1)...(19): siRNA sense strand
gagccgccauccucucucu

SEQ ID NO: 1021747 - RNA, 19 nt, Homo sapiens
  misc_RNA (1)...(19): siRNA sense strand
uuucgggcauuaaugagaa

SEQ ID NO: 1021748 - RNA, 19 nt, Homo sapiens
  misc_RNA (1)...(19): siRNA sense strand
gaggcggucuuugccaaca

SEQ ID NO: 1021749 - RNA, 19 nt, Homo sapiens
  misc_RNA (1)...(19): siRNA sense strand
ucaccacugucuuccucuu

SEQ ID NO: 1021750 - RNA, 19 nt, Homo sapiens
  misc_RNA (1)...(19): siRNA sense strand
gcugguugcugucuuuacg

SEQ ID NO: 1021751 - RNA, 19 nt, Homo sapiens
  misc_RNA (1)...(19): siRNA sense strand
ggacugccaaccucuacuc

SEQ ID NO: 1021752 - RNA, 19 nt, Homo sapiens
  misc_RNA (1)...(19): siRNA sense strand
gaggugcgucacuggugua

SEQ ID NO: 1021753 - RNA, 19 nt, Homo sapiens
  misc_RNA (1)...(19): siRNA sense strand
cuacauccuucuggcuuca

SEQ ID NO: 1021754 - RNA, 19 nt, Homo sapiens
  misc_RNA (1)...(19): siRNA sense strand
ccagugaggcggucuuugc

SEQ ID NO: 1021755 - RNA, 19 nt, Homo sapiens
  misc_RNA (1)...(19): siRNA sense strand
ucuggacgguucuacuugu

SEQ ID NO: 1021756 - RNA, 19 nt, Homo sapiens
  misc_RNA (1)...(19): siRNA sense strand
gugguggcuuugccuggaa

SEQ ID NO: 1021757 - RNA, 19 nt, Homo sapiens
  misc_RNA (1)...(19): siRNA sense strand
gcauuaaugagaagcuuuu

SEQ ID NO: 1021758 - RNA, 19 nt, Homo sapiens
  misc_RNA (1)...(19): siRNA sense strand
ggcauuaaugagaagcuuu

SEQ ID NO: 1021759 - RNA, 19 nt, Homo sapiens
  misc_RNA (1)...(19): siRNA sense strand
gcccaaacugcccuggaaa

SEQ ID NO: 1021760 - RNA, 19 nt, Homo sapiens
  misc_RNA (1)...(19): siRNA sense strand
caagagcuauuucugauua

SEQ ID NO: 1021761 - RNA, 19 nt, Homo sapiens
  misc_RNA (1)...(19): siRNA sense strand
gcaaauucuuucauccuuu

SEQ ID NO: 1021762 - RNA, 19 nt, Homo sapiens
  misc_RNA (1)...(19): siRNA sense strand
ggaaggagaggaagaacaa

SEQ ID NO: 1021763 - RNA, 19 nt, Homo sapiens
  misc_RNA (1)...(19): siRNA sense strand
gaaccagcaucuacaccaa

SEQ ID NO: 1021764 - RNA, 19 nt, Homo sapiens
  misc_RNA (1)...(19): siRNA sense strand
gaaaggugguugaaauacu

SEQ ID NO: 1021765 - RNA, 19 nt, Homo sapiens
  misc_RNA (1)...(19): siRNA sense strand
ccacaagagcuauuucuga

SEQ ID NO: 1021766 - RNA, 19 nt, Homo sapiens
  misc_RNA (1)...(19): siRNA sense strand
guggagaaguuccuaaauc

SEQ ID NO: 1021767 - RNA, 19 nt, Homo sapiens
  misc_RNA (1)...(19): siRNA sense strand
cacaagagcuauuucugau

SEQ ID NO: 1021768 - RNA, 19 nt, Homo sapiens
  misc_RNA (1)...(19): siRNA sense strand
ccuaauacaugcgaaguga

SEQ ID NO: 1021769 - RNA, 19 nt, Homo sapiens
  misc_RNA (1)...(19): siRNA sense strand
gcaauuucaugucgucgau

SEQ ID NO: 1021770 - RNA, 19 nt, Homo sapiens
  misc_RNA (1)...(19): siRNA sense strand
ccauagacccuaauacaug

SEQ ID NO: 1021771 - RNA, 19 nt, Homo sapiens
  misc_RNA (1)...(19): siRNA sense strand
ugcuugcgguuuaauauua

SEQ ID NO: 1021772 - RNA, 19 nt, Homo sapiens
  misc_RNA (1)...(19): siRNA sense strand
aaaggugguugaaauacuu

SEQ ID NO: 1021773 - RNA, 19 nt, Homo sapiens
  misc_RNA (1)...(19): siRNA sense strand
uugagaagcuggccauaga

SEQ ID NO: 1021774 - RNA, 19 nt, Homo sapiens
  misc_RNA (1)...(19): siRNA sense strand
caugcgaagugaacacaaa

SEQ ID NO: 1021775 - RNA, 19 nt, Homo sapiens
  misc_RNA (1)...(19): siRNA sense strand
aaaucugccuccaaggaua

SEQ ID NO: 1021776 - RNA, 19 nt, Homo sapiens
  misc_RNA (1)...(19): siRNA sense strand
ccucugucauuacuaaauu

SEQ ID NO: 1021777 - RNA, 19 nt, Homo sapiens
  misc_RNA (1)...(19): siRNA sense strand
cuggaaaggugguugaaau

SEQ ID NO: 1021778 - RNA, 19 nt, Homo sapiens
  misc_RNA (1)...(19): siRNA sense strand
gagccaaccacaagagcua

SEQ ID NO: 1021779 - RNA, 19 nt, Homo sapiens
  misc_RNA (1)...(19): siRNA sense strand
ggccauagacccuaauaca

SEQ ID NO: 1021780 - RNA, 19 nt, Homo sapiens
  misc_RNA (1)...(19): siRNA sense strand
gcaguaagaaccagcaucu

SEQ ID NO: 1021781 - RNA, 19 nt, Homo sapiens
  misc_RNA (1)...(19): siRNA sense strand
guaagaaccagcaucuaca

SEQ ID NO: 1021782 - RNA, 19 nt, Homo sapiens
  misc_RNA (1)...(19): siRNA sense strand
uggagaaguuccuaaaucu

SEQ ID NO: 1021783 - RNA, 19 nt, Homo sapiens
  misc_RNA (1)...(19): siRNA sense strand
uggaaaggugguugaaaua

SEQ ID NO: 1021784 - RNA, 19 nt, Homo sapiens
  misc_RNA (1)...(19): siRNA sense strand
acucauccaucaaguuguu

SEQ ID NO: 1021785 - RNA, 19 nt, Homo sapiens
  misc_RNA (1)...(19): siRNA sense strand
ggaaaggugguugaaauac

SEQ ID NO: 1021786 - RNA, 19 nt, Homo sapiens
  misc_RNA (1)...(19): siRNA sense strand
gcuugcgguuuaauauuau

SEQ ID NO: 1021787 - RNA, 19 nt, Homo sapiens
  misc_RNA (1)...(19): siRNA sense strand
cuaaaucugccuccaagga

SEQ ID NO: 1021788 - RNA, 19 nt, Homo sapiens
  misc_RNA (1)...(19): siRNA sense strand
ccaaggauaagucaauaca

SEQ ID NO: 1021789 - RNA, 19 nt, Homo sapiens
  misc_RNA (1)...(19): siRNA sense strand
gaagugaacacaaaauaca

SEQ ID NO: 1021790 - RNA, 19 nt, Homo sapiens
  misc_RNA (1)...(19): siRNA sense strand
cgcaaauucuuucauccuu

SEQ ID NO: 1021791 - RNA, 19 nt, Homo sapiens
  misc_RNA (1)...(19): siRNA sense strand
cuccaaggauaagucaaua

SEQ ID NO: 1021792 - RNA, 19 nt, Homo sapiens
  misc_RNA (1)...(19): siRNA sense strand
ggagaaguuccuaaaucug

SEQ ID NO: 1021793 - RNA, 19 nt, Homo sapiens
  misc_RNA (1)...(19): siRNA sense strand
ucacugggaggacauugaa

SEQ ID NO: 1021794 - RNA, 19 nt, Homo sapiens
  misc_RNA (1)...(19): siRNA sense strand
gaacacaaaauacaaagca

SEQ ID NO: 1021795 - RNA, 19 nt, Homo sapiens
  misc_RNA (1)...(19): siRNA sense strand
gaaggagaggaagaacaaa

SEQ ID NO: 1021796 - RNA, 19 nt, Homo sapiens
  misc_RNA (1)...(19): siRNA sense strand
caccaaacaucuggaaagg

SEQ ID NO: 1021797 - RNA, 19 nt, Homo sapiens
  misc_RNA (1)...(19): siRNA sense strand
gcgaagugaacacaaaaua

SEQ ID NO: 1021798 - RNA, 19 nt, Homo sapiens
  misc_RNA (1)...(19): siRNA sense strand
uaaaucugccuccaaggau

SEQ ID NO: 1021799 - RNA, 19 nt, Homo sapiens
  misc_RNA (1)...(19): siRNA sense strand
agaggaagaacaaaacuua

SEQ ID NO: 1021800 - RNA, 19 nt, Homo sapiens
  misc_RNA (1)...(19): siRNA sense strand
gccauagacccuaauacau

SEQ ID NO: 1021801 - RNA, 19 nt, Homo sapiens
  misc_RNA (1)...(19): siRNA sense strand
gagcuauuucugauuauac

SEQ ID NO: 1021802 - RNA, 19 nt, Homo sapiens
  misc_RNA (1)...(19): siRNA sense strand
gacauugaacuggcccuaa

SEQ ID NO: 1021803 - RNA, 19 nt, Homo sapiens
  misc_RNA (1)...(19): siRNA sense strand
caaggauaagucaauacaa

SEQ ID NO: 1021804 - RNA, 19 nt, Homo sapiens
  misc_RNA (1)...(19): siRNA sense strand
ucagggagccaaccacaag

SEQ ID NO: 1021805 - RNA, 19 nt, Homo sapiens
  misc_RNA (1)...(19): siRNA sense strand
aacuucagcucguggagaa

SEQ ID NO: 1021806 - RNA, 19 nt, Homo sapiens
  misc_RNA (1)...(19): siRNA sense strand
ugauuauacucaggugcua

SEQ ID NO: 1021807 - RNA, 19 nt, Homo sapiens
  misc_RNA (1)...(19): siRNA sense strand
ccaaccacaagagcuauuu

SEQ ID NO: 1021808 - RNA, 19 nt, Homo sapiens
  misc_RNA (1)...(19): siRNA sense strand
gcaucuacaccaaacaucu

SEQ ID NO: 1021809 - RNA, 19 nt, Homo sapiens
  misc_RNA (1)...(19): siRNA sense strand
gggaaggagaggaagaaca

SEQ ID NO: 1021810 - RNA, 19 nt, Homo sapiens
  misc_RNA (1)...(19): siRNA sense strand
aaucugccuccaaggauaa

SEQ ID NO: 1021811 - RNA, 19 nt, Homo sapiens
  misc_RNA (1)...(19): siRNA sense strand
acaagagcuauuucugauu

SEQ ID NO: 1021812 - RNA, 19 nt, Homo sapiens
  misc_RNA (1)...(19): siRNA sense strand
guggaccccucugucauua

SEQ ID NO: 1021813 - RNA, 19 nt, Homo sapiens
  misc_RNA (1)...(19): siRNA sense strand
gcaaguggccgcagugcua

SEQ ID NO: 1021814 - RNA, 19 nt, Homo sapiens
  misc_RNA (1)...(19): siRNA sense strand
caagaaggcuuugcuuaag

SEQ ID NO: 1021815 - RNA, 19 nt, Homo sapiens
  misc_RNA (1)...(19): siRNA sense strand
ggaguuccuuccuguguau

SEQ ID NO: 1021816 - RNA, 19 nt, Homo sapiens
  misc_RNA (1)...(19): siRNA sense strand
acaagaaggcuuugcuuaa

SEQ ID NO: 1021817 - RNA, 19 nt, Homo sapiens
  misc_RNA (1)...(19): siRNA sense strand
ucucagcccugcagcauug

SEQ ID NO: 1021818 - RNA, 19 nt, Homo sapiens
  misc_RNA (1)...(19): siRNA sense strand
agaaggcuuugcuuaaguu

SEQ ID NO: 1021819 - RNA, 19 nt, Homo sapiens
  misc_RNA (1)...(19): siRNA sense strand
caccgaaugugaguuugua

SEQ ID NO: 1021820 - RNA, 19 nt, Homo sapiens
  misc_RNA (1)...(19): siRNA sense strand
gugcaugaguuacaucucu

SEQ ID NO: 1021821 - RNA, 19 nt, Homo sapiens
  misc_RNA (1)...(19): siRNA sense strand
caacaagaaggcuuugcuu

SEQ ID NO: 1021822 - RNA, 19 nt, Homo sapiens
  misc_RNA (1)...(19): siRNA sense strand
ccugugaccugcccaaagu

SEQ ID NO: 1021823 - RNA, 19 nt, Homo sapiens
  misc_RNA (1)...(19): siRNA sense strand
cagcuucaggagccaauua

SEQ ID NO: 1021824 - RNA, 19 nt, Homo sapiens
  misc_RNA (1)...(19): siRNA sense strand
aacaagaaggcuuugcuua

SEQ ID NO: 1021825 - RNA, 19 nt, Homo sapiens
  misc_RNA (1)...(19): siRNA sense strand
ucaaguggccggucuuagu

SEQ ID NO: 1021826 - RNA, 19 nt, Homo sapiens
  misc_RNA (1)...(19): siRNA sense strand
gagugcuucuggccuuuau

SEQ ID NO: 1021827 - RNA, 19 nt, Homo sapiens
  misc_RNA (1)...(19): siRNA sense strand
uggaguuccuuccugugua

SEQ ID NO: 1021828 - RNA, 19 nt, Homo sapiens
  misc_RNA (1)...(19): siRNA sense strand
aagaaggcuuugcuuaagu

SEQ ID NO: 1021829 - RNA, 19 nt, Homo sapiens
  misc_RNA (1)...(19): siRNA sense strand
caaguggccggucuuagug

SEQ ID NO: 1021830 - RNA, 19 nt, Homo sapiens
  misc_RNA (1)...(19): siRNA sense strand
aggcuuugcuuaaguucaa

SEQ ID NO: 1021831 - RNA, 19 nt, Homo sapiens
  misc_RNA (1)...(19): siRNA sense strand
uuggagcccuucuucgauu

SEQ ID NO: 1021832 - RNA, 19 nt, Homo sapiens
  misc_RNA (1)...(19): siRNA sense strand
ggcacaggcucugggcauu

SEQ ID NO: 1021833 - RNA, 19 nt, Homo sapiens
  misc_RNA (1)...(19): siRNA sense strand
ggauggaggaagacugugu

SEQ ID NO: 1021834 - RNA, 19 nt, Homo sapiens
  misc_RNA (1)...(19): siRNA sense strand
gcacaggcucugggcauuc

SEQ ID NO: 1021835 - RNA, 19 nt, Homo sapiens
  misc_RNA (1)...(19): siRNA sense strand
ggccgcagugcuauucuuu

SEQ ID NO: 1021836 - RNA, 19 nt, Homo sapiens
  misc_RNA (1)...(19): siRNA sense strand
ccacacuccacuuucuuug

SEQ ID NO: 1021837 - RNA, 19 nt, Homo sapiens
  misc_RNA (1)...(19): siRNA sense strand
caaaccaggagccuucauc

SEQ ID NO: 1021838 - RNA, 19 nt, Homo sapiens
  misc_RNA (1)...(19): siRNA sense strand
gucccgagcugagaaccuu

SEQ ID NO: 1021839 - RNA, 19 nt, Homo sapiens
  misc_RNA (1)...(19): siRNA sense strand
guuccaacaagaaggcuuu

SEQ ID NO: 1021840 - RNA, 19 nt, Homo sapiens
  misc_RNA (1)...(19): siRNA sense strand
acacuccacuuucuuugac

SEQ ID NO: 1021841 - RNA, 19 nt, Homo sapiens
  misc_RNA (1)...(19): siRNA sense strand
cauuguggauguggaguuc

SEQ ID NO: 1021842 - RNA, 19 nt, Homo sapiens
  misc_RNA (1)...(19): siRNA sense strand
cauuggagcccuucuucga

SEQ ID NO: 1021843 - RNA, 19 nt, Homo sapiens
  misc_RNA (1)...(19): siRNA sense strand
caggauggaggaagacugu

SEQ ID NO: 1021844 - RNA, 19 nt, Homo sapiens
  misc_RNA (1)...(19): siRNA sense strand
cacccucuaugccaacaau

SEQ ID NO: 1021845 - RNA, 19 nt, Homo sapiens
  misc_RNA (1)...(19): siRNA sense strand
gcauuguggauguggaguu

SEQ ID NO: 1021846 - RNA, 19 nt, Homo sapiens
  misc_RNA (1)...(19): siRNA sense strand
cgagugcuucuggccuuua

SEQ ID NO: 1021847 - RNA, 19 nt, Homo sapiens
  misc_RNA (1)...(19): siRNA sense strand
ggacagcacugauggcuua

SEQ ID NO: 1021848 - RNA, 19 nt, Homo sapiens
  misc_RNA (1)...(19): siRNA sense strand
gcacauggcacccacaguu

SEQ ID NO: 1021849 - RNA, 19 nt, Homo sapiens
  misc_RNA (1)...(19): siRNA sense strand
ggauaaagcuggccuucag

SEQ ID NO: 1021850 - RNA, 19 nt, Homo sapiens
  misc_RNA (1)...(19): siRNA sense strand
ggaagcugcucacaaaucu

SEQ ID NO: 1021851 - RNA, 19 nt, Homo sapiens
  misc_RNA (1)...(19): siRNA sense strand
ggaggaccaucaggaaauu

SEQ ID NO: 1021852 - RNA, 19 nt, Homo sapiens
  misc_RNA (1)...(19): siRNA sense strand
gaagagggaccuacugauc

SEQ ID NO: 1021853 - RNA, 19 nt, Homo sapiens
  misc_RNA (1)...(19): siRNA sense strand
acacuucaguuuacuauca

SEQ ID NO: 1021854 - RNA, 19 nt, Homo sapiens
  misc_RNA (1)...(19): siRNA sense strand
ugagaaauuugucaccuau

SEQ ID NO: 1021855 - RNA, 19 nt, Homo sapiens
  misc_RNA (1)...(19): siRNA sense strand
ccaccaggauaucuacauu

SEQ ID NO: 1021856 - RNA, 19 nt, Homo sapiens
  misc_RNA (1)...(19): siRNA sense strand
uaaagaaccaacccaguga

SEQ ID NO: 1021857 - RNA, 19 nt, Homo sapiens
  misc_RNA (1)...(19): siRNA sense strand
gcaaggagguccgaguucu

SEQ ID NO: 1021858 - RNA, 19 nt, Homo sapiens
  misc_RNA (1)...(19): siRNA sense strand
augcggagcuguucaagaa

SEQ ID NO: 1021859 - RNA, 19 nt, Homo sapiens
  misc_RNA (1)...(19): siRNA sense strand
gugaggagcugccugacau

SEQ ID NO: 1021860 - RNA, 19 nt, Homo sapiens
  misc_RNA (1)...(19): siRNA sense strand
ucaacaggcucaccaacug

SEQ ID NO: 1021861 - RNA, 19 nt, Homo sapiens
  misc_RNA (1)...(19): siRNA sense strand
ggucaucuuuccggauaaa

SEQ ID NO: 1021862 - RNA, 19 nt, Homo sapiens
  misc_RNA (1)...(19): siRNA sense strand
gggcaggaguguccagcaa

SEQ ID NO: 1021863 - RNA, 19 nt, Homo sapiens
  misc_RNA (1)...(19): siRNA sense strand
gggcaacacgcauuaacaa

SEQ ID NO: 1021864 - RNA, 19 nt, Homo sapiens
  misc_RNA (1)...(19): siRNA sense strand
ucaccuauuucacaagaau

SEQ ID NO: 1021865 - RNA, 19 nt, Homo sapiens
  misc_RNA (1)...(19): siRNA sense strand
gagcaaggagguccgaguu

SEQ ID NO: 1021866 - RNA, 19 nt, Homo sapiens
  misc_RNA (1)...(19): siRNA sense strand
gccuaagccucaacaacuu

SEQ ID NO: 1021867 - RNA, 19 nt, Homo sapiens
  misc_RNA (1)...(19): siRNA sense strand
aaaugcagcugcuccaagu

SEQ ID NO: 1021868 - RNA, 19 nt, Homo sapiens
  misc_RNA (1)...(19): siRNA sense strand
gcuucggccucuugagaaa

SEQ ID NO: 1021869 - RNA, 19 nt, Homo sapiens
  misc_RNA (1)...(19): siRNA sense strand
gcagcucagugacaaagag

SEQ ID NO: 1021870 - RNA, 19 nt, Homo sapiens
  misc_RNA (1)...(19): siRNA sense strand
acggucaucuuuccggaua

SEQ ID NO: 1021871 - RNA, 19 nt, Homo sapiens
  misc_RNA (1)...(19): siRNA sense strand
agagggaccuacugaucaa

SEQ ID NO: 1021872 - RNA, 19 nt, Homo sapiens
  misc_RNA (1)...(19): siRNA sense strand
gcaggaguguccagcaaaa

SEQ ID NO: 1021873 - RNA, 19 nt, Homo sapiens
  misc_RNA (1)...(19): siRNA sense strand
gauggcaacaccaacaaga

SEQ ID NO: 1021874 - RNA, 19 nt, Homo sapiens
  misc_RNA (1)...(19): siRNA sense strand
gugaagagggaccuacuga

SEQ ID NO: 1021875 - RNA, 19 nt, Homo sapiens
  misc_RNA (1)...(19): siRNA sense strand
ugaaagagcuaaaagaacu

SEQ ID NO: 1021876 - RNA, 19 nt, Homo sapiens
  misc_RNA (1)...(19): siRNA sense strand
cagagcagcugacccucau

SEQ ID NO: 1021877 - RNA, 19 nt, Homo sapiens
  misc_RNA (1)...(19): siRNA sense strand
ugucaccuauuucacaaga

SEQ ID NO: 1021878 - RNA, 19 nt, Homo sapiens
  misc_RNA (1)...(19): siRNA sense strand
caauaggucagcuacacaa

SEQ ID NO: 1021879 - RNA, 19 nt, Homo sapiens
  misc_RNA (1)...(19): siRNA sense strand
uugagaaauuugucaccua

SEQ ID NO: 1021880 - RNA, 19 nt, Homo sapiens
  misc_RNA (1)...(19): siRNA sense strand
gguccgaguucugcaggaa

SEQ ID NO: 1021881 - RNA, 19 nt, Homo sapiens
  misc_RNA (1)...(19): siRNA sense strand
ugucgugggucuguaaaga

SEQ ID NO: 1021882 - RNA, 19 nt, Homo sapiens
  misc_RNA (1)...(19): siRNA sense strand
ugacaaagagagcuacaag

SEQ ID NO: 1021883 - RNA, 19 nt, Homo sapiens
  misc_RNA (1)...(19): siRNA sense strand
gaggagcugccugacauga

SEQ ID NO: 1021884 - RNA, 19 nt, Homo sapiens
  misc_RNA (1)...(19): siRNA sense strand
accaggauaucuacauuca

SEQ ID NO: 1021885 - RNA, 19 nt, Homo sapiens
  misc_RNA (1)...(19): siRNA sense strand
gagaaauuugucaccuauu

SEQ ID NO: 1021886 - RNA, 19 nt, Homo sapiens
  misc_RNA (1)...(19): siRNA sense strand
ggaaaugcagcugcuccaa

SEQ ID NO: 1021887 - RNA, 19 nt, Homo sapiens
  misc_RNA (1)...(19): siRNA sense strand
gcuaaaagaacucugcaaa

SEQ ID NO: 1021888 - RNA, 19 nt, Homo sapiens
  misc_RNA (1)...(19): siRNA sense strand
gcagcugacccucauggau

SEQ ID NO: 1021889 - RNA, 19 nt, Homo sapiens
  misc_RNA (1)...(19): siRNA sense strand
uaaagcuggccuucaggaa

SEQ ID NO: 1021890 - RNA, 19 nt, Homo sapiens
  misc_RNA (1)...(19): siRNA sense strand
caacgaggccaagccagau

SEQ ID NO: 1021891 - RNA, 19 nt, Homo sapiens
  misc_RNA (1)...(19): siRNA sense strand
gggauuuucugacugaguu

SEQ ID NO: 1021892 - RNA, 19 nt, Homo sapiens
  misc_RNA (1)...(19): siRNA sense strand
gaaggggaaugagcacaug

SEQ ID NO: 1021893 - RNA, 19 nt, Homo sapiens
  misc_RNA (1)...(19): siRNA sense strand
aagagggaccuacugauca

SEQ ID NO: 1021894 - RNA, 19 nt, Homo sapiens
  misc_RNA (1)...(19): siRNA sense strand
caugaaagagcuaaaagaa

SEQ ID NO: 1021895 - RNA, 19 nt, Homo sapiens
  misc_RNA (1)...(19): siRNA sense strand
uaggucagcuacacaagac

SEQ ID NO: 1021896 - RNA, 19 nt, Homo sapiens
  misc_RNA (1)...(19): siRNA sense strand
ccgcaacggucaucuuucc

SEQ ID NO: 1021897 - RNA, 19 nt, Homo sapiens
  misc_RNA (1)...(19): siRNA sense strand
gaugcggagcuguucaaga

SEQ ID NO: 1021898 - RNA, 19 nt, Homo sapiens
  misc_RNA (1)...(19): siRNA sense strand
ccaacaagaggagcaagga

SEQ ID NO: 1021899 - RNA, 19 nt, Homo sapiens
  misc_RNA (1)...(19): siRNA sense strand
ggcaacacgcauuaacaau

SEQ ID NO: 1021900 - RNA, 19 nt, Homo sapiens
  misc_RNA (1)...(19): siRNA sense strand
ggcaggaguguccagcaaa

SEQ ID NO: 1021901 - RNA, 19 nt, Homo sapiens
  misc_RNA (1)...(19): siRNA sense strand
caacccaauaggucagcua

SEQ ID NO: 1021902 - RNA, 19 nt, Homo sapiens
  misc_RNA (1)...(19): siRNA sense strand
gaggaagcugcucacaaau

SEQ ID NO: 1021903 - RNA, 19 nt, Homo sapiens
  misc_RNA (1)...(19): siRNA sense strand
gggagugccuaagccucaa

SEQ ID NO: 1021904 - RNA, 19 nt, Homo sapiens
  misc_RNA (1)...(19): siRNA sense strand
ugccugacaugacgaccuu

SEQ ID NO: 1021905 - RNA, 19 nt, Homo sapiens
  misc_RNA (1)...(19): siRNA sense strand
uggaggaccaucaggaaau

SEQ ID NO: 1021906 - RNA, 19 nt, Homo sapiens
  misc_RNA (1)...(19): siRNA sense strand
ucagugacaaagagagcua

SEQ ID NO: 1021907 - RNA, 19 nt, Homo sapiens
  misc_RNA (1)...(19): siRNA sense strand
cuaaaagaacucugcaaaa

SEQ ID NO: 1021908 - RNA, 19 nt, Homo sapiens
  misc_RNA (1)...(19): siRNA sense strand
caacauaccucgacucauu

SEQ ID NO: 1021909 - RNA, 19 nt, Homo sapiens
  misc_RNA (1)...(19): siRNA sense strand
ggucagagcuguauuauuc

SEQ ID NO: 1021910 - RNA, 19 nt, Homo sapiens
  misc_RNA (1)...(19): siRNA sense strand
gauaaguugucgucuauua

SEQ ID NO: 1021911 - RNA, 19 nt, Homo sapiens
  misc_RNA (1)...(19): siRNA sense strand
ggauuuaccugugauaaua

SEQ ID NO: 1021912 - RNA, 19 nt, Homo sapiens
  misc_RNA (1)...(19): siRNA sense strand
gcagaacuuugccuacuua

SEQ ID NO: 1021913 - RNA, 19 nt, Homo sapiens
  misc_RNA (1)...(19): siRNA sense strand
ggaagugguuggugccuua

SEQ ID NO: 1021914 - RNA, 19 nt, Homo sapiens
  misc_RNA (1)...(19): siRNA sense strand
gaaugaagcugaaguugau

SEQ ID NO: 1021915 - RNA, 19 nt, Homo sapiens
  misc_RNA (1)...(19): siRNA sense strand
gaugaaugcugucuuugua

SEQ ID NO: 1021916 - RNA, 19 nt, Homo sapiens
  misc_RNA (1)...(19): siRNA sense strand
gaaggugacuuuccauuuc

SEQ ID NO: 1021917 - RNA, 19 nt, Homo sapiens
  misc_RNA (1)...(19): siRNA sense strand
gaucaacucuccuaaagau

SEQ ID NO: 1021918 - RNA, 19 nt, Homo sapiens
  misc_RNA (1)...(19): siRNA sense strand
ggagauugauggucuacua

SEQ ID NO: 1021919 - RNA, 19 nt, Homo sapiens
  misc_RNA (1)...(19): siRNA sense strand
gcaaggaccucaccaccaa

SEQ ID NO: 1021920 - RNA, 19 nt, Homo sapiens
  misc_RNA (1)...(19): siRNA sense strand
gaugaugaaugcugucuuu

SEQ ID NO: 1021921 - RNA, 19 nt, Homo sapiens
  misc_RNA (1)...(19): siRNA sense strand
gagcaaagccacugaggua

SEQ ID NO: 1021922 - RNA, 19 nt, Homo sapiens
  misc_RNA (1)...(19): siRNA sense strand
gaacuuugccuacuuaugu

SEQ ID NO: 1021923 - RNA, 19 nt, Homo sapiens
  misc_RNA (1)...(19): siRNA sense strand
gaacagcugcuccagagua

SEQ ID NO: 1021924 - RNA, 19 nt, Homo sapiens
  misc_RNA (1)...(19): siRNA sense strand
guucugagcuuacuggaaa

SEQ ID NO: 1021925 - RNA, 19 nt, Homo sapiens
  misc_RNA (1)...(19): siRNA sense strand
cagagaaccugcagcauga

SEQ ID NO: 1021926 - RNA, 19 nt, Homo sapiens
  misc_RNA (1)...(19): siRNA sense strand
gcagauucaugaagagaaa

SEQ ID NO: 1021927 - RNA, 19 nt, Homo sapiens
  misc_RNA (1)...(19): siRNA sense strand
gacccaaacuuccuauuga

SEQ ID NO: 1021928 - RNA, 19 nt, Homo sapiens
  misc_RNA (1)...(19): siRNA sense strand
gacagaagaugccuccaaa

SEQ ID NO: 1021929 - RNA, 19 nt, Homo sapiens
  misc_RNA (1)...(19): siRNA sense strand
gaugauggcugaacuagag

SEQ ID NO: 1021930 - RNA, 19 nt, Homo sapiens
  misc_RNA (1)...(19): siRNA sense strand
ggagaacauucacaacuau

SEQ ID NO: 1021931 - RNA, 19 nt, Homo sapiens
  misc_RNA (1)...(19): siRNA sense strand
gcagucuccuauacaaaua

SEQ ID NO: 1021932 - RNA, 19 nt, Homo sapiens
  misc_RNA (1)...(19): siRNA sense strand
aaaggaagccggaauauug

SEQ ID NO: 1021933 - RNA, 19 nt, Homo sapiens
  misc_RNA (1)...(19): siRNA sense strand
acacaaggcugcuucauca

SEQ ID NO: 1021934 - RNA, 19 nt, Homo sapiens
  misc_RNA (1)...(19): siRNA sense strand
gaauuuccaucaaagcauu

SEQ ID NO: 1021935 - RNA, 19 nt, Homo sapiens
  misc_RNA (1)...(19): siRNA sense strand
caagaacagugaugaaauc

SEQ ID NO: 1021936 - RNA, 19 nt, Homo sapiens
  misc_RNA (1)...(19): siRNA sense strand
gaacugaucaacucuccua

SEQ ID NO: 1021937 - RNA, 19 nt, Homo sapiens
  misc_RNA (1)...(19): siRNA sense strand
guuacaggcuucccaagua

SEQ ID NO: 1021938 - RNA, 19 nt, Homo sapiens
  misc_RNA (1)...(19): siRNA sense strand
cauaaugucuuccugcuau

SEQ ID NO: 1021939 - RNA, 19 nt, Homo sapiens
  misc_RNA (1)...(19): siRNA sense strand
guaguggacuccuguguug

SEQ ID NO: 1021940 - RNA, 19 nt, Homo sapiens
  misc_RNA (1)...(19): siRNA sense strand
ggaaugaagcugaaguuga

SEQ ID NO: 1021941 - RNA, 19 nt, Homo sapiens
  misc_RNA (1)...(19): siRNA sense strand
ggaagauguucugagcuua

SEQ ID NO: 1021942 - RNA, 19 nt, Homo sapiens
  misc_RNA (1)...(19): siRNA sense strand
ccucugcacuuuacuauga

SEQ ID NO: 1021943 - RNA, 19 nt, Homo sapiens
  misc_RNA (1)...(19): siRNA sense strand
uuaguggccuggagucuua

SEQ ID NO: 1021944 - RNA, 19 nt, Homo sapiens
  misc_RNA (1)...(19): siRNA sense strand
ugacgaaguucaucuuaga

SEQ ID NO: 1021945 - RNA, 19 nt, Homo sapiens
  misc_RNA (1)...(19): siRNA sense strand
cauguguucucucauauuu

SEQ ID NO: 1021946 - RNA, 19 nt, Homo sapiens
  misc_RNA (1)...(19): siRNA sense strand
gacaugcacuuggugauaa

SEQ ID NO: 1021947 - RNA, 19 nt, Homo sapiens
  misc_RNA (1)...(19): siRNA sense strand
gggaagauguucugagcuu

SEQ ID NO: 1021948 - RNA, 19 nt, Homo sapiens
  misc_RNA (1)...(19): siRNA sense strand
uaaagagcguucauucaug

SEQ ID NO: 1021949 - RNA, 19 nt, Homo sapiens
  misc_RNA (1)...(19): siRNA sense strand
gaucaaauagcuuuccaaa

SEQ ID NO: 1021950 - RNA, 19 nt, Homo sapiens
  misc_RNA (1)...(19): siRNA sense strand
gagauuaagucccaaaauu

SEQ ID NO: 1021951 - RNA, 19 nt, Homo sapiens
  misc_RNA (1)...(19): siRNA sense strand
gaacacagccagccuuugg

SEQ ID NO: 1021952 - RNA, 19 nt, Homo sapiens
  misc_RNA (1)...(19): siRNA sense strand
ccaagaaauuguucauugu

SEQ ID NO: 1021953 - RNA, 19 nt, Homo sapiens
  misc_RNA (1)...(19): siRNA sense strand
cauaccaucuguaaugauu

SEQ ID NO: 1021954 - RNA, 19 nt, Homo sapiens
  misc_RNA (1)...(19): siRNA sense strand
gcaccaauacucagacaaa

SEQ ID NO: 1021955 - RNA, 19 nt, Homo sapiens
  misc_RNA (1)...(19): siRNA sense strand
guacauucucuguucauua

SEQ ID NO: 1021956 - RNA, 19 nt, Homo sapiens
  misc_RNA (1)...(19): siRNA sense strand
gcauguauguuugaaguau

SEQ ID NO: 1021957 - RNA, 19 nt, Homo sapiens
  misc_RNA (1)...(19): siRNA sense strand
uggaagaucucucccagaa

SEQ ID NO: 1021958 - RNA, 19 nt, Homo sapiens
  misc_RNA (1)...(19): siRNA sense strand
ugaaguugauacugccuua

SEQ ID NO: 1021959 - RNA, 19 nt, Homo sapiens
  misc_RNA (1)...(19): siRNA sense strand
gggcauaccaucuguaaug

SEQ ID NO: 1021960 - RNA, 19 nt, Homo sapiens
  misc_RNA (1)...(19): siRNA sense strand
gagccaaccugagcgauga

SEQ ID NO: 1021961 - RNA, 19 nt, Homo sapiens
  misc_RNA (1)...(19): siRNA sense strand
uaagaaagcagcucucuag

SEQ ID NO: 1021962 - RNA, 19 nt, Homo sapiens
  misc_RNA (1)...(19): siRNA sense strand
ggagauugcugguguuggu

SEQ ID NO: 1021963 - RNA, 19 nt, Homo sapiens
  misc_RNA (1)...(19): siRNA sense strand
caucaaagcauucccaguu

SEQ ID NO: 1021964 - RNA, 19 nt, Homo sapiens
  misc_RNA (1)...(19): siRNA sense strand
cccaagaaauuguucauug

SEQ ID NO: 1021965 - RNA, 19 nt, Homo sapiens
  misc_RNA (1)...(19): siRNA sense strand
gaaaagacaucauuguuac

SEQ ID NO: 1021966 - RNA, 19 nt, Homo sapiens
  misc_RNA (1)...(19): siRNA sense strand
gaaagaacucagugaccua

SEQ ID NO: 1021967 - RNA, 19 nt, Homo sapiens
  misc_RNA (1)...(19): siRNA sense strand
gaacaaaggaagccggaau

SEQ ID NO: 1021968 - RNA, 19 nt, Homo sapiens
  misc_RNA (1)...(19): siRNA sense strand
gaagcaaccacuuuccaaa

SEQ ID NO: 1021969 - RNA, 19 nt, Homo sapiens
  misc_RNA (1)...(19): siRNA sense strand
ugaaugcugucuuuguaaa

SEQ ID NO: 1021970 - RNA, 19 nt, Homo sapiens
  misc_RNA (1)...(19): siRNA sense strand
gacagggugcuaagaaaua

SEQ ID NO: 1021971 - RNA, 19 nt, Homo sapiens
  misc_RNA (1)...(19): siRNA sense strand
agacaaagaaguacauuga

SEQ ID NO: 1021972 - RNA, 19 nt, Homo sapiens
  misc_RNA (1)...(19): siRNA sense strand
ucaugcagcugaucaguau

SEQ ID NO: 1021973 - RNA, 19 nt, Homo sapiens
  misc_RNA (1)...(19): siRNA sense strand
guucaggaguaccacauaa

SEQ ID NO: 1021974 - RNA, 19 nt, Homo sapiens
  misc_RNA (1)...(19): siRNA sense strand
uggagaacauucacaacua

SEQ ID NO: 1021975 - RNA, 19 nt, Homo sapiens
  misc_RNA (1)...(19): siRNA sense strand
guauuauucuccucuuuga

SEQ ID NO: 1021976 - RNA, 19 nt, Homo sapiens
  misc_RNA (1)...(19): siRNA sense strand
ggauacacuugagguaauu

SEQ ID NO: 1021977 - RNA, 19 nt, Homo sapiens
  misc_RNA (1)...(19): siRNA sense strand
gcacagcagaugagaguga

SEQ ID NO: 1021978 - RNA, 19 nt, Homo sapiens
  misc_RNA (1)...(19): siRNA sense strand
auacugaaaugcacacuga

SEQ ID NO: 1021979 - RNA, 19 nt, Homo sapiens
  misc_RNA (1)...(19): siRNA sense strand
gauauguguucauccauuc

SEQ ID NO: 1021980 - RNA, 19 nt, Homo sapiens
  misc_RNA (1)...(19): siRNA sense strand
gagaucugcccaagaaauu

SEQ ID NO: 1021981 - RNA, 19 nt, Homo sapiens
  misc_RNA (1)...(19): siRNA sense strand
gaaaugcacacugaagcua

SEQ ID NO: 1021982 - RNA, 19 nt, Homo sapiens
  misc_RNA (1)...(19): siRNA sense strand
uccgagagcuggacauuga

SEQ ID NO: 1021983 - RNA, 19 nt, Homo sapiens
  misc_RNA (1)...(19): siRNA sense strand
gccaguuggugauggauaa

SEQ ID NO: 1021984 - RNA, 19 nt, Homo sapiens
  misc_RNA (1)...(19): siRNA sense strand
gaaguaugggcgucucuuu

SEQ ID NO: 1021985 - RNA, 19 nt, Homo sapiens
  misc_RNA (1)...(19): siRNA sense strand
aaagagcguucauucaugu

SEQ ID NO: 1021986 - RNA, 19 nt, Homo sapiens
  misc_RNA (1)...(19): siRNA sense strand
cuacuagauuguccuauau

SEQ ID NO: 1021987 - RNA, 19 nt, Homo sapiens
  misc_RNA (1)...(19): siRNA sense strand
uugagaaguugccagaaua

SEQ ID NO: 1021988 - RNA, 19 nt, Homo sapiens
  misc_RNA (1)...(19): siRNA sense strand
guguuuagcugcugagaau

SEQ ID NO: 1021989 - RNA, 19 nt, Homo sapiens
  misc_RNA (1)...(19): siRNA sense strand
acauugaggucuucucuau

SEQ ID NO: 1021990 - RNA, 19 nt, Homo sapiens
  misc_RNA (1)...(19): siRNA sense strand
cuacauaauucccaugcuu

SEQ ID NO: 1021991 - RNA, 19 nt, Homo sapiens
  misc_RNA (1)...(19): siRNA sense strand
ccaauacucagacaaagaa

SEQ ID NO: 1021992 - RNA, 19 nt, Homo sapiens
  misc_RNA (1)...(19): siRNA sense strand
aaagagagccugacagaag

SEQ ID NO: 1021993 - RNA, 19 nt, Homo sapiens
  misc_RNA (1)...(19): siRNA sense strand
uguacggacuggaagaaua

SEQ ID NO: 1021994 - RNA, 19 nt, Homo sapiens
  misc_RNA (1)...(19): siRNA sense strand
gcucagaguuugcuucacu

SEQ ID NO: 1021995 - RNA, 19 nt, Homo sapiens
  misc_RNA (1)...(19): siRNA sense strand
acaaagaaguacauugaca

SEQ ID NO: 1021996 - RNA, 19 nt, Homo sapiens
  misc_RNA (1)...(19): siRNA sense strand
uaaaauggcuugacagagu

SEQ ID NO: 1021997 - RNA, 19 nt, Homo sapiens
  misc_RNA (1)...(19): siRNA sense strand
guccauuacuugcagaauu

SEQ ID NO: 1021998 - RNA, 19 nt, Homo sapiens
  misc_RNA (1)...(19): siRNA sense strand
ucaacuagcuguggaucaa

SEQ ID NO: 1021999 - RNA, 19 nt, Homo sapiens
  misc_RNA (1)...(19): siRNA sense strand
gaggccagcuaaacaagga

SEQ ID NO: 1022000 - RNA, 19 nt, Homo sapiens
  misc_RNA (1)...(19): siRNA sense strand
gauauaacaccucauacug

SEQ ID NO: 1022001 - RNA, 19 nt, Homo sapiens
  misc_RNA (1)...(19): siRNA sense strand
gauguggaaacuuuagaua

SEQ ID NO: 1022002 - RNA, 19 nt, Homo sapiens
  misc_RNA (1)...(19): siRNA sense strand
ggaggagauugauggucua

SEQ ID NO: 1022003 - RNA, 19 nt, Homo sapiens
  misc_RNA (1)...(19): siRNA sense strand
gcacuuuacuaugaugaau

SEQ ID NO: 1022004 - RNA, 19 nt, Homo sapiens
  misc_RNA (1)...(19): siRNA sense strand
cgaaaacucuucuauguuc

SEQ ID NO: 1022005 - RNA, 19 nt, Homo sapiens
  misc_RNA (1)...(19): siRNA sense strand
uccauuacuugcagaauuu

SEQ ID NO: 1022006 - RNA, 19 nt, Homo sapiens
  misc_RNA (1)...(19): siRNA sense strand
gagcagaacuuugccuacu

SEQ ID NO: 1022007 - RNA, 19 nt, Homo sapiens
  misc_RNA (1)...(19): siRNA sense strand
ccacugagguaucucuaca

SEQ ID NO: 1022008 - RNA, 19 nt, Homo sapiens
  misc_RNA (1)...(19): siRNA sense strand
gaacauggaugaccuucag

SEQ ID NO: 1022009 - RNA, 19 nt, Homo sapiens
  misc_RNA (1)...(19): siRNA sense strand
gugcagaaguucaagauga

SEQ ID NO: 1022010 - RNA, 19 nt, Homo sapiens
  misc_RNA (1)...(19): siRNA sense strand
cagcaaagccaaacaaguu

SEQ ID NO: 1022011 - RNA, 19 nt, Homo sapiens
  misc_RNA (1)...(19): siRNA sense strand
gaagauuccucuccauguc

SEQ ID NO: 1022012 - RNA, 19 nt, Homo sapiens
  misc_RNA (1)...(19): siRNA sense strand
agacuuggcaugcauguua

SEQ ID NO: 1022013 - RNA, 19 nt, Homo sapiens
  misc_RNA (1)...(19): siRNA sense strand
gaacgacaaaguggaauuu

SEQ ID NO: 1022014 - RNA, 19 nt, Homo sapiens
  misc_RNA (1)...(19): siRNA sense strand
uggcaugcauguuaucaua

SEQ ID NO: 1022015 - RNA, 19 nt, Homo sapiens
  misc_RNA (1)...(19): siRNA sense strand
gaagaagauuccucuccau

SEQ ID NO: 1022016 - RNA, 19 nt, Homo sapiens
  misc_RNA (1)...(19): siRNA sense strand
aaccagagauggauucgaa

SEQ ID NO: 1022017 - RNA, 19 nt, Homo sapiens
  misc_RNA (1)...(19): siRNA sense strand
ucgcugagcugaacaugga

SEQ ID NO: 1022018 - RNA, 19 nt, Homo sapiens
  misc_RNA (1)...(19): siRNA sense strand
ugacuuggcuuccaugacu

SEQ ID NO: 1022019 - RNA, 19 nt, Homo sapiens
  misc_RNA (1)...(19): siRNA sense strand
ucuaagaguugugagauga

SEQ ID NO: 1022020 - RNA, 19 nt, Homo sapiens
  misc_RNA (1)...(19): siRNA sense strand
gagauggauucgaagaaca

SEQ ID NO: 1022021 - RNA, 19 nt, Homo sapiens
  misc_RNA (1)...(19): siRNA sense strand
ccacccgucuggcgaagaa

SEQ ID NO: 1022022 - RNA, 19 nt, Homo sapiens
  misc_RNA (1)...(19): siRNA sense strand
cagcuguggucuaagaguu

SEQ ID NO: 1022023 - RNA, 19 nt, Homo sapiens
  misc_RNA (1)...(19): siRNA sense strand
cgaagcaucuggcgagacu

SEQ ID NO: 1022024 - RNA, 19 nt, Homo sapiens
  misc_RNA (1)...(19): siRNA sense strand
cuucucggcugguugcuuu

SEQ ID NO: 1022025 - RNA, 19 nt, Homo sapiens
  misc_RNA (1)...(19): siRNA sense strand
gaccgugucgcuauaguga

SEQ ID NO: 1022026 - RNA, 19 nt, Homo sapiens
  misc_RNA (1)...(19): siRNA sense strand
gaacauuucggccugaacu

SEQ ID NO: 1022027 - RNA, 19 nt, Homo sapiens
  misc_RNA (1)...(19): siRNA sense strand
ggaaauaaugacagcaaag

SEQ ID NO: 1022028 - RNA, 19 nt, Homo sapiens
  misc_RNA (1)...(19): siRNA sense strand
cagauggcauuggcuauuc

SEQ ID NO: 1022029 - RNA, 19 nt, Homo sapiens
  misc_RNA (1)...(19): siRNA sense strand
uggaaauaaugacagcaaa

SEQ ID NO: 1022030 - RNA, 19 nt, Homo sapiens
  misc_RNA (1)...(19): siRNA sense strand
ggcaguuugugcagaaguu

SEQ ID NO: 1022031 - RNA, 19 nt, Homo sapiens
  misc_RNA (1)...(19): siRNA sense strand
ggcauuggcuauucuacag

SEQ ID NO: 1022032 - RNA, 19 nt, Homo sapiens
  misc_RNA (1)...(19): siRNA sense strand
gaccugaccgugucgcuau

SEQ ID NO: 1022033 - RNA, 19 nt, Homo sapiens
  misc_RNA (1)...(19): siRNA sense strand
gaaauaaugacagcaaagc

SEQ ID NO: 1022034 - RNA, 19 nt, Homo sapiens
  misc_RNA (1)...(19): siRNA sense strand
guuaucauagcuggaaaua

SEQ ID NO: 1022035 - RNA, 19 nt, Homo sapiens
  misc_RNA (1)...(19): siRNA sense strand
gaugaaggagcguggacuu

SEQ ID NO: 1022036 - RNA, 19 nt, Homo sapiens
  misc_RNA (1)...(19): siRNA sense strand
caacaaugcuggggugaug

SEQ ID NO: 1022037 - RNA, 19 nt, Homo sapiens
  misc_RNA (1)...(19): siRNA sense strand
gcaugcauguuaucauagc

SEQ ID NO: 1022038 - RNA, 19 nt, Homo sapiens
  misc_RNA (1)...(19): siRNA sense strand
ugacuuccauccggcaguu

SEQ ID NO: 1022039 - RNA, 19 nt, Homo sapiens
  misc_RNA (1)...(19): siRNA sense strand
aagaaaccuugaacgacaa

SEQ ID NO: 1022040 - RNA, 19 nt, Homo sapiens
  misc_RNA (1)...(19): siRNA sense strand
aagaagaaaccuugaacga

SEQ ID NO: 1022041 - RNA, 19 nt, Homo sapiens
  misc_RNA (1)...(19): siRNA sense strand
ugacagcaaagccaaacaa

SEQ ID NO: 1022042 - RNA, 19 nt, Homo sapiens
  misc_RNA (1)...(19): siRNA sense strand
gacuuggcaugcauguuau

SEQ ID NO: 1022043 - RNA, 19 nt, Homo sapiens
  misc_RNA (1)...(19): siRNA sense strand
ccagagauggauucgaaga

SEQ ID NO: 1022044 - RNA, 19 nt, Homo sapiens
  misc_RNA (1)...(19): siRNA sense strand
gggagggacagauggcauu

SEQ ID NO: 1022045 - RNA, 19 nt, Homo sapiens
  misc_RNA (1)...(19): siRNA sense strand
ugaacuaccuagggcacuu

SEQ ID NO: 1022046 - RNA, 19 nt, Homo sapiens
  misc_RNA (1)...(19): siRNA sense strand
gcugaccaaccuucucuug

SEQ ID NO: 1022047 - RNA, 19 nt, Homo sapiens
  misc_RNA (1)...(19): siRNA sense strand
ucucuuggauacgcugaaa

SEQ ID NO: 1022048 - RNA, 19 nt, Homo sapiens
  misc_RNA (1)...(19): siRNA sense strand
cagagauggauucgaagaa

SEQ ID NO: 1022049 - RNA, 19 nt, Homo sapiens
  misc_RNA (1)...(19): siRNA sense strand
gucuaagaguugugagaug

SEQ ID NO: 1022050 - RNA, 19 nt, Homo sapiens
  misc_RNA (1)...(19): siRNA sense strand
uuaccuauacaacgagaaa

SEQ ID NO: 1022051 - RNA, 19 nt, Homo sapiens
  misc_RNA (1)...(19): siRNA sense strand
gaacuaccuagggcacuuc

SEQ ID NO: 1022052 - RNA, 19 nt, Homo sapiens
  misc_RNA (1)...(19): siRNA sense strand
agagauggauucgaagaac

SEQ ID NO: 1022053 - RNA, 19 nt, Homo sapiens
  misc_RNA (1)...(19): siRNA sense strand
cauguuaucauagcuggaa

SEQ ID NO: 1022054 - RNA, 19 nt, Homo sapiens
  misc_RNA (1)...(19): siRNA sense strand
ggucuaagaguugugagau

SEQ ID NO: 1022055 - RNA, 19 nt, Homo sapiens
  misc_RNA (1)...(19): siRNA sense strand
uuacgucgcugagcugaac

SEQ ID NO: 1022056 - RNA, 19 nt, Homo sapiens
  misc_RNA (1)...(19): siRNA sense strand
ugaacgacaaaguggaauu

SEQ ID NO: 1022057 - RNA, 19 nt, Homo sapiens
  misc_RNA (1)...(19): siRNA sense strand
gauggcauuggcuauucua

SEQ ID NO: 1022058 - RNA, 19 nt, Homo sapiens
  misc_RNA (1)...(19): siRNA sense strand
acagauggcauuggcuauu

SEQ ID NO: 1022059 - RNA, 19 nt, Homo sapiens
  misc_RNA (1)...(19): siRNA sense strand
ucuccucugccacccauua

SEQ ID NO: 1022060 - RNA, 19 nt, Homo sapiens
  misc_RNA (1)...(19): siRNA sense strand
gugaugauggucccucaga

SEQ ID NO: 1022061 - RNA, 19 nt, Homo sapiens
  misc_RNA (1)...(19): siRNA sense strand
uccauguccugaucaacaa

SEQ ID NO: 1022062 - RNA, 19 nt, Homo sapiens
  misc_RNA (1)...(19): siRNA sense strand
agaagauuccucuccaugu

SEQ ID NO: 1022063 - RNA, 19 nt, Homo sapiens
  misc_RNA (1)...(19): siRNA sense strand
ggagggacagauggcauug

SEQ ID NO: 1022064 - RNA, 19 nt, Homo sapiens
  misc_RNA (1)...(19): siRNA sense strand
gaaaaccagagauggauuc

SEQ ID NO: 1022065 - RNA, 19 nt, Homo sapiens
  misc_RNA (1)...(19): siRNA sense strand
ugacugggguccuugaugu

SEQ ID NO: 1022066 - RNA, 19 nt, Homo sapiens
  misc_RNA (1)...(19): siRNA sense strand
gcuguggucuaagaguugu

SEQ ID NO: 1022067 - RNA, 19 nt, Homo sapiens
  misc_RNA (1)...(19): siRNA sense strand
ggcgagacuuggcaugcau

SEQ ID NO: 1022068 - RNA, 19 nt, Homo sapiens
  misc_RNA (1)...(19): siRNA sense strand
ggcacuuccugcugaccaa

SEQ ID NO: 1022069 - RNA, 19 nt, Homo sapiens
  misc_RNA (1)...(19): siRNA sense strand
guggagagcuggugguuuc

SEQ ID NO: 1022070 - RNA, 19 nt, Homo sapiens
  misc_RNA (1)...(19): siRNA sense strand
ccucaaguguguagacauu

SEQ ID NO: 1022071 - RNA, 19 nt, Homo sapiens
  misc_RNA (1)...(19): siRNA sense strand
ccaggucgcuguaagaagu

SEQ ID NO: 1022072 - RNA, 19 nt, Homo sapiens
  misc_RNA (1)...(19): siRNA sense strand
gagagaacaagcaguguga

SEQ ID NO: 1022073 - RNA, 19 nt, Homo sapiens
  misc_RNA (1)...(19): siRNA sense strand
ccaaauacaaagacaguga

SEQ ID NO: 1022074 - RNA, 19 nt, Homo sapiens
  misc_RNA (1)...(19): siRNA sense strand
gagaacaagcagugugaaa

SEQ ID NO: 1022075 - RNA, 19 nt, Homo sapiens
  misc_RNA (1)...(19): siRNA sense strand
gaugacagaagacgaguug

SEQ ID NO: 1022076 - RNA, 19 nt, Homo sapiens
  misc_RNA (1)...(19): siRNA sense strand
gggacugguugacagcuuu

SEQ ID NO: 1022077 - RNA, 19 nt, Homo sapiens
  misc_RNA (1)...(19): siRNA sense strand
acacugagggcuccuauga

SEQ ID NO: 1022078 - RNA, 19 nt, Homo sapiens
  misc_RNA (1)...(19): siRNA sense strand
gcacagagggagccaacug

SEQ ID NO: 1022079 - RNA, 19 nt, Homo sapiens
  misc_RNA (1)...(19): siRNA sense strand
cagcaggcuucuucucaga

SEQ ID NO: 1022080 - RNA, 19 nt, Homo sapiens
  misc_RNA (1)...(19): siRNA sense strand
ggacugguugacagcuuua

SEQ ID NO: 1022081 - RNA, 19 nt, Homo sapiens
  misc_RNA (1)...(19): siRNA sense strand
cuguggagcugaccaauuc

SEQ ID NO: 1022082 - RNA, 19 nt, Homo sapiens
  misc_RNA (1)...(19): siRNA sense strand
gaacacugagggcuccuau

SEQ ID NO: 1022083 - RNA, 19 nt, Homo sapiens
  misc_RNA (1)...(19): siRNA sense strand
gcaggugggcuccaagugu

SEQ ID NO: 1022084 - RNA, 19 nt, Homo sapiens
  misc_RNA (1)...(19): siRNA sense strand
uaacaagggccuggagaga

SEQ ID NO: 1022085 - RNA, 19 nt, Homo sapiens
  misc_RNA (1)...(19): siRNA sense strand
gaaccauccgggacaacuu

SEQ ID NO: 1022086 - RNA, 19 nt, Homo sapiens
  misc_RNA (1)...(19): siRNA sense strand
guucaccgccaucuucauu

SEQ ID NO: 1022087 - RNA, 19 nt, Homo sapiens
  misc_RNA (1)...(19): siRNA sense strand
gagagcuggugguuucaca

SEQ ID NO: 1022088 - RNA, 19 nt, Homo sapiens
  misc_RNA (1)...(19): siRNA sense strand
gagggugugugcagcaagu

SEQ ID NO: 1022089 - RNA, 19 nt, Homo sapiens
  misc_RNA (1)...(19): siRNA sense strand
gaccaauucugcgugaaca

SEQ ID NO: 1022090 - RNA, 19 nt, Homo sapiens
  misc_RNA (1)...(19): siRNA sense strand
gcuggugguuucacaagca

SEQ ID NO: 1022091 - RNA, 19 nt, Homo sapiens
  misc_RNA (1)...(19): siRNA sense strand
ccugaggaaucaaacuguu

SEQ ID NO: 1022092 - RNA, 19 nt, Homo sapiens
  misc_RNA (1)...(19): siRNA sense strand
acugagggcuccuaugagu

SEQ ID NO: 1022093 - RNA, 19 nt, Homo sapiens
  misc_RNA (1)...(19): siRNA sense strand
acaagggccuggagagaac

SEQ ID NO: 1022094 - RNA, 19 nt, Homo sapiens
  misc_RNA (1)...(19): siRNA sense strand
caguggcugugcucagauu

SEQ ID NO: 1022095 - RNA, 19 nt, Homo sapiens
  misc_RNA (1)...(19): siRNA sense strand
ccugggaggaagagaauuu

SEQ ID NO: 1022096 - RNA, 19 nt, Homo sapiens
  misc_RNA (1)...(19): siRNA sense strand
ggaaggcaucugugugaag

SEQ ID NO: 1022097 - RNA, 19 nt, Homo sapiens
  misc_RNA (1)...(19): siRNA sense strand
ugcaucaccucaagugugu

SEQ ID NO: 1022098 - RNA, 19 nt, Homo sapiens
  misc_RNA (1)...(19): siRNA sense strand
ucaccgccaucuucauugg

SEQ ID NO: 1022099 - RNA, 19 nt, Homo sapiens
  misc_RNA (1)...(19): siRNA sense strand
guguggccuuggcuacuuu

SEQ ID NO: 1022100 - RNA, 19 nt, Homo sapiens
  misc_RNA (1)...(19): siRNA sense strand
cuucaucaagggcagauaa

SEQ ID NO: 1022101 - RNA, 19 nt, Homo sapiens
  misc_RNA (1)...(19): siRNA sense strand
uguagacauugaugagugu

SEQ ID NO: 1022102 - RNA, 19 nt, Homo sapiens
  misc_RNA (1)...(19): siRNA sense strand
gaccugaggaaucaaacug

SEQ ID NO: 1022103 - RNA, 19 nt, Homo sapiens
  misc_RNA (1)...(19): siRNA sense strand
aggaagagaauuuguccaa

SEQ ID NO: 1022104 - RNA, 19 nt, Homo sapiens
  misc_RNA (1)...(19): siRNA sense strand
agagucagcaggcuucuuc

SEQ ID NO: 1022105 - RNA, 19 nt, Homo sapiens
  misc_RNA (1)...(19): siRNA sense strand
caacuguggagcugaccaa

SEQ ID NO: 1022106 - RNA, 19 nt, Homo sapiens
  misc_RNA (1)...(19): siRNA sense strand
aaacacugccugggaggaa

SEQ ID NO: 1022107 - RNA, 19 nt, Homo sapiens
  misc_RNA (1)...(19): siRNA sense strand
uaagggcgacuugguguuc

SEQ ID NO: 1022108 - RNA, 19 nt, Homo sapiens
  misc_RNA (1)...(19): siRNA sense strand
ugacagaagacgaguuggu

SEQ ID NO: 1022109 - RNA, 19 nt, Homo sapiens
  misc_RNA (1)...(19): siRNA sense strand
gaacaagcagugugaaaac

SEQ ID NO: 1022110 - RNA, 19 nt, Homo sapiens
  misc_RNA (1)...(19): siRNA sense strand
ggccaggucgcuguaagaa

SEQ ID NO: 1022111 - RNA, 19 nt, Homo sapiens
  misc_RNA (1)...(19): siRNA sense strand
gggccaggucgcuguaaga

SEQ ID NO: 1022112 - RNA, 19 nt, Homo sapiens
  misc_RNA (1)...(19): siRNA sense strand
uccaguggcugugcucaga

SEQ ID NO: 1022113 - RNA, 19 nt, Homo sapiens
  misc_RNA (1)...(19): siRNA sense strand
cagugagacccgccuggua

SEQ ID NO: 1022114 - RNA, 19 nt, Homo sapiens
  misc_RNA (1)...(19): siRNA sense strand
gggaggaagagaauuuguc

SEQ ID NO: 1022115 - RNA, 19 nt, Homo sapiens
  misc_RNA (1)...(19): siRNA sense strand
gagcuggugguuucacaag

SEQ ID NO: 1022116 - RNA, 19 nt, Homo sapiens
  misc_RNA (1)...(19): siRNA sense strand
agagaaccauccgggacaa

SEQ ID NO: 1022117 - RNA, 19 nt, Homo sapiens
  misc_RNA (1)...(19): siRNA sense strand
ugcagcagauguucuuugg

SEQ ID NO: 1022118 - RNA, 19 nt, Homo sapiens
  misc_RNA (1)...(19): siRNA sense strand
gcuccaagugucucgaugu

SEQ ID NO: 1022119 - RNA, 19 nt, Homo sapiens
  misc_RNA (1)...(19): siRNA sense strand
gaacaaagcaguccagaug

SEQ ID NO: 1022120 - RNA, 19 nt, Homo sapiens
  misc_RNA (1)...(19): siRNA sense strand
gaucaagcccucuacauaa

SEQ ID NO: 1022121 - RNA, 19 nt, Homo sapiens
  misc_RNA (1)...(19): siRNA sense strand
gagaauagaugaagcaaac

SEQ ID NO: 1022122 - RNA, 19 nt, Homo sapiens
  misc_RNA (1)...(19): siRNA sense strand
agacaaagguuaaguuaca

SEQ ID NO: 1022123 - RNA, 19 nt, Homo sapiens
  misc_RNA (1)...(19): siRNA sense strand
gaagaaacagccagacuug

SEQ ID NO: 1022124 - RNA, 19 nt, Homo sapiens
  misc_RNA (1)...(19): siRNA sense strand
gcucagaugcuucuucuuu

SEQ ID NO: 1022125 - RNA, 19 nt, Homo sapiens
  misc_RNA (1)...(19): siRNA sense strand
gaaggaguaugcauuugug

SEQ ID NO: 1022126 - RNA, 19 nt, Homo sapiens
  misc_RNA (1)...(19): siRNA sense strand
acagcaagauuauucagua

SEQ ID NO: 1022127 - RNA, 19 nt, Homo sapiens
  misc_RNA (1)...(19): siRNA sense strand
gaaacagccagacuugaaa

SEQ ID NO: 1022128 - RNA, 19 nt, Homo sapiens
  misc_RNA (1)...(19): siRNA sense strand
gaaagugagaucauucaga

SEQ ID NO: 1022129 - RNA, 19 nt, Homo sapiens
  misc_RNA (1)...(19): siRNA sense strand
ugagacagaggacauguua

SEQ ID NO: 1022130 - RNA, 19 nt, Homo sapiens
  misc_RNA (1)...(19): siRNA sense strand
cagcaagauuauucaguaa

SEQ ID NO: 1022131 - RNA, 19 nt, Homo sapiens
  misc_RNA (1)...(19): siRNA sense strand
gagcauaccagccaaaaua

SEQ ID NO: 1022132 - RNA, 19 nt, Homo sapiens
  misc_RNA (1)...(19): siRNA sense strand
ggaagaaacagccagacuu

SEQ ID NO: 1022133 - RNA, 19 nt, Homo sapiens
  misc_RNA (1)...(19): siRNA sense strand
ucaagguaaugaaggagua

SEQ ID NO: 1022134 - RNA, 19 nt, Homo sapiens
  misc_RNA (1)...(19): siRNA sense strand
uagaagagacaaagguuaa

SEQ ID NO: 1022135 - RNA, 19 nt, Homo sapiens
  misc_RNA (1)...(19): siRNA sense strand
caagauuggcucagucaaa

SEQ ID NO: 1022136 - RNA, 19 nt, Homo sapiens
  misc_RNA (1)...(19): siRNA sense strand
gcuggaaagugagaucauu

SEQ ID NO: 1022137 - RNA, 19 nt, Homo sapiens
  misc_RNA (1)...(19): siRNA sense strand
auaaagaaguaccaggaaa

SEQ ID NO: 1022138 - RNA, 19 nt, Homo sapiens
  misc_RNA (1)...(19): siRNA sense strand
agagacaaagguuaaguua

SEQ ID NO: 1022139 - RNA, 19 nt, Homo sapiens
  misc_RNA (1)...(19): siRNA sense strand
cagccagacuugaaaggaa

SEQ ID NO: 1022140 - RNA, 19 nt, Homo sapiens
  misc_RNA (1)...(19): siRNA sense strand
aaagacagcaagauuauuc

SEQ ID NO: 1022141 - RNA, 19 nt, Homo sapiens
  misc_RNA (1)...(19): siRNA sense strand
gagcaugaacccuguggaa

SEQ ID NO: 1022142 - RNA, 19 nt, Homo sapiens
  misc_RNA (1)...(19): siRNA sense strand
gaacuucaacaaaagcuua

SEQ ID NO: 1022143 - RNA, 19 nt, Homo sapiens
  misc_RNA (1)...(19): siRNA sense strand
ccaaaagacagcaagauua

SEQ ID NO: 1022144 - RNA, 19 nt, Homo sapiens
  misc_RNA (1)...(19): siRNA sense strand
caagcccucuacauaaaga

SEQ ID NO: 1022145 - RNA, 19 nt, Homo sapiens
  misc_RNA (1)...(19): siRNA sense strand
ugcaggagcuggaggaaga

SEQ ID NO: 1022146 - RNA, 19 nt, Homo sapiens
  misc_RNA (1)...(19): siRNA sense strand
agaucaagcccucuacaua

SEQ ID NO: 1022147 - RNA, 19 nt, Homo sapiens
  misc_RNA (1)...(19): siRNA sense strand
agaaacagccagacuugaa

SEQ ID NO: 1022148 - RNA, 19 nt, Homo sapiens
  misc_RNA (1)...(19): siRNA sense strand
cacaaaagauaaccaauug

SEQ ID NO: 1022149 - RNA, 19 nt, Homo sapiens
  misc_RNA (1)...(19): siRNA sense strand
gacuugaaaggaagaauaa

SEQ ID NO: 1022150 - RNA, 19 nt, Homo sapiens
  misc_RNA (1)...(19): siRNA sense strand
gacaaagguuaaguuacaa

SEQ ID NO: 1022151 - RNA, 19 nt, Homo sapiens
  misc_RNA (1)...(19): siRNA sense strand
gaaagggauacgcagagaa

SEQ ID NO: 1022152 - RNA, 19 nt, Homo sapiens
  misc_RNA (1)...(19): siRNA sense strand
ugaaagggauacgcagaga

SEQ ID NO: 1022153 - RNA, 19 nt, Homo sapiens
  misc_RNA (1)...(19): siRNA sense strand
ugacccagcucugugaaga

SEQ ID NO: 1022154 - RNA, 19 nt, Homo sapiens
  misc_RNA (1)...(19): siRNA sense strand
agacguugguccacaguau

SEQ ID NO: 1022155 - RNA, 19 nt, Homo sapiens
  misc_RNA (1)...(19): siRNA sense strand
aaaggaagaauaagacguu

SEQ ID NO: 1022156 - RNA, 19 nt, Homo sapiens
  misc_RNA (1)...(19): siRNA sense strand
caagagagggaagauaaga

SEQ ID NO: 1022157 - RNA, 19 nt, Homo sapiens
  misc_RNA (1)...(19): siRNA sense strand
agacuugaaaggaagaaua

SEQ ID NO: 1022158 - RNA, 19 nt, Homo sapiens
  misc_RNA (1)...(19): siRNA sense strand
gaggcucuguuccuugaga

SEQ ID NO: 1022159 - RNA, 19 nt, Homo sapiens
  misc_RNA (1)...(19): siRNA sense strand
cuagaagagacaaagguua

SEQ ID NO: 1022160 - RNA, 19 nt, Homo sapiens
  misc_RNA (1)...(19): siRNA sense strand
aacaaaagcuuacaaggaa

SEQ ID NO: 1022161 - RNA, 19 nt, Homo sapiens
  misc_RNA (1)...(19): siRNA sense strand
caacaaaagcuuacaagga

SEQ ID NO: 1022162 - RNA, 19 nt, Homo sapiens
  misc_RNA (1)...(19): siRNA sense strand
gcagagaauagaugaagca

SEQ ID NO: 1022163 - RNA, 19 nt, Homo sapiens
  misc_RNA (1)...(19): siRNA sense strand
gcaggagcaccuuguggaa

SEQ ID NO: 1022164 - RNA, 19 nt, Homo sapiens
  misc_RNA (1)...(19): siRNA sense strand
caggaaacguugaagaaaa

SEQ ID NO: 1022165 - RNA, 19 nt, Homo sapiens
  misc_RNA (1)...(19): siRNA sense strand
agaaguaccaggaaacguu

SEQ ID NO: 1022166 - RNA, 19 nt, Homo sapiens
  misc_RNA (1)...(19): siRNA sense strand
gaagagacaaagguuaagu

SEQ ID NO: 1022167 - RNA, 19 nt, Homo sapiens
  misc_RNA (1)...(19): siRNA sense strand
acaaggaaaucacaaaaga

SEQ ID NO: 1022168 - RNA, 19 nt, Homo sapiens
  misc_RNA (1)...(19): siRNA sense strand
ggaagaauaagacguuggu

SEQ ID NO: 1022169 - RNA, 19 nt, Homo sapiens
  misc_RNA (1)...(19): siRNA sense strand
uucagaggcuggaaaguga

SEQ ID NO: 1022170 - RNA, 19 nt, Homo sapiens
  misc_RNA (1)...(19): siRNA sense strand
ucaauguacugcccaaggu

SEQ ID NO: 1022171 - RNA, 19 nt, Homo sapiens
  misc_RNA (1)...(19): siRNA sense strand
cagaucuccucgucaaugu

SEQ ID NO: 1022172 - RNA, 19 nt, Homo sapiens
  misc_RNA (1)...(19): siRNA sense strand
guuugaacauggaccuuga

SEQ ID NO: 1022173 - RNA, 19 nt, Homo sapiens
  misc_RNA (1)...(19): siRNA sense strand
ccaggaaacguugaagaaa

SEQ ID NO: 1022174 - RNA, 19 nt, Homo sapiens
  misc_RNA (1)...(19): siRNA sense strand
uccaagagagggaagauaa

SEQ ID NO: 1022175 - RNA, 19 nt, Homo sapiens
  misc_RNA (1)...(19): siRNA sense strand
gguccacaguauaacagaa

SEQ ID NO: 1022176 - RNA, 19 nt, Homo sapiens
  misc_RNA (1)...(19): siRNA sense strand
gaagaucaagcccucuaca

SEQ ID NO: 1022177 - RNA, 19 nt, Homo sapiens
  misc_RNA (1)...(19): siRNA sense strand
agagagggaagauaagauu

SEQ ID NO: 1022178 - RNA, 19 nt, Homo sapiens
  misc_RNA (1)...(19): siRNA sense strand
caaaagacagcaagauuau

SEQ ID NO: 1022179 - RNA, 19 nt, Homo sapiens
  misc_RNA (1)...(19): siRNA sense strand
aucaagcccucuacauaaa

SEQ ID NO: 1022180 - RNA, 19 nt, Homo sapiens
  misc_RNA (1)...(19): siRNA sense strand
gacguugguccacaguaua

SEQ ID NO: 1022181 - RNA, 19 nt, Homo sapiens
  misc_RNA (1)...(19): siRNA sense strand
cauaaagaaguaccaggaa

SEQ ID NO: 1022182 - RNA, 19 nt, Homo sapiens
  misc_RNA (1)...(19): siRNA sense strand
aaagggauacgcagagaau

SEQ ID NO: 1022183 - RNA, 19 nt, Homo sapiens
  misc_RNA (1)...(19): siRNA sense strand
uuccaucucucacacuuga

SEQ ID NO: 1022184 - RNA, 19 nt, Homo sapiens
  misc_RNA (1)...(19): siRNA sense strand
ugaaggaguaugcauuugu

SEQ ID NO: 1022185 - RNA, 19 nt, Homo sapiens
  misc_RNA (1)...(19): siRNA sense strand
gaaccgcaccacgauggaa

SEQ ID NO: 1022186 - RNA, 19 nt, Homo sapiens
  misc_RNA (1)...(19): siRNA sense strand
gcaugaacccuguggaaaa

SEQ ID NO: 1022187 - RNA, 19 nt, Homo sapiens
  misc_RNA (1)...(19): siRNA sense strand
gaauagaugaagcaaacca

SEQ ID NO: 1022188 - RNA, 19 nt, Homo sapiens
  misc_RNA (1)...(19): siRNA sense strand
cauuaucaguuugaacaug

SEQ ID NO: 1022189 - RNA, 19 nt, Homo sapiens
  misc_RNA (1)...(19): siRNA sense strand
caauguacugcccaaggua

SEQ ID NO: 1022190 - RNA, 19 nt, Homo sapiens
  misc_RNA (1)...(19): siRNA sense strand
ccagaucuccucgucaaug

SEQ ID NO: 1022191 - RNA, 19 nt, Homo sapiens
  misc_RNA (1)...(19): siRNA sense strand
ccagcucugugaagaucaa

SEQ ID NO: 1022192 - RNA, 19 nt, Homo sapiens
  misc_RNA (1)...(19): siRNA sense strand
gggauacgcagagaauaga

SEQ ID NO: 1022193 - RNA, 19 nt, Homo sapiens
  misc_RNA (1)...(19): siRNA sense strand
caguauaacagaacuucaa

SEQ ID NO: 1022194 - RNA, 19 nt, Homo sapiens
  misc_RNA (1)...(19): siRNA sense strand
ggagcuggaggaagaaaca

SEQ ID NO: 1022195 - RNA, 19 nt, Homo sapiens
  misc_RNA (1)...(19): siRNA sense strand
gugaagaucaagcccucua

SEQ ID NO: 1022196 - RNA, 19 nt, Homo sapiens
  misc_RNA (1)...(19): siRNA sense strand
agaugaagcaaaccagaaa

SEQ ID NO: 1022197 - RNA, 19 nt, Homo sapiens
  misc_RNA (1)...(19): siRNA sense strand
gauggagcccuagaagaga

SEQ ID NO: 1022198 - RNA, 19 nt, Homo sapiens
  misc_RNA (1)...(19): siRNA sense strand
uaaagaaguaccaggaaac

SEQ ID NO: 1022199 - RNA, 19 nt, Homo sapiens
  misc_RNA (1)...(19): siRNA sense strand
gagggaagauaagauucag

SEQ ID NO: 1022200 - RNA, 19 nt, Homo sapiens
  misc_RNA (1)...(19): siRNA sense strand
uaucaaaacucgugagcau

SEQ ID NO: 1022201 - RNA, 19 nt, Homo sapiens
  misc_RNA (1)...(19): siRNA sense strand
gagagggaagauaagauuc

SEQ ID NO: 1022202 - RNA, 19 nt, Homo sapiens
  misc_RNA (1)...(19): siRNA sense strand
uagaugaagcaaaccagaa

SEQ ID NO: 1022203 - RNA, 19 nt, Homo sapiens
  misc_RNA (1)...(19): siRNA sense strand
caaaagauaaccaauugug

SEQ ID NO: 1022204 - RNA, 19 nt, Homo sapiens
  misc_RNA (1)...(19): siRNA sense strand
cugcugagcuacauguuuu

SEQ ID NO: 1022205 - RNA, 19 nt, Homo sapiens
  misc_RNA (1)...(19): siRNA sense strand
ugagagagaaguaucaaaa

SEQ ID NO: 1022206 - RNA, 19 nt, Homo sapiens
  misc_RNA (1)...(19): siRNA sense strand
gauacgcagagaauagaug

SEQ ID NO: 1022207 - RNA, 19 nt, Homo sapiens
  misc_RNA (1)...(19): siRNA sense strand
gaaacuucuucucaaaauc

SEQ ID NO: 1022208 - RNA, 19 nt, Homo sapiens
  misc_RNA (1)...(19): siRNA sense strand
cagauggagcccuagaaga

SEQ ID NO: 1022209 - RNA, 19 nt, Homo sapiens
  misc_RNA (1)...(19): siRNA sense strand
gaucuccucgucaauguac

SEQ ID NO: 1022210 - RNA, 19 nt, Homo sapiens
  misc_RNA (1)...(19): siRNA sense strand
caaagguuaaguuacaaca

SEQ ID NO: 1022211 - RNA, 19 nt, Homo sapiens
  misc_RNA (1)...(19): siRNA sense strand
cuugaaaggaagaauaaga

SEQ ID NO: 1022212 - RNA, 19 nt, Homo sapiens
  misc_RNA (1)...(19): siRNA sense strand
aauaaugaggguacuccua

SEQ ID NO: 1022213 - RNA, 19 nt, Homo sapiens
  misc_RNA (1)...(19): siRNA sense strand
uaaguuacaacagcuggaa

SEQ ID NO: 1022214 - RNA, 19 nt, Homo sapiens
  misc_RNA (1)...(19): siRNA sense strand
agauggagcccuagaagag

SEQ ID NO: 1022215 - RNA, 19 nt, Homo sapiens
  misc_RNA (1)...(19): siRNA sense strand
aauagaagaagaacuagag

SEQ ID NO: 1022216 - RNA, 19 nt, Homo sapiens
  misc_RNA (1)...(19): siRNA sense strand
cccucuacauaaagaagua

SEQ ID NO: 1022217 - RNA, 19 nt, Homo sapiens
  misc_RNA (1)...(19): siRNA sense strand
gagacaaagguuaaguuac

SEQ ID NO: 1022218 - RNA, 19 nt, Homo sapiens
  misc_RNA (1)...(19): siRNA sense strand
ccuagaagagacaaagguu

SEQ ID NO: 1022219 - RNA, 19 nt, Homo sapiens
  misc_RNA (1)...(19): siRNA sense strand
gauauaagccaacaauaca

SEQ ID NO: 1022220 - RNA, 19 nt, Homo sapiens
  misc_RNA (1)...(19): siRNA sense strand
gaucagggcguguuagaga

SEQ ID NO: 1022221 - RNA, 19 nt, Homo sapiens
  misc_RNA (1)...(19): siRNA sense strand
cagcaauacucaaacauuc

SEQ ID NO: 1022222 - RNA, 19 nt, Homo sapiens
  misc_RNA (1)...(19): siRNA sense strand
aagaaugucuaaugaguug

SEQ ID NO: 1022223 - RNA, 19 nt, Homo sapiens
  misc_RNA (1)...(19): siRNA sense strand
ggauauaagccaacaauac

SEQ ID NO: 1022224 - RNA, 19 nt, Homo sapiens
  misc_RNA (1)...(19): siRNA sense strand
aaggacaucuacaccauuu

SEQ ID NO: 1022225 - RNA, 19 nt, Homo sapiens
  misc_RNA (1)...(19): siRNA sense strand
caauacagcaauacucaaa

SEQ ID NO: 1022226 - RNA, 19 nt, Homo sapiens
  misc_RNA (1)...(19): siRNA sense strand
ccaaggacaucuacaccau

SEQ ID NO: 1022227 - RNA, 19 nt, Homo sapiens
  misc_RNA (1)...(19): siRNA sense strand
ggacaucuacaccauuugg

SEQ ID NO: 1022228 - RNA, 19 nt, Homo sapiens
  misc_RNA (1)...(19): siRNA sense strand
ccuagaaccaguaucugua

SEQ ID NO: 1022229 - RNA, 19 nt, Homo sapiens
  misc_RNA (1)...(19): siRNA sense strand
auacagcaauacucaaaca

SEQ ID NO: 1022230 - RNA, 19 nt, Homo sapiens
  misc_RNA (1)...(19): siRNA sense strand
agccaacaauacagcaaua

SEQ ID NO: 1022231 - RNA, 19 nt, Homo sapiens
  misc_RNA (1)...(19): siRNA sense strand
caacaauacagcaauacuc

SEQ ID NO: 1022232 - RNA, 19 nt, Homo sapiens
  misc_RNA (1)...(19): siRNA sense strand
gaaugucuaaugaguugga

SEQ ID NO: 1022233 - RNA, 19 nt, Homo sapiens
  misc_RNA (1)...(19): siRNA sense strand
caaggacaucuacaccauu

SEQ ID NO: 1022234 - RNA, 19 nt, Homo sapiens
  misc_RNA (1)...(19): siRNA sense strand
acagcaauacucaaacauu

SEQ ID NO: 1022235 - RNA, 19 nt, Homo sapiens
  misc_RNA (1)...(19): siRNA sense strand
accaguaucuguaguggau

SEQ ID NO: 1022236 - RNA, 19 nt, Homo sapiens
  misc_RNA (1)...(19): siRNA sense strand
guggauauaagccaacaau

SEQ ID NO: 1022237 - RNA, 19 nt, Homo sapiens
  misc_RNA (1)...(19): siRNA sense strand
ucaaacauucacaggcaaa

SEQ ID NO: 1022238 - RNA, 19 nt, Homo sapiens
  misc_RNA (1)...(19): siRNA sense strand
uccuugggcuggccuagaa

SEQ ID NO: 1022239 - RNA, 19 nt, Homo sapiens
  misc_RNA (1)...(19): siRNA sense strand
gccuagaaccaguaucugu

SEQ ID NO: 1022240 - RNA, 19 nt, Homo sapiens
  misc_RNA (1)...(19): siRNA sense strand
aacaauacagcaauacuca

SEQ ID NO: 1022241 - RNA, 19 nt, Homo sapiens
  misc_RNA (1)...(19): siRNA sense strand
ucagggcguguuagagaaa

SEQ ID NO: 1022242 - RNA, 19 nt, Homo sapiens
  misc_RNA (1)...(19): siRNA sense strand
uagaagagcuuaagaguaa

SEQ ID NO: 1022243 - RNA, 19 nt, Homo sapiens
  misc_RNA (1)...(19): siRNA sense strand
gaaaucaggcuuauguuua

SEQ ID NO: 1022244 - RNA, 19 nt, Homo sapiens
  misc_RNA (1)...(19): siRNA sense strand
gauaacagaucaccucaaa

SEQ ID NO: 1022245 - RNA, 19 nt, Homo sapiens
  misc_RNA (1)...(19): siRNA sense strand
gaaaugaaccggacaagaa

SEQ ID NO: 1022246 - RNA, 19 nt, Homo sapiens
  misc_RNA (1)...(19): siRNA sense strand
gaacaaagaccuauaucaa

SEQ ID NO: 1022247 - RNA, 19 nt, Homo sapiens
  misc_RNA (1)...(19): siRNA sense strand
gaaguaauguuagauguga

SEQ ID NO: 1022248 - RNA, 19 nt, Homo sapiens
  misc_RNA (1)...(19): siRNA sense strand
ggaacgaagugauaaguau

SEQ ID NO: 1022249 - RNA, 19 nt, Homo sapiens
  misc_RNA (1)...(19): siRNA sense strand
cuacaaagaugaagaacuu

SEQ ID NO: 1022250 - RNA, 19 nt, Homo sapiens
  misc_RNA (1)...(19): siRNA sense strand
cgaaauagauuguuuacag

SEQ ID NO: 1022251 - RNA, 19 nt, Homo sapiens
  misc_RNA (1)...(19): siRNA sense strand
acaaagaccuauaucaaga

SEQ ID NO: 1022252 - RNA, 19 nt, Homo sapiens
  misc_RNA (1)...(19): siRNA sense strand
ugaggaaccugauaaguug

SEQ ID NO: 1022253 - RNA, 19 nt, Homo sapiens
  misc_RNA (1)...(19): siRNA sense strand
gaacagcuaaugaaaucua

SEQ ID NO: 1022254 - RNA, 19 nt, Homo sapiens
  misc_RNA (1)...(19): siRNA sense strand
gaaaauugguguuugauga

SEQ ID NO: 1022255 - RNA, 19 nt, Homo sapiens
  misc_RNA (1)...(19): siRNA sense strand
gaacgaagugauaaguaua

SEQ ID NO: 1022256 - RNA, 19 nt, Homo sapiens
  misc_RNA (1)...(19): siRNA sense strand
ggacgaaauagauuguuua

SEQ ID NO: 1022257 - RNA, 19 nt, Homo sapiens
  misc_RNA (1)...(19): siRNA sense strand
aaacugagcuaaaccuuuc

SEQ ID NO: 1022258 - RNA, 19 nt, Homo sapiens
  misc_RNA (1)...(19): siRNA sense strand
cagaacagcuaaugaaauc

SEQ ID NO: 1022259 - RNA, 19 nt, Homo sapiens
  misc_RNA (1)...(19): siRNA sense strand
ggaacacgauagcaaauuc

SEQ ID NO: 1022260 - RNA, 19 nt, Homo sapiens
  misc_RNA (1)...(19): siRNA sense strand
caaagaauaugaggacgaa

SEQ ID NO: 1022261 - RNA, 19 nt, Homo sapiens
  misc_RNA (1)...(19): siRNA sense strand
aaacuauucuggauccuuu

SEQ ID NO: 1022262 - RNA, 19 nt, Homo sapiens
  misc_RNA (1)...(19): siRNA sense strand
gaaagaagcuaugaauucc

SEQ ID NO: 1022263 - RNA, 19 nt, Homo sapiens
  misc_RNA (1)...(19): siRNA sense strand
aagcagaccuuaacuguuc

SEQ ID NO: 1022264 - RNA, 19 nt, Homo sapiens
  misc_RNA (1)...(19): siRNA sense strand
gcaggaaaguaccagcaaa

SEQ ID NO: 1022265 - RNA, 19 nt, Homo sapiens
  misc_RNA (1)...(19): siRNA sense strand
ucacagauaauccaaguaa

SEQ ID NO: 1022266 - RNA, 19 nt, Homo sapiens
  misc_RNA (1)...(19): siRNA sense strand
ugaaagaugauguggauaa

SEQ ID NO: 1022267 - RNA, 19 nt, Homo sapiens
  misc_RNA (1)...(19): siRNA sense strand
gauagcaaauucuguugga

SEQ ID NO: 1022268 - RNA, 19 nt, Homo sapiens
  misc_RNA (1)...(19): siRNA sense strand
caaagguucucuaacuaau

SEQ ID NO: 1022269 - RNA, 19 nt, Homo sapiens
  misc_RNA (1)...(19): siRNA sense strand
gaaagaaguagaagagcuu

SEQ ID NO: 1022270 - RNA, 19 nt, Homo sapiens
  misc_RNA (1)...(19): siRNA sense strand
agacaaacaucuagucaca

SEQ ID NO: 1022271 - RNA, 19 nt, Homo sapiens
  misc_RNA (1)...(19): siRNA sense strand
acagguagaaguaauguua

SEQ ID NO: 1022272 - RNA, 19 nt, Homo sapiens
  misc_RNA (1)...(19): siRNA sense strand
acaaacaucuagucacaga

SEQ ID NO: 1022273 - RNA, 19 nt, Homo sapiens
  misc_RNA (1)...(19): siRNA sense strand
guagaagagcuuaagagua

SEQ ID NO: 1022274 - RNA, 19 nt, Homo sapiens
  misc_RNA (1)...(19): siRNA sense strand
ggacaagaacauccaguga

SEQ ID NO: 1022275 - RNA, 19 nt, Homo sapiens
  misc_RNA (1)...(19): siRNA sense strand
gaagagaaagaagcuauga

SEQ ID NO: 1022276 - RNA, 19 nt, Homo sapiens
  misc_RNA (1)...(19): siRNA sense strand
guauauagaggaacuagaa

SEQ ID NO: 1022277 - RNA, 19 nt, Homo sapiens
  misc_RNA (1)...(19): siRNA sense strand
gaaagaugauguggauaag

SEQ ID NO: 1022278 - RNA, 19 nt, Homo sapiens
  misc_RNA (1)...(19): siRNA sense strand
uaaaccaagugacugugua

SEQ ID NO: 1022279 - RNA, 19 nt, Homo sapiens
  misc_RNA (1)...(19): siRNA sense strand
agaaagaagcuaugaauuc

SEQ ID NO: 1022280 - RNA, 19 nt, Homo sapiens
  misc_RNA (1)...(19): siRNA sense strand
gagaaagaagcuaugaauu

SEQ ID NO: 1022281 - RNA, 19 nt, Homo sapiens
  misc_RNA (1)...(19): siRNA sense strand
ugaguuggauucaaugaug

SEQ ID NO: 1022282 - RNA, 19 nt, Homo sapiens
  misc_RNA (1)...(19): siRNA sense strand
ccaaagguucucuaacuaa

SEQ ID NO: 1022283 - RNA, 19 nt, Homo sapiens
  misc_RNA (1)...(19): siRNA sense strand
ggauuuggauggguuauca

SEQ ID NO: 1022284 - RNA, 19 nt, Homo sapiens
  misc_RNA (1)...(19): siRNA sense strand
gaagacaaacaucuaguca

SEQ ID NO: 1022285 - RNA, 19 nt, Homo sapiens
  misc_RNA (1)...(19): siRNA sense strand
gaauaaaccaagugacugu

SEQ ID NO: 1022286 - RNA, 19 nt, Homo sapiens
  misc_RNA (1)...(19): siRNA sense strand
ucaagaacagguagaagua

SEQ ID NO: 1022287 - RNA, 19 nt, Homo sapiens
  misc_RNA (1)...(19): siRNA sense strand
gaagcuaugaauuccauuu

SEQ ID NO: 1022288 - RNA, 19 nt, Homo sapiens
  misc_RNA (1)...(19): siRNA sense strand
uagaggaacuagaaucuca

SEQ ID NO: 1022289 - RNA, 19 nt, Homo sapiens
  misc_RNA (1)...(19): siRNA sense strand
gcuaaaggaggcaaauaaa

SEQ ID NO: 1022290 - RNA, 19 nt, Homo sapiens
  misc_RNA (1)...(19): siRNA sense strand
caaagcagaccuuaacugu

SEQ ID NO: 1022291 - RNA, 19 nt, Homo sapiens
  misc_RNA (1)...(19): siRNA sense strand
gauggaugcugcuuaccuu

SEQ ID NO: 1022292 - RNA, 19 nt, Homo sapiens
  misc_RNA (1)...(19): siRNA sense strand
gcacucaaaccaucucaga

SEQ ID NO: 1022293 - RNA, 19 nt, Homo sapiens
  misc_RNA (1)...(19): siRNA sense strand
aaauggaagugaauggaaa

SEQ ID NO: 1022294 - RNA, 19 nt, Homo sapiens
  misc_RNA (1)...(19): siRNA sense strand
caagaaagcccuggaacga

SEQ ID NO: 1022295 - RNA, 19 nt, Homo sapiens
  misc_RNA (1)...(19): siRNA sense strand
gaugauauaaguagaagug

SEQ ID NO: 1022296 - RNA, 19 nt, Homo sapiens
  misc_RNA (1)...(19): siRNA sense strand
ugagaaaucaggcuuaugu

SEQ ID NO: 1022297 - RNA, 19 nt, Homo sapiens
  misc_RNA (1)...(19): siRNA sense strand
caaccaaaaugaagacaaa

SEQ ID NO: 1022298 - RNA, 19 nt, Homo sapiens
  misc_RNA (1)...(19): siRNA sense strand
gcucuucaguccaaaguag

SEQ ID NO: 1022299 - RNA, 19 nt, Homo sapiens
  misc_RNA (1)...(19): siRNA sense strand
gaucaaaacuauucuggau

SEQ ID NO: 1022300 - RNA, 19 nt, Homo sapiens
  misc_RNA (1)...(19): siRNA sense strand
aagguucucuaacuaauga

SEQ ID NO: 1022301 - RNA, 19 nt, Homo sapiens
  misc_RNA (1)...(19): siRNA sense strand
uuaagucacuggauuugga

SEQ ID NO: 1022302 - RNA, 19 nt, Homo sapiens
  misc_RNA (1)...(19): siRNA sense strand
gacaagaacauccagugaa

SEQ ID NO: 1022303 - RNA, 19 nt, Homo sapiens
  misc_RNA (1)...(19): siRNA sense strand
gaugugacagauacaagua

SEQ ID NO: 1022304 - RNA, 19 nt, Homo sapiens
  misc_RNA (1)...(19): siRNA sense strand
gauguggugucaaagaauc

SEQ ID NO: 1022305 - RNA, 19 nt, Homo sapiens
  misc_RNA (1)...(19): siRNA sense strand
gaaguagaagagcuuaaga

SEQ ID NO: 1022306 - RNA, 19 nt, Homo sapiens
  misc_RNA (1)...(19): siRNA sense strand
gaauggaaacccacuucuu

SEQ ID NO: 1022307 - RNA, 19 nt, Homo sapiens
  misc_RNA (1)...(19): siRNA sense strand
ccugauaaguuggaagaaa

SEQ ID NO: 1022308 - RNA, 19 nt, Homo sapiens
  misc_RNA (1)...(19): siRNA sense strand
ucaaggcagugaauuucuu

SEQ ID NO: 1022309 - RNA, 19 nt, Homo sapiens
  misc_RNA (1)...(19): siRNA sense strand
cagaucaccucaaaaguuu

SEQ ID NO: 1022310 - RNA, 19 nt, Homo sapiens
  misc_RNA (1)...(19): siRNA sense strand
aauggaaacccacuucuuu

SEQ ID NO: 1022311 - RNA, 19 nt, Homo sapiens
  misc_RNA (1)...(19): siRNA sense strand
acaagaacauccagugaag

SEQ ID NO: 1022312 - RNA, 19 nt, Homo sapiens
  misc_RNA (1)...(19): siRNA sense strand
ccaaaagguugaauucuau

SEQ ID NO: 1022313 - RNA, 19 nt, Homo sapiens
  misc_RNA (1)...(19): siRNA sense strand
agaaaucaggcuuauguuu

SEQ ID NO: 1022314 - RNA, 19 nt, Homo sapiens
  misc_RNA (1)...(19): siRNA sense strand
aaaccaaucgccucaagaa

SEQ ID NO: 1022315 - RNA, 19 nt, Homo sapiens
  misc_RNA (1)...(19): siRNA sense strand
uccaaagguucucuaacua

SEQ ID NO: 1022316 - RNA, 19 nt, Homo sapiens
  misc_RNA (1)...(19): siRNA sense strand
aggcuuauguuuauccaaa

SEQ ID NO: 1022317 - RNA, 19 nt, Homo sapiens
  misc_RNA (1)...(19): siRNA sense strand
agaauaugaggacgaaaua

SEQ ID NO: 1022318 - RNA, 19 nt, Homo sapiens
  misc_RNA (1)...(19): siRNA sense strand
gaacagguagaaguaaugu

SEQ ID NO: 1022319 - RNA, 19 nt, Homo sapiens
  misc_RNA (1)...(19): siRNA sense strand
gcaaagcagaccuuaacug

SEQ ID NO: 1022320 - RNA, 19 nt, Homo sapiens
  misc_RNA (1)...(19): siRNA sense strand
agacuugaauuacuacaca

SEQ ID NO: 1022321 - RNA, 19 nt, Homo sapiens
  misc_RNA (1)...(19): siRNA sense strand
gaucuuccagcuccuugua

SEQ ID NO: 1022322 - RNA, 19 nt, Homo sapiens
  misc_RNA (1)...(19): siRNA sense strand
gaugaagaacuuuaugauc

SEQ ID NO: 1022323 - RNA, 19 nt, Homo sapiens
  misc_RNA (1)...(19): siRNA sense strand
caaagaccuauaucaagaa

SEQ ID NO: 1022324 - RNA, 19 nt, Homo sapiens
  misc_RNA (1)...(19): siRNA sense strand
ucucugaguuggauucaau

SEQ ID NO: 1022325 - RNA, 19 nt, Homo sapiens
  misc_RNA (1)...(19): siRNA sense strand
caagaacagguagaaguaa

SEQ ID NO: 1022326 - RNA, 19 nt, Homo sapiens
  misc_RNA (1)...(19): siRNA sense strand
gaaaccaaucgccucaaga

SEQ ID NO: 1022327 - RNA, 19 nt, Homo sapiens
  misc_RNA (1)...(19): siRNA sense strand
cagaagaugauauaaguag

SEQ ID NO: 1022328 - RNA, 19 nt, Homo sapiens
  misc_RNA (1)...(19): siRNA sense strand
caaaccaucucagaaaauu

SEQ ID NO: 1022329 - RNA, 19 nt, Homo sapiens
  misc_RNA (1)...(19): siRNA sense strand
aggaggauguggugucaaa

SEQ ID NO: 1022330 - RNA, 19 nt, Homo sapiens
  misc_RNA (1)...(19): siRNA sense strand
cagcuaaugaaaucuauga

SEQ ID NO: 1022331 - RNA, 19 nt, Homo sapiens
  misc_RNA (1)...(19): siRNA sense strand
ggauacuuauuuggaaaga

SEQ ID NO: 1022332 - RNA, 19 nt, Homo sapiens
  misc_RNA (1)...(19): siRNA sense strand
guagaaguaauguuagaug

SEQ ID NO: 1022333 - RNA, 19 nt, Homo sapiens
  misc_RNA (1)...(19): siRNA sense strand
ggaaaguaccagcaaagca

SEQ ID NO: 1022334 - RNA, 19 nt, Homo sapiens
  misc_RNA (1)...(19): siRNA sense strand
gaggauguggugucaaaga

SEQ ID NO: 1022335 - RNA, 19 nt, Homo sapiens
  misc_RNA (1)...(19): siRNA sense strand
agugaaagaugauguggau

SEQ ID NO: 1022336 - RNA, 19 nt, Homo sapiens
  misc_RNA (1)...(19): siRNA sense strand
ggcugaaguugauaacaga

SEQ ID NO: 1022337 - RNA, 19 nt, Homo sapiens
  misc_RNA (1)...(19): siRNA sense strand
acucaaaccaucucagaaa

SEQ ID NO: 1022338 - RNA, 19 nt, Homo sapiens
  misc_RNA (1)...(19): siRNA sense strand
agagaaagaagcuaugaau

SEQ ID NO: 1022339 - RNA, 19 nt, Homo sapiens
  misc_RNA (1)...(19): siRNA sense strand
gaacaguaugagcgugaaa

SEQ ID NO: 1022340 - RNA, 19 nt, Homo sapiens
  misc_RNA (1)...(19): siRNA sense strand
aagaacagguagaaguaau

SEQ ID NO: 1022341 - RNA, 19 nt, Homo sapiens
  misc_RNA (1)...(19): siRNA sense strand
uggauucaaugaugucaga

SEQ ID NO: 1022342 - RNA, 19 nt, Homo sapiens
  misc_RNA (1)...(19): siRNA sense strand
caaagaagaacucgaagua

SEQ ID NO: 1022343 - RNA, 19 nt, Homo sapiens
  misc_RNA (1)...(19): siRNA sense strand
cagcaaagcauucucauuu

SEQ ID NO: 1022344 - RNA, 19 nt, Homo sapiens
  misc_RNA (1)...(19): siRNA sense strand
caagaggauuugcuuaugu

SEQ ID NO: 1022345 - RNA, 19 nt, Homo sapiens
  misc_RNA (1)...(19): siRNA sense strand
aagaagaacucgaaguaga

SEQ ID NO: 1022346 - RNA, 19 nt, Homo sapiens
  misc_RNA (1)...(19): siRNA sense strand
gaaauacaguuugcacaag

SEQ ID NO: 1022347 - RNA, 19 nt, Homo sapiens
  misc_RNA (1)...(19): siRNA sense strand
ggacuugcgccgugaguuu

SEQ ID NO: 1022348 - RNA, 19 nt, Homo sapiens
  misc_RNA (1)...(19): siRNA sense strand
guacaaacagcaaagcauu

SEQ ID NO: 1022349 - RNA, 19 nt, Homo sapiens
  misc_RNA (1)...(19): siRNA sense strand
gcaaggcagucaagaacuc

SEQ ID NO: 1022350 - RNA, 19 nt, Homo sapiens
  misc_RNA (1)...(19): siRNA sense strand
ucucgaaguuaucgucaua

SEQ ID NO: 1022351 - RNA, 19 nt, Homo sapiens
  misc_RNA (1)...(19): siRNA sense strand
ccaagaggauuugcuuaug

SEQ ID NO: 1022352 - RNA, 19 nt, Homo sapiens
  misc_RNA (1)...(19): siRNA sense strand
gaagacauucugacucaau

SEQ ID NO: 1022353 - RNA, 19 nt, Homo sapiens
  misc_RNA (1)...(19): siRNA sense strand
cagacuagcucaggaacaa

SEQ ID NO: 1022354 - RNA, 19 nt, Homo sapiens
  misc_RNA (1)...(19): siRNA sense strand
aaaucaagaucacauggaa

SEQ ID NO: 1022355 - RNA, 19 nt, Homo sapiens
  misc_RNA (1)...(19): siRNA sense strand
ggucagacagccuuaaaga

SEQ ID NO: 1022356 - RNA, 19 nt, Homo sapiens
  misc_RNA (1)...(19): siRNA sense strand
uggaagacauucugacuca

SEQ ID NO: 1022357 - RNA, 19 nt, Homo sapiens
  misc_RNA (1)...(19): siRNA sense strand
caaaagagguccaagucaa

SEQ ID NO: 1022358 - RNA, 19 nt, Homo sapiens
  misc_RNA (1)...(19): siRNA sense strand
gauauggcccuauaguaga

SEQ ID NO: 1022359 - RNA, 19 nt, Homo sapiens
  misc_RNA (1)...(19): siRNA sense strand
gucuaaaucucguuccaaa

SEQ ID NO: 1022360 - RNA, 19 nt, Homo sapiens
  misc_RNA (1)...(19): siRNA sense strand
uaaaucucguuccaaauca

SEQ ID NO: 1022361 - RNA, 19 nt, Homo sapiens
  misc_RNA (1)...(19): siRNA sense strand
aagacauucugacucaaua

SEQ ID NO: 1022362 - RNA, 19 nt, Homo sapiens
  misc_RNA (1)...(19): siRNA sense strand
guauguggccgucagauug

SEQ ID NO: 1022363 - RNA, 19 nt, Homo sapiens
  misc_RNA (1)...(19): siRNA sense strand
caaaggguauaccaauucu

SEQ ID NO: 1022364 - RNA, 19 nt, Homo sapiens
  misc_RNA (1)...(19): siRNA sense strand
gaaaaucacagucaaguuc

SEQ ID NO: 1022365 - RNA, 19 nt, Homo sapiens
  misc_RNA (1)...(19): siRNA sense strand
gaaauaggaggcggucaga

SEQ ID NO: 1022366 - RNA, 19 nt, Homo sapiens
  misc_RNA (1)...(19): siRNA sense strand
gcaaagcauucucauuuuc

SEQ ID NO: 1022367 - RNA, 19 nt, Homo sapiens
  misc_RNA (1)...(19): siRNA sense strand
ccaaaggguauaccaauuc

SEQ ID NO: 1022368 - RNA, 19 nt, Homo sapiens
  misc_RNA (1)...(19): siRNA sense strand
cgauauggcccuauaguag

SEQ ID NO: 1022369 - RNA, 19 nt, Homo sapiens
  misc_RNA (1)...(19): siRNA sense strand
gaaacuaaaguacaaacag

SEQ ID NO: 1022370 - RNA, 19 nt, Homo sapiens
  misc_RNA (1)...(19): siRNA sense strand
cccaaaggguauaccaauu

SEQ ID NO: 1022371 - RNA, 19 nt, Homo sapiens
  misc_RNA (1)...(19): siRNA sense strand
ugaaauacaguuugcacaa

SEQ ID NO: 1022372 - RNA, 19 nt, Homo sapiens
  misc_RNA (1)...(19): siRNA sense strand
gaacuccaagaaggaauuu

SEQ ID NO: 1022373 - RNA, 19 nt, Homo sapiens
  misc_RNA (1)...(19): siRNA sense strand
ucagacagccuuaaagagu

SEQ ID NO: 1022374 - RNA, 19 nt, Homo sapiens
  misc_RNA (1)...(19): siRNA sense strand
aagaggauuugcuuauguu

SEQ ID NO: 1022375 - RNA, 19 nt, Homo sapiens
  misc_RNA (1)...(19): siRNA sense strand
aaagagguccaagucaaua

SEQ ID NO: 1022376 - RNA, 19 nt, Homo sapiens
  misc_RNA (1)...(19): siRNA sense strand
cuaaaucucguuccaaauc

SEQ ID NO: 1022377 - RNA, 19 nt, Homo sapiens
  misc_RNA (1)...(19): siRNA sense strand
caggccaaaugaaaucaaa

SEQ ID NO: 1022378 - RNA, 19 nt, Homo sapiens
  misc_RNA (1)...(19): siRNA sense strand
uuccagaucucgaaguuau

SEQ ID NO: 1022379 - RNA, 19 nt, Homo sapiens
  misc_RNA (1)...(19): siRNA sense strand
gcccuauaguagacguuua

SEQ ID NO: 1022380 - RNA, 19 nt, Homo sapiens
  misc_RNA (1)...(19): siRNA sense strand
gccgugaguuuggucgaua

SEQ ID NO: 1022381 - RNA, 19 nt, Homo sapiens
  misc_RNA (1)...(19): siRNA sense strand
ggguauaccaauucugaaa

SEQ ID NO: 1022382 - RNA, 19 nt, Homo sapiens
  misc_RNA (1)...(19): siRNA sense strand
caccaggccugaggacuug

SEQ ID NO: 1022383 - RNA, 19 nt, Homo sapiens
  misc_RNA (1)...(19): siRNA sense strand
gccgucagauugaaauaca

SEQ ID NO: 1022384 - RNA, 19 nt, Homo sapiens
  misc_RNA (1)...(19): siRNA sense strand
ggaagacauucugacucaa

SEQ ID NO: 1022385 - RNA, 19 nt, Homo sapiens
  misc_RNA (1)...(19): siRNA sense strand
cagucaaguucaccucaaa

SEQ ID NO: 1022386 - RNA, 19 nt, Homo sapiens
  misc_RNA (1)...(19): siRNA sense strand
agaagaacucgaaguagaa

SEQ ID NO: 1022387 - RNA, 19 nt, Homo sapiens
  misc_RNA (1)...(19): siRNA sense strand
cacaggcgauuuucuuaua

SEQ ID NO: 1022388 - RNA, 19 nt, Homo sapiens
  misc_RNA (1)...(19): siRNA sense strand
caagaacuccaagaaggaa

SEQ ID NO: 1022389 - RNA, 19 nt, Homo sapiens
  misc_RNA (1)...(19): siRNA sense strand
cauuccagaucucgaaguu

SEQ ID NO: 1022390 - RNA, 19 nt, Homo sapiens
  misc_RNA (1)...(19): siRNA sense strand
aaacagcaaagcauucuca

SEQ ID NO: 1022391 - RNA, 19 nt, Homo sapiens
  misc_RNA (1)...(19): siRNA sense strand
guauaccaauucugaaacu

SEQ ID NO: 1022392 - RNA, 19 nt, Homo sapiens
  misc_RNA (1)...(19): siRNA sense strand
aggauuugcuuauguucaa

SEQ ID NO: 1022393 - RNA, 19 nt, Homo sapiens
  misc_RNA (1)...(19): siRNA sense strand
acauuccacuugacuucua

SEQ ID NO: 1022394 - RNA, 19 nt, Homo sapiens
  misc_RNA (1)...(19): siRNA sense strand
ucaagaacuccaagaagga

SEQ ID NO: 1022395 - RNA, 19 nt, Homo sapiens
  misc_RNA (1)...(19): siRNA sense strand
gguauguggccgucagauu

SEQ ID NO: 1022396 - RNA, 19 nt, Homo sapiens
  misc_RNA (1)...(19): siRNA sense strand
caauagaaaguggguaugu

SEQ ID NO: 1022397 - RNA, 19 nt, Homo sapiens
  misc_RNA (1)...(19): siRNA sense strand
gcccaagaggauuugcuua

SEQ ID NO: 1022398 - RNA, 19 nt, Homo sapiens
  misc_RNA (1)...(19): siRNA sense strand
ucacauuccagaucucgaa

SEQ ID NO: 1022399 - RNA, 19 nt, Homo sapiens
  misc_RNA (1)...(19): siRNA sense strand
gaagaacucgaaguagaag

SEQ ID NO: 1022400 - RNA, 19 nt, Homo sapiens
  misc_RNA (1)...(19): siRNA sense strand
ugcacaaggugaucgcaaa

SEQ ID NO: 1022401 - RNA, 19 nt, Homo sapiens
  misc_RNA (1)...(19): siRNA sense strand
ccaccaggccugaggacuu

SEQ ID NO: 1022402 - RNA, 19 nt, Homo sapiens
  misc_RNA (1)...(19): siRNA sense strand
cgucauccuuguucuccaa

SEQ ID NO: 1022403 - RNA, 19 nt, Homo sapiens
  misc_RNA (1)...(19): siRNA sense strand
caaaacaccaggccaaaug

SEQ ID NO: 1022404 - RNA, 19 nt, Homo sapiens
  misc_RNA (1)...(19): siRNA sense strand
cuuaaagagucucgacaca

SEQ ID NO: 1022405 - RNA, 19 nt, Homo sapiens
  misc_RNA (1)...(19): siRNA sense strand
aaggguauaccaauucuga

SEQ ID NO: 1022406 - RNA, 19 nt, Homo sapiens
  misc_RNA (1)...(19): siRNA sense strand
ccaaagaagaacucgaagu

SEQ ID NO: 1022407 - RNA, 19 nt, Homo sapiens
  misc_RNA (1)...(19): siRNA sense strand
cauucugacucaauagcaa

SEQ ID NO: 1022408 - RNA, 19 nt, Homo sapiens
  misc_RNA (1)...(19): siRNA sense strand
ucgauauggcccuauagua

SEQ ID NO: 1022409 - RNA, 19 nt, Homo sapiens
  misc_RNA (1)...(19): siRNA sense strand
ucaagaagccccagccaaa

SEQ ID NO: 1022410 - RNA, 19 nt, Homo sapiens
  misc_RNA (1)...(19): siRNA sense strand
uaaaguacaaacagcaaag

SEQ ID NO: 1022411 - RNA, 19 nt, Homo sapiens
  misc_RNA (1)...(19): siRNA sense strand
caagaucacauggaagaca

SEQ ID NO: 1022412 - RNA, 19 nt, Homo sapiens
  misc_RNA (1)...(19): siRNA sense strand
gguccaagucaauaggaaa

SEQ ID NO: 1022413 - RNA, 19 nt, Homo sapiens
  misc_RNA (1)...(19): siRNA sense strand
aauagaaaguggguaugug

SEQ ID NO: 1022414 - RNA, 19 nt, Homo sapiens
  misc_RNA (1)...(19): siRNA sense strand
gaaggaauuuuggcucuag

SEQ ID NO: 1022415 - RNA, 19 nt, Homo sapiens
  misc_RNA (1)...(19): siRNA sense strand
ucagcaaggcagucaagaa

SEQ ID NO: 1022416 - RNA, 19 nt, Homo sapiens
  misc_RNA (1)...(19): siRNA sense strand
gaggauuugcuuauguuca

SEQ ID NO: 1022417 - RNA, 19 nt, Homo sapiens
  misc_RNA (1)...(19): siRNA sense strand
gcggucagacagccuuaaa

SEQ ID NO: 1022418 - RNA, 19 nt, Homo sapiens
  misc_RNA (1)...(19): siRNA sense strand
cagauugaaauacaguuug

SEQ ID NO: 1022419 - RNA, 19 nt, Homo sapiens
  misc_RNA (1)...(19): siRNA sense strand
ucacauggaagacauucug

SEQ ID NO: 1022420 - RNA, 19 nt, Homo sapiens
  misc_RNA (1)...(19): siRNA sense strand
uauagcaagucuaaaucuc

SEQ ID NO: 1022421 - RNA, 19 nt, Homo sapiens
  misc_RNA (1)...(19): siRNA sense strand
aaagaacgucauccuuguu

SEQ ID NO: 1022422 - RNA, 19 nt, Homo sapiens
  misc_RNA (1)...(19): siRNA sense strand
aaaagaacgucauccuugu

SEQ ID NO: 1022423 - RNA, 19 nt, Homo sapiens
  misc_RNA (1)...(19): siRNA sense strand
cagcaaggcagucaagaac

SEQ ID NO: 1022424 - RNA, 19 nt, Homo sapiens
  misc_RNA (1)...(19): siRNA sense strand
cccaagaggauuugcuuau

SEQ ID NO: 1022425 - RNA, 19 nt, Homo sapiens
  misc_RNA (1)...(19): siRNA sense strand
gcagucaagaacuccaaga

SEQ ID NO: 1022426 - RNA, 19 nt, Homo sapiens
  misc_RNA (1)...(19): siRNA sense strand
aaacaccaggccaaaugaa

SEQ ID NO: 1022427 - RNA, 19 nt, Homo sapiens
  misc_RNA (1)...(19): siRNA sense strand
ggauuugcuuauguucaau

SEQ ID NO: 1022428 - RNA, 19 nt, Homo sapiens
  misc_RNA (1)...(19): siRNA sense strand
acagucaaguucaccucaa

SEQ ID NO: 1022429 - RNA, 19 nt, Homo sapiens
  misc_RNA (1)...(19): siRNA sense strand
acguuuacauuccacuuga

SEQ ID NO: 1022430 - RNA, 19 nt, Homo sapiens
  misc_RNA (1)...(19): siRNA sense strand
cuaaaguacaaacagcaaa

SEQ ID NO: 1022431 - RNA, 19 nt, Homo sapiens
  misc_RNA (1)...(19): siRNA sense strand
gacguuuacauuccacuug

SEQ ID NO: 1022432 - RNA, 19 nt, Homo sapiens
  misc_RNA (1)...(19): siRNA sense strand
acaccaggccaaaugaaau

SEQ ID NO: 1022433 - RNA, 19 nt, Homo sapiens
  misc_RNA (1)...(19): siRNA sense strand
ccaauucugaaacuaaagu

SEQ ID NO: 1022434 - RNA, 19 nt, Homo sapiens
  misc_RNA (1)...(19): siRNA sense strand
gcaagauccccguguaaau

SEQ ID NO: 1022435 - RNA, 19 nt, Homo sapiens
  misc_RNA (1)...(19): siRNA sense strand
uggucgauauggcccuaua

SEQ ID NO: 1022436 - RNA, 19 nt, Homo sapiens
  misc_RNA (1)...(19): siRNA sense strand
uuacauuccacuugacuuc

SEQ ID NO: 1022437 - RNA, 19 nt, Homo sapiens
  misc_RNA (1)...(19): siRNA sense strand
aauaggaggcggucagaca

SEQ ID NO: 1022438 - RNA, 19 nt, Homo sapiens
  misc_RNA (1)...(19): siRNA sense strand
aagaucacauggaagacau

SEQ ID NO: 1022439 - RNA, 19 nt, Homo sapiens
  misc_RNA (1)...(19): siRNA sense strand
uauguggccgucagauuga

SEQ ID NO: 1022440 - RNA, 19 nt, Homo sapiens
  misc_RNA (1)...(19): siRNA sense strand
gacacaggcgauuuucuua

SEQ ID NO: 1022441 - RNA, 19 nt, Homo sapiens
  misc_RNA (1)...(19): siRNA sense strand
gaucacauggaagacauuc

SEQ ID NO: 1022442 - RNA, 19 nt, Homo sapiens
  misc_RNA (1)...(19): siRNA sense strand
ggagagaaauccuaugaaa

SEQ ID NO: 1022443 - RNA, 19 nt, Homo sapiens
  misc_RNA (1)...(19): siRNA sense strand
ggucagaacugcaauguga

SEQ ID NO: 1022444 - RNA, 19 nt, Homo sapiens
  misc_RNA (1)...(19): siRNA sense strand
agucagagcuuuaaccuua

SEQ ID NO: 1022445 - RNA, 19 nt, Homo sapiens
  misc_RNA (1)...(19): siRNA sense strand
ucacagcuauguccuaaua

SEQ ID NO: 1022446 - RNA, 19 nt, Homo sapiens
  misc_RNA (1)...(19): siRNA sense strand
gggaaaagcuucagcaaua

SEQ ID NO: 1022447 - RNA, 19 nt, Homo sapiens
  misc_RNA (1)...(19): siRNA sense strand
gaaaugcccuucaucucuu

SEQ ID NO: 1022448 - RNA, 19 nt, Homo sapiens
  misc_RNA (1)...(19): siRNA sense strand
gaacugcaaugugauagaa

SEQ ID NO: 1022449 - RNA, 19 nt, Homo sapiens
  misc_RNA (1)...(19): siRNA sense strand
gagagaaaccuuauaaaug

SEQ ID NO: 1022450 - RNA, 19 nt, Homo sapiens
  misc_RNA (1)...(19): siRNA sense strand
ugacauggguucaagauga

SEQ ID NO: 1022451 - RNA, 19 nt, Homo sapiens
  misc_RNA (1)...(19): siRNA sense strand
uaacaguucucaccugauu

SEQ ID NO: 1022452 - RNA, 19 nt, Homo sapiens
  misc_RNA (1)...(19): siRNA sense strand
gagaauacauacaggagaa

SEQ ID NO: 1022453 - RNA, 19 nt, Homo sapiens
  misc_RNA (1)...(19): siRNA sense strand
acaaaugucuugaguguga

SEQ ID NO: 1022454 - RNA, 19 nt, Homo sapiens
  misc_RNA (1)...(19): siRNA sense strand
ggagagaaaccuuauaaau

SEQ ID NO: 1022455 - RNA, 19 nt, Homo sapiens
  misc_RNA (1)...(19): siRNA sense strand
gcagauaaacuuaaagaga

SEQ ID NO: 1022456 - RNA, 19 nt, Homo sapiens
  misc_RNA (1)...(19): siRNA sense strand
guucaaaccuuauuacaca

SEQ ID NO: 1022457 - RNA, 19 nt, Homo sapiens
  misc_RNA (1)...(19): siRNA sense strand
gagagaaacccuacaaaug

SEQ ID NO: 1022458 - RNA, 19 nt, Homo sapiens
  misc_RNA (1)...(19): siRNA sense strand
uggaaaagcuucaguaaua

SEQ ID NO: 1022459 - RNA, 19 nt, Homo sapiens
  misc_RNA (1)...(19): siRNA sense strand
agcaauaccucccaucuua

SEQ ID NO: 1022460 - RNA, 19 nt, Homo sapiens
  misc_RNA (1)...(19): siRNA sense strand
gagauuuggugucaugauu

SEQ ID NO: 1022461 - RNA, 19 nt, Homo sapiens
  misc_RNA (1)...(19): siRNA sense strand
ccauauagauguugugaau

SEQ ID NO: 1022462 - RNA, 19 nt, Homo sapiens
  misc_RNA (1)...(19): siRNA sense strand
cagcagcucucaccuuauu

SEQ ID NO: 1022463 - RNA, 19 nt, Homo sapiens
  misc_RNA (1)...(19): siRNA sense strand
gagaaaccauauagauguu

SEQ ID NO: 1022464 - RNA, 19 nt, Homo sapiens
  misc_RNA (1)...(19): siRNA sense strand
cuacaaaugucuugagugu

SEQ ID NO: 1022465 - RNA, 19 nt, Homo sapiens
  misc_RNA (1)...(19): siRNA sense strand
ggccuuagcucccaucuca

SEQ ID NO: 1022466 - RNA, 19 nt, Homo sapiens
  misc_RNA (1)...(19): siRNA sense strand
gagaaaagccuuauaaaug

SEQ ID NO: 1022467 - RNA, 19 nt, Homo sapiens
  misc_RNA (1)...(19): siRNA sense strand
agagaaaccuucagaaugg

SEQ ID NO: 1022468 - RNA, 19 nt, Homo sapiens
  misc_RNA (1)...(19): siRNA sense strand
ggagagaaaccauauagau

SEQ ID NO: 1022469 - RNA, 19 nt, Homo sapiens
  misc_RNA (1)...(19): siRNA sense strand
gcaaugugauagaagaaug

SEQ ID NO: 1022470 - RNA, 19 nt, Homo sapiens
  misc_RNA (1)...(19): siRNA sense strand
agacauagaccacaacauu

SEQ ID NO: 1022471 - RNA, 19 nt, Homo sapiens
  misc_RNA (1)...(19): siRNA sense strand
gagaacacauacaggagaa

SEQ ID NO: 1022472 - RNA, 19 nt, Homo sapiens
  misc_RNA (1)...(19): siRNA sense strand
gacauagaccacaacauua

SEQ ID NO: 1022473 - RNA, 19 nt, Homo sapiens
  misc_RNA (1)...(19): siRNA sense strand
agacagacccuauaaaugu

SEQ ID NO: 1022474 - RNA, 19 nt, Homo sapiens
  misc_RNA (1)...(19): siRNA sense strand
ggagagaaacccuacaaau

SEQ ID NO: 1022475 - RNA, 19 nt, Homo sapiens
  misc_RNA (1)...(19): siRNA sense strand
ggaaaaggcuucagucaca

SEQ ID NO: 1022476 - RNA, 19 nt, Homo sapiens
  misc_RNA (1)...(19): siRNA sense strand
cuacaaaugucccgagugu

SEQ ID NO: 1022477 - RNA, 19 nt, Homo sapiens
  misc_RNA (1)...(19): siRNA sense strand
ggaaugggacucaggagaa

SEQ ID NO: 1022478 - RNA, 19 nt, Homo sapiens
  misc_RNA (1)...(19): siRNA sense strand
ggaaaugcccuucaucucu

SEQ ID NO: 1022479 - RNA, 19 nt, Homo sapiens
  misc_RNA (1)...(19): siRNA sense strand
gagagaaaccauauagaug

SEQ ID NO: 1022480 - RNA, 19 nt, Homo sapiens
  misc_RNA (1)...(19): siRNA sense strand
gaaauccuaugaaaguucu

SEQ ID NO: 1022481 - RNA, 19 nt, Homo sapiens
  misc_RNA (1)...(19): siRNA sense strand
gagaaauccuaugaaaguu

SEQ ID NO: 1022482 - RNA, 19 nt, Homo sapiens
  misc_RNA (1)...(19): siRNA sense strand
agucguaguucaaaccuua

SEQ ID NO: 1022483 - RNA, 19 nt, Homo sapiens
  misc_RNA (1)...(19): siRNA sense strand
gguuguaauucuacucuaa

SEQ ID NO: 1022484 - RNA, 19 nt, Homo sapiens
  misc_RNA (1)...(19): siRNA sense strand
gugagaagcccuacaaaug

SEQ ID NO: 1022485 - RNA, 19 nt, Homo sapiens
  misc_RNA (1)...(19): siRNA sense strand
gagaaacccuacaaauguc

SEQ ID NO: 1022486 - RNA, 19 nt, Homo sapiens
  misc_RNA (1)...(19): siRNA sense strand
cagcagaauucauccuuug

SEQ ID NO: 1022487 - RNA, 19 nt, Homo sapiens
  misc_RNA (1)...(19): siRNA sense strand
gaaaccauauagauguugu

SEQ ID NO: 1022488 - RNA, 19 nt, Homo sapiens
  misc_RNA (1)...(19): siRNA sense strand
gaggaaaguuugggucaga

SEQ ID NO: 1022489 - RNA, 19 nt, Homo sapiens
  misc_RNA (1)...(19): siRNA sense strand
guagacagacccuauaaau

SEQ ID NO: 1022490 - RNA, 19 nt, Homo sapiens
  misc_RNA (1)...(19): siRNA sense strand
gcagaauucauccuuugua

SEQ ID NO: 1022491 - RNA, 19 nt, Homo sapiens
  misc_RNA (1)...(19): siRNA sense strand
gacagacccuauaaauguu

SEQ ID NO: 1022492 - RNA, 19 nt, Homo sapiens
  misc_RNA (1)...(19): siRNA sense strand
cagcaucacagaucacaua

SEQ ID NO: 1022493 - RNA, 19 nt, Homo sapiens
  misc_RNA (1)...(19): siRNA sense strand
cuauaaauguuccgaaugu

SEQ ID NO: 1022494 - RNA, 19 nt, Homo sapiens
  misc_RNA (1)...(19): siRNA sense strand
gagaagcccuacaaauguc

SEQ ID NO: 1022495 - RNA, 19 nt, Homo sapiens
  misc_RNA (1)...(19): siRNA sense strand
ggaaacuguucaccacaau

SEQ ID NO: 1022496 - RNA, 19 nt, Homo sapiens
  misc_RNA (1)...(19): siRNA sense strand
gagaaaagccuuaucaaug

SEQ ID NO: 1022497 - RNA, 19 nt, Homo sapiens
  misc_RNA (1)...(19): siRNA sense strand
agagaaacccuacaaaugu

SEQ ID NO: 1022498 - RNA, 19 nt, Homo sapiens
  misc_RNA (1)...(19): siRNA sense strand
gaaacuguucaccacaaua

SEQ ID NO: 1022499 - RNA, 19 nt, Homo sapiens
  misc_RNA (1)...(19): siRNA sense strand
caggagagaaaccuuauaa

SEQ ID NO: 1022500 - RNA, 19 nt, Homo sapiens
  misc_RNA (1)...(19): siRNA sense strand
ccuuauaaauguccugauu

SEQ ID NO: 1022501 - RNA, 19 nt, Homo sapiens
  misc_RNA (1)...(19): siRNA sense strand
cagaaugugggaagaauuu

SEQ ID NO: 1022502 - RNA, 19 nt, Homo sapiens
  misc_RNA (1)...(19): siRNA sense strand
gaacaucagaggacucaca

SEQ ID NO: 1022503 - RNA, 19 nt, Homo sapiens
  misc_RNA (1)...(19): siRNA sense strand
gauagaagaaugcagaauc

SEQ ID NO: 1022504 - RNA, 19 nt, Homo sapiens
  misc_RNA (1)...(19): siRNA sense strand
aaacuguucaccacaauaa

SEQ ID NO: 1022505 - RNA, 19 nt, Homo sapiens
  misc_RNA (1)...(19): siRNA sense strand
agcagcagcucucaccuua

SEQ ID NO: 1022506 - RNA, 19 nt, Homo sapiens
  misc_RNA (1)...(19): siRNA sense strand
ggagagggagaguuugaaa

SEQ ID NO: 1022507 - RNA, 19 nt, Homo sapiens
  misc_RNA (1)...(19): siRNA sense strand
agagaaauccuaugaaagu

SEQ ID NO: 1022508 - RNA, 19 nt, Homo sapiens
  misc_RNA (1)...(19): siRNA sense strand
caucacagaucacauacag

SEQ ID NO: 1022509 - RNA, 19 nt, Homo sapiens
  misc_RNA (1)...(19): siRNA sense strand
gggaagaauuuuagucgua

SEQ ID NO: 1022510 - RNA, 19 nt, Homo sapiens
  misc_RNA (1)...(19): siRNA sense strand
gauggcaagucagagaauu

SEQ ID NO: 1022511 - RNA, 19 nt, Homo sapiens
  misc_RNA (1)...(19): siRNA sense strand
ugaaaguucugaauaugag

SEQ ID NO: 1022512 - RNA, 19 nt, Homo sapiens
  misc_RNA (1)...(19): siRNA sense strand
ccagcagaauucauccuuu

SEQ ID NO: 1022513 - RNA, 19 nt, Homo sapiens
  misc_RNA (1)...(19): siRNA sense strand
ccuuauaagugcccugauu

SEQ ID NO: 1022514 - RNA, 19 nt, Homo sapiens
  misc_RNA (1)...(19): siRNA sense strand
aaagagaaaccuucagaau

SEQ ID NO: 1022515 - RNA, 19 nt, Homo sapiens
  misc_RNA (1)...(19): siRNA sense strand
ccuaugaaaguucugaaua

SEQ ID NO: 1022516 - RNA, 19 nt, Homo sapiens
  misc_RNA (1)...(19): siRNA sense strand
ugagaagcccuacaaaugu

SEQ ID NO: 1022517 - RNA, 19 nt, Homo sapiens
  misc_RNA (1)...(19): siRNA sense strand
gcucccaucucauuagaca

SEQ ID NO: 1022518 - RNA, 19 nt, Homo sapiens
  misc_RNA (1)...(19): siRNA sense strand
agacaucagagaacacaua

SEQ ID NO: 1022519 - RNA, 19 nt, Homo sapiens
  misc_RNA (1)...(19): siRNA sense strand
ugagagugauggcaaguca

SEQ ID NO: 1022520 - RNA, 19 nt, Homo sapiens
  misc_RNA (1)...(19): siRNA sense strand
gagaaaccuuauaaauguc

SEQ ID NO: 1022521 - RNA, 19 nt, Homo sapiens
  misc_RNA (1)...(19): siRNA sense strand
gggaagaguuuuggccuua

SEQ ID NO: 1022522 - RNA, 19 nt, Homo sapiens
  misc_RNA (1)...(19): siRNA sense strand
gggaagaguuuuagucaga

SEQ ID NO: 1022523 - RNA, 19 nt, Homo sapiens
  misc_RNA (1)...(19): siRNA sense strand
cagaauucauccuuuguag

SEQ ID NO: 1022524 - RNA, 19 nt, Homo sapiens
  misc_RNA (1)...(19): siRNA sense strand
gaacucacacgggagagaa

SEQ ID NO: 1022525 - RNA, 19 nt, Homo sapiens
  misc_RNA (1)...(19): siRNA sense strand
agaaaagccuuaucaaugu

SEQ ID NO: 1022526 - RNA, 19 nt, Homo sapiens
  misc_RNA (1)...(19): siRNA sense strand
aagaugagauuugguguca

SEQ ID NO: 1022527 - RNA, 19 nt, Homo sapiens
  misc_RNA (1)...(19): siRNA sense strand
ucagaacugcaaugugaua

SEQ ID NO: 1022528 - RNA, 19 nt, Homo sapiens
  misc_RNA (1)...(19): siRNA sense strand
ggagaaaagccuuauaaau

SEQ ID NO: 1022529 - RNA, 19 nt, Homo sapiens
  misc_RNA (1)...(19): siRNA sense strand
gaauucauccuuuguagac

SEQ ID NO: 1022530 - RNA, 19 nt, Homo sapiens
  misc_RNA (1)...(19): siRNA sense strand
cauagaccacaacauuaua

SEQ ID NO: 1022531 - RNA, 19 nt, Homo sapiens
  misc_RNA (1)...(19): siRNA sense strand
agagaaaccauauagaugu

SEQ ID NO: 1022532 - RNA, 19 nt, Homo sapiens
  misc_RNA (1)...(19): siRNA sense strand
gcaauaccucccaucuuau

SEQ ID NO: 1022533 - RNA, 19 nt, Homo sapiens
  misc_RNA (1)...(19): siRNA sense strand
ggggaaauuuuauagcuaa

SEQ ID NO: 1022534 - RNA, 19 nt, Homo sapiens
  misc_RNA (1)...(19): siRNA sense strand
aagagaaaccuucagaaug

SEQ ID NO: 1022535 - RNA, 19 nt, Homo sapiens
  misc_RNA (1)...(19): siRNA sense strand
ccauaugaauguucugucu

SEQ ID NO: 1022536 - RNA, 19 nt, Homo sapiens
  misc_RNA (1)...(19): siRNA sense strand
ccucaugaauggacuugga

SEQ ID NO: 1022537 - RNA, 19 nt, Homo sapiens
  misc_RNA (1)...(19): siRNA sense strand
gaccacaacauuauaagca

SEQ ID NO: 1022538 - RNA, 19 nt, Homo sapiens
  misc_RNA (1)...(19): siRNA sense strand
ggugagaagcccuacaaau

SEQ ID NO: 1022539 - RNA, 19 nt, Homo sapiens
  misc_RNA (1)...(19): siRNA sense strand
agucacagcuauguccuaa

SEQ ID NO: 1022540 - RNA, 19 nt, Homo sapiens
  misc_RNA (1)...(19): siRNA sense strand
uaaagagaaaccuucagaa

SEQ ID NO: 1022541 - RNA, 19 nt, Homo sapiens
  misc_RNA (1)...(19): siRNA sense strand
ccacugacauggguucaag

SEQ ID NO: 1022542 - RNA, 19 nt, Homo sapiens
  misc_RNA (1)...(19): siRNA sense strand
gcacagaacugacuacuuu

SEQ ID NO: 1022543 - RNA, 19 nt, Homo sapiens
  misc_RNA (1)...(19): siRNA sense strand
gauaacagcuuucauaaug

SEQ ID NO: 1022544 - RNA, 19 nt, Homo sapiens
  misc_RNA (1)...(19): siRNA sense strand
ggaaagaucuucagcuuau

SEQ ID NO: 1022545 - RNA, 19 nt, Homo sapiens
  misc_RNA (1)...(19): siRNA sense strand
gaaguuagcuagugaguug

SEQ ID NO: 1022546 - RNA, 19 nt, Homo sapiens
  misc_RNA (1)...(19): siRNA sense strand
ucaaauagcucaaaugaug

SEQ ID NO: 1022547 - RNA, 19 nt, Homo sapiens
  misc_RNA (1)...(19): siRNA sense strand
gaagauggauugcaacaug

SEQ ID NO: 1022548 - RNA, 19 nt, Homo sapiens
  misc_RNA (1)...(19): siRNA sense strand
gaacagauagaaagagaua

SEQ ID NO: 1022549 - RNA, 19 nt, Homo sapiens
  misc_RNA (1)...(19): siRNA sense strand
ggacgugacuccaggauau

SEQ ID NO: 1022550 - RNA, 19 nt, Homo sapiens
  misc_RNA (1)...(19): siRNA sense strand
caaguaggauucauugauu

SEQ ID NO: 1022551 - RNA, 19 nt, Homo sapiens
  misc_RNA (1)...(19): siRNA sense strand
gaucuuaaauuuccuguag

SEQ ID NO: 1022552 - RNA, 19 nt, Homo sapiens
  misc_RNA (1)...(19): siRNA sense strand
ggaaagagucuaugugaga

SEQ ID NO: 1022553 - RNA, 19 nt, Homo sapiens
  misc_RNA (1)...(19): siRNA sense strand
aaucauacaugguguguuu

SEQ ID NO: 1022554 - RNA, 19 nt, Homo sapiens
  misc_RNA (1)...(19): siRNA sense strand
ggaaagaggcauuuguuga

SEQ ID NO: 1022555 - RNA, 19 nt, Homo sapiens
  misc_RNA (1)...(19): siRNA sense strand
gaagcuacguuuacacuca

SEQ ID NO: 1022556 - RNA, 19 nt, Homo sapiens
  misc_RNA (1)...(19): siRNA sense strand
gaaagagucuaugugagaa

SEQ ID NO: 1022557 - RNA, 19 nt, Homo sapiens
  misc_RNA (1)...(19): siRNA sense strand
ugaaggaacugcaaacuca

SEQ ID NO: 1022558 - RNA, 19 nt, Homo sapiens
  misc_RNA (1)...(19): siRNA sense strand
caaaggagcccucaugaau

SEQ ID NO: 1022559 - RNA, 19 nt, Homo sapiens
  misc_RNA (1)...(19): siRNA sense strand
gagugaagcucccaccauu

SEQ ID NO: 1022560 - RNA, 19 nt, Homo sapiens
  misc_RNA (1)...(19): siRNA sense strand
aaauaagggucgucucuuu

SEQ ID NO: 1022561 - RNA, 19 nt, Homo sapiens
  misc_RNA (1)...(19): siRNA sense strand
ucacaaaugucaguacaaa

SEQ ID NO: 1022562 - RNA, 19 nt, Homo sapiens
  misc_RNA (1)...(19): siRNA sense strand
gaaagaucuucagcuuaua

SEQ ID NO: 1022563 - RNA, 19 nt, Homo sapiens
  misc_RNA (1)...(19): siRNA sense strand
gaaaauggauuggaacaaa

SEQ ID NO: 1022564 - RNA, 19 nt, Homo sapiens
  misc_RNA (1)...(19): siRNA sense strand
gaagcagguucgaguaguu

SEQ ID NO: 1022565 - RNA, 19 nt, Homo sapiens
  misc_RNA (1)...(19): siRNA sense strand
gagauaacagcuuucauaa

SEQ ID NO: 1022566 - RNA, 19 nt, Homo sapiens
  misc_RNA (1)...(19): siRNA sense strand
gagcugugcuuuccaagug

SEQ ID NO: 1022567 - RNA, 19 nt, Homo sapiens
  misc_RNA (1)...(19): siRNA sense strand
gaaagaggcauuuguugau

SEQ ID NO: 1022568 - RNA, 19 nt, Homo sapiens
  misc_RNA (1)...(19): siRNA sense strand
guaccauccugccaucaua

SEQ ID NO: 1022569 - RNA, 19 nt, Homo sapiens
  misc_RNA (1)...(19): siRNA sense strand
gcaaggccguggaaacuuc

SEQ ID NO: 1022570 - RNA, 19 nt, Homo sapiens
  misc_RNA (1)...(19): siRNA sense strand
gaagggagagaaacugaaa

SEQ ID NO: 1022571 - RNA, 19 nt, Homo sapiens
  misc_RNA (1)...(19): siRNA sense strand
ugaaccaucuccuuaaaga

SEQ ID NO: 1022572 - RNA, 19 nt, Homo sapiens
  misc_RNA (1)...(19): siRNA sense strand
ggaugaguguagucagaua

SEQ ID NO: 1022573 - RNA, 19 nt, Homo sapiens
  misc_RNA (1)...(19): siRNA sense strand
gaacuacaugcacuaauga

SEQ ID NO: 1022574 - RNA, 19 nt, Homo sapiens
  misc_RNA (1)...(19): siRNA sense strand
uuucacaucuugccucaua

SEQ ID NO: 1022575 - RNA, 19 nt, Homo sapiens
  misc_RNA (1)...(19): siRNA sense strand
gcugaaccaucuccuuaaa

SEQ ID NO: 1022576 - RNA, 19 nt, Homo sapiens
  misc_RNA (1)...(19): siRNA sense strand
agagauaacagcuuucaua

SEQ ID NO: 1022577 - RNA, 19 nt, Homo sapiens
  misc_RNA (1)...(19): siRNA sense strand
gcggagcccuuuauuggaa

SEQ ID NO: 1022578 - RNA, 19 nt, Homo sapiens
  misc_RNA (1)...(19): siRNA sense strand
acucauaccuucccuauca

SEQ ID NO: 1022579 - RNA, 19 nt, Homo sapiens
  misc_RNA (1)...(19): siRNA sense strand
ucagugcuauugcuaauga

SEQ ID NO: 1022580 - RNA, 19 nt, Homo sapiens
  misc_RNA (1)...(19): siRNA sense strand
ccaccagccuucacaaaug

SEQ ID NO: 1022581 - RNA, 19 nt, Homo sapiens
  misc_RNA (1)...(19): siRNA sense strand
aaacaaggaucaagcuaca

SEQ ID NO: 1022582 - RNA, 19 nt, Homo sapiens
  misc_RNA (1)...(19): siRNA sense strand
cuacuaauguggcuguuga

SEQ ID NO: 1022583 - RNA, 19 nt, Homo sapiens
  misc_RNA (1)...(19): siRNA sense strand
cuacagcucuaauucaaau

SEQ ID NO: 1022584 - RNA, 19 nt, Homo sapiens
  misc_RNA (1)...(19): siRNA sense strand
uaaauuuccuguaguugug

SEQ ID NO: 1022585 - RNA, 19 nt, Homo sapiens
  misc_RNA (1)...(19): siRNA sense strand
uaacagcuuucauaaugug

SEQ ID NO: 1022586 - RNA, 19 nt, Homo sapiens
  misc_RNA (1)...(19): siRNA sense strand
aaaggaagguccaaauaag

SEQ ID NO: 1022587 - RNA, 19 nt, Homo sapiens
  misc_RNA (1)...(19): siRNA sense strand
caaagcugaucgauguaaa

SEQ ID NO: 1022588 - RNA, 19 nt, Homo sapiens
  misc_RNA (1)...(19): siRNA sense strand
acuuugagcuggauacuuu

SEQ ID NO: 1022589 - RNA, 19 nt, Homo sapiens
  misc_RNA (1)...(19): siRNA sense strand
cagcugaaccaucuccuua

SEQ ID NO: 1022590 - RNA, 19 nt, Homo sapiens
  misc_RNA (1)...(19): siRNA sense strand
uagaacagauagaaagaga

SEQ ID NO: 1022591 - RNA, 19 nt, Homo sapiens
  misc_RNA (1)...(19): siRNA sense strand
uaaaggacuagaacagaua

SEQ ID NO: 1022592 - RNA, 19 nt, Homo sapiens
  misc_RNA (1)...(19): siRNA sense strand
gagcggagcccuuuauugg

SEQ ID NO: 1022593 - RNA, 19 nt, Homo sapiens
  misc_RNA (1)...(19): siRNA sense strand
ggagcaacauugaaguuag

SEQ ID NO: 1022594 - RNA, 19 nt, Homo sapiens
  misc_RNA (1)...(19): siRNA sense strand
gcugaucgauguaaauucu

SEQ ID NO: 1022595 - RNA, 19 nt, Homo sapiens
  misc_RNA (1)...(19): siRNA sense strand
gaggaaagaggcauuuguu

SEQ ID NO: 1022596 - RNA, 19 nt, Homo sapiens
  misc_RNA (1)...(19): siRNA sense strand
ggacaagacaaguaggauu

SEQ ID NO: 1022597 - RNA, 19 nt, Homo sapiens
  misc_RNA (1)...(19): siRNA sense strand
ggacuagaacagauagaaa

SEQ ID NO: 1022598 - RNA, 19 nt, Homo sapiens
  misc_RNA (1)...(19): siRNA sense strand
agaacuacaugcacuaaug

SEQ ID NO: 1022599 - RNA, 19 nt, Homo sapiens
  misc_RNA (1)...(19): siRNA sense strand
uagaaauacugccuuugaa

SEQ ID NO: 1022600 - RNA, 19 nt, Homo sapiens
  misc_RNA (1)...(19): siRNA sense strand
ugaaagcauugaagaagug

SEQ ID NO: 1022601 - RNA, 19 nt, Homo sapiens
  misc_RNA (1)...(19): siRNA sense strand
gagugaugcugucaaugaa

SEQ ID NO: 1022602 - RNA, 19 nt, Homo sapiens
  misc_RNA (1)...(19): siRNA sense strand
aaacagcuaccuccuacua

SEQ ID NO: 1022603 - RNA, 19 nt, Homo sapiens
  misc_RNA (1)...(19): siRNA sense strand
ggaaauuuagccuguuuga

SEQ ID NO: 1022604 - RNA, 19 nt, Homo sapiens
  misc_RNA (1)...(19): siRNA sense strand
ucaccauccugauauuaaa

SEQ ID NO: 1022605 - RNA, 19 nt, Homo sapiens
  misc_RNA (1)...(19): siRNA sense strand
caucuugccucauagaaca

SEQ ID NO: 1022606 - RNA, 19 nt, Homo sapiens
  misc_RNA (1)...(19): siRNA sense strand
aaagaggcauuuguugauu

SEQ ID NO: 1022607 - RNA, 19 nt, Homo sapiens
  misc_RNA (1)...(19): siRNA sense strand
gaucgacuuugcuuaaugg

SEQ ID NO: 1022608 - RNA, 19 nt, Homo sapiens
  misc_RNA (1)...(19): siRNA sense strand
gcuauuucccuucuaauug

SEQ ID NO: 1022609 - RNA, 19 nt, Homo sapiens
  misc_RNA (1)...(19): siRNA sense strand
ggaccaucaucuaucaaug

SEQ ID NO: 1022610 - RNA, 19 nt, Homo sapiens
  misc_RNA (1)...(19): siRNA sense strand
aaggaaagaucuucagcuu

SEQ ID NO: 1022611 - RNA, 19 nt, Homo sapiens
  misc_RNA (1)...(19): siRNA sense strand
ccaaaccaauuuuaccuua

SEQ ID NO: 1022612 - RNA, 19 nt, Homo sapiens
  misc_RNA (1)...(19): siRNA sense strand
acccaaagcugaucgaugu

SEQ ID NO: 1022613 - RNA, 19 nt, Homo sapiens
  misc_RNA (1)...(19): siRNA sense strand
caugaaugguguaacagaa

SEQ ID NO: 1022614 - RNA, 19 nt, Homo sapiens
  misc_RNA (1)...(19): siRNA sense strand
aaagaagaccugacuccua

SEQ ID NO: 1022615 - RNA, 19 nt, Homo sapiens
  misc_RNA (1)...(19): siRNA sense strand
gaaaugcaaggccguggaa

SEQ ID NO: 1022616 - RNA, 19 nt, Homo sapiens
  misc_RNA (1)...(19): siRNA sense strand
agaacugacuacuuugaaa

SEQ ID NO: 1022617 - RNA, 19 nt, Homo sapiens
  misc_RNA (1)...(19): siRNA sense strand
guccaugcguuauugguuu

SEQ ID NO: 1022618 - RNA, 19 nt, Homo sapiens
  misc_RNA (1)...(19): siRNA sense strand
ccaaaggcaaauucacaua

SEQ ID NO: 1022619 - RNA, 19 nt, Homo sapiens
  misc_RNA (1)...(19): siRNA sense strand
agauagaaauacugccuuu

SEQ ID NO: 1022620 - RNA, 19 nt, Homo sapiens
  misc_RNA (1)...(19): siRNA sense strand
uaugaggaaugccagcuuu

SEQ ID NO: 1022621 - RNA, 19 nt, Homo sapiens
  misc_RNA (1)...(19): siRNA sense strand
gauaccacuuuaugaggaa

SEQ ID NO: 1022622 - RNA, 19 nt, Homo sapiens
  misc_RNA (1)...(19): siRNA sense strand
gaagugaaggaacugcaaa

SEQ ID NO: 1022623 - RNA, 19 nt, Homo sapiens
  misc_RNA (1)...(19): siRNA sense strand
ggucacaagccaauucuau

SEQ ID NO: 1022624 - RNA, 19 nt, Homo sapiens
  misc_RNA (1)...(19): siRNA sense strand
acagcuaccuccuacuauu

SEQ ID NO: 1022625 - RNA, 19 nt, Homo sapiens
  misc_RNA (1)...(19): siRNA sense strand
ccucaugaaugguguaaca

SEQ ID NO: 1022626 - RNA, 19 nt, Homo sapiens
  misc_RNA (1)...(19): siRNA sense strand
ggcaucacaugaaagcauu

SEQ ID NO: 1022627 - RNA, 19 nt, Homo sapiens
  misc_RNA (1)...(19): siRNA sense strand
uaaaaggcaugcucuauca

SEQ ID NO: 1022628 - RNA, 19 nt, Homo sapiens
  misc_RNA (1)...(19): siRNA sense strand
ugauuggugugauaacauu

SEQ ID NO: 1022629 - RNA, 19 nt, Homo sapiens
  misc_RNA (1)...(19): siRNA sense strand
uuaaaggacuagaacagau

SEQ ID NO: 1022630 - RNA, 19 nt, Homo sapiens
  misc_RNA (1)...(19): siRNA sense strand
gugaaaagcugauucuugu

SEQ ID NO: 1022631 - RNA, 19 nt, Homo sapiens
  misc_RNA (1)...(19): siRNA sense strand
uacaugcacuaaugaaaga

SEQ ID NO: 1022632 - RNA, 19 nt, Homo sapiens
  misc_RNA (1)...(19): siRNA sense strand
gcauugagcagcauaaacu

SEQ ID NO: 1022633 - RNA, 19 nt, Homo sapiens
  misc_RNA (1)...(19): siRNA sense strand
uaagcagacuuucacaucu

SEQ ID NO: 1022634 - RNA, 19 nt, Homo sapiens
  misc_RNA (1)...(19): siRNA sense strand
gacaagacaaguaggauuc

SEQ ID NO: 1022635 - RNA, 19 nt, Homo sapiens
  misc_RNA (1)...(19): siRNA sense strand
gaaaaggagaucauuauuc

SEQ ID NO: 1022636 - RNA, 19 nt, Homo sapiens
  misc_RNA (1)...(19): siRNA sense strand
ugaaugguguaacagaaau

SEQ ID NO: 1022637 - RNA, 19 nt, Homo sapiens
  misc_RNA (1)...(19): siRNA sense strand
uaacugaaccggccucucu

SEQ ID NO: 1022638 - RNA, 19 nt, Homo sapiens
  misc_RNA (1)...(19): siRNA sense strand
uacuguaaauccugaguuu

SEQ ID NO: 1022639 - RNA, 19 nt, Homo sapiens
  misc_RNA (1)...(19): siRNA sense strand
gaaugguguaacagaaaua

SEQ ID NO: 1022640 - RNA, 19 nt, Homo sapiens
  misc_RNA (1)...(19): siRNA sense strand
agagugaugcugucaauga

SEQ ID NO: 1022641 - RNA, 19 nt, Homo sapiens
  misc_RNA (1)...(19): siRNA sense strand
ggauuggaacaaacucuuu

SEQ ID NO: 1022642 - RNA, 19 nt, Homo sapiens
  misc_RNA (1)...(19): siRNA sense strand
gcucgacgccaucaagagu

SEQ ID NO: 1022643 - RNA, 19 nt, Homo sapiens
  misc_RNA (1)...(19): siRNA sense strand
ucgacgccaucaagaguga

SEQ ID NO: 1022644 - RNA, 19 nt, Homo sapiens
  misc_RNA (1)...(19): siRNA sense strand
ggacacauuucuauaucua

SEQ ID NO: 1022645 - RNA, 19 nt, Homo sapiens
  misc_RNA (1)...(19): siRNA sense strand
gcacuuggcugggcucuuc

SEQ ID NO: 1022646 - RNA, 19 nt, Homo sapiens
  misc_RNA (1)...(19): siRNA sense strand
gcaccugguugggcauuua

SEQ ID NO: 1022647 - RNA, 19 nt, Homo sapiens
  misc_RNA (1)...(19): siRNA sense strand
ggacgcuuccuuccgauua

SEQ ID NO: 1022648 - RNA, 19 nt, Homo sapiens
  misc_RNA (1)...(19): siRNA sense strand
ugacuaugaugcaccuaua

SEQ ID NO: 1022649 - RNA, 19 nt, Homo sapiens
  misc_RNA (1)...(19): siRNA sense strand
uagagaacaugcucaaguu

SEQ ID NO: 1022650 - RNA, 19 nt, Homo sapiens
  misc_RNA (1)...(19): siRNA sense strand
gcacaggacacauaucaau

SEQ ID NO: 1022651 - RNA, 19 nt, Homo sapiens
  misc_RNA (1)...(19): siRNA sense strand
caauagcacuaguacuuug

SEQ ID NO: 1022652 - RNA, 19 nt, Homo sapiens
  misc_RNA (1)...(19): siRNA sense strand
gagccagugugaacaugua

SEQ ID NO: 1022653 - RNA, 19 nt, Homo sapiens
  misc_RNA (1)...(19): siRNA sense strand
gcaguggacuccugguuca

SEQ ID NO: 1022654 - RNA, 19 nt, Homo sapiens
  misc_RNA (1)...(19): siRNA sense strand
ccauggagguaccaacuuu

SEQ ID NO: 1022655 - RNA, 19 nt, Homo sapiens
  misc_RNA (1)...(19): siRNA sense strand
ggaauggugccgauaagaa

SEQ ID NO: 1022656 - RNA, 19 nt, Homo sapiens
  misc_RNA (1)...(19): siRNA sense strand
ggccaagucuggaucaaug

SEQ ID NO: 1022657 - RNA, 19 nt, Homo sapiens
  misc_RNA (1)...(19): siRNA sense strand
uaacagcagugacuucaag

SEQ ID NO: 1022658 - RNA, 19 nt, Homo sapiens
  misc_RNA (1)...(19): siRNA sense strand
ccaaaggacuagagaacau

SEQ ID NO: 1022659 - RNA, 19 nt, Homo sapiens
  misc_RNA (1)...(19): siRNA sense strand
uuacauugcuggaacuaga

SEQ ID NO: 1022660 - RNA, 19 nt, Homo sapiens
  misc_RNA (1)...(19): siRNA sense strand
gaucaauggguuuaacuug

SEQ ID NO: 1022661 - RNA, 19 nt, Homo sapiens
  misc_RNA (1)...(19): siRNA sense strand
gcucuuccgugcacugcua

SEQ ID NO: 1022662 - RNA, 19 nt, Homo sapiens
  misc_RNA (1)...(19): siRNA sense strand
ccucaacgccauacaguuu

SEQ ID NO: 1022663 - RNA, 19 nt, Homo sapiens
  misc_RNA (1)...(19): siRNA sense strand
acacauaucaauucccuuu

SEQ ID NO: 1022664 - RNA, 19 nt, Homo sapiens
  misc_RNA (1)...(19): siRNA sense strand
cauucugggugccaaauaa

SEQ ID NO: 1022665 - RNA, 19 nt, Homo sapiens
  misc_RNA (1)...(19): siRNA sense strand
gcccauucauucaaucuug

SEQ ID NO: 1022666 - RNA, 19 nt, Homo sapiens
  misc_RNA (1)...(19): siRNA sense strand
uggaugauguucccucuga

SEQ ID NO: 1022667 - RNA, 19 nt, Homo sapiens
  misc_RNA (1)...(19): siRNA sense strand
ugugucagcuguaaccaaa

SEQ ID NO: 1022668 - RNA, 19 nt, Homo sapiens
  misc_RNA (1)...(19): siRNA sense strand
uugauaaccuugugaagug

SEQ ID NO: 1022669 - RNA, 19 nt, Homo sapiens
  misc_RNA (1)...(19): siRNA sense strand
caacaugaccaaaaucuuu

SEQ ID NO: 1022670 - RNA, 19 nt, Homo sapiens
  misc_RNA (1)...(19): siRNA sense strand
gaaaauugauaaccuugug

SEQ ID NO: 1022671 - RNA, 19 nt, Homo sapiens
  misc_RNA (1)...(19): siRNA sense strand
ggccauugguaaacucuga

SEQ ID NO: 1022672 - RNA, 19 nt, Homo sapiens
  misc_RNA (1)...(19): siRNA sense strand
gaaccaauggaguuaagug

SEQ ID NO: 1022673 - RNA, 19 nt, Homo sapiens
  misc_RNA (1)...(19): siRNA sense strand
ugaauaugguagcuacaga

SEQ ID NO: 1022674 - RNA, 19 nt, Homo sapiens
  misc_RNA (1)...(19): siRNA sense strand
gaugauguucccucugaaa

SEQ ID NO: 1022675 - RNA, 19 nt, Homo sapiens
  misc_RNA (1)...(19): siRNA sense strand
gaaguuccuuugggaccuu

SEQ ID NO: 1022676 - RNA, 19 nt, Homo sapiens
  misc_RNA (1)...(19): siRNA sense strand
gagugccucugaaccaaug

SEQ ID NO: 1022677 - RNA, 19 nt, Homo sapiens
  misc_RNA (1)...(19): siRNA sense strand
gaauggugccgauaagaag

SEQ ID NO: 1022678 - RNA, 19 nt, Homo sapiens
  misc_RNA (1)...(19): siRNA sense strand
acauaucaauucccuuuca

SEQ ID NO: 1022679 - RNA, 19 nt, Homo sapiens
  misc_RNA (1)...(19): siRNA sense strand
gcaacaucauuagcauuca

SEQ ID NO: 1022680 - RNA, 19 nt, Homo sapiens
  misc_RNA (1)...(19): siRNA sense strand
gauguucccucugaaaauu

SEQ ID NO: 1022681 - RNA, 19 nt, Homo sapiens
  misc_RNA (1)...(19): siRNA sense strand
ucaauagcacuaguacuuu

SEQ ID NO: 1022682 - RNA, 19 nt, Homo sapiens
  misc_RNA (1)...(19): siRNA sense strand
cauccugguugcuucgaaa

SEQ ID NO: 1022683 - RNA, 19 nt, Homo sapiens
  misc_RNA (1)...(19): siRNA sense strand
caagauuccugcuguuucc

SEQ ID NO: 1022684 - RNA, 19 nt, Homo sapiens
  misc_RNA (1)...(19): siRNA sense strand
gggacucuauaccacugua

SEQ ID NO: 1022685 - RNA, 19 nt, Homo sapiens
  misc_RNA (1)...(19): siRNA sense strand
ggcaacaucauuagcauuc

SEQ ID NO: 1022686 - RNA, 19 nt, Homo sapiens
  misc_RNA (1)...(19): siRNA sense strand
agauauauccauggcuuua

SEQ ID NO: 1022687 - RNA, 19 nt, Homo sapiens
  misc_RNA (1)...(19): siRNA sense strand
uagcgaaccuguuggucau

SEQ ID NO: 1022688 - RNA, 19 nt, Homo sapiens
  misc_RNA (1)...(19): siRNA sense strand
acacaggcuggcuggauua

SEQ ID NO: 1022689 - RNA, 19 nt, Homo sapiens
  misc_RNA (1)...(19): siRNA sense strand
uacacaggcuggcuggauu

SEQ ID NO: 1022690 - RNA, 19 nt, Homo sapiens
  misc_RNA (1)...(19): siRNA sense strand
ggaccucauugccuuucug

SEQ ID NO: 1022691 - RNA, 19 nt, Homo sapiens
  misc_RNA (1)...(19): siRNA sense strand
ggaugauguucccucugaa

SEQ ID NO: 1022692 - RNA, 19 nt, Homo sapiens
  misc_RNA (1)...(19): siRNA sense strand
gaaauaugagagacaaacu

SEQ ID NO: 1022693 - RNA, 19 nt, Homo sapiens
  misc_RNA (1)...(19): siRNA sense strand
caggcuggcuggauuacug

SEQ ID NO: 1022694 - RNA, 19 nt, Homo sapiens
  misc_RNA (1)...(19): siRNA sense strand
uggcccagcugacaacaug

SEQ ID NO: 1022695 - RNA, 19 nt, Homo sapiens
  misc_RNA (1)...(19): siRNA sense strand
caacaucauuagcauucag

SEQ ID NO: 1022696 - RNA, 19 nt, Homo sapiens
  misc_RNA (1)...(19): siRNA sense strand
ccucauugccuuucugaau

SEQ ID NO: 1022697 - RNA, 19 nt, Homo sapiens
  misc_RNA (1)...(19): siRNA sense strand
gggacacauuucuauaucu

SEQ ID NO: 1022698 - RNA, 19 nt, Homo sapiens
  misc_RNA (1)...(19): siRNA sense strand
gcauuuacuggcuuuccua

SEQ ID NO: 1022699 - RNA, 19 nt, Homo sapiens
  misc_RNA (1)...(19): siRNA sense strand
gaaccucagauccagacuu

SEQ ID NO: 1022700 - RNA, 19 nt, Homo sapiens
  misc_RNA (1)...(19): siRNA sense strand
gaaauucaucuaagaaccu

SEQ ID NO: 1022701 - RNA, 19 nt, Homo sapiens
  misc_RNA (1)...(19): siRNA sense strand
gaccaggaccuuacaucug

SEQ ID NO: 1022702 - RNA, 19 nt, Homo sapiens
  misc_RNA (1)...(19): siRNA sense strand
accaggaccuuacaucugu

SEQ ID NO: 1022703 - RNA, 19 nt, Homo sapiens
  misc_RNA (1)...(19): siRNA sense strand
ggggagcccucaacaaaau

SEQ ID NO: 1022704 - RNA, 19 nt, Homo sapiens
  misc_RNA (1)...(19): siRNA sense strand
aaccucagauccagacuuc

SEQ ID NO: 1022705 - RNA, 19 nt, Homo sapiens
  misc_RNA (1)...(19): siRNA sense strand
cucaauagcacuaguacuu

SEQ ID NO: 1022706 - RNA, 19 nt, Homo sapiens
  misc_RNA (1)...(19): siRNA sense strand
gccaagauuccugcuguuu

SEQ ID NO: 1022707 - RNA, 19 nt, Homo sapiens
  misc_RNA (1)...(19): siRNA sense strand
guuguggagcgaaauauga

SEQ ID NO: 1022708 - RNA, 19 nt, Homo sapiens
  misc_RNA (1)...(19): siRNA sense strand
ugaugcaccuauaucugaa

SEQ ID NO: 1022709 - RNA, 19 nt, Homo sapiens
  misc_RNA (1)...(19): siRNA sense strand
uaccagcuaugacuaugau

SEQ ID NO: 1022710 - RNA, 19 nt, Homo sapiens
  misc_RNA (1)...(19): siRNA sense strand
caacuuuggauauuggaau

SEQ ID NO: 1022711 - RNA, 19 nt, Homo sapiens
  misc_RNA (1)...(19): siRNA sense strand
gagaaugaauaugguagcu

SEQ ID NO: 1022712 - RNA, 19 nt, Homo sapiens
  misc_RNA (1)...(19): siRNA sense strand
auccauggcuuuaucacaa

SEQ ID NO: 1022713 - RNA, 19 nt, Homo sapiens
  misc_RNA (1)...(19): siRNA sense strand
gguggagaaugaauauggu

SEQ ID NO: 1022714 - RNA, 19 nt, Homo sapiens
  misc_RNA (1)...(19): siRNA sense strand
gcuggaacuagaagaugua

SEQ ID NO: 1022715 - RNA, 19 nt, Homo sapiens
  misc_RNA (1)...(19): siRNA sense strand
ggaucaauggguuuaacuu

SEQ ID NO: 1022716 - RNA, 19 nt, Homo sapiens
  misc_RNA (1)...(19): siRNA sense strand
gguguuguggagcgaaaua

SEQ ID NO: 1022717 - RNA, 19 nt, Homo sapiens
  misc_RNA (1)...(19): siRNA sense strand
cuagagaacaugcucaagu

SEQ ID NO: 1022718 - RNA, 19 nt, Homo sapiens
  misc_RNA (1)...(19): siRNA sense strand
acaggacacauaucaauuc

SEQ ID NO: 1022719 - RNA, 19 nt, Homo sapiens
  misc_RNA (1)...(19): siRNA sense strand
ccucugaaccaauggaguu

SEQ ID NO: 1022720 - RNA, 19 nt, Homo sapiens
  misc_RNA (1)...(19): siRNA sense strand
gauauauccauggcuuuau

SEQ ID NO: 1022721 - RNA, 19 nt, Homo sapiens
  misc_RNA (1)...(19): siRNA sense strand
cacaggacacauaucaauu

SEQ ID NO: 1022722 - RNA, 19 nt, Homo sapiens
  misc_RNA (1)...(19): siRNA sense strand
ggaacuagaagauguaccu

SEQ ID NO: 1022723 - RNA, 19 nt, Homo sapiens
  misc_RNA (1)...(19): siRNA sense strand
ccaagauuccugcuguuuc

SEQ ID NO: 1022724 - RNA, 19 nt, Homo sapiens
  misc_RNA (1)...(19): siRNA sense strand
aagcuguccugccuucguu

SEQ ID NO: 1022725 - RNA, 19 nt, Homo sapiens
  misc_RNA (1)...(19): siRNA sense strand
gagcgaaauaugagagaca

SEQ ID NO: 1022726 - RNA, 19 nt, Homo sapiens
  misc_RNA (1)...(19): siRNA sense strand
ucagguggagaaugaauau

SEQ ID NO: 1022727 - RNA, 19 nt, Homo sapiens
  misc_RNA (1)...(19): siRNA sense strand
ucaacgccauacaguuuua

SEQ ID NO: 1022728 - RNA, 19 nt, Homo sapiens
  misc_RNA (1)...(19): siRNA sense strand
caccacagaugggccugaa

SEQ ID NO: 1022729 - RNA, 19 nt, Homo sapiens
  misc_RNA (1)...(19): siRNA sense strand
uaaccaaaggacuagagaa

SEQ ID NO: 1022730 - RNA, 19 nt, Homo sapiens
  misc_RNA (1)...(19): siRNA sense strand
guaaccaaaggacuagaga

SEQ ID NO: 1022731 - RNA, 19 nt, Homo sapiens
  misc_RNA (1)...(19): siRNA sense strand
cuauaccacuguagauuuu

SEQ ID NO: 1022732 - RNA, 19 nt, Homo sapiens
  misc_RNA (1)...(19): siRNA sense strand
gggcaacaucauuagcauu

SEQ ID NO: 1022733 - RNA, 19 nt, Homo sapiens
  misc_RNA (1)...(19): siRNA sense strand
gaaccuguuggucauacug

SEQ ID NO: 1022734 - RNA, 19 nt, Homo sapiens
  misc_RNA (1)...(19): siRNA sense strand
ugacuucaagggccuguug

SEQ ID NO: 1022735 - RNA, 19 nt, Homo sapiens
  misc_RNA (1)...(19): siRNA sense strand
caaaggacuagagaacaug

SEQ ID NO: 1022736 - RNA, 19 nt, Homo sapiens
  misc_RNA (1)...(19): siRNA sense strand
ggucguucguaguggauag

SEQ ID NO: 1022737 - RNA, 19 nt, Homo sapiens
  misc_RNA (1)...(19): siRNA sense strand
ggccacaacagacccucua

SEQ ID NO: 1022738 - RNA, 19 nt, Homo sapiens
  misc_RNA (1)...(19): siRNA sense strand
aggcucagcuuugggucua

SEQ ID NO: 1022739 - RNA, 19 nt, Homo sapiens
  misc_RNA (1)...(19): siRNA sense strand
ugaccgugccuaugugaug

SEQ ID NO: 1022740 - RNA, 19 nt, Homo sapiens
  misc_RNA (1)...(19): siRNA sense strand
ccaugaccgugccuaugug

SEQ ID NO: 1022741 - RNA, 19 nt, Homo sapiens
  misc_RNA (1)...(19): siRNA sense strand
gagcggccucaacgccaua

SEQ ID NO: 1022742 - RNA, 19 nt, Homo sapiens
  misc_RNA (1)...(19): siRNA sense strand
gcgaaccuguuggucauac

SEQ ID NO: 1022743 - RNA, 19 nt, Homo sapiens
  misc_RNA (1)...(19): siRNA sense strand
gagccugugacuucagcua

SEQ ID NO: 1022744 - RNA, 19 nt, Homo sapiens
  misc_RNA (1)...(19): siRNA sense strand
cgcaguagcuaccaagaua

SEQ ID NO: 1022745 - RNA, 19 nt, Homo sapiens
  misc_RNA (1)...(19): siRNA sense strand
guaccuggcuggaaaucaa

SEQ ID NO: 1022746 - RNA, 19 nt, Homo sapiens
  misc_RNA (1)...(19): siRNA sense strand
cagagcagcuggucuuuca

SEQ ID NO: 1022747 - RNA, 19 nt, Homo sapiens
  misc_RNA (1)...(19): siRNA sense strand
gcugauaucuaccucaaca

SEQ ID NO: 1022748 - RNA, 19 nt, Homo sapiens
  misc_RNA (1)...(19): siRNA sense strand
guucauaccugagccauuc

SEQ ID NO: 1022749 - RNA, 19 nt, Homo sapiens
  misc_RNA (1)...(19): siRNA sense strand
gcaaggcugucaacuacuc

SEQ ID NO: 1022750 - RNA, 19 nt, Homo sapiens
  misc_RNA (1)...(19): siRNA sense strand
gauaucuaccucaacauaa

SEQ ID NO: 1022751 - RNA, 19 nt, Homo sapiens
  misc_RNA (1)...(19): siRNA sense strand
cccaagagcuggagaagca

SEQ ID NO: 1022752 - RNA, 19 nt, Homo sapiens
  misc_RNA (1)...(19): siRNA sense strand
ccaacaaccuucuccuaca

SEQ ID NO: 1022753 - RNA, 19 nt, Homo sapiens
  misc_RNA (1)...(19): siRNA sense strand
ccagggcaguggcaagauu

SEQ ID NO: 1022754 - RNA, 19 nt, Homo sapiens
  misc_RNA (1)...(19): siRNA sense strand
ucagagcuaugaauaugug

SEQ ID NO: 1022755 - RNA, 19 nt, Homo sapiens
  misc_RNA (1)...(19): siRNA sense strand
ugauaucuaccucaacaua

SEQ ID NO: 1022756 - RNA, 19 nt, Homo sapiens
  misc_RNA (1)...(19): siRNA sense strand
gcucuuggcgggaggauga

SEQ ID NO: 1022757 - RNA, 19 nt, Homo sapiens
  misc_RNA (1)...(19): siRNA sense strand
ugaugaggcugauaucuac

SEQ ID NO: 1022758 - RNA, 19 nt, Homo sapiens
  misc_RNA (1)...(19): siRNA sense strand
gagcagcuggucuuucaga

SEQ ID NO: 1022759 - RNA, 19 nt, Homo sapiens
  misc_RNA (1)...(19): siRNA sense strand
uauguggacugccgaggaa

SEQ ID NO: 1022760 - RNA, 19 nt, Homo sapiens
  misc_RNA (1)...(19): siRNA sense strand
gaugccagcuucgugacuu

SEQ ID NO: 1022761 - RNA, 19 nt, Homo sapiens
  misc_RNA (1)...(19): siRNA sense strand
caacaaccuucuccuacac

SEQ ID NO: 1022762 - RNA, 19 nt, Homo sapiens
  misc_RNA (1)...(19): siRNA sense strand
gcaguugguggcucucauu

SEQ ID NO: 1022763 - RNA, 19 nt, Homo sapiens
  misc_RNA (1)...(19): siRNA sense strand
uaccucaacauaacgaaua

SEQ ID NO: 1022764 - RNA, 19 nt, Homo sapiens
  misc_RNA (1)...(19): siRNA sense strand
caaaguccaccaugugcuu

SEQ ID NO: 1022765 - RNA, 19 nt, Homo sapiens
  misc_RNA (1)...(19): siRNA sense strand
cuaccaagauacgggauga

SEQ ID NO: 1022766 - RNA, 19 nt, Homo sapiens
  misc_RNA (1)...(19): siRNA sense strand
guuccugugugccuuguga

SEQ ID NO: 1022767 - RNA, 19 nt, Homo sapiens
  misc_RNA (1)...(19): siRNA sense strand
ggaaaucaaaguccaccau

SEQ ID NO: 1022768 - RNA, 19 nt, Homo sapiens
  misc_RNA (1)...(19): siRNA sense strand
aaaucaaaguccaccaugu

SEQ ID NO: 1022769 - RNA, 19 nt, Homo sapiens
  misc_RNA (1)...(19): siRNA sense strand
ucuuaaacaucuccaaugg

SEQ ID NO: 1022770 - RNA, 19 nt, Homo sapiens
  misc_RNA (1)...(19): siRNA sense strand
uugaugaggcugauaucua

SEQ ID NO: 1022771 - RNA, 19 nt, Homo sapiens
  misc_RNA (1)...(19): siRNA sense strand
gcacccugaccuguucaua

SEQ ID NO: 1022772 - RNA, 19 nt, Homo sapiens
  misc_RNA (1)...(19): siRNA sense strand
aaucaaaguccaccaugug

SEQ ID NO: 1022773 - RNA, 19 nt, Homo sapiens
  misc_RNA (1)...(19): siRNA sense strand
gaugagaacaagucaaucc

SEQ ID NO: 1022774 - RNA, 19 nt, Homo sapiens
  misc_RNA (1)...(19): siRNA sense strand
cuggugaccuccuccuuca

SEQ ID NO: 1022775 - RNA, 19 nt, Homo sapiens
  misc_RNA (1)...(19): siRNA sense strand
agucaauccuguccuccaa

SEQ ID NO: 1022776 - RNA, 19 nt, Homo sapiens
  misc_RNA (1)...(19): siRNA sense strand
caucuccaauggcaacuac

SEQ ID NO: 1022777 - RNA, 19 nt, Homo sapiens
  misc_RNA (1)...(19): siRNA sense strand
aggcugauaucuaccucaa

SEQ ID NO: 1022778 - RNA, 19 nt, Homo sapiens
  misc_RNA (1)...(19): siRNA sense strand
gggaggaugagaacaaguc

SEQ ID NO: 1022779 - RNA, 19 nt, Homo sapiens
  misc_RNA (1)...(19): siRNA sense strand
gauacgggaugaaaacaca

SEQ ID NO: 1022780 - RNA, 19 nt, Homo sapiens
  misc_RNA (1)...(19): siRNA sense strand
aaccuucuccuacacauug

SEQ ID NO: 1022781 - RNA, 19 nt, Homo sapiens
  misc_RNA (1)...(19): siRNA sense strand
ggcaacuacuaccccauua

SEQ ID NO: 1022782 - RNA, 19 nt, Homo sapiens
  misc_RNA (1)...(19): siRNA sense strand
gcgggaggaugagaacaag

SEQ ID NO: 1022783 - RNA, 19 nt, Homo sapiens
  misc_RNA (1)...(19): siRNA sense strand
caaccuucuccuacacauu

SEQ ID NO: 1022784 - RNA, 19 nt, Homo sapiens
  misc_RNA (1)...(19): siRNA sense strand
ucaauccuguccuccaaac

SEQ ID NO: 1022785 - RNA, 19 nt, Homo sapiens
  misc_RNA (1)...(19): siRNA sense strand
ggugaccuccuccuucauc

SEQ ID NO: 1022786 - RNA, 19 nt, Homo sapiens
  misc_RNA (1)...(19): siRNA sense strand
ggaggaugagaacaaguca

SEQ ID NO: 1022787 - RNA, 19 nt, Homo sapiens
  misc_RNA (1)...(19): siRNA sense strand
acagauguuuuacgcagua

SEQ ID NO: 1022788 - RNA, 19 nt, Homo sapiens
  misc_RNA (1)...(19): siRNA sense strand
ccaagcacacgaagcucuu

SEQ ID NO: 1022789 - RNA, 19 nt, Homo sapiens
  misc_RNA (1)...(19): siRNA sense strand
ggcgggaggaugagaacaa

SEQ ID NO: 1022790 - RNA, 19 nt, Homo sapiens
  misc_RNA (1)...(19): siRNA sense strand
ggaugaaaacacauacaaa

SEQ ID NO: 1022791 - RNA, 19 nt, Homo sapiens
  misc_RNA (1)...(19): siRNA sense strand
gagcacgccuuucggauua

SEQ ID NO: 1022792 - RNA, 19 nt, Homo sapiens
  misc_RNA (1)...(19): siRNA sense strand
ggacagauuucucagcuuu

SEQ ID NO: 1022793 - RNA, 19 nt, Homo sapiens
  misc_RNA (1)...(19): siRNA sense strand
aaacauaacugccauagug

SEQ ID NO: 1022794 - RNA, 19 nt, Homo sapiens
  misc_RNA (1)...(19): siRNA sense strand
gagcauaucagaaacauaa

SEQ ID NO: 1022795 - RNA, 19 nt, Homo sapiens
  misc_RNA (1)...(19): siRNA sense strand
gaacaagaacggauagaaa

SEQ ID NO: 1022796 - RNA, 19 nt, Homo sapiens
  misc_RNA (1)...(19): siRNA sense strand
gaaaugaaagcagaaguua

SEQ ID NO: 1022797 - RNA, 19 nt, Homo sapiens
  misc_RNA (1)...(19): siRNA sense strand
gcaccauacucaucuguaa

SEQ ID NO: 1022798 - RNA, 19 nt, Homo sapiens
  misc_RNA (1)...(19): siRNA sense strand
gaacuaauucugccuuaaa

SEQ ID NO: 1022799 - RNA, 19 nt, Homo sapiens
  misc_RNA (1)...(19): siRNA sense strand
gaacaucaaggaaaugaaa

SEQ ID NO: 1022800 - RNA, 19 nt, Homo sapiens
  misc_RNA (1)...(19): siRNA sense strand
gagcagagcaccaaacuga

SEQ ID NO: 1022801 - RNA, 19 nt, Homo sapiens
  misc_RNA (1)...(19): siRNA sense strand
cagcuuuccuugauuguua

SEQ ID NO: 1022802 - RNA, 19 nt, Homo sapiens
  misc_RNA (1)...(19): siRNA sense strand
ggaacucaguaaccagaua

SEQ ID NO: 1022803 - RNA, 19 nt, Homo sapiens
  misc_RNA (1)...(19): siRNA sense strand
gaacagaguggacuuguca

SEQ ID NO: 1022804 - RNA, 19 nt, Homo sapiens
  misc_RNA (1)...(19): siRNA sense strand
gcaccaaacugaagauguc

SEQ ID NO: 1022805 - RNA, 19 nt, Homo sapiens
  misc_RNA (1)...(19): siRNA sense strand
aaagggauauggagaagaa

SEQ ID NO: 1022806 - RNA, 19 nt, Homo sapiens
  misc_RNA (1)...(19): siRNA sense strand
cagcauagcuagacuuucu

SEQ ID NO: 1022807 - RNA, 19 nt, Homo sapiens
  misc_RNA (1)...(19): siRNA sense strand
ggaaaugaaagcagaaguu

SEQ ID NO: 1022808 - RNA, 19 nt, Homo sapiens
  misc_RNA (1)...(19): siRNA sense strand
ggaacuaauucugccuuaa

SEQ ID NO: 1022809 - RNA, 19 nt, Homo sapiens
  misc_RNA (1)...(19): siRNA sense strand
agaguggacuugucaauau

SEQ ID NO: 1022810 - RNA, 19 nt, Homo sapiens
  misc_RNA (1)...(19): siRNA sense strand
aaacuuaucuuggaaacga

SEQ ID NO: 1022811 - RNA, 19 nt, Homo sapiens
  misc_RNA (1)...(19): siRNA sense strand
ucaccaagcuggaguuaca

SEQ ID NO: 1022812 - RNA, 19 nt, Homo sapiens
  misc_RNA (1)...(19): siRNA sense strand
gaggaagaguggcaagaug

SEQ ID NO: 1022813 - RNA, 19 nt, Homo sapiens
  misc_RNA (1)...(19): siRNA sense strand
ggacaacauuagcuaugga

SEQ ID NO: 1022814 - RNA, 19 nt, Homo sapiens
  misc_RNA (1)...(19): siRNA sense strand
gaaguuaaugcuggguuua

SEQ ID NO: 1022815 - RNA, 19 nt, Homo sapiens
  misc_RNA (1)...(19): siRNA sense strand
gaaagcauaggauccauca

SEQ ID NO: 1022816 - RNA, 19 nt, Homo sapiens
  misc_RNA (1)...(19): siRNA sense strand
gaacucaguaaccagauau

SEQ ID NO: 1022817 - RNA, 19 nt, Homo sapiens
  misc_RNA (1)...(19): siRNA sense strand
agaagaagcucagccagau

SEQ ID NO: 1022818 - RNA, 19 nt, Homo sapiens
  misc_RNA (1)...(19): siRNA sense strand
gcaagaagaggagaagaug

SEQ ID NO: 1022819 - RNA, 19 nt, Homo sapiens
  misc_RNA (1)...(19): siRNA sense strand
aacauuagcuauggaacua

SEQ ID NO: 1022820 - RNA, 19 nt, Homo sapiens
  misc_RNA (1)...(19): siRNA sense strand
ggaacaagaacggauagaa

SEQ ID NO: 1022821 - RNA, 19 nt, Homo sapiens
  misc_RNA (1)...(19): siRNA sense strand
aaauccagcugaugcagaa

SEQ ID NO: 1022822 - RNA, 19 nt, Homo sapiens
  misc_RNA (1)...(19): siRNA sense strand
gcacgccuuucggauuaaa

SEQ ID NO: 1022823 - RNA, 19 nt, Homo sapiens
  misc_RNA (1)...(19): siRNA sense strand
agaaguuaaugcuggguuu

SEQ ID NO: 1022824 - RNA, 19 nt, Homo sapiens
  misc_RNA (1)...(19): siRNA sense strand
gaaccagaacaucaaggaa

SEQ ID NO: 1022825 - RNA, 19 nt, Homo sapiens
  misc_RNA (1)...(19): siRNA sense strand
aagcuggaguuacagauga

SEQ ID NO: 1022826 - RNA, 19 nt, Homo sapiens
  misc_RNA (1)...(19): siRNA sense strand
uggaggagcauaucagaaa

SEQ ID NO: 1022827 - RNA, 19 nt, Homo sapiens
  misc_RNA (1)...(19): siRNA sense strand
uaacugccauagugaagca

SEQ ID NO: 1022828 - RNA, 19 nt, Homo sapiens
  misc_RNA (1)...(19): siRNA sense strand
cagaguggacuugucaaua

SEQ ID NO: 1022829 - RNA, 19 nt, Homo sapiens
  misc_RNA (1)...(19): siRNA sense strand
uaaucgggauaucgaggua

SEQ ID NO: 1022830 - RNA, 19 nt, Homo sapiens
  misc_RNA (1)...(19): siRNA sense strand
uggaacuaauucugccuua

SEQ ID NO: 1022831 - RNA, 19 nt, Homo sapiens
  misc_RNA (1)...(19): siRNA sense strand
gaagaguggcaagauguga

SEQ ID NO: 1022832 - RNA, 19 nt, Homo sapiens
  misc_RNA (1)...(19): siRNA sense strand
ggauuaaagaugacauugu

SEQ ID NO: 1022833 - RNA, 19 nt, Homo sapiens
  misc_RNA (1)...(19): siRNA sense strand
gcagagcaccaaacugaag

SEQ ID NO: 1022834 - RNA, 19 nt, Homo sapiens
  misc_RNA (1)...(19): siRNA sense strand
gaguggacuugucaauauc

SEQ ID NO: 1022835 - RNA, 19 nt, Homo sapiens
  misc_RNA (1)...(19): siRNA sense strand
gggaccagcuacagaagca

SEQ ID NO: 1022836 - RNA, 19 nt, Homo sapiens
  misc_RNA (1)...(19): siRNA sense strand
uuacagccgucuaugaaag

SEQ ID NO: 1022837 - RNA, 19 nt, Homo sapiens
  misc_RNA (1)...(19): siRNA sense strand
gauccucugccaugagaaa

SEQ ID NO: 1022838 - RNA, 19 nt, Homo sapiens
  misc_RNA (1)...(19): siRNA sense strand
gaagaagcucagccagaug

SEQ ID NO: 1022839 - RNA, 19 nt, Homo sapiens
  misc_RNA (1)...(19): siRNA sense strand
ugucaacaguuugcagaaa

SEQ ID NO: 1022840 - RNA, 19 nt, Homo sapiens
  misc_RNA (1)...(19): siRNA sense strand
ggaggagcauaucagaaac

SEQ ID NO: 1022841 - RNA, 19 nt, Homo sapiens
  misc_RNA (1)...(19): siRNA sense strand
guuuacagccgucuaugaa

SEQ ID NO: 1022842 - RNA, 19 nt, Homo sapiens
  misc_RNA (1)...(19): siRNA sense strand
gggacaacauuagcuaugg

SEQ ID NO: 1022843 - RNA, 19 nt, Homo sapiens
  misc_RNA (1)...(19): siRNA sense strand
uaaagguacaguugaggaa

SEQ ID NO: 1022844 - RNA, 19 nt, Homo sapiens
  misc_RNA (1)...(19): siRNA sense strand
ugaaagggauauggagaag

SEQ ID NO: 1022845 - RNA, 19 nt, Homo sapiens
  misc_RNA (1)...(19): siRNA sense strand
gugaaagggauauggagaa

SEQ ID NO: 1022846 - RNA, 19 nt, Homo sapiens
  misc_RNA (1)...(19): siRNA sense strand
ggaagaguggcaagaugug

SEQ ID NO: 1022847 - RNA, 19 nt, Homo sapiens
  misc_RNA (1)...(19): siRNA sense strand
gaaacauaacugccauagu

SEQ ID NO: 1022848 - RNA, 19 nt, Homo sapiens
  misc_RNA (1)...(19): siRNA sense strand
cagaacaucaaggaaauga

SEQ ID NO: 1022849 - RNA, 19 nt, Homo sapiens
  misc_RNA (1)...(19): siRNA sense strand
gaagaugcacgggcgaauc

SEQ ID NO: 1022850 - RNA, 19 nt, Homo sapiens
  misc_RNA (1)...(19): siRNA sense strand
caucuaaggcgagugagaa

SEQ ID NO: 1022851 - RNA, 19 nt, Homo sapiens
  misc_RNA (1)...(19): siRNA sense strand
gccauagugaagcaacuua

SEQ ID NO: 1022852 - RNA, 19 nt, Homo sapiens
  misc_RNA (1)...(19): siRNA sense strand
gagaacaaggcaagaagag

SEQ ID NO: 1022853 - RNA, 19 nt, Homo sapiens
  misc_RNA (1)...(19): siRNA sense strand
gaaagggauauggagaaga

SEQ ID NO: 1022854 - RNA, 19 nt, Homo sapiens
  misc_RNA (1)...(19): siRNA sense strand
gcagaaaaugcaaaacaaa

SEQ ID NO: 1022855 - RNA, 19 nt, Homo sapiens
  misc_RNA (1)...(19): siRNA sense strand
gaccagcuacagaagcaaa

SEQ ID NO: 1022856 - RNA, 19 nt, Homo sapiens
  misc_RNA (1)...(19): siRNA sense strand
ccucguagagcacgccuuu

SEQ ID NO: 1022857 - RNA, 19 nt, Homo sapiens
  misc_RNA (1)...(19): siRNA sense strand
aaccagaacaucaaggaaa

SEQ ID NO: 1022858 - RNA, 19 nt, Homo sapiens
  misc_RNA (1)...(19): siRNA sense strand
aguuacagaugaaccagaa

SEQ ID NO: 1022859 - RNA, 19 nt, Homo sapiens
  misc_RNA (1)...(19): siRNA sense strand
acaggaacaagaacggaua

SEQ ID NO: 1022860 - RNA, 19 nt, Homo sapiens
  misc_RNA (1)...(19): siRNA sense strand
aaacugaagaugucucaca

SEQ ID NO: 1022861 - RNA, 19 nt, Homo sapiens
  misc_RNA (1)...(19): siRNA sense strand
gcaacuuaaucgggauauc

SEQ ID NO: 1022862 - RNA, 19 nt, Homo sapiens
  misc_RNA (1)...(19): siRNA sense strand
gguuuacagccgucuauga

SEQ ID NO: 1022863 - RNA, 19 nt, Homo sapiens
  misc_RNA (1)...(19): siRNA sense strand
gaaacgaaaaucaaagaug

SEQ ID NO: 1022864 - RNA, 19 nt, Homo sapiens
  misc_RNA (1)...(19): siRNA sense strand
gacaacauuagcuauggaa

SEQ ID NO: 1022865 - RNA, 19 nt, Homo sapiens
  misc_RNA (1)...(19): siRNA sense strand
gaagcaaauccagcugaug

SEQ ID NO: 1022866 - RNA, 19 nt, Homo sapiens
  misc_RNA (1)...(19): siRNA sense strand
agaagcaaauccagcugau

SEQ ID NO: 1022867 - RNA, 19 nt, Homo sapiens
  misc_RNA (1)...(19): siRNA sense strand
ggacagggaccagcuacag

SEQ ID NO: 1022868 - RNA, 19 nt, Homo sapiens
  misc_RNA (1)...(19): siRNA sense strand
ggcaagaagaggagaagau

SEQ ID NO: 1022869 - RNA, 19 nt, Homo sapiens
  misc_RNA (1)...(19): siRNA sense strand
uaucagagcagagcaccaa

SEQ ID NO: 1022870 - RNA, 19 nt, Homo sapiens
  misc_RNA (1)...(19): siRNA sense strand
gaugcagagggacagauuu

SEQ ID NO: 1022871 - RNA, 19 nt, Homo sapiens
  misc_RNA (1)...(19): siRNA sense strand
gccagcauagcuagacuuu

SEQ ID NO: 1022872 - RNA, 19 nt, Homo sapiens
  misc_RNA (1)...(19): siRNA sense strand
ccauagugaagcaacuuaa

SEQ ID NO: 1022873 - RNA, 19 nt, Homo sapiens
  misc_RNA (1)...(19): siRNA sense strand
gacagggaccagcuacaga

SEQ ID NO: 1022874 - RNA, 19 nt, Homo sapiens
  misc_RNA (1)...(19): siRNA sense strand
caagcuggaguuacagaug

SEQ ID NO: 1022875 - RNA, 19 nt, Homo sapiens
  misc_RNA (1)...(19): siRNA sense strand
ucagagaacaaggcaagaa

SEQ ID NO: 1022876 - RNA, 19 nt, Homo sapiens
  misc_RNA (1)...(19): siRNA sense strand
aaauugaucagcuuuccuu

SEQ ID NO: 1022877 - RNA, 19 nt, Homo sapiens
  misc_RNA (1)...(19): siRNA sense strand
ggacacuaaauuuaaaggu

SEQ ID NO: 1022878 - RNA, 19 nt, Homo sapiens
  misc_RNA (1)...(19): siRNA sense strand
cagagggacagauuucuca

SEQ ID NO: 1022879 - RNA, 19 nt, Homo sapiens
  misc_RNA (1)...(19): siRNA sense strand
gcacuugaacaaagaacag

SEQ ID NO: 1022880 - RNA, 19 nt, Homo sapiens
  misc_RNA (1)...(19): siRNA sense strand
caacauuagcuauggaacu

SEQ ID NO: 1022881 - RNA, 19 nt, Homo sapiens
  misc_RNA (1)...(19): siRNA sense strand
gcagagggacagauuucuc

SEQ ID NO: 1022882 - RNA, 19 nt, Homo sapiens
  misc_RNA (1)...(19): siRNA sense strand
caaggaaaugaaagcagaa

SEQ ID NO: 1022883 - RNA, 19 nt, Homo sapiens
  misc_RNA (1)...(19): siRNA sense strand
accagaacaucaaggaaau

SEQ ID NO: 1022884 - RNA, 19 nt, Homo sapiens
  misc_RNA (1)...(19): siRNA sense strand
acucaguaaccagauauua

SEQ ID NO: 1022885 - RNA, 19 nt, Homo sapiens
  misc_RNA (1)...(19): siRNA sense strand
gggacagauuucucagcuu

SEQ ID NO: 1022886 - RNA, 19 nt, Homo sapiens
  misc_RNA (1)...(19): siRNA sense strand
cuccagcacuugaacaaag

SEQ ID NO: 1022887 - RNA, 19 nt, Homo sapiens
  misc_RNA (1)...(19): siRNA sense strand
acagggaccagcuacagaa

SEQ ID NO: 1022888 - RNA, 19 nt, Homo sapiens
  misc_RNA (1)...(19): siRNA sense strand
ggagcauaucagaaacaua

SEQ ID NO: 1022889 - RNA, 19 nt, Homo sapiens
  misc_RNA (1)...(19): siRNA sense strand
ccagugaaagggauaugga

SEQ ID NO: 1022890 - RNA, 19 nt, Homo sapiens
  misc_RNA (1)...(19): siRNA sense strand
gaggagcauaucagaaaca

SEQ ID NO: 1022891 - RNA, 19 nt, Homo sapiens
  misc_RNA (1)...(19): siRNA sense strand
ucaaguacgugcuaaugaa

SEQ ID NO: 1022892 - RNA, 19 nt, Homo sapiens
  misc_RNA (1)...(19): siRNA sense strand
ccaaggauguggacagaga

SEQ ID NO: 1022893 - RNA, 19 nt, Homo sapiens
  misc_RNA (1)...(19): siRNA sense strand
ggacaggaccaucgacuau

SEQ ID NO: 1022894 - RNA, 19 nt, Homo sapiens
  misc_RNA (1)...(19): siRNA sense strand
caacaagaaaucucacuga

SEQ ID NO: 1022895 - RNA, 19 nt, Homo sapiens
  misc_RNA (1)...(19): siRNA sense strand
gaaggaggccgacaaggau

SEQ ID NO: 1022896 - RNA, 19 nt, Homo sapiens
  misc_RNA (1)...(19): siRNA sense strand
ggaacacacucaaguacgu

SEQ ID NO: 1022897 - RNA, 19 nt, Homo sapiens
  misc_RNA (1)...(19): siRNA sense strand
ccuucaagcugauccagua

SEQ ID NO: 1022898 - RNA, 19 nt, Homo sapiens
  misc_RNA (1)...(19): siRNA sense strand
caacaaaggguucuucaac

SEQ ID NO: 1022899 - RNA, 19 nt, Homo sapiens
  misc_RNA (1)...(19): siRNA sense strand
ggaguacaagggagucuuu

SEQ ID NO: 1022900 - RNA, 19 nt, Homo sapiens
  misc_RNA (1)...(19): siRNA sense strand
acaggaccaucgacuauga

SEQ ID NO: 1022901 - RNA, 19 nt, Homo sapiens
  misc_RNA (1)...(19): siRNA sense strand
caucgacuaugaggaguuu

SEQ ID NO: 1022902 - RNA, 19 nt, Homo sapiens
  misc_RNA (1)...(19): siRNA sense strand
caagggagucuuugagaug

SEQ ID NO: 1022903 - RNA, 19 nt, Homo sapiens
  misc_RNA (1)...(19): siRNA sense strand
cugagcagaucaaggagua

SEQ ID NO: 1022904 - RNA, 19 nt, Homo sapiens
  misc_RNA (1)...(19): siRNA sense strand
acaaaggguucuucaacug

SEQ ID NO: 1022905 - RNA, 19 nt, Homo sapiens
  misc_RNA (1)...(19): siRNA sense strand
cggagcagaugaugaagga

SEQ ID NO: 1022906 - RNA, 19 nt, Homo sapiens
  misc_RNA (1)...(19): siRNA sense strand
ugaaggaggccgacaagga

SEQ ID NO: 1022907 - RNA, 19 nt, Homo sapiens
  misc_RNA (1)...(19): siRNA sense strand
ggccaaggauguggacaga

SEQ ID NO: 1022908 - RNA, 19 nt, Homo sapiens
  misc_RNA (1)...(19): siRNA sense strand
ggcaagggcuacauugacu

SEQ ID NO: 1022909 - RNA, 19 nt, Homo sapiens
  misc_RNA (1)...(19): siRNA sense strand
acaagggagucuuugagau

SEQ ID NO: 1022910 - RNA, 19 nt, Homo sapiens
  misc_RNA (1)...(19): siRNA sense strand
ucaugagccugcuggguau

SEQ ID NO: 1022911 - RNA, 19 nt, Homo sapiens
  misc_RNA (1)...(19): siRNA sense strand
cggcugagcagaucaagga

SEQ ID NO: 1022912 - RNA, 19 nt, Homo sapiens
  misc_RNA (1)...(19): siRNA sense strand
gaugguuuccuggcacuaa

SEQ ID NO: 1022913 - RNA, 19 nt, Homo sapiens
  misc_RNA (1)...(19): siRNA sense strand
guacaagggagucuuugag

SEQ ID NO: 1022914 - RNA, 19 nt, Homo sapiens
  misc_RNA (1)...(19): siRNA sense strand
gggacaggaccaucgacua

SEQ ID NO: 1022915 - RNA, 19 nt, Homo sapiens
  misc_RNA (1)...(19): siRNA sense strand
gggagucuuugagauguuc

SEQ ID NO: 1022916 - RNA, 19 nt, Homo sapiens
  misc_RNA (1)...(19): siRNA sense strand
acacucaaguacgugcuaa

SEQ ID NO: 1022917 - RNA, 19 nt, Homo sapiens
  misc_RNA (1)...(19): siRNA sense strand
gacaacaaaggguucuuca

SEQ ID NO: 1022918 - RNA, 19 nt, Homo sapiens
  misc_RNA (1)...(19): siRNA sense strand
gaugaaggaggccgacaag

SEQ ID NO: 1022919 - RNA, 19 nt, Homo sapiens
  misc_RNA (1)...(19): siRNA sense strand
gagggcaagggcuacauug

SEQ ID NO: 1022920 - RNA, 19 nt, Homo sapiens
  misc_RNA (1)...(19): siRNA sense strand
aacaaaggguucuucaacu

SEQ ID NO: 1022921 - RNA, 19 nt, Homo sapiens
  misc_RNA (1)...(19): siRNA sense strand
aggcggagcagaugaugaa

SEQ ID NO: 1022922 - RNA, 19 nt, Homo sapiens
  misc_RNA (1)...(19): siRNA sense strand
gggaguccuucaagcugau

SEQ ID NO: 1022923 - RNA, 19 nt, Homo sapiens
  misc_RNA (1)...(19): siRNA sense strand
gaguuuguggccaugauga

SEQ ID NO: 1022924 - RNA, 19 nt, Homo sapiens
  misc_RNA (1)...(19): siRNA sense strand
gagcagaucaaggaguaca

SEQ ID NO: 1022925 - RNA, 19 nt, Homo sapiens
  misc_RNA (1)...(19): siRNA sense strand
acaagaaaucucacugaca

SEQ ID NO: 1022926 - RNA, 19 nt, Homo sapiens
  misc_RNA (1)...(19): siRNA sense strand
uggcacuaaugggaguuua

SEQ ID NO: 1022927 - RNA, 19 nt, Homo sapiens
  misc_RNA (1)...(19): siRNA sense strand
uacaagggagucuuugaga

SEQ ID NO: 1022928 - RNA, 19 nt, Homo sapiens
  misc_RNA (1)...(19): siRNA sense strand
cggcauuccgugucuuuga

SEQ ID NO: 1022929 - RNA, 19 nt, Homo sapiens
  misc_RNA (1)...(19): siRNA sense strand
aagggagucuuugagaugu

SEQ ID NO: 1022930 - RNA, 19 nt, Homo sapiens
  misc_RNA (1)...(19): siRNA sense strand
gggcaagggcuacauugac

SEQ ID NO: 1022931 - RNA, 19 nt, Homo sapiens
  misc_RNA (1)...(19): siRNA sense strand
ggaguuuguggccaugaug

SEQ ID NO: 1022932 - RNA, 19 nt, Homo sapiens
  misc_RNA (1)...(19): siRNA sense strand
gcagaucaaggaguacaag

SEQ ID NO: 1022933 - RNA, 19 nt, Homo sapiens
  misc_RNA (1)...(19): siRNA sense strand
gacaggaccaucgacuaug

SEQ ID NO: 1022934 - RNA, 19 nt, Homo sapiens
  misc_RNA (1)...(19): siRNA sense strand
gcacaccgccaacguaguc

SEQ ID NO: 1022935 - RNA, 19 nt, Homo sapiens
  misc_RNA (1)...(19): siRNA sense strand
gggcgugaguuucuuagca

SEQ ID NO: 1022936 - RNA, 19 nt, Homo sapiens
  misc_RNA (1)...(19): siRNA sense strand
gcgcacagcaguccuccuu

SEQ ID NO: 1022937 - RNA, 19 nt, Homo sapiens
  misc_RNA (1)...(19): siRNA sense strand
caucgacgacgccuacaug

SEQ ID NO: 1022938 - RNA, 19 nt, Homo sapiens
  misc_RNA (1)...(19): siRNA sense strand
ggugggcgugaguuucuua

SEQ ID NO: 1022939 - RNA, 19 nt, Homo sapiens
  misc_RNA (1)...(19): siRNA sense strand
cgcgacagcuggagcaagu

SEQ ID NO: 1022940 - RNA, 19 nt, Homo sapiens
  misc_RNA (1)...(19): siRNA sense strand
ccgcuuacccgguguacug

SEQ ID NO: 1022941 - RNA, 19 nt, Homo sapiens
  misc_RNA (1)...(19): siRNA sense strand
agaugcugcucauguggaa

SEQ ID NO: 1022942 - RNA, 19 nt, Homo sapiens
  misc_RNA (1)...(19): siRNA sense strand
acgagaugcugcucaugug

SEQ ID NO: 1022943 - RNA, 19 nt, Homo sapiens
  misc_RNA (1)...(19): siRNA sense strand
ccuacgagaugcugcucau

SEQ ID NO: 1022944 - RNA, 19 nt, Homo sapiens
  misc_RNA (1)...(19): siRNA sense strand
cagccgaguuggccuauug

SEQ ID NO: 1022945 - RNA, 19 nt, Homo sapiens
  misc_RNA (1)...(19): siRNA sense strand
gcccuggacuccugcuuug

SEQ ID NO: 1022946 - RNA, 19 nt, Homo sapiens
  misc_RNA (1)...(19): siRNA sense strand
ggccuuggcuucaguuggu

SEQ ID NO: 1022947 - RNA, 19 nt, Homo sapiens
  misc_RNA (1)...(19): siRNA sense strand
accaggacauccagacuuu

SEQ ID NO: 1022948 - RNA, 19 nt, Homo sapiens
  misc_RNA (1)...(19): siRNA sense strand
gaccaggacauccagacuu

SEQ ID NO: 1022949 - RNA, 19 nt, Homo sapiens
  misc_RNA (1)...(19): siRNA sense strand
caggacccauggcacauuc

SEQ ID NO: 1022950 - RNA, 19 nt, Homo sapiens
  misc_RNA (1)...(19): siRNA sense strand
caggacccguggcacauuc

SEQ ID NO: 1022951 - RNA, 19 nt, Homo sapiens
  misc_RNA (1)...(19): siRNA sense strand
caggacccguggcacauuc

SEQ ID NO: 1022952 - RNA, 19 nt, Homo sapiens
  misc_RNA (1)...(19): siRNA sense strand
caggacccguggcacauuc

SEQ ID NO: 1022953 - RNA, 19 nt, Homo sapiens
  misc_RNA (1)...(19): siRNA sense strand
gcuuugggccacagcaaga

SEQ ID NO: 1022954 - RNA, 19 nt, Homo sapiens
  misc_RNA (1)...(19): siRNA sense strand
ccuauugccugcucaugcu

SEQ ID NO: 1022955 - RNA, 19 nt, Homo sapiens
  misc_RNA (1)...(19): siRNA sense strand
ggacagaguucauuucaaa

SEQ ID NO: 1022956 - RNA, 19 nt, Homo sapiens
  misc_RNA (1)...(19): siRNA sense strand
gaagagagaaucuaguuua

SEQ ID NO: 1022957 - RNA, 19 nt, Homo sapiens
  misc_RNA (1)...(19): siRNA sense strand
gaacuuaauugcucuggaa

SEQ ID NO: 1022958 - RNA, 19 nt, Homo sapiens
  misc_RNA (1)...(19): siRNA sense strand
caacuacaaugcugaagua

SEQ ID NO: 1022959 - RNA, 19 nt, Homo sapiens
  misc_RNA (1)...(19): siRNA sense strand
gagaaggacuaucccauuu

SEQ ID NO: 1022960 - RNA, 19 nt, Homo sapiens
  misc_RNA (1)...(19): siRNA sense strand
ggacauacauuguguugga

SEQ ID NO: 1022961 - RNA, 19 nt, Homo sapiens
  misc_RNA (1)...(19): siRNA sense strand
cuaagaaucugaaagaaga

SEQ ID NO: 1022962 - RNA, 19 nt, Homo sapiens
  misc_RNA (1)...(19): siRNA sense strand
gaccauacauuucuugaug

SEQ ID NO: 1022963 - RNA, 19 nt, Homo sapiens
  misc_RNA (1)...(19): siRNA sense strand
gaacgaaccauuagcuuug

SEQ ID NO: 1022964 - RNA, 19 nt, Homo sapiens
  misc_RNA (1)...(19): siRNA sense strand
gaagagaagaccuuaauuc

SEQ ID NO: 1022965 - RNA, 19 nt, Homo sapiens
  misc_RNA (1)...(19): siRNA sense strand
ggaaacaguuggcuuugga

SEQ ID NO: 1022966 - RNA, 19 nt, Homo sapiens
  misc_RNA (1)...(19): siRNA sense strand
ggacuuuacuugguuugua

SEQ ID NO: 1022967 - RNA, 19 nt, Homo sapiens
  misc_RNA (1)...(19): siRNA sense strand
aaagagcacugguguagaa

SEQ ID NO: 1022968 - RNA, 19 nt, Homo sapiens
  misc_RNA (1)...(19): siRNA sense strand
gaaagaagagaagaccuua

SEQ ID NO: 1022969 - RNA, 19 nt, Homo sapiens
  misc_RNA (1)...(19): siRNA sense strand
ucaaggagauaccaacaaa

SEQ ID NO: 1022970 - RNA, 19 nt, Homo sapiens
  misc_RNA (1)...(19): siRNA sense strand
gaagacaacaucauuugaa

SEQ ID NO: 1022971 - RNA, 19 nt, Homo sapiens
  misc_RNA (1)...(19): siRNA sense strand
gaaggacuaucccauuuua

SEQ ID NO: 1022972 - RNA, 19 nt, Homo sapiens
  misc_RNA (1)...(19): siRNA sense strand
uaacauuccugaugcauuc

SEQ ID NO: 1022973 - RNA, 19 nt, Homo sapiens
  misc_RNA (1)...(19): siRNA sense strand
gcagugcagucuugaaguu

SEQ ID NO: 1022974 - RNA, 19 nt, Homo sapiens
  misc_RNA (1)...(19): siRNA sense strand
guaaagauugugagagaua

SEQ ID NO: 1022975 - RNA, 19 nt, Homo sapiens
  misc_RNA (1)...(19): siRNA sense strand
gaagagaaagaguaugaaa

SEQ ID NO: 1022976 - RNA, 19 nt, Homo sapiens
  misc_RNA (1)...(19): siRNA sense strand
gaauauuucuagagccauu

SEQ ID NO: 1022977 - RNA, 19 nt, Homo sapiens
  misc_RNA (1)...(19): siRNA sense strand
gaaaguuggacggcaauua

SEQ ID NO: 1022978 - RNA, 19 nt, Homo sapiens
  misc_RNA (1)...(19): siRNA sense strand
ggagauaccaacaaagaaa

SEQ ID NO: 1022979 - RNA, 19 nt, Homo sapiens
  misc_RNA (1)...(19): siRNA sense strand
ucagugagcucuauguguu

SEQ ID NO: 1022980 - RNA, 19 nt, Homo sapiens
  misc_RNA (1)...(19): siRNA sense strand
gagcagaauucaaucaagu

SEQ ID NO: 1022981 - RNA, 19 nt, Homo sapiens
  misc_RNA (1)...(19): siRNA sense strand
ggaggaacuucagacauuu

SEQ ID NO: 1022982 - RNA, 19 nt, Homo sapiens
  misc_RNA (1)...(19): siRNA sense strand
gcuaagcagugcagucuug

SEQ ID NO: 1022983 - RNA, 19 nt, Homo sapiens
  misc_RNA (1)...(19): siRNA sense strand
gaacuucagacauuuauca

SEQ ID NO: 1022984 - RNA, 19 nt, Homo sapiens
  misc_RNA (1)...(19): siRNA sense strand
gaauggaacucugaagcuu

SEQ ID NO: 1022985 - RNA, 19 nt, Homo sapiens
  misc_RNA (1)...(19): siRNA sense strand
gaaagaagcaucaaaaugu

SEQ ID NO: 1022986 - RNA, 19 nt, Homo sapiens
  misc_RNA (1)...(19): siRNA sense strand
gaugaauacuacagaaugu

SEQ ID NO: 1022987 - RNA, 19 nt, Homo sapiens
  misc_RNA (1)...(19): siRNA sense strand
ggagcugcauuaucuauuc

SEQ ID NO: 1022988 - RNA, 19 nt, Homo sapiens
  misc_RNA (1)...(19): siRNA sense strand
gcucagcuaugaacuuaau

SEQ ID NO: 1022989 - RNA, 19 nt, Homo sapiens
  misc_RNA (1)...(19): siRNA sense strand
ggauaugauuugaaagguu

SEQ ID NO: 1022990 - RNA, 19 nt, Homo sapiens
  misc_RNA (1)...(19): siRNA sense strand
cuacaaugcugaaguaugg

SEQ ID NO: 1022991 - RNA, 19 nt, Homo sapiens
  misc_RNA (1)...(19): siRNA sense strand
agagggauaugauuugaaa

SEQ ID NO: 1022992 - RNA, 19 nt, Homo sapiens
  misc_RNA (1)...(19): siRNA sense strand
ccagaagggucaaggaaau

SEQ ID NO: 1022993 - RNA, 19 nt, Homo sapiens
  misc_RNA (1)...(19): siRNA sense strand
gaaauucaguuggacaaag

SEQ ID NO: 1022994 - RNA, 19 nt, Homo sapiens
  misc_RNA (1)...(19): siRNA sense strand
ggaaggacagaguucauuu

SEQ ID NO: 1022995 - RNA, 19 nt, Homo sapiens
  misc_RNA (1)...(19): siRNA sense strand
gcagucugauucacaagaa

SEQ ID NO: 1022996 - RNA, 19 nt, Homo sapiens
  misc_RNA (1)...(19): siRNA sense strand
gcagggacauacauugugu

SEQ ID NO: 1022997 - RNA, 19 nt, Homo sapiens
  misc_RNA (1)...(19): siRNA sense strand
gagcucagauacuccuuug

SEQ ID NO: 1022998 - RNA, 19 nt, Homo sapiens
  misc_RNA (1)...(19): siRNA sense strand
gcuaauaacauuccugaug

SEQ ID NO: 1022999 - RNA, 19 nt, Homo sapiens
  misc_RNA (1)...(19): siRNA sense strand
agagugauauggauaguga

SEQ ID NO: 1023000 - RNA, 19 nt, Homo sapiens
  misc_RNA (1)...(19): siRNA sense strand
gcccaaacacacauucuua

SEQ ID NO: 1023001 - RNA, 19 nt, Homo sapiens
  misc_RNA (1)...(19): siRNA sense strand
cagaugaccucgcucacaa

SEQ ID NO: 1023002 - RNA, 19 nt, Homo sapiens
  misc_RNA (1)...(19): siRNA sense strand
ugacagagggauaugauuu

SEQ ID NO: 1023003 - RNA, 19 nt, Homo sapiens
  misc_RNA (1)...(19): siRNA sense strand
gaacaacuacaaugcugaa

SEQ ID NO: 1023004 - RNA, 19 nt, Homo sapiens
  misc_RNA (1)...(19): siRNA sense strand
gcacaaguaacaaagcaaa

SEQ ID NO: 1023005 - RNA, 19 nt, Homo sapiens
  misc_RNA (1)...(19): siRNA sense strand
aagcagaagucaaugagaa

SEQ ID NO: 1023006 - RNA, 19 nt, Homo sapiens
  misc_RNA (1)...(19): siRNA sense strand
gauaaaccagugaaagaaa

SEQ ID NO: 1023007 - RNA, 19 nt, Homo sapiens
  misc_RNA (1)...(19): siRNA sense strand
ggaauaccuucaacaagca

SEQ ID NO: 1023008 - RNA, 19 nt, Homo sapiens
  misc_RNA (1)...(19): siRNA sense strand
ggaggaaucacuucagaug

SEQ ID NO: 1023009 - RNA, 19 nt, Homo sapiens
  misc_RNA (1)...(19): siRNA sense strand
gaagggccaucucuauuuu

SEQ ID NO: 1023010 - RNA, 19 nt, Homo sapiens
  misc_RNA (1)...(19): siRNA sense strand
caucaaagcacaagagugu

SEQ ID NO: 1023011 - RNA, 19 nt, Homo sapiens
  misc_RNA (1)...(19): siRNA sense strand
gcacuguugcaaccauuua

SEQ ID NO: 1023012 - RNA, 19 nt, Homo sapiens
  misc_RNA (1)...(19): siRNA sense strand
ugugagagauaaauacuug

SEQ ID NO: 1023013 - RNA, 19 nt, Homo sapiens
  misc_RNA (1)...(19): siRNA sense strand
gauauuggccaucacuuga

SEQ ID NO: 1023014 - RNA, 19 nt, Homo sapiens
  misc_RNA (1)...(19): siRNA sense strand
guagagaucacaagaguuc

SEQ ID NO: 1023015 - RNA, 19 nt, Homo sapiens
  misc_RNA (1)...(19): siRNA sense strand
caagcagagugcauaaaga

SEQ ID NO: 1023016 - RNA, 19 nt, Homo sapiens
  misc_RNA (1)...(19): siRNA sense strand
aggaggaacuucagacauu

SEQ ID NO: 1023017 - RNA, 19 nt, Homo sapiens
  misc_RNA (1)...(19): siRNA sense strand
ugaaaagacugaugaagaa

SEQ ID NO: 1023018 - RNA, 19 nt, Homo sapiens
  misc_RNA (1)...(19): siRNA sense strand
ugaagggccaucucuauuu

SEQ ID NO: 1023019 - RNA, 19 nt, Homo sapiens
  misc_RNA (1)...(19): siRNA sense strand
ccuccaaacugcagucuga

SEQ ID NO: 1023020 - RNA, 19 nt, Homo sapiens
  misc_RNA (1)...(19): siRNA sense strand
ucaaacaacaguuccauug

SEQ ID NO: 1023021 - RNA, 19 nt, Homo sapiens
  misc_RNA (1)...(19): siRNA sense strand
caaacacacauucuuaaga

SEQ ID NO: 1023022 - RNA, 19 nt, Homo sapiens
  misc_RNA (1)...(19): siRNA sense strand
gaacuaugagcaagcagaa

SEQ ID NO: 1023023 - RNA, 19 nt, Homo sapiens
  misc_RNA (1)...(19): siRNA sense strand
gcacaagaguguuuucaga

SEQ ID NO: 1023024 - RNA, 19 nt, Homo sapiens
  misc_RNA (1)...(19): siRNA sense strand
gaaaacagguggccaaacu

SEQ ID NO: 1023025 - RNA, 19 nt, Homo sapiens
  misc_RNA (1)...(19): siRNA sense strand
aaauacaacuucacuagca

SEQ ID NO: 1023026 - RNA, 19 nt, Homo sapiens
  misc_RNA (1)...(19): siRNA sense strand
gaaucaagcagagugcaua

SEQ ID NO: 1023027 - RNA, 19 nt, Homo sapiens
  misc_RNA (1)...(19): siRNA sense strand
ggacagcgaauuuaggaau

SEQ ID NO: 1023028 - RNA, 19 nt, Homo sapiens
  misc_RNA (1)...(19): siRNA sense strand
uccaggagcuaauaacauu

SEQ ID NO: 1023029 - RNA, 19 nt, Homo sapiens
  misc_RNA (1)...(19): siRNA sense strand
cuuagaaacuccuagauca

SEQ ID NO: 1023030 - RNA, 19 nt, Homo sapiens
  misc_RNA (1)...(19): siRNA sense strand
gcucagcuuucguuucaug

SEQ ID NO: 1023031 - RNA, 19 nt, Homo sapiens
  misc_RNA (1)...(19): siRNA sense strand
aagcugaaauugaaagaug

SEQ ID NO: 1023032 - RNA, 19 nt, Homo sapiens
  misc_RNA (1)...(19): siRNA sense strand
gagcaggccuacaaguaca

SEQ ID NO: 1023033 - RNA, 19 nt, Homo sapiens
  misc_RNA (1)...(19): siRNA sense strand
ucaaggcugugcaguaugu

SEQ ID NO: 1023034 - RNA, 19 nt, Homo sapiens
  misc_RNA (1)...(19): siRNA sense strand
caaagaaagaagcaucaaa

SEQ ID NO: 1023035 - RNA, 19 nt, Homo sapiens
  misc_RNA (1)...(19): siRNA sense strand
ggaagagagaaucuaguuu

SEQ ID NO: 1023036 - RNA, 19 nt, Homo sapiens
  misc_RNA (1)...(19): siRNA sense strand
gggaagagagaaucuaguu

SEQ ID NO: 1023037 - RNA, 19 nt, Homo sapiens
  misc_RNA (1)...(19): siRNA sense strand
gaacagcuucaacucuuug

SEQ ID NO: 1023038 - RNA, 19 nt, Homo sapiens
  misc_RNA (1)...(19): siRNA sense strand
gaggaacuucagacauuua

SEQ ID NO: 1023039 - RNA, 19 nt, Homo sapiens
  misc_RNA (1)...(19): siRNA sense strand
agaauucaaucaagugguu

SEQ ID NO: 1023040 - RNA, 19 nt, Homo sapiens
  misc_RNA (1)...(19): siRNA sense strand
gaagauaaaccagugaaag

SEQ ID NO: 1023041 - RNA, 19 nt, Homo sapiens
  misc_RNA (1)...(19): siRNA sense strand
gguggaccuucuucccuua

SEQ ID NO: 1023042 - RNA, 19 nt, Homo sapiens
  misc_RNA (1)...(19): siRNA sense strand
ggacaaagccuugguucca

SEQ ID NO: 1023043 - RNA, 19 nt, Homo sapiens
  misc_RNA (1)...(19): siRNA sense strand
aaacaacaguuccauugca

SEQ ID NO: 1023044 - RNA, 19 nt, Homo sapiens
  misc_RNA (1)...(19): siRNA sense strand
gcagagauccacacacuac

SEQ ID NO: 1023045 - RNA, 19 nt, Homo sapiens
  misc_RNA (1)...(19): siRNA sense strand
agaagacacugaggaaaga

SEQ ID NO: 1023046 - RNA, 19 nt, Homo sapiens
  misc_RNA (1)...(19): siRNA sense strand
gauggcagcagcauauuau

SEQ ID NO: 1023047 - RNA, 19 nt, Homo sapiens
  misc_RNA (1)...(19): siRNA sense strand
cagaggagcuagccagaag

SEQ ID NO: 1023048 - RNA, 19 nt, Homo sapiens
  misc_RNA (1)...(19): siRNA sense strand
gcaggcaccuaguauaaaa

SEQ ID NO: 1023049 - RNA, 19 nt, Homo sapiens
  misc_RNA (1)...(19): siRNA sense strand
gaagcagggacauacauug

SEQ ID NO: 1023050 - RNA, 19 nt, Homo sapiens
  misc_RNA (1)...(19): siRNA sense strand
ucaucuaucuggaagagaa

SEQ ID NO: 1023051 - RNA, 19 nt, Homo sapiens
  misc_RNA (1)...(19): siRNA sense strand
gaaagagggaagagagaau

SEQ ID NO: 1023052 - RNA, 19 nt, Homo sapiens
  misc_RNA (1)...(19): siRNA sense strand
ggagaacuaugagcaagca

SEQ ID NO: 1023053 - RNA, 19 nt, Homo sapiens
  misc_RNA (1)...(19): siRNA sense strand
ucaaagcacaagaguguuu

SEQ ID NO: 1023054 - RNA, 19 nt, Homo sapiens
  misc_RNA (1)...(19): siRNA sense strand
guucuuaacugugacugaa

SEQ ID NO: 1023055 - RNA, 19 nt, Homo sapiens
  misc_RNA (1)...(19): siRNA sense strand
gaagagaggugaagucgua

SEQ ID NO: 1023056 - RNA, 19 nt, Homo sapiens
  misc_RNA (1)...(19): siRNA sense strand
gagagaagaugauguaauu

SEQ ID NO: 1023057 - RNA, 19 nt, Homo sapiens
  misc_RNA (1)...(19): siRNA sense strand
gaagacaaauggacaauug

SEQ ID NO: 1023058 - RNA, 19 nt, Homo sapiens
  misc_RNA (1)...(19): siRNA sense strand
aaagaaagauggacaaaga

SEQ ID NO: 1023059 - RNA, 19 nt, Homo sapiens
  misc_RNA (1)...(19): siRNA sense strand
gaaagcuacugauacacua

SEQ ID NO: 1023060 - RNA, 19 nt, Homo sapiens
  misc_RNA (1)...(19): siRNA sense strand
cuacagaaauuuacuggaa

SEQ ID NO: 1023061 - RNA, 19 nt, Homo sapiens
  misc_RNA (1)...(19): siRNA sense strand
cagcagaguuggcacuuaa

SEQ ID NO: 1023062 - RNA, 19 nt, Homo sapiens
  misc_RNA (1)...(19): siRNA sense strand
caagagauauacugccauu

SEQ ID NO: 1023063 - RNA, 19 nt, Homo sapiens
  misc_RNA (1)...(19): siRNA sense strand
uaaaugagccaaagagaga

SEQ ID NO: 1023064 - RNA, 19 nt, Homo sapiens
  misc_RNA (1)...(19): siRNA sense strand
uacaguaucucccuucaaa

SEQ ID NO: 1023065 - RNA, 19 nt, Homo sapiens
  misc_RNA (1)...(19): siRNA sense strand
aaagagagaagaugaugua

SEQ ID NO: 1023066 - RNA, 19 nt, Homo sapiens
  misc_RNA (1)...(19): siRNA sense strand
gagauauacugccauugga

SEQ ID NO: 1023067 - RNA, 19 nt, Homo sapiens
  misc_RNA (1)...(19): siRNA sense strand
cuaccaagcugcuguccuu

SEQ ID NO: 1023068 - RNA, 19 nt, Homo sapiens
  misc_RNA (1)...(19): siRNA sense strand
cacagucucuugagcauug

SEQ ID NO: 1023069 - RNA, 19 nt, Homo sapiens
  misc_RNA (1)...(19): siRNA sense strand
ucagaagcuuggucaguga

SEQ ID NO: 1023070 - RNA, 19 nt, Homo sapiens
  misc_RNA (1)...(19): siRNA sense strand
acaaauggacaauugauga

SEQ ID NO: 1023071 - RNA, 19 nt, Homo sapiens
  misc_RNA (1)...(19): siRNA sense strand
gaaccaaacagggaccauu

SEQ ID NO: 1023072 - RNA, 19 nt, Homo sapiens
  misc_RNA (1)...(19): siRNA sense strand
gaaagauggacaaagacuu

SEQ ID NO: 1023073 - RNA, 19 nt, Homo sapiens
  misc_RNA (1)...(19): siRNA sense strand
cagaauggaccaagaggaa

SEQ ID NO: 1023074 - RNA, 19 nt, Homo sapiens
  misc_RNA (1)...(19): siRNA sense strand
ccagcagaguuggcacuua

SEQ ID NO: 1023075 - RNA, 19 nt, Homo sapiens
  misc_RNA (1)...(19): siRNA sense strand
ggaaagcuacugauacacu

SEQ ID NO: 1023076 - RNA, 19 nt, Homo sapiens
  misc_RNA (1)...(19): siRNA sense strand
ugaaucgguugaaggagaa

SEQ ID NO: 1023077 - RNA, 19 nt, Homo sapiens
  misc_RNA (1)...(19): siRNA sense strand
gagcugacccgaaccaaac

SEQ ID NO: 1023078 - RNA, 19 nt, Homo sapiens
  misc_RNA (1)...(19): siRNA sense strand
caggaacggucgcagcaau

SEQ ID NO: 1023079 - RNA, 19 nt, Homo sapiens
  misc_RNA (1)...(19): siRNA sense strand
ccucuauucugcauuaaag

SEQ ID NO: 1023080 - RNA, 19 nt, Homo sapiens
  misc_RNA (1)...(19): siRNA sense strand
ggaauuggaagcggaacaa

SEQ ID NO: 1023081 - RNA, 19 nt, Homo sapiens
  misc_RNA (1)...(19): siRNA sense strand
ugucaggguccaagagaua

SEQ ID NO: 1023082 - RNA, 19 nt, Homo sapiens
  misc_RNA (1)...(19): siRNA sense strand
gagaggugaagucguagaa

SEQ ID NO: 1023083 - RNA, 19 nt, Homo sapiens
  misc_RNA (1)...(19): siRNA sense strand
cauuuacgcuagaagaaca

SEQ ID NO: 1023084 - RNA, 19 nt, Homo sapiens
  misc_RNA (1)...(19): siRNA sense strand
aaucaaaaccugagucuaa

SEQ ID NO: 1023085 - RNA, 19 nt, Homo sapiens
  misc_RNA (1)...(19): siRNA sense strand
gaagauauugaaggcauuc

SEQ ID NO: 1023086 - RNA, 19 nt, Homo sapiens
  misc_RNA (1)...(19): siRNA sense strand
ccaaagagagaagaugaug

SEQ ID NO: 1023087 - RNA, 19 nt, Homo sapiens
  misc_RNA (1)...(19): siRNA sense strand
guuuugagcugugaauaua

SEQ ID NO: 1023088 - RNA, 19 nt, Homo sapiens
  misc_RNA (1)...(19): siRNA sense strand
aagcagacuuugaaaauug

SEQ ID NO: 1023089 - RNA, 19 nt, Homo sapiens
  misc_RNA (1)...(19): siRNA sense strand
gacaaauggacaauugaug

SEQ ID NO: 1023090 - RNA, 19 nt, Homo sapiens
  misc_RNA (1)...(19): siRNA sense strand
ggggaaagcuacugauaca

SEQ ID NO: 1023091 - RNA, 19 nt, Homo sapiens
  misc_RNA (1)...(19): siRNA sense strand
ugucuucgccgucuuugaa

SEQ ID NO: 1023092 - RNA, 19 nt, Homo sapiens
  misc_RNA (1)...(19): siRNA sense strand
gaccauuuacgcuagaaga

SEQ ID NO: 1023093 - RNA, 19 nt, Homo sapiens
  misc_RNA (1)...(19): siRNA sense strand
gugaagucguagaagcaaa

SEQ ID NO: 1023094 - RNA, 19 nt, Homo sapiens
  misc_RNA (1)...(19): siRNA sense strand
cuacugauacacuagauuc

SEQ ID NO: 1023095 - RNA, 19 nt, Homo sapiens
  misc_RNA (1)...(19): siRNA sense strand
gggcauggagggacucuag

SEQ ID NO: 1023096 - RNA, 19 nt, Homo sapiens
  misc_RNA (1)...(19): siRNA sense strand
agaagauauugaaggcauu

SEQ ID NO: 1023097 - RNA, 19 nt, Homo sapiens
  misc_RNA (1)...(19): siRNA sense strand
ccgaggaguucugguuguu

SEQ ID NO: 1023098 - RNA, 19 nt, Homo sapiens
  misc_RNA (1)...(19): siRNA sense strand
aaaccugagucuaaugaac

SEQ ID NO: 1023099 - RNA, 19 nt, Homo sapiens
  misc_RNA (1)...(19): siRNA sense strand
aaccaaacagggaccauuu

SEQ ID NO: 1023100 - RNA, 19 nt, Homo sapiens
  misc_RNA (1)...(19): siRNA sense strand
gauauugaaggcauucuac

SEQ ID NO: 1023101 - RNA, 19 nt, Homo sapiens
  misc_RNA (1)...(19): siRNA sense strand
gaauuggaagcggaacaaa

SEQ ID NO: 1023102 - RNA, 19 nt, Homo sapiens
  misc_RNA (1)...(19): siRNA sense strand
gacuuucgacuuugaugaa

SEQ ID NO: 1023103 - RNA, 19 nt, Homo sapiens
  misc_RNA (1)...(19): siRNA sense strand
caaagagagaagaugaugu

SEQ ID NO: 1023104 - RNA, 19 nt, Homo sapiens
  misc_RNA (1)...(19): siRNA sense strand
gacauugcacagucucuug

SEQ ID NO: 1023105 - RNA, 19 nt, Homo sapiens
  misc_RNA (1)...(19): siRNA sense strand
agagauauacugccauugg

SEQ ID NO: 1023106 - RNA, 19 nt, Homo sapiens
  misc_RNA (1)...(19): siRNA sense strand
cuggaaauauaaugcaagu

SEQ ID NO: 1023107 - RNA, 19 nt, Homo sapiens
  misc_RNA (1)...(19): siRNA sense strand
gagcugugaauauauaacu

SEQ ID NO: 1023108 - RNA, 19 nt, Homo sapiens
  misc_RNA (1)...(19): siRNA sense strand
gaugaagagaggugaaguc

SEQ ID NO: 1023109 - RNA, 19 nt, Homo sapiens
  misc_RNA (1)...(19): siRNA sense strand
ccaaacagggaccauuuac

SEQ ID NO: 1023110 - RNA, 19 nt, Homo sapiens
  misc_RNA (1)...(19): siRNA sense strand
ugagucuaaugaacagguu

SEQ ID NO: 1023111 - RNA, 19 nt, Homo sapiens
  misc_RNA (1)...(19): siRNA sense strand
gcacagucucuugagcauu

SEQ ID NO: 1023112 - RNA, 19 nt, Homo sapiens
  misc_RNA (1)...(19): siRNA sense strand
uaaagaaagauggacaaag

SEQ ID NO: 1023113 - RNA, 19 nt, Homo sapiens
  misc_RNA (1)...(19): siRNA sense strand
caaaaccugagucuaauga

SEQ ID NO: 1023114 - RNA, 19 nt, Homo sapiens
  misc_RNA (1)...(19): siRNA sense strand
gaauggaccaagaggaaaa

SEQ ID NO: 1023115 - RNA, 19 nt, Homo sapiens
  misc_RNA (1)...(19): siRNA sense strand
ggaguucugguuguuggaa

SEQ ID NO: 1023116 - RNA, 19 nt, Homo sapiens
  misc_RNA (1)...(19): siRNA sense strand
agagagaagaugauguaau

SEQ ID NO: 1023117 - RNA, 19 nt, Homo sapiens
  misc_RNA (1)...(19): siRNA sense strand
gaguucugguuguuggaau

SEQ ID NO: 1023118 - RNA, 19 nt, Homo sapiens
  misc_RNA (1)...(19): siRNA sense strand
accaaacagggaccauuua

SEQ ID NO: 1023119 - RNA, 19 nt, Homo sapiens
  misc_RNA (1)...(19): siRNA sense strand
agacaaauggacaauugau

SEQ ID NO: 1023120 - RNA, 19 nt, Homo sapiens
  misc_RNA (1)...(19): siRNA sense strand
ugaagacaaauggacaauu

SEQ ID NO: 1023121 - RNA, 19 nt, Homo sapiens
  misc_RNA (1)...(19): siRNA sense strand
ucaggguccaagagauaua

SEQ ID NO: 1023122 - RNA, 19 nt, Homo sapiens
  misc_RNA (1)...(19): siRNA sense strand
gagcugcugaaucgguuga

SEQ ID NO: 1023123 - RNA, 19 nt, Homo sapiens
  misc_RNA (1)...(19): siRNA sense strand
aauguugaccaguauguug

SEQ ID NO: 1023124 - RNA, 19 nt, Homo sapiens
  misc_RNA (1)...(19): siRNA sense strand
auggacaauugaugacauu

SEQ ID NO: 1023125 - RNA, 19 nt, Homo sapiens
  misc_RNA (1)...(19): siRNA sense strand
ucagugacauuggaaaaga

SEQ ID NO: 1023126 - RNA, 19 nt, Homo sapiens
  misc_RNA (1)...(19): siRNA sense strand
gcuggcagaagcuggaaug

SEQ ID NO: 1023127 - RNA, 19 nt, Homo sapiens
  misc_RNA (1)...(19): siRNA sense strand
gaaacugcagucacccuua

SEQ ID NO: 1023128 - RNA, 19 nt, Homo sapiens
  misc_RNA (1)...(19): siRNA sense strand
gcucugcccucgugcuuug

SEQ ID NO: 1023129 - RNA, 19 nt, Homo sapiens
  misc_RNA (1)...(19): siRNA sense strand
gaccacauguugagaaacu

SEQ ID NO: 1023130 - RNA, 19 nt, Homo sapiens
  misc_RNA (1)...(19): siRNA sense strand
aaacugcagucacccuuag

SEQ ID NO: 1023131 - RNA, 19 nt, Homo sapiens
  misc_RNA (1)...(19): siRNA sense strand
ccaggaagcccuaugacau

SEQ ID NO: 1023132 - RNA, 19 nt, Homo sapiens
  misc_RNA (1)...(19): siRNA sense strand
ccagauuuaccuuccagua

SEQ ID NO: 1023133 - RNA, 19 nt, Homo sapiens
  misc_RNA (1)...(19): siRNA sense strand
cggaccacauguugagaaa

SEQ ID NO: 1023134 - RNA, 19 nt, Homo sapiens
  misc_RNA (1)...(19): siRNA sense strand
gcugcaguguggccagauu

SEQ ID NO: 1023135 - RNA, 19 nt, Homo sapiens
  misc_RNA (1)...(19): siRNA sense strand
gauccacggaccacauguu

SEQ ID NO: 1023136 - RNA, 19 nt, Homo sapiens
  misc_RNA (1)...(19): siRNA sense strand
caggaagcccuaugacauc

SEQ ID NO: 1023137 - RNA, 19 nt, Homo sapiens
  misc_RNA (1)...(19): siRNA sense strand
ugacuggcccugaccuuca

SEQ ID NO: 1023138 - RNA, 19 nt, Homo sapiens
  misc_RNA (1)...(19): siRNA sense strand
cuaccaggaagcccuauga

SEQ ID NO: 1023139 - RNA, 19 nt, Homo sapiens
  misc_RNA (1)...(19): siRNA sense strand
ccacggaccacauguugag

SEQ ID NO: 1023140 - RNA, 19 nt, Homo sapiens
  misc_RNA (1)...(19): siRNA sense strand
ccacacccacccuccguau

SEQ ID NO: 1023141 - RNA, 19 nt, Homo sapiens
  misc_RNA (1)...(19): siRNA sense strand
ccacgguucuccagcaaga

SEQ ID NO: 1023142 - RNA, 19 nt, Homo sapiens
  misc_RNA (1)...(19): siRNA sense strand
gcguugcccuucacuaaga

SEQ ID NO: 1023143 - RNA, 19 nt, Homo sapiens
  misc_RNA (1)...(19): siRNA sense strand
ucaaggaggugcgcuucuu

SEQ ID NO: 1023144 - RNA, 19 nt, Homo sapiens
  misc_RNA (1)...(19): siRNA sense strand
gacauggacguguuugaug

SEQ ID NO: 1023145 - RNA, 19 nt, Homo sapiens
  misc_RNA (1)...(19): siRNA sense strand
ccaccugccuccugcucuu

SEQ ID NO: 1023146 - RNA, 19 nt, Homo sapiens
  misc_RNA (1)...(19): siRNA sense strand
gaccugaugcgcucuaucu

SEQ ID NO: 1023147 - RNA, 19 nt, Homo sapiens
  misc_RNA (1)...(19): siRNA sense strand
ccugaugcgcucuaucuuu

SEQ ID NO: 1023148 - RNA, 19 nt, Homo sapiens
  misc_RNA (1)...(19): siRNA sense strand
cgacauggacguguuugau

SEQ ID NO: 1023149 - RNA, 19 nt, Homo sapiens
  misc_RNA (1)...(19): siRNA sense strand
cguguuugaugccuacaug

SEQ ID NO: 1023150 - RNA, 19 nt, Homo sapiens
  misc_RNA (1)...(19): siRNA sense strand
cauacuucgucuaggaaug

SEQ ID NO: 1023151 - RNA, 19 nt, Homo sapiens
  misc_RNA (1)...(19): siRNA sense strand
cugaugcgcucuaucuuuu

SEQ ID NO: 1023152 - RNA, 19 nt, Homo sapiens
  misc_RNA (1)...(19): siRNA sense strand
cgacgucuucuaccugaug

SEQ ID NO: 1023153 - RNA, 19 nt, Homo sapiens
  misc_RNA (1)...(19): siRNA sense strand
acgcguugcccuucacuaa

SEQ ID NO: 1023154 - RNA, 19 nt, Homo sapiens
  misc_RNA (1)...(19): siRNA sense strand
caaggaggugcgcuucuuc

SEQ ID NO: 1023155 - RNA, 19 nt, Homo sapiens
  misc_RNA (1)...(19): siRNA sense strand
uuccauacuucgucuagga

SEQ ID NO: 1023156 - RNA, 19 nt, Homo sapiens
  misc_RNA (1)...(19): siRNA sense strand
gccacguggugcucaagga

SEQ ID NO: 1023157 - RNA, 19 nt, Homo sapiens
  misc_RNA (1)...(19): siRNA sense strand
ggaggugcgcuucuucaac

SEQ ID NO: 1023158 - RNA, 19 nt, Homo sapiens
  misc_RNA (1)...(19): siRNA sense strand
gauacuggcacgcgacaac

SEQ ID NO: 1023159 - RNA, 19 nt, Homo sapiens
  misc_RNA (1)...(19): siRNA sense strand
ccacgguucuccagcaaga

SEQ ID NO: 1023160 - RNA, 19 nt, Homo sapiens
  misc_RNA (1)...(19): siRNA sense strand
gcguugcccuucacuaaga

SEQ ID NO: 1023161 - RNA, 19 nt, Homo sapiens
  misc_RNA (1)...(19): siRNA sense strand
ucaaggaggugcgcuucuu

SEQ ID NO: 1023162 - RNA, 19 nt, Homo sapiens
  misc_RNA (1)...(19): siRNA sense strand
gacauggacguguuugaug

SEQ ID NO: 1023163 - RNA, 19 nt, Homo sapiens
  misc_RNA (1)...(19): siRNA sense strand
ccaccugccuccugcucuu

SEQ ID NO: 1023164 - RNA, 19 nt, Homo sapiens
  misc_RNA (1)...(19): siRNA sense strand
gaccugaugcgcucuaucu

SEQ ID NO: 1023165 - RNA, 19 nt, Homo sapiens
  misc_RNA (1)...(19): siRNA sense strand
ccugaugcgcucuaucuuu

SEQ ID NO: 1023166 - RNA, 19 nt, Homo sapiens
  misc_RNA (1)...(19): siRNA sense strand
cgacauggacguguuugau

SEQ ID NO: 1023167 - RNA, 19 nt, Homo sapiens
  misc_RNA (1)...(19): siRNA sense strand
cguguuugaugccuacaug

SEQ ID NO: 1023168 - RNA, 19 nt, Homo sapiens
  misc_RNA (1)...(19): siRNA sense strand
cauacuucgucuaggaaug

SEQ ID NO: 1023169 - RNA, 19 nt, Homo sapiens
  misc_RNA (1)...(19): siRNA sense strand
cugaugcgcucuaucuuuu

SEQ ID NO: 1023170 - RNA, 19 nt, Homo sapiens
  misc_RNA (1)...(19): siRNA sense strand
cgacgucuucuaccugaug

SEQ ID NO: 1023171 - RNA, 19 nt, Homo sapiens
  misc_RNA (1)...(19): siRNA sense strand
acgcguugcccuucacuaa

SEQ ID NO: 1023172 - RNA, 19 nt, Homo sapiens
  misc_RNA (1)...(19): siRNA sense strand
caaggaggugcgcuucuuc

SEQ ID NO: 1023173 - RNA, 19 nt, Homo sapiens
  misc_RNA (1)...(19): siRNA sense strand
uuccauacuucgucuagga

SEQ ID NO: 1023174 - RNA, 19 nt, Homo sapiens
  misc_RNA (1)...(19): siRNA sense strand
gccacguggugcucaagga

SEQ ID NO: 1023175 - RNA, 19 nt, Homo sapiens
  misc_RNA (1)...(19): siRNA sense strand
ggaggugcgcuucuucaac

SEQ ID NO: 1023176 - RNA, 19 nt, Homo sapiens
  misc_RNA (1)...(19): siRNA sense strand
gauacuggcacgcgacaac

SEQ ID NO: 1023177 - RNA, 19 nt, Homo sapiens
  misc_RNA (1)...(19): siRNA sense strand
gaaggucucccauguguaa

SEQ ID NO: 1023178 - RNA, 19 nt, Homo sapiens
  misc_RNA (1)...(19): siRNA sense strand
caaacaagcuagagaguca

SEQ ID NO: 1023179 - RNA, 19 nt, Homo sapiens
  misc_RNA (1)...(19): siRNA sense strand
cgaaagaaaugcuagaauc

SEQ ID NO: 1023180 - RNA, 19 nt, Homo sapiens
  misc_RNA (1)...(19): siRNA sense strand
ugaagaacaucaucaauag

SEQ ID NO: 1023181 - RNA, 19 nt, Homo sapiens
  misc_RNA (1)...(19): siRNA sense strand
gaaagaaaugcuagaauca

SEQ ID NO: 1023182 - RNA, 19 nt, Homo sapiens
  misc_RNA (1)...(19): siRNA sense strand
ggcuaauucugacauaaua

SEQ ID NO: 1023183 - RNA, 19 nt, Homo sapiens
  misc_RNA (1)...(19): siRNA sense strand
cauaauaucccucaacuuc

SEQ ID NO: 1023184 - RNA, 19 nt, Homo sapiens
  misc_RNA (1)...(19): siRNA sense strand
acagugaccuuagaaauga

SEQ ID NO: 1023185 - RNA, 19 nt, Homo sapiens
  misc_RNA (1)...(19): siRNA sense strand
cagaaggucucccaugugu

SEQ ID NO: 1023186 - RNA, 19 nt, Homo sapiens
  misc_RNA (1)...(19): siRNA sense strand
cugaagaacaucaucaaua

SEQ ID NO: 1023187 - RNA, 19 nt, Homo sapiens
  misc_RNA (1)...(19): siRNA sense strand
agacuugagugacagauau

SEQ ID NO: 1023188 - RNA, 19 nt, Homo sapiens
  misc_RNA (1)...(19): siRNA sense strand
gacaguaacagugaccuua

SEQ ID NO: 1023189 - RNA, 19 nt, Homo sapiens
  misc_RNA (1)...(19): siRNA sense strand
gugguuauauagcaucaaa

SEQ ID NO: 1023190 - RNA, 19 nt, Homo sapiens
  misc_RNA (1)...(19): siRNA sense strand
cacagaaggucucccaugu

SEQ ID NO: 1023191 - RNA, 19 nt, Homo sapiens
  misc_RNA (1)...(19): siRNA sense strand
ccacagcucuucggacauc

SEQ ID NO: 1023192 - RNA, 19 nt, Homo sapiens
  misc_RNA (1)...(19): siRNA sense strand
uaacagugaccuuagaaau

SEQ ID NO: 1023193 - RNA, 19 nt, Homo sapiens
  misc_RNA (1)...(19): siRNA sense strand
gacauaauaucccucaacu

SEQ ID NO: 1023194 - RNA, 19 nt, Homo sapiens
  misc_RNA (1)...(19): siRNA sense strand
gaucagcucagacugugaa

SEQ ID NO: 1023195 - RNA, 19 nt, Homo sapiens
  misc_RNA (1)...(19): siRNA sense strand
uggagagguucuucaacua

SEQ ID NO: 1023196 - RNA, 19 nt, Homo sapiens
  misc_RNA (1)...(19): siRNA sense strand
gaaaugcuagaaucaucaa

SEQ ID NO: 1023197 - RNA, 19 nt, Homo sapiens
  misc_RNA (1)...(19): siRNA sense strand
caaguaugaucagcucaga

SEQ ID NO: 1023198 - RNA, 19 nt, Homo sapiens
  misc_RNA (1)...(19): siRNA sense strand
gaaccagcuuguggaguca

SEQ ID NO: 1023199 - RNA, 19 nt, Homo sapiens
  misc_RNA (1)...(19): siRNA sense strand
guggagagguucuucaacu

SEQ ID NO: 1023200 - RNA, 19 nt, Homo sapiens
  misc_RNA (1)...(19): siRNA sense strand
aagaaaugcuagaaucauc

SEQ ID NO: 1023201 - RNA, 19 nt, Homo sapiens
  misc_RNA (1)...(19): siRNA sense strand
cggagucccugaaggucua

SEQ ID NO: 1023202 - RNA, 19 nt, Homo sapiens
  misc_RNA (1)...(19): siRNA sense strand
caguaacagugaccuuaga

SEQ ID NO: 1023203 - RNA, 19 nt, Homo sapiens
  misc_RNA (1)...(19): siRNA sense strand
cuagaaucaucaagugguu

SEQ ID NO: 1023204 - RNA, 19 nt, Homo sapiens
  misc_RNA (1)...(19): siRNA sense strand
gagagguucuucaacuacu

SEQ ID NO: 1023205 - RNA, 19 nt, Homo sapiens
  misc_RNA (1)...(19): siRNA sense strand
aagcacagcucccgcaacu

SEQ ID NO: 1023206 - RNA, 19 nt, Homo sapiens
  misc_RNA (1)...(19): siRNA sense strand
gggcuaauucugacauaau

SEQ ID NO: 1023207 - RNA, 19 nt, Homo sapiens
  misc_RNA (1)...(19): siRNA sense strand
gcagccaucgccuccauga

SEQ ID NO: 1023208 - RNA, 19 nt, Homo sapiens
  misc_RNA (1)...(19): siRNA sense strand
guaacagugaccuuagaaa

SEQ ID NO: 1023209 - RNA, 19 nt, Homo sapiens
  misc_RNA (1)...(19): siRNA sense strand
gaacagucucaggacagua

SEQ ID NO: 1023210 - RNA, 19 nt, Homo sapiens
  misc_RNA (1)...(19): siRNA sense strand
ccuuagaaaugaugacagu

SEQ ID NO: 1023211 - RNA, 19 nt, Homo sapiens
  misc_RNA (1)...(19): siRNA sense strand
ggagagguucuucaacuac

SEQ ID NO: 1023212 - RNA, 19 nt, Homo sapiens
  misc_RNA (1)...(19): siRNA sense strand
gguuauauagcaucaaaca

SEQ ID NO: 1023213 - RNA, 19 nt, Homo sapiens
  misc_RNA (1)...(19): siRNA sense strand
ggacaguaacagugaccuu

SEQ ID NO: 1023214 - RNA, 19 nt, Homo sapiens
  misc_RNA (1)...(19): siRNA sense strand
ucaagugguuauauagcau

SEQ ID NO: 1023215 - RNA, 19 nt, Homo sapiens
  misc_RNA (1)...(19): siRNA sense strand
gcaucaaacaagcuagaga

SEQ ID NO: 1023216 - RNA, 19 nt, Homo sapiens
  misc_RNA (1)...(19): siRNA sense strand
uugcaagggcuaauucuga

SEQ ID NO: 1023217 - RNA, 19 nt, Homo sapiens
  misc_RNA (1)...(19): siRNA sense strand
caagcuagagagucacaga

SEQ ID NO: 1023218 - RNA, 19 nt, Homo sapiens
  misc_RNA (1)...(19): siRNA sense strand
gccaucgccuccaugaagu

SEQ ID NO: 1023219 - RNA, 19 nt, Homo sapiens
  misc_RNA (1)...(19): siRNA sense strand
gcagagggagaaccugaag

SEQ ID NO: 1023220 - RNA, 19 nt, Homo sapiens
  misc_RNA (1)...(19): siRNA sense strand
aacagugaccuuagaaaug

SEQ ID NO: 1023221 - RNA, 19 nt, Homo sapiens
  misc_RNA (1)...(19): siRNA sense strand
cagacuugagugacagaua

SEQ ID NO: 1023222 - RNA, 19 nt, Homo sapiens
  misc_RNA (1)...(19): siRNA sense strand
ugaacagucucaggacagu

SEQ ID NO: 1023223 - RNA, 19 nt, Homo sapiens
  misc_RNA (1)...(19): siRNA sense strand
aagggcuaauucugacaua

SEQ ID NO: 1023224 - RNA, 19 nt, Homo sapiens
  misc_RNA (1)...(19): siRNA sense strand
acgcggacguggagagguu

SEQ ID NO: 1023225 - RNA, 19 nt, Homo sapiens
  misc_RNA (1)...(19): siRNA sense strand
gaaaaccugggaauggaaa

SEQ ID NO: 1023226 - RNA, 19 nt, Homo sapiens
  misc_RNA (1)...(19): siRNA sense strand
gaagaacaucaucaauagc

SEQ ID NO: 1023227 - RNA, 19 nt, Homo sapiens
  misc_RNA (1)...(19): siRNA sense strand
gaacaaggggccagacuac

SEQ ID NO: 1023228 - RNA, 19 nt, Homo sapiens
  misc_RNA (1)...(19): siRNA sense strand
aacagucucaggacaguaa

SEQ ID NO: 1023229 - RNA, 19 nt, Homo sapiens
  misc_RNA (1)...(19): siRNA sense strand
agcuggagauccugaagaa

SEQ ID NO: 1023230 - RNA, 19 nt, Homo sapiens
  misc_RNA (1)...(19): siRNA sense strand
ggacguggagagguucuuc

SEQ ID NO: 1023231 - RNA, 19 nt, Homo sapiens
  misc_RNA (1)...(19): siRNA sense strand
gcaaggugaccagcgugaa

SEQ ID NO: 1023232 - RNA, 19 nt, Homo sapiens
  misc_RNA (1)...(19): siRNA sense strand
caaggugaccagcgugaag

SEQ ID NO: 1023233 - RNA, 19 nt, Homo sapiens
  misc_RNA (1)...(19): siRNA sense strand
gaaucaucaagugguuaua

SEQ ID NO: 1023234 - RNA, 19 nt, Homo sapiens
  misc_RNA (1)...(19): siRNA sense strand
uagaaucaucaagugguua

SEQ ID NO: 1023235 - RNA, 19 nt, Homo sapiens
  misc_RNA (1)...(19): siRNA sense strand
agaaaugcuagaaucauca

SEQ ID NO: 1023236 - RNA, 19 nt, Homo sapiens
  misc_RNA (1)...(19): siRNA sense strand
ccaagcaggagcccgugaa

SEQ ID NO: 1023237 - RNA, 19 nt, Homo sapiens
  misc_RNA (1)...(19): siRNA sense strand
uggagauccugaagaacau

SEQ ID NO: 1023238 - RNA, 19 nt, Homo sapiens
  misc_RNA (1)...(19): siRNA sense strand
cuggagauccugaagaaca

SEQ ID NO: 1023239 - RNA, 19 nt, Homo sapiens
  misc_RNA (1)...(19): siRNA sense strand
agaaucaucaagugguuau

SEQ ID NO: 1023240 - RNA, 19 nt, Homo sapiens
  misc_RNA (1)...(19): siRNA sense strand
gaagcuggagauccugaag

SEQ ID NO: 1023241 - RNA, 19 nt, Homo sapiens
  misc_RNA (1)...(19): siRNA sense strand
augcuagaaucaucaagug

SEQ ID NO: 1023242 - RNA, 19 nt, Homo sapiens
  misc_RNA (1)...(19): siRNA sense strand
gagacccuacagacaggua

SEQ ID NO: 1023243 - RNA, 19 nt, Homo sapiens
  misc_RNA (1)...(19): siRNA sense strand
uaugaucagcucagacugu

SEQ ID NO: 1023244 - RNA, 19 nt, Homo sapiens
  misc_RNA (1)...(19): siRNA sense strand
gaacuaauuugacaggauu

SEQ ID NO: 1023245 - RNA, 19 nt, Homo sapiens
  misc_RNA (1)...(19): siRNA sense strand
uaaccacacuuaccacuua

SEQ ID NO: 1023246 - RNA, 19 nt, Homo sapiens
  misc_RNA (1)...(19): siRNA sense strand
gaaacugcaugaccuuuau

SEQ ID NO: 1023247 - RNA, 19 nt, Homo sapiens
  misc_RNA (1)...(19): siRNA sense strand
gccaagaccuacuguauga

SEQ ID NO: 1023248 - RNA, 19 nt, Homo sapiens
  misc_RNA (1)...(19): siRNA sense strand
ccauggagaucuuacauuu

SEQ ID NO: 1023249 - RNA, 19 nt, Homo sapiens
  misc_RNA (1)...(19): siRNA sense strand
gaagacaacuuugauccaa

SEQ ID NO: 1023250 - RNA, 19 nt, Homo sapiens
  misc_RNA (1)...(19): siRNA sense strand
gcguagaccuagaucuuua

SEQ ID NO: 1023251 - RNA, 19 nt, Homo sapiens
  misc_RNA (1)...(19): siRNA sense strand
gcagaaugaugaugaugaa

SEQ ID NO: 1023252 - RNA, 19 nt, Homo sapiens
  misc_RNA (1)...(19): siRNA sense strand
gcgcagaacugucguaaac

SEQ ID NO: 1023253 - RNA, 19 nt, Homo sapiens
  misc_RNA (1)...(19): siRNA sense strand
gcacgaagcuguggaucau

SEQ ID NO: 1023254 - RNA, 19 nt, Homo sapiens
  misc_RNA (1)...(19): siRNA sense strand
gaaucuaguucccaucaug

SEQ ID NO: 1023255 - RNA, 19 nt, Homo sapiens
  misc_RNA (1)...(19): siRNA sense strand
agacacagauagaaacuug

SEQ ID NO: 1023256 - RNA, 19 nt, Homo sapiens
  misc_RNA (1)...(19): siRNA sense strand
ucaaagugauucugauuuc

SEQ ID NO: 1023257 - RNA, 19 nt, Homo sapiens
  misc_RNA (1)...(19): siRNA sense strand
gaaaugagagacaucugaa

SEQ ID NO: 1023258 - RNA, 19 nt, Homo sapiens
  misc_RNA (1)...(19): siRNA sense strand
gaacugucguaaacgcaaa

SEQ ID NO: 1023259 - RNA, 19 nt, Homo sapiens
  misc_RNA (1)...(19): siRNA sense strand
gcacugaccaugaaucuag

SEQ ID NO: 1023260 - RNA, 19 nt, Homo sapiens
  misc_RNA (1)...(19): siRNA sense strand
ccaguaagcuuugucacuu

SEQ ID NO: 1023261 - RNA, 19 nt, Homo sapiens
  misc_RNA (1)...(19): siRNA sense strand
aaacgcaaauuggacauaa

SEQ ID NO: 1023262 - RNA, 19 nt, Homo sapiens
  misc_RNA (1)...(19): siRNA sense strand
gcaugccuguugauucuuu

SEQ ID NO: 1023263 - RNA, 19 nt, Homo sapiens
  misc_RNA (1)...(19): siRNA sense strand
ggaacuaauuugacaggau

SEQ ID NO: 1023264 - RNA, 19 nt, Homo sapiens
  misc_RNA (1)...(19): siRNA sense strand
caacuuugauccaaucgau

SEQ ID NO: 1023265 - RNA, 19 nt, Homo sapiens
  misc_RNA (1)...(19): siRNA sense strand
ccacagaagacaacuuuga

SEQ ID NO: 1023266 - RNA, 19 nt, Homo sapiens
  misc_RNA (1)...(19): siRNA sense strand
gcaagcacaauguaacaaa

SEQ ID NO: 1023267 - RNA, 19 nt, Homo sapiens
  misc_RNA (1)...(19): siRNA sense strand
ucacagaagauaaggagua

SEQ ID NO: 1023268 - RNA, 19 nt, Homo sapiens
  misc_RNA (1)...(19): siRNA sense strand
aauaauaccucugucauca

SEQ ID NO: 1023269 - RNA, 19 nt, Homo sapiens
  misc_RNA (1)...(19): siRNA sense strand
gaacucacuucagcagaau

SEQ ID NO: 1023270 - RNA, 19 nt, Homo sapiens
  misc_RNA (1)...(19): siRNA sense strand
ucaauagcauguuaaguag

SEQ ID NO: 1023271 - RNA, 19 nt, Homo sapiens
  misc_RNA (1)...(19): siRNA sense strand
gaacagcgugcuaaagcuu

SEQ ID NO: 1023272 - RNA, 19 nt, Homo sapiens
  misc_RNA (1)...(19): siRNA sense strand
aaagaccacugaaucuaga

SEQ ID NO: 1023273 - RNA, 19 nt, Homo sapiens
  misc_RNA (1)...(19): siRNA sense strand
ggacagauacuucuuucuc

SEQ ID NO: 1023274 - RNA, 19 nt, Homo sapiens
  misc_RNA (1)...(19): siRNA sense strand
ugaaggugcuauagguuau

SEQ ID NO: 1023275 - RNA, 19 nt, Homo sapiens
  misc_RNA (1)...(19): siRNA sense strand
gauaguacccaaagaacug

SEQ ID NO: 1023276 - RNA, 19 nt, Homo sapiens
  misc_RNA (1)...(19): siRNA sense strand
gagagcaagcacaauguaa

SEQ ID NO: 1023277 - RNA, 19 nt, Homo sapiens
  misc_RNA (1)...(19): siRNA sense strand
agaacucacuucagcagaa

SEQ ID NO: 1023278 - RNA, 19 nt, Homo sapiens
  misc_RNA (1)...(19): siRNA sense strand
gaagauaaggaguagauac

SEQ ID NO: 1023279 - RNA, 19 nt, Homo sapiens
  misc_RNA (1)...(19): siRNA sense strand
ugacuuagaaggugcugua

SEQ ID NO: 1023280 - RNA, 19 nt, Homo sapiens
  misc_RNA (1)...(19): siRNA sense strand
gcaguuaaauucucauacc

SEQ ID NO: 1023281 - RNA, 19 nt, Homo sapiens
  misc_RNA (1)...(19): siRNA sense strand
uaagagagagcaagcacaa

SEQ ID NO: 1023282 - RNA, 19 nt, Homo sapiens
  misc_RNA (1)...(19): siRNA sense strand
ggaagucacagaagauaag

SEQ ID NO: 1023283 - RNA, 19 nt, Homo sapiens
  misc_RNA (1)...(19): siRNA sense strand
ccagaacccaguaagcuuu

SEQ ID NO: 1023284 - RNA, 19 nt, Homo sapiens
  misc_RNA (1)...(19): siRNA sense strand
gaaaagaccacugaaucua

SEQ ID NO: 1023285 - RNA, 19 nt, Homo sapiens
  misc_RNA (1)...(19): siRNA sense strand
ggccacagaagacaacuuu

SEQ ID NO: 1023286 - RNA, 19 nt, Homo sapiens
  misc_RNA (1)...(19): siRNA sense strand
aaccauuucugcaguuaaa

SEQ ID NO: 1023287 - RNA, 19 nt, Homo sapiens
  misc_RNA (1)...(19): siRNA sense strand
gugauggcaugaauucuuc

SEQ ID NO: 1023288 - RNA, 19 nt, Homo sapiens
  misc_RNA (1)...(19): siRNA sense strand
ccacugaaucuagaaauga

SEQ ID NO: 1023289 - RNA, 19 nt, Homo sapiens
  misc_RNA (1)...(19): siRNA sense strand
agaaacugcaugaccuuua

SEQ ID NO: 1023290 - RNA, 19 nt, Homo sapiens
  misc_RNA (1)...(19): siRNA sense strand
uaauaccucugucaucaag

SEQ ID NO: 1023291 - RNA, 19 nt, Homo sapiens
  misc_RNA (1)...(19): siRNA sense strand
gacagauacuucuuucucu

SEQ ID NO: 1023292 - RNA, 19 nt, Homo sapiens
  misc_RNA (1)...(19): siRNA sense strand
uaaauucucauaccaccaa

SEQ ID NO: 1023293 - RNA, 19 nt, Homo sapiens
  misc_RNA (1)...(19): siRNA sense strand
ugaugaaggugcuauaggu

SEQ ID NO: 1023294 - RNA, 19 nt, Homo sapiens
  misc_RNA (1)...(19): siRNA sense strand
ccucugucaucaagucuaa

SEQ ID NO: 1023295 - RNA, 19 nt, Homo sapiens
  misc_RNA (1)...(19): siRNA sense strand
gaaccauuucugcaguuaa

SEQ ID NO: 1023296 - RNA, 19 nt, Homo sapiens
  misc_RNA (1)...(19): siRNA sense strand
caagcacaauguaacaaag

SEQ ID NO: 1023297 - RNA, 19 nt, Homo sapiens
  misc_RNA (1)...(19): siRNA sense strand
gugcuaaagcuuugcauau

SEQ ID NO: 1023298 - RNA, 19 nt, Homo sapiens
  misc_RNA (1)...(19): siRNA sense strand
caacacguauuucauaacc

SEQ ID NO: 1023299 - RNA, 19 nt, Homo sapiens
  misc_RNA (1)...(19): siRNA sense strand
auggagaucuuacauuuca

SEQ ID NO: 1023300 - RNA, 19 nt, Homo sapiens
  misc_RNA (1)...(19): siRNA sense strand
agacaacuuugauccaauc

SEQ ID NO: 1023301 - RNA, 19 nt, Homo sapiens
  misc_RNA (1)...(19): siRNA sense strand
gagcaagcacaauguaaca

SEQ ID NO: 1023302 - RNA, 19 nt, Homo sapiens
  misc_RNA (1)...(19): siRNA sense strand
cggcaugccuguugauucu

SEQ ID NO: 1023303 - RNA, 19 nt, Homo sapiens
  misc_RNA (1)...(19): siRNA sense strand
uaguucccaucaugacuua

SEQ ID NO: 1023304 - RNA, 19 nt, Homo sapiens
  misc_RNA (1)...(19): siRNA sense strand
gaagaugauguauguaacu

SEQ ID NO: 1023305 - RNA, 19 nt, Homo sapiens
  misc_RNA (1)...(19): siRNA sense strand
gcacaauguaacaaagcua

SEQ ID NO: 1023306 - RNA, 19 nt, Homo sapiens
  misc_RNA (1)...(19): siRNA sense strand
ccugggaagucacagaaga

SEQ ID NO: 1023307 - RNA, 19 nt, Homo sapiens
  misc_RNA (1)...(19): siRNA sense strand
cagaagauaaggaguagau

SEQ ID NO: 1023308 - RNA, 19 nt, Homo sapiens
  misc_RNA (1)...(19): siRNA sense strand
agaaaugagagacaucuga

SEQ ID NO: 1023309 - RNA, 19 nt, Homo sapiens
  misc_RNA (1)...(19): siRNA sense strand
auuaagagaugaccaaggu

SEQ ID NO: 1023310 - RNA, 19 nt, Homo sapiens
  misc_RNA (1)...(19): siRNA sense strand
gggaagucacagaagauaa

SEQ ID NO: 1023311 - RNA, 19 nt, Homo sapiens
  misc_RNA (1)...(19): siRNA sense strand
gaaucuacuucugaaccuu

SEQ ID NO: 1023312 - RNA, 19 nt, Homo sapiens
  misc_RNA (1)...(19): siRNA sense strand
caguaagcuuugucacuug

SEQ ID NO: 1023313 - RNA, 19 nt, Homo sapiens
  misc_RNA (1)...(19): siRNA sense strand
uuauugcacugaccaugaa

SEQ ID NO: 1023314 - RNA, 19 nt, Homo sapiens
  misc_RNA (1)...(19): siRNA sense strand
gaugaaggugcuauagguu

SEQ ID NO: 1023315 - RNA, 19 nt, Homo sapiens
  misc_RNA (1)...(19): siRNA sense strand
caacagcaaggacuucaca

SEQ ID NO: 1023316 - RNA, 19 nt, Homo sapiens
  misc_RNA (1)...(19): siRNA sense strand
gaggccaucuugcuuuguc

SEQ ID NO: 1023317 - RNA, 19 nt, Homo sapiens
  misc_RNA (1)...(19): siRNA sense strand
caugaggccaucuugcuuu

SEQ ID NO: 1023318 - RNA, 19 nt, Homo sapiens
  misc_RNA (1)...(19): siRNA sense strand
gagagagcaagcacaaugu

SEQ ID NO: 1023319 - RNA, 19 nt, Homo sapiens
  misc_RNA (1)...(19): siRNA sense strand
gcuaaagcuuugcauaucc

SEQ ID NO: 1023320 - RNA, 19 nt, Homo sapiens
  misc_RNA (1)...(19): siRNA sense strand
caacugcaccagaaucuac

SEQ ID NO: 1023321 - RNA, 19 nt, Homo sapiens
  misc_RNA (1)...(19): siRNA sense strand
cuuagaaggugcuguaggu

SEQ ID NO: 1023322 - RNA, 19 nt, Homo sapiens
  misc_RNA (1)...(19): siRNA sense strand
cauaugaggaaucuaacaa

SEQ ID NO: 1023323 - RNA, 19 nt, Homo sapiens
  misc_RNA (1)...(19): siRNA sense strand
uuucaccgguugacaauca

SEQ ID NO: 1023324 - RNA, 19 nt, Homo sapiens
  misc_RNA (1)...(19): siRNA sense strand
agagagagcaagcacaaug

SEQ ID NO: 1023325 - RNA, 19 nt, Homo sapiens
  misc_RNA (1)...(19): siRNA sense strand
aaacuugagccgugaugaa

SEQ ID NO: 1023326 - RNA, 19 nt, Homo sapiens
  misc_RNA (1)...(19): siRNA sense strand
gaagacacagauagaaacu

SEQ ID NO: 1023327 - RNA, 19 nt, Homo sapiens
  misc_RNA (1)...(19): siRNA sense strand
caucacagccugaaaauuc

SEQ ID NO: 1023328 - RNA, 19 nt, Homo sapiens
  misc_RNA (1)...(19): siRNA sense strand
caugauggaaguaucuuga

SEQ ID NO: 1023329 - RNA, 19 nt, Homo sapiens
  misc_RNA (1)...(19): siRNA sense strand
ugauguauguaacuugcaa

SEQ ID NO: 1023330 - RNA, 19 nt, Homo sapiens
  misc_RNA (1)...(19): siRNA sense strand
uaaaguugcugcgcagaac

SEQ ID NO: 1023331 - RNA, 19 nt, Homo sapiens
  misc_RNA (1)...(19): siRNA sense strand
acagccaacugcaccagaa

SEQ ID NO: 1023332 - RNA, 19 nt, Homo sapiens
  misc_RNA (1)...(19): siRNA sense strand
guuauugcacugaccauga

SEQ ID NO: 1023333 - RNA, 19 nt, Homo sapiens
  misc_RNA (1)...(19): siRNA sense strand
ucagugauggcaugaauuc

SEQ ID NO: 1023334 - RNA, 19 nt, Homo sapiens
  misc_RNA (1)...(19): siRNA sense strand
gaaacuugagccgugauga

SEQ ID NO: 1023335 - RNA, 19 nt, Homo sapiens
  misc_RNA (1)...(19): siRNA sense strand
caauaauaccucugucauc

SEQ ID NO: 1023336 - RNA, 19 nt, Homo sapiens
  misc_RNA (1)...(19): siRNA sense strand
gauucuggccuuucuuuag

SEQ ID NO: 1023337 - RNA, 19 nt, Homo sapiens
  misc_RNA (1)...(19): siRNA sense strand
gaagcuguggaucauaguu

SEQ ID NO: 1023338 - RNA, 19 nt, Homo sapiens
  misc_RNA (1)...(19): siRNA sense strand
gaauucuucagcacauuau

SEQ ID NO: 1023339 - RNA, 19 nt, Homo sapiens
  misc_RNA (1)...(19): siRNA sense strand
ugaaugggacagauacuuc

SEQ ID NO: 1023340 - RNA, 19 nt, Homo sapiens
  misc_RNA (1)...(19): siRNA sense strand
caagguaggccagucaauc

SEQ ID NO: 1023341 - RNA, 19 nt, Homo sapiens
  misc_RNA (1)...(19): siRNA sense strand
ucuuacauuucaacacgua

SEQ ID NO: 1023342 - RNA, 19 nt, Homo sapiens
  misc_RNA (1)...(19): siRNA sense strand
acaaucauaugaggaaucu

SEQ ID NO: 1023343 - RNA, 19 nt, Homo sapiens
  misc_RNA (1)...(19): siRNA sense strand
uaaacgcaaauuggacaua

SEQ ID NO: 1023344 - RNA, 19 nt, Homo sapiens
  misc_RNA (1)...(19): siRNA sense strand
gaagagcuuucauuuggua

SEQ ID NO: 1023345 - RNA, 19 nt, Homo sapiens
  misc_RNA (1)...(19): siRNA sense strand
gaacagcagugauaagauc

SEQ ID NO: 1023346 - RNA, 19 nt, Homo sapiens
  misc_RNA (1)...(19): siRNA sense strand
gaagugccgucucccagua

SEQ ID NO: 1023347 - RNA, 19 nt, Homo sapiens
  misc_RNA (1)...(19): siRNA sense strand
uguaugagcuucuguuaaa

SEQ ID NO: 1023348 - RNA, 19 nt, Homo sapiens
  misc_RNA (1)...(19): siRNA sense strand
ggaagugucucucuuugau

SEQ ID NO: 1023349 - RNA, 19 nt, Homo sapiens
  misc_RNA (1)...(19): siRNA sense strand
ggagaugaauuaagcucua

SEQ ID NO: 1023350 - RNA, 19 nt, Homo sapiens
  misc_RNA (1)...(19): siRNA sense strand
caugagcacugacuucuuu

SEQ ID NO: 1023351 - RNA, 19 nt, Homo sapiens
  misc_RNA (1)...(19): siRNA sense strand
gcauugcucuggcucuuaa

SEQ ID NO: 1023352 - RNA, 19 nt, Homo sapiens
  misc_RNA (1)...(19): siRNA sense strand
gaggaaggcugaaguugug

SEQ ID NO: 1023353 - RNA, 19 nt, Homo sapiens
  misc_RNA (1)...(19): siRNA sense strand
ccuaucagguuaauuguuu

SEQ ID NO: 1023354 - RNA, 19 nt, Homo sapiens
  misc_RNA (1)...(19): siRNA sense strand
ccacaaaguuuccugagau

SEQ ID NO: 1023355 - RNA, 19 nt, Homo sapiens
  misc_RNA (1)...(19): siRNA sense strand
ggagaaagcaauacagguu

SEQ ID NO: 1023356 - RNA, 19 nt, Homo sapiens
  misc_RNA (1)...(19): siRNA sense strand
gaaaucccacuuauaaaga

SEQ ID NO: 1023357 - RNA, 19 nt, Homo sapiens
  misc_RNA (1)...(19): siRNA sense strand
caaccuggauucaacucua

SEQ ID NO: 1023358 - RNA, 19 nt, Homo sapiens
  misc_RNA (1)...(19): siRNA sense strand
gaccauugcagcuggauua

SEQ ID NO: 1023359 - RNA, 19 nt, Homo sapiens
  misc_RNA (1)...(19): siRNA sense strand
gcuauaaacaucacugaaa

SEQ ID NO: 1023360 - RNA, 19 nt, Homo sapiens
  misc_RNA (1)...(19): siRNA sense strand
ucacugaaaucccacuuau

SEQ ID NO: 1023361 - RNA, 19 nt, Homo sapiens
  misc_RNA (1)...(19): siRNA sense strand
acaaggauuugaugccaua

SEQ ID NO: 1023362 - RNA, 19 nt, Homo sapiens
  misc_RNA (1)...(19): siRNA sense strand
gaccucagcuccauagaca

SEQ ID NO: 1023363 - RNA, 19 nt, Homo sapiens
  misc_RNA (1)...(19): siRNA sense strand
uaaaaugccuuccugauga

SEQ ID NO: 1023364 - RNA, 19 nt, Homo sapiens
  misc_RNA (1)...(19): siRNA sense strand
gggacaggcugaauccauu

SEQ ID NO: 1023365 - RNA, 19 nt, Homo sapiens
  misc_RNA (1)...(19): siRNA sense strand
caagguauccucagcaaga

SEQ ID NO: 1023366 - RNA, 19 nt, Homo sapiens
  misc_RNA (1)...(19): siRNA sense strand
gcaacccugugugcuauaa

SEQ ID NO: 1023367 - RNA, 19 nt, Homo sapiens
  misc_RNA (1)...(19): siRNA sense strand
caucuugucugccaaauac

SEQ ID NO: 1023368 - RNA, 19 nt, Homo sapiens
  misc_RNA (1)...(19): siRNA sense strand
acugaaaucccacuuauaa

SEQ ID NO: 1023369 - RNA, 19 nt, Homo sapiens
  misc_RNA (1)...(19): siRNA sense strand
gagaaagcaauacagguuu

SEQ ID NO: 1023370 - RNA, 19 nt, Homo sapiens
  misc_RNA (1)...(19): siRNA sense strand
gcagaacuccuggacauug

SEQ ID NO: 1023371 - RNA, 19 nt, Homo sapiens
  misc_RNA (1)...(19): siRNA sense strand
gauugucuaugccaccuuu

SEQ ID NO: 1023372 - RNA, 19 nt, Homo sapiens
  misc_RNA (1)...(19): siRNA sense strand
ggaugcaguuguagguuug

SEQ ID NO: 1023373 - RNA, 19 nt, Homo sapiens
  misc_RNA (1)...(19): siRNA sense strand
ggacuugggacccuuucua

SEQ ID NO: 1023374 - RNA, 19 nt, Homo sapiens
  misc_RNA (1)...(19): siRNA sense strand
cugaugagauauucaaaga

SEQ ID NO: 1023375 - RNA, 19 nt, Homo sapiens
  misc_RNA (1)...(19): siRNA sense strand
gcagcuggauuaacuaagg

SEQ ID NO: 1023376 - RNA, 19 nt, Homo sapiens
  misc_RNA (1)...(19): siRNA sense strand
uaaggaagugucucucuuu

SEQ ID NO: 1023377 - RNA, 19 nt, Homo sapiens
  misc_RNA (1)...(19): siRNA sense strand
gagaugaauuaagcucuau

SEQ ID NO: 1023378 - RNA, 19 nt, Homo sapiens
  misc_RNA (1)...(19): siRNA sense strand
aggauuugaugccauauuu

SEQ ID NO: 1023379 - RNA, 19 nt, Homo sapiens
  misc_RNA (1)...(19): siRNA sense strand
augagaaggugcugucuuu

SEQ ID NO: 1023380 - RNA, 19 nt, Homo sapiens
  misc_RNA (1)...(19): siRNA sense strand
uuugggacaugccaucuua

SEQ ID NO: 1023381 - RNA, 19 nt, Homo sapiens
  misc_RNA (1)...(19): siRNA sense strand
gaacaacuucgcccugcuu

SEQ ID NO: 1023382 - RNA, 19 nt, Homo sapiens
  misc_RNA (1)...(19): siRNA sense strand
aagugucucucuuugauuu

SEQ ID NO: 1023383 - RNA, 19 nt, Homo sapiens
  misc_RNA (1)...(19): siRNA sense strand
uggcucaaguccugcuuua

SEQ ID NO: 1023384 - RNA, 19 nt, Homo sapiens
  misc_RNA (1)...(19): siRNA sense strand
agaaagcaauacagguuug

SEQ ID NO: 1023385 - RNA, 19 nt, Homo sapiens
  misc_RNA (1)...(19): siRNA sense strand
guauguauccgacuuguca

SEQ ID NO: 1023386 - RNA, 19 nt, Homo sapiens
  misc_RNA (1)...(19): siRNA sense strand
gaaggcugaaguuguguuu

SEQ ID NO: 1023387 - RNA, 19 nt, Homo sapiens
  misc_RNA (1)...(19): siRNA sense strand
aaggguaccuggaugauuc

SEQ ID NO: 1023388 - RNA, 19 nt, Homo sapiens
  misc_RNA (1)...(19): siRNA sense strand
ggacaggcugaauccauuu

SEQ ID NO: 1023389 - RNA, 19 nt, Homo sapiens
  misc_RNA (1)...(19): siRNA sense strand
gaggaagacacauucauca

SEQ ID NO: 1023390 - RNA, 19 nt, Homo sapiens
  misc_RNA (1)...(19): siRNA sense strand
ggaggaagacacauucauc

SEQ ID NO: 1023391 - RNA, 19 nt, Homo sapiens
  misc_RNA (1)...(19): siRNA sense strand
caacuucgcccugcuuuca

SEQ ID NO: 1023392 - RNA, 19 nt, Homo sapiens
  misc_RNA (1)...(19): siRNA sense strand
cggaugcaguuguagguuu

SEQ ID NO: 1023393 - RNA, 19 nt, Homo sapiens
  misc_RNA (1)...(19): siRNA sense strand
ugaaaucccacuuauaaag

SEQ ID NO: 1023394 - RNA, 19 nt, Homo sapiens
  misc_RNA (1)...(19): siRNA sense strand
gaaguuuccagauugucua

SEQ ID NO: 1023395 - RNA, 19 nt, Homo sapiens
  misc_RNA (1)...(19): siRNA sense strand
ggugcugucuuucuacaau

SEQ ID NO: 1023396 - RNA, 19 nt, Homo sapiens
  misc_RNA (1)...(19): siRNA sense strand
aagcagaacuccuggacau

SEQ ID NO: 1023397 - RNA, 19 nt, Homo sapiens
  misc_RNA (1)...(19): siRNA sense strand
gaggcaaccuggauucaac

SEQ ID NO: 1023398 - RNA, 19 nt, Homo sapiens
  misc_RNA (1)...(19): siRNA sense strand
gccacaaaguuuccugaga

SEQ ID NO: 1023399 - RNA, 19 nt, Homo sapiens
  misc_RNA (1)...(19): siRNA sense strand
gaagugucucucuuugauu

SEQ ID NO: 1023400 - RNA, 19 nt, Homo sapiens
  misc_RNA (1)...(19): siRNA sense strand
uagccgaguuuaagaggaa

SEQ ID NO: 1023401 - RNA, 19 nt, Homo sapiens
  misc_RNA (1)...(19): siRNA sense strand
ugaugacccugaaggagaa

SEQ ID NO: 1023402 - RNA, 19 nt, Homo sapiens
  misc_RNA (1)...(19): siRNA sense strand
ggacagccgagaccacgaa

SEQ ID NO: 1023403 - RNA, 19 nt, Homo sapiens
  misc_RNA (1)...(19): siRNA sense strand
uggaaauacugggaaguuu

SEQ ID NO: 1023404 - RNA, 19 nt, Homo sapiens
  misc_RNA (1)...(19): siRNA sense strand
uaagcucuauagccacaaa

SEQ ID NO: 1023405 - RNA, 19 nt, Homo sapiens
  misc_RNA (1)...(19): siRNA sense strand
cugcagcacacaugucuua

SEQ ID NO: 1023406 - RNA, 19 nt, Homo sapiens
  misc_RNA (1)...(19): siRNA sense strand
ggacccugcccacuaaaga

SEQ ID NO: 1023407 - RNA, 19 nt, Homo sapiens
  misc_RNA (1)...(19): siRNA sense strand
gugcaacccugugugcuau

SEQ ID NO: 1023408 - RNA, 19 nt, Homo sapiens
  misc_RNA (1)...(19): siRNA sense strand
uuaaggaagugucucucuu

SEQ ID NO: 1023409 - RNA, 19 nt, Homo sapiens
  misc_RNA (1)...(19): siRNA sense strand
ggagagaacaccauaucgu

SEQ ID NO: 1023410 - RNA, 19 nt, Homo sapiens
  misc_RNA (1)...(19): siRNA sense strand
gcauggaggaagacacauu

SEQ ID NO: 1023411 - RNA, 19 nt, Homo sapiens
  misc_RNA (1)...(19): siRNA sense strand
gauaaggaacuuggaagga

SEQ ID NO: 1023412 - RNA, 19 nt, Homo sapiens
  misc_RNA (1)...(19): siRNA sense strand
uaugccaccuuuccucuug

SEQ ID NO: 1023413 - RNA, 19 nt, Homo sapiens
  misc_RNA (1)...(19): siRNA sense strand
uaagaggaaggcugaaguu

SEQ ID NO: 1023414 - RNA, 19 nt, Homo sapiens
  misc_RNA (1)...(19): siRNA sense strand
gagcuuucauuugguagga

SEQ ID NO: 1023415 - RNA, 19 nt, Homo sapiens
  misc_RNA (1)...(19): siRNA sense strand
gaugauucaggauacagua

SEQ ID NO: 1023416 - RNA, 19 nt, Homo sapiens
  misc_RNA (1)...(19): siRNA sense strand
cagaaggccugaggagcuu

SEQ ID NO: 1023417 - RNA, 19 nt, Homo sapiens
  misc_RNA (1)...(19): siRNA sense strand
cauugcagcuggauuaacu

SEQ ID NO: 1023418 - RNA, 19 nt, Homo sapiens
  misc_RNA (1)...(19): siRNA sense strand
cuugggacccuuucuagua

SEQ ID NO: 1023419 - RNA, 19 nt, Homo sapiens
  misc_RNA (1)...(19): siRNA sense strand
gguuuuagauucccacaaa

SEQ ID NO: 1023420 - RNA, 19 nt, Homo sapiens
  misc_RNA (1)...(19): siRNA sense strand
agaaccagacccucaauga

SEQ ID NO: 1023421 - RNA, 19 nt, Homo sapiens
  misc_RNA (1)...(19): siRNA sense strand
gaaccugcugugucacuug

SEQ ID NO: 1023422 - RNA, 19 nt, Homo sapiens
  misc_RNA (1)...(19): siRNA sense strand
aaggaagugucucucuuug

SEQ ID NO: 1023423 - RNA, 19 nt, Homo sapiens
  misc_RNA (1)...(19): siRNA sense strand
guggaccaguucugucuug

SEQ ID NO: 1023424 - RNA, 19 nt, Homo sapiens
  misc_RNA (1)...(19): siRNA sense strand
uuaauuguuuggcguggaa

SEQ ID NO: 1023425 - RNA, 19 nt, Homo sapiens
  misc_RNA (1)...(19): siRNA sense strand
cacccuaucagguuaauug

SEQ ID NO: 1023426 - RNA, 19 nt, Homo sapiens
  misc_RNA (1)...(19): siRNA sense strand
ggugcaacccugugugcua

SEQ ID NO: 1023427 - RNA, 19 nt, Homo sapiens
  misc_RNA (1)...(19): siRNA sense strand
gcgcauugcucuggcucuu

SEQ ID NO: 1023428 - RNA, 19 nt, Homo sapiens
  misc_RNA (1)...(19): siRNA sense strand
caauacagguuugggacau

SEQ ID NO: 1023429 - RNA, 19 nt, Homo sapiens
  misc_RNA (1)...(19): siRNA sense strand
gugauaagauccccagcua

SEQ ID NO: 1023430 - RNA, 19 nt, Homo sapiens
  misc_RNA (1)...(19): siRNA sense strand
ggaaccugcugugucacuu

SEQ ID NO: 1023431 - RNA, 19 nt, Homo sapiens
  misc_RNA (1)...(19): siRNA sense strand
gauaagauccccagcuaug

SEQ ID NO: 1023432 - RNA, 19 nt, Homo sapiens
  misc_RNA (1)...(19): siRNA sense strand
gcaggagcuugggaccauu

SEQ ID NO: 1023433 - RNA, 19 nt, Homo sapiens
  misc_RNA (1)...(19): siRNA sense strand
gugucucucuuugauuuaa

SEQ ID NO: 1023434 - RNA, 19 nt, Homo sapiens
  misc_RNA (1)...(19): siRNA sense strand
ggaacagcagugauaagau

SEQ ID NO: 1023435 - RNA, 19 nt, Homo sapiens
  misc_RNA (1)...(19): siRNA sense strand
gaauuccucugggcugucu

SEQ ID NO: 1023436 - RNA, 19 nt, Homo sapiens
  misc_RNA (1)...(19): siRNA sense strand
gaugaauuaagcucuauag

SEQ ID NO: 1023437 - RNA, 19 nt, Homo sapiens
  misc_RNA (1)...(19): siRNA sense strand
ggacgacuccauugcugau

SEQ ID NO: 1023438 - RNA, 19 nt, Homo sapiens
  misc_RNA (1)...(19): siRNA sense strand
ugugugcccuuucugauca

SEQ ID NO: 1023439 - RNA, 19 nt, Homo sapiens
  misc_RNA (1)...(19): siRNA sense strand
ucaagcuccugggacagua

SEQ ID NO: 1023440 - RNA, 19 nt, Homo sapiens
  misc_RNA (1)...(19): siRNA sense strand
ugggagcuguccaggguuu

SEQ ID NO: 1023441 - RNA, 19 nt, Homo sapiens
  misc_RNA (1)...(19): siRNA sense strand
ucccuaagcuggcaaacag

SEQ ID NO: 1023442 - RNA, 19 nt, Homo sapiens
  misc_RNA (1)...(19): siRNA sense strand
ggugguaguggccagaauu

SEQ ID NO: 1023443 - RNA, 19 nt, Homo sapiens
  misc_RNA (1)...(19): siRNA sense strand
gccaagagccaggucauca

SEQ ID NO: 1023444 - RNA, 19 nt, Homo sapiens
  misc_RNA (1)...(19): siRNA sense strand
gaagagcuuucauuuggua

SEQ ID NO: 1023445 - RNA, 19 nt, Homo sapiens
  misc_RNA (1)...(19): siRNA sense strand
gaacagcagugauaagauc

SEQ ID NO: 1023446 - RNA, 19 nt, Homo sapiens
  misc_RNA (1)...(19): siRNA sense strand
gaagugccgucucccagua

SEQ ID NO: 1023447 - RNA, 19 nt, Homo sapiens
  misc_RNA (1)...(19): siRNA sense strand
uguaugagcuucuguuaaa

SEQ ID NO: 1023448 - RNA, 19 nt, Homo sapiens
  misc_RNA (1)...(19): siRNA sense strand
ggaagugucucucuuugau

SEQ ID NO: 1023449 - RNA, 19 nt, Homo sapiens
  misc_RNA (1)...(19): siRNA sense strand
ggagaugaauuaagcucua

SEQ ID NO: 1023450 - RNA, 19 nt, Homo sapiens
  misc_RNA (1)...(19): siRNA sense strand
caugagcacugacuucuuu

SEQ ID NO: 1023451 - RNA, 19 nt, Homo sapiens
  misc_RNA (1)...(19): siRNA sense strand
gcauugcucuggcucuuaa

SEQ ID NO: 1023452 - RNA, 19 nt, Homo sapiens
  misc_RNA (1)...(19): siRNA sense strand
gaggaaggcugaaguugug

SEQ ID NO: 1023453 - RNA, 19 nt, Homo sapiens
  misc_RNA (1)...(19): siRNA sense strand
ccuaucagguuaauuguuu

SEQ ID NO: 1023454 - RNA, 19 nt, Homo sapiens
  misc_RNA (1)...(19): siRNA sense strand
ccacaaaguuuccugagau

SEQ ID NO: 1023455 - RNA, 19 nt, Homo sapiens
  misc_RNA (1)...(19): siRNA sense strand
ggagaaagcaauacagguu

SEQ ID NO: 1023456 - RNA, 19 nt, Homo sapiens
  misc_RNA (1)...(19): siRNA sense strand
gaaaucccacuuauaaaga

SEQ ID NO: 1023457 - RNA, 19 nt, Homo sapiens
  misc_RNA (1)...(19): siRNA sense strand
caaccuggauucaacucua

SEQ ID NO: 1023458 - RNA, 19 nt, Homo sapiens
  misc_RNA (1)...(19): siRNA sense strand
gaccauugcagcuggauua

SEQ ID NO: 1023459 - RNA, 19 nt, Homo sapiens
  misc_RNA (1)...(19): siRNA sense strand
gcuauaaacaucacugaaa

SEQ ID NO: 1023460 - RNA, 19 nt, Homo sapiens
  misc_RNA (1)...(19): siRNA sense strand
ucacugaaaucccacuuau

SEQ ID NO: 1023461 - RNA, 19 nt, Homo sapiens
  misc_RNA (1)...(19): siRNA sense strand
acaaggauuugaugccaua

SEQ ID NO: 1023462 - RNA, 19 nt, Homo sapiens
  misc_RNA (1)...(19): siRNA sense strand
gaccucagcuccauagaca

SEQ ID NO: 1023463 - RNA, 19 nt, Homo sapiens
  misc_RNA (1)...(19): siRNA sense strand
uaaaaugccuuccugauga

SEQ ID NO: 1023464 - RNA, 19 nt, Homo sapiens
  misc_RNA (1)...(19): siRNA sense strand
gggacaggcugaauccauu

SEQ ID NO: 1023465 - RNA, 19 nt, Homo sapiens
  misc_RNA (1)...(19): siRNA sense strand
caagguauccucagcaaga

SEQ ID NO: 1023466 - RNA, 19 nt, Homo sapiens
  misc_RNA (1)...(19): siRNA sense strand
gcaacccugugugcuauaa

SEQ ID NO: 1023467 - RNA, 19 nt, Homo sapiens
  misc_RNA (1)...(19): siRNA sense strand
caucuugucugccaaauac

SEQ ID NO: 1023468 - RNA, 19 nt, Homo sapiens
  misc_RNA (1)...(19): siRNA sense strand
acugaaaucccacuuauaa

SEQ ID NO: 1023469 - RNA, 19 nt, Homo sapiens
  misc_RNA (1)...(19): siRNA sense strand
gagaaagcaauacagguuu

SEQ ID NO: 1023470 - RNA, 19 nt, Homo sapiens
  misc_RNA (1)...(19): siRNA sense strand
gcagaacuccuggacauug

SEQ ID NO: 1023471 - RNA, 19 nt, Homo sapiens
  misc_RNA (1)...(19): siRNA sense strand
gauugucuaugccaccuuu

SEQ ID NO: 1023472 - RNA, 19 nt, Homo sapiens
  misc_RNA (1)...(19): siRNA sense strand
ggaugcaguuguagguuug

SEQ ID NO: 1023473 - RNA, 19 nt, Homo sapiens
  misc_RNA (1)...(19): siRNA sense strand
ggacuugggacccuuucua

SEQ ID NO: 1023474 - RNA, 19 nt, Homo sapiens
  misc_RNA (1)...(19): siRNA sense strand
cugaugagauauucaaaga

SEQ ID NO: 1023475 - RNA, 19 nt, Homo sapiens
  misc_RNA (1)...(19): siRNA sense strand
gcagcuggauuaacuaagg

SEQ ID NO: 1023476 - RNA, 19 nt, Homo sapiens
  misc_RNA (1)...(19): siRNA sense strand
uaaggaagugucucucuuu

SEQ ID NO: 1023477 - RNA, 19 nt, Homo sapiens
  misc_RNA (1)...(19): siRNA sense strand
gagaugaauuaagcucuau

SEQ ID NO: 1023478 - RNA, 19 nt, Homo sapiens
  misc_RNA (1)...(19): siRNA sense strand
aggauuugaugccauauuu

SEQ ID NO: 1023479 - RNA, 19 nt, Homo sapiens
  misc_RNA (1)...(19): siRNA sense strand
augagaaggugcugucuuu

SEQ ID NO: 1023480 - RNA, 19 nt, Homo sapiens
  misc_RNA (1)...(19): siRNA sense strand
uuugggacaugccaucuua

SEQ ID NO: 1023481 - RNA, 19 nt, Homo sapiens
  misc_RNA (1)...(19): siRNA sense strand
gaacaacuucgcccugcuu

SEQ ID NO: 1023482 - RNA, 19 nt, Homo sapiens
  misc_RNA (1)...(19): siRNA sense strand
aagugucucucuuugauuu

SEQ ID NO: 1023483 - RNA, 19 nt, Homo sapiens
  misc_RNA (1)...(19): siRNA sense strand
uggcucaaguccugcuuua

SEQ ID NO: 1023484 - RNA, 19 nt, Homo sapiens
  misc_RNA (1)...(19): siRNA sense strand
agaaagcaauacagguuug

SEQ ID NO: 1023485 - RNA, 19 nt, Homo sapiens
  misc_RNA (1)...(19): siRNA sense strand
guauguauccgacuuguca

SEQ ID NO: 1023486 - RNA, 19 nt, Homo sapiens
  misc_RNA (1)...(19): siRNA sense strand
gaaggcugaaguuguguuu

SEQ ID NO: 1023487 - RNA, 19 nt, Homo sapiens
  misc_RNA (1)...(19): siRNA sense strand
aaggguaccuggaugauuc

SEQ ID NO: 1023488 - RNA, 19 nt, Homo sapiens
  misc_RNA (1)...(19): siRNA sense strand
ggacaggcugaauccauuu

SEQ ID NO: 1023489 - RNA, 19 nt, Homo sapiens
  misc_RNA (1)...(19): siRNA sense strand
gaggaagacacauucauca

SEQ ID NO: 1023490 - RNA, 19 nt, Homo sapiens
  misc_RNA (1)...(19): siRNA sense strand
ggaggaagacacauucauc

SEQ ID NO: 1023491 - RNA, 19 nt, Homo sapiens
  misc_RNA (1)...(19): siRNA sense strand
caacuucgcccugcuuuca

SEQ ID NO: 1023492 - RNA, 19 nt, Homo sapiens
  misc_RNA (1)...(19): siRNA sense strand
cggaugcaguuguagguuu

SEQ ID NO: 1023493 - RNA, 19 nt, Homo sapiens
  misc_RNA (1)...(19): siRNA sense strand
ugaaaucccacuuauaaag

SEQ ID NO: 1023494 - RNA, 19 nt, Homo sapiens
  misc_RNA (1)...(19): siRNA sense strand
gaaguuuccagauugucua

SEQ ID NO: 1023495 - RNA, 19 nt, Homo sapiens
  misc_RNA (1)...(19): siRNA sense strand
ggugcugucuuucuacaau

SEQ ID NO: 1023496 - RNA, 19 nt, Homo sapiens
  misc_RNA (1)...(19): siRNA sense strand
aagcagaacuccuggacau

SEQ ID NO: 1023497 - RNA, 19 nt, Homo sapiens
  misc_RNA (1)...(19): siRNA sense strand
gaggcaaccuggauucaac

SEQ ID NO: 1023498 - RNA, 19 nt, Homo sapiens
  misc_RNA (1)...(19): siRNA sense strand
gccacaaaguuuccugaga

SEQ ID NO: 1023499 - RNA, 19 nt, Homo sapiens
  misc_RNA (1)...(19): siRNA sense strand
gaagugucucucuuugauu

SEQ ID NO: 1023500 - RNA, 19 nt, Homo sapiens
  misc_RNA (1)...(19): siRNA sense strand
uagccgaguuuaagaggaa

SEQ ID NO: 1023501 - RNA, 19 nt, Homo sapiens
  misc_RNA (1)...(19): siRNA sense strand
ugaugacccugaaggagaa

SEQ ID NO: 1023502 - RNA, 19 nt, Homo sapiens
  misc_RNA (1)...(19): siRNA sense strand
ggacagccgagaccacgaa

SEQ ID NO: 1023503 - RNA, 19 nt, Homo sapiens
  misc_RNA (1)...(19): siRNA sense strand
uggaaauacugggaaguuu

SEQ ID NO: 1023504 - RNA, 19 nt, Homo sapiens
  misc_RNA (1)...(19): siRNA sense strand
uaagcucuauagccacaaa

SEQ ID NO: 1023505 - RNA, 19 nt, Homo sapiens
  misc_RNA (1)...(19): siRNA sense strand
cugcagcacacaugucuua

SEQ ID NO: 1023506 - RNA, 19 nt, Homo sapiens
  misc_RNA (1)...(19): siRNA sense strand
ggacccugcccacuaaaga

SEQ ID NO: 1023507 - RNA, 19 nt, Homo sapiens
  misc_RNA (1)...(19): siRNA sense strand
gugcaacccugugugcuau

SEQ ID NO: 1023508 - RNA, 19 nt, Homo sapiens
  misc_RNA (1)...(19): siRNA sense strand
uuaaggaagugucucucuu

SEQ ID NO: 1023509 - RNA, 19 nt, Homo sapiens
  misc_RNA (1)...(19): siRNA sense strand
ggagagaacaccauaucgu

SEQ ID NO: 1023510 - RNA, 19 nt, Homo sapiens
  misc_RNA (1)...(19): siRNA sense strand
gcauggaggaagacacauu

SEQ ID NO: 1023511 - RNA, 19 nt, Homo sapiens
  misc_RNA (1)...(19): siRNA sense strand
gauaaggaacuuggaagga

SEQ ID NO: 1023512 - RNA, 19 nt, Homo sapiens
  misc_RNA (1)...(19): siRNA sense strand
uaugccaccuuuccucuug

SEQ ID NO: 1023513 - RNA, 19 nt, Homo sapiens
  misc_RNA (1)...(19): siRNA sense strand
uaagaggaaggcugaaguu

SEQ ID NO: 1023514 - RNA, 19 nt, Homo sapiens
  misc_RNA (1)...(19): siRNA sense strand
gagcuuucauuugguagga

SEQ ID NO: 1023515 - RNA, 19 nt, Homo sapiens
  misc_RNA (1)...(19): siRNA sense strand
gaugauucaggauacagua

SEQ ID NO: 1023516 - RNA, 19 nt, Homo sapiens
  misc_RNA (1)...(19): siRNA sense strand
cagaaggccugaggagcuu

SEQ ID NO: 1023517 - RNA, 19 nt, Homo sapiens
  misc_RNA (1)...(19): siRNA sense strand
cauugcagcuggauuaacu

SEQ ID NO: 1023518 - RNA, 19 nt, Homo sapiens
  misc_RNA (1)...(19): siRNA sense strand
cuugggacccuuucuagua

SEQ ID NO: 1023519 - RNA, 19 nt, Homo sapiens
  misc_RNA (1)...(19): siRNA sense strand
gguuuuagauucccacaaa

SEQ ID NO: 1023520 - RNA, 19 nt, Homo sapiens
  misc_RNA (1)...(19): siRNA sense strand
agaaccagacccucaauga

SEQ ID NO: 1023521 - RNA, 19 nt, Homo sapiens
  misc_RNA (1)...(19): siRNA sense strand
gaaccugcugugucacuug

SEQ ID NO: 1023522 - RNA, 19 nt, Homo sapiens
  misc_RNA (1)...(19): siRNA sense strand
aaggaagugucucucuuug

SEQ ID NO: 1023523 - RNA, 19 nt, Homo sapiens
  misc_RNA (1)...(19): siRNA sense strand
guggaccaguucugucuug

SEQ ID NO: 1023524 - RNA, 19 nt, Homo sapiens
  misc_RNA (1)...(19): siRNA sense strand
uuaauuguuuggcguggaa

SEQ ID NO: 1023525 - RNA, 19 nt, Homo sapiens
  misc_RNA (1)...(19): siRNA sense strand
cacccuaucagguuaauug

SEQ ID NO: 1023526 - RNA, 19 nt, Homo sapiens
  misc_RNA (1)...(19): siRNA sense strand
ggugcaacccugugugcua

SEQ ID NO: 1023527 - RNA, 19 nt, Homo sapiens
  misc_RNA (1)...(19): siRNA sense strand
gcgcauugcucuggcucuu

SEQ ID NO: 1023528 - RNA, 19 nt, Homo sapiens
  misc_RNA (1)...(19): siRNA sense strand
caauacagguuugggacau

SEQ ID NO: 1023529 - RNA, 19 nt, Homo sapiens
  misc_RNA (1)...(19): siRNA sense strand
gugauaagauccccagcua

SEQ ID NO: 1023530 - RNA, 19 nt, Homo sapiens
  misc_RNA (1)...(19): siRNA sense strand
ggaaccugcugugucacuu

SEQ ID NO: 1023531 - RNA, 19 nt, Homo sapiens
  misc_RNA (1)...(19): siRNA sense strand
gauaagauccccagcuaug

SEQ ID NO: 1023532 - RNA, 19 nt, Homo sapiens
  misc_RNA (1)...(19): siRNA sense strand
gcaggagcuugggaccauu

SEQ ID NO: 1023533 - RNA, 19 nt, Homo sapiens
  misc_RNA (1)...(19): siRNA sense strand
gugucucucuuugauuuaa

SEQ ID NO: 1023534 - RNA, 19 nt, Homo sapiens
  misc_RNA (1)...(19): siRNA sense strand
ggaacagcagugauaagau

SEQ ID NO: 1023535 - RNA, 19 nt, Homo sapiens
  misc_RNA (1)...(19): siRNA sense strand
gaauuccucugggcugucu

SEQ ID NO: 1023536 - RNA, 19 nt, Homo sapiens
  misc_RNA (1)...(19): siRNA sense strand
gaugaauuaagcucuauag

SEQ ID NO: 1023537 - RNA, 19 nt, Homo sapiens
  misc_RNA (1)...(19): siRNA sense strand
ggacgacuccauugcugau

SEQ ID NO: 1023538 - RNA, 19 nt, Homo sapiens
  misc_RNA (1)...(19): siRNA sense strand
ugugugcccuuucugauca

SEQ ID NO: 1023539 - RNA, 19 nt, Homo sapiens
  misc_RNA (1)...(19): siRNA sense strand
ucaagcuccugggacagua

SEQ ID NO: 1023540 - RNA, 19 nt, Homo sapiens
  misc_RNA (1)...(19): siRNA sense strand
ugggagcuguccaggguuu

SEQ ID NO: 1023541 - RNA, 19 nt, Homo sapiens
  misc_RNA (1)...(19): siRNA sense strand
ucccuaagcuggcaaacag

SEQ ID NO: 1023542 - RNA, 19 nt, Homo sapiens
  misc_RNA (1)...(19): siRNA sense strand
ggugguaguggccagaauu

SEQ ID NO: 1023543 - RNA, 19 nt, Homo sapiens
  misc_RNA (1)...(19): siRNA sense strand
gccaagagccaggucauca

SEQ ID NO: 1023544 - RNA, 19 nt, Homo sapiens
  misc_RNA (1)...(19): siRNA sense strand
gaagagcuuucauuuggua

SEQ ID NO: 1023545 - RNA, 19 nt, Homo sapiens
  misc_RNA (1)...(19): siRNA sense strand
gaacagcagugauaagauc

SEQ ID NO: 1023546 - RNA, 19 nt, Homo sapiens
  misc_RNA (1)...(19): siRNA sense strand
gaagugccgucucccagua

SEQ ID NO: 1023547 - RNA, 19 nt, Homo sapiens
  misc_RNA (1)...(19): siRNA sense strand
uguaugagcuucuguuaaa

SEQ ID NO: 1023548 - RNA, 19 nt, Homo sapiens
  misc_RNA (1)...(19): siRNA sense strand
ggaagugucucucuuugau

SEQ ID NO: 1023549 - RNA, 19 nt, Homo sapiens
  misc_RNA (1)...(19): siRNA sense strand
ggagaugaauuaagcucua

SEQ ID NO: 1023550 - RNA, 19 nt, Homo sapiens
  misc_RNA (1)...(19): siRNA sense strand
caugagcacugacuucuuu

SEQ ID NO: 1023551 - RNA, 19 nt, Homo sapiens
  misc_RNA (1)...(19): siRNA sense strand
gcauugcucuggcucuuaa

SEQ ID NO: 1023552 - RNA, 19 nt, Homo sapiens
  misc_RNA (1)...(19): siRNA sense strand
gaggaaggcugaaguugug

SEQ ID NO: 1023553 - RNA, 19 nt, Homo sapiens
  misc_RNA (1)...(19): siRNA sense strand
ccuaucagguuaauuguuu

SEQ ID NO: 1023554 - RNA, 19 nt, Homo sapiens
  misc_RNA (1)...(19): siRNA sense strand
ccacaaaguuuccugagau

SEQ ID NO: 1023555 - RNA, 19 nt, Homo sapiens
  misc_RNA (1)...(19): siRNA sense strand
ggagaaagcaauacagguu

SEQ ID NO: 1023556 - RNA, 19 nt, Homo sapiens
  misc_RNA (1)...(19): siRNA sense strand
gaaaucccacuuauaaaga

SEQ ID NO: 1023557 - RNA, 19 nt, Homo sapiens
  misc_RNA (1)...(19): siRNA sense strand
caaccuggauucaacucua

SEQ ID NO: 1023558 - RNA, 19 nt, Homo sapiens
  misc_RNA (1)...(19): siRNA sense strand
gaccauugcagcuggauua

SEQ ID NO: 1023559 - RNA, 19 nt, Homo sapiens
  misc_RNA (1)...(19): siRNA sense strand
gcuauaaacaucacugaaa

SEQ ID NO: 1023560 - RNA, 19 nt, Homo sapiens
  misc_RNA (1)...(19): siRNA sense strand
ucacugaaaucccacuuau

SEQ ID NO: 1023561 - RNA, 19 nt, Homo sapiens
  misc_RNA (1)...(19): siRNA sense strand
acaaggauuugaugccaua

SEQ ID NO: 1023562 - RNA, 19 nt, Homo sapiens
  misc_RNA (1)...(19): siRNA sense strand
gaccucagcuccauagaca

SEQ ID NO: 1023563 - RNA, 19 nt, Homo sapiens
  misc_RNA (1)...(19): siRNA sense strand
uaaaaugccuuccugauga

SEQ ID NO: 1023564 - RNA, 19 nt, Homo sapiens
  misc_RNA (1)...(19): siRNA sense strand
gggacaggcugaauccauu

SEQ ID NO: 1023565 - RNA, 19 nt, Homo sapiens
  misc_RNA (1)...(19): siRNA sense strand
caagguauccucagcaaga

SEQ ID NO: 1023566 - RNA, 19 nt, Homo sapiens
  misc_RNA (1)...(19): siRNA sense strand
gcaacccugugugcuauaa

SEQ ID NO: 1023567 - RNA, 19 nt, Homo sapiens
  misc_RNA (1)...(19): siRNA sense strand
caucuugucugccaaauac

SEQ ID NO: 1023568 - RNA, 19 nt, Homo sapiens
  misc_RNA (1)...(19): siRNA sense strand
acugaaaucccacuuauaa

SEQ ID NO: 1023569 - RNA, 19 nt, Homo sapiens
  misc_RNA (1)...(19): siRNA sense strand
gagaaagcaauacagguuu

SEQ ID NO: 1023570 - RNA, 19 nt, Homo sapiens
  misc_RNA (1)...(19): siRNA sense strand
gcagaacuccuggacauug

SEQ ID NO: 1023571 - RNA, 19 nt, Homo sapiens
  misc_RNA (1)...(19): siRNA sense strand
gauugucuaugccaccuuu

SEQ ID NO: 1023572 - RNA, 19 nt, Homo sapiens
  misc_RNA (1)...(19): siRNA sense strand
ggaugcaguuguagguuug

SEQ ID NO: 1023573 - RNA, 19 nt, Homo sapiens
  misc_RNA (1)...(19): siRNA sense strand
ggacuugggacccuuucua

SEQ ID NO: 1023574 - RNA, 19 nt, Homo sapiens
  misc_RNA (1)...(19): siRNA sense strand
cugaugagauauucaaaga

SEQ ID NO: 1023575 - RNA, 19 nt, Homo sapiens
  misc_RNA (1)...(19): siRNA sense strand
gcagcuggauuaacuaagg

SEQ ID NO: 1023576 - RNA, 19 nt, Homo sapiens
  misc_RNA (1)...(19): siRNA sense strand
uaaggaagugucucucuuu

SEQ ID NO: 1023577 - RNA, 19 nt, Homo sapiens
  misc_RNA (1)...(19): siRNA sense strand
gagaugaauuaagcucuau

SEQ ID NO: 1023578 - RNA, 19 nt, Homo sapiens
  misc_RNA (1)...(19): siRNA sense strand
aggauuugaugccauauuu

SEQ ID NO: 1023579 - RNA, 19 nt, Homo sapiens
  misc_RNA (1)...(19): siRNA sense strand
augagaaggugcugucuuu

SEQ ID NO: 1023580 - RNA, 19 nt, Homo sapiens
  misc_RNA (1)...(19): siRNA sense strand
uuugggacaugccaucuua

SEQ ID NO: 1023581 - RNA, 19 nt, Homo sapiens
  misc_RNA (1)...(19): siRNA sense strand
gaacaacuucgcccugcuu

SEQ ID NO: 1023582 - RNA, 19 nt, Homo sapiens
  misc_RNA (1)...(19): siRNA sense strand
aagugucucucuuugauuu

SEQ ID NO: 1023583 - RNA, 19 nt, Homo sapiens
  misc_RNA (1)...(19): siRNA sense strand
uggcucaaguccugcuuua

SEQ ID NO: 1023584 - RNA, 19 nt, Homo sapiens
  misc_RNA (1)...(19): siRNA sense strand
agaaagcaauacagguuug

SEQ ID NO: 1023585 - RNA, 19 nt, Homo sapiens
  misc_RNA (1)...(19): siRNA sense strand
guauguauccgacuuguca

SEQ ID NO: 1023586 - RNA, 19 nt, Homo sapiens
  misc_RNA (1)...(19): siRNA sense strand
gaaggcugaaguuguguuu

SEQ ID NO: 1023587 - RNA, 19 nt, Homo sapiens
  misc_RNA (1)...(19): siRNA sense strand
aaggguaccuggaugauuc

SEQ ID NO: 1023588 - RNA, 19 nt, Homo sapiens
  misc_RNA (1)...(19): siRNA sense strand
ggacaggcugaauccauuu

SEQ ID NO: 1023589 - RNA, 19 nt, Homo sapiens
  misc_RNA (1)...(19): siRNA sense strand
gaggaagacacauucauca

SEQ ID NO: 1023590 - RNA, 19 nt, Homo sapiens
  misc_RNA (1)...(19): siRNA sense strand
ggaggaagacacauucauc

SEQ ID NO: 1023591 - RNA, 19 nt, Homo sapiens
  misc_RNA (1)...(19): siRNA sense strand
caacuucgcccugcuuuca

SEQ ID NO: 1023592 - RNA, 19 nt, Homo sapiens
  misc_RNA (1)...(19): siRNA sense strand
cggaugcaguuguagguuu

SEQ ID NO: 1023593 - RNA, 19 nt, Homo sapiens
  misc_RNA (1)...(19): siRNA sense strand
ugaaaucccacuuauaaag

SEQ ID NO: 1023594 - RNA, 19 nt, Homo sapiens
  misc_RNA (1)...(19): siRNA sense strand
gaaguuuccagauugucua

SEQ ID NO: 1023595 - RNA, 19 nt, Homo sapiens
  misc_RNA (1)...(19): siRNA sense strand
ggugcugucuuucuacaau

SEQ ID NO: 1023596 - RNA, 19 nt, Homo sapiens
  misc_RNA (1)...(19): siRNA sense strand
aagcagaacuccuggacau

SEQ ID NO: 1023597 - RNA, 19 nt, Homo sapiens
  misc_RNA (1)...(19): siRNA sense strand
gaggcaaccuggauucaac

SEQ ID NO: 1023598 - RNA, 19 nt, Homo sapiens
  misc_RNA (1)...(19): siRNA sense strand
gccacaaaguuuccugaga

SEQ ID NO: 1023599 - RNA, 19 nt, Homo sapiens
  misc_RNA (1)...(19): siRNA sense strand
gaagugucucucuuugauu

SEQ ID NO: 1023600 - RNA, 19 nt, Homo sapiens
  misc_RNA (1)...(19): siRNA sense strand
uagccgaguuuaagaggaa

SEQ ID NO: 1023601 - RNA, 19 nt, Homo sapiens
  misc_RNA (1)...(19): siRNA sense strand
ugaugacccugaaggagaa

SEQ ID NO: 1023602 - RNA, 19 nt, Homo sapiens
  misc_RNA (1)...(19): siRNA sense strand
ggacagccgagaccacgaa

SEQ ID NO: 1023603 - RNA, 19 nt, Homo sapiens
  misc_RNA (1)...(19): siRNA sense strand
uggaaauacugggaaguuu

SEQ ID NO: 1023604 - RNA, 19 nt, Homo sapiens
  misc_RNA (1)...(19): siRNA sense strand
uaagcucuauagccacaaa

SEQ ID NO: 1023605 - RNA, 19 nt, Homo sapiens
  misc_RNA (1)...(19): siRNA sense strand
cugcagcacacaugucuua

SEQ ID NO: 1023606 - RNA, 19 nt, Homo sapiens
  misc_RNA (1)...(19): siRNA sense strand
ggacccugcccacuaaaga

SEQ ID NO: 1023607 - RNA, 19 nt, Homo sapiens
  misc_RNA (1)...(19): siRNA sense strand
gugcaacccugugugcuau

SEQ ID NO: 1023608 - RNA, 19 nt, Homo sapiens
  misc_RNA (1)...(19): siRNA sense strand
uuaaggaagugucucucuu

SEQ ID NO: 1023609 - RNA, 19 nt, Homo sapiens
  misc_RNA (1)...(19): siRNA sense strand
ggagagaacaccauaucgu

SEQ ID NO: 1023610 - RNA, 19 nt, Homo sapiens
  misc_RNA (1)...(19): siRNA sense strand
gcauggaggaagacacauu

SEQ ID NO: 1023611 - RNA, 19 nt, Homo sapiens
  misc_RNA (1)...(19): siRNA sense strand
gauaaggaacuuggaagga

SEQ ID NO: 1023612 - RNA, 19 nt, Homo sapiens
  misc_RNA (1)...(19): siRNA sense strand
uaugccaccuuuccucuug

SEQ ID NO: 1023613 - RNA, 19 nt, Homo sapiens
  misc_RNA (1)...(19): siRNA sense strand
uaagaggaaggcugaaguu

SEQ ID NO: 1023614 - RNA, 19 nt, Homo sapiens
  misc_RNA (1)...(19): siRNA sense strand
gagcuuucauuugguagga

SEQ ID NO: 1023615 - RNA, 19 nt, Homo sapiens
  misc_RNA (1)...(19): siRNA sense strand
gaugauucaggauacagua

SEQ ID NO: 1023616 - RNA, 19 nt, Homo sapiens
  misc_RNA (1)...(19): siRNA sense strand
cagaaggccugaggagcuu

SEQ ID NO: 1023617 - RNA, 19 nt, Homo sapiens
  misc_RNA (1)...(19): siRNA sense strand
cauugcagcuggauuaacu

SEQ ID NO: 1023618 - RNA, 19 nt, Homo sapiens
  misc_RNA (1)...(19): siRNA sense strand
cuugggacccuuucuagua

SEQ ID NO: 1023619 - RNA, 19 nt, Homo sapiens
  misc_RNA (1)...(19): siRNA sense strand
gguuuuagauucccacaaa

SEQ ID NO: 1023620 - RNA, 19 nt, Homo sapiens
  misc_RNA (1)...(19): siRNA sense strand
agaaccagacccucaauga

SEQ ID NO: 1023621 - RNA, 19 nt, Homo sapiens
  misc_RNA (1)...(19): siRNA sense strand
gaaccugcugugucacuug

SEQ ID NO: 1023622 - RNA, 19 nt, Homo sapiens
  misc_RNA (1)...(19): siRNA sense strand
aaggaagugucucucuuug

SEQ ID NO: 1023623 - RNA, 19 nt, Homo sapiens
  misc_RNA (1)...(19): siRNA sense strand
guggaccaguucugucuug

SEQ ID NO: 1023624 - RNA, 19 nt, Homo sapiens
  misc_RNA (1)...(19): siRNA sense strand
uuaauuguuuggcguggaa

SEQ ID NO: 1023625 - RNA, 19 nt, Homo sapiens
  misc_RNA (1)...(19): siRNA sense strand
cacccuaucagguuaauug

SEQ ID NO: 1023626 - RNA, 19 nt, Homo sapiens
  misc_RNA (1)...(19): siRNA sense strand
ggugcaacccugugugcua

SEQ ID NO: 1023627 - RNA, 19 nt, Homo sapiens
  misc_RNA (1)...(19): siRNA sense strand
gcgcauugcucuggcucuu

SEQ ID NO: 1023628 - RNA, 19 nt, Homo sapiens
  misc_RNA (1)...(19): siRNA sense strand
caauacagguuugggacau

SEQ ID NO: 1023629 - RNA, 19 nt, Homo sapiens
  misc_RNA (1)...(19): siRNA sense strand
gugauaagauccccagcua

SEQ ID NO: 1023630 - RNA, 19 nt, Homo sapiens
  misc_RNA (1)...(19): siRNA sense strand
ggaaccugcugugucacuu

SEQ ID NO: 1023631 - RNA, 19 nt, Homo sapiens
  misc_RNA (1)...(19): siRNA sense strand
gauaagauccccagcuaug

SEQ ID NO: 1023632 - RNA, 19 nt, Homo sapiens
  misc_RNA (1)...(19): siRNA sense strand
gcaggagcuugggaccauu

SEQ ID NO: 1023633 - RNA, 19 nt, Homo sapiens
  misc_RNA (1)...(19): siRNA sense strand
gugucucucuuugauuuaa

SEQ ID NO: 1023634 - RNA, 19 nt, Homo sapiens
  misc_RNA (1)...(19): siRNA sense strand
ggaacagcagugauaagau

SEQ ID NO: 1023635 - RNA, 19 nt, Homo sapiens
  misc_RNA (1)...(19): siRNA sense strand
gaauuccucugggcugucu

SEQ ID NO: 1023636 - RNA, 19 nt, Homo sapiens
  misc_RNA (1)...(19): siRNA sense strand
gaugaauuaagcucuauag

SEQ ID NO: 1023637 - RNA, 19 nt, Homo sapiens
  misc_RNA (1)...(19): siRNA sense strand
ggacgacuccauugcugau

SEQ ID NO: 1023638 - RNA, 19 nt, Homo sapiens
  misc_RNA (1)...(19): siRNA sense strand
ugugugcccuuucugauca

SEQ ID NO: 1023639 - RNA, 19 nt, Homo sapiens
  misc_RNA (1)...(19): siRNA sense strand
ucaagcuccugggacagua

SEQ ID NO: 1023640 - RNA, 19 nt, Homo sapiens
  misc_RNA (1)...(19): siRNA sense strand
ugggagcuguccaggguuu

SEQ ID NO: 1023641 - RNA, 19 nt, Homo sapiens
  misc_RNA (1)...(19): siRNA sense strand
ucccuaagcuggcaaacag

SEQ ID NO: 1023642 - RNA, 19 nt, Homo sapiens
  misc_RNA (1)...(19): siRNA sense strand
ggugguaguggccagaauu

SEQ ID NO: 1023643 - RNA, 19 nt, Homo sapiens
  misc_RNA (1)...(19): siRNA sense strand
gccaagagccaggucauca

SEQ ID NO: 1023644 - RNA, 19 nt, Homo sapiens
  misc_RNA (1)...(19): siRNA sense strand
gaagagcuuucauuuggua

SEQ ID NO: 1023645 - RNA, 19 nt, Homo sapiens
  misc_RNA (1)...(19): siRNA sense strand
gaacagcagugauaagauc

SEQ ID NO: 1023646 - RNA, 19 nt, Homo sapiens
  misc_RNA (1)...(19): siRNA sense strand
gaagugccgucucccagua

SEQ ID NO: 1023647 - RNA, 19 nt, Homo sapiens
  misc_RNA (1)...(19): siRNA sense strand
uguaugagcuucuguuaaa

SEQ ID NO: 1023648 - RNA, 19 nt, Homo sapiens
  misc_RNA (1)...(19): siRNA sense strand
ggaagugucucucuuugau

SEQ ID NO: 1023649 - RNA, 19 nt, Homo sapiens
  misc_RNA (1)...(19): siRNA sense strand
ggagaugaauuaagcucua

SEQ ID NO: 1023650 - RNA, 19 nt, Homo sapiens
  misc_RNA (1)...(19): siRNA sense strand
caugagcacugacuucuuu

SEQ ID NO: 1023651 - RNA, 19 nt, Homo sapiens
  misc_RNA (1)...(19): siRNA sense strand
gcauugcucuggcucuuaa

SEQ ID NO: 1023652 - RNA, 19 nt, Homo sapiens
  misc_RNA (1)...(19): siRNA sense strand
gaggaaggcugaaguugug

SEQ ID NO: 1023653 - RNA, 19 nt, Homo sapiens
  misc_RNA (1)...(19): siRNA sense strand
ccuaucagguuaauuguuu

SEQ ID NO: 1023654 - RNA, 19 nt, Homo sapiens
  misc_RNA (1)...(19): siRNA sense strand
ccacaaaguuuccugagau

SEQ ID NO: 1023655 - RNA, 19 nt, Homo sapiens
  misc_RNA (1)...(19): siRNA sense strand
ggagaaagcaauacagguu

SEQ ID NO: 1023656 - RNA, 19 nt, Homo sapiens
  misc_RNA (1)...(19): siRNA sense strand
gaaaucccacuuauaaaga

SEQ ID NO: 1023657 - RNA, 19 nt, Homo sapiens
  misc_RNA (1)...(19): siRNA sense strand
caaccuggauucaacucua

SEQ ID NO: 1023658 - RNA, 19 nt, Homo sapiens
  misc_RNA (1)...(19): siRNA sense strand
gaccauugcagcuggauua

SEQ ID NO: 1023659 - RNA, 19 nt, Homo sapiens
  misc_RNA (1)...(19): siRNA sense strand
gcuauaaacaucacugaaa

SEQ ID NO: 1023660 - RNA, 19 nt, Homo sapiens
  misc_RNA (1)...(19): siRNA sense strand
ucacugaaaucccacuuau

SEQ ID NO: 1023661 - RNA, 19 nt, Homo sapiens
  misc_RNA (1)...(19): siRNA sense strand
acaaggauuugaugccaua

SEQ ID NO: 1023662 - RNA, 19 nt, Homo sapiens
  misc_RNA (1)...(19): siRNA sense strand
gaccucagcuccauagaca

SEQ ID NO: 1023663 - RNA, 19 nt, Homo sapiens
  misc_RNA (1)...(19): siRNA sense strand
uaaaaugccuuccugauga

SEQ ID NO: 1023664 - RNA, 19 nt, Homo sapiens
  misc_RNA (1)...(19): siRNA sense strand
gggacaggcugaauccauu

SEQ ID NO: 1023665 - RNA, 19 nt, Homo sapiens
  misc_RNA (1)...(19): siRNA sense strand
caagguauccucagcaaga

SEQ ID NO: 1023666 - RNA, 19 nt, Homo sapiens
  misc_RNA (1)...(19): siRNA sense strand
gcaacccugugugcuauaa

SEQ ID NO: 1023667 - RNA, 19 nt, Homo sapiens
  misc_RNA (1)...(19): siRNA sense strand
caucuugucugccaaauac

SEQ ID NO: 1023668 - RNA, 19 nt, Homo sapiens
  misc_RNA (1)...(19): siRNA sense strand
acugaaaucccacuuauaa

SEQ ID NO: 1023669 - RNA, 19 nt, Homo sapiens
  misc_RNA (1)...(19): siRNA sense strand
gagaaagcaauacagguuu

SEQ ID NO: 1023670 - RNA, 19 nt, Homo sapiens
  misc_RNA (1)...(19): siRNA sense strand
gcagaacuccuggacauug

SEQ ID NO: 1023671 - RNA, 19 nt, Homo sapiens
  misc_RNA (1)...(19): siRNA sense strand
gauugucuaugccaccuuu

SEQ ID NO: 1023672 - RNA, 19 nt, Homo sapiens
  misc_RNA (1)...(19): siRNA sense strand
ggaugcaguuguagguuug

SEQ ID NO: 1023673 - RNA, 19 nt, Homo sapiens
  misc_RNA (1)...(19): siRNA sense strand
ggacuugggacccuuucua

SEQ ID NO: 1023674 - RNA, 19 nt, Homo sapiens
  misc_RNA (1)...(19): siRNA sense strand
cugaugagauauucaaaga

SEQ ID NO: 1023675 - RNA, 19 nt, Homo sapiens
  misc_RNA (1)...(19): siRNA sense strand
gcagcuggauuaacuaagg

SEQ ID NO: 1023676 - RNA, 19 nt, Homo sapiens
  misc_RNA (1)...(19): siRNA sense strand
uaaggaagugucucucuuu

SEQ ID NO: 1023677 - RNA, 19 nt, Homo sapiens
  misc_RNA (1)...(19): siRNA sense strand
gagaugaauuaagcucuau

SEQ ID NO: 1023678 - RNA, 19 nt, Homo sapiens
  misc_RNA (1)...(19): siRNA sense strand
aggauuugaugccauauuu

SEQ ID NO: 1023679 - RNA, 19 nt, Homo sapiens
  misc_RNA (1)...(19): siRNA sense strand
augagaaggugcugucuuu

SEQ ID NO: 1023680 - RNA, 19 nt, Homo sapiens
  misc_RNA (1)...(19): siRNA sense strand
uuugggacaugccaucuua

SEQ ID NO: 1023681 - RNA, 19 nt, Homo sapiens
  misc_RNA (1)...(19): siRNA sense strand
gaacaacuucgcccugcuu

SEQ ID NO: 1023682 - RNA, 19 nt, Homo sapiens
  misc_RNA (1)...(19): siRNA sense strand
aagugucucucuuugauuu

SEQ ID NO: 1023683 - RNA, 19 nt, Homo sapiens
  misc_RNA (1)...(19): siRNA sense strand
uggcucaaguccugcuuua

SEQ ID NO: 1023684 - RNA, 19 nt, Homo sapiens
  misc_RNA (1)...(19): siRNA sense strand
agaaagcaauacagguuug

SEQ ID NO: 1023685 - RNA, 19 nt, Homo sapiens
  misc_RNA (1)...(19): siRNA sense strand
guauguauccgacuuguca

SEQ ID NO: 1023686 - RNA, 19 nt, Homo sapiens
  misc_RNA (1)...(19): siRNA sense strand
gaaggcugaaguuguguuu

SEQ ID NO: 1023687 - RNA, 19 nt, Homo sapiens
  misc_RNA (1)...(19): siRNA sense strand
aaggguaccuggaugauuc

SEQ ID NO: 1023688 - RNA, 19 nt, Homo sapiens
  misc_RNA (1)...(19): siRNA sense strand
ggacaggcugaauccauuu

SEQ ID NO: 1023689 - RNA, 19 nt, Homo sapiens
  misc_RNA (1)...(19): siRNA sense strand
gaggaagacacauucauca

SEQ ID NO: 1023690 - RNA, 19 nt, Homo sapiens
  misc_RNA (1)...(19): siRNA sense strand
ggaggaagacacauucauc

SEQ ID NO: 1023691 - RNA, 19 nt, Homo sapiens
  misc_RNA (1)...(19): siRNA sense strand
caacuucgcccugcuuuca

SEQ ID NO: 1023692 - RNA, 19 nt, Homo sapiens
  misc_RNA (1)...(19): siRNA sense strand
cggaugcaguuguagguuu

SEQ ID NO: 1023693 - RNA, 19 nt, Homo sapiens
  misc_RNA (1)...(19): siRNA sense strand
ugaaaucccacuuauaaag

SEQ ID NO: 1023694 - RNA, 19 nt, Homo sapiens
  misc_RNA (1)...(19): siRNA sense strand
gaaguuuccagauugucua

SEQ ID NO: 1023695 - RNA, 19 nt, Homo sapiens
  misc_RNA (1)...(19): siRNA sense strand
ggugcugucuuucuacaau

SEQ ID NO: 1023696 - RNA, 19 nt, Homo sapiens
  misc_RNA (1)...(19): siRNA sense strand
aagcagaacuccuggacau

SEQ ID NO: 1023697 - RNA, 19 nt, Homo sapiens
  misc_RNA (1)...(19): siRNA sense strand
gaggcaaccuggauucaac

SEQ ID NO: 1023698 - RNA, 19 nt, Homo sapiens
  misc_RNA (1)...(19): siRNA sense strand
gccacaaaguuuccugaga

SEQ ID NO: 1023699 - RNA, 19 nt, Homo sapiens
  misc_RNA (1)...(19): siRNA sense strand
gaagugucucucuuugauu

SEQ ID NO: 1023700 - RNA, 19 nt, Homo sapiens
  misc_RNA (1)...(19): siRNA sense strand
uagccgaguuuaagaggaa

SEQ ID NO: 1023701 - RNA, 19 nt, Homo sapiens
  misc_RNA (1)...(19): siRNA sense strand
ugaugacccugaaggagaa

SEQ ID NO: 1023702 - RNA, 19 nt, Homo sapiens
  misc_RNA (1)...(19): siRNA sense strand
ggacagccgagaccacgaa

SEQ ID NO: 1023703 - RNA, 19 nt, Homo sapiens
  misc_RNA (1)...(19): siRNA sense strand
uggaaauacugggaaguuu

SEQ ID NO: 1023704 - RNA, 19 nt, Homo sapiens
  misc_RNA (1)...(19): siRNA sense strand
uaagcucuauagccacaaa

SEQ ID NO: 1023705 - RNA, 19 nt, Homo sapiens
  misc_RNA (1)...(19): siRNA sense strand
cugcagcacacaugucuua

SEQ ID NO: 1023706 - RNA, 19 nt, Homo sapiens
  misc_RNA (1)...(19): siRNA sense strand
ggacccugcccacuaaaga

SEQ ID NO: 1023707 - RNA, 19 nt, Homo sapiens
  misc_RNA (1)...(19): siRNA sense strand
gugcaacccugugugcuau

SEQ ID NO: 1023708 - RNA, 19 nt, Homo sapiens
  misc_RNA (1)...(19): siRNA sense strand
uuaaggaagugucucucuu

SEQ ID NO: 1023709 - RNA, 19 nt, Homo sapiens
  misc_RNA (1)...(19): siRNA sense strand
ggagagaacaccauaucgu

SEQ ID NO: 1023710 - RNA, 19 nt, Homo sapiens
  misc_RNA (1)...(19): siRNA sense strand
gcauggaggaagacacauu

SEQ ID NO: 1023711 - RNA, 19 nt, Homo sapiens
  misc_RNA (1)...(19): siRNA sense strand
gauaaggaacuuggaagga

SEQ ID NO: 1023712 - RNA, 19 nt, Homo sapiens
  misc_RNA (1)...(19): siRNA sense strand
uaugccaccuuuccucuug

SEQ ID NO: 1023713 - RNA, 19 nt, Homo sapiens
  misc_RNA (1)...(19): siRNA sense strand
uaagaggaaggcugaaguu

SEQ ID NO: 1023714 - RNA, 19 nt, Homo sapiens
  misc_RNA (1)...(19): siRNA sense strand
gagcuuucauuugguagga

SEQ ID NO: 1023715 - RNA, 19 nt, Homo sapiens
  misc_RNA (1)...(19): siRNA sense strand
gaugauucaggauacagua

SEQ ID NO: 1023716 - RNA, 19 nt, Homo sapiens
  misc_RNA (1)...(19): siRNA sense strand
cagaaggccugaggagcuu

SEQ ID NO: 1023717 - RNA, 19 nt, Homo sapiens
  misc_RNA (1)...(19): siRNA sense strand
cauugcagcuggauuaacu

SEQ ID NO: 1023718 - RNA, 19 nt, Homo sapiens
  misc_RNA (1)...(19): siRNA sense strand
cuugggacccuuucuagua

SEQ ID NO: 1023719 - RNA, 19 nt, Homo sapiens
  misc_RNA (1)...(19): siRNA sense strand
gguuuuagauucccacaaa

SEQ ID NO: 1023720 - RNA, 19 nt, Homo sapiens
  misc_RNA (1)...(19): siRNA sense strand
agaaccagacccucaauga

SEQ ID NO: 1023721 - RNA, 19 nt, Homo sapiens
  misc_RNA (1)...(19): siRNA sense strand
gaaccugcugugucacuug

SEQ ID NO: 1023722 - RNA, 19 nt, Homo sapiens
  misc_RNA (1)...(19): siRNA sense strand
aaggaagugucucucuuug

SEQ ID NO: 1023723 - RNA, 19 nt, Homo sapiens
  misc_RNA (1)...(19): siRNA sense strand
guggaccaguucugucuug

SEQ ID NO: 1023724 - RNA, 19 nt, Homo sapiens
  misc_RNA (1)...(19): siRNA sense strand
uuaauuguuuggcguggaa

SEQ ID NO: 1023725 - RNA, 19 nt, Homo sapiens
  misc_RNA (1)...(19): siRNA sense strand
cacccuaucagguuaauug

SEQ ID NO: 1023726 - RNA, 19 nt, Homo sapiens
  misc_RNA (1)...(19): siRNA sense strand
ggugcaacccugugugcua

SEQ ID NO: 1023727 - RNA, 19 nt, Homo sapiens
  misc_RNA (1)...(19): siRNA sense strand
gcgcauugcucuggcucuu

SEQ ID NO: 1023728 - RNA, 19 nt, Homo sapiens
  misc_RNA (1)...(19): siRNA sense strand
caauacagguuugggacau

SEQ ID NO: 1023729 - RNA, 19 nt, Homo sapiens
  misc_RNA (1)...(19): siRNA sense strand
gugauaagauccccagcua

SEQ ID NO: 1023730 - RNA, 19 nt, Homo sapiens
  misc_RNA (1)...(19): siRNA sense strand
ggaaccugcugugucacuu

SEQ ID NO: 1023731 - RNA, 19 nt, Homo sapiens
  misc_RNA (1)...(19): siRNA sense strand
gauaagauccccagcuaug

SEQ ID NO: 1023732 - RNA, 19 nt, Homo sapiens
  misc_RNA (1)...(19): siRNA sense strand
gcaggagcuugggaccauu

SEQ ID NO: 1023733 - RNA, 19 nt, Homo sapiens
  misc_RNA (1)...(19): siRNA sense strand
gugucucucuuugauuuaa

SEQ ID NO: 1023734 - RNA, 19 nt, Homo sapiens
  misc_RNA (1)...(19): siRNA sense strand
ggaacagcagugauaagau

SEQ ID NO: 1023735 - RNA, 19 nt, Homo sapiens
  misc_RNA (1)...(19): siRNA sense strand
gaauuccucugggcugucu

SEQ ID NO: 1023736 - RNA, 19 nt, Homo sapiens
  misc_RNA (1)...(19): siRNA sense strand
gaugaauuaagcucuauag

SEQ ID NO: 1023737 - RNA, 19 nt, Homo sapiens
  misc_RNA (1)...(19): siRNA sense strand
ggacgacuccauugcugau

SEQ ID NO: 1023738 - RNA, 19 nt, Homo sapiens
  misc_RNA (1)...(19): siRNA sense strand
ugugugcccuuucugauca

SEQ ID NO: 1023739 - RNA, 19 nt, Homo sapiens
  misc_RNA (1)...(19): siRNA sense strand
ucaagcuccugggacagua

SEQ ID NO: 1023740 - RNA, 19 nt, Homo sapiens
  misc_RNA (1)...(19): siRNA sense strand
ugggagcuguccaggguuu

SEQ ID NO: 1023741 - RNA, 19 nt, Homo sapiens
  misc_RNA (1)...(19): siRNA sense strand
ucccuaagcuggcaaacag

SEQ ID NO: 1023742 - RNA, 19 nt, Homo sapiens
  misc_RNA (1)...(19): siRNA sense strand
ggugguaguggccagaauu

SEQ ID NO: 1023743 - RNA, 19 nt, Homo sapiens
  misc_RNA (1)...(19): siRNA sense strand
gccaagagccaggucauca

SEQ ID NO: 1023744 - RNA, 19 nt, Homo sapiens
  misc_RNA (1)...(19): siRNA sense strand
ggaguuaccucugaacaaa

SEQ ID NO: 1023745 - RNA, 19 nt, Homo sapiens
  misc_RNA (1)...(19): siRNA sense strand
acaaagaacugacacagaa

SEQ ID NO: 1023746 - RNA, 19 nt, Homo sapiens
  misc_RNA (1)...(19): siRNA sense strand
ggacaaugauggagagaga

SEQ ID NO: 1023747 - RNA, 19 nt, Homo sapiens
  misc_RNA (1)...(19): siRNA sense strand
uagaggagcuggaagauga

SEQ ID NO: 1023748 - RNA, 19 nt, Homo sapiens
  misc_RNA (1)...(19): siRNA sense strand
ggaaaugggccaagucaaa

SEQ ID NO: 1023749 - RNA, 19 nt, Homo sapiens
  misc_RNA (1)...(19): siRNA sense strand
gaacaaagaagagauugaa

SEQ ID NO: 1023750 - RNA, 19 nt, Homo sapiens
  misc_RNA (1)...(19): siRNA sense strand
gaacaguugucuaagaaca

SEQ ID NO: 1023751 - RNA, 19 nt, Homo sapiens
  misc_RNA (1)...(19): siRNA sense strand
gaaaggaaaggccaagaaa

SEQ ID NO: 1023752 - RNA, 19 nt, Homo sapiens
  misc_RNA (1)...(19): siRNA sense strand
gcacaaguccucuccaaau

SEQ ID NO: 1023753 - RNA, 19 nt, Homo sapiens
  misc_RNA (1)...(19): siRNA sense strand
gaaagaauaggcggaaauu

SEQ ID NO: 1023754 - RNA, 19 nt, Homo sapiens
  misc_RNA (1)...(19): siRNA sense strand
agacgccgguuucucauua

SEQ ID NO: 1023755 - RNA, 19 nt, Homo sapiens
  misc_RNA (1)...(19): siRNA sense strand
ugaaugaagugcagaugaa

SEQ ID NO: 1023756 - RNA, 19 nt, Homo sapiens
  misc_RNA (1)...(19): siRNA sense strand
gaagaggagagaaaccaua

SEQ ID NO: 1023757 - RNA, 19 nt, Homo sapiens
  misc_RNA (1)...(19): siRNA sense strand
ggagagagaaagcaucaaa

SEQ ID NO: 1023758 - RNA, 19 nt, Homo sapiens
  misc_RNA (1)...(19): siRNA sense strand
gagcagcugcggaagguua

SEQ ID NO: 1023759 - RNA, 19 nt, Homo sapiens
  misc_RNA (1)...(19): siRNA sense strand
gcaacugaguagagucaaa

SEQ ID NO: 1023760 - RNA, 19 nt, Homo sapiens
  misc_RNA (1)...(19): siRNA sense strand
gugcuuccauauccauuua

SEQ ID NO: 1023761 - RNA, 19 nt, Homo sapiens
  misc_RNA (1)...(19): siRNA sense strand
gccaggaggugcugucuga

SEQ ID NO: 1023762 - RNA, 19 nt, Homo sapiens
  misc_RNA (1)...(19): siRNA sense strand
aggaagaacuagcggauuu

SEQ ID NO: 1023763 - RNA, 19 nt, Homo sapiens
  misc_RNA (1)...(19): siRNA sense strand
gcaauuauggccaaauaug

SEQ ID NO: 1023764 - RNA, 19 nt, Homo sapiens
  misc_RNA (1)...(19): siRNA sense strand
ucucagaaauugaaggaaa

SEQ ID NO: 1023765 - RNA, 19 nt, Homo sapiens
  misc_RNA (1)...(19): siRNA sense strand
gaacggauccacagagaag

SEQ ID NO: 1023766 - RNA, 19 nt, Homo sapiens
  misc_RNA (1)...(19): siRNA sense strand
gaaagaggagccagccauu

SEQ ID NO: 1023767 - RNA, 19 nt, Homo sapiens
  misc_RNA (1)...(19): siRNA sense strand
ugaguagagucaaaucaaa

SEQ ID NO: 1023768 - RNA, 19 nt, Homo sapiens
  misc_RNA (1)...(19): siRNA sense strand
gagaaguagcauucaauaa

SEQ ID NO: 1023769 - RNA, 19 nt, Homo sapiens
  misc_RNA (1)...(19): siRNA sense strand
caaagaagacaguggaguu

SEQ ID NO: 1023770 - RNA, 19 nt, Homo sapiens
  misc_RNA (1)...(19): siRNA sense strand
caggaacaguugucuaaga

SEQ ID NO: 1023771 - RNA, 19 nt, Homo sapiens
  misc_RNA (1)...(19): siRNA sense strand
ccacagagaaguagcauuc

SEQ ID NO: 1023772 - RNA, 19 nt, Homo sapiens
  misc_RNA (1)...(19): siRNA sense strand
ccagaaugauggaaagaau

SEQ ID NO: 1023773 - RNA, 19 nt, Homo sapiens
  misc_RNA (1)...(19): siRNA sense strand
uaauccagcugcagcacua

SEQ ID NO: 1023774 - RNA, 19 nt, Homo sapiens
  misc_RNA (1)...(19): siRNA sense strand
caaaugaucgaccuacaga

SEQ ID NO: 1023775 - RNA, 19 nt, Homo sapiens
  misc_RNA (1)...(19): siRNA sense strand
ggaaagaauaggcggaaau

SEQ ID NO: 1023776 - RNA, 19 nt, Homo sapiens
  misc_RNA (1)...(19): siRNA sense strand
aaagaagacaguggaguua

SEQ ID NO: 1023777 - RNA, 19 nt, Homo sapiens
  misc_RNA (1)...(19): siRNA sense strand
aggcaauuauggccaaaua

SEQ ID NO: 1023778 - RNA, 19 nt, Homo sapiens
  misc_RNA (1)...(19): siRNA sense strand
cacaaguccucuccaaaug

SEQ ID NO: 1023779 - RNA, 19 nt, Homo sapiens
  misc_RNA (1)...(19): siRNA sense strand
gaacaagcagccagugaca

SEQ ID NO: 1023780 - RNA, 19 nt, Homo sapiens
  misc_RNA (1)...(19): siRNA sense strand
cagaagauguggaagaacu

SEQ ID NO: 1023781 - RNA, 19 nt, Homo sapiens
  misc_RNA (1)...(19): siRNA sense strand
gaaagugagggagaagaaa

SEQ ID NO: 1023782 - RNA, 19 nt, Homo sapiens
  misc_RNA (1)...(19): siRNA sense strand
gaaagaaugagccuuaagc

SEQ ID NO: 1023783 - RNA, 19 nt, Homo sapiens
  misc_RNA (1)...(19): siRNA sense strand
ggugcugucugaauugaga

SEQ ID NO: 1023784 - RNA, 19 nt, Homo sapiens
  misc_RNA (1)...(19): siRNA sense strand
caauuauggccaaauauga

SEQ ID NO: 1023785 - RNA, 19 nt, Homo sapiens
  misc_RNA (1)...(19): siRNA sense strand
gaaaugggccaagucaaag

SEQ ID NO: 1023786 - RNA, 19 nt, Homo sapiens
  misc_RNA (1)...(19): siRNA sense strand
caauagaggagcuggaaga

SEQ ID NO: 1023787 - RNA, 19 nt, Homo sapiens
  misc_RNA (1)...(19): siRNA sense strand
ccaaauaaucgcccugaug

SEQ ID NO: 1023788 - RNA, 19 nt, Homo sapiens
  misc_RNA (1)...(19): siRNA sense strand
gaggugcugucugaauuga

SEQ ID NO: 1023789 - RNA, 19 nt, Homo sapiens
  misc_RNA (1)...(19): siRNA sense strand
ugagagaauuugaggaaag

SEQ ID NO: 1023790 - RNA, 19 nt, Homo sapiens
  misc_RNA (1)...(19): siRNA sense strand
aggaacaguugucuaagaa

SEQ ID NO: 1023791 - RNA, 19 nt, Homo sapiens
  misc_RNA (1)...(19): siRNA sense strand
agagucaaaucaaagaaga

SEQ ID NO: 1023792 - RNA, 19 nt, Homo sapiens
  misc_RNA (1)...(19): siRNA sense strand
ggacguggaccugacacua

SEQ ID NO: 1023793 - RNA, 19 nt, Homo sapiens
  misc_RNA (1)...(19): siRNA sense strand
gagaaaccauaggcagaug

SEQ ID NO: 1023794 - RNA, 19 nt, Homo sapiens
  misc_RNA (1)...(19): siRNA sense strand
gagccaacaggaagaacua

SEQ ID NO: 1023795 - RNA, 19 nt, Homo sapiens
  misc_RNA (1)...(19): siRNA sense strand
ugagugagagugaagauga

SEQ ID NO: 1023796 - RNA, 19 nt, Homo sapiens
  misc_RNA (1)...(19): siRNA sense strand
aguacuaucucagaaauug

SEQ ID NO: 1023797 - RNA, 19 nt, Homo sapiens
  misc_RNA (1)...(19): siRNA sense strand
ggaggacccugagcaacug

SEQ ID NO: 1023798 - RNA, 19 nt, Homo sapiens
  misc_RNA (1)...(19): siRNA sense strand
acaguggaguuaccucuga

SEQ ID NO: 1023799 - RNA, 19 nt, Homo sapiens
  misc_RNA (1)...(19): siRNA sense strand
ccacgcagcugcucaucag

SEQ ID NO: 1023800 - RNA, 19 nt, Homo sapiens
  misc_RNA (1)...(19): siRNA sense strand
ucccagaccuguguuagaa

SEQ ID NO: 1023801 - RNA, 19 nt, Homo sapiens
  misc_RNA (1)...(19): siRNA sense strand
uagaagagcugggaaaaga

SEQ ID NO: 1023802 - RNA, 19 nt, Homo sapiens
  misc_RNA (1)...(19): siRNA sense strand
gaaugcagaugggccgaau

SEQ ID NO: 1023803 - RNA, 19 nt, Homo sapiens
  misc_RNA (1)...(19): siRNA sense strand
gacuaccucuugagugaga

SEQ ID NO: 1023804 - RNA, 19 nt, Homo sapiens
  misc_RNA (1)...(19): siRNA sense strand
ggagggaggcacagaagau

SEQ ID NO: 1023805 - RNA, 19 nt, Homo sapiens
  misc_RNA (1)...(19): siRNA sense strand
gcucugcaguccuacuaug

SEQ ID NO: 1023806 - RNA, 19 nt, Homo sapiens
  misc_RNA (1)...(19): siRNA sense strand
acagagaaguagcauucaa

SEQ ID NO: 1023807 - RNA, 19 nt, Homo sapiens
  misc_RNA (1)...(19): siRNA sense strand
caagccaggccauaucauu

SEQ ID NO: 1023808 - RNA, 19 nt, Homo sapiens
  misc_RNA (1)...(19): siRNA sense strand
aaagaccaguggcagaaga

SEQ ID NO: 1023809 - RNA, 19 nt, Homo sapiens
  misc_RNA (1)...(19): siRNA sense strand
agagaaguagcauucaaua

SEQ ID NO: 1023810 - RNA, 19 nt, Homo sapiens
  misc_RNA (1)...(19): siRNA sense strand
caaagaacugacacagaaa

SEQ ID NO: 1023811 - RNA, 19 nt, Homo sapiens
  misc_RNA (1)...(19): siRNA sense strand
aagccaggccauaucauua

SEQ ID NO: 1023812 - RNA, 19 nt, Homo sapiens
  misc_RNA (1)...(19): siRNA sense strand
aaccauaggcagaugauaa

SEQ ID NO: 1023813 - RNA, 19 nt, Homo sapiens
  misc_RNA (1)...(19): siRNA sense strand
gagagaauuugaggaaagg

SEQ ID NO: 1023814 - RNA, 19 nt, Homo sapiens
  misc_RNA (1)...(19): siRNA sense strand
gccagugacagacccuuua

SEQ ID NO: 1023815 - RNA, 19 nt, Homo sapiens
  misc_RNA (1)...(19): siRNA sense strand
auaggcagaugauaaagga

SEQ ID NO: 1023816 - RNA, 19 nt, Homo sapiens
  misc_RNA (1)...(19): siRNA sense strand
cuacagaaccuccuaacca

SEQ ID NO: 1023817 - RNA, 19 nt, Homo sapiens
  misc_RNA (1)...(19): siRNA sense strand
agaguacuaucucagaaau

SEQ ID NO: 1023818 - RNA, 19 nt, Homo sapiens
  misc_RNA (1)...(19): siRNA sense strand
guugagagaauuugaggaa

SEQ ID NO: 1023819 - RNA, 19 nt, Homo sapiens
  misc_RNA (1)...(19): siRNA sense strand
gccaagcuaugcaggaaca

SEQ ID NO: 1023820 - RNA, 19 nt, Homo sapiens
  misc_RNA (1)...(19): siRNA sense strand
gaaggugucagaguucaau

SEQ ID NO: 1023821 - RNA, 19 nt, Homo sapiens
  misc_RNA (1)...(19): siRNA sense strand
gaucugcuugagccuguua

SEQ ID NO: 1023822 - RNA, 19 nt, Homo sapiens
  misc_RNA (1)...(19): siRNA sense strand
gaguacagacgcuggaaga

SEQ ID NO: 1023823 - RNA, 19 nt, Homo sapiens
  misc_RNA (1)...(19): siRNA sense strand
aggaggugcugucugaauu

SEQ ID NO: 1023824 - RNA, 19 nt, Homo sapiens
  misc_RNA (1)...(19): siRNA sense strand
agaaugauggaaagaauga

SEQ ID NO: 1023825 - RNA, 19 nt, Homo sapiens
  misc_RNA (1)...(19): siRNA sense strand
ucaaccuccuccauaagaa

SEQ ID NO: 1023826 - RNA, 19 nt, Homo sapiens
  misc_RNA (1)...(19): siRNA sense strand
ucccugauguagugaauga

SEQ ID NO: 1023827 - RNA, 19 nt, Homo sapiens
  misc_RNA (1)...(19): siRNA sense strand
uggaaagaaugagccuuaa

SEQ ID NO: 1023828 - RNA, 19 nt, Homo sapiens
  misc_RNA (1)...(19): siRNA sense strand
gcacuagaagaacuggaaa

SEQ ID NO: 1023829 - RNA, 19 nt, Homo sapiens
  misc_RNA (1)...(19): siRNA sense strand
caagaaagcccuaaaagag

SEQ ID NO: 1023830 - RNA, 19 nt, Homo sapiens
  misc_RNA (1)...(19): siRNA sense strand
gcaccagugacaccaaaga

SEQ ID NO: 1023831 - RNA, 19 nt, Homo sapiens
  misc_RNA (1)...(19): siRNA sense strand
gaagggcagcagucagaga

SEQ ID NO: 1023832 - RNA, 19 nt, Homo sapiens
  misc_RNA (1)...(19): siRNA sense strand
uagaagggcagcagucaga

SEQ ID NO: 1023833 - RNA, 19 nt, Homo sapiens
  misc_RNA (1)...(19): siRNA sense strand
ggaggugcugucugaauug

SEQ ID NO: 1023834 - RNA, 19 nt, Homo sapiens
  misc_RNA (1)...(19): siRNA sense strand
ugaaagugagggagaagaa

SEQ ID NO: 1023835 - RNA, 19 nt, Homo sapiens
  misc_RNA (1)...(19): siRNA sense strand
ggaagaacuagcggauuug

SEQ ID NO: 1023836 - RNA, 19 nt, Homo sapiens
  misc_RNA (1)...(19): siRNA sense strand
gacgccgguuucucauuaa

SEQ ID NO: 1023837 - RNA, 19 nt, Homo sapiens
  misc_RNA (1)...(19): siRNA sense strand
ccaagucaaaggcaauuau

SEQ ID NO: 1023838 - RNA, 19 nt, Homo sapiens
  misc_RNA (1)...(19): siRNA sense strand
ggaaagaaugagccuuaag

SEQ ID NO: 1023839 - RNA, 19 nt, Homo sapiens
  misc_RNA (1)...(19): siRNA sense strand
cgugaagucuuuggcaguu

SEQ ID NO: 1023840 - RNA, 19 nt, Homo sapiens
  misc_RNA (1)...(19): siRNA sense strand
gagcuucccagaccugugu

SEQ ID NO: 1023841 - RNA, 19 nt, Homo sapiens
  misc_RNA (1)...(19): siRNA sense strand
gcaaaugaucgaccuacag

SEQ ID NO: 1023842 - RNA, 19 nt, Homo sapiens
  misc_RNA (1)...(19): siRNA sense strand
caacugaguagagucaaau

SEQ ID NO: 1023843 - RNA, 19 nt, Homo sapiens
  misc_RNA (1)...(19): siRNA sense strand
gaaaccauaggcagaugau

SEQ ID NO: 1023844 - RNA, 19 nt, Homo sapiens
  misc_RNA (1)...(19): siRNA sense strand
ugaaugagaccaucaauua

SEQ ID NO: 1023845 - RNA, 19 nt, Homo sapiens
  misc_RNA (1)...(19): siRNA sense strand
gaacuaugcugaggaguau

SEQ ID NO: 1023846 - RNA, 19 nt, Homo sapiens
  misc_RNA (1)...(19): siRNA sense strand
guaccuagcugagaaguuc

SEQ ID NO: 1023847 - RNA, 19 nt, Homo sapiens
  misc_RNA (1)...(19): siRNA sense strand
gcugagaaguucacuccaa

SEQ ID NO: 1023848 - RNA, 19 nt, Homo sapiens
  misc_RNA (1)...(19): siRNA sense strand
ugacugcacuggccacguu

SEQ ID NO: 1023849 - RNA, 19 nt, Homo sapiens
  misc_RNA (1)...(19): siRNA sense strand
gagaaguucacuccaagaa

SEQ ID NO: 1023850 - RNA, 19 nt, Homo sapiens
  misc_RNA (1)...(19): siRNA sense strand
ccaccaaggcauacuguaa

SEQ ID NO: 1023851 - RNA, 19 nt, Homo sapiens
  misc_RNA (1)...(19): siRNA sense strand
gguauaugguggcuacaug

SEQ ID NO: 1023852 - RNA, 19 nt, Homo sapiens
  misc_RNA (1)...(19): siRNA sense strand
gcuguuggcucugcucuuc

SEQ ID NO: 1023853 - RNA, 19 nt, Homo sapiens
  misc_RNA (1)...(19): siRNA sense strand
gaaagacgaggcuguucug

SEQ ID NO: 1023854 - RNA, 19 nt, Homo sapiens
  misc_RNA (1)...(19): siRNA sense strand
gggccugccuucuggauca

SEQ ID NO: 1023855 - RNA, 19 nt, Homo sapiens
  misc_RNA (1)...(19): siRNA sense strand
uaugguggcuacaugcuau

SEQ ID NO: 1023856 - RNA, 19 nt, Homo sapiens
  misc_RNA (1)...(19): siRNA sense strand
caaccagaguguggaugaa

SEQ ID NO: 1023857 - RNA, 19 nt, Homo sapiens
  misc_RNA (1)...(19): siRNA sense strand
ggaaagacgaggcuguucu

SEQ ID NO: 1023858 - RNA, 19 nt, Homo sapiens
  misc_RNA (1)...(19): siRNA sense strand
gaaugagaccaucaauuac

SEQ ID NO: 1023859 - RNA, 19 nt, Homo sapiens
  misc_RNA (1)...(19): siRNA sense strand
ugccagacccuguguugua

SEQ ID NO: 1023860 - RNA, 19 nt, Homo sapiens
  misc_RNA (1)...(19): siRNA sense strand
agaacuaugcugaggagua

SEQ ID NO: 1023861 - RNA, 19 nt, Homo sapiens
  misc_RNA (1)...(19): siRNA sense strand
ucaauuacaacgaggaguu

SEQ ID NO: 1023862 - RNA, 19 nt, Homo sapiens
  misc_RNA (1)...(19): siRNA sense strand
gcgcuucugugcugcauac

SEQ ID NO: 1023863 - RNA, 19 nt, Homo sapiens
  misc_RNA (1)...(19): siRNA sense strand
ccaaugugaugcucuccau

SEQ ID NO: 1023864 - RNA, 19 nt, Homo sapiens
  misc_RNA (1)...(19): siRNA sense strand
gauccugauugugcuuuau

SEQ ID NO: 1023865 - RNA, 19 nt, Homo sapiens
  misc_RNA (1)...(19): siRNA sense strand
gcgccugggugagaacuau

SEQ ID NO: 1023866 - RNA, 19 nt, Homo sapiens
  misc_RNA (1)...(19): siRNA sense strand
ccaugccugugcugguaua

SEQ ID NO: 1023867 - RNA, 19 nt, Homo sapiens
  misc_RNA (1)...(19): siRNA sense strand
cuucugugcugcauacuca

SEQ ID NO: 1023868 - RNA, 19 nt, Homo sapiens
  misc_RNA (1)...(19): siRNA sense strand
cucacaggcugaaggcuuu

SEQ ID NO: 1023869 - RNA, 19 nt, Homo sapiens
  misc_RNA (1)...(19): siRNA sense strand
ucaaccagaguguggauga

SEQ ID NO: 1023870 - RNA, 19 nt, Homo sapiens
  misc_RNA (1)...(19): siRNA sense strand
uguuguaccuagcugagaa

SEQ ID NO: 1023871 - RNA, 19 nt, Homo sapiens
  misc_RNA (1)...(19): siRNA sense strand
cuacaccucagccaugcua

SEQ ID NO: 1023872 - RNA, 19 nt, Homo sapiens
  misc_RNA (1)...(19): siRNA sense strand
ggacacacauuccccuucu

SEQ ID NO: 1023873 - RNA, 19 nt, Homo sapiens
  misc_RNA (1)...(19): siRNA sense strand
cuccaugccugugcuggua

SEQ ID NO: 1023874 - RNA, 19 nt, Homo sapiens
  misc_RNA (1)...(19): siRNA sense strand
aaugagaccaucaauuaca

SEQ ID NO: 1023875 - RNA, 19 nt, Homo sapiens
  misc_RNA (1)...(19): siRNA sense strand
agauccugauugugcuuua

SEQ ID NO: 1023876 - RNA, 19 nt, Homo sapiens
  misc_RNA (1)...(19): siRNA sense strand
gccagacccuguguuguac

SEQ ID NO: 1023877 - RNA, 19 nt, Homo sapiens
  misc_RNA (1)...(19): siRNA sense strand
augagaccaucaauuacaa

SEQ ID NO: 1023878 - RNA, 19 nt, Homo sapiens
  misc_RNA (1)...(19): siRNA sense strand
ugccugugcugguauaugg

SEQ ID NO: 1023879 - RNA, 19 nt, Homo sapiens
  misc_RNA (1)...(19): siRNA sense strand
gcugccagacccuguguug

SEQ ID NO: 1023880 - RNA, 19 nt, Homo sapiens
  misc_RNA (1)...(19): siRNA sense strand
augcaaaggcucuggagaa

SEQ ID NO: 1023881 - RNA, 19 nt, Homo sapiens
  misc_RNA (1)...(19): siRNA sense strand
ugcaaaggcucuggagaag

SEQ ID NO: 1023882 - RNA, 19 nt, Homo sapiens
  misc_RNA (1)...(19): siRNA sense strand
ccccaaagauccugauugu

SEQ ID NO: 1023883 - RNA, 19 nt, Homo sapiens
  misc_RNA (1)...(19): siRNA sense strand
gcugcuggccaaugugaug

SEQ ID NO: 1023884 - RNA, 19 nt, Homo sapiens
  misc_RNA (1)...(19): siRNA sense strand
uccugauugugcuuuauaa

SEQ ID NO: 1023885 - RNA, 19 nt, Homo sapiens
  misc_RNA (1)...(19): siRNA sense strand
gggcaucuuccagcuguug

SEQ ID NO: 1023886 - RNA, 19 nt, Homo sapiens
  misc_RNA (1)...(19): siRNA sense strand
gaaaguagaauuacaagga

SEQ ID NO: 1023887 - RNA, 19 nt, Homo sapiens
  misc_RNA (1)...(19): siRNA sense strand
gaacgcaggugcagcugaa

SEQ ID NO: 1023888 - RNA, 19 nt, Homo sapiens
  misc_RNA (1)...(19): siRNA sense strand
cgaaacaccugacuccaaa

SEQ ID NO: 1023889 - RNA, 19 nt, Homo sapiens
  misc_RNA (1)...(19): siRNA sense strand
ugaacgaguugcagaauuu

SEQ ID NO: 1023890 - RNA, 19 nt, Homo sapiens
  misc_RNA (1)...(19): siRNA sense strand
ugaagacccuggcccauaa

SEQ ID NO: 1023891 - RNA, 19 nt, Homo sapiens
  misc_RNA (1)...(19): siRNA sense strand
ugcaagaccuuacccuuua

SEQ ID NO: 1023892 - RNA, 19 nt, Homo sapiens
  misc_RNA (1)...(19): siRNA sense strand
gcuuagagauugaacauuc

SEQ ID NO: 1023893 - RNA, 19 nt, Homo sapiens
  misc_RNA (1)...(19): siRNA sense strand
ugaaggccaucgaaacuuu

SEQ ID NO: 1023894 - RNA, 19 nt, Homo sapiens
  misc_RNA (1)...(19): siRNA sense strand
ggaaaacgcuuagagauug

SEQ ID NO: 1023895 - RNA, 19 nt, Homo sapiens
  misc_RNA (1)...(19): siRNA sense strand
ugaagaagguagagcaaga

SEQ ID NO: 1023896 - RNA, 19 nt, Homo sapiens
  misc_RNA (1)...(19): siRNA sense strand
guaugugggugccauuauu

SEQ ID NO: 1023897 - RNA, 19 nt, Homo sapiens
  misc_RNA (1)...(19): siRNA sense strand
ggagaaccaugcccugaag

SEQ ID NO: 1023898 - RNA, 19 nt, Homo sapiens
  misc_RNA (1)...(19): siRNA sense strand
ggaagaaucuauggcaaac

SEQ ID NO: 1023899 - RNA, 19 nt, Homo sapiens
  misc_RNA (1)...(19): siRNA sense strand
aaacagacccaguccaaga

SEQ ID NO: 1023900 - RNA, 19 nt, Homo sapiens
  misc_RNA (1)...(19): siRNA sense strand
caaaggagccggaaaauuc

SEQ ID NO: 1023901 - RNA, 19 nt, Homo sapiens
  misc_RNA (1)...(19): siRNA sense strand
gacggcagcugagguggua

SEQ ID NO: 1023902 - RNA, 19 nt, Homo sapiens
  misc_RNA (1)...(19): siRNA sense strand
caaaacggcugacgagguu

SEQ ID NO: 1023903 - RNA, 19 nt, Homo sapiens
  misc_RNA (1)...(19): siRNA sense strand
gugaacgaguugcagaauu

SEQ ID NO: 1023904 - RNA, 19 nt, Homo sapiens
  misc_RNA (1)...(19): siRNA sense strand
gagcaggaaauaaugaaga

SEQ ID NO: 1023905 - RNA, 19 nt, Homo sapiens
  misc_RNA (1)...(19): siRNA sense strand
caucagaagggacagagua

SEQ ID NO: 1023906 - RNA, 19 nt, Homo sapiens
  misc_RNA (1)...(19): siRNA sense strand
gacgagcacugggcgauga

SEQ ID NO: 1023907 - RNA, 19 nt, Homo sapiens
  misc_RNA (1)...(19): siRNA sense strand
gaagcuggagacccacaua

SEQ ID NO: 1023908 - RNA, 19 nt, Homo sapiens
  misc_RNA (1)...(19): siRNA sense strand
gggaagaaucuauggcaaa

SEQ ID NO: 1023909 - RNA, 19 nt, Homo sapiens
  misc_RNA (1)...(19): siRNA sense strand
agauagacgugcauaggaa

SEQ ID NO: 1023910 - RNA, 19 nt, Homo sapiens
  misc_RNA (1)...(19): siRNA sense strand
acaccugacuccaaaguuc

SEQ ID NO: 1023911 - RNA, 19 nt, Homo sapiens
  misc_RNA (1)...(19): siRNA sense strand
agacggcaguggugaaugu

SEQ ID NO: 1023912 - RNA, 19 nt, Homo sapiens
  misc_RNA (1)...(19): siRNA sense strand
gaaaacgcuuagagauuga

SEQ ID NO: 1023913 - RNA, 19 nt, Homo sapiens
  misc_RNA (1)...(19): siRNA sense strand
gcaagaccuuacccuuuac

SEQ ID NO: 1023914 - RNA, 19 nt, Homo sapiens
  misc_RNA (1)...(19): siRNA sense strand
gaaggacggaaccugaaga

SEQ ID NO: 1023915 - RNA, 19 nt, Homo sapiens
  misc_RNA (1)...(19): siRNA sense strand
ggagauggugcagguguuu

SEQ ID NO: 1023916 - RNA, 19 nt, Homo sapiens
  misc_RNA (1)...(19): siRNA sense strand
cccuauagcuccuuuaugc

SEQ ID NO: 1023917 - RNA, 19 nt, Homo sapiens
  misc_RNA (1)...(19): siRNA sense strand
gaacgaguugcagaauuug

SEQ ID NO: 1023918 - RNA, 19 nt, Homo sapiens
  misc_RNA (1)...(19): siRNA sense strand
ccaaaguucguaugguuau

SEQ ID NO: 1023919 - RNA, 19 nt, Homo sapiens
  misc_RNA (1)...(19): siRNA sense strand
cuccaaaguucguaugguu

SEQ ID NO: 1023920 - RNA, 19 nt, Homo sapiens
  misc_RNA (1)...(19): siRNA sense strand
gggccgagcaggaaauaau

SEQ ID NO: 1023921 - RNA, 19 nt, Homo sapiens
  misc_RNA (1)...(19): siRNA sense strand
gaagaagguagagcaagau

SEQ ID NO: 1023922 - RNA, 19 nt, Homo sapiens
  misc_RNA (1)...(19): siRNA sense strand
gccagcgccuccaucaaga

SEQ ID NO: 1023923 - RNA, 19 nt, Homo sapiens
  misc_RNA (1)...(19): siRNA sense strand
gagauggugcagguguuua

SEQ ID NO: 1023924 - RNA, 19 nt, Homo sapiens
  misc_RNA (1)...(19): siRNA sense strand
gcucagggaagaaucuaug

SEQ ID NO: 1023925 - RNA, 19 nt, Homo sapiens
  misc_RNA (1)...(19): siRNA sense strand
aaucaucggacauuucuau

SEQ ID NO: 1023926 - RNA, 19 nt, Homo sapiens
  misc_RNA (1)...(19): siRNA sense strand
uuaagcagcagcaucagaa

SEQ ID NO: 1023927 - RNA, 19 nt, Homo sapiens
  misc_RNA (1)...(19): siRNA sense strand
caagauagacgugcauagg

SEQ ID NO: 1023928 - RNA, 19 nt, Homo sapiens
  misc_RNA (1)...(19): siRNA sense strand
aagaaucuauggcaaacuc

SEQ ID NO: 1023929 - RNA, 19 nt, Homo sapiens
  misc_RNA (1)...(19): siRNA sense strand
gaacugugagcaagugaac

SEQ ID NO: 1023930 - RNA, 19 nt, Homo sapiens
  misc_RNA (1)...(19): siRNA sense strand
ggccaguucuuggucaaau

SEQ ID NO: 1023931 - RNA, 19 nt, Homo sapiens
  misc_RNA (1)...(19): siRNA sense strand
gcugaauggccaccaguug

SEQ ID NO: 1023932 - RNA, 19 nt, Homo sapiens
  misc_RNA (1)...(19): siRNA sense strand
agcaggaaauaaugaagaa

SEQ ID NO: 1023933 - RNA, 19 nt, Homo sapiens
  misc_RNA (1)...(19): siRNA sense strand
aaacaaaggagccggaaaa

SEQ ID NO: 1023934 - RNA, 19 nt, Homo sapiens
  misc_RNA (1)...(19): siRNA sense strand
gcaaacucaaggaggagaa

SEQ ID NO: 1023935 - RNA, 19 nt, Homo sapiens
  misc_RNA (1)...(19): siRNA sense strand
guucguaugguuaucauca

SEQ ID NO: 1023936 - RNA, 19 nt, Homo sapiens
  misc_RNA (1)...(19): siRNA sense strand
uugcaagaccuuacccuuu

SEQ ID NO: 1023937 - RNA, 19 nt, Homo sapiens
  misc_RNA (1)...(19): siRNA sense strand
cuacagcggccaguucuug

SEQ ID NO: 1023938 - RNA, 19 nt, Homo sapiens
  misc_RNA (1)...(19): siRNA sense strand
agagaacugugagcaagug

SEQ ID NO: 1023939 - RNA, 19 nt, Homo sapiens
  misc_RNA (1)...(19): siRNA sense strand
auucaaggcucagggaaga

SEQ ID NO: 1023940 - RNA, 19 nt, Homo sapiens
  misc_RNA (1)...(19): siRNA sense strand
ccgaaacaccugacuccaa

SEQ ID NO: 1023941 - RNA, 19 nt, Homo sapiens
  misc_RNA (1)...(19): siRNA sense strand
ggcaagccaucaugaagcu

SEQ ID NO: 1023942 - RNA, 19 nt, Homo sapiens
  misc_RNA (1)...(19): siRNA sense strand
gcaagugaacaccgagagu

SEQ ID NO: 1023943 - RNA, 19 nt, Homo sapiens
  misc_RNA (1)...(19): siRNA sense strand
cugaagacccuggcccaua

SEQ ID NO: 1023944 - RNA, 19 nt, Homo sapiens
  misc_RNA (1)...(19): siRNA sense strand
gccagaggcccaauucaag

SEQ ID NO: 1023945 - RNA, 19 nt, Homo sapiens
  misc_RNA (1)...(19): siRNA sense strand
ggaggccuaugagaaugau

SEQ ID NO: 1023946 - RNA, 19 nt, Homo sapiens
  misc_RNA (1)...(19): siRNA sense strand
gcaggaaauaaugaagaaa

SEQ ID NO: 1023947 - RNA, 19 nt, Homo sapiens
  misc_RNA (1)...(19): siRNA sense strand
ggaaggacggaaccugaag

SEQ ID NO: 1023948 - RNA, 19 nt, Homo sapiens
  misc_RNA (1)...(19): siRNA sense strand
ggcccauaauaacuuugua

SEQ ID NO: 1023949 - RNA, 19 nt, Homo sapiens
  misc_RNA (1)...(19): siRNA sense strand
gaaucuauggcaaacucaa

SEQ ID NO: 1023950 - RNA, 19 nt, Homo sapiens
  misc_RNA (1)...(19): siRNA sense strand
gggaggccuaugagaauga

SEQ ID NO: 1023951 - RNA, 19 nt, Homo sapiens
  misc_RNA (1)...(19): siRNA sense strand
caggaaauaaugaagaaag

SEQ ID NO: 1023952 - RNA, 19 nt, Homo sapiens
  misc_RNA (1)...(19): siRNA sense strand
aagaagguagagcaagaua

SEQ ID NO: 1023953 - RNA, 19 nt, Homo sapiens
  misc_RNA (1)...(19): siRNA sense strand
ggcucaguaugguacagua

SEQ ID NO: 1023954 - RNA, 19 nt, Homo sapiens
  misc_RNA (1)...(19): siRNA sense strand
caaaguucguaugguuauc

SEQ ID NO: 1023955 - RNA, 19 nt, Homo sapiens
  misc_RNA (1)...(19): siRNA sense strand
cgggaaaguagaauuacaa

SEQ ID NO: 1023956 - RNA, 19 nt, Homo sapiens
  misc_RNA (1)...(19): siRNA sense strand
aaaucaccaucuccucguu

SEQ ID NO: 1023957 - RNA, 19 nt, Homo sapiens
  misc_RNA (1)...(19): siRNA sense strand
agagcaagauaccgagaca

SEQ ID NO: 1023958 - RNA, 19 nt, Homo sapiens
  misc_RNA (1)...(19): siRNA sense strand
ccuggcccauaauaacuuu

SEQ ID NO: 1023959 - RNA, 19 nt, Homo sapiens
  misc_RNA (1)...(19): siRNA sense strand
caaaacagacccaguccaa

SEQ ID NO: 1023960 - RNA, 19 nt, Homo sapiens
  misc_RNA (1)...(19): siRNA sense strand
gagcacaagaucuccuaca

SEQ ID NO: 1023961 - RNA, 19 nt, Homo sapiens
  misc_RNA (1)...(19): siRNA sense strand
ccaggcaagccaucaugaa

SEQ ID NO: 1023962 - RNA, 19 nt, Homo sapiens
  misc_RNA (1)...(19): siRNA sense strand
gaacauucggugcccaaaa

SEQ ID NO: 1023963 - RNA, 19 nt, Homo sapiens
  misc_RNA (1)...(19): siRNA sense strand
uccaaaguucguaugguua

SEQ ID NO: 1023964 - RNA, 19 nt, Homo sapiens
  misc_RNA (1)...(19): siRNA sense strand
gaagacccuggcccauaau

SEQ ID NO: 1023965 - RNA, 19 nt, Homo sapiens
  misc_RNA (1)...(19): siRNA sense strand
gaccaggcaagccaucaug

SEQ ID NO: 1023966 - RNA, 19 nt, Homo sapiens
  misc_RNA (1)...(19): siRNA sense strand
cuccuccgcuuguaagaug

SEQ ID NO: 1023967 - RNA, 19 nt, Homo sapiens
  misc_RNA (1)...(19): siRNA sense strand
ccgggaaaguagaauuaca

SEQ ID NO: 1023968 - RNA, 19 nt, Homo sapiens
  misc_RNA (1)...(19): siRNA sense strand
agcaagauaccgagacaaa

SEQ ID NO: 1023969 - RNA, 19 nt, Homo sapiens
  misc_RNA (1)...(19): siRNA sense strand
ugaauggccaccaguugga

SEQ ID NO: 1023970 - RNA, 19 nt, Homo sapiens
  misc_RNA (1)...(19): siRNA sense strand
cgccagaggcccaauucaa

SEQ ID NO: 1023971 - RNA, 19 nt, Homo sapiens
  misc_RNA (1)...(19): siRNA sense strand
acagacccaguccaagaua

SEQ ID NO: 1023972 - RNA, 19 nt, Homo sapiens
  misc_RNA (1)...(19): siRNA sense strand
gugaacaccgagagugaga

SEQ ID NO: 1023973 - RNA, 19 nt, Homo sapiens
  misc_RNA (1)...(19): siRNA sense strand
guuaagcagcagcaucaga

SEQ ID NO: 1023974 - RNA, 19 nt, Homo sapiens
  misc_RNA (1)...(19): siRNA sense strand
cuccgggaaaguagaauua

SEQ ID NO: 1023975 - RNA, 19 nt, Homo sapiens
  misc_RNA (1)...(19): siRNA sense strand
gcagggccgagcaggaaau

SEQ ID NO: 1023976 - RNA, 19 nt, Homo sapiens
  misc_RNA (1)...(19): siRNA sense strand
cagccaagcagcagcaagu

SEQ ID NO: 1023977 - RNA, 19 nt, Homo sapiens
  misc_RNA (1)...(19): siRNA sense strand
ucaguaugguacaguagag

SEQ ID NO: 1023978 - RNA, 19 nt, Homo sapiens
  misc_RNA (1)...(19): siRNA sense strand
caaggaaaacgcuuagaga

SEQ ID NO: 1023979 - RNA, 19 nt, Homo sapiens
  misc_RNA (1)...(19): siRNA sense strand
gauugcaccacccgaaaca

SEQ ID NO: 1023980 - RNA, 19 nt, Homo sapiens
  misc_RNA (1)...(19): siRNA sense strand
cagcgccuccaucaagauu

SEQ ID NO: 1023981 - RNA, 19 nt, Homo sapiens
  misc_RNA (1)...(19): siRNA sense strand
gacccuggcccauaauaac

SEQ ID NO: 1023982 - RNA, 19 nt, Homo sapiens
  misc_RNA (1)...(19): siRNA sense strand
agacccuggcccauaauaa

SEQ ID NO: 1023983 - RNA, 19 nt, Homo sapiens
  misc_RNA (1)...(19): siRNA sense strand
gccaguucuuggucaaauc

SEQ ID NO: 1023984 - RNA, 19 nt, Homo sapiens
  misc_RNA (1)...(19): siRNA sense strand
aagauagacgugcauagga

SEQ ID NO: 1023985 - RNA, 19 nt, Homo sapiens
  misc_RNA (1)...(19): siRNA sense strand
aaacaccugacuccaaagu

SEQ ID NO: 1023986 - RNA, 19 nt, Homo sapiens
  misc_RNA (1)...(19): siRNA sense strand
gcucugacgugcugaagaa

SEQ ID NO: 1023987 - RNA, 19 nt, Homo sapiens
  misc_RNA (1)...(19): siRNA sense strand
cagcgugccugccagugua

SEQ ID NO: 1023988 - RNA, 19 nt, Homo sapiens
  misc_RNA (1)...(19): siRNA sense strand
guaccugugaugaccaaua

SEQ ID NO: 1023989 - RNA, 19 nt, Homo sapiens
  misc_RNA (1)...(19): siRNA sense strand
cugacgugcugaagaaauu

SEQ ID NO: 1023990 - RNA, 19 nt, Homo sapiens
  misc_RNA (1)...(19): siRNA sense strand
ucacuaucaucaucugcuu

SEQ ID NO: 1023991 - RNA, 19 nt, Homo sapiens
  misc_RNA (1)...(19): siRNA sense strand
gcagcacccuacccaaugc

SEQ ID NO: 1023992 - RNA, 19 nt, Homo sapiens
  misc_RNA (1)...(19): siRNA sense strand
cgaguccuguccagauuuc

SEQ ID NO: 1023993 - RNA, 19 nt, Homo sapiens
  misc_RNA (1)...(19): siRNA sense strand
ccagccagccuccuuacaa

SEQ ID NO: 1023994 - RNA, 19 nt, Homo sapiens
  misc_RNA (1)...(19): siRNA sense strand
cagcagcacccuacccaau

SEQ ID NO: 1023995 - RNA, 19 nt, Homo sapiens
  misc_RNA (1)...(19): siRNA sense strand
ugucgucacuaucaucauc

SEQ ID NO: 1023996 - RNA, 19 nt, Homo sapiens
  misc_RNA (1)...(19): siRNA sense strand
ugcaguacccaccaccuua

SEQ ID NO: 1023997 - RNA, 19 nt, Homo sapiens
  misc_RNA (1)...(19): siRNA sense strand
cccgaguccuguccagauu

SEQ ID NO: 1023998 - RNA, 19 nt, Homo sapiens
  misc_RNA (1)...(19): siRNA sense strand
gcugcugccuuuacaagac

SEQ ID NO: 1023999 - RNA, 19 nt, Homo sapiens
  misc_RNA (1)...(19): siRNA sense strand
cacccuacccaaugcagua

SEQ ID NO: 1024000 - RNA, 19 nt, Homo sapiens
  misc_RNA (1)...(19): siRNA sense strand
uaccugugaugaccaauac

SEQ ID NO: 1024001 - RNA, 19 nt, Homo sapiens
  misc_RNA (1)...(19): siRNA sense strand
gaccaucuuugugcugucu

SEQ ID NO: 1024002 - RNA, 19 nt, Homo sapiens
  misc_RNA (1)...(19): siRNA sense strand
cagccagccuccuuacaac

SEQ ID NO: 1024003 - RNA, 19 nt, Homo sapiens
  misc_RNA (1)...(19): siRNA sense strand
gcaguacccaccaccuuac

SEQ ID NO: 1024004 - RNA, 19 nt, Homo sapiens
  misc_RNA (1)...(19): siRNA sense strand
caacagggaugaauucuac

SEQ ID NO: 1024005 - RNA, 19 nt, Homo sapiens
  misc_RNA (1)...(19): siRNA sense strand
ugaagaaggucucuaugga

SEQ ID NO: 1024006 - RNA, 19 nt, Homo sapiens
  misc_RNA (1)...(19): siRNA sense strand
uggaugugcucaacaauaa

SEQ ID NO: 1024007 - RNA, 19 nt, Homo sapiens
  misc_RNA (1)...(19): siRNA sense strand
uggcagcacucaccaacua

SEQ ID NO: 1024008 - RNA, 19 nt, Homo sapiens
  misc_RNA (1)...(19): siRNA sense strand
cagccgacccuccaaguua

SEQ ID NO: 1024009 - RNA, 19 nt, Homo sapiens
  misc_RNA (1)...(19): siRNA sense strand
gaacuugucacccacuuuc

SEQ ID NO: 1024010 - RNA, 19 nt, Homo sapiens
  misc_RNA (1)...(19): siRNA sense strand
gcacauggcugggcaucag

SEQ ID NO: 1024011 - RNA, 19 nt, Homo sapiens
  misc_RNA (1)...(19): siRNA sense strand
gcaaagggagacgucauuu

SEQ ID NO: 1024012 - RNA, 19 nt, Homo sapiens
  misc_RNA (1)...(19): siRNA sense strand
ucagugggcuggacaugga

SEQ ID NO: 1024013 - RNA, 19 nt, Homo sapiens
  misc_RNA (1)...(19): siRNA sense strand
gcaccagaaccaacacuau

SEQ ID NO: 1024014 - RNA, 19 nt, Homo sapiens
  misc_RNA (1)...(19): siRNA sense strand
agacgucauuugcuacuau

SEQ ID NO: 1024015 - RNA, 19 nt, Homo sapiens
  misc_RNA (1)...(19): siRNA sense strand
ggagggccaucuguacaau

SEQ ID NO: 1024016 - RNA, 19 nt, Homo sapiens
  misc_RNA (1)...(19): siRNA sense strand
guagcaugauggacaagga

SEQ ID NO: 1024017 - RNA, 19 nt, Homo sapiens
  misc_RNA (1)...(19): siRNA sense strand
agggagacgucauuugcua

SEQ ID NO: 1024018 - RNA, 19 nt, Homo sapiens
  misc_RNA (1)...(19): siRNA sense strand
gagacgucauuugcuacua

SEQ ID NO: 1024019 - RNA, 19 nt, Homo sapiens
  misc_RNA (1)...(19): siRNA sense strand
gcaucaucuucuuuaaguu

SEQ ID NO: 1024020 - RNA, 19 nt, Homo sapiens
  misc_RNA (1)...(19): siRNA sense strand
ugcaucaucuucuuuaagu

SEQ ID NO: 1024021 - RNA, 19 nt, Homo sapiens
  misc_RNA (1)...(19): siRNA sense strand
ggagccugauccuaucguu

SEQ ID NO: 1024022 - RNA, 19 nt, Homo sapiens
  misc_RNA (1)...(19): siRNA sense strand
caacaacgagauccucagu

SEQ ID NO: 1024023 - RNA, 19 nt, Homo sapiens
  misc_RNA (1)...(19): siRNA sense strand
ggaggaaggcaaggaagga

SEQ ID NO: 1024024 - RNA, 19 nt, Homo sapiens
  misc_RNA (1)...(19): siRNA sense strand
ccaacagggaugaauucua

SEQ ID NO: 1024025 - RNA, 19 nt, Homo sapiens
  misc_RNA (1)...(19): siRNA sense strand
gacgucauuugcuacuaug

SEQ ID NO: 1024026 - RNA, 19 nt, Homo sapiens
  misc_RNA (1)...(19): siRNA sense strand
gaaccaacacuaucauccu

SEQ ID NO: 1024027 - RNA, 19 nt, Homo sapiens
  misc_RNA (1)...(19): siRNA sense strand
gagccugauccuaucguuu

SEQ ID NO: 1024028 - RNA, 19 nt, Homo sapiens
  misc_RNA (1)...(19): siRNA sense strand
gcaccuacgggcugagcaa

SEQ ID NO: 1024029 - RNA, 19 nt, Homo sapiens
  misc_RNA (1)...(19): siRNA sense strand
caauggcuucaaccucaua

SEQ ID NO: 1024030 - RNA, 19 nt, Homo sapiens
  misc_RNA (1)...(19): siRNA sense strand
acacuaucauccugguaga

SEQ ID NO: 1024031 - RNA, 19 nt, Homo sapiens
  misc_RNA (1)...(19): siRNA sense strand
gaugugcucaacaauaaag

SEQ ID NO: 1024032 - RNA, 19 nt, Homo sapiens
  misc_RNA (1)...(19): siRNA sense strand
cuggaugugcucaacaaua

SEQ ID NO: 1024033 - RNA, 19 nt, Homo sapiens
  misc_RNA (1)...(19): siRNA sense strand
ggaugugcucaacaauaaa

SEQ ID NO: 1024034 - RNA, 19 nt, Homo sapiens
  misc_RNA (1)...(19): siRNA sense strand
gggagaccagaaccuauga

SEQ ID NO: 1024035 - RNA, 19 nt, Homo sapiens
  misc_RNA (1)...(19): siRNA sense strand
ucacugagcguagcaugau

SEQ ID NO: 1024036 - RNA, 19 nt, Homo sapiens
  misc_RNA (1)...(19): siRNA sense strand
aaagggagacgucauuugc

SEQ ID NO: 1024037 - RNA, 19 nt, Homo sapiens
  misc_RNA (1)...(19): siRNA sense strand
caacacuaucauccuggua

SEQ ID NO: 1024038 - RNA, 19 nt, Homo sapiens
  misc_RNA (1)...(19): siRNA sense strand
cagccaacagggaugaauu

SEQ ID NO: 1024039 - RNA, 19 nt, Homo sapiens
  misc_RNA (1)...(19): siRNA sense strand
gaggggagccugauccuau

SEQ ID NO: 1024040 - RNA, 19 nt, Homo sapiens
  misc_RNA (1)...(19): siRNA sense strand
cagcuuguccuaccugaag

SEQ ID NO: 1024041 - RNA, 19 nt, Homo sapiens
  misc_RNA (1)...(19): siRNA sense strand
gcaaggaaggaggcacaug

SEQ ID NO: 1024042 - RNA, 19 nt, Homo sapiens
  misc_RNA (1)...(19): siRNA sense strand
cccacuuucugaccacuga

SEQ ID NO: 1024043 - RNA, 19 nt, Homo sapiens
  misc_RNA (1)...(19): siRNA sense strand
gagaccagaaccuaugagu

SEQ ID NO: 1024044 - RNA, 19 nt, Homo sapiens
  misc_RNA (1)...(19): siRNA sense strand
caccagaaccaacacuauc

SEQ ID NO: 1024045 - RNA, 19 nt, Homo sapiens
  misc_RNA (1)...(19): siRNA sense strand
gggaauaguuucacgagua

SEQ ID NO: 1024046 - RNA, 19 nt, Homo sapiens
  misc_RNA (1)...(19): siRNA sense strand
gggcgagccuuuaaugaua

SEQ ID NO: 1024047 - RNA, 19 nt, Homo sapiens
  misc_RNA (1)...(19): siRNA sense strand
guaaagauguugagaccaa

SEQ ID NO: 1024048 - RNA, 19 nt, Homo sapiens
  misc_RNA (1)...(19): siRNA sense strand
guacagaagugugauguug

SEQ ID NO: 1024049 - RNA, 19 nt, Homo sapiens
  misc_RNA (1)...(19): siRNA sense strand
gaagugugauguuggagaa

SEQ ID NO: 1024050 - RNA, 19 nt, Homo sapiens
  misc_RNA (1)...(19): siRNA sense strand
ggagaaacccuaugagugu

SEQ ID NO: 1024051 - RNA, 19 nt, Homo sapiens
  misc_RNA (1)...(19): siRNA sense strand
ggagaaacccuuugacugu

SEQ ID NO: 1024052 - RNA, 19 nt, Homo sapiens
  misc_RNA (1)...(19): siRNA sense strand
gacagugaguccacauuaa

SEQ ID NO: 1024053 - RNA, 19 nt, Homo sapiens
  misc_RNA (1)...(19): siRNA sense strand
gaacugacuucccagaaac

SEQ ID NO: 1024054 - RNA, 19 nt, Homo sapiens
  misc_RNA (1)...(19): siRNA sense strand
gagaaacccuaugagugua

SEQ ID NO: 1024055 - RNA, 19 nt, Homo sapiens
  misc_RNA (1)...(19): siRNA sense strand
gagaaacccuaugagugua

SEQ ID NO: 1024056 - RNA, 19 nt, Homo sapiens
  misc_RNA (1)...(19): siRNA sense strand
gagaaacccuaugagugua

SEQ ID NO: 1024057 - RNA, 19 nt, Homo sapiens
  misc_RNA (1)...(19): siRNA sense strand
gagaugggaugaugucaca

SEQ ID NO: 1024058 - RNA, 19 nt, Homo sapiens
  misc_RNA (1)...(19): siRNA sense strand
ggacaagccuucaauuuuc

SEQ ID NO: 1024059 - RNA, 19 nt, Homo sapiens
  misc_RNA (1)...(19): siRNA sense strand
ggaauaguuucacgaguag

SEQ ID NO: 1024060 - RNA, 19 nt, Homo sapiens
  misc_RNA (1)...(19): siRNA sense strand
ggagaaaccuuuugagugu

SEQ ID NO: 1024061 - RNA, 19 nt, Homo sapiens
  misc_RNA (1)...(19): siRNA sense strand
agaaagagaugggaugaug

SEQ ID NO: 1024062 - RNA, 19 nt, Homo sapiens
  misc_RNA (1)...(19): siRNA sense strand
gaagaaagagaugggauga

SEQ ID NO: 1024063 - RNA, 19 nt, Homo sapiens
  misc_RNA (1)...(19): siRNA sense strand
ggagagagacccuaucagu

SEQ ID NO: 1024064 - RNA, 19 nt, Homo sapiens
  misc_RNA (1)...(19): siRNA sense strand
ggaaauccuucagcuacuu

SEQ ID NO: 1024065 - RNA, 19 nt, Homo sapiens
  misc_RNA (1)...(19): siRNA sense strand
gaaaagccuuauucuugua

SEQ ID NO: 1024066 - RNA, 19 nt, Homo sapiens
  misc_RNA (1)...(19): siRNA sense strand
gaaacccuuugacugugua

SEQ ID NO: 1024067 - RNA, 19 nt, Homo sapiens
  misc_RNA (1)...(19): siRNA sense strand
ggaaaagccuuauucuugu

SEQ ID NO: 1024068 - RNA, 19 nt, Homo sapiens
  misc_RNA (1)...(19): siRNA sense strand
gagaaggccuuugggacuu

SEQ ID NO: 1024069 - RNA, 19 nt, Homo sapiens
  misc_RNA (1)...(19): siRNA sense strand
agaccaacauugacaguga

SEQ ID NO: 1024070 - RNA, 19 nt, Homo sapiens
  misc_RNA (1)...(19): siRNA sense strand
gcugugcacuucaccaaga

SEQ ID NO: 1024071 - RNA, 19 nt, Homo sapiens
  misc_RNA (1)...(19): siRNA sense strand
agaacugacuucccagaaa

SEQ ID NO: 1024072 - RNA, 19 nt, Homo sapiens
  misc_RNA (1)...(19): siRNA sense strand
ugacagugaguccacauua

SEQ ID NO: 1024073 - RNA, 19 nt, Homo sapiens
  misc_RNA (1)...(19): siRNA sense strand
ggauguggcugugcacuuc

SEQ ID NO: 1024074 - RNA, 19 nt, Homo sapiens
  misc_RNA (1)...(19): siRNA sense strand
gcacugaucucacuuuugg

SEQ ID NO: 1024075 - RNA, 19 nt, Homo sapiens
  misc_RNA (1)...(19): siRNA sense strand
ggagagaaacccuaugagu

SEQ ID NO: 1024076 - RNA, 19 nt, Homo sapiens
  misc_RNA (1)...(19): siRNA sense strand
ggaaaagccuugacuagca

SEQ ID NO: 1024077 - RNA, 19 nt, Homo sapiens
  misc_RNA (1)...(19): siRNA sense strand
gggaaaagccuuauucuug

SEQ ID NO: 1024078 - RNA, 19 nt, Homo sapiens
  misc_RNA (1)...(19): siRNA sense strand
ggagagaaacccuaugagu

SEQ ID NO: 1024079 - RNA, 19 nt, Homo sapiens
  misc_RNA (1)...(19): siRNA sense strand
ggcgagccuuuaaugauaa

SEQ ID NO: 1024080 - RNA, 19 nt, Homo sapiens
  misc_RNA (1)...(19): siRNA sense strand
gaaauccuucagcuacuuu

SEQ ID NO: 1024081 - RNA, 19 nt, Homo sapiens
  misc_RNA (1)...(19): siRNA sense strand
gccuuauucuuguaaagua

SEQ ID NO: 1024082 - RNA, 19 nt, Homo sapiens
  misc_RNA (1)...(19): siRNA sense strand
aaacgucuguaaagauguu

SEQ ID NO: 1024083 - RNA, 19 nt, Homo sapiens
  misc_RNA (1)...(19): siRNA sense strand
agaaacacguaauguggaa

SEQ ID NO: 1024084 - RNA, 19 nt, Homo sapiens
  misc_RNA (1)...(19): siRNA sense strand
caacaucagcguauucaca

SEQ ID NO: 1024085 - RNA, 19 nt, Homo sapiens
  misc_RNA (1)...(19): siRNA sense strand
gaucaggcaucagagaauc

SEQ ID NO: 1024086 - RNA, 19 nt, Homo sapiens
  misc_RNA (1)...(19): siRNA sense strand
gaagagugucccucagaga

SEQ ID NO: 1024087 - RNA, 19 nt, Homo sapiens
  misc_RNA (1)...(19): siRNA sense strand
ccacauuaauccagggaau

SEQ ID NO: 1024088 - RNA, 19 nt, Homo sapiens
  misc_RNA (1)...(19): siRNA sense strand
agagaaacccuaugagugu

SEQ ID NO: 1024089 - RNA, 19 nt, Homo sapiens
  misc_RNA (1)...(19): siRNA sense strand
gaaaucuucaucagcauca

SEQ ID NO: 1024090 - RNA, 19 nt, Homo sapiens
  misc_RNA (1)...(19): siRNA sense strand
gaaaagccuugacuagcaa

SEQ ID NO: 1024091 - RNA, 19 nt, Homo sapiens
  misc_RNA (1)...(19): siRNA sense strand
guggacaagccuucaauuu

SEQ ID NO: 1024092 - RNA, 19 nt, Homo sapiens
  misc_RNA (1)...(19): siRNA sense strand
agagaaacccuaugagugu

SEQ ID NO: 1024093 - RNA, 19 nt, Homo sapiens
  misc_RNA (1)...(19): siRNA sense strand
gauucacacuggagagaga

SEQ ID NO: 1024094 - RNA, 19 nt, Homo sapiens
  misc_RNA (1)...(19): siRNA sense strand
aaaggcaucugagaauuca

SEQ ID NO: 1024095 - RNA, 19 nt, Homo sapiens
  misc_RNA (1)...(19): siRNA sense strand
caucaaagaauccauacug

SEQ ID NO: 1024096 - RNA, 19 nt, Homo sapiens
  misc_RNA (1)...(19): siRNA sense strand
gaaagagaugggaugaugu

SEQ ID NO: 1024097 - RNA, 19 nt, Homo sapiens
  misc_RNA (1)...(19): siRNA sense strand
cagcaucaaagaauccaua

SEQ ID NO: 1024098 - RNA, 19 nt, Homo sapiens
  misc_RNA (1)...(19): siRNA sense strand
agagagacccuaucagugu

SEQ ID NO: 1024099 - RNA, 19 nt, Homo sapiens
  misc_RNA (1)...(19): siRNA sense strand
ucccaaaccugcacugauc

SEQ ID NO: 1024100 - RNA, 19 nt, Homo sapiens
  misc_RNA (1)...(19): siRNA sense strand
acagaagugugauguugga

SEQ ID NO: 1024101 - RNA, 19 nt, Homo sapiens
  misc_RNA (1)...(19): siRNA sense strand
cuauguaugugaugagugu

SEQ ID NO: 1024102 - RNA, 19 nt, Homo sapiens
  misc_RNA (1)...(19): siRNA sense strand
uugggaaccugacugcuuu

SEQ ID NO: 1024103 - RNA, 19 nt, Homo sapiens
  misc_RNA (1)...(19): siRNA sense strand
gcacuucaccaagacagaa

SEQ ID NO: 1024104 - RNA, 19 nt, Homo sapiens
  misc_RNA (1)...(19): siRNA sense strand
gaaacccuaugaguguaau

SEQ ID NO: 1024105 - RNA, 19 nt, Homo sapiens
  misc_RNA (1)...(19): siRNA sense strand
gaaacccuaugaguguaau

SEQ ID NO: 1024106 - RNA, 19 nt, Homo sapiens
  misc_RNA (1)...(19): siRNA sense strand
guacagagugugggaauag

SEQ ID NO: 1024107 - RNA, 19 nt, Homo sapiens
  misc_RNA (1)...(19): siRNA sense strand
gauaaugcaaaucugauca

SEQ ID NO: 1024108 - RNA, 19 nt, Homo sapiens
  misc_RNA (1)...(19): siRNA sense strand
gaguguagcaaguaugaga

SEQ ID NO: 1024109 - RNA, 19 nt, Homo sapiens
  misc_RNA (1)...(19): siRNA sense strand
ggagucuuccuauguaugu

SEQ ID NO: 1024110 - RNA, 19 nt, Homo sapiens
  misc_RNA (1)...(19): siRNA sense strand
guuccgaguuuguuauaca

SEQ ID NO: 1024111 - RNA, 19 nt, Homo sapiens
  misc_RNA (1)...(19): siRNA sense strand
gagaacugacuucccagaa

SEQ ID NO: 1024112 - RNA, 19 nt, Homo sapiens
  misc_RNA (1)...(19): siRNA sense strand
gugugauguuggagaauuu

SEQ ID NO: 1024113 - RNA, 19 nt, Homo sapiens
  misc_RNA (1)...(19): siRNA sense strand
cacgaguaguuccgaguuu

SEQ ID NO: 1024114 - RNA, 19 nt, Homo sapiens
  misc_RNA (1)...(19): siRNA sense strand
ggacauccccacagugaaa

SEQ ID NO: 1024115 - RNA, 19 nt, Homo sapiens
  misc_RNA (1)...(19): siRNA sense strand
uaacucggcaccagagaau

SEQ ID NO: 1024116 - RNA, 19 nt, Homo sapiens
  misc_RNA (1)...(19): siRNA sense strand
ccagagggcccuguacaga

SEQ ID NO: 1024117 - RNA, 19 nt, Homo sapiens
  misc_RNA (1)...(19): siRNA sense strand
cagagugugggaauaguuu

SEQ ID NO: 1024118 - RNA, 19 nt, Homo sapiens
  misc_RNA (1)...(19): siRNA sense strand
gggaaauccuucagcuacu

SEQ ID NO: 1024119 - RNA, 19 nt, Homo sapiens
  misc_RNA (1)...(19): siRNA sense strand
cagagggcccuguacagaa

SEQ ID NO: 1024120 - RNA, 19 nt, Homo sapiens
  misc_RNA (1)...(19): siRNA sense strand
ucagugcucaggaacaauu

SEQ ID NO: 1024121 - RNA, 19 nt, Homo sapiens
  misc_RNA (1)...(19): siRNA sense strand
gaggagaaacccuuugacu

SEQ ID NO: 1024122 - RNA, 19 nt, Homo sapiens
  misc_RNA (1)...(19): siRNA sense strand
gauggugaccuucgaggau

SEQ ID NO: 1024123 - RNA, 19 nt, Homo sapiens
  misc_RNA (1)...(19): siRNA sense strand
agaaacccuuugacugugu

SEQ ID NO: 1024124 - RNA, 19 nt, Homo sapiens
  misc_RNA (1)...(19): siRNA sense strand
acauuaauccagggaauuu

SEQ ID NO: 1024125 - RNA, 19 nt, Homo sapiens
  misc_RNA (1)...(19): siRNA sense strand
ccgaguuuguuauacauca

SEQ ID NO: 1024126 - RNA, 19 nt, Homo sapiens
  misc_RNA (1)...(19): siRNA sense strand
ggagugugggcgagccuuu

SEQ ID NO: 1024127 - RNA, 19 nt, Homo sapiens
  misc_RNA (1)...(19): siRNA sense strand
gagugugggcgagccuuua

SEQ ID NO: 1024128 - RNA, 19 nt, Homo sapiens
  misc_RNA (1)...(19): siRNA sense strand
gugaggagaaacccuuuga

SEQ ID NO: 1024129 - RNA, 19 nt, Homo sapiens
  misc_RNA (1)...(19): siRNA sense strand
agagggcccuguacagaag

SEQ ID NO: 1024130 - RNA, 19 nt, Homo sapiens
  misc_RNA (1)...(19): siRNA sense strand
ucacauggucagcugaaga

SEQ ID NO: 1024131 - RNA, 19 nt, Homo sapiens
  misc_RNA (1)...(19): siRNA sense strand
caucugagaauucauacuc

SEQ ID NO: 1024132 - RNA, 19 nt, Homo sapiens
  misc_RNA (1)...(19): siRNA sense strand
cuucagugcucaggaacaa

SEQ ID NO: 1024133 - RNA, 19 nt, Homo sapiens
  misc_RNA (1)...(19): siRNA sense strand
aggcaucugagaauucaua

SEQ ID NO: 1024134 - RNA, 19 nt, Homo sapiens
  misc_RNA (1)...(19): siRNA sense strand
acagugaguccacauuaau

SEQ ID NO: 1024135 - RNA, 19 nt, Homo sapiens
  misc_RNA (1)...(19): siRNA sense strand
ccuaugaguguagcaagua

SEQ ID NO: 1024136 - RNA, 19 nt, Homo sapiens
  misc_RNA (1)...(19): siRNA sense strand
uguacagagugugggaaua

SEQ ID NO: 1024137 - RNA, 19 nt, Homo sapiens
  misc_RNA (1)...(19): siRNA sense strand
uuucauaugugaggagugu

SEQ ID NO: 1024138 - RNA, 19 nt, Homo sapiens
  misc_RNA (1)...(19): siRNA sense strand
aagagugucccucagagaa

SEQ ID NO: 1024139 - RNA, 19 nt, Homo sapiens
  misc_RNA (1)...(19): siRNA sense strand
agccugugcuggacauuug

SEQ ID NO: 1024140 - RNA, 19 nt, Homo sapiens
  misc_RNA (1)...(19): siRNA sense strand
cuaugaguguagcaaguau

SEQ ID NO: 1024141 - RNA, 19 nt, Homo sapiens
  misc_RNA (1)...(19): siRNA sense strand
guaguuccgaguuuguuau

SEQ ID NO: 1024142 - RNA, 19 nt, Homo sapiens
  misc_RNA (1)...(19): siRNA sense strand
gagaaaccuuuugagugua

SEQ ID NO: 1024143 - RNA, 19 nt, Homo sapiens
  misc_RNA (1)...(19): siRNA sense strand
gggacagacccuauuacug

SEQ ID NO: 1024144 - RNA, 19 nt, Homo sapiens
  misc_RNA (1)...(19): siRNA sense strand
gugcucaggaacaauuaaa

SEQ ID NO: 1024145 - RNA, 19 nt, Homo sapiens
  misc_RNA (1)...(19): siRNA sense strand
gaaagucaccuucaucuuc

SEQ ID NO: 1024146 - RNA, 19 nt, Homo sapiens
  misc_RNA (1)...(19): siRNA sense strand
ucagagaccuggaaaggaa

SEQ ID NO: 1024147 - RNA, 19 nt, Homo sapiens
  misc_RNA (1)...(19): siRNA sense strand
caggagcuguucugacuua

SEQ ID NO: 1024148 - RNA, 19 nt, Homo sapiens
  misc_RNA (1)...(19): siRNA sense strand
gaaagagaccaacaucaga

SEQ ID NO: 1024149 - RNA, 19 nt, Homo sapiens
  misc_RNA (1)...(19): siRNA sense strand
gcagaaggauacacaugug

SEQ ID NO: 1024150 - RNA, 19 nt, Homo sapiens
  misc_RNA (1)...(19): siRNA sense strand
caacagaauccacacauca

SEQ ID NO: 1024151 - RNA, 19 nt, Homo sapiens
  misc_RNA (1)...(19): siRNA sense strand
gcaacagaauccacacauc

SEQ ID NO: 1024152 - RNA, 19 nt, Homo sapiens
  misc_RNA (1)...(19): siRNA sense strand
ggcuggagcuauuucauug

SEQ ID NO: 1024153 - RNA, 19 nt, Homo sapiens
  misc_RNA (1)...(19): siRNA sense strand
gagcuguucugacuuagag

SEQ ID NO: 1024154 - RNA, 19 nt, Homo sapiens
  misc_RNA (1)...(19): siRNA sense strand
gcacagacgaucacagaca

SEQ ID NO: 1024155 - RNA, 19 nt, Homo sapiens
  misc_RNA (1)...(19): siRNA sense strand
caggugagcugggacaaga

SEQ ID NO: 1024156 - RNA, 19 nt, Homo sapiens
  misc_RNA (1)...(19): siRNA sense strand
ggagaaagagaccaacauc

SEQ ID NO: 1024157 - RNA, 19 nt, Homo sapiens
  misc_RNA (1)...(19): siRNA sense strand
gggcacagacgaucacaga

SEQ ID NO: 1024158 - RNA, 19 nt, Homo sapiens
  misc_RNA (1)...(19): siRNA sense strand
caacaucagagaccuggaa

SEQ ID NO: 1024159 - RNA, 19 nt, Homo sapiens
  misc_RNA (1)...(19): siRNA sense strand
ggaaagucaccuucaucuu

SEQ ID NO: 1024160 - RNA, 19 nt, Homo sapiens
  misc_RNA (1)...(19): siRNA sense strand
ggcuggugcuuauccuaua

SEQ ID NO: 1024161 - RNA, 19 nt, Homo sapiens
  misc_RNA (1)...(19): siRNA sense strand
gagaaagagaccaacauca

SEQ ID NO: 1024162 - RNA, 19 nt, Homo sapiens
  misc_RNA (1)...(19): siRNA sense strand
gugcuuauccuauacuuca

SEQ ID NO: 1024163 - RNA, 19 nt, Homo sapiens
  misc_RNA (1)...(19): siRNA sense strand
gagcagaaggauacacaug

SEQ ID NO: 1024164 - RNA, 19 nt, Homo sapiens
  misc_RNA (1)...(19): siRNA sense strand
gucauggccuucuccaaga

SEQ ID NO: 1024165 - RNA, 19 nt, Homo sapiens
  misc_RNA (1)...(19): siRNA sense strand
aaagucaccuucaucuucu

SEQ ID NO: 1024166 - RNA, 19 nt, Homo sapiens
  misc_RNA (1)...(19): siRNA sense strand
ccacacaucagcccacguu

SEQ ID NO: 1024167 - RNA, 19 nt, Homo sapiens
  misc_RNA (1)...(19): siRNA sense strand
ugacuuagagaaugggaaa

SEQ ID NO: 1024168 - RNA, 19 nt, Homo sapiens
  misc_RNA (1)...(19): siRNA sense strand
ccgcugcccuuucaaugga

SEQ ID NO: 1024169 - RNA, 19 nt, Homo sapiens
  misc_RNA (1)...(19): siRNA sense strand
gaauguauccauccccaua

SEQ ID NO: 1024170 - RNA, 19 nt, Homo sapiens
  misc_RNA (1)...(19): siRNA sense strand
gcaaauccaggagcuguuc

SEQ ID NO: 1024171 - RNA, 19 nt, Homo sapiens
  misc_RNA (1)...(19): siRNA sense strand
ggucagaaggagaaagaga

SEQ ID NO: 1024172 - RNA, 19 nt, Homo sapiens
  misc_RNA (1)...(19): siRNA sense strand
gcgcgauccuuugcuacuu

SEQ ID NO: 1024173 - RNA, 19 nt, Homo sapiens
  misc_RNA (1)...(19): siRNA sense strand
aaaaguuucuggagucuga

SEQ ID NO: 1024174 - RNA, 19 nt, Homo sapiens
  misc_RNA (1)...(19): siRNA sense strand
cacaucagcccacguuaug

SEQ ID NO: 1024175 - RNA, 19 nt, Homo sapiens
  misc_RNA (1)...(19): siRNA sense strand
caauggagaaucacacaca

SEQ ID NO: 1024176 - RNA, 19 nt, Homo sapiens
  misc_RNA (1)...(19): siRNA sense strand
ccauuaacaucuggaucuu

SEQ ID NO: 1024177 - RNA, 19 nt, Homo sapiens
  misc_RNA (1)...(19): siRNA sense strand
gggaaagucaccuucaucu

SEQ ID NO: 1024178 - RNA, 19 nt, Homo sapiens
  misc_RNA (1)...(19): siRNA sense strand
ucuccacccucaugcuauu

SEQ ID NO: 1024179 - RNA, 19 nt, Homo sapiens
  misc_RNA (1)...(19): siRNA sense strand
cuaggagccucuucuacca

SEQ ID NO: 1024180 - RNA, 19 nt, Homo sapiens
  misc_RNA (1)...(19): siRNA sense strand
agaaagagaccaacaucag

SEQ ID NO: 1024181 - RNA, 19 nt, Homo sapiens
  misc_RNA (1)...(19): siRNA sense strand
uccaggagcuguucugacu

SEQ ID NO: 1024182 - RNA, 19 nt, Homo sapiens
  misc_RNA (1)...(19): siRNA sense strand
gaacucuccgcugcccuuu

SEQ ID NO: 1024183 - RNA, 19 nt, Homo sapiens
  misc_RNA (1)...(19): siRNA sense strand
uugguuggcuggugcuuau

SEQ ID NO: 1024184 - RNA, 19 nt, Homo sapiens
  misc_RNA (1)...(19): siRNA sense strand
acacaucagcccacguuau

SEQ ID NO: 1024185 - RNA, 19 nt, Homo sapiens
  misc_RNA (1)...(19): siRNA sense strand
gaaauggcuggaccucucu

SEQ ID NO: 1024186 - RNA, 19 nt, Homo sapiens
  misc_RNA (1)...(19): siRNA sense strand
acucuccgcugcccuuuca

SEQ ID NO: 1024187 - RNA, 19 nt, Homo sapiens
  misc_RNA (1)...(19): siRNA sense strand
ccugcgcgauccuuugcua

SEQ ID NO: 1024188 - RNA, 19 nt, Homo sapiens
  misc_RNA (1)...(19): siRNA sense strand
acaucuggaucuucgaguu

SEQ ID NO: 1024189 - RNA, 19 nt, Homo sapiens
  misc_RNA (1)...(19): siRNA sense strand
caucagagaccuggaaagg

SEQ ID NO: 1024190 - RNA, 19 nt, Homo sapiens
  misc_RNA (1)...(19): siRNA sense strand
gcucagccugguugccuuu

SEQ ID NO: 1024191 - RNA, 19 nt, Homo sapiens
  misc_RNA (1)...(19): siRNA sense strand
uuugcuacuucaaccauaa

SEQ ID NO: 1024192 - RNA, 19 nt, Homo sapiens
  misc_RNA (1)...(19): siRNA sense strand
gcgauccuuugcuacuuca

SEQ ID NO: 1024193 - RNA, 19 nt, Homo sapiens
  misc_RNA (1)...(19): siRNA sense strand
caggucagaaggagaaaga

SEQ ID NO: 1024194 - RNA, 19 nt, Homo sapiens
  misc_RNA (1)...(19): siRNA sense strand
guggaugucagcaacagaa

SEQ ID NO: 1024195 - RNA, 19 nt, Homo sapiens
  misc_RNA (1)...(19): siRNA sense strand
cagccugguugccuuuauc

SEQ ID NO: 1024196 - RNA, 19 nt, Homo sapiens
  misc_RNA (1)...(19): siRNA sense strand
caguuucggcucaguagaa

SEQ ID NO: 1024197 - RNA, 19 nt, Homo sapiens
  misc_RNA (1)...(19): siRNA sense strand
caucuggaucuucgaguug

SEQ ID NO: 1024198 - RNA, 19 nt, Homo sapiens
  misc_RNA (1)...(19): siRNA sense strand
caucuucuccacccucaug

SEQ ID NO: 1024199 - RNA, 19 nt, Homo sapiens
  misc_RNA (1)...(19): siRNA sense strand
ggagcuguucugacuuaga

SEQ ID NO: 1024200 - RNA, 19 nt, Homo sapiens
  misc_RNA (1)...(19): siRNA sense strand
gaguuggaaaggaauguau

SEQ ID NO: 1024201 - RNA, 19 nt, Homo sapiens
  misc_RNA (1)...(19): siRNA sense strand
gaccuggaaaggaaaggaa

SEQ ID NO: 1024202 - RNA, 19 nt, Homo sapiens
  misc_RNA (1)...(19): siRNA sense strand
ggagaaucacacacagcuu

SEQ ID NO: 1024203 - RNA, 19 nt, Homo sapiens
  misc_RNA (1)...(19): siRNA sense strand
ccugguugccuuuauccua

SEQ ID NO: 1024204 - RNA, 19 nt, Homo sapiens
  misc_RNA (1)...(19): siRNA sense strand
gcuggugcuuauccuauac

SEQ ID NO: 1024205 - RNA, 19 nt, Homo sapiens
  misc_RNA (1)...(19): siRNA sense strand
cagcaguuucggcucagua

SEQ ID NO: 1024206 - RNA, 19 nt, Homo sapiens
  misc_RNA (1)...(19): siRNA sense strand
agaaggagaaagagaccaa

SEQ ID NO: 1024207 - RNA, 19 nt, Homo sapiens
  misc_RNA (1)...(19): siRNA sense strand
ucagccugguugccuuuau

SEQ ID NO: 1024208 - RNA, 19 nt, Homo sapiens
  misc_RNA (1)...(19): siRNA sense strand
ccaagggcacagacgauca

SEQ ID NO: 1024209 - RNA, 19 nt, Homo sapiens
  misc_RNA (1)...(19): siRNA sense strand
ggugagcugggacaagaug

SEQ ID NO: 1024210 - RNA, 19 nt, Homo sapiens
  misc_RNA (1)...(19): siRNA sense strand
caucagcccacguuauguc

SEQ ID NO: 1024211 - RNA, 19 nt, Homo sapiens
  misc_RNA (1)...(19): siRNA sense strand
gccuuuauccuacuauugg

SEQ ID NO: 1024212 - RNA, 19 nt, Homo sapiens
  misc_RNA (1)...(19): siRNA sense strand
gcacaaaucccacuuauac

SEQ ID NO: 1024213 - RNA, 19 nt, Homo sapiens
  misc_RNA (1)...(19): siRNA sense strand
gcucaaacaucuccacaau

SEQ ID NO: 1024214 - RNA, 19 nt, Homo sapiens
  misc_RNA (1)...(19): siRNA sense strand
ucaaacaucuccacaaugg

SEQ ID NO: 1024215 - RNA, 19 nt, Homo sapiens
  misc_RNA (1)...(19): siRNA sense strand
gacagcaggucucauccua

SEQ ID NO: 1024216 - RNA, 19 nt, Homo sapiens
  misc_RNA (1)...(19): siRNA sense strand
gcaccgaguucguguucaa

SEQ ID NO: 1024217 - RNA, 19 nt, Homo sapiens
  misc_RNA (1)...(19): siRNA sense strand
cuucaaggccuaccaauuu

SEQ ID NO: 1024218 - RNA, 19 nt, Homo sapiens
  misc_RNA (1)...(19): siRNA sense strand
cauccuagguccuuagaga

SEQ ID NO: 1024219 - RNA, 19 nt, Homo sapiens
  misc_RNA (1)...(19): siRNA sense strand
gcaccaaggccgugaacuu

SEQ ID NO: 1024220 - RNA, 19 nt, Homo sapiens
  misc_RNA (1)...(19): siRNA sense strand
gcucuuccuuggugacauu

SEQ ID NO: 1024221 - RNA, 19 nt, Homo sapiens
  misc_RNA (1)...(19): siRNA sense strand
gugcacaaaucccacuuau

SEQ ID NO: 1024222 - RNA, 19 nt, Homo sapiens
  misc_RNA (1)...(19): siRNA sense strand
gcccagaguucaucacaag

SEQ ID NO: 1024223 - RNA, 19 nt, Homo sapiens
  misc_RNA (1)...(19): siRNA sense strand
ucacaagguccuacagauu

SEQ ID NO: 1024224 - RNA, 19 nt, Homo sapiens
  misc_RNA (1)...(19): siRNA sense strand
gaacuuugccaugcaugaa

SEQ ID NO: 1024225 - RNA, 19 nt, Homo sapiens
  misc_RNA (1)...(19): siRNA sense strand
ggaguacgagaucuucaaa

SEQ ID NO: 1024226 - RNA, 19 nt, Homo sapiens
  misc_RNA (1)...(19): siRNA sense strand
gcagaugccaccuacaauc

SEQ ID NO: 1024227 - RNA, 19 nt, Homo sapiens
  misc_RNA (1)...(19): siRNA sense strand
gaguucguguucaaaguga

SEQ ID NO: 1024228 - RNA, 19 nt, Homo sapiens
  misc_RNA (1)...(19): siRNA sense strand
uacagauucuaccacaaua

SEQ ID NO: 1024229 - RNA, 19 nt, Homo sapiens
  misc_RNA (1)...(19): siRNA sense strand
gccaucacaugcucaaaca

SEQ ID NO: 1024230 - RNA, 19 nt, Homo sapiens
  misc_RNA (1)...(19): siRNA sense strand
caccaaggccgugaacuuu

SEQ ID NO: 1024231 - RNA, 19 nt, Homo sapiens
  misc_RNA (1)...(19): siRNA sense strand
gagaggagaacggcuguga

SEQ ID NO: 1024232 - RNA, 19 nt, Homo sapiens
  misc_RNA (1)...(19): siRNA sense strand
ugcaggacguggccuauga

SEQ ID NO: 1024233 - RNA, 19 nt, Homo sapiens
  misc_RNA (1)...(19): siRNA sense strand
gaggagaacggcugugagu

SEQ ID NO: 1024234 - RNA, 19 nt, Homo sapiens
  misc_RNA (1)...(19): siRNA sense strand
gugcagaugccaccuacaa

SEQ ID NO: 1024235 - RNA, 19 nt, Homo sapiens
  misc_RNA (1)...(19): siRNA sense strand
gcacggaagccgacuacca

SEQ ID NO: 1024236 - RNA, 19 nt, Homo sapiens
  misc_RNA (1)...(19): siRNA sense strand
cuacagauucuaccacaau

SEQ ID NO: 1024237 - RNA, 19 nt, Homo sapiens
  misc_RNA (1)...(19): siRNA sense strand
cacaagguccuacagauuc

SEQ ID NO: 1024238 - RNA, 19 nt, Homo sapiens
  misc_RNA (1)...(19): siRNA sense strand
ggcgcuaucugcuguucaa

SEQ ID NO: 1024239 - RNA, 19 nt, Homo sapiens
  misc_RNA (1)...(19): siRNA sense strand
ccacuacuaccacuacuca

SEQ ID NO: 1024240 - RNA, 19 nt, Homo sapiens
  misc_RNA (1)...(19): siRNA sense strand
ccacuuauacucucaucau

SEQ ID NO: 1024241 - RNA, 19 nt, Homo sapiens
  misc_RNA (1)...(19): siRNA sense strand
gcagcaaccggugcacaaa

SEQ ID NO: 1024242 - RNA, 19 nt, Homo sapiens
  misc_RNA (1)...(19): siRNA sense strand
gcaguaccuucaccacaac

SEQ ID NO: 1024243 - RNA, 19 nt, Homo sapiens
  misc_RNA (1)...(19): siRNA sense strand
gcacaacguccaggugauc

SEQ ID NO: 1024244 - RNA, 19 nt, Homo sapiens
  misc_RNA (1)...(19): siRNA sense strand
ccaaggccgugaacuuugc

SEQ ID NO: 1024245 - RNA, 19 nt, Homo sapiens
  misc_RNA (1)...(19): siRNA sense strand
caucuuccaugacaacaac

SEQ ID NO: 1024246 - RNA, 19 nt, Homo sapiens
  misc_RNA (1)...(19): siRNA sense strand
caucacaugcucaaacauc

SEQ ID NO: 1024247 - RNA, 19 nt, Homo sapiens
  misc_RNA (1)...(19): siRNA sense strand
ggugcacaaaucccacuua

SEQ ID NO: 1024248 - RNA, 19 nt, Homo sapiens
  misc_RNA (1)...(19): siRNA sense strand
agcaguaccuucaccacaa

SEQ ID NO: 1024249 - RNA, 19 nt, Homo sapiens
  misc_RNA (1)...(19): siRNA sense strand
caaaucccacuuauacucu

SEQ ID NO: 1024250 - RNA, 19 nt, Homo sapiens
  misc_RNA (1)...(19): siRNA sense strand
gcagaagacaguggaagca

SEQ ID NO: 1024251 - RNA, 19 nt, Homo sapiens
  misc_RNA (1)...(19): siRNA sense strand
caucacaagguccuacaga

SEQ ID NO: 1024252 - RNA, 19 nt, Homo sapiens
  misc_RNA (1)...(19): siRNA sense strand
ccacccagaggauguucua

SEQ ID NO: 1024253 - RNA, 19 nt, Homo sapiens
  misc_RNA (1)...(19): siRNA sense strand
ccucacugcucaacgucuu

SEQ ID NO: 1024254 - RNA, 19 nt, Homo sapiens
  misc_RNA (1)...(19): siRNA sense strand
ccagacaggccagagaaga

SEQ ID NO: 1024255 - RNA, 19 nt, Homo sapiens
  misc_RNA (1)...(19): siRNA sense strand
acaaaucccacuuauacuc

SEQ ID NO: 1024256 - RNA, 19 nt, Homo sapiens
  misc_RNA (1)...(19): siRNA sense strand
gcccagacaggccagagaa

SEQ ID NO: 1024257 - RNA, 19 nt, Homo sapiens
  misc_RNA (1)...(19): siRNA sense strand
agaagagagccacguccua

SEQ ID NO: 1024258 - RNA, 19 nt, Homo sapiens
  misc_RNA (1)...(19): siRNA sense strand
ggcccagaguucaucacaa

SEQ ID NO: 1024259 - RNA, 19 nt, Homo sapiens
  misc_RNA (1)...(19): siRNA sense strand
cagccucacugcucaacgu

SEQ ID NO: 1024260 - RNA, 19 nt, Homo sapiens
  misc_RNA (1)...(19): siRNA sense strand
acagauucuaccacaauaa

SEQ ID NO: 1024261 - RNA, 19 nt, Homo sapiens
  misc_RNA (1)...(19): siRNA sense strand
uacgagaucuucaaaaugg

SEQ ID NO: 1024262 - RNA, 19 nt, Homo sapiens
  misc_RNA (1)...(19): siRNA sense strand
acucagacccggugugcaa

SEQ ID NO: 1024263 - RNA, 19 nt, Homo sapiens
  misc_RNA (1)...(19): siRNA sense strand
ccugggagggccacuacua

SEQ ID NO: 1024264 - RNA, 19 nt, Homo sapiens
  misc_RNA (1)...(19): siRNA sense strand
acaagguccuacagauucu

SEQ ID NO: 1024265 - RNA, 19 nt, Homo sapiens
  misc_RNA (1)...(19): siRNA sense strand
auuggaacauccgcagaua

SEQ ID NO: 1024266 - RNA, 19 nt, Homo sapiens
  misc_RNA (1)...(19): siRNA sense strand
ccgaguucguguucaaagu

SEQ ID NO: 1024267 - RNA, 19 nt, Homo sapiens
  misc_RNA (1)...(19): siRNA sense strand
gagucacagugccaucaca

SEQ ID NO: 1024268 - RNA, 19 nt, Homo sapiens
  misc_RNA (1)...(19): siRNA sense strand
gccgccuccugcucagaua

SEQ ID NO: 1024269 - RNA, 19 nt, Homo sapiens
  misc_RNA (1)...(19): siRNA sense strand
ggucucauccuagguccuu

SEQ ID NO: 1024270 - RNA, 19 nt, Homo sapiens
  misc_RNA (1)...(19): siRNA sense strand
cgaguucguguucaaagug

SEQ ID NO: 1024271 - RNA, 19 nt, Homo sapiens
  misc_RNA (1)...(19): siRNA sense strand
ggcagcaaccggugcacaa

SEQ ID NO: 1024272 - RNA, 19 nt, Homo sapiens
  misc_RNA (1)...(19): siRNA sense strand
cagcaaccggugcacaaau

SEQ ID NO: 1024273 - RNA, 19 nt, Homo sapiens
  misc_RNA (1)...(19): siRNA sense strand
ggagaaaguuuaccauuga

SEQ ID NO: 1024274 - RNA, 19 nt, Homo sapiens
  misc_RNA (1)...(19): siRNA sense strand
ggagaaaggucuuaugaau

SEQ ID NO: 1024275 - RNA, 19 nt, Homo sapiens
  misc_RNA (1)...(19): siRNA sense strand
gagaaaggccuuauaaaug

SEQ ID NO: 1024276 - RNA, 19 nt, Homo sapiens
  misc_RNA (1)...(19): siRNA sense strand
ggagaaaggccuuauaaau

SEQ ID NO: 1024277 - RNA, 19 nt, Homo sapiens
  misc_RNA (1)...(19): siRNA sense strand
caucagagauuucacaaug

SEQ ID NO: 1024278 - RNA, 19 nt, Homo sapiens
  misc_RNA (1)...(19): siRNA sense strand
cagaaggccuuuauuagaa

SEQ ID NO: 1024279 - RNA, 19 nt, Homo sapiens
  misc_RNA (1)...(19): siRNA sense strand
uaacaaaugugggaaauuc

SEQ ID NO: 1024280 - RNA, 19 nt, Homo sapiens
  misc_RNA (1)...(19): siRNA sense strand
agaaaggucuuaugaaugu

SEQ ID NO: 1024281 - RNA, 19 nt, Homo sapiens
  misc_RNA (1)...(19): siRNA sense strand
ggagaaagaccuuauaagu

SEQ ID NO: 1024282 - RNA, 19 nt, Homo sapiens
  misc_RNA (1)...(19): siRNA sense strand
gaggagaucuucacaugca

SEQ ID NO: 1024283 - RNA, 19 nt, Homo sapiens
  misc_RNA (1)...(19): siRNA sense strand
gagaaagaccuuauaagug

SEQ ID NO: 1024284 - RNA, 19 nt, Homo sapiens
  misc_RNA (1)...(19): siRNA sense strand
caacacaugugggaaauuc

SEQ ID NO: 1024285 - RNA, 19 nt, Homo sapiens
  misc_RNA (1)...(19): siRNA sense strand
ggagucaccuucacagcaa

SEQ ID NO: 1024286 - RNA, 19 nt, Homo sapiens
  misc_RNA (1)...(19): siRNA sense strand
cagaggagaucuucacaug

SEQ ID NO: 1024287 - RNA, 19 nt, Homo sapiens
  misc_RNA (1)...(19): siRNA sense strand
ggacagcuccacacucauu

SEQ ID NO: 1024288 - RNA, 19 nt, Homo sapiens
  misc_RNA (1)...(19): siRNA sense strand
ggagaaagaccuuaugagu

SEQ ID NO: 1024289 - RNA, 19 nt, Homo sapiens
  misc_RNA (1)...(19): siRNA sense strand
ugucagagguuacaacuuc

SEQ ID NO: 1024290 - RNA, 19 nt, Homo sapiens
  misc_RNA (1)...(19): siRNA sense strand
uagaaagucucaccugguu

SEQ ID NO: 1024291 - RNA, 19 nt, Homo sapiens
  misc_RNA (1)...(19): siRNA sense strand
ggagaaaggccuuaugagu

SEQ ID NO: 1024292 - RNA, 19 nt, Homo sapiens
  misc_RNA (1)...(19): siRNA sense strand
ggagaaaggccuuaugagu

SEQ ID NO: 1024293 - RNA, 19 nt, Homo sapiens
  misc_RNA (1)...(19): siRNA sense strand
ggagaaaggccuuaugagu

SEQ ID NO: 1024294 - RNA, 19 nt, Homo sapiens
  misc_RNA (1)...(19): siRNA sense strand
gugggaaauucuuuaagua

SEQ ID NO: 1024295 - RNA, 19 nt, Homo sapiens
  misc_RNA (1)...(19): siRNA sense strand
ggacguggccauauauuuc

SEQ ID NO: 1024296 - RNA, 19 nt, Homo sapiens
  misc_RNA (1)...(19): siRNA sense strand
ccagaaggccuuuauuaga

SEQ ID NO: 1024297 - RNA, 19 nt, Homo sapiens
  misc_RNA (1)...(19): siRNA sense strand
ggacacagaggacagagaa

SEQ ID NO: 1024298 - RNA, 19 nt, Homo sapiens
  misc_RNA (1)...(19): siRNA sense strand
ggagaaaggccguaugagu

SEQ ID NO: 1024299 - RNA, 19 nt, Homo sapiens
  misc_RNA (1)...(19): siRNA sense strand
agaaaggccuuauaaaugc

SEQ ID NO: 1024300 - RNA, 19 nt, Homo sapiens
  misc_RNA (1)...(19): siRNA sense strand
guaggagugucagagguua

SEQ ID NO: 1024301 - RNA, 19 nt, Homo sapiens
  misc_RNA (1)...(19): siRNA sense strand
gagaaaggucuuaugaaug

SEQ ID NO: 1024302 - RNA, 19 nt, Homo sapiens
  misc_RNA (1)...(19): siRNA sense strand
gcuccacacucauuaaaca

SEQ ID NO: 1024303 - RNA, 19 nt, Homo sapiens
  misc_RNA (1)...(19): siRNA sense strand
gggaaauucuuuaaguaca

SEQ ID NO: 1024304 - RNA, 19 nt, Homo sapiens
  misc_RNA (1)...(19): siRNA sense strand
uggagaaaguuuaccauug

SEQ ID NO: 1024305 - RNA, 19 nt, Homo sapiens
  misc_RNA (1)...(19): siRNA sense strand
gaaagucucaccugguuca

SEQ ID NO: 1024306 - RNA, 19 nt, Homo sapiens
  misc_RNA (1)...(19): siRNA sense strand
uaaguacagugccaauuuc

SEQ ID NO: 1024307 - RNA, 19 nt, Homo sapiens
  misc_RNA (1)...(19): siRNA sense strand
gaaaggucuuaugaaugua

SEQ ID NO: 1024308 - RNA, 19 nt, Homo sapiens
  misc_RNA (1)...(19): siRNA sense strand
ccuuauaagugcaaugauu

SEQ ID NO: 1024309 - RNA, 19 nt, Homo sapiens
  misc_RNA (1)...(19): siRNA sense strand
guacagcuccacauuuguu

SEQ ID NO: 1024310 - RNA, 19 nt, Homo sapiens
  misc_RNA (1)...(19): siRNA sense strand
ucacaauggagaaaguuua

SEQ ID NO: 1024311 - RNA, 19 nt, Homo sapiens
  misc_RNA (1)...(19): siRNA sense strand
cgguacagcuccacauuug

SEQ ID NO: 1024312 - RNA, 19 nt, Homo sapiens
  misc_RNA (1)...(19): siRNA sense strand
gaaaggccuuauaaaugca

SEQ ID NO: 1024313 - RNA, 19 nt, Homo sapiens
  misc_RNA (1)...(19): siRNA sense strand
ggaaauucuuuaaguacag

SEQ ID NO: 1024314 - RNA, 19 nt, Homo sapiens
  misc_RNA (1)...(19): siRNA sense strand
ucagagauuucacaaugga

SEQ ID NO: 1024315 - RNA, 19 nt, Homo sapiens
  misc_RNA (1)...(19): siRNA sense strand
agaaggccuuuauuagaaa

SEQ ID NO: 1024316 - RNA, 19 nt, Homo sapiens
  misc_RNA (1)...(19): siRNA sense strand
guacagugccaauuucaug

SEQ ID NO: 1024317 - RNA, 19 nt, Homo sapiens
  misc_RNA (1)...(19): siRNA sense strand
uuaaguacagugccaauuu

SEQ ID NO: 1024318 - RNA, 19 nt, Homo sapiens
  misc_RNA (1)...(19): siRNA sense strand
guuaaacauuggagaaauc

SEQ ID NO: 1024319 - RNA, 19 nt, Homo sapiens
  misc_RNA (1)...(19): siRNA sense strand
guacaacuaccgacucaug

SEQ ID NO: 1024320 - RNA, 19 nt, Homo sapiens
  misc_RNA (1)...(19): siRNA sense strand
gaauucauccugagcaaca

SEQ ID NO: 1024321 - RNA, 19 nt, Homo sapiens
  misc_RNA (1)...(19): siRNA sense strand
caugaaacaucagacaguu

SEQ ID NO: 1024322 - RNA, 19 nt, Homo sapiens
  misc_RNA (1)...(19): siRNA sense strand
ccacacucauuaaacauca

SEQ ID NO: 1024323 - RNA, 19 nt, Homo sapiens
  misc_RNA (1)...(19): siRNA sense strand
caacuccaaccucauuaaa

SEQ ID NO: 1024324 - RNA, 19 nt, Homo sapiens
  misc_RNA (1)...(19): siRNA sense strand
cauuagacaucagagaauu

SEQ ID NO: 1024325 - RNA, 19 nt, Homo sapiens
  misc_RNA (1)...(19): siRNA sense strand
gauuggauaccuucauuug

SEQ ID NO: 1024326 - RNA, 19 nt, Homo sapiens
  misc_RNA (1)...(19): siRNA sense strand
gcauggagcugaggaugag

SEQ ID NO: 1024327 - RNA, 19 nt, Homo sapiens
  misc_RNA (1)...(19): siRNA sense strand
caaaugugggaaauucuuu

SEQ ID NO: 1024328 - RNA, 19 nt, Homo sapiens
  misc_RNA (1)...(19): siRNA sense strand
uugaggacguggccauaua

SEQ ID NO: 1024329 - RNA, 19 nt, Homo sapiens
  misc_RNA (1)...(19): siRNA sense strand
caggagaaaggucuuauga

SEQ ID NO: 1024330 - RNA, 19 nt, Homo sapiens
  misc_RNA (1)...(19): siRNA sense strand
ugccagaaggccuuuauua

SEQ ID NO: 1024331 - RNA, 19 nt, Homo sapiens
  misc_RNA (1)...(19): siRNA sense strand
caucagacaguucacacua

SEQ ID NO: 1024332 - RNA, 19 nt, Homo sapiens
  misc_RNA (1)...(19): siRNA sense strand
caacuccagccuuguuaaa

SEQ ID NO: 1024333 - RNA, 19 nt, Homo sapiens
  misc_RNA (1)...(19): siRNA sense strand
guauaucuccacacucauu

SEQ ID NO: 1024334 - RNA, 19 nt, Homo sapiens
  misc_RNA (1)...(19): siRNA sense strand
ggacagagaagccuuucag

SEQ ID NO: 1024335 - RNA, 19 nt, Homo sapiens
  misc_RNA (1)...(19): siRNA sense strand
ccuuauaaaugcagugaau

SEQ ID NO: 1024336 - RNA, 19 nt, Homo sapiens
  misc_RNA (1)...(19): siRNA sense strand
ccacauuuguuagacauca

SEQ ID NO: 1024337 - RNA, 19 nt, Homo sapiens
  misc_RNA (1)...(19): siRNA sense strand
ggaaaauccuuuauguaca

SEQ ID NO: 1024338 - RNA, 19 nt, Homo sapiens
  misc_RNA (1)...(19): siRNA sense strand
gcuguaccgugaugugaug

SEQ ID NO: 1024339 - RNA, 19 nt, Homo sapiens
  misc_RNA (1)...(19): siRNA sense strand
cauuaaacaucagagaguu

SEQ ID NO: 1024340 - RNA, 19 nt, Homo sapiens
  misc_RNA (1)...(19): siRNA sense strand
gugaugugaugcuggagaa

SEQ ID NO: 1024341 - RNA, 19 nt, Homo sapiens
  misc_RNA (1)...(19): siRNA sense strand
acuccaaccucauuaaaca

SEQ ID NO: 1024342 - RNA, 19 nt, Homo sapiens
  misc_RNA (1)...(19): siRNA sense strand
gugcagagagugugggaaa

SEQ ID NO: 1024343 - RNA, 19 nt, Homo sapiens
  misc_RNA (1)...(19): siRNA sense strand
acuccaaccucauuaaaca

SEQ ID NO: 1024344 - RNA, 19 nt, Homo sapiens
  misc_RNA (1)...(19): siRNA sense strand
uuacaacuccaaccucauu

SEQ ID NO: 1024345 - RNA, 19 nt, Homo sapiens
  misc_RNA (1)...(19): siRNA sense strand
ggacuuaugagugcagaga

SEQ ID NO: 1024346 - RNA, 19 nt, Homo sapiens
  misc_RNA (1)...(19): siRNA sense strand
cuagugaaaggacuuauga

SEQ ID NO: 1024347 - RNA, 19 nt, Homo sapiens
  misc_RNA (1)...(19): siRNA sense strand
cugcagcuauucauuuguu

SEQ ID NO: 1024348 - RNA, 19 nt, Homo sapiens
  misc_RNA (1)...(19): siRNA sense strand
gaugugaugcuggagaauu

SEQ ID NO: 1024349 - RNA, 19 nt, Homo sapiens
  misc_RNA (1)...(19): siRNA sense strand
gccagaaggccuuuauuag

SEQ ID NO: 1024350 - RNA, 19 nt, Homo sapiens
  misc_RNA (1)...(19): siRNA sense strand
gaaaucacacuggagaaag

SEQ ID NO: 1024351 - RNA, 19 nt, Homo sapiens
  misc_RNA (1)...(19): siRNA sense strand
gaaaucacacuggagaaag

SEQ ID NO: 1024352 - RNA, 19 nt, Homo sapiens
  misc_RNA (1)...(19): siRNA sense strand
gaccuuauaagugcaauga

SEQ ID NO: 1024353 - RNA, 19 nt, Homo sapiens
  misc_RNA (1)...(19): siRNA sense strand
cagagaagccuuucagacu

SEQ ID NO: 1024354 - RNA, 19 nt, Homo sapiens
  misc_RNA (1)...(19): siRNA sense strand
agguauaucuccacacuca

SEQ ID NO: 1024355 - RNA, 19 nt, Homo sapiens
  misc_RNA (1)...(19): siRNA sense strand
ugugggaaauucuuuaagu

SEQ ID NO: 1024356 - RNA, 19 nt, Homo sapiens
  misc_RNA (1)...(19): siRNA sense strand
caacuaccgacucaugaga

SEQ ID NO: 1024357 - RNA, 19 nt, Homo sapiens
  misc_RNA (1)...(19): siRNA sense strand
aaacuccaaccucauuaaa

SEQ ID NO: 1024358 - RNA, 19 nt, Homo sapiens
  misc_RNA (1)...(19): siRNA sense strand
gccuuuagccacaagcaua

SEQ ID NO: 1024359 - RNA, 19 nt, Homo sapiens
  misc_RNA (1)...(19): siRNA sense strand
ccaaccucauuaaacauug

SEQ ID NO: 1024360 - RNA, 19 nt, Homo sapiens
  misc_RNA (1)...(19): siRNA sense strand
cagaggggaugauuggaua

SEQ ID NO: 1024361 - RNA, 19 nt, Homo sapiens
  misc_RNA (1)...(19): siRNA sense strand
gacagcuccacacucauua

SEQ ID NO: 1024362 - RNA, 19 nt, Homo sapiens
  misc_RNA (1)...(19): siRNA sense strand
ugugggaaauucuuuaugg

SEQ ID NO: 1024363 - RNA, 19 nt, Homo sapiens
  misc_RNA (1)...(19): siRNA sense strand
ucagacaguucacacuagu

SEQ ID NO: 1024364 - RNA, 19 nt, Homo sapiens
  misc_RNA (1)...(19): siRNA sense strand
agucucaccugguucauca

SEQ ID NO: 1024365 - RNA, 19 nt, Homo sapiens
  misc_RNA (1)...(19): siRNA sense strand
gugggaaauucuuuaugga

SEQ ID NO: 1024366 - RNA, 19 nt, Homo sapiens
  misc_RNA (1)...(19): siRNA sense strand
gcagggaaugugggaaauu

SEQ ID NO: 1024367 - RNA, 19 nt, Homo sapiens
  misc_RNA (1)...(19): siRNA sense strand
caugagacauaagcgaguu

SEQ ID NO: 1024368 - RNA, 19 nt, Homo sapiens
  misc_RNA (1)...(19): siRNA sense strand
ugagggccguguggucuuu

SEQ ID NO: 1024369 - RNA, 19 nt, Homo sapiens
  misc_RNA (1)...(19): siRNA sense strand
ccuuaugagugcaguguau

SEQ ID NO: 1024370 - RNA, 19 nt, Homo sapiens
  misc_RNA (1)...(19): siRNA sense strand
ccggagaaagaccuuauaa

SEQ ID NO: 1024371 - RNA, 19 nt, Homo sapiens
  misc_RNA (1)...(19): siRNA sense strand
gugcaacacaugugggaaa

SEQ ID NO: 1024372 - RNA, 19 nt, Homo sapiens
  misc_RNA (1)...(19): siRNA sense strand
agaaaucacacuggagaaa

SEQ ID NO: 1024373 - RNA, 19 nt, Homo sapiens
  misc_RNA (1)...(19): siRNA sense strand
gggaguaccucaagaagga

SEQ ID NO: 1024374 - RNA, 19 nt, Homo sapiens
  misc_RNA (1)...(19): siRNA sense strand
gaagcaaucaggaagauag

SEQ ID NO: 1024375 - RNA, 19 nt, Homo sapiens
  misc_RNA (1)...(19): siRNA sense strand
caagugcuccggagaguga

SEQ ID NO: 1024376 - RNA, 19 nt, Homo sapiens
  misc_RNA (1)...(19): siRNA sense strand
ggagauggcgacucuguuc

SEQ ID NO: 1024377 - RNA, 19 nt, Homo sapiens
  misc_RNA (1)...(19): siRNA sense strand
uggagacucugucggauga

SEQ ID NO: 1024378 - RNA, 19 nt, Homo sapiens
  misc_RNA (1)...(19): siRNA sense strand
gggaacauuuggacaccuu

SEQ ID NO: 1024379 - RNA, 19 nt, Homo sapiens
  misc_RNA (1)...(19): siRNA sense strand
gcagaagcaaucaggaaga

SEQ ID NO: 1024380 - RNA, 19 nt, Homo sapiens
  misc_RNA (1)...(19): siRNA sense strand
ucugucggaugaagaagua

SEQ ID NO: 1024381 - RNA, 19 nt, Homo sapiens
  misc_RNA (1)...(19): siRNA sense strand
ggacucacaaacugcauga

SEQ ID NO: 1024382 - RNA, 19 nt, Homo sapiens
  misc_RNA (1)...(19): siRNA sense strand
ccacacaucgcacguuuua

SEQ ID NO: 1024383 - RNA, 19 nt, Homo sapiens
  misc_RNA (1)...(19): siRNA sense strand
cagaagcaaucaggaagau

SEQ ID NO: 1024384 - RNA, 19 nt, Homo sapiens
  misc_RNA (1)...(19): siRNA sense strand
gaagcuggccguccugaac

SEQ ID NO: 1024385 - RNA, 19 nt, Homo sapiens
  misc_RNA (1)...(19): siRNA sense strand
caucgucaccgugcccuua

SEQ ID NO: 1024386 - RNA, 19 nt, Homo sapiens
  misc_RNA (1)...(19): siRNA sense strand
ggggagaccuuuccagugu

SEQ ID NO: 1024387 - RNA, 19 nt, Homo sapiens
  misc_RNA (1)...(19): siRNA sense strand
aaaucuuccuggaguuuga

SEQ ID NO: 1024388 - RNA, 19 nt, Homo sapiens
  misc_RNA (1)...(19): siRNA sense strand
gggcuggacugcaccuuuu

SEQ ID NO: 1024389 - RNA, 19 nt, Homo sapiens
  misc_RNA (1)...(19): siRNA sense strand
ugagaaggcagaagcaauc

SEQ ID NO: 1024390 - RNA, 19 nt, Homo sapiens
  misc_RNA (1)...(19): siRNA sense strand
cagugucgguagaguguga

SEQ ID NO: 1024391 - RNA, 19 nt, Homo sapiens
  misc_RNA (1)...(19): siRNA sense strand
ucaccgugcccuuagguuu

SEQ ID NO: 1024392 - RNA, 19 nt, Homo sapiens
  misc_RNA (1)...(19): siRNA sense strand
aaccuggaaugcuguguga

SEQ ID NO: 1024393 - RNA, 19 nt, Homo sapiens
  misc_RNA (1)...(19): siRNA sense strand
uaucaaggacucacaaacu

SEQ ID NO: 1024394 - RNA, 19 nt, Homo sapiens
  misc_RNA (1)...(19): siRNA sense strand
gguagagugugaggaugga

SEQ ID NO: 1024395 - RNA, 19 nt, Homo sapiens
  misc_RNA (1)...(19): siRNA sense strand
uggcggagauggcgacucu

SEQ ID NO: 1024396 - RNA, 19 nt, Homo sapiens
  misc_RNA (1)...(19): siRNA sense strand
gauggcgacucuguucuac

SEQ ID NO: 1024397 - RNA, 19 nt, Homo sapiens
  misc_RNA (1)...(19): siRNA sense strand
agccacacaucgcacguuu

SEQ ID NO: 1024398 - RNA, 19 nt, Homo sapiens
  misc_RNA (1)...(19): siRNA sense strand
gcuaucaaggacucacaaa

SEQ ID NO: 1024399 - RNA, 19 nt, Homo sapiens
  misc_RNA (1)...(19): siRNA sense strand
ucaggaagauaggcuuugg

SEQ ID NO: 1024400 - RNA, 19 nt, Homo sapiens
  misc_RNA (1)...(19): siRNA sense strand
gcggagauggcgacucugu

SEQ ID NO: 1024401 - RNA, 19 nt, Homo sapiens
  misc_RNA (1)...(19): siRNA sense strand
gcucugcugucgggaugga

SEQ ID NO: 1024402 - RNA, 19 nt, Homo sapiens
  misc_RNA (1)...(19): siRNA sense strand
gagacucugucggaugaag

SEQ ID NO: 1024403 - RNA, 19 nt, Homo sapiens
  misc_RNA (1)...(19): siRNA sense strand
acauuuggacaccuucuuu

SEQ ID NO: 1024404 - RNA, 19 nt, Homo sapiens
  misc_RNA (1)...(19): siRNA sense strand
gagaaggcagaagcaauca

SEQ ID NO: 1024405 - RNA, 19 nt, Homo sapiens
  misc_RNA (1)...(19): siRNA sense strand
gaacauuuggacaccuucu

SEQ ID NO: 1024406 - RNA, 19 nt, Homo sapiens
  misc_RNA (1)...(19): siRNA sense strand
ucuguucuacggccugaua

SEQ ID NO: 1024407 - RNA, 19 nt, Homo sapiens
  misc_RNA (1)...(19): siRNA sense strand
gaccgccuccucagucugu

SEQ ID NO: 1024408 - RNA, 19 nt, Homo sapiens
  misc_RNA (1)...(19): siRNA sense strand
ggacccagauggugacuga

SEQ ID NO: 1024409 - RNA, 19 nt, Homo sapiens
  misc_RNA (1)...(19): siRNA sense strand
gagaauaucaucagcaaga

SEQ ID NO: 1024410 - RNA, 19 nt, Homo sapiens
  misc_RNA (1)...(19): siRNA sense strand
gugcuacacuuaucacugu

SEQ ID NO: 1024411 - RNA, 19 nt, Homo sapiens
  misc_RNA (1)...(19): siRNA sense strand
gcuccuaucucacuaagac

SEQ ID NO: 1024412 - RNA, 19 nt, Homo sapiens
  misc_RNA (1)...(19): siRNA sense strand
cugaguaccuggaaauugu

SEQ ID NO: 1024413 - RNA, 19 nt, Homo sapiens
  misc_RNA (1)...(19): siRNA sense strand
ccgagcaacuuccucaaga

SEQ ID NO: 1024414 - RNA, 19 nt, Homo sapiens
  misc_RNA (1)...(19): siRNA sense strand
ccgagaauaucaucagcaa

SEQ ID NO: 1024415 - RNA, 19 nt, Homo sapiens
  misc_RNA (1)...(19): siRNA sense strand
acacaucaguaccacaaga

SEQ ID NO: 1024416 - RNA, 19 nt, Homo sapiens
  misc_RNA (1)...(19): siRNA sense strand
ucacuaagaccguccugaa

SEQ ID NO: 1024417 - RNA, 19 nt, Homo sapiens
  misc_RNA (1)...(19): siRNA sense strand
cgagggcugugaagcagaa

SEQ ID NO: 1024418 - RNA, 19 nt, Homo sapiens
  misc_RNA (1)...(19): siRNA sense strand
cguggucuauuauaacuau

SEQ ID NO: 1024419 - RNA, 19 nt, Homo sapiens
  misc_RNA (1)...(19): siRNA sense strand
cuaagaccguccugaaagu

SEQ ID NO: 1024420 - RNA, 19 nt, Homo sapiens
  misc_RNA (1)...(19): siRNA sense strand
gcaagacacaucaguacca

SEQ ID NO: 1024421 - RNA, 19 nt, Homo sapiens
  misc_RNA (1)...(19): siRNA sense strand
ugucuuugcuuucccaugu

SEQ ID NO: 1024422 - RNA, 19 nt, Homo sapiens
  misc_RNA (1)...(19): siRNA sense strand
acuccguggucuauuauaa

SEQ ID NO: 1024423 - RNA, 19 nt, Homo sapiens
  misc_RNA (1)...(19): siRNA sense strand
ucagcaagacacaucagua

SEQ ID NO: 1024424 - RNA, 19 nt, Homo sapiens
  misc_RNA (1)...(19): siRNA sense strand
aaaaggacaugguggagaa

SEQ ID NO: 1024425 - RNA, 19 nt, Homo sapiens
  misc_RNA (1)...(19): siRNA sense strand
uggcccagcuccuaucuca

SEQ ID NO: 1024426 - RNA, 19 nt, Homo sapiens
  misc_RNA (1)...(19): siRNA sense strand
uuagaggcauccaaguguu

SEQ ID NO: 1024427 - RNA, 19 nt, Homo sapiens
  misc_RNA (1)...(19): siRNA sense strand
guacaugacccugcggaau

SEQ ID NO: 1024428 - RNA, 19 nt, Homo sapiens
  misc_RNA (1)...(19): siRNA sense strand
ccgcaggccuguaugaacu

SEQ ID NO: 1024429 - RNA, 19 nt, Homo sapiens
  misc_RNA (1)...(19): siRNA sense strand
agacacaucaguaccacaa

SEQ ID NO: 1024430 - RNA, 19 nt, Homo sapiens
  misc_RNA (1)...(19): siRNA sense strand
ggugcuuacuggcaagaug

SEQ ID NO: 1024431 - RNA, 19 nt, Homo sapiens
  misc_RNA (1)...(19): siRNA sense strand
gggcccacccuaauucaga

SEQ ID NO: 1024432 - RNA, 19 nt, Homo sapiens
  misc_RNA (1)...(19): siRNA sense strand
ccacgagggcugugaagca

SEQ ID NO: 1024433 - RNA, 19 nt, Homo sapiens
  misc_RNA (1)...(19): siRNA sense strand
ggaaugccacucagcaaaa

SEQ ID NO: 1024434 - RNA, 19 nt, Homo sapiens
  misc_RNA (1)...(19): siRNA sense strand
gaauaucaucagcaagaca

SEQ ID NO: 1024435 - RNA, 19 nt, Homo sapiens
  misc_RNA (1)...(19): siRNA sense strand
aagaugaccgugaccuuga

SEQ ID NO: 1024436 - RNA, 19 nt, Homo sapiens
  misc_RNA (1)...(19): siRNA sense strand
uacaugacccugcggaaug

SEQ ID NO: 1024437 - RNA, 19 nt, Homo sapiens
  misc_RNA (1)...(19): siRNA sense strand
cagcaagacacaucaguac

SEQ ID NO: 1024438 - RNA, 19 nt, Homo sapiens
  misc_RNA (1)...(19): siRNA sense strand
caucugaguaccuggaaau

SEQ ID NO: 1024439 - RNA, 19 nt, Homo sapiens
  misc_RNA (1)...(19): siRNA sense strand
cggaaugccacucagcaaa

SEQ ID NO: 1024440 - RNA, 19 nt, Homo sapiens
  misc_RNA (1)...(19): siRNA sense strand
auucagaccuuccaaaaga

SEQ ID NO: 1024441 - RNA, 19 nt, Homo sapiens
  misc_RNA (1)...(19): siRNA sense strand
gaugugcugugggccuuuc

SEQ ID NO: 1024442 - RNA, 19 nt, Homo sapiens
  misc_RNA (1)...(19): siRNA sense strand
gaccgugaccuugaacuuc

SEQ ID NO: 1024443 - RNA, 19 nt, Homo sapiens
  misc_RNA (1)...(19): siRNA sense strand
cacuaagaccguccugaaa

SEQ ID NO: 1024444 - RNA, 19 nt, Homo sapiens
  misc_RNA (1)...(19): siRNA sense strand
gcaggccuguaugaacuca

SEQ ID NO: 1024445 - RNA, 19 nt, Homo sapiens
  misc_RNA (1)...(19): siRNA sense strand
agaugaccgugaccuugaa

SEQ ID NO: 1024446 - RNA, 19 nt, Homo sapiens
  misc_RNA (1)...(19): siRNA sense strand
cuaauucagaccuuccaaa

SEQ ID NO: 1024447 - RNA, 19 nt, Homo sapiens
  misc_RNA (1)...(19): siRNA sense strand
gccgcugacugcuggaugu

SEQ ID NO: 1024448 - RNA, 19 nt, Homo sapiens
  misc_RNA (1)...(19): siRNA sense strand
cccagauggugacugaaga

SEQ ID NO: 1024449 - RNA, 19 nt, Homo sapiens
  misc_RNA (1)...(19): siRNA sense strand
ccacgacccgagcaacuuc

SEQ ID NO: 1024450 - RNA, 19 nt, Homo sapiens
  misc_RNA (1)...(19): siRNA sense strand
gguguggcccuccagaauc

SEQ ID NO: 1024451 - RNA, 19 nt, Homo sapiens
  misc_RNA (1)...(19): siRNA sense strand
agaccgccuuguuucucua

SEQ ID NO: 1024452 - RNA, 19 nt, Homo sapiens
  misc_RNA (1)...(19): siRNA sense strand
ucgcugaagcugcaggaaa

SEQ ID NO: 1024453 - RNA, 19 nt, Homo sapiens
  misc_RNA (1)...(19): siRNA sense strand
uggaaauuguucgugagaa

SEQ ID NO: 1024454 - RNA, 19 nt, Homo sapiens
  misc_RNA (1)...(19): siRNA sense strand
gcggaaugccacucagcaa

SEQ ID NO: 1024455 - RNA, 19 nt, Homo sapiens
  misc_RNA (1)...(19): siRNA sense strand
ggaagaagccgaagcugaa

SEQ ID NO: 1024456 - RNA, 19 nt, Homo sapiens
  misc_RNA (1)...(19): siRNA sense strand
ucacugaguuccugaagaa

SEQ ID NO: 1024457 - RNA, 19 nt, Homo sapiens
  misc_RNA (1)...(19): siRNA sense strand
gcacggagggugaaaguga

SEQ ID NO: 1024458 - RNA, 19 nt, Homo sapiens
  misc_RNA (1)...(19): siRNA sense strand
gaaacgaggccucucucua

SEQ ID NO: 1024459 - RNA, 19 nt, Homo sapiens
  misc_RNA (1)...(19): siRNA sense strand
gaaagcggcagaccuguga

SEQ ID NO: 1024460 - RNA, 19 nt, Homo sapiens
  misc_RNA (1)...(19): siRNA sense strand
gaggaaagaggaccuggua

SEQ ID NO: 1024461 - RNA, 19 nt, Homo sapiens
  misc_RNA (1)...(19): siRNA sense strand
gcagaccugugacaucgaa

SEQ ID NO: 1024462 - RNA, 19 nt, Homo sapiens
  misc_RNA (1)...(19): siRNA sense strand
gggaaguacugcugugugu

SEQ ID NO: 1024463 - RNA, 19 nt, Homo sapiens
  misc_RNA (1)...(19): siRNA sense strand
gaaagaggaccugguacuu

SEQ ID NO: 1024464 - RNA, 19 nt, Homo sapiens
  misc_RNA (1)...(19): siRNA sense strand
gcagggaucugugagaaac

SEQ ID NO: 1024465 - RNA, 19 nt, Homo sapiens
  misc_RNA (1)...(19): siRNA sense strand
gaaacagccucuggaucug

SEQ ID NO: 1024466 - RNA, 19 nt, Homo sapiens
  misc_RNA (1)...(19): siRNA sense strand
cacagcagcuucagaucuu

SEQ ID NO: 1024467 - RNA, 19 nt, Homo sapiens
  misc_RNA (1)...(19): siRNA sense strand
ccaccuagaacucaggaua

SEQ ID NO: 1024468 - RNA, 19 nt, Homo sapiens
  misc_RNA (1)...(19): siRNA sense strand
caaagcccgugacaaaucu

SEQ ID NO: 1024469 - RNA, 19 nt, Homo sapiens
  misc_RNA (1)...(19): siRNA sense strand
ugaugaaguucgacagcua

SEQ ID NO: 1024470 - RNA, 19 nt, Homo sapiens
  misc_RNA (1)...(19): siRNA sense strand
gcacagcagcuucagaucu

SEQ ID NO: 1024471 - RNA, 19 nt, Homo sapiens
  misc_RNA (1)...(19): siRNA sense strand
ccaaagcccgugacaaauc

SEQ ID NO: 1024472 - RNA, 19 nt, Homo sapiens
  misc_RNA (1)...(19): siRNA sense strand
gaacuccaccaccgacuca

SEQ ID NO: 1024473 - RNA, 19 nt, Homo sapiens
  misc_RNA (1)...(19): siRNA sense strand
ggaaagaggaccugguacu

SEQ ID NO: 1024474 - RNA, 19 nt, Homo sapiens
  misc_RNA (1)...(19): siRNA sense strand
agaaacagccucuggaucu

SEQ ID NO: 1024475 - RNA, 19 nt, Homo sapiens
  misc_RNA (1)...(19): siRNA sense strand
cuccaaagcccgugacaaa

SEQ ID NO: 1024476 - RNA, 19 nt, Homo sapiens
  misc_RNA (1)...(19): siRNA sense strand
caacaucuaccaggaguuc

SEQ ID NO: 1024477 - RNA, 19 nt, Homo sapiens
  misc_RNA (1)...(19): siRNA sense strand
aaacgaggccucucucuac

SEQ ID NO: 1024478 - RNA, 19 nt, Homo sapiens
  misc_RNA (1)...(19): siRNA sense strand
gggccuggcuuacuucacu

SEQ ID NO: 1024479 - RNA, 19 nt, Homo sapiens
  misc_RNA (1)...(19): siRNA sense strand
gggcacagcagcuucagau

SEQ ID NO: 1024480 - RNA, 19 nt, Homo sapiens
  misc_RNA (1)...(19): siRNA sense strand
uggcuuacuucacugaguu

SEQ ID NO: 1024481 - RNA, 19 nt, Homo sapiens
  misc_RNA (1)...(19): siRNA sense strand
ggaaguacugcugugugua

SEQ ID NO: 1024482 - RNA, 19 nt, Homo sapiens
  misc_RNA (1)...(19): siRNA sense strand
caccuagaacucaggauaa

SEQ ID NO: 1024483 - RNA, 19 nt, Homo sapiens
  misc_RNA (1)...(19): siRNA sense strand
gcgcugagcccagugaaca

SEQ ID NO: 1024484 - RNA, 19 nt, Homo sapiens
  misc_RNA (1)...(19): siRNA sense strand
gaugaaguucgacagcuau

SEQ ID NO: 1024485 - RNA, 19 nt, Homo sapiens
  misc_RNA (1)...(19): siRNA sense strand
uggcagggaucugugagaa

SEQ ID NO: 1024486 - RNA, 19 nt, Homo sapiens
  misc_RNA (1)...(19): siRNA sense strand
gagcacggagggugaaagu

SEQ ID NO: 1024487 - RNA, 19 nt, Homo sapiens
  misc_RNA (1)...(19): siRNA sense strand
aaagaggaccugguacuuc

SEQ ID NO: 1024488 - RNA, 19 nt, Homo sapiens
  misc_RNA (1)...(19): siRNA sense strand
cacggagggugaaagugaa

SEQ ID NO: 1024489 - RNA, 19 nt, Homo sapiens
  misc_RNA (1)...(19): siRNA sense strand
gcuaugcgcgcuucgucaa

SEQ ID NO: 1024490 - RNA, 19 nt, Homo sapiens
  misc_RNA (1)...(19): siRNA sense strand
ucugagagccaccggaaga

SEQ ID NO: 1024491 - RNA, 19 nt, Homo sapiens
  misc_RNA (1)...(19): siRNA sense strand
guaccgcgagugccugcua

SEQ ID NO: 1024492 - RNA, 19 nt, Homo sapiens
  misc_RNA (1)...(19): siRNA sense strand
gaagaagccgaagcugaag

SEQ ID NO: 1024493 - RNA, 19 nt, Homo sapiens
  misc_RNA (1)...(19): siRNA sense strand
gugugaagaucuccaaagc

SEQ ID NO: 1024494 - RNA, 19 nt, Homo sapiens
  misc_RNA (1)...(19): siRNA sense strand
cgagaaacagccucuggau

SEQ ID NO: 1024495 - RNA, 19 nt, Homo sapiens
  misc_RNA (1)...(19): siRNA sense strand
gugaaggugcccaguagug

SEQ ID NO: 1024496 - RNA, 19 nt, Homo sapiens
  misc_RNA (1)...(19): siRNA sense strand
gaggagaccccaccacaga

SEQ ID NO: 1024497 - RNA, 19 nt, Homo sapiens
  misc_RNA (1)...(19): siRNA sense strand
uggugaaggugcccaguag

SEQ ID NO: 1024498 - RNA, 19 nt, Homo sapiens
  misc_RNA (1)...(19): siRNA sense strand
caggaagugcggcuggaaa

SEQ ID NO: 1024499 - RNA, 19 nt, Homo sapiens
  misc_RNA (1)...(19): siRNA sense strand
gcagcucucucagcaucca

SEQ ID NO: 1024500 - RNA, 19 nt, Homo sapiens
  misc_RNA (1)...(19): siRNA sense strand
gcuggcggaucaggaagug

SEQ ID NO: 1024501 - RNA, 19 nt, Homo sapiens
  misc_RNA (1)...(19): siRNA sense strand
gcuaguaccuguauucuua

SEQ ID NO: 1024502 - RNA, 19 nt, Homo sapiens
  misc_RNA (1)...(19): siRNA sense strand
gacaaucucucaagaauuu

SEQ ID NO: 1024503 - RNA, 19 nt, Homo sapiens
  misc_RNA (1)...(19): siRNA sense strand
ggaaggagaugauucacua

SEQ ID NO: 1024504 - RNA, 19 nt, Homo sapiens
  misc_RNA (1)...(19): siRNA sense strand
guaaagcagucaacaauaa

SEQ ID NO: 1024505 - RNA, 19 nt, Homo sapiens
  misc_RNA (1)...(19): siRNA sense strand
ggagaagacuaucaauaua

SEQ ID NO: 1024506 - RNA, 19 nt, Homo sapiens
  misc_RNA (1)...(19): siRNA sense strand
gaaauuacauggugguuug

SEQ ID NO: 1024507 - RNA, 19 nt, Homo sapiens
  misc_RNA (1)...(19): siRNA sense strand
ggagaugauucacuacuua

SEQ ID NO: 1024508 - RNA, 19 nt, Homo sapiens
  misc_RNA (1)...(19): siRNA sense strand
gaaauaugguaguagauga

SEQ ID NO: 1024509 - RNA, 19 nt, Homo sapiens
  misc_RNA (1)...(19): siRNA sense strand
ggaaauugaugcagcacua

SEQ ID NO: 1024510 - RNA, 19 nt, Homo sapiens
  misc_RNA (1)...(19): siRNA sense strand
ggagaaauaugguaguaga

SEQ ID NO: 1024511 - RNA, 19 nt, Homo sapiens
  misc_RNA (1)...(19): siRNA sense strand
ggaagaagguagcaucaug

SEQ ID NO: 1024512 - RNA, 19 nt, Homo sapiens
  misc_RNA (1)...(19): siRNA sense strand
gaaaauacagcgugaauua

SEQ ID NO: 1024513 - RNA, 19 nt, Homo sapiens
  misc_RNA (1)...(19): siRNA sense strand
gcaagaaggagaacaauug

SEQ ID NO: 1024514 - RNA, 19 nt, Homo sapiens
  misc_RNA (1)...(19): siRNA sense strand
ccagucagauuuacgguua

SEQ ID NO: 1024515 - RNA, 19 nt, Homo sapiens
  misc_RNA (1)...(19): siRNA sense strand
gaacaaagaagaauugaag

SEQ ID NO: 1024516 - RNA, 19 nt, Homo sapiens
  misc_RNA (1)...(19): siRNA sense strand
gaacaacgaccaucucuca

SEQ ID NO: 1024517 - RNA, 19 nt, Homo sapiens
  misc_RNA (1)...(19): siRNA sense strand
gaagguagcaucaugaaug

SEQ ID NO: 1024518 - RNA, 19 nt, Homo sapiens
  misc_RNA (1)...(19): siRNA sense strand
ggagaacaauugaccuuga

SEQ ID NO: 1024519 - RNA, 19 nt, Homo sapiens
  misc_RNA (1)...(19): siRNA sense strand
gaacaaagggaaauugaug

SEQ ID NO: 1024520 - RNA, 19 nt, Homo sapiens
  misc_RNA (1)...(19): siRNA sense strand
gagcagagaauaugaagaa

SEQ ID NO: 1024521 - RNA, 19 nt, Homo sapiens
  misc_RNA (1)...(19): siRNA sense strand
gaagaacaaagaagaauug

SEQ ID NO: 1024522 - RNA, 19 nt, Homo sapiens
  misc_RNA (1)...(19): siRNA sense strand
ggaagaugauguugauguu

SEQ ID NO: 1024523 - RNA, 19 nt, Homo sapiens
  misc_RNA (1)...(19): siRNA sense strand
gaacccaaaccagaaauua

SEQ ID NO: 1024524 - RNA, 19 nt, Homo sapiens
  misc_RNA (1)...(19): siRNA sense strand
gcgagaagcugaaaauuuu

SEQ ID NO: 1024525 - RNA, 19 nt, Homo sapiens
  misc_RNA (1)...(19): siRNA sense strand
gaauugagcaggauauguu

SEQ ID NO: 1024526 - RNA, 19 nt, Homo sapiens
  misc_RNA (1)...(19): siRNA sense strand
gaacggaggaggaacgaaa

SEQ ID NO: 1024527 - RNA, 19 nt, Homo sapiens
  misc_RNA (1)...(19): siRNA sense strand
gcaaagaagagaagaugaa

SEQ ID NO: 1024528 - RNA, 19 nt, Homo sapiens
  misc_RNA (1)...(19): siRNA sense strand
ggaagaaaaugaaaccuuu

SEQ ID NO: 1024529 - RNA, 19 nt, Homo sapiens
  misc_RNA (1)...(19): siRNA sense strand
gagaacaauugaccuugaa

SEQ ID NO: 1024530 - RNA, 19 nt, Homo sapiens
  misc_RNA (1)...(19): siRNA sense strand
gaagaagaacaaagaagaa

SEQ ID NO: 1024531 - RNA, 19 nt, Homo sapiens
  misc_RNA (1)...(19): siRNA sense strand
gaaggagaauagaggaaga

SEQ ID NO: 1024532 - RNA, 19 nt, Homo sapiens
  misc_RNA (1)...(19): siRNA sense strand
gaaauggaaaggcaaagaa

SEQ ID NO: 1024533 - RNA, 19 nt, Homo sapiens
  misc_RNA (1)...(19): siRNA sense strand
uaaaggaucugcagcuagu

SEQ ID NO: 1024534 - RNA, 19 nt, Homo sapiens
  misc_RNA (1)...(19): siRNA sense strand
gaagaagccagaaggagaa

SEQ ID NO: 1024535 - RNA, 19 nt, Homo sapiens
  misc_RNA (1)...(19): siRNA sense strand
gaggagaguauauguguaa

SEQ ID NO: 1024536 - RNA, 19 nt, Homo sapiens
  misc_RNA (1)...(19): siRNA sense strand
gaaacucacugccuuuacu

SEQ ID NO: 1024537 - RNA, 19 nt, Homo sapiens
  misc_RNA (1)...(19): siRNA sense strand
gaacaacugagacaggaaa

SEQ ID NO: 1024538 - RNA, 19 nt, Homo sapiens
  misc_RNA (1)...(19): siRNA sense strand
ggagaaacaagaauuugaa

SEQ ID NO: 1024539 - RNA, 19 nt, Homo sapiens
  misc_RNA (1)...(19): siRNA sense strand
gaagaagguagcaucauga

SEQ ID NO: 1024540 - RNA, 19 nt, Homo sapiens
  misc_RNA (1)...(19): siRNA sense strand
gaagaugauguugauguua

SEQ ID NO: 1024541 - RNA, 19 nt, Homo sapiens
  misc_RNA (1)...(19): siRNA sense strand
agaaagaaaggaucaagua

SEQ ID NO: 1024542 - RNA, 19 nt, Homo sapiens
  misc_RNA (1)...(19): siRNA sense strand
ggaggagaguauaugugua

SEQ ID NO: 1024543 - RNA, 19 nt, Homo sapiens
  misc_RNA (1)...(19): siRNA sense strand
gaagauggaggagaguaua

SEQ ID NO: 1024544 - RNA, 19 nt, Homo sapiens
  misc_RNA (1)...(19): siRNA sense strand
gaagaaauggaaaggcaaa

SEQ ID NO: 1024545 - RNA, 19 nt, Homo sapiens
  misc_RNA (1)...(19): siRNA sense strand
gaagagcgagcaagaagga

SEQ ID NO: 1024546 - RNA, 19 nt, Homo sapiens
  misc_RNA (1)...(19): siRNA sense strand
gaaacaaagacaagaggaa

SEQ ID NO: 1024547 - RNA, 19 nt, Homo sapiens
  misc_RNA (1)...(19): siRNA sense strand
gagaaacucacugccuuua

SEQ ID NO: 1024548 - RNA, 19 nt, Homo sapiens
  misc_RNA (1)...(19): siRNA sense strand
gaagaagaagaacaaagaa

SEQ ID NO: 1024549 - RNA, 19 nt, Homo sapiens
  misc_RNA (1)...(19): siRNA sense strand
gaacagauugaggacauaa

SEQ ID NO: 1024550 - RNA, 19 nt, Homo sapiens
  misc_RNA (1)...(19): siRNA sense strand
gaagagaacggaggaggaa

SEQ ID NO: 1024551 - RNA, 19 nt, Homo sapiens
  misc_RNA (1)...(19): siRNA sense strand
gaagagaaagaaaggauca

SEQ ID NO: 1024552 - RNA, 19 nt, Homo sapiens
  misc_RNA (1)...(19): siRNA sense strand
ccagagauguauaagacaa

SEQ ID NO: 1024553 - RNA, 19 nt, Homo sapiens
  misc_RNA (1)...(19): siRNA sense strand
gaacgaaaacgcagaauug

SEQ ID NO: 1024554 - RNA, 19 nt, Homo sapiens
  misc_RNA (1)...(19): siRNA sense strand
aaugaaaccuuuggauuga

SEQ ID NO: 1024555 - RNA, 19 nt, Homo sapiens
  misc_RNA (1)...(19): siRNA sense strand
gaacgugaagagaaagaaa

SEQ ID NO: 1024556 - RNA, 19 nt, Homo sapiens
  misc_RNA (1)...(19): siRNA sense strand
ugaggaagaugauguugau

SEQ ID NO: 1024557 - RNA, 19 nt, Homo sapiens
  misc_RNA (1)...(19): siRNA sense strand
cagagaauaugaagaacug

SEQ ID NO: 1024558 - RNA, 19 nt, Homo sapiens
  misc_RNA (1)...(19): siRNA sense strand
cgaggaagauaaaagaaua

SEQ ID NO: 1024559 - RNA, 19 nt, Homo sapiens
  misc_RNA (1)...(19): siRNA sense strand
gaagaagagcgagcaagaa

SEQ ID NO: 1024560 - RNA, 19 nt, Homo sapiens
  misc_RNA (1)...(19): siRNA sense strand
gaagaagaagccagaagga

SEQ ID NO: 1024561 - RNA, 19 nt, Homo sapiens
  misc_RNA (1)...(19): siRNA sense strand
ugugguaccugucaaauca

SEQ ID NO: 1024562 - RNA, 19 nt, Homo sapiens
  misc_RNA (1)...(19): siRNA sense strand
ggcaagagaagaagaagaa

SEQ ID NO: 1024563 - RNA, 19 nt, Homo sapiens
  misc_RNA (1)...(19): siRNA sense strand
gaacaauugaccuugaaau

SEQ ID NO: 1024564 - RNA, 19 nt, Homo sapiens
  misc_RNA (1)...(19): siRNA sense strand
gaagcaaggagaaauaugg

SEQ ID NO: 1024565 - RNA, 19 nt, Homo sapiens
  misc_RNA (1)...(19): siRNA sense strand
ucaaguacgaggaagauaa

SEQ ID NO: 1024566 - RNA, 19 nt, Homo sapiens
  misc_RNA (1)...(19): siRNA sense strand
ggagaacccaaaccagaaa

SEQ ID NO: 1024567 - RNA, 19 nt, Homo sapiens
  misc_RNA (1)...(19): siRNA sense strand
ggagcuccaugguucaaga

SEQ ID NO: 1024568 - RNA, 19 nt, Homo sapiens
  misc_RNA (1)...(19): siRNA sense strand
acaaauggcuaaggcaaga

SEQ ID NO: 1024569 - RNA, 19 nt, Homo sapiens
  misc_RNA (1)...(19): siRNA sense strand
aaaugaaaccuuuggauug

SEQ ID NO: 1024570 - RNA, 19 nt, Homo sapiens
  misc_RNA (1)...(19): siRNA sense strand
gcugaagcaaggagaaaua

SEQ ID NO: 1024571 - RNA, 19 nt, Homo sapiens
  misc_RNA (1)...(19): siRNA sense strand
aagaaaggaucaaguacga

SEQ ID NO: 1024572 - RNA, 19 nt, Homo sapiens
  misc_RNA (1)...(19): siRNA sense strand
ggagaaacucacugccuuu

SEQ ID NO: 1024573 - RNA, 19 nt, Homo sapiens
  misc_RNA (1)...(19): siRNA sense strand
agaagaagaagaacaaaga

SEQ ID NO: 1024574 - RNA, 19 nt, Homo sapiens
  misc_RNA (1)...(19): siRNA sense strand
gaggaggaacggaagcaua

SEQ ID NO: 1024575 - RNA, 19 nt, Homo sapiens
  misc_RNA (1)...(19): siRNA sense strand
caaguacgaggaagauaaa

SEQ ID NO: 1024576 - RNA, 19 nt, Homo sapiens
  misc_RNA (1)...(19): siRNA sense strand
aagacaaucucucaagaau

SEQ ID NO: 1024577 - RNA, 19 nt, Homo sapiens
  misc_RNA (1)...(19): siRNA sense strand
uggagaagacuaucaauau

SEQ ID NO: 1024578 - RNA, 19 nt, Homo sapiens
  misc_RNA (1)...(19): siRNA sense strand
caagaaggagaacaauuga

SEQ ID NO: 1024579 - RNA, 19 nt, Homo sapiens
  misc_RNA (1)...(19): siRNA sense strand
guaccugucaaaucauaua

SEQ ID NO: 1024580 - RNA, 19 nt, Homo sapiens
  misc_RNA (1)...(19): siRNA sense strand
gaaauuaaagagcgagaag

SEQ ID NO: 1024581 - RNA, 19 nt, Homo sapiens
  misc_RNA (1)...(19): siRNA sense strand
cgggaaaacuggaaauuaa

SEQ ID NO: 1024582 - RNA, 19 nt, Homo sapiens
  misc_RNA (1)...(19): siRNA sense strand
aaggaaagcagaagaagaa

SEQ ID NO: 1024583 - RNA, 19 nt, Homo sapiens
  misc_RNA (1)...(19): siRNA sense strand
caaagaagagaagaugaaa

SEQ ID NO: 1024584 - RNA, 19 nt, Homo sapiens
  misc_RNA (1)...(19): siRNA sense strand
gaaagaaaggaucaaguac

SEQ ID NO: 1024585 - RNA, 19 nt, Homo sapiens
  misc_RNA (1)...(19): siRNA sense strand
aaaagaacgugaagagaaa

SEQ ID NO: 1024586 - RNA, 19 nt, Homo sapiens
  misc_RNA (1)...(19): siRNA sense strand
gaucaggagcuccaugguu

SEQ ID NO: 1024587 - RNA, 19 nt, Homo sapiens
  misc_RNA (1)...(19): siRNA sense strand
gaaauggagaaacaagaau

SEQ ID NO: 1024588 - RNA, 19 nt, Homo sapiens
  misc_RNA (1)...(19): siRNA sense strand
aauaaaggaucugcagcua

SEQ ID NO: 1024589 - RNA, 19 nt, Homo sapiens
  misc_RNA (1)...(19): siRNA sense strand
gagaguauauguguaaagc

SEQ ID NO: 1024590 - RNA, 19 nt, Homo sapiens
  misc_RNA (1)...(19): siRNA sense strand
gauguuaggccugcaagaa

SEQ ID NO: 1024591 - RNA, 19 nt, Homo sapiens
  misc_RNA (1)...(19): siRNA sense strand
acaagaauuugaacaacug

SEQ ID NO: 1024592 - RNA, 19 nt, Homo sapiens
  misc_RNA (1)...(19): siRNA sense strand
ggaaaggcaaagaagagaa

SEQ ID NO: 1024593 - RNA, 19 nt, Homo sapiens
  misc_RNA (1)...(19): siRNA sense strand
gagcaggauauguuagaaa

SEQ ID NO: 1024594 - RNA, 19 nt, Homo sapiens
  misc_RNA (1)...(19): siRNA sense strand
ggaagcauaagcuagaaau

SEQ ID NO: 1024595 - RNA, 19 nt, Homo sapiens
  misc_RNA (1)...(19): siRNA sense strand
ugaaucagcaucagaggaa

SEQ ID NO: 1024596 - RNA, 19 nt, Homo sapiens
  misc_RNA (1)...(19): siRNA sense strand
uaagacaaucucucaagaa

SEQ ID NO: 1024597 - RNA, 19 nt, Homo sapiens
  misc_RNA (1)...(19): siRNA sense strand
aaggagaaauaugguagua

SEQ ID NO: 1024598 - RNA, 19 nt, Homo sapiens
  misc_RNA (1)...(19): siRNA sense strand
gaagccagaaggagaauag

SEQ ID NO: 1024599 - RNA, 19 nt, Homo sapiens
  misc_RNA (1)...(19): siRNA sense strand
gacaagaggaacaaaggaa

SEQ ID NO: 1024600 - RNA, 19 nt, Homo sapiens
  misc_RNA (1)...(19): siRNA sense strand
agaagaagaacaaagaaga

SEQ ID NO: 1024601 - RNA, 19 nt, Homo sapiens
  misc_RNA (1)...(19): siRNA sense strand
gaacaggccuuccuacuga

SEQ ID NO: 1024602 - RNA, 19 nt, Homo sapiens
  misc_RNA (1)...(19): siRNA sense strand
cauauuggauggcuucuuu

SEQ ID NO: 1024603 - RNA, 19 nt, Homo sapiens
  misc_RNA (1)...(19): siRNA sense strand
gaugacugcugagaaauuu

SEQ ID NO: 1024604 - RNA, 19 nt, Homo sapiens
  misc_RNA (1)...(19): siRNA sense strand
caggaugacugcugagaaa

SEQ ID NO: 1024605 - RNA, 19 nt, Homo sapiens
  misc_RNA (1)...(19): siRNA sense strand
ggcccagacugaugagaua

SEQ ID NO: 1024606 - RNA, 19 nt, Homo sapiens
  misc_RNA (1)...(19): siRNA sense strand
guccaaggaucagaagaua

SEQ ID NO: 1024607 - RNA, 19 nt, Homo sapiens
  misc_RNA (1)...(19): siRNA sense strand
uuagugagcuggugguaga

SEQ ID NO: 1024608 - RNA, 19 nt, Homo sapiens
  misc_RNA (1)...(19): siRNA sense strand
gagcugauggccuucauga

SEQ ID NO: 1024609 - RNA, 19 nt, Homo sapiens
  misc_RNA (1)...(19): siRNA sense strand
ggaugacugcugagaaauu

SEQ ID NO: 1024610 - RNA, 19 nt, Homo sapiens
  misc_RNA (1)...(19): siRNA sense strand
cacccaggcuccaggauga

SEQ ID NO: 1024611 - RNA, 19 nt, Homo sapiens
  misc_RNA (1)...(19): siRNA sense strand
gugagugacuugcgcaauc

SEQ ID NO: 1024612 - RNA, 19 nt, Homo sapiens
  misc_RNA (1)...(19): siRNA sense strand
gcaggcagcggaugcacaa

SEQ ID NO: 1024613 - RNA, 19 nt, Homo sapiens
  misc_RNA (1)...(19): siRNA sense strand
cgaaguccagccugaaauu

SEQ ID NO: 1024614 - RNA, 19 nt, Homo sapiens
  misc_RNA (1)...(19): siRNA sense strand
cgaggaauccgcaucuaug

SEQ ID NO: 1024615 - RNA, 19 nt, Homo sapiens
  misc_RNA (1)...(19): siRNA sense strand
ggaugacagccaagaaguu

SEQ ID NO: 1024616 - RNA, 19 nt, Homo sapiens
  misc_RNA (1)...(19): siRNA sense strand
gaacaggcuccccaaguuu

SEQ ID NO: 1024617 - RNA, 19 nt, Homo sapiens
  misc_RNA (1)...(19): siRNA sense strand
gaugacagccaagaaguuc

SEQ ID NO: 1024618 - RNA, 19 nt, Homo sapiens
  misc_RNA (1)...(19): siRNA sense strand
ggacgugcgagcucugcua

SEQ ID NO: 1024619 - RNA, 19 nt, Homo sapiens
  misc_RNA (1)...(19): siRNA sense strand
ugaaggcccagacugauga

SEQ ID NO: 1024620 - RNA, 19 nt, Homo sapiens
  misc_RNA (1)...(19): siRNA sense strand
gcgaggaauccgcaucuau

SEQ ID NO: 1024621 - RNA, 19 nt, Homo sapiens
  misc_RNA (1)...(19): siRNA sense strand
gaaguccagccugaaauuc

SEQ ID NO: 1024622 - RNA, 19 nt, Homo sapiens
  misc_RNA (1)...(19): siRNA sense strand
cugaugagauacuguccaa

SEQ ID NO: 1024623 - RNA, 19 nt, Homo sapiens
  misc_RNA (1)...(19): siRNA sense strand
ugagugacuugcgcaauca

SEQ ID NO: 1024624 - RNA, 19 nt, Homo sapiens
  misc_RNA (1)...(19): siRNA sense strand
gcgcugccuccgagacaua

SEQ ID NO: 1024625 - RNA, 19 nt, Homo sapiens
  misc_RNA (1)...(19): siRNA sense strand
cugaagcucuaccggaaug

SEQ ID NO: 1024626 - RNA, 19 nt, Homo sapiens
  misc_RNA (1)...(19): siRNA sense strand
aggaggaacuggagacgau

SEQ ID NO: 1024627 - RNA, 19 nt, Homo sapiens
  misc_RNA (1)...(19): siRNA sense strand
ggacucagagagcaagaca

SEQ ID NO: 1024628 - RNA, 19 nt, Homo sapiens
  misc_RNA (1)...(19): siRNA sense strand
ugaacaggcuccccaaguu

SEQ ID NO: 1024629 - RNA, 19 nt, Homo sapiens
  misc_RNA (1)...(19): siRNA sense strand
cuaccggaauggcaucaug

SEQ ID NO: 1024630 - RNA, 19 nt, Homo sapiens
  misc_RNA (1)...(19): siRNA sense strand
gcaucaagucugagaaugg

SEQ ID NO: 1024631 - RNA, 19 nt, Homo sapiens
  misc_RNA (1)...(19): siRNA sense strand
ggaugccucugccuuugag

SEQ ID NO: 1024632 - RNA, 19 nt, Homo sapiens
  misc_RNA (1)...(19): siRNA sense strand
cauggaugccucugccuuu

SEQ ID NO: 1024633 - RNA, 19 nt, Homo sapiens
  misc_RNA (1)...(19): siRNA sense strand
ucagggacaccuugcagaa

SEQ ID NO: 1024634 - RNA, 19 nt, Homo sapiens
  misc_RNA (1)...(19): siRNA sense strand
uuugagaucuucagcacau

SEQ ID NO: 1024635 - RNA, 19 nt, Homo sapiens
  misc_RNA (1)...(19): siRNA sense strand
gcgcaucaagucugagaau

SEQ ID NO: 1024636 - RNA, 19 nt, Homo sapiens
  misc_RNA (1)...(19): siRNA sense strand
ccaucccgcugaagcucua

SEQ ID NO: 1024637 - RNA, 19 nt, Homo sapiens
  misc_RNA (1)...(19): siRNA sense strand
cagaacugcugcccauugc

SEQ ID NO: 1024638 - RNA, 19 nt, Homo sapiens
  misc_RNA (1)...(19): siRNA sense strand
gaggaauccgcaucuaugg

SEQ ID NO: 1024639 - RNA, 19 nt, Homo sapiens
  misc_RNA (1)...(19): siRNA sense strand
gugaaggcccagacugaug

SEQ ID NO: 1024640 - RNA, 19 nt, Homo sapiens
  misc_RNA (1)...(19): siRNA sense strand
ggcgaggaauccgcaucua

SEQ ID NO: 1024641 - RNA, 19 nt, Homo sapiens
  misc_RNA (1)...(19): siRNA sense strand
ccaaggaucagaagauagc

SEQ ID NO: 1024642 - RNA, 19 nt, Homo sapiens
  misc_RNA (1)...(19): siRNA sense strand
ggcgagagggacuggauga

SEQ ID NO: 1024643 - RNA, 19 nt, Homo sapiens
  misc_RNA (1)...(19): siRNA sense strand
ccucggagccuaugaaucc

SEQ ID NO: 1024644 - RNA, 19 nt, Homo sapiens
  misc_RNA (1)...(19): siRNA sense strand
ggcaaggcgaggugauuga

SEQ ID NO: 1024645 - RNA, 19 nt, Homo sapiens
  misc_RNA (1)...(19): siRNA sense strand
ccaggaugacugcugagaa

SEQ ID NO: 1024646 - RNA, 19 nt, Homo sapiens
  misc_RNA (1)...(19): siRNA sense strand
uggagcgguuccucaguga

SEQ ID NO: 1024647 - RNA, 19 nt, Homo sapiens
  misc_RNA (1)...(19): siRNA sense strand
ccagacugaugagauacug

SEQ ID NO: 1024648 - RNA, 19 nt, Homo sapiens
  misc_RNA (1)...(19): siRNA sense strand
ucagagcuccagcgacugu

SEQ ID NO: 1024649 - RNA, 19 nt, Homo sapiens
  misc_RNA (1)...(19): siRNA sense strand
gggacaccuugcagaacug

SEQ ID NO: 1024650 - RNA, 19 nt, Homo sapiens
  misc_RNA (1)...(19): siRNA sense strand
ccucugccuuugagaucuu

SEQ ID NO: 1024651 - RNA, 19 nt, Homo sapiens
  misc_RNA (1)...(19): siRNA sense strand
gaagccaaguggaaagauu

SEQ ID NO: 1024652 - RNA, 19 nt, Homo sapiens
  misc_RNA (1)...(19): siRNA sense strand
gcuuaugucuuuaaucuca

SEQ ID NO: 1024653 - RNA, 19 nt, Homo sapiens
  misc_RNA (1)...(19): siRNA sense strand
uacaugagcagcuaaauaa

SEQ ID NO: 1024654 - RNA, 19 nt, Homo sapiens
  misc_RNA (1)...(19): siRNA sense strand
ccacuuacaugagcagcua

SEQ ID NO: 1024655 - RNA, 19 nt, Homo sapiens
  misc_RNA (1)...(19): siRNA sense strand
agaccaaccuggauaauac

SEQ ID NO: 1024656 - RNA, 19 nt, Homo sapiens
  misc_RNA (1)...(19): siRNA sense strand
uuacaugagcagcuaaaua

SEQ ID NO: 1024657 - RNA, 19 nt, Homo sapiens
  misc_RNA (1)...(19): siRNA sense strand
gccaggaguucaagaccaa

SEQ ID NO: 1024658 - RNA, 19 nt, Homo sapiens
  misc_RNA (1)...(19): siRNA sense strand
ucuuuaaucucagcuguuu

SEQ ID NO: 1024659 - RNA, 19 nt, Homo sapiens
  misc_RNA (1)...(19): siRNA sense strand
augagcagcuaaauaaaug

SEQ ID NO: 1024660 - RNA, 19 nt, Homo sapiens
  misc_RNA (1)...(19): siRNA sense strand
ucaagaccaaccuggauaa

SEQ ID NO: 1024661 - RNA, 19 nt, Homo sapiens
  misc_RNA (1)...(19): siRNA sense strand
caugagcagcuaaauaaau

SEQ ID NO: 1024662 - RNA, 19 nt, Homo sapiens
  misc_RNA (1)...(19): siRNA sense strand
gagagaauugggccugaug

SEQ ID NO: 1024663 - RNA, 19 nt, Homo sapiens
  misc_RNA (1)...(19): siRNA sense strand
gccugaugcugaaggagaa

SEQ ID NO: 1024664 - RNA, 19 nt, Homo sapiens
  misc_RNA (1)...(19): siRNA sense strand
aagaccaaccuggauaaua

SEQ ID NO: 1024665 - RNA, 19 nt, Homo sapiens
  misc_RNA (1)...(19): siRNA sense strand
gcaccugaagcuuguuuua

SEQ ID NO: 1024666 - RNA, 19 nt, Homo sapiens
  misc_RNA (1)...(19): siRNA sense strand
gaagcuuguuuuaguuuuc

SEQ ID NO: 1024667 - RNA, 19 nt, Homo sapiens
  misc_RNA (1)...(19): siRNA sense strand
ccaaguggaaagauugcuu

SEQ ID NO: 1024668 - RNA, 19 nt, Homo sapiens
  misc_RNA (1)...(19): siRNA sense strand
gggaagccaaguggaaaga

SEQ ID NO: 1024669 - RNA, 19 nt, Homo sapiens
  misc_RNA (1)...(19): siRNA sense strand
guucaagaccaaccuggau

SEQ ID NO: 1024670 - RNA, 19 nt, Homo sapiens
  misc_RNA (1)...(19): siRNA sense strand
aauugggccugaugcugaa

SEQ ID NO: 1024671 - RNA, 19 nt, Homo sapiens
  misc_RNA (1)...(19): siRNA sense strand
gcgcgacucugcucucaag

SEQ ID NO: 1024672 - RNA, 19 nt, Homo sapiens
  misc_RNA (1)...(19): siRNA sense strand
ccugugugcuuugaaguuu

SEQ ID NO: 1024673 - RNA, 19 nt, Homo sapiens
  misc_RNA (1)...(19): siRNA sense strand
guuagaugauuggaaguga

SEQ ID NO: 1024674 - RNA, 19 nt, Homo sapiens
  misc_RNA (1)...(19): siRNA sense strand
acccuuagcuggagaggau

SEQ ID NO: 1024675 - RNA, 19 nt, Homo sapiens
  misc_RNA (1)...(19): siRNA sense strand
gcuccugugugcuuugaag

SEQ ID NO: 1024676 - RNA, 19 nt, Homo sapiens
  misc_RNA (1)...(19): siRNA sense strand
gaggauggcaugggugaca

SEQ ID NO: 1024677 - RNA, 19 nt, Homo sapiens
  misc_RNA (1)...(19): siRNA sense strand
gaacuaccgugaugaaaua

SEQ ID NO: 1024678 - RNA, 19 nt, Homo sapiens
  misc_RNA (1)...(19): siRNA sense strand
ggaaagaaaugcaggaguu

SEQ ID NO: 1024679 - RNA, 19 nt, Homo sapiens
  misc_RNA (1)...(19): siRNA sense strand
gaaacgaggugcccacuga

SEQ ID NO: 1024680 - RNA, 19 nt, Homo sapiens
  misc_RNA (1)...(19): siRNA sense strand
caugaacucuuuacagaaa

SEQ ID NO: 1024681 - RNA, 19 nt, Homo sapiens
  misc_RNA (1)...(19): siRNA sense strand
gauaacugcuggauagaga

SEQ ID NO: 1024682 - RNA, 19 nt, Homo sapiens
  misc_RNA (1)...(19): siRNA sense strand
gccaugaacucuuuacaga

SEQ ID NO: 1024683 - RNA, 19 nt, Homo sapiens
  misc_RNA (1)...(19): siRNA sense strand
ggguggacauuaaugauaa

SEQ ID NO: 1024684 - RNA, 19 nt, Homo sapiens
  misc_RNA (1)...(19): siRNA sense strand
acagauaacugcuggauag

SEQ ID NO: 1024685 - RNA, 19 nt, Homo sapiens
  misc_RNA (1)...(19): siRNA sense strand
gccagccucucccaauuua

SEQ ID NO: 1024686 - RNA, 19 nt, Homo sapiens
  misc_RNA (1)...(19): siRNA sense strand
gagagaauuuggcgaggaa

SEQ ID NO: 1024687 - RNA, 19 nt, Homo sapiens
  misc_RNA (1)...(19): siRNA sense strand
gaaaauuagugcuacauug

SEQ ID NO: 1024688 - RNA, 19 nt, Homo sapiens
  misc_RNA (1)...(19): siRNA sense strand
acagaaaucuaggaaagaa

SEQ ID NO: 1024689 - RNA, 19 nt, Homo sapiens
  misc_RNA (1)...(19): siRNA sense strand
uuacagaaaucuaggaaag

SEQ ID NO: 1024690 - RNA, 19 nt, Homo sapiens
  misc_RNA (1)...(19): siRNA sense strand
gcugugaacuaccgugaug

SEQ ID NO: 1024691 - RNA, 19 nt, Homo sapiens
  misc_RNA (1)...(19): siRNA sense strand
cuacguggaugauucuaga

SEQ ID NO: 1024692 - RNA, 19 nt, Homo sapiens
  misc_RNA (1)...(19): siRNA sense strand
aggaagccaugaacucuuu

SEQ ID NO: 1024693 - RNA, 19 nt, Homo sapiens
  misc_RNA (1)...(19): siRNA sense strand
ggagagacaauugcacaaa

SEQ ID NO: 1024694 - RNA, 19 nt, Homo sapiens
  misc_RNA (1)...(19): siRNA sense strand
gaaagaaaugcaggaguug

SEQ ID NO: 1024695 - RNA, 19 nt, Homo sapiens
  misc_RNA (1)...(19): siRNA sense strand
ggaguuggagagacaauug

SEQ ID NO: 1024696 - RNA, 19 nt, Homo sapiens
  misc_RNA (1)...(19): siRNA sense strand
gagagacaauugcacaaac

SEQ ID NO: 1024697 - RNA, 19 nt, Homo sapiens
  misc_RNA (1)...(19): siRNA sense strand
gaugaugccaagaaaguga

SEQ ID NO: 1024698 - RNA, 19 nt, Homo sapiens
  misc_RNA (1)...(19): siRNA sense strand
cuaccgugaugaaauaaug

SEQ ID NO: 1024699 - RNA, 19 nt, Homo sapiens
  misc_RNA (1)...(19): siRNA sense strand
gguggacauuaaugauaaa

SEQ ID NO: 1024700 - RNA, 19 nt, Homo sapiens
  misc_RNA (1)...(19): siRNA sense strand
ggaugauucuagaaacaca

SEQ ID NO: 1024701 - RNA, 19 nt, Homo sapiens
  misc_RNA (1)...(19): siRNA sense strand
gcgaugaugccaagaaagu

SEQ ID NO: 1024702 - RNA, 19 nt, Homo sapiens
  misc_RNA (1)...(19): siRNA sense strand
gauucuagaaacacagaua

SEQ ID NO: 1024703 - RNA, 19 nt, Homo sapiens
  misc_RNA (1)...(19): siRNA sense strand
ucuggaagcuggcgaugau

SEQ ID NO: 1024704 - RNA, 19 nt, Homo sapiens
  misc_RNA (1)...(19): siRNA sense strand
gugcuacauugaagagaga

SEQ ID NO: 1024705 - RNA, 19 nt, Homo sapiens
  misc_RNA (1)...(19): siRNA sense strand
ccaauuuauucaacuugug

SEQ ID NO: 1024706 - RNA, 19 nt, Homo sapiens
  misc_RNA (1)...(19): siRNA sense strand
guggaugauucuagaaaca

SEQ ID NO: 1024707 - RNA, 19 nt, Homo sapiens
  misc_RNA (1)...(19): siRNA sense strand
cagccucucccaauuuauu

SEQ ID NO: 1024708 - RNA, 19 nt, Homo sapiens
  misc_RNA (1)...(19): siRNA sense strand
gaaaucuaggaaagaaaug

SEQ ID NO: 1024709 - RNA, 19 nt, Homo sapiens
  misc_RNA (1)...(19): siRNA sense strand
ugaacuaccgugaugaaau

SEQ ID NO: 1024710 - RNA, 19 nt, Homo sapiens
  misc_RNA (1)...(19): siRNA sense strand
ggaagccaugaacucuuua

SEQ ID NO: 1024711 - RNA, 19 nt, Homo sapiens
  misc_RNA (1)...(19): siRNA sense strand
ggagagaaaauuagugcua

SEQ ID NO: 1024712 - RNA, 19 nt, Homo sapiens
  misc_RNA (1)...(19): siRNA sense strand
ugcacaaacuccucaguca

SEQ ID NO: 1024713 - RNA, 19 nt, Homo sapiens
  misc_RNA (1)...(19): siRNA sense strand
gaggaagccaugaacucuu

SEQ ID NO: 1024714 - RNA, 19 nt, Homo sapiens
  misc_RNA (1)...(19): siRNA sense strand
gauccaggagagaaaauua

SEQ ID NO: 1024715 - RNA, 19 nt, Homo sapiens
  misc_RNA (1)...(19): siRNA sense strand
uggguggacauuaaugaua

SEQ ID NO: 1024716 - RNA, 19 nt, Homo sapiens
  misc_RNA (1)...(19): siRNA sense strand
ugaacucuuuacagaaauc

SEQ ID NO: 1024717 - RNA, 19 nt, Homo sapiens
  misc_RNA (1)...(19): siRNA sense strand
cuauaaaggcuacguggau

SEQ ID NO: 1024718 - RNA, 19 nt, Homo sapiens
  misc_RNA (1)...(19): siRNA sense strand
ccaugaacucuuuacagaa

SEQ ID NO: 1024719 - RNA, 19 nt, Homo sapiens
  misc_RNA (1)...(19): siRNA sense strand
agagacaauugcacaaacu

SEQ ID NO: 1024720 - RNA, 19 nt, Homo sapiens
  misc_RNA (1)...(19): siRNA sense strand
aaggcuacguggaugauuc

SEQ ID NO: 1024721 - RNA, 19 nt, Homo sapiens
  misc_RNA (1)...(19): siRNA sense strand
cuagaaacacagauaacug

SEQ ID NO: 1024722 - RNA, 19 nt, Homo sapiens
  misc_RNA (1)...(19): siRNA sense strand
gcgaggaagccaugaacuc

SEQ ID NO: 1024723 - RNA, 19 nt, Homo sapiens
  misc_RNA (1)...(19): siRNA sense strand
cuacauugaagagagaauu

SEQ ID NO: 1024724 - RNA, 19 nt, Homo sapiens
  misc_RNA (1)...(19): siRNA sense strand
cccaauuuauucaacuugu

SEQ ID NO: 1024725 - RNA, 19 nt, Homo sapiens
  misc_RNA (1)...(19): siRNA sense strand
cagaaaucuaggaaagaaa

SEQ ID NO: 1024726 - RNA, 19 nt, Homo sapiens
  misc_RNA (1)...(19): siRNA sense strand
ugcaggaguuggagagaca

SEQ ID NO: 1024727 - RNA, 19 nt, Homo sapiens
  misc_RNA (1)...(19): siRNA sense strand
gguggauccaggagagaaa

SEQ ID NO: 1024728 - RNA, 19 nt, Homo sapiens
  misc_RNA (1)...(19): siRNA sense strand
cgaggaagccaugaacucu

SEQ ID NO: 1024729 - RNA, 19 nt, Homo sapiens
  misc_RNA (1)...(19): siRNA sense strand
aauuagugcuacauugaag

SEQ ID NO: 1024730 - RNA, 19 nt, Homo sapiens
  misc_RNA (1)...(19): siRNA sense strand
gaagacuaauccagagaua

SEQ ID NO: 1024731 - RNA, 19 nt, Homo sapiens
  misc_RNA (1)...(19): siRNA sense strand
aagaagaccuguggaaaua

SEQ ID NO: 1024732 - RNA, 19 nt, Homo sapiens
  misc_RNA (1)...(19): siRNA sense strand
ggaaauaagaguucaguga

SEQ ID NO: 1024733 - RNA, 19 nt, Homo sapiens
  misc_RNA (1)...(19): siRNA sense strand
gaagaagaaccaagugaaa

SEQ ID NO: 1024734 - RNA, 19 nt, Homo sapiens
  misc_RNA (1)...(19): siRNA sense strand
gcacagaagacaaauguau

SEQ ID NO: 1024735 - RNA, 19 nt, Homo sapiens
  misc_RNA (1)...(19): siRNA sense strand
gaagaagaccuguggaaau

SEQ ID NO: 1024736 - RNA, 19 nt, Homo sapiens
  misc_RNA (1)...(19): siRNA sense strand
gaaccuauaucugugaaau

SEQ ID NO: 1024737 - RNA, 19 nt, Homo sapiens
  misc_RNA (1)...(19): siRNA sense strand
cugaaugacuugaauguuu

SEQ ID NO: 1024738 - RNA, 19 nt, Homo sapiens
  misc_RNA (1)...(19): siRNA sense strand
cggaacaacucacuugaaa

SEQ ID NO: 1024739 - RNA, 19 nt, Homo sapiens
  misc_RNA (1)...(19): siRNA sense strand
ggacgaauaugugcuauac

SEQ ID NO: 1024740 - RNA, 19 nt, Homo sapiens
  misc_RNA (1)...(19): siRNA sense strand
acgaauaugugcuauacua

SEQ ID NO: 1024741 - RNA, 19 nt, Homo sapiens
  misc_RNA (1)...(19): siRNA sense strand
caagguagaauggauauuu

SEQ ID NO: 1024742 - RNA, 19 nt, Homo sapiens
  misc_RNA (1)...(19): siRNA sense strand
gaagaccuguggaaauaag

SEQ ID NO: 1024743 - RNA, 19 nt, Homo sapiens
  misc_RNA (1)...(19): siRNA sense strand
caaaggaggagauuguauu

SEQ ID NO: 1024744 - RNA, 19 nt, Homo sapiens
  misc_RNA (1)...(19): siRNA sense strand
gcugcucccuguucugaua

SEQ ID NO: 1024745 - RNA, 19 nt, Homo sapiens
  misc_RNA (1)...(19): siRNA sense strand
ggaagaagaaccaagugaa

SEQ ID NO: 1024746 - RNA, 19 nt, Homo sapiens
  misc_RNA (1)...(19): siRNA sense strand
gagcacagaagacaaaugu

SEQ ID NO: 1024747 - RNA, 19 nt, Homo sapiens
  misc_RNA (1)...(19): siRNA sense strand
ccauguggguggauugauu

SEQ ID NO: 1024748 - RNA, 19 nt, Homo sapiens
  misc_RNA (1)...(19): siRNA sense strand
gcuauacuauuacuccaau

SEQ ID NO: 1024749 - RNA, 19 nt, Homo sapiens
  misc_RNA (1)...(19): siRNA sense strand
ugaaugacuugaauguuuc

SEQ ID NO: 1024750 - RNA, 19 nt, Homo sapiens
  misc_RNA (1)...(19): siRNA sense strand
ugauauugaucgugaagaa

SEQ ID NO: 1024751 - RNA, 19 nt, Homo sapiens
  misc_RNA (1)...(19): siRNA sense strand
gaaacuacaccugcaguau

SEQ ID NO: 1024752 - RNA, 19 nt, Homo sapiens
  misc_RNA (1)...(19): siRNA sense strand
ggagucagauggaggaaac

SEQ ID NO: 1024753 - RNA, 19 nt, Homo sapiens
  misc_RNA (1)...(19): siRNA sense strand
ggaaacuacaccugcagua

SEQ ID NO: 1024754 - RNA, 19 nt, Homo sapiens
  misc_RNA (1)...(19): siRNA sense strand
gaucggaacaacucacuug

SEQ ID NO: 1024755 - RNA, 19 nt, Homo sapiens
  misc_RNA (1)...(19): siRNA sense strand
gagauuguauuucguuacu

SEQ ID NO: 1024756 - RNA, 19 nt, Homo sapiens
  misc_RNA (1)...(19): siRNA sense strand
agacuaauccagagauaaa

SEQ ID NO: 1024757 - RNA, 19 nt, Homo sapiens
  misc_RNA (1)...(19): siRNA sense strand
gcucugaugggauguguuu

SEQ ID NO: 1024758 - RNA, 19 nt, Homo sapiens
  misc_RNA (1)...(19): siRNA sense strand
gcaaaggaggagauuguau

SEQ ID NO: 1024759 - RNA, 19 nt, Homo sapiens
  misc_RNA (1)...(19): siRNA sense strand
ccagggaaccuauaucugu

SEQ ID NO: 1024760 - RNA, 19 nt, Homo sapiens
  misc_RNA (1)...(19): siRNA sense strand
gugaagaacacgaagaaga

SEQ ID NO: 1024761 - RNA, 19 nt, Homo sapiens
  misc_RNA (1)...(19): siRNA sense strand
ugaaacacgugaccaaggu

SEQ ID NO: 1024762 - RNA, 19 nt, Homo sapiens
  misc_RNA (1)...(19): siRNA sense strand
ccagagcacagaagacaaa

SEQ ID NO: 1024763 - RNA, 19 nt, Homo sapiens
  misc_RNA (1)...(19): siRNA sense strand
ccagagcacagaagugaaa

SEQ ID NO: 1024764 - RNA, 19 nt, Homo sapiens
  misc_RNA (1)...(19): siRNA sense strand
cacagaagacaaauguaua

SEQ ID NO: 1024765 - RNA, 19 nt, Homo sapiens
  misc_RNA (1)...(19): siRNA sense strand
gggaggugaucgaggaaga

SEQ ID NO: 1024766 - RNA, 19 nt, Homo sapiens
  misc_RNA (1)...(19): siRNA sense strand
gcgcaaaggaggagauugu

SEQ ID NO: 1024767 - RNA, 19 nt, Homo sapiens
  misc_RNA (1)...(19): siRNA sense strand
gaccaagguagaauggaua

SEQ ID NO: 1024768 - RNA, 19 nt, Homo sapiens
  misc_RNA (1)...(19): siRNA sense strand
aagauagacuggacucugu

SEQ ID NO: 1024769 - RNA, 19 nt, Homo sapiens
  misc_RNA (1)...(19): siRNA sense strand
guggguggauugauucaga

SEQ ID NO: 1024770 - RNA, 19 nt, Homo sapiens
  misc_RNA (1)...(19): siRNA sense strand
caaggacgaauaugugcua

SEQ ID NO: 1024771 - RNA, 19 nt, Homo sapiens
  misc_RNA (1)...(19): siRNA sense strand
gacaacuuaugcaaugaug

SEQ ID NO: 1024772 - RNA, 19 nt, Homo sapiens
  misc_RNA (1)...(19): siRNA sense strand
gauuguauuucguuacuac

SEQ ID NO: 1024773 - RNA, 19 nt, Homo sapiens
  misc_RNA (1)...(19): siRNA sense strand
aaaggaggagauuguauuu

SEQ ID NO: 1024774 - RNA, 19 nt, Homo sapiens
  misc_RNA (1)...(19): siRNA sense strand
gaaacacgugaccaaggua

SEQ ID NO: 1024775 - RNA, 19 nt, Homo sapiens
  misc_RNA (1)...(19): siRNA sense strand
ggugaucgaggaagaagaa

SEQ ID NO: 1024776 - RNA, 19 nt, Homo sapiens
  misc_RNA (1)...(19): siRNA sense strand
agagccagguguucaagaa

SEQ ID NO: 1024777 - RNA, 19 nt, Homo sapiens
  misc_RNA (1)...(19): siRNA sense strand
gaggagauuguauuucguu

SEQ ID NO: 1024778 - RNA, 19 nt, Homo sapiens
  misc_RNA (1)...(19): siRNA sense strand
ugaccaagguagaauggau

SEQ ID NO: 1024779 - RNA, 19 nt, Homo sapiens
  misc_RNA (1)...(19): siRNA sense strand
gcacgccaaggacgaauau

SEQ ID NO: 1024780 - RNA, 19 nt, Homo sapiens
  misc_RNA (1)...(19): siRNA sense strand
ccucuggucuuggguggua

SEQ ID NO: 1024781 - RNA, 19 nt, Homo sapiens
  misc_RNA (1)...(19): siRNA sense strand
caggagagcacgccaagga

SEQ ID NO: 1024782 - RNA, 19 nt, Homo sapiens
  misc_RNA (1)...(19): siRNA sense strand
gggccugaaugacuugaau

SEQ ID NO: 1024783 - RNA, 19 nt, Homo sapiens
  misc_RNA (1)...(19): siRNA sense strand
ugaagaagaccuguggaaa

SEQ ID NO: 1024784 - RNA, 19 nt, Homo sapiens
  misc_RNA (1)...(19): siRNA sense strand
ggugaucauugugggaauu

SEQ ID NO: 1024785 - RNA, 19 nt, Homo sapiens
  misc_RNA (1)...(19): siRNA sense strand
ggagugagggagucagaug

SEQ ID NO: 1024786 - RNA, 19 nt, Homo sapiens
  misc_RNA (1)...(19): siRNA sense strand
ccagaaccgcguacacuug

SEQ ID NO: 1024787 - RNA, 19 nt, Homo sapiens
  misc_RNA (1)...(19): siRNA sense strand
ggucagaucggaacaacuc

SEQ ID NO: 1024788 - RNA, 19 nt, Homo sapiens
  misc_RNA (1)...(19): siRNA sense strand
gggaaccuauaucugugaa

SEQ ID NO: 1024789 - RNA, 19 nt, Homo sapiens
  misc_RNA (1)...(19): siRNA sense strand
gaaccgcguacacuugaug

SEQ ID NO: 1024790 - RNA, 19 nt, Homo sapiens
  misc_RNA (1)...(19): siRNA sense strand
gggacaacuuaugcaauga

SEQ ID NO: 1024791 - RNA, 19 nt, Homo sapiens
  misc_RNA (1)...(19): siRNA sense strand
ucagaggccaccuacauga

SEQ ID NO: 1024792 - RNA, 19 nt, Homo sapiens
  misc_RNA (1)...(19): siRNA sense strand
gcucucuccugcuccaaga

SEQ ID NO: 1024793 - RNA, 19 nt, Homo sapiens
  misc_RNA (1)...(19): siRNA sense strand
ggacaacuuaugcaaugau

SEQ ID NO: 1024794 - RNA, 19 nt, Homo sapiens
  misc_RNA (1)...(19): siRNA sense strand
ucagugaauucuacagucu

SEQ ID NO: 1024795 - RNA, 19 nt, Homo sapiens
  misc_RNA (1)...(19): siRNA sense strand
cagaaccgcguacacuuga

SEQ ID NO: 1024796 - RNA, 19 nt, Homo sapiens
  misc_RNA (1)...(19): siRNA sense strand
gggagaaacacauuuacuc

SEQ ID NO: 1024797 - RNA, 19 nt, Homo sapiens
  misc_RNA (1)...(19): siRNA sense strand
ggucuugggugguaaucag

SEQ ID NO: 1024798 - RNA, 19 nt, Homo sapiens
  misc_RNA (1)...(19): siRNA sense strand
gcuccaagaugugcaagag

SEQ ID NO: 1024799 - RNA, 19 nt, Homo sapiens
  misc_RNA (1)...(19): siRNA sense strand
ggggacaacuuaugcaaug

SEQ ID NO: 1024800 - RNA, 19 nt, Homo sapiens
  misc_RNA (1)...(19): siRNA sense strand
agaacacgaagaagacuaa

SEQ ID NO: 1024801 - RNA, 19 nt, Homo sapiens
  misc_RNA (1)...(19): siRNA sense strand
gaccagggaaccuauaucu

SEQ ID NO: 1024802 - RNA, 19 nt, Homo sapiens
  misc_RNA (1)...(19): siRNA sense strand
ggaggagauuguauuucgu

SEQ ID NO: 1024803 - RNA, 19 nt, Homo sapiens
  misc_RNA (1)...(19): siRNA sense strand
gugaagaagaccuguggaa

SEQ ID NO: 1024804 - RNA, 19 nt, Homo sapiens
  misc_RNA (1)...(19): siRNA sense strand
ccugaggccucuggucuug

SEQ ID NO: 1024805 - RNA, 19 nt, Homo sapiens
  misc_RNA (1)...(19): siRNA sense strand
aaacuacaccugcaguauc

SEQ ID NO: 1024806 - RNA, 19 nt, Homo sapiens
  misc_RNA (1)...(19): siRNA sense strand
cacauuuacuccccaauaa

SEQ ID NO: 1024807 - RNA, 19 nt, Homo sapiens
  misc_RNA (1)...(19): siRNA sense strand
ccaguuuggccuucucuga

SEQ ID NO: 1024808 - RNA, 19 nt, Homo sapiens
  misc_RNA (1)...(19): siRNA sense strand
caagaaggcggugguacug

SEQ ID NO: 1024809 - RNA, 19 nt, Homo sapiens
  misc_RNA (1)...(19): siRNA sense strand
aaucagaggccaccuacau

SEQ ID NO: 1024810 - RNA, 19 nt, Homo sapiens
  misc_RNA (1)...(19): siRNA sense strand
aggagauuguauuucguua

SEQ ID NO: 1024811 - RNA, 19 nt, Homo sapiens
  misc_RNA (1)...(19): siRNA sense strand
cgaauaugugcuauacuau

SEQ ID NO: 1024812 - RNA, 19 nt, Homo sapiens
  misc_RNA (1)...(19): siRNA sense strand
cgaggaagaagaaccaagu

SEQ ID NO: 1024813 - RNA, 19 nt, Homo sapiens
  misc_RNA (1)...(19): siRNA sense strand
aaaccauugugcugcaugu

SEQ ID NO: 1024814 - RNA, 19 nt, Homo sapiens
  misc_RNA (1)...(19): siRNA sense strand
aggaggagauuguauuucg

SEQ ID NO: 1024815 - RNA, 19 nt, Homo sapiens
  misc_RNA (1)...(19): siRNA sense strand
gaggucagaucggaacaac

SEQ ID NO: 1024816 - RNA, 19 nt, Homo sapiens
  misc_RNA (1)...(19): siRNA sense strand
caggaugucugcggaguac

SEQ ID NO: 1024817 - RNA, 19 nt, Homo sapiens
  misc_RNA (1)...(19): siRNA sense strand
gaucgaggaagaagaacca

SEQ ID NO: 1024818 - RNA, 19 nt, Homo sapiens
  misc_RNA (1)...(19): siRNA sense strand
agugaauucuacagucuug

SEQ ID NO: 1024819 - RNA, 19 nt, Homo sapiens
  misc_RNA (1)...(19): siRNA sense strand
caccugcaguauccaccua

SEQ ID NO: 1024820 - RNA, 19 nt, Homo sapiens
  misc_RNA (1)...(19): siRNA sense strand
ugauucagaugggaugugu

SEQ ID NO: 1024821 - RNA, 19 nt, Homo sapiens
  misc_RNA (1)...(19): siRNA sense strand
uacuauuacuccaaucuca

SEQ ID NO: 1024822 - RNA, 19 nt, Homo sapiens
  misc_RNA (1)...(19): siRNA sense strand
ugaagaacacgaagaagac

SEQ ID NO: 1024823 - RNA, 19 nt, Homo sapiens
  misc_RNA (1)...(19): siRNA sense strand
ggaggugaucgaggaagaa

SEQ ID NO: 1024824 - RNA, 19 nt, Homo sapiens
  misc_RNA (1)...(19): siRNA sense strand
auucagaugggauguguuu

SEQ ID NO: 1024825 - RNA, 19 nt, Homo sapiens
  misc_RNA (1)...(19): siRNA sense strand
gaccaugcacccaguuugg

SEQ ID NO: 1024826 - RNA, 19 nt, Homo sapiens
  misc_RNA (1)...(19): siRNA sense strand
gaggaagaagaaccaagug

SEQ ID NO: 1024827 - RNA, 19 nt, Homo sapiens
  misc_RNA (1)...(19): siRNA sense strand
caaucucagugugccuauu

SEQ ID NO: 1024828 - RNA, 19 nt, Homo sapiens
  misc_RNA (1)...(19): siRNA sense strand
uaaguggagauuauuccuu

SEQ ID NO: 1024829 - RNA, 19 nt, Homo sapiens
  misc_RNA (1)...(19): siRNA sense strand
gaagaacacgaagaagacu

SEQ ID NO: 1024830 - RNA, 19 nt, Homo sapiens
  misc_RNA (1)...(19): siRNA sense strand
gaagauagcacacuaagaa

SEQ ID NO: 1024831 - RNA, 19 nt, Homo sapiens
  misc_RNA (1)...(19): siRNA sense strand
ucaaguaacuguccaaauu

SEQ ID NO: 1024832 - RNA, 19 nt, Homo sapiens
  misc_RNA (1)...(19): siRNA sense strand
gaaagcagugucugaaaua

SEQ ID NO: 1024833 - RNA, 19 nt, Homo sapiens
  misc_RNA (1)...(19): siRNA sense strand
gaagagaagccuagaagaa

SEQ ID NO: 1024834 - RNA, 19 nt, Homo sapiens
  misc_RNA (1)...(19): siRNA sense strand
cuaauaaacuuuccgacua

SEQ ID NO: 1024835 - RNA, 19 nt, Homo sapiens
  misc_RNA (1)...(19): siRNA sense strand
gauagcacacuaagaaaua

SEQ ID NO: 1024836 - RNA, 19 nt, Homo sapiens
  misc_RNA (1)...(19): siRNA sense strand
gcaaagccuuaaugagaaa

SEQ ID NO: 1024837 - RNA, 19 nt, Homo sapiens
  misc_RNA (1)...(19): siRNA sense strand
ggaacagcaugcccucuuu

SEQ ID NO: 1024838 - RNA, 19 nt, Homo sapiens
  misc_RNA (1)...(19): siRNA sense strand
caaguaacuguccaaauua

SEQ ID NO: 1024839 - RNA, 19 nt, Homo sapiens
  misc_RNA (1)...(19): siRNA sense strand
gaaggaauucaguaugaua

SEQ ID NO: 1024840 - RNA, 19 nt, Homo sapiens
  misc_RNA (1)...(19): siRNA sense strand
gaagaggugcucacucaaa

SEQ ID NO: 1024841 - RNA, 19 nt, Homo sapiens
  misc_RNA (1)...(19): siRNA sense strand
gaagaucuccugcgaguag

SEQ ID NO: 1024842 - RNA, 19 nt, Homo sapiens
  misc_RNA (1)...(19): siRNA sense strand
gaugaagaucugacuaaua

SEQ ID NO: 1024843 - RNA, 19 nt, Homo sapiens
  misc_RNA (1)...(19): siRNA sense strand
gcagauguuuaauauggaa

SEQ ID NO: 1024844 - RNA, 19 nt, Homo sapiens
  misc_RNA (1)...(19): siRNA sense strand
gaaacuagaaaccaaugaa

SEQ ID NO: 1024845 - RNA, 19 nt, Homo sapiens
  misc_RNA (1)...(19): siRNA sense strand
ugaaagcagugucugaaau

SEQ ID NO: 1024846 - RNA, 19 nt, Homo sapiens
  misc_RNA (1)...(19): siRNA sense strand
ggaaguauccaaccuccaa

SEQ ID NO: 1024847 - RNA, 19 nt, Homo sapiens
  misc_RNA (1)...(19): siRNA sense strand
ggaagaugauaugcugaaa

SEQ ID NO: 1024848 - RNA, 19 nt, Homo sapiens
  misc_RNA (1)...(19): siRNA sense strand
cagcugagcaggaaauaaa

SEQ ID NO: 1024849 - RNA, 19 nt, Homo sapiens
  misc_RNA (1)...(19): siRNA sense strand
gcuaggcucugauacaaag

SEQ ID NO: 1024850 - RNA, 19 nt, Homo sapiens
  misc_RNA (1)...(19): siRNA sense strand
cagcuaggcucugauacaa

SEQ ID NO: 1024851 - RNA, 19 nt, Homo sapiens
  misc_RNA (1)...(19): siRNA sense strand
gcuauucacucuguucuca

SEQ ID NO: 1024852 - RNA, 19 nt, Homo sapiens
  misc_RNA (1)...(19): siRNA sense strand
ggaaaaccaauaccaguua

SEQ ID NO: 1024853 - RNA, 19 nt, Homo sapiens
  misc_RNA (1)...(19): siRNA sense strand
ugacuaugcagauguuuaa

SEQ ID NO: 1024854 - RNA, 19 nt, Homo sapiens
  misc_RNA (1)...(19): siRNA sense strand
gauacaaaggcaauugaaa

SEQ ID NO: 1024855 - RNA, 19 nt, Homo sapiens
  misc_RNA (1)...(19): siRNA sense strand
caaaggcaauugaaaaguu

SEQ ID NO: 1024856 - RNA, 19 nt, Homo sapiens
  misc_RNA (1)...(19): siRNA sense strand
gaagaucugacuaauaaac

SEQ ID NO: 1024857 - RNA, 19 nt, Homo sapiens
  misc_RNA (1)...(19): siRNA sense strand
gugaagagccggaagaagu

SEQ ID NO: 1024858 - RNA, 19 nt, Homo sapiens
  misc_RNA (1)...(19): siRNA sense strand
aaagcagugucugaaauaa

SEQ ID NO: 1024859 - RNA, 19 nt, Homo sapiens
  misc_RNA (1)...(19): siRNA sense strand
gaacagcaugcccucuuug

SEQ ID NO: 1024860 - RNA, 19 nt, Homo sapiens
  misc_RNA (1)...(19): siRNA sense strand
cagaaaagcuugagucuac

SEQ ID NO: 1024861 - RNA, 19 nt, Homo sapiens
  misc_RNA (1)...(19): siRNA sense strand
uaaaggaauugguggugau

SEQ ID NO: 1024862 - RNA, 19 nt, Homo sapiens
  misc_RNA (1)...(19): siRNA sense strand
uaauaaacuuuccgacuac

SEQ ID NO: 1024863 - RNA, 19 nt, Homo sapiens
  misc_RNA (1)...(19): siRNA sense strand
ugcaaagccuuaaugagaa

SEQ ID NO: 1024864 - RNA, 19 nt, Homo sapiens
  misc_RNA (1)...(19): siRNA sense strand
aagcuugagucuacugaaa

SEQ ID NO: 1024865 - RNA, 19 nt, Homo sapiens
  misc_RNA (1)...(19): siRNA sense strand
agagaagccuagaagaaau

SEQ ID NO: 1024866 - RNA, 19 nt, Homo sapiens
  misc_RNA (1)...(19): siRNA sense strand
ggaagagaagccuagaaga

SEQ ID NO: 1024867 - RNA, 19 nt, Homo sapiens
  misc_RNA (1)...(19): siRNA sense strand
caagacacauuugccaaca

SEQ ID NO: 1024868 - RNA, 19 nt, Homo sapiens
  misc_RNA (1)...(19): siRNA sense strand
agaaaccaaugaauuccaa

SEQ ID NO: 1024869 - RNA, 19 nt, Homo sapiens
  misc_RNA (1)...(19): siRNA sense strand
agacacauuugccaacaau

SEQ ID NO: 1024870 - RNA, 19 nt, Homo sapiens
  misc_RNA (1)...(19): siRNA sense strand
ccaaugaauuccaacaacu

SEQ ID NO: 1024871 - RNA, 19 nt, Homo sapiens
  misc_RNA (1)...(19): siRNA sense strand
ggaugcaaagccuuaauga

SEQ ID NO: 1024872 - RNA, 19 nt, Homo sapiens
  misc_RNA (1)...(19): siRNA sense strand
cgacuacgaacccaaaguu

SEQ ID NO: 1024873 - RNA, 19 nt, Homo sapiens
  misc_RNA (1)...(19): siRNA sense strand
aagagaagccuagaagaaa

SEQ ID NO: 1024874 - RNA, 19 nt, Homo sapiens
  misc_RNA (1)...(19): siRNA sense strand
gagaagccuagaagaaaug

SEQ ID NO: 1024875 - RNA, 19 nt, Homo sapiens
  misc_RNA (1)...(19): siRNA sense strand
gcagcuaggcucugauaca

SEQ ID NO: 1024876 - RNA, 19 nt, Homo sapiens
  misc_RNA (1)...(19): siRNA sense strand
gcuaaaagauuuggaagau

SEQ ID NO: 1024877 - RNA, 19 nt, Homo sapiens
  misc_RNA (1)...(19): siRNA sense strand
augaagaggugcucacuca

SEQ ID NO: 1024878 - RNA, 19 nt, Homo sapiens
  misc_RNA (1)...(19): siRNA sense strand
cuacgaacccaaaguugaa

SEQ ID NO: 1024879 - RNA, 19 nt, Homo sapiens
  misc_RNA (1)...(19): siRNA sense strand
ggaagauagcacacuaaga

SEQ ID NO: 1024880 - RNA, 19 nt, Homo sapiens
  misc_RNA (1)...(19): siRNA sense strand
augcaaagccuuaaugaga

SEQ ID NO: 1024881 - RNA, 19 nt, Homo sapiens
  misc_RNA (1)...(19): siRNA sense strand
acacauuugccaacaauug

SEQ ID NO: 1024882 - RNA, 19 nt, Homo sapiens
  misc_RNA (1)...(19): siRNA sense strand
gaauuccaacaacuucaaa

SEQ ID NO: 1024883 - RNA, 19 nt, Homo sapiens
  misc_RNA (1)...(19): siRNA sense strand
agcagugucugaaauaaug

SEQ ID NO: 1024884 - RNA, 19 nt, Homo sapiens
  misc_RNA (1)...(19): siRNA sense strand
gaagaugauaugcugaaag

SEQ ID NO: 1024885 - RNA, 19 nt, Homo sapiens
  misc_RNA (1)...(19): siRNA sense strand
augcagauguuuaauaugg

SEQ ID NO: 1024886 - RNA, 19 nt, Homo sapiens
  misc_RNA (1)...(19): siRNA sense strand
caaugaauuccaacaacuu

SEQ ID NO: 1024887 - RNA, 19 nt, Homo sapiens
  misc_RNA (1)...(19): siRNA sense strand
gcugaaagcagugucugaa

SEQ ID NO: 1024888 - RNA, 19 nt, Homo sapiens
  misc_RNA (1)...(19): siRNA sense strand
gaggugcucacucaaagga

SEQ ID NO: 1024889 - RNA, 19 nt, Homo sapiens
  misc_RNA (1)...(19): siRNA sense strand
uaaacuuuccgacuacgaa

SEQ ID NO: 1024890 - RNA, 19 nt, Homo sapiens
  misc_RNA (1)...(19): siRNA sense strand
agacuugacuaugcagaug

SEQ ID NO: 1024891 - RNA, 19 nt, Homo sapiens
  misc_RNA (1)...(19): siRNA sense strand
acuagaaaccaaugaauuc

SEQ ID NO: 1024892 - RNA, 19 nt, Homo sapiens
  misc_RNA (1)...(19): siRNA sense strand
aagaugauaugcugaaagc

SEQ ID NO: 1024893 - RNA, 19 nt, Homo sapiens
  misc_RNA (1)...(19): siRNA sense strand
ugucuuugaugacccaguu

SEQ ID NO: 1024894 - RNA, 19 nt, Homo sapiens
  misc_RNA (1)...(19): siRNA sense strand
uuuggaagauagcacacua

SEQ ID NO: 1024895 - RNA, 19 nt, Homo sapiens
  misc_RNA (1)...(19): siRNA sense strand
aagaggugcucacucaaag

SEQ ID NO: 1024896 - RNA, 19 nt, Homo sapiens
  misc_RNA (1)...(19): siRNA sense strand
gaggugaagagccggaaga

SEQ ID NO: 1024897 - RNA, 19 nt, Homo sapiens
  misc_RNA (1)...(19): siRNA sense strand
ugucugaaauaauggagau

SEQ ID NO: 1024898 - RNA, 19 nt, Homo sapiens
  misc_RNA (1)...(19): siRNA sense strand
gaacccaaaguugaagaau

SEQ ID NO: 1024899 - RNA, 19 nt, Homo sapiens
  misc_RNA (1)...(19): siRNA sense strand
caaccuccaagauaucaug

SEQ ID NO: 1024900 - RNA, 19 nt, Homo sapiens
  misc_RNA (1)...(19): siRNA sense strand
aacccaaaguugaagaaug

SEQ ID NO: 1024901 - RNA, 19 nt, Homo sapiens
  misc_RNA (1)...(19): siRNA sense strand
gcgaguagaggagcagcua

SEQ ID NO: 1024902 - RNA, 19 nt, Homo sapiens
  misc_RNA (1)...(19): siRNA sense strand
guaacuguccaaauuaacu

SEQ ID NO: 1024903 - RNA, 19 nt, Homo sapiens
  misc_RNA (1)...(19): siRNA sense strand
uggaagacuugacuaugca

SEQ ID NO: 1024904 - RNA, 19 nt, Homo sapiens
  misc_RNA (1)...(19): siRNA sense strand
cacauuugccaacaauuga

SEQ ID NO: 1024905 - RNA, 19 nt, Homo sapiens
  misc_RNA (1)...(19): siRNA sense strand
gcucugauacaaaggcaau

SEQ ID NO: 1024906 - RNA, 19 nt, Homo sapiens
  misc_RNA (1)...(19): siRNA sense strand
aaauggaagacuugacuau

SEQ ID NO: 1024907 - RNA, 19 nt, Homo sapiens
  misc_RNA (1)...(19): siRNA sense strand
acccaaaguugaagaaugc

SEQ ID NO: 1024908 - RNA, 19 nt, Homo sapiens
  misc_RNA (1)...(19): siRNA sense strand
gaaaaccaauaccaguuac

SEQ ID NO: 1024909 - RNA, 19 nt, Homo sapiens
  misc_RNA (1)...(19): siRNA sense strand
gacaagaagaagaagaucu

SEQ ID NO: 1024910 - RNA, 19 nt, Homo sapiens
  misc_RNA (1)...(19): siRNA sense strand
gaaaauggaagacuugacu

SEQ ID NO: 1024911 - RNA, 19 nt, Homo sapiens
  misc_RNA (1)...(19): siRNA sense strand
uacugaaacuagaaaccaa

SEQ ID NO: 1024912 - RNA, 19 nt, Homo sapiens
  misc_RNA (1)...(19): siRNA sense strand
cugaacggcuaaaagauuu

SEQ ID NO: 1024913 - RNA, 19 nt, Homo sapiens
  misc_RNA (1)...(19): siRNA sense strand
caaaaugaacuggauauuc

SEQ ID NO: 1024914 - RNA, 19 nt, Homo sapiens
  misc_RNA (1)...(19): siRNA sense strand
ccuccaagauaucaugcau

SEQ ID NO: 1024915 - RNA, 19 nt, Homo sapiens
  misc_RNA (1)...(19): siRNA sense strand
uaauggagaugcagaaaac

SEQ ID NO: 1024916 - RNA, 19 nt, Homo sapiens
  misc_RNA (1)...(19): siRNA sense strand
ugaagagccggaagaaguc

SEQ ID NO: 1024917 - RNA, 19 nt, Homo sapiens
  misc_RNA (1)...(19): siRNA sense strand
aaagacaagaagaagaaga

SEQ ID NO: 1024918 - RNA, 19 nt, Homo sapiens
  misc_RNA (1)...(19): siRNA sense strand
ucacugaacggcuaaaaga

SEQ ID NO: 1024919 - RNA, 19 nt, Homo sapiens
  misc_RNA (1)...(19): siRNA sense strand
uggccugguuuguauuuca

SEQ ID NO: 1024920 - RNA, 19 nt, Homo sapiens
  misc_RNA (1)...(19): siRNA sense strand
agauagcacacuaagaaau

SEQ ID NO: 1024921 - RNA, 19 nt, Homo sapiens
  misc_RNA (1)...(19): siRNA sense strand
uggaagaugauaugcugaa

SEQ ID NO: 1024922 - RNA, 19 nt, Homo sapiens
  misc_RNA (1)...(19): siRNA sense strand
ccaguuugagcaggaagua

SEQ ID NO: 1024923 - RNA, 19 nt, Homo sapiens
  misc_RNA (1)...(19): siRNA sense strand
acuacgaacccaaaguuga

SEQ ID NO: 1024924 - RNA, 19 nt, Homo sapiens
  misc_RNA (1)...(19): siRNA sense strand
ugauacaaaggcaauugaa

SEQ ID NO: 1024925 - RNA, 19 nt, Homo sapiens
  misc_RNA (1)...(19): siRNA sense strand
aagauagcacacuaagaaa

SEQ ID NO: 1024926 - RNA, 19 nt, Homo sapiens
  misc_RNA (1)...(19): siRNA sense strand
aaauaauggagaugcagaa

SEQ ID NO: 1024927 - RNA, 19 nt, Homo sapiens
  misc_RNA (1)...(19): siRNA sense strand
ccaacaauugaaagugcua

SEQ ID NO: 1024928 - RNA, 19 nt, Homo sapiens
  misc_RNA (1)...(19): siRNA sense strand
aagacacauuugccaacaa

SEQ ID NO: 1024929 - RNA, 19 nt, Homo sapiens
  misc_RNA (1)...(19): siRNA sense strand
guuagaagaggaacagcau

SEQ ID NO: 1024930 - RNA, 19 nt, Homo sapiens
  misc_RNA (1)...(19): siRNA sense strand
gauaagacaucgagccaua

SEQ ID NO: 1024931 - RNA, 19 nt, Homo sapiens
  misc_RNA (1)...(19): siRNA sense strand
uaucaaagcuacccaaaga

SEQ ID NO: 1024932 - RNA, 19 nt, Homo sapiens
  misc_RNA (1)...(19): siRNA sense strand
agacaaaccuuucaagugu

SEQ ID NO: 1024933 - RNA, 19 nt, Homo sapiens
  misc_RNA (1)...(19): siRNA sense strand
ccucucagcucauauagaa

SEQ ID NO: 1024934 - RNA, 19 nt, Homo sapiens
  misc_RNA (1)...(19): siRNA sense strand
gaggacagcauaagcagua

SEQ ID NO: 1024935 - RNA, 19 nt, Homo sapiens
  misc_RNA (1)...(19): siRNA sense strand
ggaggaaauuaaagaacaa

SEQ ID NO: 1024936 - RNA, 19 nt, Homo sapiens
  misc_RNA (1)...(19): siRNA sense strand
gaacaaugccgcagaagag

SEQ ID NO: 1024937 - RNA, 19 nt, Homo sapiens
  misc_RNA (1)...(19): siRNA sense strand
ccaaacauauacagaacaa

SEQ ID NO: 1024938 - RNA, 19 nt, Homo sapiens
  misc_RNA (1)...(19): siRNA sense strand
ggaaagguuguaaaguaua

SEQ ID NO: 1024939 - RNA, 19 nt, Homo sapiens
  misc_RNA (1)...(19): siRNA sense strand
gauguagacagcacaauuu

SEQ ID NO: 1024940 - RNA, 19 nt, Homo sapiens
  misc_RNA (1)...(19): siRNA sense strand
ucaaagcuacccaaagaua

SEQ ID NO: 1024941 - RNA, 19 nt, Homo sapiens
  misc_RNA (1)...(19): siRNA sense strand
gaaugaaagugaacgacau

SEQ ID NO: 1024942 - RNA, 19 nt, Homo sapiens
  misc_RNA (1)...(19): siRNA sense strand
cauaagcaguacuauaaug

SEQ ID NO: 1024943 - RNA, 19 nt, Homo sapiens
  misc_RNA (1)...(19): siRNA sense strand
caaagauacugccuugcuu

SEQ ID NO: 1024944 - RNA, 19 nt, Homo sapiens
  misc_RNA (1)...(19): siRNA sense strand
agucaaaguugguuacaaa

SEQ ID NO: 1024945 - RNA, 19 nt, Homo sapiens
  misc_RNA (1)...(19): siRNA sense strand
auggaaagguuguaaagua

SEQ ID NO: 1024946 - RNA, 19 nt, Homo sapiens
  misc_RNA (1)...(19): siRNA sense strand
ggacaaggaagcacuacuu

SEQ ID NO: 1024947 - RNA, 19 nt, Homo sapiens
  misc_RNA (1)...(19): siRNA sense strand
cagcucauauagaaaguuu

SEQ ID NO: 1024948 - RNA, 19 nt, Homo sapiens
  misc_RNA (1)...(19): siRNA sense strand
agaagagguugaagaggua

SEQ ID NO: 1024949 - RNA, 19 nt, Homo sapiens
  misc_RNA (1)...(19): siRNA sense strand
gcaguacuauaauggaugu

SEQ ID NO: 1024950 - RNA, 19 nt, Homo sapiens
  misc_RNA (1)...(19): siRNA sense strand
gagacaaaccuuucaagug

SEQ ID NO: 1024951 - RNA, 19 nt, Homo sapiens
  misc_RNA (1)...(19): siRNA sense strand
guauauaacacuccaucua

SEQ ID NO: 1024952 - RNA, 19 nt, Homo sapiens
  misc_RNA (1)...(19): siRNA sense strand
gaacaaaaggaggaaauua

SEQ ID NO: 1024953 - RNA, 19 nt, Homo sapiens
  misc_RNA (1)...(19): siRNA sense strand
gaaagugaacgacaucagu

SEQ ID NO: 1024954 - RNA, 19 nt, Homo sapiens
  misc_RNA (1)...(19): siRNA sense strand
ggauguagacagcacaauu

SEQ ID NO: 1024955 - RNA, 19 nt, Homo sapiens
  misc_RNA (1)...(19): siRNA sense strand
uaaccucucagcucauaua

SEQ ID NO: 1024956 - RNA, 19 nt, Homo sapiens
  misc_RNA (1)...(19): siRNA sense strand
gaucacauccguuccauac

SEQ ID NO: 1024957 - RNA, 19 nt, Homo sapiens
  misc_RNA (1)...(19): siRNA sense strand
cagcauaagcaguacuaua

SEQ ID NO: 1024958 - RNA, 19 nt, Homo sapiens
  misc_RNA (1)...(19): siRNA sense strand
gaagacauucugccugaug

SEQ ID NO: 1024959 - RNA, 19 nt, Homo sapiens
  misc_RNA (1)...(19): siRNA sense strand
caaaagacgacgcucauua

SEQ ID NO: 1024960 - RNA, 19 nt, Homo sapiens
  misc_RNA (1)...(19): siRNA sense strand
guacuauaauggauguaga

SEQ ID NO: 1024961 - RNA, 19 nt, Homo sapiens
  misc_RNA (1)...(19): siRNA sense strand
uggaaagguuguaaaguau

SEQ ID NO: 1024962 - RNA, 19 nt, Homo sapiens
  misc_RNA (1)...(19): siRNA sense strand
ucacauccguuccauacau

SEQ ID NO: 1024963 - RNA, 19 nt, Homo sapiens
  misc_RNA (1)...(19): siRNA sense strand
caucgagccauaugcuuua

SEQ ID NO: 1024964 - RNA, 19 nt, Homo sapiens
  misc_RNA (1)...(19): siRNA sense strand
gccaaaggccaaagaagaa

SEQ ID NO: 1024965 - RNA, 19 nt, Homo sapiens
  misc_RNA (1)...(19): siRNA sense strand
gacacacaguggagacaaa

SEQ ID NO: 1024966 - RNA, 19 nt, Homo sapiens
  misc_RNA (1)...(19): siRNA sense strand
ggacucggaggacagcaua

SEQ ID NO: 1024967 - RNA, 19 nt, Homo sapiens
  misc_RNA (1)...(19): siRNA sense strand
agcauaagcaguacuauaa

SEQ ID NO: 1024968 - RNA, 19 nt, Homo sapiens
  misc_RNA (1)...(19): siRNA sense strand
ggagacaaaccuuucaagu

SEQ ID NO: 1024969 - RNA, 19 nt, Homo sapiens
  misc_RNA (1)...(19): siRNA sense strand
gguauuuguuugcuuaugg

SEQ ID NO: 1024970 - RNA, 19 nt, Homo sapiens
  misc_RNA (1)...(19): siRNA sense strand
acagaacaaugccgcagaa

SEQ ID NO: 1024971 - RNA, 19 nt, Homo sapiens
  misc_RNA (1)...(19): siRNA sense strand
agggcuagcucgucaugua

SEQ ID NO: 1024972 - RNA, 19 nt, Homo sapiens
  misc_RNA (1)...(19): siRNA sense strand
gcguucaacuccagcaaug

SEQ ID NO: 1024973 - RNA, 19 nt, Homo sapiens
  misc_RNA (1)...(19): siRNA sense strand
cagcagaacuccucaaaag

SEQ ID NO: 1024974 - RNA, 19 nt, Homo sapiens
  misc_RNA (1)...(19): siRNA sense strand
gacccaaacauauacagaa

SEQ ID NO: 1024975 - RNA, 19 nt, Homo sapiens
  misc_RNA (1)...(19): siRNA sense strand
aaugaugaauggacaagga

SEQ ID NO: 1024976 - RNA, 19 nt, Homo sapiens
  misc_RNA (1)...(19): siRNA sense strand
uuggaugccugaagacauu

SEQ ID NO: 1024977 - RNA, 19 nt, Homo sapiens
  misc_RNA (1)...(19): siRNA sense strand
gcacuacuucuucaagcaa

SEQ ID NO: 1024978 - RNA, 19 nt, Homo sapiens
  misc_RNA (1)...(19): siRNA sense strand
gcucauauagaaaguuuag

SEQ ID NO: 1024979 - RNA, 19 nt, Homo sapiens
  misc_RNA (1)...(19): siRNA sense strand
gcauaagcaguacuauaau

SEQ ID NO: 1024980 - RNA, 19 nt, Homo sapiens
  misc_RNA (1)...(19): siRNA sense strand
uuuaaccucucagcucaua

SEQ ID NO: 1024981 - RNA, 19 nt, Homo sapiens
  misc_RNA (1)...(19): siRNA sense strand
aaaggcauaugcugacaca

SEQ ID NO: 1024982 - RNA, 19 nt, Homo sapiens
  misc_RNA (1)...(19): siRNA sense strand
guauuuguuugcuuaugga

SEQ ID NO: 1024983 - RNA, 19 nt, Homo sapiens
  misc_RNA (1)...(19): siRNA sense strand
ggacccaaacauauacaga

SEQ ID NO: 1024984 - RNA, 19 nt, Homo sapiens
  misc_RNA (1)...(19): siRNA sense strand
gacagcauaagcaguacua

SEQ ID NO: 1024985 - RNA, 19 nt, Homo sapiens
  misc_RNA (1)...(19): siRNA sense strand
aggaggaaauuaaagaaca

SEQ ID NO: 1024986 - RNA, 19 nt, Homo sapiens
  misc_RNA (1)...(19): siRNA sense strand
acaaaccuuucaagugugu

SEQ ID NO: 1024987 - RNA, 19 nt, Homo sapiens
  misc_RNA (1)...(19): siRNA sense strand
guaguucauuuaucaaagc

SEQ ID NO: 1024988 - RNA, 19 nt, Homo sapiens
  misc_RNA (1)...(19): siRNA sense strand
gugaacgacaucaguuaaa

SEQ ID NO: 1024989 - RNA, 19 nt, Homo sapiens
  misc_RNA (1)...(19): siRNA sense strand
guacuguaauagcuaagag

SEQ ID NO: 1024990 - RNA, 19 nt, Homo sapiens
  misc_RNA (1)...(19): siRNA sense strand
caggcuugcuucaacucua

SEQ ID NO: 1024991 - RNA, 19 nt, Homo sapiens
  misc_RNA (1)...(19): siRNA sense strand
aaagugaacgacaucaguu

SEQ ID NO: 1024992 - RNA, 19 nt, Homo sapiens
  misc_RNA (1)...(19): siRNA sense strand
gaugugugggugaaugaaa

SEQ ID NO: 1024993 - RNA, 19 nt, Homo sapiens
  misc_RNA (1)...(19): siRNA sense strand
gaagauucugggaagauca

SEQ ID NO: 1024994 - RNA, 19 nt, Homo sapiens
  misc_RNA (1)...(19): siRNA sense strand
cauaguacuguaauagcua

SEQ ID NO: 1024995 - RNA, 19 nt, Homo sapiens
  misc_RNA (1)...(19): siRNA sense strand
uaagacaucgagccauaug

SEQ ID NO: 1024996 - RNA, 19 nt, Homo sapiens
  misc_RNA (1)...(19): siRNA sense strand
uuucuucgaugcacaaaca

SEQ ID NO: 1024997 - RNA, 19 nt, Homo sapiens
  misc_RNA (1)...(19): siRNA sense strand
guagacagcacaauuucca

SEQ ID NO: 1024998 - RNA, 19 nt, Homo sapiens
  misc_RNA (1)...(19): siRNA sense strand
cauaugcuuuaaccucuca

SEQ ID NO: 1024999 - RNA, 19 nt, Homo sapiens
  misc_RNA (1)...(19): siRNA sense strand
uaccacggccacaugauuu

SEQ ID NO: 1025000 - RNA, 19 nt, Homo sapiens
  misc_RNA (1)...(19): siRNA sense strand
gugggugaaugaaagugaa

SEQ ID NO: 1025001 - RNA, 19 nt, Homo sapiens
  misc_RNA (1)...(19): siRNA sense strand
gaggagggguauuuguuug

SEQ ID NO: 1025002 - RNA, 19 nt, Homo sapiens
  misc_RNA (1)...(19): siRNA sense strand
gaagagguugaagagguaa

SEQ ID NO: 1025003 - RNA, 19 nt, Homo sapiens
  misc_RNA (1)...(19): siRNA sense strand
ccaucuaccagucaaaguu

SEQ ID NO: 1025004 - RNA, 19 nt, Homo sapiens
  misc_RNA (1)...(19): siRNA sense strand
gugccaggcuugcuucaac

SEQ ID NO: 1025005 - RNA, 19 nt, Homo sapiens
  misc_RNA (1)...(19): siRNA sense strand
aagcaguacuauaauggau

SEQ ID NO: 1025006 - RNA, 19 nt, Homo sapiens
  misc_RNA (1)...(19): siRNA sense strand
ccaaagauacugccuugcu

SEQ ID NO: 1025007 - RNA, 19 nt, Homo sapiens
  misc_RNA (1)...(19): siRNA sense strand
acaaacacuggaugcgaua

SEQ ID NO: 1025008 - RNA, 19 nt, Homo sapiens
  misc_RNA (1)...(19): siRNA sense strand
gcagaucacauccguucca

SEQ ID NO: 1025009 - RNA, 19 nt, Homo sapiens
  misc_RNA (1)...(19): siRNA sense strand
caucuaccagucaaaguug

SEQ ID NO: 1025010 - RNA, 19 nt, Homo sapiens
  misc_RNA (1)...(19): siRNA sense strand
uauauaacacuccaucuac

SEQ ID NO: 1025011 - RNA, 19 nt, Homo sapiens
  misc_RNA (1)...(19): siRNA sense strand
caacuccagcaaugaugaa

SEQ ID NO: 1025012 - RNA, 19 nt, Homo sapiens
  misc_RNA (1)...(19): siRNA sense strand
ucauaguacuguaauagcu

SEQ ID NO: 1025013 - RNA, 19 nt, Homo sapiens
  misc_RNA (1)...(19): siRNA sense strand
ggagggcuagcucgucaug

SEQ ID NO: 1025014 - RNA, 19 nt, Homo sapiens
  misc_RNA (1)...(19): siRNA sense strand
caaagcuacccaaagauac

SEQ ID NO: 1025015 - RNA, 19 nt, Homo sapiens
  misc_RNA (1)...(19): siRNA sense strand
ugaacgacaucaguuaaaa

SEQ ID NO: 1025016 - RNA, 19 nt, Homo sapiens
  misc_RNA (1)...(19): siRNA sense strand
aagugaacgacaucaguua

SEQ ID NO: 1025017 - RNA, 19 nt, Homo sapiens
  misc_RNA (1)...(19): siRNA sense strand
cuucaacucuagcccagau

SEQ ID NO: 1025018 - RNA, 19 nt, Homo sapiens
  misc_RNA (1)...(19): siRNA sense strand
ccgcagaagagguugaaga

SEQ ID NO: 1025019 - RNA, 19 nt, Homo sapiens
  misc_RNA (1)...(19): siRNA sense strand
acaucgagccauaugcuuu

SEQ ID NO: 1025020 - RNA, 19 nt, Homo sapiens
  misc_RNA (1)...(19): siRNA sense strand
cacauccguuccauacaug

SEQ ID NO: 1025021 - RNA, 19 nt, Homo sapiens
  misc_RNA (1)...(19): siRNA sense strand
agaacaaugccgcagaaga

SEQ ID NO: 1025022 - RNA, 19 nt, Homo sapiens
  misc_RNA (1)...(19): siRNA sense strand
caaugccgcagaagagguu

SEQ ID NO: 1025023 - RNA, 19 nt, Homo sapiens
  misc_RNA (1)...(19): siRNA sense strand
guucaacuccagcaaugau

SEQ ID NO: 1025024 - RNA, 19 nt, Homo sapiens
  misc_RNA (1)...(19): siRNA sense strand
ucugggaagaucaaacuuu

SEQ ID NO: 1025025 - RNA, 19 nt, Homo sapiens
  misc_RNA (1)...(19): siRNA sense strand
uuaccacggccacaugauu

SEQ ID NO: 1025026 - RNA, 19 nt, Homo sapiens
  misc_RNA (1)...(19): siRNA sense strand
agccaaaggccaaagaaga

SEQ ID NO: 1025027 - RNA, 19 nt, Homo sapiens
  misc_RNA (1)...(19): siRNA sense strand
gccacaugauuucuucgau

SEQ ID NO: 1025028 - RNA, 19 nt, Homo sapiens
  misc_RNA (1)...(19): siRNA sense strand
ucaacuccagcaaugauga

SEQ ID NO: 1025029 - RNA, 19 nt, Homo sapiens
  misc_RNA (1)...(19): siRNA sense strand
uaagcaguacuauaaugga

SEQ ID NO: 1025030 - RNA, 19 nt, Homo sapiens
  misc_RNA (1)...(19): siRNA sense strand
ggaagcagcccucuacauu

SEQ ID NO: 1025031 - RNA, 19 nt, Homo sapiens
  misc_RNA (1)...(19): siRNA sense strand
caagauaaaucggaaacaa

SEQ ID NO: 1025032 - RNA, 19 nt, Homo sapiens
  misc_RNA (1)...(19): siRNA sense strand
ccaaauucauugccuguga

SEQ ID NO: 1025033 - RNA, 19 nt, Homo sapiens
  misc_RNA (1)...(19): siRNA sense strand
ccagaaggauauaaaguca

SEQ ID NO: 1025034 - RNA, 19 nt, Homo sapiens
  misc_RNA (1)...(19): siRNA sense strand
cggaaacaaucaacccaaa

SEQ ID NO: 1025035 - RNA, 19 nt, Homo sapiens
  misc_RNA (1)...(19): siRNA sense strand
aagcagcccucuacauuca

SEQ ID NO: 1025036 - RNA, 19 nt, Homo sapiens
  misc_RNA (1)...(19): siRNA sense strand
gaagcagcccucuacauuc

SEQ ID NO: 1025037 - RNA, 19 nt, Homo sapiens
  misc_RNA (1)...(19): siRNA sense strand
gcaaauccccagccacaua

SEQ ID NO: 1025038 - RNA, 19 nt, Homo sapiens
  misc_RNA (1)...(19): siRNA sense strand
gcugugauccugagauuca

SEQ ID NO: 1025039 - RNA, 19 nt, Homo sapiens
  misc_RNA (1)...(19): siRNA sense strand
aaacauguucucccaaaga

SEQ ID NO: 1025040 - RNA, 19 nt, Homo sapiens
  misc_RNA (1)...(19): siRNA sense strand
caaauucauugccugugau

SEQ ID NO: 1025041 - RNA, 19 nt, Homo sapiens
  misc_RNA (1)...(19): siRNA sense strand
cggaauggcuagccugcuu

SEQ ID NO: 1025042 - RNA, 19 nt, Homo sapiens
  misc_RNA (1)...(19): siRNA sense strand
caucuuuccuguucugcuu

SEQ ID NO: 1025043 - RNA, 19 nt, Homo sapiens
  misc_RNA (1)...(19): siRNA sense strand
gcagcccucuacauucaau

SEQ ID NO: 1025044 - RNA, 19 nt, Homo sapiens
  misc_RNA (1)...(19): siRNA sense strand
ggaggacgaugcaguaccu

SEQ ID NO: 1025045 - RNA, 19 nt, Homo sapiens
  misc_RNA (1)...(19): siRNA sense strand
ucaccgagccgucaagcaa

SEQ ID NO: 1025046 - RNA, 19 nt, Homo sapiens
  misc_RNA (1)...(19): siRNA sense strand
ugacugagugguuauacaa

SEQ ID NO: 1025047 - RNA, 19 nt, Homo sapiens
  misc_RNA (1)...(19): siRNA sense strand
gauuacgguugcgccagua

SEQ ID NO: 1025048 - RNA, 19 nt, Homo sapiens
  misc_RNA (1)...(19): siRNA sense strand
gauaaaucggaaacaauca

SEQ ID NO: 1025049 - RNA, 19 nt, Homo sapiens
  misc_RNA (1)...(19): siRNA sense strand
ucgcugugauccugagauu

SEQ ID NO: 1025050 - RNA, 19 nt, Homo sapiens
  misc_RNA (1)...(19): siRNA sense strand
cacccuguccucaagauaa

SEQ ID NO: 1025051 - RNA, 19 nt, Homo sapiens
  misc_RNA (1)...(19): siRNA sense strand
cuggagagccugugugguu

SEQ ID NO: 1025052 - RNA, 19 nt, Homo sapiens
  misc_RNA (1)...(19): siRNA sense strand
cagccucccuuuccagaag

SEQ ID NO: 1025053 - RNA, 19 nt, Homo sapiens
  misc_RNA (1)...(19): siRNA sense strand
caagcacauucaccagcaa

SEQ ID NO: 1025054 - RNA, 19 nt, Homo sapiens
  misc_RNA (1)...(19): siRNA sense strand
ccacauagugcgccucaag

SEQ ID NO: 1025055 - RNA, 19 nt, Homo sapiens
  misc_RNA (1)...(19): siRNA sense strand
agauaaaucggaaacaauc

SEQ ID NO: 1025056 - RNA, 19 nt, Homo sapiens
  misc_RNA (1)...(19): siRNA sense strand
aaagugaaaugcaaaaugg

SEQ ID NO: 1025057 - RNA, 19 nt, Homo sapiens
  misc_RNA (1)...(19): siRNA sense strand
gccaguagaggaaaugcuu

SEQ ID NO: 1025058 - RNA, 19 nt, Homo sapiens
  misc_RNA (1)...(19): siRNA sense strand
guaccugcagccaagauga

SEQ ID NO: 1025059 - RNA, 19 nt, Homo sapiens
  misc_RNA (1)...(19): siRNA sense strand
ucaccaagcgaagaaagaa

SEQ ID NO: 1025060 - RNA, 19 nt, Homo sapiens
  misc_RNA (1)...(19): siRNA sense strand
aauggaggacgaugcagua

SEQ ID NO: 1025061 - RNA, 19 nt, Homo sapiens
  misc_RNA (1)...(19): siRNA sense strand
ggaaacaaucaacccaaaa

SEQ ID NO: 1025062 - RNA, 19 nt, Homo sapiens
  misc_RNA (1)...(19): siRNA sense strand
gcacauucaccagcaaguc

SEQ ID NO: 1025063 - RNA, 19 nt, Homo sapiens
  misc_RNA (1)...(19): siRNA sense strand
ucuacagacucgucguuca

SEQ ID NO: 1025064 - RNA, 19 nt, Homo sapiens
  misc_RNA (1)...(19): siRNA sense strand
ggaggagcggcuaaagcaa

SEQ ID NO: 1025065 - RNA, 19 nt, Homo sapiens
  misc_RNA (1)...(19): siRNA sense strand
acuuucaucuuuccuguuc

SEQ ID NO: 1025066 - RNA, 19 nt, Homo sapiens
  misc_RNA (1)...(19): siRNA sense strand
gaucugcaaggaguaugaa

SEQ ID NO: 1025067 - RNA, 19 nt, Homo sapiens
  misc_RNA (1)...(19): siRNA sense strand
gaauggcuagccugcuuca

SEQ ID NO: 1025068 - RNA, 19 nt, Homo sapiens
  misc_RNA (1)...(19): siRNA sense strand
acccuguccucaagauaaa

SEQ ID NO: 1025069 - RNA, 19 nt, Homo sapiens
  misc_RNA (1)...(19): siRNA sense strand
cguacacccuguccucaag

SEQ ID NO: 1025070 - RNA, 19 nt, Homo sapiens
  misc_RNA (1)...(19): siRNA sense strand
gcucuacagacucgucguu

SEQ ID NO: 1025071 - RNA, 19 nt, Homo sapiens
  misc_RNA (1)...(19): siRNA sense strand
ccaguagaggaaaugcuuu

SEQ ID NO: 1025072 - RNA, 19 nt, Homo sapiens
  misc_RNA (1)...(19): siRNA sense strand
ggaaaagaaccaaauucau

SEQ ID NO: 1025073 - RNA, 19 nt, Homo sapiens
  misc_RNA (1)...(19): siRNA sense strand
guacacccuguccucaaga

SEQ ID NO: 1025074 - RNA, 19 nt, Homo sapiens
  misc_RNA (1)...(19): siRNA sense strand
uggaggagcggcuaaagca

SEQ ID NO: 1025075 - RNA, 19 nt, Homo sapiens
  misc_RNA (1)...(19): siRNA sense strand
aagcccagcugcucuacag

SEQ ID NO: 1025076 - RNA, 19 nt, Homo sapiens
  misc_RNA (1)...(19): siRNA sense strand
gcacuggacuugcuuaaac

SEQ ID NO: 1025077 - RNA, 19 nt, Homo sapiens
  misc_RNA (1)...(19): siRNA sense strand
ucacagacacgcagauuaa

SEQ ID NO: 1025078 - RNA, 19 nt, Homo sapiens
  misc_RNA (1)...(19): siRNA sense strand
ucggagagcucaaagagaa

SEQ ID NO: 1025079 - RNA, 19 nt, Homo sapiens
  misc_RNA (1)...(19): siRNA sense strand
cuacaucacccgcuacuuu

SEQ ID NO: 1025080 - RNA, 19 nt, Homo sapiens
  misc_RNA (1)...(19): siRNA sense strand
acacgcagauuaagaggaa

SEQ ID NO: 1025081 - RNA, 19 nt, Homo sapiens
  misc_RNA (1)...(19): siRNA sense strand
cuaaagagcaccaagcuau

SEQ ID NO: 1025082 - RNA, 19 nt, Homo sapiens
  misc_RNA (1)...(19): siRNA sense strand
caacagaaaccaccugaca

SEQ ID NO: 1025083 - RNA, 19 nt, Homo sapiens
  misc_RNA (1)...(19): siRNA sense strand
agacauacauugccacgau

SEQ ID NO: 1025084 - RNA, 19 nt, Homo sapiens
  misc_RNA (1)...(19): siRNA sense strand
ugaagggccuggauuaucu

SEQ ID NO: 1025085 - RNA, 19 nt, Homo sapiens
  misc_RNA (1)...(19): siRNA sense strand
gggcaucgauaaccacaca

SEQ ID NO: 1025086 - RNA, 19 nt, Homo sapiens
  misc_RNA (1)...(19): siRNA sense strand
gcaccaagcuauggaucau

SEQ ID NO: 1025087 - RNA, 19 nt, Homo sapiens
  misc_RNA (1)...(19): siRNA sense strand
cugaggagcucuucaccaa

SEQ ID NO: 1025088 - RNA, 19 nt, Homo sapiens
  misc_RNA (1)...(19): siRNA sense strand
ugaggacucugacauugau

SEQ ID NO: 1025089 - RNA, 19 nt, Homo sapiens
  misc_RNA (1)...(19): siRNA sense strand
ggagcagggugacgugaag

SEQ ID NO: 1025090 - RNA, 19 nt, Homo sapiens
  misc_RNA (1)...(19): siRNA sense strand
ucaaagagaagcacaagca

SEQ ID NO: 1025091 - RNA, 19 nt, Homo sapiens
  misc_RNA (1)...(19): siRNA sense strand
uacuuuggcuccuaccuaa

SEQ ID NO: 1025092 - RNA, 19 nt, Homo sapiens
  misc_RNA (1)...(19): siRNA sense strand
gagcucaucgaccgcuaua

SEQ ID NO: 1025093 - RNA, 19 nt, Homo sapiens
  misc_RNA (1)...(19): siRNA sense strand
gcucaucgaccgcuauaag

SEQ ID NO: 1025094 - RNA, 19 nt, Homo sapiens
  misc_RNA (1)...(19): siRNA sense strand
uauggaucaucauggagua

SEQ ID NO: 1025095 - RNA, 19 nt, Homo sapiens
  misc_RNA (1)...(19): siRNA sense strand
gcacagcaagcccuucaag

SEQ ID NO: 1025096 - RNA, 19 nt, Homo sapiens
  misc_RNA (1)...(19): siRNA sense strand
gcaucgauaaccacacaaa

SEQ ID NO: 1025097 - RNA, 19 nt, Homo sapiens
  misc_RNA (1)...(19): siRNA sense strand
ccacacagcaagcuucaca

SEQ ID NO: 1025098 - RNA, 19 nt, Homo sapiens
  misc_RNA (1)...(19): siRNA sense strand
ucugaggacucugacauug

SEQ ID NO: 1025099 - RNA, 19 nt, Homo sapiens
  misc_RNA (1)...(19): siRNA sense strand
caagauccaccgagacauc

SEQ ID NO: 1025100 - RNA, 19 nt, Homo sapiens
  misc_RNA (1)...(19): siRNA sense strand
uaaagagcaccaagcuaug

SEQ ID NO: 1025101 - RNA, 19 nt, Homo sapiens
  misc_RNA (1)...(19): siRNA sense strand
uagcagggcagcucacaga

SEQ ID NO: 1025102 - RNA, 19 nt, Homo sapiens
  misc_RNA (1)...(19): siRNA sense strand
caaagcugccaacgugcua

SEQ ID NO: 1025103 - RNA, 19 nt, Homo sapiens
  misc_RNA (1)...(19): siRNA sense strand
agauuaagaggaacacauu

SEQ ID NO: 1025104 - RNA, 19 nt, Homo sapiens
  misc_RNA (1)...(19): siRNA sense strand
gcuauaagcgcuggaaguc

SEQ ID NO: 1025105 - RNA, 19 nt, Homo sapiens
  misc_RNA (1)...(19): siRNA sense strand
gugcagagguuuucacaca

SEQ ID NO: 1025106 - RNA, 19 nt, Homo sapiens
  misc_RNA (1)...(19): siRNA sense strand
uggaggaggccgaggauga

SEQ ID NO: 1025107 - RNA, 19 nt, Homo sapiens
  misc_RNA (1)...(19): siRNA sense strand
gcucacagacacgcagauu

SEQ ID NO: 1025108 - RNA, 19 nt, Homo sapiens
  misc_RNA (1)...(19): siRNA sense strand
ucuacaagggcaucgauaa

SEQ ID NO: 1025109 - RNA, 19 nt, Homo sapiens
  misc_RNA (1)...(19): siRNA sense strand
gauccaccgagacaucaaa

SEQ ID NO: 1025110 - RNA, 19 nt, Homo sapiens
  misc_RNA (1)...(19): siRNA sense strand
gcacuccgaacgcaagauc

SEQ ID NO: 1025111 - RNA, 19 nt, Homo sapiens
  misc_RNA (1)...(19): siRNA sense strand
acagaaaccaccugacauc

SEQ ID NO: 1025112 - RNA, 19 nt, Homo sapiens
  misc_RNA (1)...(19): siRNA sense strand
gcgaggaguccagcucuga

SEQ ID NO: 1025113 - RNA, 19 nt, Homo sapiens
  misc_RNA (1)...(19): siRNA sense strand
gaagcacaaguucaucaca

SEQ ID NO: 1025114 - RNA, 19 nt, Homo sapiens
  misc_RNA (1)...(19): siRNA sense strand
ucgauaaccacacaaagga

SEQ ID NO: 1025115 - RNA, 19 nt, Homo sapiens
  misc_RNA (1)...(19): siRNA sense strand
acaagggcaucgauaacca

SEQ ID NO: 1025116 - RNA, 19 nt, Homo sapiens
  misc_RNA (1)...(19): siRNA sense strand
aggaugagaucgaggacau

SEQ ID NO: 1025117 - RNA, 19 nt, Homo sapiens
  misc_RNA (1)...(19): siRNA sense strand
gcagggcagcucacagaca

SEQ ID NO: 1025118 - RNA, 19 nt, Homo sapiens
  misc_RNA (1)...(19): siRNA sense strand
cuacuuuggcuccuaccua

SEQ ID NO: 1025119 - RNA, 19 nt, Homo sapiens
  misc_RNA (1)...(19): siRNA sense strand
ggacauccagcaggagauc

SEQ ID NO: 1025120 - RNA, 19 nt, Homo sapiens
  misc_RNA (1)...(19): siRNA sense strand
accaagcuauggaucauca

SEQ ID NO: 1025121 - RNA, 19 nt, Homo sapiens
  misc_RNA (1)...(19): siRNA sense strand
acgugaagcuggcggacuu

SEQ ID NO: 1025122 - RNA, 19 nt, Homo sapiens
  misc_RNA (1)...(19): siRNA sense strand
gcucugaggacucugacau

SEQ ID NO: 1025123 - RNA, 19 nt, Homo sapiens
  misc_RNA (1)...(19): siRNA sense strand
acagacacgcagauuaaga

SEQ ID NO: 1025124 - RNA, 19 nt, Homo sapiens
  misc_RNA (1)...(19): siRNA sense strand
ggugguggccaucaagauc

SEQ ID NO: 1025125 - RNA, 19 nt, Homo sapiens
  misc_RNA (1)...(19): siRNA sense strand
ggagcgagugcagagguuu

SEQ ID NO: 1025126 - RNA, 19 nt, Homo sapiens
  misc_RNA (1)...(19): siRNA sense strand
caagcuauggaucaucaug

SEQ ID NO: 1025127 - RNA, 19 nt, Homo sapiens
  misc_RNA (1)...(19): siRNA sense strand
cagcacagcaagcccuuca

SEQ ID NO: 1025128 - RNA, 19 nt, Homo sapiens
  misc_RNA (1)...(19): siRNA sense strand
ccacgauccugcgggagau

SEQ ID NO: 1025129 - RNA, 19 nt, Homo sapiens
  misc_RNA (1)...(19): siRNA sense strand
uacaucacccgcuacuuug

SEQ ID NO: 1025130 - RNA, 19 nt, Homo sapiens
  misc_RNA (1)...(19): siRNA sense strand
gcccugcacaguucacaga

SEQ ID NO: 1025131 - RNA, 19 nt, Homo sapiens
  misc_RNA (1)...(19): siRNA sense strand
gaggugguggccaucaaga

SEQ ID NO: 1025132 - RNA, 19 nt, Homo sapiens
  misc_RNA (1)...(19): siRNA sense strand
ccuaaagagcaccaagcua

SEQ ID NO: 1025133 - RNA, 19 nt, Homo sapiens
  misc_RNA (1)...(19): siRNA sense strand
gauuaagaggaacacauuc

SEQ ID NO: 1025134 - RNA, 19 nt, Homo sapiens
  misc_RNA (1)...(19): siRNA sense strand
acacauggcuuccaacuua

SEQ ID NO: 1025135 - RNA, 19 nt, Homo sapiens
  misc_RNA (1)...(19): siRNA sense strand
gugcagaucuuaacucauu

SEQ ID NO: 1025136 - RNA, 19 nt, Homo sapiens
  misc_RNA (1)...(19): siRNA sense strand
ggaagaaauuguuaacugu

SEQ ID NO: 1025137 - RNA, 19 nt, Homo sapiens
  misc_RNA (1)...(19): siRNA sense strand
guacaucacuuuggucauu

SEQ ID NO: 1025138 - RNA, 19 nt, Homo sapiens
  misc_RNA (1)...(19): siRNA sense strand
ugacagcgcugcaccuaaa

SEQ ID NO: 1025139 - RNA, 19 nt, Homo sapiens
  misc_RNA (1)...(19): siRNA sense strand
ggccauggauuacauuaaa

SEQ ID NO: 1025140 - RNA, 19 nt, Homo sapiens
  misc_RNA (1)...(19): siRNA sense strand
gaacuaggguacaaugagu

SEQ ID NO: 1025141 - RNA, 19 nt, Homo sapiens
  misc_RNA (1)...(19): siRNA sense strand
gcagauaucauuagucuuc

SEQ ID NO: 1025142 - RNA, 19 nt, Homo sapiens
  misc_RNA (1)...(19): siRNA sense strand
ccaauuacaccuuugauuu

SEQ ID NO: 1025143 - RNA, 19 nt, Homo sapiens
  misc_RNA (1)...(19): siRNA sense strand
gcaccuaaaugacaauuac

SEQ ID NO: 1025144 - RNA, 19 nt, Homo sapiens
  misc_RNA (1)...(19): siRNA sense strand
acaaacagcugcuuauagu

SEQ ID NO: 1025145 - RNA, 19 nt, Homo sapiens
  misc_RNA (1)...(19): siRNA sense strand
gagcagguaugaagccuau

SEQ ID NO: 1025146 - RNA, 19 nt, Homo sapiens
  misc_RNA (1)...(19): siRNA sense strand
gauccucgcagaauuuaua

SEQ ID NO: 1025147 - RNA, 19 nt, Homo sapiens
  misc_RNA (1)...(19): siRNA sense strand
ggaaacagagcaauacuuc

SEQ ID NO: 1025148 - RNA, 19 nt, Homo sapiens
  misc_RNA (1)...(19): siRNA sense strand
ggagguagccaaugggaaa

SEQ ID NO: 1025149 - RNA, 19 nt, Homo sapiens
  misc_RNA (1)...(19): siRNA sense strand
gaagggagaaucacacaug

SEQ ID NO: 1025150 - RNA, 19 nt, Homo sapiens
  misc_RNA (1)...(19): siRNA sense strand
gcagaagcauacaguggaa

SEQ ID NO: 1025151 - RNA, 19 nt, Homo sapiens
  misc_RNA (1)...(19): siRNA sense strand
gcguggauaugauggauuu

SEQ ID NO: 1025152 - RNA, 19 nt, Homo sapiens
  misc_RNA (1)...(19): siRNA sense strand
uauuagagguccacaaaga

SEQ ID NO: 1025153 - RNA, 19 nt, Homo sapiens
  misc_RNA (1)...(19): siRNA sense strand
guagaugguugugcaauau

SEQ ID NO: 1025154 - RNA, 19 nt, Homo sapiens
  misc_RNA (1)...(19): siRNA sense strand
uaauagggaugccaaagga

SEQ ID NO: 1025155 - RNA, 19 nt, Homo sapiens
  misc_RNA (1)...(19): siRNA sense strand
uacaaugagugucuuauga

SEQ ID NO: 1025156 - RNA, 19 nt, Homo sapiens
  misc_RNA (1)...(19): siRNA sense strand
gaaggagcguggauaugau

SEQ ID NO: 1025157 - RNA, 19 nt, Homo sapiens
  misc_RNA (1)...(19): siRNA sense strand
guuacaauguguuauguga

SEQ ID NO: 1025158 - RNA, 19 nt, Homo sapiens
  misc_RNA (1)...(19): siRNA sense strand
gagcaauacuucacucucu

SEQ ID NO: 1025159 - RNA, 19 nt, Homo sapiens
  misc_RNA (1)...(19): siRNA sense strand
gauauugccaagcuucaua

SEQ ID NO: 1025160 - RNA, 19 nt, Homo sapiens
  misc_RNA (1)...(19): siRNA sense strand
gcauuaaacugggaauaca

SEQ ID NO: 1025161 - RNA, 19 nt, Homo sapiens
  misc_RNA (1)...(19): siRNA sense strand
cauucacgguuauguguua

SEQ ID NO: 1025162 - RNA, 19 nt, Homo sapiens
  misc_RNA (1)...(19): siRNA sense strand
gggcagguguagaaauuau

SEQ ID NO: 1025163 - RNA, 19 nt, Homo sapiens
  misc_RNA (1)...(19): siRNA sense strand
gagaaagcauguagauggu

SEQ ID NO: 1025164 - RNA, 19 nt, Homo sapiens
  misc_RNA (1)...(19): siRNA sense strand
gguauuagagguccacaaa

SEQ ID NO: 1025165 - RNA, 19 nt, Homo sapiens
  misc_RNA (1)...(19): siRNA sense strand
gaacuucagcugcaaugga

SEQ ID NO: 1025166 - RNA, 19 nt, Homo sapiens
  misc_RNA (1)...(19): siRNA sense strand
ggagagaaagcauguagau

SEQ ID NO: 1025167 - RNA, 19 nt, Homo sapiens
  misc_RNA (1)...(19): siRNA sense strand
ccauaaagacuucaaggaa

SEQ ID NO: 1025168 - RNA, 19 nt, Homo sapiens
  misc_RNA (1)...(19): siRNA sense strand
ugacaaccauaaagacuuc

SEQ ID NO: 1025169 - RNA, 19 nt, Homo sapiens
  misc_RNA (1)...(19): siRNA sense strand
gcaauacuucacucucuuu

SEQ ID NO: 1025170 - RNA, 19 nt, Homo sapiens
  misc_RNA (1)...(19): siRNA sense strand
uuacaccaauuacaccuuu

SEQ ID NO: 1025171 - RNA, 19 nt, Homo sapiens
  misc_RNA (1)...(19): siRNA sense strand
ugaacagagugaugacaaa

SEQ ID NO: 1025172 - RNA, 19 nt, Homo sapiens
  misc_RNA (1)...(19): siRNA sense strand
ugaaggagcguggauauga

SEQ ID NO: 1025173 - RNA, 19 nt, Homo sapiens
  misc_RNA (1)...(19): siRNA sense strand
ggaaacauggugucucuca

SEQ ID NO: 1025174 - RNA, 19 nt, Homo sapiens
  misc_RNA (1)...(19): siRNA sense strand
ucacugggcagaauuagaa

SEQ ID NO: 1025175 - RNA, 19 nt, Homo sapiens
  misc_RNA (1)...(19): siRNA sense strand
uguagaugguugugcaaua

SEQ ID NO: 1025176 - RNA, 19 nt, Homo sapiens
  misc_RNA (1)...(19): siRNA sense strand
uggaagaaauuguuaacug

SEQ ID NO: 1025177 - RNA, 19 nt, Homo sapiens
  misc_RNA (1)...(19): siRNA sense strand
uggugucgcugugguauua

SEQ ID NO: 1025178 - RNA, 19 nt, Homo sapiens
  misc_RNA (1)...(19): siRNA sense strand
ucaaggaacuaggguacaa

SEQ ID NO: 1025179 - RNA, 19 nt, Homo sapiens
  misc_RNA (1)...(19): siRNA sense strand
cuuaagcaauggaggagua

SEQ ID NO: 1025180 - RNA, 19 nt, Homo sapiens
  misc_RNA (1)...(19): siRNA sense strand
ucagauggauccgaagcua

SEQ ID NO: 1025181 - RNA, 19 nt, Homo sapiens
  misc_RNA (1)...(19): siRNA sense strand
cuuaagagcgccuaugaaa

SEQ ID NO: 1025182 - RNA, 19 nt, Homo sapiens
  misc_RNA (1)...(19): siRNA sense strand
gaauuuauaccaucauguc

SEQ ID NO: 1025183 - RNA, 19 nt, Homo sapiens
  misc_RNA (1)...(19): siRNA sense strand
guggaauacuuaagcaaug

SEQ ID NO: 1025184 - RNA, 19 nt, Homo sapiens
  misc_RNA (1)...(19): siRNA sense strand
ccagauccucgcagaauuu

SEQ ID NO: 1025185 - RNA, 19 nt, Homo sapiens
  misc_RNA (1)...(19): siRNA sense strand
cagaggagguagccaaugg

SEQ ID NO: 1025186 - RNA, 19 nt, Homo sapiens
  misc_RNA (1)...(19): siRNA sense strand
caauuacaccuuugauuuc

SEQ ID NO: 1025187 - RNA, 19 nt, Homo sapiens
  misc_RNA (1)...(19): siRNA sense strand
gacaaacagcugcuuauag

SEQ ID NO: 1025188 - RNA, 19 nt, Homo sapiens
  misc_RNA (1)...(19): siRNA sense strand
gcagcuauauggcuauugc

SEQ ID NO: 1025189 - RNA, 19 nt, Homo sapiens
  misc_RNA (1)...(19): siRNA sense strand
gaacuucaugcuugacaau

SEQ ID NO: 1025190 - RNA, 19 nt, Homo sapiens
  misc_RNA (1)...(19): siRNA sense strand
cagcugcaauggaaagaau

SEQ ID NO: 1025191 - RNA, 19 nt, Homo sapiens
  misc_RNA (1)...(19): siRNA sense strand
caacugcagauccuaauuc

SEQ ID NO: 1025192 - RNA, 19 nt, Homo sapiens
  misc_RNA (1)...(19): siRNA sense strand
uaucauuagucuucaggaa

SEQ ID NO: 1025193 - RNA, 19 nt, Homo sapiens
  misc_RNA (1)...(19): siRNA sense strand
gaucugucauccaauaaac

SEQ ID NO: 1025194 - RNA, 19 nt, Homo sapiens
  misc_RNA (1)...(19): siRNA sense strand
cagcaucauucacgguuau

SEQ ID NO: 1025195 - RNA, 19 nt, Homo sapiens
  misc_RNA (1)...(19): siRNA sense strand
cagcagaacuaggaaacau

SEQ ID NO: 1025196 - RNA, 19 nt, Homo sapiens
  misc_RNA (1)...(19): siRNA sense strand
guacaaugagugucuuaug

SEQ ID NO: 1025197 - RNA, 19 nt, Homo sapiens
  misc_RNA (1)...(19): siRNA sense strand
ggcgauggcuaauucagau

SEQ ID NO: 1025198 - RNA, 19 nt, Homo sapiens
  misc_RNA (1)...(19): siRNA sense strand
gaagcauacaguggaauuu

SEQ ID NO: 1025199 - RNA, 19 nt, Homo sapiens
  misc_RNA (1)...(19): siRNA sense strand
ugacgcagauaucauuagu

SEQ ID NO: 1025200 - RNA, 19 nt, Homo sapiens
  misc_RNA (1)...(19): siRNA sense strand
gguuauguguuacaaugug

SEQ ID NO: 1025201 - RNA, 19 nt, Homo sapiens
  misc_RNA (1)...(19): siRNA sense strand
gaaagaauggaagcucaga

SEQ ID NO: 1025202 - RNA, 19 nt, Homo sapiens
  misc_RNA (1)...(19): siRNA sense strand
agacaaacagcugcuuaua

SEQ ID NO: 1025203 - RNA, 19 nt, Homo sapiens
  misc_RNA (1)...(19): siRNA sense strand
aagcauacaguggaauuua

SEQ ID NO: 1025204 - RNA, 19 nt, Homo sapiens
  misc_RNA (1)...(19): siRNA sense strand
cagaauuuauaccaucaug

SEQ ID NO: 1025205 - RNA, 19 nt, Homo sapiens
  misc_RNA (1)...(19): siRNA sense strand
gcagguaugaagccuauuc

SEQ ID NO: 1025206 - RNA, 19 nt, Homo sapiens
  misc_RNA (1)...(19): siRNA sense strand
uugccaagcuucauaaucu

SEQ ID NO: 1025207 - RNA, 19 nt, Homo sapiens
  misc_RNA (1)...(19): siRNA sense strand
gaguagcugacaaccauaa

SEQ ID NO: 1025208 - RNA, 19 nt, Homo sapiens
  misc_RNA (1)...(19): siRNA sense strand
gguccacaaagaacuauuu

SEQ ID NO: 1025209 - RNA, 19 nt, Homo sapiens
  misc_RNA (1)...(19): siRNA sense strand
ugucugagcaggagagaaa

SEQ ID NO: 1025210 - RNA, 19 nt, Homo sapiens
  misc_RNA (1)...(19): siRNA sense strand
ucagcaucauucacgguua

SEQ ID NO: 1025211 - RNA, 19 nt, Homo sapiens
  misc_RNA (1)...(19): siRNA sense strand
uaggaaacauggugucucu

SEQ ID NO: 1025212 - RNA, 19 nt, Homo sapiens
  misc_RNA (1)...(19): siRNA sense strand
aaacugggaauacaggaaa

SEQ ID NO: 1025213 - RNA, 19 nt, Homo sapiens
  misc_RNA (1)...(19): siRNA sense strand
gugcggagccuaaguacau

SEQ ID NO: 1025214 - RNA, 19 nt, Homo sapiens
  misc_RNA (1)...(19): siRNA sense strand
uuagaaaucucggguagag

SEQ ID NO: 1025215 - RNA, 19 nt, Homo sapiens
  misc_RNA (1)...(19): siRNA sense strand
aaucacacauggcuuccaa

SEQ ID NO: 1025216 - RNA, 19 nt, Homo sapiens
  misc_RNA (1)...(19): siRNA sense strand
aggaguagcugacaaccau

SEQ ID NO: 1025217 - RNA, 19 nt, Homo sapiens
  misc_RNA (1)...(19): siRNA sense strand
agauucagguguuguggaa

SEQ ID NO: 1025218 - RNA, 19 nt, Homo sapiens
  misc_RNA (1)...(19): siRNA sense strand
uuacauuggugcagaagca

SEQ ID NO: 1025219 - RNA, 19 nt, Homo sapiens
  misc_RNA (1)...(19): siRNA sense strand
gaaacagagcaauacuuca

SEQ ID NO: 1025220 - RNA, 19 nt, Homo sapiens
  misc_RNA (1)...(19): siRNA sense strand
acgcagauaucauuagucu

SEQ ID NO: 1025221 - RNA, 19 nt, Homo sapiens
  misc_RNA (1)...(19): siRNA sense strand
cacauggcuuccaacuuaa

SEQ ID NO: 1025222 - RNA, 19 nt, Homo sapiens
  misc_RNA (1)...(19): siRNA sense strand
ggugcuaugugcagaucuu

SEQ ID NO: 1025223 - RNA, 19 nt, Homo sapiens
  misc_RNA (1)...(19): siRNA sense strand
agcauacaguggaauuuaa

SEQ ID NO: 1025224 - RNA, 19 nt, Homo sapiens
  misc_RNA (1)...(19): siRNA sense strand
aaagggaauuauggaagaa

SEQ ID NO: 1025225 - RNA, 19 nt, Homo sapiens
  misc_RNA (1)...(19): siRNA sense strand
uugggcagguguagaaauu

SEQ ID NO: 1025226 - RNA, 19 nt, Homo sapiens
  misc_RNA (1)...(19): siRNA sense strand
uaagagcgccuaugaaaau

SEQ ID NO: 1025227 - RNA, 19 nt, Homo sapiens
  misc_RNA (1)...(19): siRNA sense strand
ggaacuaggguacaaugag

SEQ ID NO: 1025228 - RNA, 19 nt, Homo sapiens
  misc_RNA (1)...(19): siRNA sense strand
gguagagugcggagccuaa

SEQ ID NO: 1025229 - RNA, 19 nt, Homo sapiens
  misc_RNA (1)...(19): siRNA sense strand
gauccgaagcuaugcugaa

SEQ ID NO: 1025230 - RNA, 19 nt, Homo sapiens
  misc_RNA (1)...(19): siRNA sense strand
gagcguggauaugauggau

SEQ ID NO: 1025231 - RNA, 19 nt, Homo sapiens
  misc_RNA (1)...(19): siRNA sense strand
ggaaguggaaacagagcaa

SEQ ID NO: 1025232 - RNA, 19 nt, Homo sapiens
  misc_RNA (1)...(19): siRNA sense strand
acaaugagugucuuaugaa

SEQ ID NO: 1025233 - RNA, 19 nt, Homo sapiens
  misc_RNA (1)...(19): siRNA sense strand
caaugagugucuuaugaac

SEQ ID NO: 1025234 - RNA, 19 nt, Homo sapiens
  misc_RNA (1)...(19): siRNA sense strand
cagccaagcucaaccauaa

SEQ ID NO: 1025235 - RNA, 19 nt, Homo sapiens
  misc_RNA (1)...(19): siRNA sense strand
gcaagugcgugaucaugug

SEQ ID NO: 1025236 - RNA, 19 nt, Homo sapiens
  misc_RNA (1)...(19): siRNA sense strand
ggaaagagaagcucaaagg

SEQ ID NO: 1025237 - RNA, 19 nt, Homo sapiens
  misc_RNA (1)...(19): siRNA sense strand
gcacauuccgggagagcua

SEQ ID NO: 1025238 - RNA, 19 nt, Homo sapiens
  misc_RNA (1)...(19): siRNA sense strand
gggaacaagugugaugaga

SEQ ID NO: 1025239 - RNA, 19 nt, Homo sapiens
  misc_RNA (1)...(19): siRNA sense strand
caagagcucccugguguug

SEQ ID NO: 1025240 - RNA, 19 nt, Homo sapiens
  misc_RNA (1)...(19): siRNA sense strand
gcucaagcccaucuacgaa

SEQ ID NO: 1025241 - RNA, 19 nt, Homo sapiens
  misc_RNA (1)...(19): siRNA sense strand
gcucaaccauaacgugaag

SEQ ID NO: 1025242 - RNA, 19 nt, Homo sapiens
  misc_RNA (1)...(19): siRNA sense strand
ggcaagugaucagcuguga

SEQ ID NO: 1025243 - RNA, 19 nt, Homo sapiens
  misc_RNA (1)...(19): siRNA sense strand
gaccgugagucuccagauc

SEQ ID NO: 1025244 - RNA, 19 nt, Homo sapiens
  misc_RNA (1)...(19): siRNA sense strand
cugagcagaguaacgauua

SEQ ID NO: 1025245 - RNA, 19 nt, Homo sapiens
  misc_RNA (1)...(19): siRNA sense strand
gcaagcagcagaaaaggaa

SEQ ID NO: 1025246 - RNA, 19 nt, Homo sapiens
  misc_RNA (1)...(19): siRNA sense strand
ucaagcccaucuacgaaca

SEQ ID NO: 1025247 - RNA, 19 nt, Homo sapiens
  misc_RNA (1)...(19): siRNA sense strand
gcccaucuacgaacaaauc

SEQ ID NO: 1025248 - RNA, 19 nt, Homo sapiens
  misc_RNA (1)...(19): siRNA sense strand
gcaagagcucccugguguu

SEQ ID NO: 1025249 - RNA, 19 nt, Homo sapiens
  misc_RNA (1)...(19): siRNA sense strand
gguguugagguuugugaaa

SEQ ID NO: 1025250 - RNA, 19 nt, Homo sapiens
  misc_RNA (1)...(19): siRNA sense strand
aaaggcaagugcgugauca

SEQ ID NO: 1025251 - RNA, 19 nt, Homo sapiens
  misc_RNA (1)...(19): siRNA sense strand
caaaggcaagugcgugauc

SEQ ID NO: 1025252 - RNA, 19 nt, Homo sapiens
  misc_RNA (1)...(19): siRNA sense strand
caagugcgugaucauguga

SEQ ID NO: 1025253 - RNA, 19 nt, Homo sapiens
  misc_RNA (1)...(19): siRNA sense strand
ggcaagugcgugaucaugu

SEQ ID NO: 1025254 - RNA, 19 nt, Homo sapiens
  misc_RNA (1)...(19): siRNA sense strand
gcucccugguguugagguu

SEQ ID NO: 1025255 - RNA, 19 nt, Homo sapiens
  misc_RNA (1)...(19): siRNA sense strand
ucagccaagcucaaccaua

SEQ ID NO: 1025256 - RNA, 19 nt, Homo sapiens
  misc_RNA (1)...(19): siRNA sense strand
guguugagguuugugaaag

SEQ ID NO: 1025257 - RNA, 19 nt, Homo sapiens
  misc_RNA (1)...(19): siRNA sense strand
auccugguguacuccauua

SEQ ID NO: 1025258 - RNA, 19 nt, Homo sapiens
  misc_RNA (1)...(19): siRNA sense strand
aagcccaucuacgaacaaa

SEQ ID NO: 1025259 - RNA, 19 nt, Homo sapiens
  misc_RNA (1)...(19): siRNA sense strand
aaagagcaagcagcagaaa

SEQ ID NO: 1025260 - RNA, 19 nt, Homo sapiens
  misc_RNA (1)...(19): siRNA sense strand
caagauugcuuauucgaua

SEQ ID NO: 1025261 - RNA, 19 nt, Homo sapiens
  misc_RNA (1)...(19): siRNA sense strand
ccacaccucugaaauauuu

SEQ ID NO: 1025262 - RNA, 19 nt, Homo sapiens
  misc_RNA (1)...(19): siRNA sense strand
cgaguuaccucuuuaauga

SEQ ID NO: 1025263 - RNA, 19 nt, Homo sapiens
  misc_RNA (1)...(19): siRNA sense strand
caagaaaccucaugaagug

SEQ ID NO: 1025264 - RNA, 19 nt, Homo sapiens
  misc_RNA (1)...(19): siRNA sense strand
gcaacaaagucgcacuaua

SEQ ID NO: 1025265 - RNA, 19 nt, Homo sapiens
  misc_RNA (1)...(19): siRNA sense strand
caaagagcauugaagaauu

SEQ ID NO: 1025266 - RNA, 19 nt, Homo sapiens
  misc_RNA (1)...(19): siRNA sense strand
caacgaacaugucaaagga

SEQ ID NO: 1025267 - RNA, 19 nt, Homo sapiens
  misc_RNA (1)...(19): siRNA sense strand
aaaccaagauugcuuauuc

SEQ ID NO: 1025268 - RNA, 19 nt, Homo sapiens
  misc_RNA (1)...(19): siRNA sense strand
uaaagaagaucuagggaau

SEQ ID NO: 1025269 - RNA, 19 nt, Homo sapiens
  misc_RNA (1)...(19): siRNA sense strand
gaaucgaguuaccucuuua

SEQ ID NO: 1025270 - RNA, 19 nt, Homo sapiens
  misc_RNA (1)...(19): siRNA sense strand
ggaaagaauugcagacagu

SEQ ID NO: 1025271 - RNA, 19 nt, Homo sapiens
  misc_RNA (1)...(19): siRNA sense strand
cuaaagaaguaccauaaga

SEQ ID NO: 1025272 - RNA, 19 nt, Homo sapiens
  misc_RNA (1)...(19): siRNA sense strand
caacaaagucgcacuauag

SEQ ID NO: 1025273 - RNA, 19 nt, Homo sapiens
  misc_RNA (1)...(19): siRNA sense strand
gauauauccugauuguuug

SEQ ID NO: 1025274 - RNA, 19 nt, Homo sapiens
  misc_RNA (1)...(19): siRNA sense strand
ggucagaguccauugauuu

SEQ ID NO: 1025275 - RNA, 19 nt, Homo sapiens
  misc_RNA (1)...(19): siRNA sense strand
aagaagaucuagggaauaa

SEQ ID NO: 1025276 - RNA, 19 nt, Homo sapiens
  misc_RNA (1)...(19): siRNA sense strand
gaacaacccaagagcauau

SEQ ID NO: 1025277 - RNA, 19 nt, Homo sapiens
  misc_RNA (1)...(19): siRNA sense strand
ugaaagaacucuccacaac

SEQ ID NO: 1025278 - RNA, 19 nt, Homo sapiens
  misc_RNA (1)...(19): siRNA sense strand
uaucaagacuagcaacaaa

SEQ ID NO: 1025279 - RNA, 19 nt, Homo sapiens
  misc_RNA (1)...(19): siRNA sense strand
caacuaguaucgacuucaa

SEQ ID NO: 1025280 - RNA, 19 nt, Homo sapiens
  misc_RNA (1)...(19): siRNA sense strand
aaaccacaccucugaaaua

SEQ ID NO: 1025281 - RNA, 19 nt, Homo sapiens
  misc_RNA (1)...(19): siRNA sense strand
ggugguuucuccauaaauu

SEQ ID NO: 1025282 - RNA, 19 nt, Homo sapiens
  misc_RNA (1)...(19): siRNA sense strand
cagaugaaauggagacaga

SEQ ID NO: 1025283 - RNA, 19 nt, Homo sapiens
  misc_RNA (1)...(19): siRNA sense strand
gaaaccucaugaagugaaa

SEQ ID NO: 1025284 - RNA, 19 nt, Homo sapiens
  misc_RNA (1)...(19): siRNA sense strand
gguggugguuucuccauaa

SEQ ID NO: 1025285 - RNA, 19 nt, Homo sapiens
  misc_RNA (1)...(19): siRNA sense strand
caacagacaacuacaacuu

SEQ ID NO: 1025286 - RNA, 19 nt, Homo sapiens
  misc_RNA (1)...(19): siRNA sense strand
gcacaagccauauaugcaa

SEQ ID NO: 1025287 - RNA, 19 nt, Homo sapiens
  misc_RNA (1)...(19): siRNA sense strand
ugagacaaguucuuauaga

SEQ ID NO: 1025288 - RNA, 19 nt, Homo sapiens
  misc_RNA (1)...(19): siRNA sense strand
agauaaugcuuucagauga

SEQ ID NO: 1025289 - RNA, 19 nt, Homo sapiens
  misc_RNA (1)...(19): siRNA sense strand
aaagagcauugaagaauuc

SEQ ID NO: 1025290 - RNA, 19 nt, Homo sapiens
  misc_RNA (1)...(19): siRNA sense strand
gaagaucuagggaauaaca

SEQ ID NO: 1025291 - RNA, 19 nt, Homo sapiens
  misc_RNA (1)...(19): siRNA sense strand
gagagaauguguggcauca

SEQ ID NO: 1025292 - RNA, 19 nt, Homo sapiens
  misc_RNA (1)...(19): siRNA sense strand
uuugagaaguuccuacaua

SEQ ID NO: 1025293 - RNA, 19 nt, Homo sapiens
  misc_RNA (1)...(19): siRNA sense strand
caaagucgcacuauaguag

SEQ ID NO: 1025294 - RNA, 19 nt, Homo sapiens
  misc_RNA (1)...(19): siRNA sense strand
ucacaggauucaaagcaaa

SEQ ID NO: 1025295 - RNA, 19 nt, Homo sapiens
  misc_RNA (1)...(19): siRNA sense strand
ugaggaagaagaauacuaa

SEQ ID NO: 1025296 - RNA, 19 nt, Homo sapiens
  misc_RNA (1)...(19): siRNA sense strand
ccaaagagcauugaagaau

SEQ ID NO: 1025297 - RNA, 19 nt, Homo sapiens
  misc_RNA (1)...(19): siRNA sense strand
gaucuagggaauaacauuu

SEQ ID NO: 1025298 - RNA, 19 nt, Homo sapiens
  misc_RNA (1)...(19): siRNA sense strand
caaagcaaaugaacuuacu

SEQ ID NO: 1025299 - RNA, 19 nt, Homo sapiens
  misc_RNA (1)...(19): siRNA sense strand
uugagaaguuccuacauaa

SEQ ID NO: 1025300 - RNA, 19 nt, Homo sapiens
  misc_RNA (1)...(19): siRNA sense strand
agaaucgaguuaccucuuu

SEQ ID NO: 1025301 - RNA, 19 nt, Homo sapiens
  misc_RNA (1)...(19): siRNA sense strand
caacuacaacuuugaggaa

SEQ ID NO: 1025302 - RNA, 19 nt, Homo sapiens
  misc_RNA (1)...(19): siRNA sense strand
gaaacaggacuuugagaag

SEQ ID NO: 1025303 - RNA, 19 nt, Homo sapiens
  misc_RNA (1)...(19): siRNA sense strand
aaagacaauuugcaaggaa

SEQ ID NO: 1025304 - RNA, 19 nt, Homo sapiens
  misc_RNA (1)...(19): siRNA sense strand
ggagacagagaagaauaua

SEQ ID NO: 1025305 - RNA, 19 nt, Homo sapiens
  misc_RNA (1)...(19): siRNA sense strand
ccaagaaaccucaugaagu

SEQ ID NO: 1025306 - RNA, 19 nt, Homo sapiens
  misc_RNA (1)...(19): siRNA sense strand
aagcaaaggcuaccaagaa

SEQ ID NO: 1025307 - RNA, 19 nt, Homo sapiens
  misc_RNA (1)...(19): siRNA sense strand
agacagagaagaauauaga

SEQ ID NO: 1025308 - RNA, 19 nt, Homo sapiens
  misc_RNA (1)...(19): siRNA sense strand
aaagaacucuccacaacca

SEQ ID NO: 1025309 - RNA, 19 nt, Homo sapiens
  misc_RNA (1)...(19): siRNA sense strand
acagacaacuacaacuuug

SEQ ID NO: 1025310 - RNA, 19 nt, Homo sapiens
  misc_RNA (1)...(19): siRNA sense strand
gagaauguguggcaucacu

SEQ ID NO: 1025311 - RNA, 19 nt, Homo sapiens
  misc_RNA (1)...(19): siRNA sense strand
aagcugaaauugagagaga

SEQ ID NO: 1025312 - RNA, 19 nt, Homo sapiens
  misc_RNA (1)...(19): siRNA sense strand
ggaacgauauggggaauuu

SEQ ID NO: 1025313 - RNA, 19 nt, Homo sapiens
  misc_RNA (1)...(19): siRNA sense strand
caugaagcauuuccagaau

SEQ ID NO: 1025314 - RNA, 19 nt, Homo sapiens
  misc_RNA (1)...(19): siRNA sense strand
gcagacagucaagaacaua

SEQ ID NO: 1025315 - RNA, 19 nt, Homo sapiens
  misc_RNA (1)...(19): siRNA sense strand
ccucugaaauauuuaagug

SEQ ID NO: 1025316 - RNA, 19 nt, Homo sapiens
  misc_RNA (1)...(19): siRNA sense strand
caacuuugaggaagaagaa

SEQ ID NO: 1025317 - RNA, 19 nt, Homo sapiens
  misc_RNA (1)...(19): siRNA sense strand
gaaaauguuccucgaauau

SEQ ID NO: 1025318 - RNA, 19 nt, Homo sapiens
  misc_RNA (1)...(19): siRNA sense strand
ugcaugagcuggcugguau

SEQ ID NO: 1025319 - RNA, 19 nt, Homo sapiens
  misc_RNA (1)...(19): siRNA sense strand
ugaaacaggacuuugagaa

SEQ ID NO: 1025320 - RNA, 19 nt, Homo sapiens
  misc_RNA (1)...(19): siRNA sense strand
ccaugaagcauuuccagaa

SEQ ID NO: 1025321 - RNA, 19 nt, Homo sapiens
  misc_RNA (1)...(19): siRNA sense strand
gagaaguuccuacauaaac

SEQ ID NO: 1025322 - RNA, 19 nt, Homo sapiens
  misc_RNA (1)...(19): siRNA sense strand
aaccacaccucugaaauau

SEQ ID NO: 1025323 - RNA, 19 nt, Homo sapiens
  misc_RNA (1)...(19): siRNA sense strand
cuacaacuuugaggaagaa

SEQ ID NO: 1025324 - RNA, 19 nt, Homo sapiens
  misc_RNA (1)...(19): siRNA sense strand
agcaaaggcuaccaagaaa

SEQ ID NO: 1025325 - RNA, 19 nt, Homo sapiens
  misc_RNA (1)...(19): siRNA sense strand
ucaagauuaucaagacuag

SEQ ID NO: 1025326 - RNA, 19 nt, Homo sapiens
  misc_RNA (1)...(19): siRNA sense strand
aaaagcaccugcaaaauca

SEQ ID NO: 1025327 - RNA, 19 nt, Homo sapiens
  misc_RNA (1)...(19): siRNA sense strand
gguugcagcuucacaggau

SEQ ID NO: 1025328 - RNA, 19 nt, Homo sapiens
  misc_RNA (1)...(19): siRNA sense strand
ucgaauauuugaagcacuu

SEQ ID NO: 1025329 - RNA, 19 nt, Homo sapiens
  misc_RNA (1)...(19): siRNA sense strand
uagagaugaugauaaaugg

SEQ ID NO: 1025330 - RNA, 19 nt, Homo sapiens
  misc_RNA (1)...(19): siRNA sense strand
gcauaccucuaagucgaaa

SEQ ID NO: 1025331 - RNA, 19 nt, Homo sapiens
  misc_RNA (1)...(19): siRNA sense strand
gaaauggagacagagaaga

SEQ ID NO: 1025332 - RNA, 19 nt, Homo sapiens
  misc_RNA (1)...(19): siRNA sense strand
caucaucaacagacaacua

SEQ ID NO: 1025333 - RNA, 19 nt, Homo sapiens
  misc_RNA (1)...(19): siRNA sense strand
uuacucagcuacccagaca

SEQ ID NO: 1025334 - RNA, 19 nt, Homo sapiens
  misc_RNA (1)...(19): siRNA sense strand
gaauguguggcaucacuau

SEQ ID NO: 1025335 - RNA, 19 nt, Homo sapiens
  misc_RNA (1)...(19): siRNA sense strand
gcuccaacauaccgugaug

SEQ ID NO: 1025336 - RNA, 19 nt, Homo sapiens
  misc_RNA (1)...(19): siRNA sense strand
acauuuggaugcugaacaa

SEQ ID NO: 1025337 - RNA, 19 nt, Homo sapiens
  misc_RNA (1)...(19): siRNA sense strand
cagcuucacaggauucaaa

SEQ ID NO: 1025338 - RNA, 19 nt, Homo sapiens
  misc_RNA (1)...(19): siRNA sense strand
ggaggucagaguccauuga

SEQ ID NO: 1025339 - RNA, 19 nt, Homo sapiens
  misc_RNA (1)...(19): siRNA sense strand
ggccaacgaacaugucaaa

SEQ ID NO: 1025340 - RNA, 19 nt, Homo sapiens
  misc_RNA (1)...(19): siRNA sense strand
ucugagacaaguucuuaua

SEQ ID NO: 1025341 - RNA, 19 nt, Homo sapiens
  misc_RNA (1)...(19): siRNA sense strand
gaaccuccaaagagcauug

SEQ ID NO: 1025342 - RNA, 19 nt, Homo sapiens
  misc_RNA (1)...(19): siRNA sense strand
caacguuccaugaagcauu

SEQ ID NO: 1025343 - RNA, 19 nt, Homo sapiens
  misc_RNA (1)...(19): siRNA sense strand
gaugaaauggagacagaga

SEQ ID NO: 1025344 - RNA, 19 nt, Homo sapiens
  misc_RNA (1)...(19): siRNA sense strand
aaaugaacuuacucagcua

SEQ ID NO: 1025345 - RNA, 19 nt, Homo sapiens
  misc_RNA (1)...(19): siRNA sense strand
aaauggagacagagaagaa

SEQ ID NO: 1025346 - RNA, 19 nt, Homo sapiens
  misc_RNA (1)...(19): siRNA sense strand
gaaauugagagagaaugug

SEQ ID NO: 1025347 - RNA, 19 nt, Homo sapiens
  misc_RNA (1)...(19): siRNA sense strand
ugagaaguuccuacauaaa

SEQ ID NO: 1025348 - RNA, 19 nt, Homo sapiens
  misc_RNA (1)...(19): siRNA sense strand
uuaggauacuccaagcaaa

SEQ ID NO: 1025349 - RNA, 19 nt, Homo sapiens
  misc_RNA (1)...(19): siRNA sense strand
gcaaggaaccaaaaggauu

SEQ ID NO: 1025350 - RNA, 19 nt, Homo sapiens
  misc_RNA (1)...(19): siRNA sense strand
gcccauauccaaggaagaa

SEQ ID NO: 1025351 - RNA, 19 nt, Homo sapiens
  misc_RNA (1)...(19): siRNA sense strand
agacagucaagaacauaua

SEQ ID NO: 1025352 - RNA, 19 nt, Homo sapiens
  misc_RNA (1)...(19): siRNA sense strand
ucaguaaaggaaagaauug

SEQ ID NO: 1025353 - RNA, 19 nt, Homo sapiens
  misc_RNA (1)...(19): siRNA sense strand
ucuuugguguucagguuua

SEQ ID NO: 1025354 - RNA, 19 nt, Homo sapiens
  misc_RNA (1)...(19): siRNA sense strand
aaagaagaucuagggaaua

SEQ ID NO: 1025355 - RNA, 19 nt, Homo sapiens
  misc_RNA (1)...(19): siRNA sense strand
acuaguaucgacuucaaua

SEQ ID NO: 1025356 - RNA, 19 nt, Homo sapiens
  misc_RNA (1)...(19): siRNA sense strand
guggugguuucuccauaaa

SEQ ID NO: 1025357 - RNA, 19 nt, Homo sapiens
  misc_RNA (1)...(19): siRNA sense strand
aacguuccaugaagcauuu

SEQ ID NO: 1025358 - RNA, 19 nt, Homo sapiens
  misc_RNA (1)...(19): siRNA sense strand
uauaugcaacguuccauga

SEQ ID NO: 1025359 - RNA, 19 nt, Homo sapiens
  misc_RNA (1)...(19): siRNA sense strand
uggcaucacuaucgucauc

SEQ ID NO: 1025360 - RNA, 19 nt, Homo sapiens
  misc_RNA (1)...(19): siRNA sense strand
ggaaggagcucucgcuguu

SEQ ID NO: 1025361 - RNA, 19 nt, Homo sapiens
  misc_RNA (1)...(19): siRNA sense strand
uaaagaaacucuccaccuu

SEQ ID NO: 1025362 - RNA, 19 nt, Homo sapiens
  misc_RNA (1)...(19): siRNA sense strand
ucaaggagaucaagaagga

SEQ ID NO: 1025363 - RNA, 19 nt, Homo sapiens
  misc_RNA (1)...(19): siRNA sense strand
gagcaacgcaugccuguuu

SEQ ID NO: 1025364 - RNA, 19 nt, Homo sapiens
  misc_RNA (1)...(19): siRNA sense strand
aauagaagcuucacugaga

SEQ ID NO: 1025365 - RNA, 19 nt, Homo sapiens
  misc_RNA (1)...(19): siRNA sense strand
gugaagagaugaaauacug

SEQ ID NO: 1025366 - RNA, 19 nt, Homo sapiens
  misc_RNA (1)...(19): siRNA sense strand
gaugaaauacugcaagaaa

SEQ ID NO: 1025367 - RNA, 19 nt, Homo sapiens
  misc_RNA (1)...(19): siRNA sense strand
gagaugaaauacugcaaga

SEQ ID NO: 1025368 - RNA, 19 nt, Homo sapiens
  misc_RNA (1)...(19): siRNA sense strand
ggaacuggaagauguauuu

SEQ ID NO: 1025369 - RNA, 19 nt, Homo sapiens
  misc_RNA (1)...(19): siRNA sense strand
ugagggagcuguuggauag

SEQ ID NO: 1025370 - RNA, 19 nt, Homo sapiens
  misc_RNA (1)...(19): siRNA sense strand
gaucaagccucuggagaug

SEQ ID NO: 1025371 - RNA, 19 nt, Homo sapiens
  misc_RNA (1)...(19): siRNA sense strand
ggagauaucccguuucaag

SEQ ID NO: 1025372 - RNA, 19 nt, Homo sapiens
  misc_RNA (1)...(19): siRNA sense strand
ucacugagacgauuagaaa

SEQ ID NO: 1025373 - RNA, 19 nt, Homo sapiens
  misc_RNA (1)...(19): siRNA sense strand
caacauccugcguauauuu

SEQ ID NO: 1025374 - RNA, 19 nt, Homo sapiens
  misc_RNA (1)...(19): siRNA sense strand
ucaaggacgugaacaggaa

SEQ ID NO: 1025375 - RNA, 19 nt, Homo sapiens
  misc_RNA (1)...(19): siRNA sense strand
gaaauauacagcuuuggaa

SEQ ID NO: 1025376 - RNA, 19 nt, Homo sapiens
  misc_RNA (1)...(19): siRNA sense strand
ugaaagaaaucaaggaaac

SEQ ID NO: 1025377 - RNA, 19 nt, Homo sapiens
  misc_RNA (1)...(19): siRNA sense strand
ugaggcagacuuucaauaa

SEQ ID NO: 1025378 - RNA, 19 nt, Homo sapiens
  misc_RNA (1)...(19): siRNA sense strand
ggaaaucgccacuggagau

SEQ ID NO: 1025379 - RNA, 19 nt, Homo sapiens
  misc_RNA (1)...(19): siRNA sense strand
ggugugaagagaugaaaua

SEQ ID NO: 1025380 - RNA, 19 nt, Homo sapiens
  misc_RNA (1)...(19): siRNA sense strand
agucaaaucuacagcauau

SEQ ID NO: 1025381 - RNA, 19 nt, Homo sapiens
  misc_RNA (1)...(19): siRNA sense strand
uaaaggagaauaccacaga

SEQ ID NO: 1025382 - RNA, 19 nt, Homo sapiens
  misc_RNA (1)...(19): siRNA sense strand
gaaaucgccacuggagaua

SEQ ID NO: 1025383 - RNA, 19 nt, Homo sapiens
  misc_RNA (1)...(19): siRNA sense strand
acacagacuuccaugaguu

SEQ ID NO: 1025384 - RNA, 19 nt, Homo sapiens
  misc_RNA (1)...(19): siRNA sense strand
caaacuuccugguaacuca

SEQ ID NO: 1025385 - RNA, 19 nt, Homo sapiens
  misc_RNA (1)...(19): siRNA sense strand
caccugaacuccacggaaa

SEQ ID NO: 1025386 - RNA, 19 nt, Homo sapiens
  misc_RNA (1)...(19): siRNA sense strand
gagcuccaguggccauaaa

SEQ ID NO: 1025387 - RNA, 19 nt, Homo sapiens
  misc_RNA (1)...(19): siRNA sense strand
caaacggugugaagagaug

SEQ ID NO: 1025388 - RNA, 19 nt, Homo sapiens
  misc_RNA (1)...(19): siRNA sense strand
caggcgagcuuuccagaug

SEQ ID NO: 1025389 - RNA, 19 nt, Homo sapiens
  misc_RNA (1)...(19): siRNA sense strand
gcuaagaagagauaaugaa

SEQ ID NO: 1025390 - RNA, 19 nt, Homo sapiens
  misc_RNA (1)...(19): siRNA sense strand
acucaaggcuaccaaguga

SEQ ID NO: 1025391 - RNA, 19 nt, Homo sapiens
  misc_RNA (1)...(19): siRNA sense strand
ggaaucguccucugggaaa

SEQ ID NO: 1025392 - RNA, 19 nt, Homo sapiens
  misc_RNA (1)...(19): siRNA sense strand
gauccaauaucugcagguu

SEQ ID NO: 1025393 - RNA, 19 nt, Homo sapiens
  misc_RNA (1)...(19): siRNA sense strand
gaaggagcucucgcuguua

SEQ ID NO: 1025394 - RNA, 19 nt, Homo sapiens
  misc_RNA (1)...(19): siRNA sense strand
aaacuuugaggcaguauuu

SEQ ID NO: 1025395 - RNA, 19 nt, Homo sapiens
  misc_RNA (1)...(19): siRNA sense strand
acaggaagcugagugaugu

SEQ ID NO: 1025396 - RNA, 19 nt, Homo sapiens
  misc_RNA (1)...(19): siRNA sense strand
aagugaagcuugcaggauu

SEQ ID NO: 1025397 - RNA, 19 nt, Homo sapiens
  misc_RNA (1)...(19): siRNA sense strand
uccaauaucugcagguuuc

SEQ ID NO: 1025398 - RNA, 19 nt, Homo sapiens
  misc_RNA (1)...(19): siRNA sense strand
gcaagcugguggcugugaa

SEQ ID NO: 1025399 - RNA, 19 nt, Homo sapiens
  misc_RNA (1)...(19): siRNA sense strand
gaggcagacuuucaauaag

SEQ ID NO: 1025400 - RNA, 19 nt, Homo sapiens
  misc_RNA (1)...(19): siRNA sense strand
aaagacagacagagucaaa

SEQ ID NO: 1025401 - RNA, 19 nt, Homo sapiens
  misc_RNA (1)...(19): siRNA sense strand
caacaugaaagaaaucaag

SEQ ID NO: 1025402 - RNA, 19 nt, Homo sapiens
  misc_RNA (1)...(19): siRNA sense strand
ggagaucccgcaagagcaa

SEQ ID NO: 1025403 - RNA, 19 nt, Homo sapiens
  misc_RNA (1)...(19): siRNA sense strand
cugcguauauuugggauuu

SEQ ID NO: 1025404 - RNA, 19 nt, Homo sapiens
  misc_RNA (1)...(19): siRNA sense strand
ggauuugcauugaugaaac

SEQ ID NO: 1025405 - RNA, 19 nt, Homo sapiens
  misc_RNA (1)...(19): siRNA sense strand
cagaugcuaagaagagaua

SEQ ID NO: 1025406 - RNA, 19 nt, Homo sapiens
  misc_RNA (1)...(19): siRNA sense strand
ugaaauauacagcuuugga

SEQ ID NO: 1025407 - RNA, 19 nt, Homo sapiens
  misc_RNA (1)...(19): siRNA sense strand
gauuugcauugaugaaaca

SEQ ID NO: 1025408 - RNA, 19 nt, Homo sapiens
  misc_RNA (1)...(19): siRNA sense strand
gagcaaaucaaggagauca

SEQ ID NO: 1025409 - RNA, 19 nt, Homo sapiens
  misc_RNA (1)...(19): siRNA sense strand
uuucaaggcuguaauucug

SEQ ID NO: 1025410 - RNA, 19 nt, Homo sapiens
  misc_RNA (1)...(19): siRNA sense strand
ucugaaauauacagcuuug

SEQ ID NO: 1025411 - RNA, 19 nt, Homo sapiens
  misc_RNA (1)...(19): siRNA sense strand
caauagugaggcagacuuu

SEQ ID NO: 1025412 - RNA, 19 nt, Homo sapiens
  misc_RNA (1)...(19): siRNA sense strand
ccaacauccugcguauauu

SEQ ID NO: 1025413 - RNA, 19 nt, Homo sapiens
  misc_RNA (1)...(19): siRNA sense strand
ugagugaugucuggaagga

SEQ ID NO: 1025414 - RNA, 19 nt, Homo sapiens
  misc_RNA (1)...(19): siRNA sense strand
cucuguggaugaaaucuua

SEQ ID NO: 1025415 - RNA, 19 nt, Homo sapiens
  misc_RNA (1)...(19): siRNA sense strand
ugaaauacugcaagaaaca

SEQ ID NO: 1025416 - RNA, 19 nt, Homo sapiens
  misc_RNA (1)...(19): siRNA sense strand
gcucaaacuuccugguaac

SEQ ID NO: 1025417 - RNA, 19 nt, Homo sapiens
  misc_RNA (1)...(19): siRNA sense strand
gcaagcgcaugguccuagu

SEQ ID NO: 1025418 - RNA, 19 nt, Homo sapiens
  misc_RNA (1)...(19): siRNA sense strand
ggcagacuuucaauaagga

SEQ ID NO: 1025419 - RNA, 19 nt, Homo sapiens
  misc_RNA (1)...(19): siRNA sense strand
ggcaguauuuaccaccaaa

SEQ ID NO: 1025420 - RNA, 19 nt, Homo sapiens
  misc_RNA (1)...(19): siRNA sense strand
ucagcaggaugcagacgaa

SEQ ID NO: 1025421 - RNA, 19 nt, Homo sapiens
  misc_RNA (1)...(19): siRNA sense strand
caugaaagaaaucaaggaa

SEQ ID NO: 1025422 - RNA, 19 nt, Homo sapiens
  misc_RNA (1)...(19): siRNA sense strand
cccaacauccugcguauau

SEQ ID NO: 1025423 - RNA, 19 nt, Homo sapiens
  misc_RNA (1)...(19): siRNA sense strand
guucagcaauagauccaau

SEQ ID NO: 1025424 - RNA, 19 nt, Homo sapiens
  misc_RNA (1)...(19): siRNA sense strand
ggauuugaguugaggaaaa

SEQ ID NO: 1025425 - RNA, 19 nt, Homo sapiens
  misc_RNA (1)...(19): siRNA sense strand
gcaauagugaggcagacuu

SEQ ID NO: 1025426 - RNA, 19 nt, Homo sapiens
  misc_RNA (1)...(19): siRNA sense strand
caaaaugcaugcaggagau

SEQ ID NO: 1025427 - RNA, 19 nt, Homo sapiens
  misc_RNA (1)...(19): siRNA sense strand
cuucagagcugcgggagau

SEQ ID NO: 1025428 - RNA, 19 nt, Homo sapiens
  misc_RNA (1)...(19): siRNA sense strand
cuggagauaucccguuuca

SEQ ID NO: 1025429 - RNA, 19 nt, Homo sapiens
  misc_RNA (1)...(19): siRNA sense strand
cucaggaacuggaagaugu

SEQ ID NO: 1025430 - RNA, 19 nt, Homo sapiens
  misc_RNA (1)...(19): siRNA sense strand
aaacacagacuuccaugag

SEQ ID NO: 1025431 - RNA, 19 nt, Homo sapiens
  misc_RNA (1)...(19): siRNA sense strand
gcuacaccauucagaagca

SEQ ID NO: 1025432 - RNA, 19 nt, Homo sapiens
  misc_RNA (1)...(19): siRNA sense strand
ugcaggagaucccgcaaga

SEQ ID NO: 1025433 - RNA, 19 nt, Homo sapiens
  misc_RNA (1)...(19): siRNA sense strand
ggagcgugcccucugagaa

SEQ ID NO: 1025434 - RNA, 19 nt, Homo sapiens
  misc_RNA (1)...(19): siRNA sense strand
aagaaacucuccaccuuuu

SEQ ID NO: 1025435 - RNA, 19 nt, Homo sapiens
  misc_RNA (1)...(19): siRNA sense strand
gagcugcgggagaucauug

SEQ ID NO: 1025436 - RNA, 19 nt, Homo sapiens
  misc_RNA (1)...(19): siRNA sense strand
gagcgugcccucugagaag

SEQ ID NO: 1025437 - RNA, 19 nt, Homo sapiens
  misc_RNA (1)...(19): siRNA sense strand
cacuggagauaucccguuu

SEQ ID NO: 1025438 - RNA, 19 nt, Homo sapiens
  misc_RNA (1)...(19): siRNA sense strand
acagacagagucaaaucua

SEQ ID NO: 1025439 - RNA, 19 nt, Homo sapiens
  misc_RNA (1)...(19): siRNA sense strand
gugaggcagacuuucaaua

SEQ ID NO: 1025440 - RNA, 19 nt, Homo sapiens
  misc_RNA (1)...(19): siRNA sense strand
caaaucaaggagaucaaga

SEQ ID NO: 1025441 - RNA, 19 nt, Homo sapiens
  misc_RNA (1)...(19): siRNA sense strand
gaaacuuugaggcaguauu

SEQ ID NO: 1025442 - RNA, 19 nt, Homo sapiens
  misc_RNA (1)...(19): siRNA sense strand
aagcuucacugagacgauu

SEQ ID NO: 1025443 - RNA, 19 nt, Homo sapiens
  misc_RNA (1)...(19): siRNA sense strand
gaaaaguucagcaauagau

SEQ ID NO: 1025444 - RNA, 19 nt, Homo sapiens
  misc_RNA (1)...(19): siRNA sense strand
gaucaaaaccaugaagaaa

SEQ ID NO: 1025445 - RNA, 19 nt, Homo sapiens
  misc_RNA (1)...(19): siRNA sense strand
ucaagaaggagcagcuuuc

SEQ ID NO: 1025446 - RNA, 19 nt, Homo sapiens
  misc_RNA (1)...(19): siRNA sense strand
agaaaucaaggaaacuuug

SEQ ID NO: 1025447 - RNA, 19 nt, Homo sapiens
  misc_RNA (1)...(19): siRNA sense strand
gaaagaaaucaaggaaacu

SEQ ID NO: 1025448 - RNA, 19 nt, Homo sapiens
  misc_RNA (1)...(19): siRNA sense strand
uaacagcaagccaggacaa

SEQ ID NO: 1025449 - RNA, 19 nt, Homo sapiens
  misc_RNA (1)...(19): siRNA sense strand
gaaucguccucugggaaau

SEQ ID NO: 1025450 - RNA, 19 nt, Homo sapiens
  misc_RNA (1)...(19): siRNA sense strand
gagucaaaucuacagcaua

SEQ ID NO: 1025451 - RNA, 19 nt, Homo sapiens
  misc_RNA (1)...(19): siRNA sense strand
gaaaagacagacagaguca

SEQ ID NO: 1025452 - RNA, 19 nt, Homo sapiens
  misc_RNA (1)...(19): siRNA sense strand
agugaagcuugcaggauuu

SEQ ID NO: 1025453 - RNA, 19 nt, Homo sapiens
  misc_RNA (1)...(19): siRNA sense strand
gggauuugcauugaugaaa

SEQ ID NO: 1025454 - RNA, 19 nt, Homo sapiens
  misc_RNA (1)...(19): siRNA sense strand
uauuugggauuugcauuga

SEQ ID NO: 1025455 - RNA, 19 nt, Homo sapiens
  misc_RNA (1)...(19): siRNA sense strand
gcaaaucaaggagaucaag

SEQ ID NO: 1025456 - RNA, 19 nt, Homo sapiens
  misc_RNA (1)...(19): siRNA sense strand
ucaaaucuacagcauaucu

SEQ ID NO: 1025457 - RNA, 19 nt, Homo sapiens
  misc_RNA (1)...(19): siRNA sense strand
auucgaaucucccaacauc

SEQ ID NO: 1025458 - RNA, 19 nt, Homo sapiens
  misc_RNA (1)...(19): siRNA sense strand
agucagcacacuuuauaaa

SEQ ID NO: 1025459 - RNA, 19 nt, Homo sapiens
  misc_RNA (1)...(19): siRNA sense strand
uggcagcauugcaauagug

SEQ ID NO: 1025460 - RNA, 19 nt, Homo sapiens
  misc_RNA (1)...(19): siRNA sense strand
gaacugggaugacuuaugg

SEQ ID NO: 1025461 - RNA, 19 nt, Homo sapiens
  misc_RNA (1)...(19): siRNA sense strand
gcucagaucuggucaaaca

SEQ ID NO: 1025462 - RNA, 19 nt, Homo sapiens
  misc_RNA (1)...(19): siRNA sense strand
ccauauaucugcacugauu

SEQ ID NO: 1025463 - RNA, 19 nt, Homo sapiens
  misc_RNA (1)...(19): siRNA sense strand
ggaaaugucucucucaaac

SEQ ID NO: 1025464 - RNA, 19 nt, Homo sapiens
  misc_RNA (1)...(19): siRNA sense strand
ggagaaacccuacaagugu

SEQ ID NO: 1025465 - RNA, 19 nt, Homo sapiens
  misc_RNA (1)...(19): siRNA sense strand
gcucugaccuggugaaaca

SEQ ID NO: 1025466 - RNA, 19 nt, Homo sapiens
  misc_RNA (1)...(19): siRNA sense strand
gcacaggucuagggaguga

SEQ ID NO: 1025467 - RNA, 19 nt, Homo sapiens
  misc_RNA (1)...(19): siRNA sense strand
ggagaaacccuaccucugu

SEQ ID NO: 1025468 - RNA, 19 nt, Homo sapiens
  misc_RNA (1)...(19): siRNA sense strand
gagcucagaucuggucaaa

SEQ ID NO: 1025469 - RNA, 19 nt, Homo sapiens
  misc_RNA (1)...(19): siRNA sense strand
cgaaugaguuugaacauac

SEQ ID NO: 1025470 - RNA, 19 nt, Homo sapiens
  misc_RNA (1)...(19): siRNA sense strand
ugucagaucuggugaaaca

SEQ ID NO: 1025471 - RNA, 19 nt, Homo sapiens
  misc_RNA (1)...(19): siRNA sense strand
guucugaccuggugaaaca

SEQ ID NO: 1025472 - RNA, 19 nt, Homo sapiens
  misc_RNA (1)...(19): siRNA sense strand
cuacaaguguggcauaugu

SEQ ID NO: 1025473 - RNA, 19 nt, Homo sapiens
  misc_RNA (1)...(19): siRNA sense strand
gaugucagaucuggugaaa

SEQ ID NO: 1025474 - RNA, 19 nt, Homo sapiens
  misc_RNA (1)...(19): siRNA sense strand
gauccgaccuggugaagca

SEQ ID NO: 1025475 - RNA, 19 nt, Homo sapiens
  misc_RNA (1)...(19): siRNA sense strand
gagagagggucuaggaaag

SEQ ID NO: 1025476 - RNA, 19 nt, Homo sapiens
  misc_RNA (1)...(19): siRNA sense strand
ccgaaugaguuugaacaua

SEQ ID NO: 1025477 - RNA, 19 nt, Homo sapiens
  misc_RNA (1)...(19): siRNA sense strand
ggagugagaacgugauuuc

SEQ ID NO: 1025478 - RNA, 19 nt, Homo sapiens
  misc_RNA (1)...(19): siRNA sense strand
gggagaaacccuacaagug

SEQ ID NO: 1025479 - RNA, 19 nt, Homo sapiens
  misc_RNA (1)...(19): siRNA sense strand
gggagaagccauacaagug

SEQ ID NO: 1025480 - RNA, 19 nt, Homo sapiens
  misc_RNA (1)...(19): siRNA sense strand
ggagaagccauacaagugu

SEQ ID NO: 1025481 - RNA, 19 nt, Homo sapiens
  misc_RNA (1)...(19): siRNA sense strand
gugagaagcccuacaagug

SEQ ID NO: 1025482 - RNA, 19 nt, Homo sapiens
  misc_RNA (1)...(19): siRNA sense strand
aaacaccagcggacucaua

SEQ ID NO: 1025483 - RNA, 19 nt, Homo sapiens
  misc_RNA (1)...(19): siRNA sense strand
ggagagggagccacagaga

SEQ ID NO: 1025484 - RNA, 19 nt, Homo sapiens
  misc_RNA (1)...(19): siRNA sense strand
ggacacacacuggugagaa

SEQ ID NO: 1025485 - RNA, 19 nt, Homo sapiens
  misc_RNA (1)...(19): siRNA sense strand
guucaaggaagaagauuug

SEQ ID NO: 1025486 - RNA, 19 nt, Homo sapiens
  misc_RNA (1)...(19): siRNA sense strand
ccagagagagggucuagga

SEQ ID NO: 1025487 - RNA, 19 nt, Homo sapiens
  misc_RNA (1)...(19): siRNA sense strand
uaggaaaugucucucucaa

SEQ ID NO: 1025488 - RNA, 19 nt, Homo sapiens
  misc_RNA (1)...(19): siRNA sense strand
gcugugauguguguggaaa

SEQ ID NO: 1025489 - RNA, 19 nt, Homo sapiens
  misc_RNA (1)...(19): siRNA sense strand
ggcuccagaucaugaagua

SEQ ID NO: 1025490 - RNA, 19 nt, Homo sapiens
  misc_RNA (1)...(19): siRNA sense strand
aaacacaggcguacacaca

SEQ ID NO: 1025491 - RNA, 19 nt, Homo sapiens
  misc_RNA (1)...(19): siRNA sense strand
gaucaugaaguaggaaaug

SEQ ID NO: 1025492 - RNA, 19 nt, Homo sapiens
  misc_RNA (1)...(19): siRNA sense strand
auacaagugugcagagugu

SEQ ID NO: 1025493 - RNA, 19 nt, Homo sapiens
  misc_RNA (1)...(19): siRNA sense strand
gacacacacuggugagaag

SEQ ID NO: 1025494 - RNA, 19 nt, Homo sapiens
  misc_RNA (1)...(19): siRNA sense strand
gaagaugacuugggguuca

SEQ ID NO: 1025495 - RNA, 19 nt, Homo sapiens
  misc_RNA (1)...(19): siRNA sense strand
ugagaagcccuacaagugu

SEQ ID NO: 1025496 - RNA, 19 nt, Homo sapiens
  misc_RNA (1)...(19): siRNA sense strand
gcccaggacaagccauaua

SEQ ID NO: 1025497 - RNA, 19 nt, Homo sapiens
  misc_RNA (1)...(19): siRNA sense strand
agagagagggucuaggaaa

SEQ ID NO: 1025498 - RNA, 19 nt, Homo sapiens
  misc_RNA (1)...(19): siRNA sense strand
ccacaagugcccugagugu

SEQ ID NO: 1025499 - RNA, 19 nt, Homo sapiens
  misc_RNA (1)...(19): siRNA sense strand
gcugcagccuccugaguca

SEQ ID NO: 1025500 - RNA, 19 nt, Homo sapiens
  misc_RNA (1)...(19): siRNA sense strand
gaccgaaggcccaggacaa

SEQ ID NO: 1025501 - RNA, 19 nt, Homo sapiens
  misc_RNA (1)...(19): siRNA sense strand
gaggagagggagccacaga

SEQ ID NO: 1025502 - RNA, 19 nt, Homo sapiens
  misc_RNA (1)...(19): siRNA sense strand
cagaucuggugaaacauca

SEQ ID NO: 1025503 - RNA, 19 nt, Homo sapiens
  misc_RNA (1)...(19): siRNA sense strand
ugacuuauggguccagaga

SEQ ID NO: 1025504 - RNA, 19 nt, Homo sapiens
  misc_RNA (1)...(19): siRNA sense strand
gaagauuuggcuccagauc

SEQ ID NO: 1025505 - RNA, 19 nt, Homo sapiens
  misc_RNA (1)...(19): siRNA sense strand
ggcaagggcuuuggggaua

SEQ ID NO: 1025506 - RNA, 19 nt, Homo sapiens
  misc_RNA (1)...(19): siRNA sense strand
gaaugcgaccguaccuuca

SEQ ID NO: 1025507 - RNA, 19 nt, Homo sapiens
  misc_RNA (1)...(19): siRNA sense strand
cacuaucuguggugaaugu

SEQ ID NO: 1025508 - RNA, 19 nt, Homo sapiens
  misc_RNA (1)...(19): siRNA sense strand
ggugagaagcccuacaagu

SEQ ID NO: 1025509 - RNA, 19 nt, Homo sapiens
  misc_RNA (1)...(19): siRNA sense strand
ccagagugcggcaaagguu

SEQ ID NO: 1025510 - RNA, 19 nt, Homo sapiens
  misc_RNA (1)...(19): siRNA sense strand
ugauuucucagccgaauga

SEQ ID NO: 1025511 - RNA, 19 nt, Homo sapiens
  misc_RNA (1)...(19): siRNA sense strand
caagggcuuuggcgacagu

SEQ ID NO: 1025512 - RNA, 19 nt, Homo sapiens
  misc_RNA (1)...(19): siRNA sense strand
agauuuggcuccagaucau

SEQ ID NO: 1025513 - RNA, 19 nt, Homo sapiens
  misc_RNA (1)...(19): siRNA sense strand
agccauauaucugcacuga

SEQ ID NO: 1025514 - RNA, 19 nt, Homo sapiens
  misc_RNA (1)...(19): siRNA sense strand
gggccaggcuaguagugau

SEQ ID NO: 1025515 - RNA, 19 nt, Homo sapiens
  misc_RNA (1)...(19): siRNA sense strand
gcucugcccggaucaaaca

SEQ ID NO: 1025516 - RNA, 19 nt, Homo sapiens
  misc_RNA (1)...(19): siRNA sense strand
guaggaaaugucucucuca

SEQ ID NO: 1025517 - RNA, 19 nt, Homo sapiens
  misc_RNA (1)...(19): siRNA sense strand
cagcucagcccgagucaag

SEQ ID NO: 1025518 - RNA, 19 nt, Homo sapiens
  misc_RNA (1)...(19): siRNA sense strand
cugaaggcauccagaacug

SEQ ID NO: 1025519 - RNA, 19 nt, Homo sapiens
  misc_RNA (1)...(19): siRNA sense strand
ccugacgcccuuugggaua

SEQ ID NO: 1025520 - RNA, 19 nt, Homo sapiens
  misc_RNA (1)...(19): siRNA sense strand
gaaugaguuugaacauacc

SEQ ID NO: 1025521 - RNA, 19 nt, Homo sapiens
  misc_RNA (1)...(19): siRNA sense strand
gguucaaggaagaagauuu

SEQ ID NO: 1025522 - RNA, 19 nt, Homo sapiens
  misc_RNA (1)...(19): siRNA sense strand
acuuauggguccagagaga

SEQ ID NO: 1025523 - RNA, 19 nt, Homo sapiens
  misc_RNA (1)...(19): siRNA sense strand
gcccuacaaguguggcaua

SEQ ID NO: 1025524 - RNA, 19 nt, Homo sapiens
  misc_RNA (1)...(19): siRNA sense strand
ugaaguaggaaaugucucu

SEQ ID NO: 1025525 - RNA, 19 nt, Homo sapiens
  misc_RNA (1)...(19): siRNA sense strand
gaagcucugaccuggugaa

SEQ ID NO: 1025526 - RNA, 19 nt, Homo sapiens
  misc_RNA (1)...(19): siRNA sense strand
caggacaagccauauaucu

SEQ ID NO: 1025527 - RNA, 19 nt, Homo sapiens
  misc_RNA (1)...(19): siRNA sense strand
aaaugucucucucaaaccu

SEQ ID NO: 1025528 - RNA, 19 nt, Homo sapiens
  misc_RNA (1)...(19): siRNA sense strand
gcuuccggcugaguucuga

SEQ ID NO: 1025529 - RNA, 19 nt, Homo sapiens
  misc_RNA (1)...(19): siRNA sense strand
gcagcaacaggacuggaau

SEQ ID NO: 1025530 - RNA, 19 nt, Homo sapiens
  misc_RNA (1)...(19): siRNA sense strand
cagaguguggcaaggguuu

SEQ ID NO: 1025531 - RNA, 19 nt, Homo sapiens
  misc_RNA (1)...(19): siRNA sense strand
cagagugcggcaaagguuu

SEQ ID NO: 1025532 - RNA, 19 nt, Homo sapiens
  misc_RNA (1)...(19): siRNA sense strand
ucaaacaccagcggacuca

SEQ ID NO: 1025533 - RNA, 19 nt, Homo sapiens
  misc_RNA (1)...(19): siRNA sense strand
ccauacaagugugcagagu

SEQ ID NO: 1025534 - RNA, 19 nt, Homo sapiens
  misc_RNA (1)...(19): siRNA sense strand
cuaccucuguccugaaugc

SEQ ID NO: 1025535 - RNA, 19 nt, Homo sapiens
  misc_RNA (1)...(19): siRNA sense strand
ggcagcaacaggacuggaa

SEQ ID NO: 1025536 - RNA, 19 nt, Homo sapiens
  misc_RNA (1)...(19): siRNA sense strand
gaauggaggucaacuauau

SEQ ID NO: 1025537 - RNA, 19 nt, Homo sapiens
  misc_RNA (1)...(19): siRNA sense strand
gaaggaacuugcagaaauc

SEQ ID NO: 1025538 - RNA, 19 nt, Homo sapiens
  misc_RNA (1)...(19): siRNA sense strand
gcaagaaccagaaagagaa

SEQ ID NO: 1025539 - RNA, 19 nt, Homo sapiens
  misc_RNA (1)...(19): siRNA sense strand
caaaaccgcugcuaaauug

SEQ ID NO: 1025540 - RNA, 19 nt, Homo sapiens
  misc_RNA (1)...(19): siRNA sense strand
acaagaaucuaucacugua

SEQ ID NO: 1025541 - RNA, 19 nt, Homo sapiens
  misc_RNA (1)...(19): siRNA sense strand
agaaggaacuugcagaaau

SEQ ID NO: 1025542 - RNA, 19 nt, Homo sapiens
  misc_RNA (1)...(19): siRNA sense strand
ccaaaggagacaacauuua

SEQ ID NO: 1025543 - RNA, 19 nt, Homo sapiens
  misc_RNA (1)...(19): siRNA sense strand
caaaggagacaacauuuau

SEQ ID NO: 1025544 - RNA, 19 nt, Homo sapiens
  misc_RNA (1)...(19): siRNA sense strand
caacuggaguccggcuuua

SEQ ID NO: 1025545 - RNA, 19 nt, Homo sapiens
  misc_RNA (1)...(19): siRNA sense strand
gcugcuaaauugucaacua

SEQ ID NO: 1025546 - RNA, 19 nt, Homo sapiens
  misc_RNA (1)...(19): siRNA sense strand
ucaccagacuauccguuua

SEQ ID NO: 1025547 - RNA, 19 nt, Homo sapiens
  misc_RNA (1)...(19): siRNA sense strand
gcucacuucuuacagauug

SEQ ID NO: 1025548 - RNA, 19 nt, Homo sapiens
  misc_RNA (1)...(19): siRNA sense strand
ggagacaacauuuaugaau

SEQ ID NO: 1025549 - RNA, 19 nt, Homo sapiens
  misc_RNA (1)...(19): siRNA sense strand
acaaagaguugaugacagu

SEQ ID NO: 1025550 - RNA, 19 nt, Homo sapiens
  misc_RNA (1)...(19): siRNA sense strand
gcuaaauugucaacuagug

SEQ ID NO: 1025551 - RNA, 19 nt, Homo sapiens
  misc_RNA (1)...(19): siRNA sense strand
gcacaaagaguugaugaca

SEQ ID NO: 1025552 - RNA, 19 nt, Homo sapiens
  misc_RNA (1)...(19): siRNA sense strand
cgauggagaucaacgugaa

SEQ ID NO: 1025553 - RNA, 19 nt, Homo sapiens
  misc_RNA (1)...(19): siRNA sense strand
cccaggaucugucuaugaa

SEQ ID NO: 1025554 - RNA, 19 nt, Homo sapiens
  misc_RNA (1)...(19): siRNA sense strand
gguguucuuucuugacauu

SEQ ID NO: 1025555 - RNA, 19 nt, Homo sapiens
  misc_RNA (1)...(19): siRNA sense strand
gaugacaguccaagcacua

SEQ ID NO: 1025556 - RNA, 19 nt, Homo sapiens
  misc_RNA (1)...(19): siRNA sense strand
uccaucugcucacuucuua

SEQ ID NO: 1025557 - RNA, 19 nt, Homo sapiens
  misc_RNA (1)...(19): siRNA sense strand
ggaguccggcuuuaacuau

SEQ ID NO: 1025558 - RNA, 19 nt, Homo sapiens
  misc_RNA (1)...(19): siRNA sense strand
gagaucaacgugaaagugu

SEQ ID NO: 1025559 - RNA, 19 nt, Homo sapiens
  misc_RNA (1)...(19): siRNA sense strand
gaguccggcuuuaacuauu

SEQ ID NO: 1025560 - RNA, 19 nt, Homo sapiens
  misc_RNA (1)...(19): siRNA sense strand
gcaaaaccgcugcuaaauu

SEQ ID NO: 1025561 - RNA, 19 nt, Homo sapiens
  misc_RNA (1)...(19): siRNA sense strand
ggagaucaacgugaaagug

SEQ ID NO: 1025562 - RNA, 19 nt, Homo sapiens
  misc_RNA (1)...(19): siRNA sense strand
cuaaaguucuccucuccau

SEQ ID NO: 1025563 - RNA, 19 nt, Homo sapiens
  misc_RNA (1)...(19): siRNA sense strand
caagaaucuaucacuguaa

SEQ ID NO: 1025564 - RNA, 19 nt, Homo sapiens
  misc_RNA (1)...(19): siRNA sense strand
ugaauggaggucaacuaua

SEQ ID NO: 1025565 - RNA, 19 nt, Homo sapiens
  misc_RNA (1)...(19): siRNA sense strand
aaggagacaacauuuauga

SEQ ID NO: 1025566 - RNA, 19 nt, Homo sapiens
  misc_RNA (1)...(19): siRNA sense strand
ggacccuccucccaacugu

SEQ ID NO: 1025567 - RNA, 19 nt, Homo sapiens
  misc_RNA (1)...(19): siRNA sense strand
uugcagaaaucacauugga

SEQ ID NO: 1025568 - RNA, 19 nt, Homo sapiens
  misc_RNA (1)...(19): siRNA sense strand
ggagggguguucuuucuug

SEQ ID NO: 1025569 - RNA, 19 nt, Homo sapiens
  misc_RNA (1)...(19): siRNA sense strand
ggaacuugcagaaaucaca

SEQ ID NO: 1025570 - RNA, 19 nt, Homo sapiens
  misc_RNA (1)...(19): siRNA sense strand
gccaaggugugaucugucu

SEQ ID NO: 1025571 - RNA, 19 nt, Homo sapiens
  misc_RNA (1)...(19): siRNA sense strand
cagccaaggugugaucugu

SEQ ID NO: 1025572 - RNA, 19 nt, Homo sapiens
  misc_RNA (1)...(19): siRNA sense strand
gaucaacgugaaaguguuc

SEQ ID NO: 1025573 - RNA, 19 nt, Homo sapiens
  misc_RNA (1)...(19): siRNA sense strand
ucagaaggaacuugcagaa

SEQ ID NO: 1025574 - RNA, 19 nt, Homo sapiens
  misc_RNA (1)...(19): siRNA sense strand
ccacugaggcacaaagagu

SEQ ID NO: 1025575 - RNA, 19 nt, Homo sapiens
  misc_RNA (1)...(19): siRNA sense strand
caacagagcagagcaugac

SEQ ID NO: 1025576 - RNA, 19 nt, Homo sapiens
  misc_RNA (1)...(19): siRNA sense strand
caccagacuauccguuuaa

SEQ ID NO: 1025577 - RNA, 19 nt, Homo sapiens
  misc_RNA (1)...(19): siRNA sense strand
cuaaaagaauucagaagga

SEQ ID NO: 1025578 - RNA, 19 nt, Homo sapiens
  misc_RNA (1)...(19): siRNA sense strand
ucagcaagaaccagaaaga

SEQ ID NO: 1025579 - RNA, 19 nt, Homo sapiens
  misc_RNA (1)...(19): siRNA sense strand
cugcuaaauugucaacuag

SEQ ID NO: 1025580 - RNA, 19 nt, Homo sapiens
  misc_RNA (1)...(19): siRNA sense strand
aguccggcuuuaacuauuu

SEQ ID NO: 1025581 - RNA, 19 nt, Homo sapiens
  misc_RNA (1)...(19): siRNA sense strand
gaacuugcagaaaucacau

SEQ ID NO: 1025582 - RNA, 19 nt, Homo sapiens
  misc_RNA (1)...(19): siRNA sense strand
cagaaggaacuugcagaaa

SEQ ID NO: 1025583 - RNA, 19 nt, Homo sapiens
  misc_RNA (1)...(19): siRNA sense strand
uaacagccaaggugugauc

SEQ ID NO: 1025584 - RNA, 19 nt, Homo sapiens
  misc_RNA (1)...(19): siRNA sense strand
ccacacaguacaugaccaa

SEQ ID NO: 1025585 - RNA, 19 nt, Homo sapiens
  misc_RNA (1)...(19): siRNA sense strand
cggcuuuaacuauuucuaa

SEQ ID NO: 1025586 - RNA, 19 nt, Homo sapiens
  misc_RNA (1)...(19): siRNA sense strand
cagcaucgccacacaguac

SEQ ID NO: 1025587 - RNA, 19 nt, Homo sapiens
  misc_RNA (1)...(19): siRNA sense strand
ccaagcgguacgccacaua

SEQ ID NO: 1025588 - RNA, 19 nt, Homo sapiens
  misc_RNA (1)...(19): siRNA sense strand
cacaguacaugaccaacag

SEQ ID NO: 1025589 - RNA, 19 nt, Homo sapiens
  misc_RNA (1)...(19): siRNA sense strand
gucuggacaucuuaaagga

SEQ ID NO: 1025590 - RNA, 19 nt, Homo sapiens
  misc_RNA (1)...(19): siRNA sense strand
gaaguuccgauggagauca

SEQ ID NO: 1025591 - RNA, 19 nt, Homo sapiens
  misc_RNA (1)...(19): siRNA sense strand
gcagcaucgccacacagua

SEQ ID NO: 1025592 - RNA, 19 nt, Homo sapiens
  misc_RNA (1)...(19): siRNA sense strand
aaaguucuccucuccaucu

SEQ ID NO: 1025593 - RNA, 19 nt, Homo sapiens
  misc_RNA (1)...(19): siRNA sense strand
gauggagaucaacgugaaa

SEQ ID NO: 1025594 - RNA, 19 nt, Homo sapiens
  misc_RNA (1)...(19): siRNA sense strand
cccaaaggagacaacauuu

SEQ ID NO: 1025595 - RNA, 19 nt, Homo sapiens
  misc_RNA (1)...(19): siRNA sense strand
cgaacaagaaucuaucacu

SEQ ID NO: 1025596 - RNA, 19 nt, Homo sapiens
  misc_RNA (1)...(19): siRNA sense strand
agaucaacgugaaaguguu

SEQ ID NO: 1025597 - RNA, 19 nt, Homo sapiens
  misc_RNA (1)...(19): siRNA sense strand
uaugaauggaggucaacua

SEQ ID NO: 1025598 - RNA, 19 nt, Homo sapiens
  misc_RNA (1)...(19): siRNA sense strand
aaaggagacaacauuuaug

SEQ ID NO: 1025599 - RNA, 19 nt, Homo sapiens
  misc_RNA (1)...(19): siRNA sense strand
cuguagugcuggacccaaa

SEQ ID NO: 1025600 - RNA, 19 nt, Homo sapiens
  misc_RNA (1)...(19): siRNA sense strand
caucugcucacuucuuaca

SEQ ID NO: 1025601 - RNA, 19 nt, Homo sapiens
  misc_RNA (1)...(19): siRNA sense strand
acccaaaggagacaacauu

SEQ ID NO: 1025602 - RNA, 19 nt, Homo sapiens
  misc_RNA (1)...(19): siRNA sense strand
ccaacagagcagagcauga

SEQ ID NO: 1025603 - RNA, 19 nt, Homo sapiens
  misc_RNA (1)...(19): siRNA sense strand
gacaguccaagcacuagug

SEQ ID NO: 1025604 - RNA, 19 nt, Homo sapiens
  misc_RNA (1)...(19): siRNA sense strand
gaaccagaaagagaacaag

SEQ ID NO: 1025605 - RNA, 19 nt, Homo sapiens
  misc_RNA (1)...(19): siRNA sense strand
caacuagugcuaaaagaau

SEQ ID NO: 1025606 - RNA, 19 nt, Homo sapiens
  misc_RNA (1)...(19): siRNA sense strand
gaaaucaucugugcuuugg

SEQ ID NO: 1025607 - RNA, 19 nt, Homo sapiens
  misc_RNA (1)...(19): siRNA sense strand
ggucauugcuccucucucu

SEQ ID NO: 1025608 - RNA, 19 nt, Homo sapiens
  misc_RNA (1)...(19): siRNA sense strand
caucugugcuuuggucauu

SEQ ID NO: 1025609 - RNA, 19 nt, Homo sapiens
  misc_RNA (1)...(19): siRNA sense strand
ggccagcuauccacucuuc

SEQ ID NO: 1025610 - RNA, 19 nt, Homo sapiens
  misc_RNA (1)...(19): siRNA sense strand
acucuucugugccugcuua

SEQ ID NO: 1025611 - RNA, 19 nt, Homo sapiens
  misc_RNA (1)...(19): siRNA sense strand
cgagguggcugcugugacu

SEQ ID NO: 1025612 - RNA, 19 nt, Homo sapiens
  misc_RNA (1)...(19): siRNA sense strand
cgaaaucaucugugcuuug

SEQ ID NO: 1025613 - RNA, 19 nt, Homo sapiens
  misc_RNA (1)...(19): siRNA sense strand
gccauacgccuccgaaauc

SEQ ID NO: 1025614 - RNA, 19 nt, Homo sapiens
  misc_RNA (1)...(19): siRNA sense strand
ccacuaguccugugcaaca

SEQ ID NO: 1025615 - RNA, 19 nt, Homo sapiens
  misc_RNA (1)...(19): siRNA sense strand
ccauacgccuccgaaauca

SEQ ID NO: 1025616 - RNA, 19 nt, Homo sapiens
  misc_RNA (1)...(19): siRNA sense strand
ccgaaaucaucugugcuuu

SEQ ID NO: 1025617 - RNA, 19 nt, Homo sapiens
  misc_RNA (1)...(19): siRNA sense strand
gcccuucguucagguguuc

SEQ ID NO: 1025618 - RNA, 19 nt, Homo sapiens
  misc_RNA (1)...(19): siRNA sense strand
cgucgacgggugaagauau

SEQ ID NO: 1025619 - RNA, 19 nt, Homo sapiens
  misc_RNA (1)...(19): siRNA sense strand
gucgacgggugaagauauc

SEQ ID NO: 1025620 - RNA, 19 nt, Homo sapiens
  misc_RNA (1)...(19): siRNA sense strand
gcaaugagauguugguaaa

SEQ ID NO: 1025621 - RNA, 19 nt, Homo sapiens
  misc_RNA (1)...(19): siRNA sense strand
ggguuuaucuacacuauua

SEQ ID NO: 1025622 - RNA, 19 nt, Homo sapiens
  misc_RNA (1)...(19): siRNA sense strand
aaacagggcuuccguguga

SEQ ID NO: 1025623 - RNA, 19 nt, Homo sapiens
  misc_RNA (1)...(19): siRNA sense strand
ggaaggccgugcugcuuua

SEQ ID NO: 1025624 - RNA, 19 nt, Homo sapiens
  misc_RNA (1)...(19): siRNA sense strand
cuacagagaugccuacuug

SEQ ID NO: 1025625 - RNA, 19 nt, Homo sapiens
  misc_RNA (1)...(19): siRNA sense strand
caaguaugcucguguuauu

SEQ ID NO: 1025626 - RNA, 19 nt, Homo sapiens
  misc_RNA (1)...(19): siRNA sense strand
ggaagaagcaacugaagaa

SEQ ID NO: 1025627 - RNA, 19 nt, Homo sapiens
  misc_RNA (1)...(19): siRNA sense strand
uaucaguccucaaagaaua

SEQ ID NO: 1025628 - RNA, 19 nt, Homo sapiens
  misc_RNA (1)...(19): siRNA sense strand
gaacaggauuuaguacuuc

SEQ ID NO: 1025629 - RNA, 19 nt, Homo sapiens
  misc_RNA (1)...(19): siRNA sense strand
ggacagcucaaucuuguuu

SEQ ID NO: 1025630 - RNA, 19 nt, Homo sapiens
  misc_RNA (1)...(19): siRNA sense strand
ugacaagacuggaacucua

SEQ ID NO: 1025631 - RNA, 19 nt, Homo sapiens
  misc_RNA (1)...(19): siRNA sense strand
agaagcaacugaagaagaa

SEQ ID NO: 1025632 - RNA, 19 nt, Homo sapiens
  misc_RNA (1)...(19): siRNA sense strand
ggccagagauuguggaaug

SEQ ID NO: 1025633 - RNA, 19 nt, Homo sapiens
  misc_RNA (1)...(19): siRNA sense strand
gagaugcaauugagaacaa

SEQ ID NO: 1025634 - RNA, 19 nt, Homo sapiens
  misc_RNA (1)...(19): siRNA sense strand
gaaaaugugugcaaugaga

SEQ ID NO: 1025635 - RNA, 19 nt, Homo sapiens
  misc_RNA (1)...(19): siRNA sense strand
aaacagcacuucauaaucg

SEQ ID NO: 1025636 - RNA, 19 nt, Homo sapiens
  misc_RNA (1)...(19): siRNA sense strand
aggaauaggagaucaauua

SEQ ID NO: 1025637 - RNA, 19 nt, Homo sapiens
  misc_RNA (1)...(19): siRNA sense strand
aaacugacauggcauaaag

SEQ ID NO: 1025638 - RNA, 19 nt, Homo sapiens
  misc_RNA (1)...(19): siRNA sense strand
ggagaaaguguuccaguga

SEQ ID NO: 1025639 - RNA, 19 nt, Homo sapiens
  misc_RNA (1)...(19): siRNA sense strand
gugaugcugugcuuauuaa

SEQ ID NO: 1025640 - RNA, 19 nt, Homo sapiens
  misc_RNA (1)...(19): siRNA sense strand
ucagugauuuccacaauug

SEQ ID NO: 1025641 - RNA, 19 nt, Homo sapiens
  misc_RNA (1)...(19): siRNA sense strand
ggcauaaaguacagaauau

SEQ ID NO: 1025642 - RNA, 19 nt, Homo sapiens
  misc_RNA (1)...(19): siRNA sense strand
cuuauucucuggaucauuu

SEQ ID NO: 1025643 - RNA, 19 nt, Homo sapiens
  misc_RNA (1)...(19): siRNA sense strand
gcagugcagucauccauca

SEQ ID NO: 1025644 - RNA, 19 nt, Homo sapiens
  misc_RNA (1)...(19): siRNA sense strand
ggaaacacauaaacgacau

SEQ ID NO: 1025645 - RNA, 19 nt, Homo sapiens
  misc_RNA (1)...(19): siRNA sense strand
ucaguggcaucucccuuua

SEQ ID NO: 1025646 - RNA, 19 nt, Homo sapiens
  misc_RNA (1)...(19): siRNA sense strand
gcagagaugcaauugagaa

SEQ ID NO: 1025647 - RNA, 19 nt, Homo sapiens
  misc_RNA (1)...(19): siRNA sense strand
gaaacagcacuucauaauc

SEQ ID NO: 1025648 - RNA, 19 nt, Homo sapiens
  misc_RNA (1)...(19): siRNA sense strand
gaucagaagacacaguuga

SEQ ID NO: 1025649 - RNA, 19 nt, Homo sapiens
  misc_RNA (1)...(19): siRNA sense strand
ggaauaggagaucaauuau

SEQ ID NO: 1025650 - RNA, 19 nt, Homo sapiens
  misc_RNA (1)...(19): siRNA sense strand
gaacuuccagcuacuuaug

SEQ ID NO: 1025651 - RNA, 19 nt, Homo sapiens
  misc_RNA (1)...(19): siRNA sense strand
ucgagucucuugauauuau

SEQ ID NO: 1025652 - RNA, 19 nt, Homo sapiens
  misc_RNA (1)...(19): siRNA sense strand
cagaggcuauuccgguuaa

SEQ ID NO: 1025653 - RNA, 19 nt, Homo sapiens
  misc_RNA (1)...(19): siRNA sense strand
cugcaguacuugaagauuu

SEQ ID NO: 1025654 - RNA, 19 nt, Homo sapiens
  misc_RNA (1)...(19): siRNA sense strand
gcucaaucuuguuugcuuu

SEQ ID NO: 1025655 - RNA, 19 nt, Homo sapiens
  misc_RNA (1)...(19): siRNA sense strand
guggacagcucaaucuugu

SEQ ID NO: 1025656 - RNA, 19 nt, Homo sapiens
  misc_RNA (1)...(19): siRNA sense strand
gcaaaugauuguggugcuu

SEQ ID NO: 1025657 - RNA, 19 nt, Homo sapiens
  misc_RNA (1)...(19): siRNA sense strand
ggugauggcgcaaaugauu

SEQ ID NO: 1025658 - RNA, 19 nt, Homo sapiens
  misc_RNA (1)...(19): siRNA sense strand
gauucuaccucaggauaaa

SEQ ID NO: 1025659 - RNA, 19 nt, Homo sapiens
  misc_RNA (1)...(19): siRNA sense strand
uagcagagaugcaauugag

SEQ ID NO: 1025660 - RNA, 19 nt, Homo sapiens
  misc_RNA (1)...(19): siRNA sense strand
gaaaggaauaggagaucaa

SEQ ID NO: 1025661 - RNA, 19 nt, Homo sapiens
  misc_RNA (1)...(19): siRNA sense strand
gcaucucccuuuaccucua

SEQ ID NO: 1025662 - RNA, 19 nt, Homo sapiens
  misc_RNA (1)...(19): siRNA sense strand
acacggaggcauuuccuua

SEQ ID NO: 1025663 - RNA, 19 nt, Homo sapiens
  misc_RNA (1)...(19): siRNA sense strand
gaagacacaguugauagaa

SEQ ID NO: 1025664 - RNA, 19 nt, Homo sapiens
  misc_RNA (1)...(19): siRNA sense strand
ggaaaaucauucucaguga

SEQ ID NO: 1025665 - RNA, 19 nt, Homo sapiens
  misc_RNA (1)...(19): siRNA sense strand
gacuggaacucuaacugaa

SEQ ID NO: 1025666 - RNA, 19 nt, Homo sapiens
  misc_RNA (1)...(19): siRNA sense strand
cagagaugccuacuuguuu

SEQ ID NO: 1025667 - RNA, 19 nt, Homo sapiens
  misc_RNA (1)...(19): siRNA sense strand
guuagaacaggauuuagua

SEQ ID NO: 1025668 - RNA, 19 nt, Homo sapiens
  misc_RNA (1)...(19): siRNA sense strand
acacauaaacgacauacuu

SEQ ID NO: 1025669 - RNA, 19 nt, Homo sapiens
  misc_RNA (1)...(19): siRNA sense strand
aaauggagcuguuugaacu

SEQ ID NO: 1025670 - RNA, 19 nt, Homo sapiens
  misc_RNA (1)...(19): siRNA sense strand
gacaagacuggaacucuaa

SEQ ID NO: 1025671 - RNA, 19 nt, Homo sapiens
  misc_RNA (1)...(19): siRNA sense strand
agaacaggauuuaguacuu

SEQ ID NO: 1025672 - RNA, 19 nt, Homo sapiens
  misc_RNA (1)...(19): siRNA sense strand
cgucaaagccauaguuguu

SEQ ID NO: 1025673 - RNA, 19 nt, Homo sapiens
  misc_RNA (1)...(19): siRNA sense strand
ucuaagacuccuaguauuu

SEQ ID NO: 1025674 - RNA, 19 nt, Homo sapiens
  misc_RNA (1)...(19): siRNA sense strand
uuaaauugguccaugauag

SEQ ID NO: 1025675 - RNA, 19 nt, Homo sapiens
  misc_RNA (1)...(19): siRNA sense strand
gaaacacauaaacgacaua

SEQ ID NO: 1025676 - RNA, 19 nt, Homo sapiens
  misc_RNA (1)...(19): siRNA sense strand
cuuagaggaucuucaaaug

SEQ ID NO: 1025677 - RNA, 19 nt, Homo sapiens
  misc_RNA (1)...(19): siRNA sense strand
uggcauaaaguacagaaua

SEQ ID NO: 1025678 - RNA, 19 nt, Homo sapiens
  misc_RNA (1)...(19): siRNA sense strand
cuacuuguuucuacuaugu

SEQ ID NO: 1025679 - RNA, 19 nt, Homo sapiens
  misc_RNA (1)...(19): siRNA sense strand
ggagugcucucuggugauc

SEQ ID NO: 1025680 - RNA, 19 nt, Homo sapiens
  misc_RNA (1)...(19): siRNA sense strand
guaccugcauuguaaacga

SEQ ID NO: 1025681 - RNA, 19 nt, Homo sapiens
  misc_RNA (1)...(19): siRNA sense strand
gcugaagcauuaccuccaa

SEQ ID NO: 1025682 - RNA, 19 nt, Homo sapiens
  misc_RNA (1)...(19): siRNA sense strand
gaaaauggacgccuacaug

SEQ ID NO: 1025683 - RNA, 19 nt, Homo sapiens
  misc_RNA (1)...(19): siRNA sense strand
agaaacagcacuucauaau

SEQ ID NO: 1025684 - RNA, 19 nt, Homo sapiens
  misc_RNA (1)...(19): siRNA sense strand
guaaacgaaagcauguuaa

SEQ ID NO: 1025685 - RNA, 19 nt, Homo sapiens
  misc_RNA (1)...(19): siRNA sense strand
aggccgugcugcuuuaaua

SEQ ID NO: 1025686 - RNA, 19 nt, Homo sapiens
  misc_RNA (1)...(19): siRNA sense strand
cagagauuguggaaugauu

SEQ ID NO: 1025687 - RNA, 19 nt, Homo sapiens
  misc_RNA (1)...(19): siRNA sense strand
gcagaacaaauuaaagcaa

SEQ ID NO: 1025688 - RNA, 19 nt, Homo sapiens
  misc_RNA (1)...(19): siRNA sense strand
gaaauggagcuguuugaac

SEQ ID NO: 1025689 - RNA, 19 nt, Homo sapiens
  misc_RNA (1)...(19): siRNA sense strand
ggucauaauuaucgagucu

SEQ ID NO: 1025690 - RNA, 19 nt, Homo sapiens
  misc_RNA (1)...(19): siRNA sense strand
caaguuggggucauaauua

SEQ ID NO: 1025691 - RNA, 19 nt, Homo sapiens
  misc_RNA (1)...(19): siRNA sense strand
ccucuaagacuccuaguau

SEQ ID NO: 1025692 - RNA, 19 nt, Homo sapiens
  misc_RNA (1)...(19): siRNA sense strand
caucucccuuuaccucuaa

SEQ ID NO: 1025693 - RNA, 19 nt, Homo sapiens
  misc_RNA (1)...(19): siRNA sense strand
ucaaagccauaguuguuag

SEQ ID NO: 1025694 - RNA, 19 nt, Homo sapiens
  misc_RNA (1)...(19): siRNA sense strand
gggaaggccgugcugcuuu

SEQ ID NO: 1025695 - RNA, 19 nt, Homo sapiens
  misc_RNA (1)...(19): siRNA sense strand
guacuugaagauuugcaua

SEQ ID NO: 1025696 - RNA, 19 nt, Homo sapiens
  misc_RNA (1)...(19): siRNA sense strand
uguaaacgaaagcauguua

SEQ ID NO: 1025697 - RNA, 19 nt, Homo sapiens
  misc_RNA (1)...(19): siRNA sense strand
uauauaauccggaaacaca

SEQ ID NO: 1025698 - RNA, 19 nt, Homo sapiens
  misc_RNA (1)...(19): siRNA sense strand
uagaggaucuucaaaugac

SEQ ID NO: 1025699 - RNA, 19 nt, Homo sapiens
  misc_RNA (1)...(19): siRNA sense strand
aaacaacugcuuccugaau

SEQ ID NO: 1025700 - RNA, 19 nt, Homo sapiens
  misc_RNA (1)...(19): siRNA sense strand
gaaaauguuugaggcuauu

SEQ ID NO: 1025701 - RNA, 19 nt, Homo sapiens
  misc_RNA (1)...(19): siRNA sense strand
ugcaaugacugcugguauu

SEQ ID NO: 1025702 - RNA, 19 nt, Homo sapiens
  misc_RNA (1)...(19): siRNA sense strand
cacauaaacgacauacuuu

SEQ ID NO: 1025703 - RNA, 19 nt, Homo sapiens
  misc_RNA (1)...(19): siRNA sense strand
ucagaagacacaguugaua

SEQ ID NO: 1025704 - RNA, 19 nt, Homo sapiens
  misc_RNA (1)...(19): siRNA sense strand
agagaugccuacuuguuuc

SEQ ID NO: 1025705 - RNA, 19 nt, Homo sapiens
  misc_RNA (1)...(19): siRNA sense strand
gcaccguguuugcccguau

SEQ ID NO: 1025706 - RNA, 19 nt, Homo sapiens
  misc_RNA (1)...(19): siRNA sense strand
ugggaaaguugccaaaaua

SEQ ID NO: 1025707 - RNA, 19 nt, Homo sapiens
  misc_RNA (1)...(19): siRNA sense strand
gagaacaacauggauuuua

SEQ ID NO: 1025708 - RNA, 19 nt, Homo sapiens
  misc_RNA (1)...(19): siRNA sense strand
ugacauggcauaaaguaca

SEQ ID NO: 1025709 - RNA, 19 nt, Homo sapiens
  misc_RNA (1)...(19): siRNA sense strand
caagaaauggagcuguuug

SEQ ID NO: 1025710 - RNA, 19 nt, Homo sapiens
  misc_RNA (1)...(19): siRNA sense strand
ggagaugucauggucauuc

SEQ ID NO: 1025711 - RNA, 19 nt, Homo sapiens
  misc_RNA (1)...(19): siRNA sense strand
ggcauuggguuuaucuaca

SEQ ID NO: 1025712 - RNA, 19 nt, Homo sapiens
  misc_RNA (1)...(19): siRNA sense strand
cauaaacgacauacuuugu

SEQ ID NO: 1025713 - RNA, 19 nt, Homo sapiens
  misc_RNA (1)...(19): siRNA sense strand
gaucuucaaaugacucguu

SEQ ID NO: 1025714 - RNA, 19 nt, Homo sapiens
  misc_RNA (1)...(19): siRNA sense strand
gcuuguucguuccauauug

SEQ ID NO: 1025715 - RNA, 19 nt, Homo sapiens
  misc_RNA (1)...(19): siRNA sense strand
gucaaagccauaguuguua

SEQ ID NO: 1025716 - RNA, 19 nt, Homo sapiens
  misc_RNA (1)...(19): siRNA sense strand
ugaaaggaauaggagauca

SEQ ID NO: 1025717 - RNA, 19 nt, Homo sapiens
  misc_RNA (1)...(19): siRNA sense strand
guguuauucuucagugauu

SEQ ID NO: 1025718 - RNA, 19 nt, Homo sapiens
  misc_RNA (1)...(19): siRNA sense strand
ccagugacaaagacuaauu

SEQ ID NO: 1025719 - RNA, 19 nt, Homo sapiens
  misc_RNA (1)...(19): siRNA sense strand
gcaggaaaccaagaaaugg

SEQ ID NO: 1025720 - RNA, 19 nt, Homo sapiens
  misc_RNA (1)...(19): siRNA sense strand
cgaagaagcucugcuccaa

SEQ ID NO: 1025721 - RNA, 19 nt, Homo sapiens
  misc_RNA (1)...(19): siRNA sense strand
gaagaagcucugcuccaaa

SEQ ID NO: 1025722 - RNA, 19 nt, Homo sapiens
  misc_RNA (1)...(19): siRNA sense strand
aagaagcucugcuccaaau

SEQ ID NO: 1025723 - RNA, 19 nt, Homo sapiens
  misc_RNA (1)...(19): siRNA sense strand
gcgggaagcuccacguucu

SEQ ID NO: 1025724 - RNA, 19 nt, Homo sapiens
  misc_RNA (1)...(19): siRNA sense strand
gcaccggauugcagaaggu

SEQ ID NO: 1025725 - RNA, 19 nt, Homo sapiens
  misc_RNA (1)...(19): siRNA sense strand
gaagcucugcuccaaaugg

SEQ ID NO: 1025726 - RNA, 19 nt, Homo sapiens
  misc_RNA (1)...(19): siRNA sense strand
gcaggacaccgaggaagau

SEQ ID NO: 1025727 - RNA, 19 nt, Homo sapiens
  misc_RNA (1)...(19): siRNA sense strand
agccagcgcuuuccagaag

SEQ ID NO: 1025728 - RNA, 19 nt, Homo sapiens
  misc_RNA (1)...(19): siRNA sense strand
caaggaggagggugaaguc

SEQ ID NO: 1025729 - RNA, 19 nt, Homo sapiens
  misc_RNA (1)...(19): siRNA sense strand
gcuccacguucugcucuuc

SEQ ID NO: 1025730 - RNA, 19 nt, Homo sapiens
  misc_RNA (1)...(19): siRNA sense strand
gaggagcacuuugggaaga

SEQ ID NO: 1025731 - RNA, 19 nt, Homo sapiens
  misc_RNA (1)...(19): siRNA sense strand
gaggugucauucuuugaaa

SEQ ID NO: 1025732 - RNA, 19 nt, Homo sapiens
  misc_RNA (1)...(19): siRNA sense strand
caaggugugcccaaacuuu

SEQ ID NO: 1025733 - RNA, 19 nt, Homo sapiens
  misc_RNA (1)...(19): siRNA sense strand
gcagggagaggagcacuuu

SEQ ID NO: 1025734 - RNA, 19 nt, Homo sapiens
  misc_RNA (1)...(19): siRNA sense strand
ccgcaaaccuacucgaauc

SEQ ID NO: 1025735 - RNA, 19 nt, Homo sapiens
  misc_RNA (1)...(19): siRNA sense strand
ggaggaacccaagcauuga

SEQ ID NO: 1025736 - RNA, 19 nt, Homo sapiens
  misc_RNA (1)...(19): siRNA sense strand
ugaauuggcgcugucauuu

SEQ ID NO: 1025737 - RNA, 19 nt, Homo sapiens
  misc_RNA (1)...(19): siRNA sense strand
ggacaaggccagccaugag

SEQ ID NO: 1025738 - RNA, 19 nt, Homo sapiens
  misc_RNA (1)...(19): siRNA sense strand
acucgaaucuccuucaagu

SEQ ID NO: 1025739 - RNA, 19 nt, Homo sapiens
  misc_RNA (1)...(19): siRNA sense strand
aauccaagcucggaaguca

SEQ ID NO: 1025740 - RNA, 19 nt, Homo sapiens
  misc_RNA (1)...(19): siRNA sense strand
gaaucuccuucaagucucu

SEQ ID NO: 1025741 - RNA, 19 nt, Homo sapiens
  misc_RNA (1)...(19): siRNA sense strand
ggagaaaagaggugucauu

SEQ ID NO: 1025742 - RNA, 19 nt, Homo sapiens
  misc_RNA (1)...(19): siRNA sense strand
cuacucgaaucuccuucaa

SEQ ID NO: 1025743 - RNA, 19 nt, Homo sapiens
  misc_RNA (1)...(19): siRNA sense strand
aggaggaacccaagcauug

SEQ ID NO: 1025744 - RNA, 19 nt, Homo sapiens
  misc_RNA (1)...(19): siRNA sense strand
agucaacaccgcaaaccua

SEQ ID NO: 1025745 - RNA, 19 nt, Homo sapiens
  misc_RNA (1)...(19): siRNA sense strand
gcaaggugugcccaaacuu

SEQ ID NO: 1025746 - RNA, 19 nt, Homo sapiens
  misc_RNA (1)...(19): siRNA sense strand
caacaccgcaaaccuacuc

SEQ ID NO: 1025747 - RNA, 19 nt, Homo sapiens
  misc_RNA (1)...(19): siRNA sense strand
gaauuggcgcugucauuuu

SEQ ID NO: 1025748 - RNA, 19 nt, Homo sapiens
  misc_RNA (1)...(19): siRNA sense strand
guugcaaggugugcccaaa

SEQ ID NO: 1025749 - RNA, 19 nt, Homo sapiens
  misc_RNA (1)...(19): siRNA sense strand
gcucacuuccuguuacauc

SEQ ID NO: 1025750 - RNA, 19 nt, Homo sapiens
  misc_RNA (1)...(19): siRNA sense strand
caggaggaacccaagcauu

SEQ ID NO: 1025751 - RNA, 19 nt, Homo sapiens
  misc_RNA (1)...(19): siRNA sense strand
agaggugucauucuuugaa

SEQ ID NO: 1025752 - RNA, 19 nt, Homo sapiens
  misc_RNA (1)...(19): siRNA sense strand
ccacagugcacaggacuca

SEQ ID NO: 1025753 - RNA, 19 nt, Homo sapiens
  misc_RNA (1)...(19): siRNA sense strand
ggaagucaacaccgcaaac

SEQ ID NO: 1025754 - RNA, 19 nt, Homo sapiens
  misc_RNA (1)...(19): siRNA sense strand
ucgaaucuccuucaagucu

SEQ ID NO: 1025755 - RNA, 19 nt, Homo sapiens
  misc_RNA (1)...(19): siRNA sense strand
ugucuccacuccucuccuu

SEQ ID NO: 1025756 - RNA, 19 nt, Homo sapiens
  misc_RNA (1)...(19): siRNA sense strand
gagaaaagaggugucauuc

SEQ ID NO: 1025757 - RNA, 19 nt, Homo sapiens
  misc_RNA (1)...(19): siRNA sense strand
ucauuccagugccuuaaag

SEQ ID NO: 1025758 - RNA, 19 nt, Homo sapiens
  misc_RNA (1)...(19): siRNA sense strand
gccgaggccugguccuuua

SEQ ID NO: 1025759 - RNA, 19 nt, Homo sapiens
  misc_RNA (1)...(19): siRNA sense strand
gagcgaagccagccagaug

SEQ ID NO: 1025760 - RNA, 19 nt, Homo sapiens
  misc_RNA (1)...(19): siRNA sense strand
ccagugaccuccugaguug

SEQ ID NO: 1025761 - RNA, 19 nt, Homo sapiens
  misc_RNA (1)...(19): siRNA sense strand
cgacugguguggacuguug

SEQ ID NO: 1025762 - RNA, 19 nt, Homo sapiens
  misc_RNA (1)...(19): siRNA sense strand
ccuauugcccugcuacuua

SEQ ID NO: 1025763 - RNA, 19 nt, Homo sapiens
  misc_RNA (1)...(19): siRNA sense strand
aguauuauaugcuccauga

SEQ ID NO: 1025764 - RNA, 19 nt, Homo sapiens
  misc_RNA (1)...(19): siRNA sense strand
cuauugcccugcuacuuaa

SEQ ID NO: 1025765 - RNA, 19 nt, Homo sapiens
  misc_RNA (1)...(19): siRNA sense strand
ggugugcgcuguccuacau

SEQ ID NO: 1025766 - RNA, 19 nt, Homo sapiens
  misc_RNA (1)...(19): siRNA sense strand
ucugggaacuccugacauc

SEQ ID NO: 1025767 - RNA, 19 nt, Homo sapiens
  misc_RNA (1)...(19): siRNA sense strand
gcucaacauccucagcauu

SEQ ID NO: 1025768 - RNA, 19 nt, Homo sapiens
  misc_RNA (1)...(19): siRNA sense strand
caacaguggccuuccuauc

SEQ ID NO: 1025769 - RNA, 19 nt, Homo sapiens
  misc_RNA (1)...(19): siRNA sense strand
uauuauaugcuccaugaga

SEQ ID NO: 1025770 - RNA, 19 nt, Homo sapiens
  misc_RNA (1)...(19): siRNA sense strand
acaguggccuuccuaucug

SEQ ID NO: 1025771 - RNA, 19 nt, Homo sapiens
  misc_RNA (1)...(19): siRNA sense strand
caacauccucagcauugga

SEQ ID NO: 1025772 - RNA, 19 nt, Homo sapiens
  misc_RNA (1)...(19): siRNA sense strand
cauuggaugugccuacagu

SEQ ID NO: 1025773 - RNA, 19 nt, Homo sapiens
  misc_RNA (1)...(19): siRNA sense strand
ugggcuauguggaggcuuu

SEQ ID NO: 1025774 - RNA, 19 nt, Homo sapiens
  misc_RNA (1)...(19): siRNA sense strand
cagcauugccaucauuaca

SEQ ID NO: 1025775 - RNA, 19 nt, Homo sapiens
  misc_RNA (1)...(19): siRNA sense strand
gguuguggcccuuauacug

SEQ ID NO: 1025776 - RNA, 19 nt, Homo sapiens
  misc_RNA (1)...(19): siRNA sense strand
ccuggacucuggacacuac

SEQ ID NO: 1025777 - RNA, 19 nt, Homo sapiens
  misc_RNA (1)...(19): siRNA sense strand
cucaacauccucagcauug

SEQ ID NO: 1025778 - RNA, 19 nt, Homo sapiens
  misc_RNA (1)...(19): siRNA sense strand
uguggcaccuucugacauc

SEQ ID NO: 1025779 - RNA, 19 nt, Homo sapiens
  misc_RNA (1)...(19): siRNA sense strand
gggcugcauccuaggacua

SEQ ID NO: 1025780 - RNA, 19 nt, Homo sapiens
  misc_RNA (1)...(19): siRNA sense strand
gaccuggacucuggacacu

SEQ ID NO: 1025781 - RNA, 19 nt, Homo sapiens
  misc_RNA (1)...(19): siRNA sense strand
cauccuaggacuaaucauc

SEQ ID NO: 1025782 - RNA, 19 nt, Homo sapiens
  misc_RNA (1)...(19): siRNA sense strand
cuaggacuaaucaucauug

SEQ ID NO: 1025783 - RNA, 19 nt, Homo sapiens
  misc_RNA (1)...(19): siRNA sense strand
uaggacuaaucaucauugu

SEQ ID NO: 1025784 - RNA, 19 nt, Homo sapiens
  misc_RNA (1)...(19): siRNA sense strand
cccugaggcuucuggucua

SEQ ID NO: 1025785 - RNA, 19 nt, Homo sapiens
  misc_RNA (1)...(19): siRNA sense strand
ucugugcccugcucaacau

SEQ ID NO: 1025786 - RNA, 19 nt, Homo sapiens
  misc_RNA (1)...(19): siRNA sense strand
ggaaagagcuggccgacuu

SEQ ID NO: 1025787 - RNA, 19 nt, Homo sapiens
  misc_RNA (1)...(19): siRNA sense strand
gcucaaaggcuuacaugua

SEQ ID NO: 1025788 - RNA, 19 nt, Homo sapiens
  misc_RNA (1)...(19): siRNA sense strand
gaaacuaccuucuccuucu

SEQ ID NO: 1025789 - RNA, 19 nt, Homo sapiens
  misc_RNA (1)...(19): siRNA sense strand
ggaaacagggagcaaauaa

SEQ ID NO: 1025790 - RNA, 19 nt, Homo sapiens
  misc_RNA (1)...(19): siRNA sense strand
uaacugacaucacagcaaa

SEQ ID NO: 1025791 - RNA, 19 nt, Homo sapiens
  misc_RNA (1)...(19): siRNA sense strand
caaauaaacagaccaagaa

SEQ ID NO: 1025792 - RNA, 19 nt, Homo sapiens
  misc_RNA (1)...(19): siRNA sense strand
ucaagaagcuccgagauga

SEQ ID NO: 1025793 - RNA, 19 nt, Homo sapiens
  misc_RNA (1)...(19): siRNA sense strand
uaacaaggaccugaucuua

SEQ ID NO: 1025794 - RNA, 19 nt, Homo sapiens
  misc_RNA (1)...(19): siRNA sense strand
acaaggaccugaucuuaga

SEQ ID NO: 1025795 - RNA, 19 nt, Homo sapiens
  misc_RNA (1)...(19): siRNA sense strand
ggaaauggccagugcaguu

SEQ ID NO: 1025796 - RNA, 19 nt, Homo sapiens
  misc_RNA (1)...(19): siRNA sense strand
gcaaauaaacagaccaaga

SEQ ID NO: 1025797 - RNA, 19 nt, Homo sapiens
  misc_RNA (1)...(19): siRNA sense strand
ggaaccaucuucaacaaag

SEQ ID NO: 1025798 - RNA, 19 nt, Homo sapiens
  misc_RNA (1)...(19): siRNA sense strand
gaaacagggagcaaauaaa

SEQ ID NO: 1025799 - RNA, 19 nt, Homo sapiens
  misc_RNA (1)...(19): siRNA sense strand
auaaagaacgccagaauuu

SEQ ID NO: 1025800 - RNA, 19 nt, Homo sapiens
  misc_RNA (1)...(19): siRNA sense strand
gauaaagaacgccagaauu

SEQ ID NO: 1025801 - RNA, 19 nt, Homo sapiens
  misc_RNA (1)...(19): siRNA sense strand
gcuaagcagugaaagugaa

SEQ ID NO: 1025802 - RNA, 19 nt, Homo sapiens
  misc_RNA (1)...(19): siRNA sense strand
gcagugaaagugaagauga

SEQ ID NO: 1025803 - RNA, 19 nt, Homo sapiens
  misc_RNA (1)...(19): siRNA sense strand
guaaguuucugacccacaa

SEQ ID NO: 1025804 - RNA, 19 nt, Homo sapiens
  misc_RNA (1)...(19): siRNA sense strand
ggaaagcacccugagaaga

SEQ ID NO: 1025805 - RNA, 19 nt, Homo sapiens
  misc_RNA (1)...(19): siRNA sense strand
cagcauaggguccauggua

SEQ ID NO: 1025806 - RNA, 19 nt, Homo sapiens
  misc_RNA (1)...(19): siRNA sense strand
gaauuugcucgcagacaua

SEQ ID NO: 1025807 - RNA, 19 nt, Homo sapiens
  misc_RNA (1)...(19): siRNA sense strand
gaaagggaagagaagauug

SEQ ID NO: 1025808 - RNA, 19 nt, Homo sapiens
  misc_RNA (1)...(19): siRNA sense strand
gaaauggccagugcaguug

SEQ ID NO: 1025809 - RNA, 19 nt, Homo sapiens
  misc_RNA (1)...(19): siRNA sense strand
ucagaauccuccaagaaga

SEQ ID NO: 1025810 - RNA, 19 nt, Homo sapiens
  misc_RNA (1)...(19): siRNA sense strand
ccaaagaucccugaaguuc

SEQ ID NO: 1025811 - RNA, 19 nt, Homo sapiens
  misc_RNA (1)...(19): siRNA sense strand
gaaggugcaucaugugacu

SEQ ID NO: 1025812 - RNA, 19 nt, Homo sapiens
  misc_RNA (1)...(19): siRNA sense strand
gaaagcacccugagaagac

SEQ ID NO: 1025813 - RNA, 19 nt, Homo sapiens
  misc_RNA (1)...(19): siRNA sense strand
ggauaaagaacgccagaau

SEQ ID NO: 1025814 - RNA, 19 nt, Homo sapiens
  misc_RNA (1)...(19): siRNA sense strand
aaacacagccagucagguu

SEQ ID NO: 1025815 - RNA, 19 nt, Homo sapiens
  misc_RNA (1)...(19): siRNA sense strand
gcucagaauccuccaagaa

SEQ ID NO: 1025816 - RNA, 19 nt, Homo sapiens
  misc_RNA (1)...(19): siRNA sense strand
ggaaacgcuucagggcuuu

SEQ ID NO: 1025817 - RNA, 19 nt, Homo sapiens
  misc_RNA (1)...(19): siRNA sense strand
gaaggaaagcacccugaga

SEQ ID NO: 1025818 - RNA, 19 nt, Homo sapiens
  misc_RNA (1)...(19): siRNA sense strand
gaaguuccccuccaugaua

SEQ ID NO: 1025819 - RNA, 19 nt, Homo sapiens
  misc_RNA (1)...(19): siRNA sense strand
aagugaagaugaagaagaa

SEQ ID NO: 1025820 - RNA, 19 nt, Homo sapiens
  misc_RNA (1)...(19): siRNA sense strand
gaagacaggaaagaaagaa

SEQ ID NO: 1025821 - RNA, 19 nt, Homo sapiens
  misc_RNA (1)...(19): siRNA sense strand
gauuguggaucaggagaaa

SEQ ID NO: 1025822 - RNA, 19 nt, Homo sapiens
  misc_RNA (1)...(19): siRNA sense strand
uaaagaacgccagaauuug

SEQ ID NO: 1025823 - RNA, 19 nt, Homo sapiens
  misc_RNA (1)...(19): siRNA sense strand
ugagaagacaggaaagaaa

SEQ ID NO: 1025824 - RNA, 19 nt, Homo sapiens
  misc_RNA (1)...(19): siRNA sense strand
acagccacaucucucuuua

SEQ ID NO: 1025825 - RNA, 19 nt, Homo sapiens
  misc_RNA (1)...(19): siRNA sense strand
gaaccgagucagccuggaa

SEQ ID NO: 1025826 - RNA, 19 nt, Homo sapiens
  misc_RNA (1)...(19): siRNA sense strand
gagaagacaggaaagaaag

SEQ ID NO: 1025827 - RNA, 19 nt, Homo sapiens
  misc_RNA (1)...(19): siRNA sense strand
cagugaaagugaagaugaa

SEQ ID NO: 1025828 - RNA, 19 nt, Homo sapiens
  misc_RNA (1)...(19): siRNA sense strand
gaacuauccaggcguaucu

SEQ ID NO: 1025829 - RNA, 19 nt, Homo sapiens
  misc_RNA (1)...(19): siRNA sense strand
ggagugccgcugugugauu

SEQ ID NO: 1025830 - RNA, 19 nt, Homo sapiens
  misc_RNA (1)...(19): siRNA sense strand
caaaacaaauucugacauc

SEQ ID NO: 1025831 - RNA, 19 nt, Homo sapiens
  misc_RNA (1)...(19): siRNA sense strand
gagaggagugcagcagaua

SEQ ID NO: 1025832 - RNA, 19 nt, Homo sapiens
  misc_RNA (1)...(19): siRNA sense strand
gacucuagcuccccaguua

SEQ ID NO: 1025833 - RNA, 19 nt, Homo sapiens
  misc_RNA (1)...(19): siRNA sense strand
gggaaacagggagcaaaua

SEQ ID NO: 1025834 - RNA, 19 nt, Homo sapiens
  misc_RNA (1)...(19): siRNA sense strand
acauuugccuuucugaaga

SEQ ID NO: 1025835 - RNA, 19 nt, Homo sapiens
  misc_RNA (1)...(19): siRNA sense strand
ugaaagugaagaugaagaa

SEQ ID NO: 1025836 - RNA, 19 nt, Homo sapiens
  misc_RNA (1)...(19): siRNA sense strand
gagcagcagcuuggcagua

SEQ ID NO: 1025837 - RNA, 19 nt, Homo sapiens
  misc_RNA (1)...(19): siRNA sense strand
caacauuugccuuucugaa

SEQ ID NO: 1025838 - RNA, 19 nt, Homo sapiens
  misc_RNA (1)...(19): siRNA sense strand
gagcaaauaaacagaccaa

SEQ ID NO: 1025839 - RNA, 19 nt, Homo sapiens
  misc_RNA (1)...(19): siRNA sense strand
agagaagauuguagugguu

SEQ ID NO: 1025840 - RNA, 19 nt, Homo sapiens
  misc_RNA (1)...(19): siRNA sense strand
gagugccgcugugugauug

SEQ ID NO: 1025841 - RNA, 19 nt, Homo sapiens
  misc_RNA (1)...(19): siRNA sense strand
gaggccagaggaaugcuua

SEQ ID NO: 1025842 - RNA, 19 nt, Homo sapiens
  misc_RNA (1)...(19): siRNA sense strand
aaggaaccaucuucaacaa

SEQ ID NO: 1025843 - RNA, 19 nt, Homo sapiens
  misc_RNA (1)...(19): siRNA sense strand
aaaccaagccgagucagaa

SEQ ID NO: 1025844 - RNA, 19 nt, Homo sapiens
  misc_RNA (1)...(19): siRNA sense strand
gggaagagaagauuguagu

SEQ ID NO: 1025845 - RNA, 19 nt, Homo sapiens
  misc_RNA (1)...(19): siRNA sense strand
ucacaugcgcauucacaaa

SEQ ID NO: 1025846 - RNA, 19 nt, Homo sapiens
  misc_RNA (1)...(19): siRNA sense strand
gcugaaacugucacacaaa

SEQ ID NO: 1025847 - RNA, 19 nt, Homo sapiens
  misc_RNA (1)...(19): siRNA sense strand
agccacaucucucuuuaga

SEQ ID NO: 1025848 - RNA, 19 nt, Homo sapiens
  misc_RNA (1)...(19): siRNA sense strand
aggcguaucuaccuucaga

SEQ ID NO: 1025849 - RNA, 19 nt, Homo sapiens
  misc_RNA (1)...(19): siRNA sense strand
agaauuugcucgcagacau

SEQ ID NO: 1025850 - RNA, 19 nt, Homo sapiens
  misc_RNA (1)...(19): siRNA sense strand
gaaagagcuggccgacuuc

SEQ ID NO: 1025851 - RNA, 19 nt, Homo sapiens
  misc_RNA (1)...(19): siRNA sense strand
gaggaaugcuuaaaacaca

SEQ ID NO: 1025852 - RNA, 19 nt, Homo sapiens
  misc_RNA (1)...(19): siRNA sense strand
caagcaaggcagaaggaaa

SEQ ID NO: 1025853 - RNA, 19 nt, Homo sapiens
  misc_RNA (1)...(19): siRNA sense strand
gcaguaaccaaaacaaauu

SEQ ID NO: 1025854 - RNA, 19 nt, Homo sapiens
  misc_RNA (1)...(19): siRNA sense strand
ggaagagaagauuguagug

SEQ ID NO: 1025855 - RNA, 19 nt, Homo sapiens
  misc_RNA (1)...(19): siRNA sense strand
gugaagaugaagaagaauu

SEQ ID NO: 1025856 - RNA, 19 nt, Homo sapiens
  misc_RNA (1)...(19): siRNA sense strand
aaggaaagcacccugagaa

SEQ ID NO: 1025857 - RNA, 19 nt, Homo sapiens
  misc_RNA (1)...(19): siRNA sense strand
gaaggugugacauccacuu

SEQ ID NO: 1025858 - RNA, 19 nt, Homo sapiens
  misc_RNA (1)...(19): siRNA sense strand
ugaaagggaagagaagauu

SEQ ID NO: 1025859 - RNA, 19 nt, Homo sapiens
  misc_RNA (1)...(19): siRNA sense strand
caagaagcuccgagaugaa

SEQ ID NO: 1025860 - RNA, 19 nt, Homo sapiens
  misc_RNA (1)...(19): siRNA sense strand
cgacuucacaugcgcauuc

SEQ ID NO: 1025861 - RNA, 19 nt, Homo sapiens
  misc_RNA (1)...(19): siRNA sense strand
aaacagggagcaaauaaac

SEQ ID NO: 1025862 - RNA, 19 nt, Homo sapiens
  misc_RNA (1)...(19): siRNA sense strand
aaagugaagaugaagaaga

SEQ ID NO: 1025863 - RNA, 19 nt, Homo sapiens
  misc_RNA (1)...(19): siRNA sense strand
ccagugcaguugugaaugc

SEQ ID NO: 1025864 - RNA, 19 nt, Homo sapiens
  misc_RNA (1)...(19): siRNA sense strand
gcaaagacagcagggaaag

SEQ ID NO: 1025865 - RNA, 19 nt, Homo sapiens
  misc_RNA (1)...(19): siRNA sense strand
ugacaucacagcaaagaca

SEQ ID NO: 1025866 - RNA, 19 nt, Homo sapiens
  misc_RNA (1)...(19): siRNA sense strand
aagaaugcagcacugguua

SEQ ID NO: 1025867 - RNA, 19 nt, Homo sapiens
  misc_RNA (1)...(19): siRNA sense strand
ggagugcagcagauaacaa

SEQ ID NO: 1025868 - RNA, 19 nt, Homo sapiens
  misc_RNA (1)...(19): siRNA sense strand
aggcuuaucagcaguguuu

SEQ ID NO: 1025869 - RNA, 19 nt, Homo sapiens
  misc_RNA (1)...(19): siRNA sense strand
cuucagggcuuuguaacug

SEQ ID NO: 1025870 - RNA, 19 nt, Homo sapiens
  misc_RNA (1)...(19): siRNA sense strand
aaagaaugcagcacugguu

SEQ ID NO: 1025871 - RNA, 19 nt, Homo sapiens
  misc_RNA (1)...(19): siRNA sense strand
gauccagugcucuuacaga

SEQ ID NO: 1025872 - RNA, 19 nt, Homo sapiens
  misc_RNA (1)...(19): siRNA sense strand
uguagugguugacaucuca

SEQ ID NO: 1025873 - RNA, 19 nt, Homo sapiens
  misc_RNA (1)...(19): siRNA sense strand
ucaucacccucacuggauu

SEQ ID NO: 1025874 - RNA, 19 nt, Homo sapiens
  misc_RNA (1)...(19): siRNA sense strand
gguggaggagccaacagua

SEQ ID NO: 1025875 - RNA, 19 nt, Homo sapiens
  misc_RNA (1)...(19): siRNA sense strand
aacaaauucugacauccuu

SEQ ID NO: 1025876 - RNA, 19 nt, Homo sapiens
  misc_RNA (1)...(19): siRNA sense strand
agcagcagcuuggcaguaa

SEQ ID NO: 1025877 - RNA, 19 nt, Homo sapiens
  misc_RNA (1)...(19): siRNA sense strand
acacaaacacagccaguca

SEQ ID NO: 1025878 - RNA, 19 nt, Homo sapiens
  misc_RNA (1)...(19): siRNA sense strand
ggugugacauccacuucuc

SEQ ID NO: 1025879 - RNA, 19 nt, Homo sapiens
  misc_RNA (1)...(19): siRNA sense strand
gaaacugucacacaaacac

SEQ ID NO: 1025880 - RNA, 19 nt, Homo sapiens
  misc_RNA (1)...(19): siRNA sense strand
aaacuaccuucuccuucug

SEQ ID NO: 1025881 - RNA, 19 nt, Homo sapiens
  misc_RNA (1)...(19): siRNA sense strand
gacaagcaaggcagaagga

SEQ ID NO: 1025882 - RNA, 19 nt, Homo sapiens
  misc_RNA (1)...(19): siRNA sense strand
gagggaaacagggagcaaa

SEQ ID NO: 1025883 - RNA, 19 nt, Homo sapiens
  misc_RNA (1)...(19): siRNA sense strand
aagaggagacagccugaaa

SEQ ID NO: 1025884 - RNA, 19 nt, Homo sapiens
  misc_RNA (1)...(19): siRNA sense strand
guaacugacaucacagcaa

SEQ ID NO: 1025885 - RNA, 19 nt, Homo sapiens
  misc_RNA (1)...(19): siRNA sense strand
uaggagcacugcagaccau

SEQ ID NO: 1025886 - RNA, 19 nt, Homo sapiens
  misc_RNA (1)...(19): siRNA sense strand
gaaagggauuccaaacuau

SEQ ID NO: 1025887 - RNA, 19 nt, Homo sapiens
  misc_RNA (1)...(19): siRNA sense strand
gaaagcaagugagaucauu

SEQ ID NO: 1025888 - RNA, 19 nt, Homo sapiens
  misc_RNA (1)...(19): siRNA sense strand
agaaagggauuccaaacua

SEQ ID NO: 1025889 - RNA, 19 nt, Homo sapiens
  misc_RNA (1)...(19): siRNA sense strand
gccaauauaucuucacaga

SEQ ID NO: 1025890 - RNA, 19 nt, Homo sapiens
  misc_RNA (1)...(19): siRNA sense strand
agauacagcuggccaauga

SEQ ID NO: 1025891 - RNA, 19 nt, Homo sapiens
  misc_RNA (1)...(19): siRNA sense strand
caacgucacuugucaggau

SEQ ID NO: 1025892 - RNA, 19 nt, Homo sapiens
  misc_RNA (1)...(19): siRNA sense strand
ggugcuagcugcauugauc

SEQ ID NO: 1025893 - RNA, 19 nt, Homo sapiens
  misc_RNA (1)...(19): siRNA sense strand
agaaggcagugaaaucuau

SEQ ID NO: 1025894 - RNA, 19 nt, Homo sapiens
  misc_RNA (1)...(19): siRNA sense strand
uggagaagauuaagauaca

SEQ ID NO: 1025895 - RNA, 19 nt, Homo sapiens
  misc_RNA (1)...(19): siRNA sense strand
ucaucaccaucuucaauuu

SEQ ID NO: 1025896 - RNA, 19 nt, Homo sapiens
  misc_RNA (1)...(19): siRNA sense strand
gaucugcaccagcaucuga

SEQ ID NO: 1025897 - RNA, 19 nt, Homo sapiens
  misc_RNA (1)...(19): siRNA sense strand
gagagaaagggauuccaaa

SEQ ID NO: 1025898 - RNA, 19 nt, Homo sapiens
  misc_RNA (1)...(19): siRNA sense strand
gcaccagcaucugagagaa

SEQ ID NO: 1025899 - RNA, 19 nt, Homo sapiens
  misc_RNA (1)...(19): siRNA sense strand
aaagggauuccaaacuaua

SEQ ID NO: 1025900 - RNA, 19 nt, Homo sapiens
  misc_RNA (1)...(19): siRNA sense strand
ggucaucaccaucuucaau

SEQ ID NO: 1025901 - RNA, 19 nt, Homo sapiens
  misc_RNA (1)...(19): siRNA sense strand
gagaaagggauuccaaacu

SEQ ID NO: 1025902 - RNA, 19 nt, Homo sapiens
  misc_RNA (1)...(19): siRNA sense strand
cgucugcacuuaccuugga

SEQ ID NO: 1025903 - RNA, 19 nt, Homo sapiens
  misc_RNA (1)...(19): siRNA sense strand
ggaaagcaagugagaucau

SEQ ID NO: 1025904 - RNA, 19 nt, Homo sapiens
  misc_RNA (1)...(19): siRNA sense strand
gcacaagggcggugauagc

SEQ ID NO: 1025905 - RNA, 19 nt, Homo sapiens
  misc_RNA (1)...(19): siRNA sense strand
gcaagugagaucauugaag

SEQ ID NO: 1025906 - RNA, 19 nt, Homo sapiens
  misc_RNA (1)...(19): siRNA sense strand
ccacggaacccagaacuag

SEQ ID NO: 1025907 - RNA, 19 nt, Homo sapiens
  misc_RNA (1)...(19): siRNA sense strand
ggccaaugaggaauauaaa

SEQ ID NO: 1025908 - RNA, 19 nt, Homo sapiens
  misc_RNA (1)...(19): siRNA sense strand
caucugagagaaagggauu

SEQ ID NO: 1025909 - RNA, 19 nt, Homo sapiens
  misc_RNA (1)...(19): siRNA sense strand
ggaaggcgagcugggagaa

SEQ ID NO: 1025910 - RNA, 19 nt, Homo sapiens
  misc_RNA (1)...(19): siRNA sense strand
gcuggagaagauuaagaua

SEQ ID NO: 1025911 - RNA, 19 nt, Homo sapiens
  misc_RNA (1)...(19): siRNA sense strand
caaacuauaccuccaugag

SEQ ID NO: 1025912 - RNA, 19 nt, Homo sapiens
  misc_RNA (1)...(19): siRNA sense strand
gcuggccaaugaggaauau

SEQ ID NO: 1025913 - RNA, 19 nt, Homo sapiens
  misc_RNA (1)...(19): siRNA sense strand
cgagcugggagaacuguaa

SEQ ID NO: 1025914 - RNA, 19 nt, Homo sapiens
  misc_RNA (1)...(19): siRNA sense strand
ugagagaaagggauuccaa

SEQ ID NO: 1025915 - RNA, 19 nt, Homo sapiens
  misc_RNA (1)...(19): siRNA sense strand
uggccaaugaggaauauaa

SEQ ID NO: 1025916 - RNA, 19 nt, Homo sapiens
  misc_RNA (1)...(19): siRNA sense strand
ccuagaaggcagugaaauc

SEQ ID NO: 1025917 - RNA, 19 nt, Homo sapiens
  misc_RNA (1)...(19): siRNA sense strand
gucaucaccaucuucaauu

SEQ ID NO: 1025918 - RNA, 19 nt, Homo sapiens
  misc_RNA (1)...(19): siRNA sense strand
gaccugggaaagcaaguga

SEQ ID NO: 1025919 - RNA, 19 nt, Homo sapiens
  misc_RNA (1)...(19): siRNA sense strand
ggagaagauuaagauacag

SEQ ID NO: 1025920 - RNA, 19 nt, Homo sapiens
  misc_RNA (1)...(19): siRNA sense strand
aagcaagugagaucauuga

SEQ ID NO: 1025921 - RNA, 19 nt, Homo sapiens
  misc_RNA (1)...(19): siRNA sense strand
ccaauauaucuucacagaa

SEQ ID NO: 1025922 - RNA, 19 nt, Homo sapiens
  misc_RNA (1)...(19): siRNA sense strand
ugaaggcucuggucaucac

SEQ ID NO: 1025923 - RNA, 19 nt, Homo sapiens
  misc_RNA (1)...(19): siRNA sense strand
gcuccuagaaggcagugaa

SEQ ID NO: 1025924 - RNA, 19 nt, Homo sapiens
  misc_RNA (1)...(19): siRNA sense strand
ccaaugaggaauauaaacg

SEQ ID NO: 1025925 - RNA, 19 nt, Homo sapiens
  misc_RNA (1)...(19): siRNA sense strand
uggccgagcuguaugucau

SEQ ID NO: 1025926 - RNA, 19 nt, Homo sapiens
  misc_RNA (1)...(19): siRNA sense strand
aagccaauauaucuucaca

SEQ ID NO: 1025927 - RNA, 19 nt, Homo sapiens
  misc_RNA (1)...(19): siRNA sense strand
ucagcgaccugggaaagca

SEQ ID NO: 1025928 - RNA, 19 nt, Homo sapiens
  misc_RNA (1)...(19): siRNA sense strand
gaaggcagugaaaucuauc

SEQ ID NO: 1025929 - RNA, 19 nt, Homo sapiens
  misc_RNA (1)...(19): siRNA sense strand
caccagcaucugagagaaa

SEQ ID NO: 1025930 - RNA, 19 nt, Homo sapiens
  misc_RNA (1)...(19): siRNA sense strand
caucaccaucuucaauuuc

SEQ ID NO: 1025931 - RNA, 19 nt, Homo sapiens
  misc_RNA (1)...(19): siRNA sense strand
caccaucuucaauuucauu

SEQ ID NO: 1025932 - RNA, 19 nt, Homo sapiens
  misc_RNA (1)...(19): siRNA sense strand
cuagaaggcagugaaaucu

SEQ ID NO: 1025933 - RNA, 19 nt, Homo sapiens
  misc_RNA (1)...(19): siRNA sense strand
gcgauuggugcgugcuuug

SEQ ID NO: 1025934 - RNA, 19 nt, Homo sapiens
  misc_RNA (1)...(19): siRNA sense strand
agacauggugggacucuca

SEQ ID NO: 1025935 - RNA, 19 nt, Homo sapiens
  misc_RNA (1)...(19): siRNA sense strand
aacgucacuugucaggaua

SEQ ID NO: 1025936 - RNA, 19 nt, Homo sapiens
  misc_RNA (1)...(19): siRNA sense strand
ggacgacgcucacaauuga

SEQ ID NO: 1025937 - RNA, 19 nt, Homo sapiens
  misc_RNA (1)...(19): siRNA sense strand
gcagcaaggugaucaagaa

SEQ ID NO: 1025938 - RNA, 19 nt, Homo sapiens
  misc_RNA (1)...(19): siRNA sense strand
gcaaggagccugacaagug

SEQ ID NO: 1025939 - RNA, 19 nt, Homo sapiens
  misc_RNA (1)...(19): siRNA sense strand
ucaagaagguaaagaagaa

SEQ ID NO: 1025940 - RNA, 19 nt, Homo sapiens
  misc_RNA (1)...(19): siRNA sense strand
caagacagcuggccaggau

SEQ ID NO: 1025941 - RNA, 19 nt, Homo sapiens
  misc_RNA (1)...(19): siRNA sense strand
gacgugagccgaucauuaa

SEQ ID NO: 1025942 - RNA, 19 nt, Homo sapiens
  misc_RNA (1)...(19): siRNA sense strand
gcacugggcacaucaucua

SEQ ID NO: 1025943 - RNA, 19 nt, Homo sapiens
  misc_RNA (1)...(19): siRNA sense strand
gcaaggugaucaagaaggu

SEQ ID NO: 1025944 - RNA, 19 nt, Homo sapiens
  misc_RNA (1)...(19): siRNA sense strand
gaaaagcccgguuaaauug

SEQ ID NO: 1025945 - RNA, 19 nt, Homo sapiens
  misc_RNA (1)...(19): siRNA sense strand
gaaagauggacuaaggaaa

SEQ ID NO: 1025946 - RNA, 19 nt, Homo sapiens
  misc_RNA (1)...(19): siRNA sense strand
gaacacaguccaggccaaa

SEQ ID NO: 1025947 - RNA, 19 nt, Homo sapiens
  misc_RNA (1)...(19): siRNA sense strand
agaaaggccaguugacuaa

SEQ ID NO: 1025948 - RNA, 19 nt, Homo sapiens
  misc_RNA (1)...(19): siRNA sense strand
ccaguugacuaagaagaaa

SEQ ID NO: 1025949 - RNA, 19 nt, Homo sapiens
  misc_RNA (1)...(19): siRNA sense strand
ucacaagccaggaagguaa

SEQ ID NO: 1025950 - RNA, 19 nt, Homo sapiens
  misc_RNA (1)...(19): siRNA sense strand
agacgugagccgaucauua

SEQ ID NO: 1025951 - RNA, 19 nt, Homo sapiens
  misc_RNA (1)...(19): siRNA sense strand
ccaggaagguaaacaagag

SEQ ID NO: 1025952 - RNA, 19 nt, Homo sapiens
  misc_RNA (1)...(19): siRNA sense strand
gucaaccacugcaacugua

SEQ ID NO: 1025953 - RNA, 19 nt, Homo sapiens
  misc_RNA (1)...(19): siRNA sense strand
aggaggagauggaugagaa

SEQ ID NO: 1025954 - RNA, 19 nt, Homo sapiens
  misc_RNA (1)...(19): siRNA sense strand
gcacaucaucuacccuuuc

SEQ ID NO: 1025955 - RNA, 19 nt, Homo sapiens
  misc_RNA (1)...(19): siRNA sense strand
ggaagguaaacaagagaaa

SEQ ID NO: 1025956 - RNA, 19 nt, Homo sapiens
  misc_RNA (1)...(19): siRNA sense strand
aaaggccaguugacuaaga

SEQ ID NO: 1025957 - RNA, 19 nt, Homo sapiens
  misc_RNA (1)...(19): siRNA sense strand
acaaggaggagauggauga

SEQ ID NO: 1025958 - RNA, 19 nt, Homo sapiens
  misc_RNA (1)...(19): siRNA sense strand
gaaggcaaagcugaagaaa

SEQ ID NO: 1025959 - RNA, 19 nt, Homo sapiens
  misc_RNA (1)...(19): siRNA sense strand
uaaaugaagaagaggaaga

SEQ ID NO: 1025960 - RNA, 19 nt, Homo sapiens
  misc_RNA (1)...(19): siRNA sense strand
aagaaaggccaguugacua

SEQ ID NO: 1025961 - RNA, 19 nt, Homo sapiens
  misc_RNA (1)...(19): siRNA sense strand
ccacagcgcccaucaccau

SEQ ID NO: 1025962 - RNA, 19 nt, Homo sapiens
  misc_RNA (1)...(19): siRNA sense strand
cacugcaacuguaauucua

SEQ ID NO: 1025963 - RNA, 19 nt, Homo sapiens
  misc_RNA (1)...(19): siRNA sense strand
gaaagacaaggaggagaug

SEQ ID NO: 1025964 - RNA, 19 nt, Homo sapiens
  misc_RNA (1)...(19): siRNA sense strand
gaucaagaagguaaagaag

SEQ ID NO: 1025965 - RNA, 19 nt, Homo sapiens
  misc_RNA (1)...(19): siRNA sense strand
gauccaccauccacucuac

SEQ ID NO: 1025966 - RNA, 19 nt, Homo sapiens
  misc_RNA (1)...(19): siRNA sense strand
guggagcgauuccgguaug

SEQ ID NO: 1025967 - RNA, 19 nt, Homo sapiens
  misc_RNA (1)...(19): siRNA sense strand
guaauucuaggcugaagga

SEQ ID NO: 1025968 - RNA, 19 nt, Homo sapiens
  misc_RNA (1)...(19): siRNA sense strand
ugaaagauggacuaaggaa

SEQ ID NO: 1025969 - RNA, 19 nt, Homo sapiens
  misc_RNA (1)...(19): siRNA sense strand
gagcgaggacaguuacaau

SEQ ID NO: 1025970 - RNA, 19 nt, Homo sapiens
  misc_RNA (1)...(19): siRNA sense strand
ccaaccugcucccauguca

SEQ ID NO: 1025971 - RNA, 19 nt, Homo sapiens
  misc_RNA (1)...(19): siRNA sense strand
gaagaaaagcccgguuaaa

SEQ ID NO: 1025972 - RNA, 19 nt, Homo sapiens
  misc_RNA (1)...(19): siRNA sense strand
ggaagaggaggaggaggaa

SEQ ID NO: 1025973 - RNA, 19 nt, Homo sapiens
  misc_RNA (1)...(19): siRNA sense strand
ggaagagagagaacacagu

SEQ ID NO: 1025974 - RNA, 19 nt, Homo sapiens
  misc_RNA (1)...(19): siRNA sense strand
gcaccuacacucugucaac

SEQ ID NO: 1025975 - RNA, 19 nt, Homo sapiens
  misc_RNA (1)...(19): siRNA sense strand
gccaagaaaggccaguuga

SEQ ID NO: 1025976 - RNA, 19 nt, Homo sapiens
  misc_RNA (1)...(19): siRNA sense strand
gagaaggcaaagcugaaga

SEQ ID NO: 1025977 - RNA, 19 nt, Homo sapiens
  misc_RNA (1)...(19): siRNA sense strand
caagaaaggccaguugacu

SEQ ID NO: 1025978 - RNA, 19 nt, Homo sapiens
  misc_RNA (1)...(19): siRNA sense strand
agaaaagcccgguuaaauu

SEQ ID NO: 1025979 - RNA, 19 nt, Homo sapiens
  misc_RNA (1)...(19): siRNA sense strand
gccaguugacuaagaagaa

SEQ ID NO: 1025980 - RNA, 19 nt, Homo sapiens
  misc_RNA (1)...(19): siRNA sense strand
ugaucuaaaugaagaagag

SEQ ID NO: 1025981 - RNA, 19 nt, Homo sapiens
  misc_RNA (1)...(19): siRNA sense strand
gcgaggacaguuacaaugg

SEQ ID NO: 1025982 - RNA, 19 nt, Homo sapiens
  misc_RNA (1)...(19): siRNA sense strand
ggagagcgaggacaguuac

SEQ ID NO: 1025983 - RNA, 19 nt, Homo sapiens
  misc_RNA (1)...(19): siRNA sense strand
auugaaagauggacuaagg

SEQ ID NO: 1025984 - RNA, 19 nt, Homo sapiens
  misc_RNA (1)...(19): siRNA sense strand
aaagcccgguuaaauugga

SEQ ID NO: 1025985 - RNA, 19 nt, Homo sapiens
  misc_RNA (1)...(19): siRNA sense strand
ugaucaagaagguaaagaa

SEQ ID NO: 1025986 - RNA, 19 nt, Homo sapiens
  misc_RNA (1)...(19): siRNA sense strand
acaauugaaagauggacua

SEQ ID NO: 1025987 - RNA, 19 nt, Homo sapiens
  misc_RNA (1)...(19): siRNA sense strand
caauugaaagauggacuaa

SEQ ID NO: 1025988 - RNA, 19 nt, Homo sapiens
  misc_RNA (1)...(19): siRNA sense strand
ggcacaucaucuacccuuu

SEQ ID NO: 1025989 - RNA, 19 nt, Homo sapiens
  misc_RNA (1)...(19): siRNA sense strand
caagaagguaaagaagaaa

SEQ ID NO: 1025990 - RNA, 19 nt, Homo sapiens
  misc_RNA (1)...(19): siRNA sense strand
ccacugcaacuguaauucu

SEQ ID NO: 1025991 - RNA, 19 nt, Homo sapiens
  misc_RNA (1)...(19): siRNA sense strand
gccaggaagguaaacaaga

SEQ ID NO: 1025992 - RNA, 19 nt, Homo sapiens
  misc_RNA (1)...(19): siRNA sense strand
ggauauuguggaaucauca

SEQ ID NO: 1025993 - RNA, 19 nt, Homo sapiens
  misc_RNA (1)...(19): siRNA sense strand
aaagauggacuaaggaaaa

SEQ ID NO: 1025994 - RNA, 19 nt, Homo sapiens
  misc_RNA (1)...(19): siRNA sense strand
gaagaggaggaggaggaaa

SEQ ID NO: 1025995 - RNA, 19 nt, Homo sapiens
  misc_RNA (1)...(19): siRNA sense strand
agaaagacaaggaggagau

SEQ ID NO: 1025996 - RNA, 19 nt, Homo sapiens
  misc_RNA (1)...(19): siRNA sense strand
ggaagggucagggcagcaa

SEQ ID NO: 1025997 - RNA, 19 nt, Homo sapiens
  misc_RNA (1)...(19): siRNA sense strand
caucaucgcccaggaagag

SEQ ID NO: 1025998 - RNA, 19 nt, Homo sapiens
  misc_RNA (1)...(19): siRNA sense strand
gaucauuaagcgcaagaca

SEQ ID NO: 1025999 - RNA, 19 nt, Homo sapiens
  misc_RNA (1)...(19): siRNA sense strand
aaggccaguugacuaagaa

SEQ ID NO: 1026000 - RNA, 19 nt, Homo sapiens
  misc_RNA (1)...(19): siRNA sense strand
agaaggcaaagcugaagaa

SEQ ID NO: 1026001 - RNA, 19 nt, Homo sapiens
  misc_RNA (1)...(19): siRNA sense strand
accauccacucuaccauga

SEQ ID NO: 1026002 - RNA, 19 nt, Homo sapiens
  misc_RNA (1)...(19): siRNA sense strand
gaagguaaacaagagaaaa

SEQ ID NO: 1026003 - RNA, 19 nt, Homo sapiens
  misc_RNA (1)...(19): siRNA sense strand
uggagagcgaggacaguua

SEQ ID NO: 1026004 - RNA, 19 nt, Homo sapiens
  misc_RNA (1)...(19): siRNA sense strand
ucaggacgacgcucacaau

SEQ ID NO: 1026005 - RNA, 19 nt, Homo sapiens
  misc_RNA (1)...(19): siRNA sense strand
caggacgacgcucacaauu

SEQ ID NO: 1026006 - RNA, 19 nt, Homo sapiens
  misc_RNA (1)...(19): siRNA sense strand
aggagcauguggagcgauu

SEQ ID NO: 1026007 - RNA, 19 nt, Homo sapiens
  misc_RNA (1)...(19): siRNA sense strand
aaggugaucaagaagguaa

SEQ ID NO: 1026008 - RNA, 19 nt, Homo sapiens
  misc_RNA (1)...(19): siRNA sense strand
cgguauggcuggugcaaaa

SEQ ID NO: 1026009 - RNA, 19 nt, Homo sapiens
  misc_RNA (1)...(19): siRNA sense strand
gaaaggccaguugacuaag

SEQ ID NO: 1026010 - RNA, 19 nt, Homo sapiens
  misc_RNA (1)...(19): siRNA sense strand
ucaaccacugcaacuguaa

SEQ ID NO: 1026011 - RNA, 19 nt, Homo sapiens
  misc_RNA (1)...(19): siRNA sense strand
gccacagccugcaccuaca

SEQ ID NO: 1026012 - RNA, 19 nt, Homo sapiens
  misc_RNA (1)...(19): siRNA sense strand
uaucagggcucacauacuu

SEQ ID NO: 1026013 - RNA, 19 nt, Homo sapiens
  misc_RNA (1)...(19): siRNA sense strand
ggaaucugcugaagaccaa

SEQ ID NO: 1026014 - RNA, 19 nt, Homo sapiens
  misc_RNA (1)...(19): siRNA sense strand
caaauacaggucuggguua

SEQ ID NO: 1026015 - RNA, 19 nt, Homo sapiens
  misc_RNA (1)...(19): siRNA sense strand
gaaagagccacagcacaga

SEQ ID NO: 1026016 - RNA, 19 nt, Homo sapiens
  misc_RNA (1)...(19): siRNA sense strand
auacaggucuggguuauca

SEQ ID NO: 1026017 - RNA, 19 nt, Homo sapiens
  misc_RNA (1)...(19): siRNA sense strand
gaaggaaugaggagaggau

SEQ ID NO: 1026018 - RNA, 19 nt, Homo sapiens
  misc_RNA (1)...(19): siRNA sense strand
caaagaaggagggaaggaa

SEQ ID NO: 1026019 - RNA, 19 nt, Homo sapiens
  misc_RNA (1)...(19): siRNA sense strand
cccaagccauggcaaagaa

SEQ ID NO: 1026020 - RNA, 19 nt, Homo sapiens
  misc_RNA (1)...(19): siRNA sense strand
ucaggugacucccaagaag

SEQ ID NO: 1026021 - RNA, 19 nt, Homo sapiens
  misc_RNA (1)...(19): siRNA sense strand
aaauacaggucuggguuau

SEQ ID NO: 1026022 - RNA, 19 nt, Homo sapiens
  misc_RNA (1)...(19): siRNA sense strand
gcaaagaaggagggaagga

SEQ ID NO: 1026023 - RNA, 19 nt, Homo sapiens
  misc_RNA (1)...(19): siRNA sense strand
ggaaggccaagcagcaugu

SEQ ID NO: 1026024 - RNA, 19 nt, Homo sapiens
  misc_RNA (1)...(19): siRNA sense strand
gguuaucagggcucacaua

SEQ ID NO: 1026025 - RNA, 19 nt, Homo sapiens
  misc_RNA (1)...(19): siRNA sense strand
gacccugucucaaaacaaa

SEQ ID NO: 1026026 - RNA, 19 nt, Homo sapiens
  misc_RNA (1)...(19): siRNA sense strand
gggcucacauacuucuaag

SEQ ID NO: 1026027 - RNA, 19 nt, Homo sapiens
  misc_RNA (1)...(19): siRNA sense strand
caucaggugacucccaaga

SEQ ID NO: 1026028 - RNA, 19 nt, Homo sapiens
  misc_RNA (1)...(19): siRNA sense strand
cuuggaaucugcugaagac

SEQ ID NO: 1026029 - RNA, 19 nt, Homo sapiens
  misc_RNA (1)...(19): siRNA sense strand
gagggaaggaagcaaaggu

SEQ ID NO: 1026030 - RNA, 19 nt, Homo sapiens
  misc_RNA (1)...(19): siRNA sense strand
gaccuggaucuacccuuga

SEQ ID NO: 1026031 - RNA, 19 nt, Homo sapiens
  misc_RNA (1)...(19): siRNA sense strand
acacccuacugccuuggaa

SEQ ID NO: 1026032 - RNA, 19 nt, Homo sapiens
  misc_RNA (1)...(19): siRNA sense strand
gggaagagaucaccuauga

SEQ ID NO: 1026033 - RNA, 19 nt, Homo sapiens
  misc_RNA (1)...(19): siRNA sense strand
gaacuuugauugugauaug

SEQ ID NO: 1026034 - RNA, 19 nt, Homo sapiens
  misc_RNA (1)...(19): siRNA sense strand
ggauauugcucuacacuug

SEQ ID NO: 1026035 - RNA, 19 nt, Homo sapiens
  misc_RNA (1)...(19): siRNA sense strand
gaacugacagagauaagua

SEQ ID NO: 1026036 - RNA, 19 nt, Homo sapiens
  misc_RNA (1)...(19): siRNA sense strand
uuaaagagcucagcaguau

SEQ ID NO: 1026037 - RNA, 19 nt, Homo sapiens
  misc_RNA (1)...(19): siRNA sense strand
gaagagaucaccuaugaca

SEQ ID NO: 1026038 - RNA, 19 nt, Homo sapiens
  misc_RNA (1)...(19): siRNA sense strand
ggaaauuaauggagacauc

SEQ ID NO: 1026039 - RNA, 19 nt, Homo sapiens
  misc_RNA (1)...(19): siRNA sense strand
gauguggccuuucauuuca

SEQ ID NO: 1026040 - RNA, 19 nt, Homo sapiens
  misc_RNA (1)...(19): siRNA sense strand
caaaggauauugcucuaca

SEQ ID NO: 1026041 - RNA, 19 nt, Homo sapiens
  misc_RNA (1)...(19): siRNA sense strand
gccaaaagcuuuaauguug

SEQ ID NO: 1026042 - RNA, 19 nt, Homo sapiens
  misc_RNA (1)...(19): siRNA sense strand
ggagaagaagagagaaaua

SEQ ID NO: 1026043 - RNA, 19 nt, Homo sapiens
  misc_RNA (1)...(19): siRNA sense strand
gcaggaaaaucaaaggaua

SEQ ID NO: 1026044 - RNA, 19 nt, Homo sapiens
  misc_RNA (1)...(19): siRNA sense strand
ccagguggcuguaaaugga

SEQ ID NO: 1026045 - RNA, 19 nt, Homo sapiens
  misc_RNA (1)...(19): siRNA sense strand
ugacagagauaaguagaga

SEQ ID NO: 1026046 - RNA, 19 nt, Homo sapiens
  misc_RNA (1)...(19): siRNA sense strand
ccaagcaucuagucuggaa

SEQ ID NO: 1026047 - RNA, 19 nt, Homo sapiens
  misc_RNA (1)...(19): siRNA sense strand
gaacugucgucguuaaagg

SEQ ID NO: 1026048 - RNA, 19 nt, Homo sapiens
  misc_RNA (1)...(19): siRNA sense strand
ggucauggcucugaaacau

SEQ ID NO: 1026049 - RNA, 19 nt, Homo sapiens
  misc_RNA (1)...(19): siRNA sense strand
gauguacuuugagaugaua

SEQ ID NO: 1026050 - RNA, 19 nt, Homo sapiens
  misc_RNA (1)...(19): siRNA sense strand
gagaagaagagagaaauau

SEQ ID NO: 1026051 - RNA, 19 nt, Homo sapiens
  misc_RNA (1)...(19): siRNA sense strand
ggaguacaaacacagauuu

SEQ ID NO: 1026052 - RNA, 19 nt, Homo sapiens
  misc_RNA (1)...(19): siRNA sense strand
gaguacaaacacagauuua

SEQ ID NO: 1026053 - RNA, 19 nt, Homo sapiens
  misc_RNA (1)...(19): siRNA sense strand
gagccgauguggccuuuca

SEQ ID NO: 1026054 - RNA, 19 nt, Homo sapiens
  misc_RNA (1)...(19): siRNA sense strand
uagacacucugggcauuua

SEQ ID NO: 1026055 - RNA, 19 nt, Homo sapiens
  misc_RNA (1)...(19): siRNA sense strand
uauuaccucuuucccauuu

SEQ ID NO: 1026056 - RNA, 19 nt, Homo sapiens
  misc_RNA (1)...(19): siRNA sense strand
cagaauggcagcaguguga

SEQ ID NO: 1026057 - RNA, 19 nt, Homo sapiens
  misc_RNA (1)...(19): siRNA sense strand
aaggagaagugaaugcaaa

SEQ ID NO: 1026058 - RNA, 19 nt, Homo sapiens
  misc_RNA (1)...(19): siRNA sense strand
aaagagcucagcaguauug

SEQ ID NO: 1026059 - RNA, 19 nt, Homo sapiens
  misc_RNA (1)...(19): siRNA sense strand
gggcauuuauggcaaagug

SEQ ID NO: 1026060 - RNA, 19 nt, Homo sapiens
  misc_RNA (1)...(19): siRNA sense strand
uugacacgcuggaaauuaa

SEQ ID NO: 1026061 - RNA, 19 nt, Homo sapiens
  misc_RNA (1)...(19): siRNA sense strand
ggauguacuuugagaugau

SEQ ID NO: 1026062 - RNA, 19 nt, Homo sapiens
  misc_RNA (1)...(19): siRNA sense strand
gggauguacuuugagauga

SEQ ID NO: 1026063 - RNA, 19 nt, Homo sapiens
  misc_RNA (1)...(19): siRNA sense strand
caaaguacccaagcaucua

SEQ ID NO: 1026064 - RNA, 19 nt, Homo sapiens
  misc_RNA (1)...(19): siRNA sense strand
guccugggauguacuuuga

SEQ ID NO: 1026065 - RNA, 19 nt, Homo sapiens
  misc_RNA (1)...(19): siRNA sense strand
gagaaaauguuccaaaguc

SEQ ID NO: 1026066 - RNA, 19 nt, Homo sapiens
  misc_RNA (1)...(19): siRNA sense strand
ucugaaacauucuguagug

SEQ ID NO: 1026067 - RNA, 19 nt, Homo sapiens
  misc_RNA (1)...(19): siRNA sense strand
aacccacgccugaauauua

SEQ ID NO: 1026068 - RNA, 19 nt, Homo sapiens
  misc_RNA (1)...(19): siRNA sense strand
ucauggcucugaaacauuc

SEQ ID NO: 1026069 - RNA, 19 nt, Homo sapiens
  misc_RNA (1)...(19): siRNA sense strand
gagcucagcaguauugaca

SEQ ID NO: 1026070 - RNA, 19 nt, Homo sapiens
  misc_RNA (1)...(19): siRNA sense strand
gcaaaugccaaaagcuuua

SEQ ID NO: 1026071 - RNA, 19 nt, Homo sapiens
  misc_RNA (1)...(19): siRNA sense strand
gccugaauauuaaagcauu

SEQ ID NO: 1026072 - RNA, 19 nt, Homo sapiens
  misc_RNA (1)...(19): siRNA sense strand
uuucaauccucguuucaaa

SEQ ID NO: 1026073 - RNA, 19 nt, Homo sapiens
  misc_RNA (1)...(19): siRNA sense strand
gaagagagaaauauuaccu

SEQ ID NO: 1026074 - RNA, 19 nt, Homo sapiens
  misc_RNA (1)...(19): siRNA sense strand
ccuggaacuuugauuguga

SEQ ID NO: 1026075 - RNA, 19 nt, Homo sapiens
  misc_RNA (1)...(19): siRNA sense strand
gauccuggaacuuugauug

SEQ ID NO: 1026076 - RNA, 19 nt, Homo sapiens
  misc_RNA (1)...(19): siRNA sense strand
gaaaacauacucugcucua

SEQ ID NO: 1026077 - RNA, 19 nt, Homo sapiens
  misc_RNA (1)...(19): siRNA sense strand
gaacccacgccugaauauu

SEQ ID NO: 1026078 - RNA, 19 nt, Homo sapiens
  misc_RNA (1)...(19): siRNA sense strand
acagagauaaguagagaaa

SEQ ID NO: 1026079 - RNA, 19 nt, Homo sapiens
  misc_RNA (1)...(19): siRNA sense strand
gcuggauccuggaacuuug

SEQ ID NO: 1026080 - RNA, 19 nt, Homo sapiens
  misc_RNA (1)...(19): siRNA sense strand
gauauugcucuacacuuga

SEQ ID NO: 1026081 - RNA, 19 nt, Homo sapiens
  misc_RNA (1)...(19): siRNA sense strand
gaauucaagguugcaguaa

SEQ ID NO: 1026082 - RNA, 19 nt, Homo sapiens
  misc_RNA (1)...(19): siRNA sense strand
acccacgccugaauauuaa

SEQ ID NO: 1026083 - RNA, 19 nt, Homo sapiens
  misc_RNA (1)...(19): siRNA sense strand
gaauggcagcagugugaaa

SEQ ID NO: 1026084 - RNA, 19 nt, Homo sapiens
  misc_RNA (1)...(19): siRNA sense strand
gugggcauguuccuaguga

SEQ ID NO: 1026085 - RNA, 19 nt, Homo sapiens
  misc_RNA (1)...(19): siRNA sense strand
cgauguggccuuucauuuc

SEQ ID NO: 1026086 - RNA, 19 nt, Homo sapiens
  misc_RNA (1)...(19): siRNA sense strand
caggaucggcccagagaaa

SEQ ID NO: 1026087 - RNA, 19 nt, Homo sapiens
  misc_RNA (1)...(19): siRNA sense strand
ccagguggaucugcagaau

SEQ ID NO: 1026088 - RNA, 19 nt, Homo sapiens
  misc_RNA (1)...(19): siRNA sense strand
gcauuuauggcaaagugaa

SEQ ID NO: 1026089 - RNA, 19 nt, Homo sapiens
  misc_RNA (1)...(19): siRNA sense strand
gaucgugauuauggugcua

SEQ ID NO: 1026090 - RNA, 19 nt, Homo sapiens
  misc_RNA (1)...(19): siRNA sense strand
ccaaaagcuuuaauguuga

SEQ ID NO: 1026091 - RNA, 19 nt, Homo sapiens
  misc_RNA (1)...(19): siRNA sense strand
gcucugaaacauucuguag

SEQ ID NO: 1026092 - RNA, 19 nt, Homo sapiens
  misc_RNA (1)...(19): siRNA sense strand
aagcuuuaauguugaccua

SEQ ID NO: 1026093 - RNA, 19 nt, Homo sapiens
  misc_RNA (1)...(19): siRNA sense strand
aauagacacucugggcauu

SEQ ID NO: 1026094 - RNA, 19 nt, Homo sapiens
  misc_RNA (1)...(19): siRNA sense strand
auucaagguugcaguaaau

SEQ ID NO: 1026095 - RNA, 19 nt, Homo sapiens
  misc_RNA (1)...(19): siRNA sense strand
aauucaagguugcaguaaa

SEQ ID NO: 1026096 - RNA, 19 nt, Homo sapiens
  misc_RNA (1)...(19): siRNA sense strand
agaauucaagguugcagua

SEQ ID NO: 1026097 - RNA, 19 nt, Homo sapiens
  misc_RNA (1)...(19): siRNA sense strand
guauugacacgcuggaaau

SEQ ID NO: 1026098 - RNA, 19 nt, Homo sapiens
  misc_RNA (1)...(19): siRNA sense strand
gagaagugaaugcaaaugc

SEQ ID NO: 1026099 - RNA, 19 nt, Homo sapiens
  misc_RNA (1)...(19): siRNA sense strand
ccugggauguacuuugaga

SEQ ID NO: 1026100 - RNA, 19 nt, Homo sapiens
  misc_RNA (1)...(19): siRNA sense strand
ucauuucaauccucguuuc

SEQ ID NO: 1026101 - RNA, 19 nt, Homo sapiens
  misc_RNA (1)...(19): siRNA sense strand
uacacagccuggaguacaa

SEQ ID NO: 1026102 - RNA, 19 nt, Homo sapiens
  misc_RNA (1)...(19): siRNA sense strand
ccuacagaauaucaucuau

SEQ ID NO: 1026103 - RNA, 19 nt, Homo sapiens
  misc_RNA (1)...(19): siRNA sense strand
cagaauaucaucuauaacc

SEQ ID NO: 1026104 - RNA, 19 nt, Homo sapiens
  misc_RNA (1)...(19): siRNA sense strand
gaauauucacucaauuggu

SEQ ID NO: 1026105 - RNA, 19 nt, Homo sapiens
  misc_RNA (1)...(19): siRNA sense strand
ggaacugacagagauaagu

SEQ ID NO: 1026106 - RNA, 19 nt, Homo sapiens
  misc_RNA (1)...(19): siRNA sense strand
ccgauguggccuuucauuu

SEQ ID NO: 1026107 - RNA, 19 nt, Homo sapiens
  misc_RNA (1)...(19): siRNA sense strand
gggagaagaagagagaaau

SEQ ID NO: 1026108 - RNA, 19 nt, Homo sapiens
  misc_RNA (1)...(19): siRNA sense strand
ugugauaugugggcauguu

SEQ ID NO: 1026109 - RNA, 19 nt, Homo sapiens
  misc_RNA (1)...(19): siRNA sense strand
ucaccuaugacacgccuuu

SEQ ID NO: 1026110 - RNA, 19 nt, Homo sapiens
  misc_RNA (1)...(19): siRNA sense strand
ggagaagugaaugcaaaug

SEQ ID NO: 1026111 - RNA, 19 nt, Homo sapiens
  misc_RNA (1)...(19): siRNA sense strand
gcaucuagucuggaacuga

SEQ ID NO: 1026112 - RNA, 19 nt, Homo sapiens
  misc_RNA (1)...(19): siRNA sense strand
caaauuccagguggcugua

SEQ ID NO: 1026113 - RNA, 19 nt, Homo sapiens
  misc_RNA (1)...(19): siRNA sense strand
gucugacuguggcuucuuu

SEQ ID NO: 1026114 - RNA, 19 nt, Homo sapiens
  misc_RNA (1)...(19): siRNA sense strand
guucuuuggacacgaguuu

SEQ ID NO: 1026115 - RNA, 19 nt, Homo sapiens
  misc_RNA (1)...(19): siRNA sense strand
gacgggaagagaucaccua

SEQ ID NO: 1026116 - RNA, 19 nt, Homo sapiens
  misc_RNA (1)...(19): siRNA sense strand
uuuaaagagcucagcagua

SEQ ID NO: 1026117 - RNA, 19 nt, Homo sapiens
  misc_RNA (1)...(19): siRNA sense strand
caaccuacagaauaucauc

SEQ ID NO: 1026118 - RNA, 19 nt, Homo sapiens
  misc_RNA (1)...(19): siRNA sense strand
ugucgucguuaaaggagaa

SEQ ID NO: 1026119 - RNA, 19 nt, Homo sapiens
  misc_RNA (1)...(19): siRNA sense strand
caaacacagauuuaaagag

SEQ ID NO: 1026120 - RNA, 19 nt, Homo sapiens
  misc_RNA (1)...(19): siRNA sense strand
gcuuuaauguugaccuacu

SEQ ID NO: 1026121 - RNA, 19 nt, Homo sapiens
  misc_RNA (1)...(19): siRNA sense strand
uaaaggagaagugaaugca

SEQ ID NO: 1026122 - RNA, 19 nt, Homo sapiens
  misc_RNA (1)...(19): siRNA sense strand
cuagugacgcagacagauu

SEQ ID NO: 1026123 - RNA, 19 nt, Homo sapiens
  misc_RNA (1)...(19): siRNA sense strand
uaaagagcucagcaguauu

SEQ ID NO: 1026124 - RNA, 19 nt, Homo sapiens
  misc_RNA (1)...(19): siRNA sense strand
auauugcucuacacuugaa

SEQ ID NO: 1026125 - RNA, 19 nt, Homo sapiens
  misc_RNA (1)...(19): siRNA sense strand
cuuuaauguugaccuacua

SEQ ID NO: 1026126 - RNA, 19 nt, Homo sapiens
  misc_RNA (1)...(19): siRNA sense strand
gaucggcccagagaaaaua

SEQ ID NO: 1026127 - RNA, 19 nt, Homo sapiens
  misc_RNA (1)...(19): siRNA sense strand
cacaggaucggcccagaga

SEQ ID NO: 1026128 - RNA, 19 nt, Homo sapiens
  misc_RNA (1)...(19): siRNA sense strand
ugaacccacgccugaauau

SEQ ID NO: 1026129 - RNA, 19 nt, Homo sapiens
  misc_RNA (1)...(19): siRNA sense strand
agguggaucugcagaaugg

SEQ ID NO: 1026130 - RNA, 19 nt, Homo sapiens
  misc_RNA (1)...(19): siRNA sense strand
guagagaaaauguuccaaa

SEQ ID NO: 1026131 - RNA, 19 nt, Homo sapiens
  misc_RNA (1)...(19): siRNA sense strand
acaaaguacccaagcaucu

SEQ ID NO: 1026132 - RNA, 19 nt, Homo sapiens
  misc_RNA (1)...(19): siRNA sense strand
gcaggaaagugucaucuau

SEQ ID NO: 1026133 - RNA, 19 nt, Homo sapiens
  misc_RNA (1)...(19): siRNA sense strand
gggcgcagauacacacgua

SEQ ID NO: 1026134 - RNA, 19 nt, Homo sapiens
  misc_RNA (1)...(19): siRNA sense strand
caaauguggugucugcaau

SEQ ID NO: 1026135 - RNA, 19 nt, Homo sapiens
  misc_RNA (1)...(19): siRNA sense strand
ggacauugcaagaauacuu

SEQ ID NO: 1026136 - RNA, 19 nt, Homo sapiens
  misc_RNA (1)...(19): siRNA sense strand
gcaucagcauguagucaaa

SEQ ID NO: 1026137 - RNA, 19 nt, Homo sapiens
  misc_RNA (1)...(19): siRNA sense strand
aggaaagugucaucuauug

SEQ ID NO: 1026138 - RNA, 19 nt, Homo sapiens
  misc_RNA (1)...(19): siRNA sense strand
guaacugucuccuuaucug

SEQ ID NO: 1026139 - RNA, 19 nt, Homo sapiens
  misc_RNA (1)...(19): siRNA sense strand
cccuguaacugucuccuua

SEQ ID NO: 1026140 - RNA, 19 nt, Homo sapiens
  misc_RNA (1)...(19): siRNA sense strand
cuccuuaucugcaaaguga

SEQ ID NO: 1026141 - RNA, 19 nt, Homo sapiens
  misc_RNA (1)...(19): siRNA sense strand
ccacuggccuugccuuugg

SEQ ID NO: 1026142 - RNA, 19 nt, Homo sapiens
  misc_RNA (1)...(19): siRNA sense strand
gccaaucucucaucaacgu

SEQ ID NO: 1026143 - RNA, 19 nt, Homo sapiens
  misc_RNA (1)...(19): siRNA sense strand
gacauugcaagaauacuuu

SEQ ID NO: 1026144 - RNA, 19 nt, Homo sapiens
  misc_RNA (1)...(19): siRNA sense strand
caacguggaaggcaagaug

SEQ ID NO: 1026145 - RNA, 19 nt, Homo sapiens
  misc_RNA (1)...(19): siRNA sense strand
gggcauuugucauccuguu

SEQ ID NO: 1026146 - RNA, 19 nt, Homo sapiens
  misc_RNA (1)...(19): siRNA sense strand
gauacacacguaagagaug

SEQ ID NO: 1026147 - RNA, 19 nt, Homo sapiens
  misc_RNA (1)...(19): siRNA sense strand
uguggacauugcaagaaua

SEQ ID NO: 1026148 - RNA, 19 nt, Homo sapiens
  misc_RNA (1)...(19): siRNA sense strand
guucacagaccgcacuuug

SEQ ID NO: 1026149 - RNA, 19 nt, Homo sapiens
  misc_RNA (1)...(19): siRNA sense strand
caggaaagugucaucuauu

SEQ ID NO: 1026150 - RNA, 19 nt, Homo sapiens
  misc_RNA (1)...(19): siRNA sense strand
gugcaucccggaccucuga

SEQ ID NO: 1026151 - RNA, 19 nt, Homo sapiens
  misc_RNA (1)...(19): siRNA sense strand
ggaagcaugcacggcgaua

SEQ ID NO: 1026152 - RNA, 19 nt, Homo sapiens
  misc_RNA (1)...(19): siRNA sense strand
cagauacacacguaagaga

SEQ ID NO: 1026153 - RNA, 19 nt, Homo sapiens
  misc_RNA (1)...(19): siRNA sense strand
aggguuaucuguggacauu

SEQ ID NO: 1026154 - RNA, 19 nt, Homo sapiens
  misc_RNA (1)...(19): siRNA sense strand
ggaaagugucaucuauugg

SEQ ID NO: 1026155 - RNA, 19 nt, Homo sapiens
  misc_RNA (1)...(19): siRNA sense strand
ccuauucacccuuaacuag

SEQ ID NO: 1026156 - RNA, 19 nt, Homo sapiens
  misc_RNA (1)...(19): siRNA sense strand
guagucaaauguggugucu

SEQ ID NO: 1026157 - RNA, 19 nt, Homo sapiens
  misc_RNA (1)...(19): siRNA sense strand
gcaaaagaaucaucaaccu

SEQ ID NO: 1026158 - RNA, 19 nt, Homo sapiens
  misc_RNA (1)...(19): siRNA sense strand
aauguggugucugcaauga

SEQ ID NO: 1026159 - RNA, 19 nt, Homo sapiens
  misc_RNA (1)...(19): siRNA sense strand
gcagauacacacguaagag

SEQ ID NO: 1026160 - RNA, 19 nt, Homo sapiens
  misc_RNA (1)...(19): siRNA sense strand
ucaaauguggugucugcaa

SEQ ID NO: 1026161 - RNA, 19 nt, Homo sapiens
  misc_RNA (1)...(19): siRNA sense strand
ccuguuggcugugcugugu

SEQ ID NO: 1026162 - RNA, 19 nt, Homo sapiens
  misc_RNA (1)...(19): siRNA sense strand
gaagcaugcacggcgauau

SEQ ID NO: 1026163 - RNA, 19 nt, Homo sapiens
  misc_RNA (1)...(19): siRNA sense strand
gguuaucuguggacauugc

SEQ ID NO: 1026164 - RNA, 19 nt, Homo sapiens
  misc_RNA (1)...(19): siRNA sense strand
uguuggcugugcuguguuu

SEQ ID NO: 1026165 - RNA, 19 nt, Homo sapiens
  misc_RNA (1)...(19): siRNA sense strand
gcgauauggaggcaucuau

SEQ ID NO: 1026166 - RNA, 19 nt, Homo sapiens
  misc_RNA (1)...(19): siRNA sense strand
uguggugucugcaaugaag

SEQ ID NO: 1026167 - RNA, 19 nt, Homo sapiens
  misc_RNA (1)...(19): siRNA sense strand
cagcauguagucaaaugug

SEQ ID NO: 1026168 - RNA, 19 nt, Homo sapiens
  misc_RNA (1)...(19): siRNA sense strand
gaccgcacuuuggcacguu

SEQ ID NO: 1026169 - RNA, 19 nt, Homo sapiens
  misc_RNA (1)...(19): siRNA sense strand
gcucuuuauugggccugua

SEQ ID NO: 1026170 - RNA, 19 nt, Homo sapiens
  misc_RNA (1)...(19): siRNA sense strand
gcgcagauacacacguaag

SEQ ID NO: 1026171 - RNA, 19 nt, Homo sapiens
  misc_RNA (1)...(19): siRNA sense strand
cugccaaucucucaucaac

SEQ ID NO: 1026172 - RNA, 19 nt, Homo sapiens
  misc_RNA (1)...(19): siRNA sense strand
cagccacccuguccagaac

SEQ ID NO: 1026173 - RNA, 19 nt, Homo sapiens
  misc_RNA (1)...(19): siRNA sense strand
cgauauggaggcaucuaug

SEQ ID NO: 1026174 - RNA, 19 nt, Homo sapiens
  misc_RNA (1)...(19): siRNA sense strand
gaagccaccccaaucaaga

SEQ ID NO: 1026175 - RNA, 19 nt, Homo sapiens
  misc_RNA (1)...(19): siRNA sense strand
gugcaaggcgaacgucuuc

SEQ ID NO: 1026176 - RNA, 19 nt, Homo sapiens
  misc_RNA (1)...(19): siRNA sense strand
gcaaauccauucucuuuua

SEQ ID NO: 1026177 - RNA, 19 nt, Homo sapiens
  misc_RNA (1)...(19): siRNA sense strand
agacacagaugacagauuu

SEQ ID NO: 1026178 - RNA, 19 nt, Homo sapiens
  misc_RNA (1)...(19): siRNA sense strand
gguauggccuggaguauca

SEQ ID NO: 1026179 - RNA, 19 nt, Homo sapiens
  misc_RNA (1)...(19): siRNA sense strand
ggacgcugcagauaaguua

SEQ ID NO: 1026180 - RNA, 19 nt, Homo sapiens
  misc_RNA (1)...(19): siRNA sense strand
gagaguuucugaagaccaa

SEQ ID NO: 1026181 - RNA, 19 nt, Homo sapiens
  misc_RNA (1)...(19): siRNA sense strand
ccgaaauccuuaaaucuau

SEQ ID NO: 1026182 - RNA, 19 nt, Homo sapiens
  misc_RNA (1)...(19): siRNA sense strand
gaugacagauuugaagauc

SEQ ID NO: 1026183 - RNA, 19 nt, Homo sapiens
  misc_RNA (1)...(19): siRNA sense strand
gaaccucggccucucgaaa

SEQ ID NO: 1026184 - RNA, 19 nt, Homo sapiens
  misc_RNA (1)...(19): siRNA sense strand
gccgaaauccuuaaaucua

SEQ ID NO: 1026185 - RNA, 19 nt, Homo sapiens
  misc_RNA (1)...(19): siRNA sense strand
ggaagaggcaaauccauuc

SEQ ID NO: 1026186 - RNA, 19 nt, Homo sapiens
  misc_RNA (1)...(19): siRNA sense strand
cagaauuuaugcaaaggaa

SEQ ID NO: 1026187 - RNA, 19 nt, Homo sapiens
  misc_RNA (1)...(19): siRNA sense strand
cagcagaauuuaugcaaag

SEQ ID NO: 1026188 - RNA, 19 nt, Homo sapiens
  misc_RNA (1)...(19): siRNA sense strand
gcugagacacugaaucuug

SEQ ID NO: 1026189 - RNA, 19 nt, Homo sapiens
  misc_RNA (1)...(19): siRNA sense strand
gagcggaaguuagaagcaa

SEQ ID NO: 1026190 - RNA, 19 nt, Homo sapiens
  misc_RNA (1)...(19): siRNA sense strand
gauccggccagcagaauuu

SEQ ID NO: 1026191 - RNA, 19 nt, Homo sapiens
  misc_RNA (1)...(19): siRNA sense strand
ccuuaaaucuauagacaga

SEQ ID NO: 1026192 - RNA, 19 nt, Homo sapiens
  misc_RNA (1)...(19): siRNA sense strand
ccagcagaauuuaugcaaa

SEQ ID NO: 1026193 - RNA, 19 nt, Homo sapiens
  misc_RNA (1)...(19): siRNA sense strand
gagcugagacacugaaucu

SEQ ID NO: 1026194 - RNA, 19 nt, Homo sapiens
  misc_RNA (1)...(19): siRNA sense strand
cagcacauaccuuuccuuu

SEQ ID NO: 1026195 - RNA, 19 nt, Homo sapiens
  misc_RNA (1)...(19): siRNA sense strand
aggcaaauccauucucuuu

SEQ ID NO: 1026196 - RNA, 19 nt, Homo sapiens
  misc_RNA (1)...(19): siRNA sense strand
ugagaagaaagcugaauga

SEQ ID NO: 1026197 - RNA, 19 nt, Homo sapiens
  misc_RNA (1)...(19): siRNA sense strand
gaaucuuguugccgaaauc

SEQ ID NO: 1026198 - RNA, 19 nt, Homo sapiens
  misc_RNA (1)...(19): siRNA sense strand
uuagagaguuucugaagac

SEQ ID NO: 1026199 - RNA, 19 nt, Homo sapiens
  misc_RNA (1)...(19): siRNA sense strand
gaccaaacgggcuguaaag

SEQ ID NO: 1026200 - RNA, 19 nt, Homo sapiens
  misc_RNA (1)...(19): siRNA sense strand
gggagacacagaugacaga

SEQ ID NO: 1026201 - RNA, 19 nt, Homo sapiens
  misc_RNA (1)...(19): siRNA sense strand
acgacgcacugaaagauga

SEQ ID NO: 1026202 - RNA, 19 nt, Homo sapiens
  misc_RNA (1)...(19): siRNA sense strand
ugaccaaacgggcuguaaa

SEQ ID NO: 1026203 - RNA, 19 nt, Homo sapiens
  misc_RNA (1)...(19): siRNA sense strand
caacuuccagcgagagaau

SEQ ID NO: 1026204 - RNA, 19 nt, Homo sapiens
  misc_RNA (1)...(19): siRNA sense strand
acacagaugacagauuuga

SEQ ID NO: 1026205 - RNA, 19 nt, Homo sapiens
  misc_RNA (1)...(19): siRNA sense strand
uuaaagacgaggaggaaga

SEQ ID NO: 1026206 - RNA, 19 nt, Homo sapiens
  misc_RNA (1)...(19): siRNA sense strand
gagacacagaugacagauu

SEQ ID NO: 1026207 - RNA, 19 nt, Homo sapiens
  misc_RNA (1)...(19): siRNA sense strand
gauuugaagaucuggaaga

SEQ ID NO: 1026208 - RNA, 19 nt, Homo sapiens
  misc_RNA (1)...(19): siRNA sense strand
gaagaggcaaauccauucu

SEQ ID NO: 1026209 - RNA, 19 nt, Homo sapiens
  misc_RNA (1)...(19): siRNA sense strand
cugagacacugaaucuugu

SEQ ID NO: 1026210 - RNA, 19 nt, Homo sapiens
  misc_RNA (1)...(19): siRNA sense strand
uuuagagaguuucugaaga

SEQ ID NO: 1026211 - RNA, 19 nt, Homo sapiens
  misc_RNA (1)...(19): siRNA sense strand
gugcacaggcuuccaucaa

SEQ ID NO: 1026212 - RNA, 19 nt, Homo sapiens
  misc_RNA (1)...(19): siRNA sense strand
gcggguauggccuggagua

SEQ ID NO: 1026213 - RNA, 19 nt, Homo sapiens
  misc_RNA (1)...(19): siRNA sense strand
gcagaauuuaugcaaagga

SEQ ID NO: 1026214 - RNA, 19 nt, Homo sapiens
  misc_RNA (1)...(19): siRNA sense strand
ugaaucuuguugccgaaau

SEQ ID NO: 1026215 - RNA, 19 nt, Homo sapiens
  misc_RNA (1)...(19): siRNA sense strand
uaaguuacgacgcacugaa

SEQ ID NO: 1026216 - RNA, 19 nt, Homo sapiens
  misc_RNA (1)...(19): siRNA sense strand
ccucgugggcguugaguga

SEQ ID NO: 1026217 - RNA, 19 nt, Homo sapiens
  misc_RNA (1)...(19): siRNA sense strand
aggcgcaggucuccaacuu

SEQ ID NO: 1026218 - RNA, 19 nt, Homo sapiens
  misc_RNA (1)...(19): siRNA sense strand
gaggauccggccagcagaa

SEQ ID NO: 1026219 - RNA, 19 nt, Homo sapiens
  misc_RNA (1)...(19): siRNA sense strand
cagaugacagauuugaaga

SEQ ID NO: 1026220 - RNA, 19 nt, Homo sapiens
  misc_RNA (1)...(19): siRNA sense strand
uugccgaaauccuuaaauc

SEQ ID NO: 1026221 - RNA, 19 nt, Homo sapiens
  misc_RNA (1)...(19): siRNA sense strand
ggauccggccagcagaauu

SEQ ID NO: 1026222 - RNA, 19 nt, Homo sapiens
  misc_RNA (1)...(19): siRNA sense strand
gagaagaaagcugaaugag

SEQ ID NO: 1026223 - RNA, 19 nt, Homo sapiens
  misc_RNA (1)...(19): siRNA sense strand
uggaguaucagcagccauu

SEQ ID NO: 1026224 - RNA, 19 nt, Homo sapiens
  misc_RNA (1)...(19): siRNA sense strand
ggaguaucagcagccauuu

SEQ ID NO: 1026225 - RNA, 19 nt, Homo sapiens
  misc_RNA (1)...(19): siRNA sense strand
gagacacugaaucuuguug

SEQ ID NO: 1026226 - RNA, 19 nt, Homo sapiens
  misc_RNA (1)...(19): siRNA sense strand
acagaugacagauuugaag

SEQ ID NO: 1026227 - RNA, 19 nt, Homo sapiens
  misc_RNA (1)...(19): siRNA sense strand
gccagcagaauuuaugcaa

SEQ ID NO: 1026228 - RNA, 19 nt, Homo sapiens
  misc_RNA (1)...(19): siRNA sense strand
gcacugaaagaugaaaauu

SEQ ID NO: 1026229 - RNA, 19 nt, Homo sapiens
  misc_RNA (1)...(19): siRNA sense strand
guuacgacgcacugaaaga

SEQ ID NO: 1026230 - RNA, 19 nt, Homo sapiens
  misc_RNA (1)...(19): siRNA sense strand
caaauccauucucuuuuag

SEQ ID NO: 1026231 - RNA, 19 nt, Homo sapiens
  misc_RNA (1)...(19): siRNA sense strand
ucaaggaggaaagcgacua

SEQ ID NO: 1026232 - RNA, 19 nt, Homo sapiens
  misc_RNA (1)...(19): siRNA sense strand
ggaagugguucuacaauug

SEQ ID NO: 1026233 - RNA, 19 nt, Homo sapiens
  misc_RNA (1)...(19): siRNA sense strand
caaauggagugaagugaau

SEQ ID NO: 1026234 - RNA, 19 nt, Homo sapiens
  misc_RNA (1)...(19): siRNA sense strand
gaauacagcuaucaaaaug

SEQ ID NO: 1026235 - RNA, 19 nt, Homo sapiens
  misc_RNA (1)...(19): siRNA sense strand
cgauggugcugaugaagua

SEQ ID NO: 1026236 - RNA, 19 nt, Homo sapiens
  misc_RNA (1)...(19): siRNA sense strand
guacacaaauggagugaag

SEQ ID NO: 1026237 - RNA, 19 nt, Homo sapiens
  misc_RNA (1)...(19): siRNA sense strand
gagaaccacgugaggaaua

SEQ ID NO: 1026238 - RNA, 19 nt, Homo sapiens
  misc_RNA (1)...(19): siRNA sense strand
ggacacaggccuauucauc

SEQ ID NO: 1026239 - RNA, 19 nt, Homo sapiens
  misc_RNA (1)...(19): siRNA sense strand
ugacagauaaugggaauuu

SEQ ID NO: 1026240 - RNA, 19 nt, Homo sapiens
  misc_RNA (1)...(19): siRNA sense strand
ucgaauggcugucaacaag

SEQ ID NO: 1026241 - RNA, 19 nt, Homo sapiens
  misc_RNA (1)...(19): siRNA sense strand
uggaagugguucuacaauu

SEQ ID NO: 1026242 - RNA, 19 nt, Homo sapiens
  misc_RNA (1)...(19): siRNA sense strand
acacaggccuauucaucaa

SEQ ID NO: 1026243 - RNA, 19 nt, Homo sapiens
  misc_RNA (1)...(19): siRNA sense strand
gaagugguucuacaauugu

SEQ ID NO: 1026244 - RNA, 19 nt, Homo sapiens
  misc_RNA (1)...(19): siRNA sense strand
gcugagagagucuacuuug

SEQ ID NO: 1026245 - RNA, 19 nt, Homo sapiens
  misc_RNA (1)...(19): siRNA sense strand
ggugacagauaaugggaau

SEQ ID NO: 1026246 - RNA, 19 nt, Homo sapiens
  misc_RNA (1)...(19): siRNA sense strand
gaacuucgaauggcuguca

SEQ ID NO: 1026247 - RNA, 19 nt, Homo sapiens
  misc_RNA (1)...(19): siRNA sense strand
cugaaagggugaagcaaga

SEQ ID NO: 1026248 - RNA, 19 nt, Homo sapiens
  misc_RNA (1)...(19): siRNA sense strand
ggaauuggaagugguucua

SEQ ID NO: 1026249 - RNA, 19 nt, Homo sapiens
  misc_RNA (1)...(19): siRNA sense strand
ccagugagccgagcuguga

SEQ ID NO: 1026250 - RNA, 19 nt, Homo sapiens
  misc_RNA (1)...(19): siRNA sense strand
gcugugagccagaaguuug

SEQ ID NO: 1026251 - RNA, 19 nt, Homo sapiens
  misc_RNA (1)...(19): siRNA sense strand
gaaagggugaagcaagaga

SEQ ID NO: 1026252 - RNA, 19 nt, Homo sapiens
  misc_RNA (1)...(19): siRNA sense strand
agaaccacgugaggaauaa

SEQ ID NO: 1026253 - RNA, 19 nt, Homo sapiens
  misc_RNA (1)...(19): siRNA sense strand
gaagugaauacagcuauca

SEQ ID NO: 1026254 - RNA, 19 nt, Homo sapiens
  misc_RNA (1)...(19): siRNA sense strand
caggauggcucagugaaca

SEQ ID NO: 1026255 - RNA, 19 nt, Homo sapiens
  misc_RNA (1)...(19): siRNA sense strand
gacacaggccuauucauca

SEQ ID NO: 1026256 - RNA, 19 nt, Homo sapiens
  misc_RNA (1)...(19): siRNA sense strand
gaagauuguggcuggcuau

SEQ ID NO: 1026257 - RNA, 19 nt, Homo sapiens
  misc_RNA (1)...(19): siRNA sense strand
ucaggaaagauucgaagaa

SEQ ID NO: 1026258 - RNA, 19 nt, Homo sapiens
  misc_RNA (1)...(19): siRNA sense strand
gauuguggcuggcuaugcu

SEQ ID NO: 1026259 - RNA, 19 nt, Homo sapiens
  misc_RNA (1)...(19): siRNA sense strand
uaucuuggacuggaaguuu

SEQ ID NO: 1026260 - RNA, 19 nt, Homo sapiens
  misc_RNA (1)...(19): siRNA sense strand
gggcgugguugaacuucga

SEQ ID NO: 1026261 - RNA, 19 nt, Homo sapiens
  misc_RNA (1)...(19): siRNA sense strand
gagcugugagccagaaguu

SEQ ID NO: 1026262 - RNA, 19 nt, Homo sapiens
  misc_RNA (1)...(19): siRNA sense strand
ccaucgaggucaucccaau

SEQ ID NO: 1026263 - RNA, 19 nt, Homo sapiens
  misc_RNA (1)...(19): siRNA sense strand
ucaucgugaucgcugauuu

SEQ ID NO: 1026264 - RNA, 19 nt, Homo sapiens
  misc_RNA (1)...(19): siRNA sense strand
acaaauggagugaagugaa

SEQ ID NO: 1026265 - RNA, 19 nt, Homo sapiens
  misc_RNA (1)...(19): siRNA sense strand
ugaagugaauacagcuauc

SEQ ID NO: 1026266 - RNA, 19 nt, Homo sapiens
  misc_RNA (1)...(19): siRNA sense strand
caagugcugggaauuggaa

SEQ ID NO: 1026267 - RNA, 19 nt, Homo sapiens
  misc_RNA (1)...(19): siRNA sense strand
gaagcaagagaaucugaac

SEQ ID NO: 1026268 - RNA, 19 nt, Homo sapiens
  misc_RNA (1)...(19): siRNA sense strand
cgaagaaucucggggauca

SEQ ID NO: 1026269 - RNA, 19 nt, Homo sapiens
  misc_RNA (1)...(19): siRNA sense strand
gaaucugaaccucgucugu

SEQ ID NO: 1026270 - RNA, 19 nt, Homo sapiens
  misc_RNA (1)...(19): siRNA sense strand
aaucugaaccucgucugua

SEQ ID NO: 1026271 - RNA, 19 nt, Homo sapiens
  misc_RNA (1)...(19): siRNA sense strand
gguggacacaggccuauuc

SEQ ID NO: 1026272 - RNA, 19 nt, Homo sapiens
  misc_RNA (1)...(19): siRNA sense strand
cgugaggaauaaccaagug

SEQ ID NO: 1026273 - RNA, 19 nt, Homo sapiens
  misc_RNA (1)...(19): siRNA sense strand
gacccucagugaucuggau

SEQ ID NO: 1026274 - RNA, 19 nt, Homo sapiens
  misc_RNA (1)...(19): siRNA sense strand
cagcucauccugcaguaug

SEQ ID NO: 1026275 - RNA, 19 nt, Homo sapiens
  misc_RNA (1)...(19): siRNA sense strand
acacaaauggagugaagug

SEQ ID NO: 1026276 - RNA, 19 nt, Homo sapiens
  misc_RNA (1)...(19): siRNA sense strand
gccagcucauccugcagua

SEQ ID NO: 1026277 - RNA, 19 nt, Homo sapiens
  misc_RNA (1)...(19): siRNA sense strand
uaaccaagugcugggaauu

SEQ ID NO: 1026278 - RNA, 19 nt, Homo sapiens
  misc_RNA (1)...(19): siRNA sense strand
cagugaacaugagggagaa

SEQ ID NO: 1026279 - RNA, 19 nt, Homo sapiens
  misc_RNA (1)...(19): siRNA sense strand
ggagaaccacgugaggaau

SEQ ID NO: 1026280 - RNA, 19 nt, Homo sapiens
  misc_RNA (1)...(19): siRNA sense strand
gugaagcaagagaaucuga

SEQ ID NO: 1026281 - RNA, 19 nt, Homo sapiens
  misc_RNA (1)...(19): siRNA sense strand
uggagaaccacgugaggaa

SEQ ID NO: 1026282 - RNA, 19 nt, Homo sapiens
  misc_RNA (1)...(19): siRNA sense strand
gugaagugaauacagcuau

SEQ ID NO: 1026283 - RNA, 19 nt, Homo sapiens
  misc_RNA (1)...(19): siRNA sense strand
gggugaagcaagagaaucu

SEQ ID NO: 1026284 - RNA, 19 nt, Homo sapiens
  misc_RNA (1)...(19): siRNA sense strand
ugaagcaagagaaucugaa

SEQ ID NO: 1026285 - RNA, 19 nt, Homo sapiens
  misc_RNA (1)...(19): siRNA sense strand
gccgagcugugagccagaa

SEQ ID NO: 1026286 - RNA, 19 nt, Homo sapiens
  misc_RNA (1)...(19): siRNA sense strand
acaggccuauucaucaaca

SEQ ID NO: 1026287 - RNA, 19 nt, Homo sapiens
  misc_RNA (1)...(19): siRNA sense strand
gcaaagagaagaaauauga

SEQ ID NO: 1026288 - RNA, 19 nt, Homo sapiens
  misc_RNA (1)...(19): siRNA sense strand
gcaggaggauggaucuuua

SEQ ID NO: 1026289 - RNA, 19 nt, Homo sapiens
  misc_RNA (1)...(19): siRNA sense strand
gggacaagcuccaguguaa

SEQ ID NO: 1026290 - RNA, 19 nt, Homo sapiens
  misc_RNA (1)...(19): siRNA sense strand
ggacaggccuggcuucuuc

SEQ ID NO: 1026291 - RNA, 19 nt, Homo sapiens
  misc_RNA (1)...(19): siRNA sense strand
caggacaucuguuaucaua

SEQ ID NO: 1026292 - RNA, 19 nt, Homo sapiens
  misc_RNA (1)...(19): siRNA sense strand
gaggauggaucuuuauuuc

SEQ ID NO: 1026293 - RNA, 19 nt, Homo sapiens
  misc_RNA (1)...(19): siRNA sense strand
uuaaagagcucuacuacca

SEQ ID NO: 1026294 - RNA, 19 nt, Homo sapiens
  misc_RNA (1)...(19): siRNA sense strand
caucaggucuccaacaaug

SEQ ID NO: 1026295 - RNA, 19 nt, Homo sapiens
  misc_RNA (1)...(19): siRNA sense strand
gaagugauccuuguagaug

SEQ ID NO: 1026296 - RNA, 19 nt, Homo sapiens
  misc_RNA (1)...(19): siRNA sense strand
ucaaagagcgcauguuaug

SEQ ID NO: 1026297 - RNA, 19 nt, Homo sapiens
  misc_RNA (1)...(19): siRNA sense strand
acaaaggacuaacagacua

SEQ ID NO: 1026298 - RNA, 19 nt, Homo sapiens
  misc_RNA (1)...(19): siRNA sense strand
ggaagcagcuccgggacaa

SEQ ID NO: 1026299 - RNA, 19 nt, Homo sapiens
  misc_RNA (1)...(19): siRNA sense strand
ggaacccgcugugcaaaga

SEQ ID NO: 1026300 - RNA, 19 nt, Homo sapiens
  misc_RNA (1)...(19): siRNA sense strand
ggacaucuguuaucauagc

SEQ ID NO: 1026301 - RNA, 19 nt, Homo sapiens
  misc_RNA (1)...(19): siRNA sense strand
ggaggauggaucuuuauuu

SEQ ID NO: 1026302 - RNA, 19 nt, Homo sapiens
  misc_RNA (1)...(19): siRNA sense strand
caguuucguuccacucuua

SEQ ID NO: 1026303 - RNA, 19 nt, Homo sapiens
  misc_RNA (1)...(19): siRNA sense strand
gacaccaggucauucugua

SEQ ID NO: 1026304 - RNA, 19 nt, Homo sapiens
  misc_RNA (1)...(19): siRNA sense strand
cuucaaagagcgcauguua

SEQ ID NO: 1026305 - RNA, 19 nt, Homo sapiens
  misc_RNA (1)...(19): siRNA sense strand
gcaggaauggauacccuua

SEQ ID NO: 1026306 - RNA, 19 nt, Homo sapiens
  misc_RNA (1)...(19): siRNA sense strand
uagaagaagugauccuugu

SEQ ID NO: 1026307 - RNA, 19 nt, Homo sapiens
  misc_RNA (1)...(19): siRNA sense strand
gaagaagugauccuuguag

SEQ ID NO: 1026308 - RNA, 19 nt, Homo sapiens
  misc_RNA (1)...(19): siRNA sense strand
ggauggaucuuuauuucac

SEQ ID NO: 1026309 - RNA, 19 nt, Homo sapiens
  misc_RNA (1)...(19): siRNA sense strand
aaguauggauggaugaauu

SEQ ID NO: 1026310 - RNA, 19 nt, Homo sapiens
  misc_RNA (1)...(19): siRNA sense strand
auacaggaauggaaguuug

SEQ ID NO: 1026311 - RNA, 19 nt, Homo sapiens
  misc_RNA (1)...(19): siRNA sense strand
cuauaacccucccgaugaa

SEQ ID NO: 1026312 - RNA, 19 nt, Homo sapiens
  misc_RNA (1)...(19): siRNA sense strand
cagaaagaaauacgcuaua

SEQ ID NO: 1026313 - RNA, 19 nt, Homo sapiens
  misc_RNA (1)...(19): siRNA sense strand
gaacaguccaagaaaugug

SEQ ID NO: 1026314 - RNA, 19 nt, Homo sapiens
  misc_RNA (1)...(19): siRNA sense strand
caucuguuaucauagcauu

SEQ ID NO: 1026315 - RNA, 19 nt, Homo sapiens
  misc_RNA (1)...(19): siRNA sense strand
ggagucgagugacaguuuc

SEQ ID NO: 1026316 - RNA, 19 nt, Homo sapiens
  misc_RNA (1)...(19): siRNA sense strand
gaaagaaauacgcuauaac

SEQ ID NO: 1026317 - RNA, 19 nt, Homo sapiens
  misc_RNA (1)...(19): siRNA sense strand
guacacgucccagaaagaa

SEQ ID NO: 1026318 - RNA, 19 nt, Homo sapiens
  misc_RNA (1)...(19): siRNA sense strand
gagaggauacggaugcaau

SEQ ID NO: 1026319 - RNA, 19 nt, Homo sapiens
  misc_RNA (1)...(19): siRNA sense strand
ucacgaacaguccaagaaa

SEQ ID NO: 1026320 - RNA, 19 nt, Homo sapiens
  misc_RNA (1)...(19): siRNA sense strand
gucaucaggucuccaacaa

SEQ ID NO: 1026321 - RNA, 19 nt, Homo sapiens
  misc_RNA (1)...(19): siRNA sense strand
cgaggaaggagucgaguga

SEQ ID NO: 1026322 - RNA, 19 nt, Homo sapiens
  misc_RNA (1)...(19): siRNA sense strand
gaucuuuauuucacgaaca

SEQ ID NO: 1026323 - RNA, 19 nt, Homo sapiens
  misc_RNA (1)...(19): siRNA sense strand
gacuacugcuuugacuaua

SEQ ID NO: 1026324 - RNA, 19 nt, Homo sapiens
  misc_RNA (1)...(19): siRNA sense strand
ggauggaugaauuuaaaga

SEQ ID NO: 1026325 - RNA, 19 nt, Homo sapiens
  misc_RNA (1)...(19): siRNA sense strand
ccagaaagaaauacgcuau

SEQ ID NO: 1026326 - RNA, 19 nt, Homo sapiens
  misc_RNA (1)...(19): siRNA sense strand
cuaacagacuacugcuuug

SEQ ID NO: 1026327 - RNA, 19 nt, Homo sapiens
  misc_RNA (1)...(19): siRNA sense strand
gggcugcauugcuguggaa

SEQ ID NO: 1026328 - RNA, 19 nt, Homo sapiens
  misc_RNA (1)...(19): siRNA sense strand
cggauauccugcuagaaga

SEQ ID NO: 1026329 - RNA, 19 nt, Homo sapiens
  misc_RNA (1)...(19): siRNA sense strand
caaagagcgcauguuauga

SEQ ID NO: 1026330 - RNA, 19 nt, Homo sapiens
  misc_RNA (1)...(19): siRNA sense strand
gaguacacgucccagaaag

SEQ ID NO: 1026331 - RNA, 19 nt, Homo sapiens
  misc_RNA (1)...(19): siRNA sense strand
aagaagugauccuuguaga

SEQ ID NO: 1026332 - RNA, 19 nt, Homo sapiens
  misc_RNA (1)...(19): siRNA sense strand
gauacaggaauggaaguuu

SEQ ID NO: 1026333 - RNA, 19 nt, Homo sapiens
  misc_RNA (1)...(19): siRNA sense strand
gaaucagaaguucaucuug

SEQ ID NO: 1026334 - RNA, 19 nt, Homo sapiens
  misc_RNA (1)...(19): siRNA sense strand
uaacagacuacugcuuuga

SEQ ID NO: 1026335 - RNA, 19 nt, Homo sapiens
  misc_RNA (1)...(19): siRNA sense strand
gacaagcuccaguguaaag

SEQ ID NO: 1026336 - RNA, 19 nt, Homo sapiens
  misc_RNA (1)...(19): siRNA sense strand
ggacaagcuccaguguaaa

SEQ ID NO: 1026337 - RNA, 19 nt, Homo sapiens
  misc_RNA (1)...(19): siRNA sense strand
acuaacagacuacugcuuu

SEQ ID NO: 1026338 - RNA, 19 nt, Homo sapiens
  misc_RNA (1)...(19): siRNA sense strand
cgaguacacgucccagaaa

SEQ ID NO: 1026339 - RNA, 19 nt, Homo sapiens
  misc_RNA (1)...(19): siRNA sense strand
ggacaccaggucauucugu

SEQ ID NO: 1026340 - RNA, 19 nt, Homo sapiens
  misc_RNA (1)...(19): siRNA sense strand
gugcaaagagaagaaauau

SEQ ID NO: 1026341 - RNA, 19 nt, Homo sapiens
  misc_RNA (1)...(19): siRNA sense strand
ggauauccugcuagaagaa

SEQ ID NO: 1026342 - RNA, 19 nt, Homo sapiens
  misc_RNA (1)...(19): siRNA sense strand
cacgaacaguccaagaaau

SEQ ID NO: 1026343 - RNA, 19 nt, Homo sapiens
  misc_RNA (1)...(19): siRNA sense strand
acuauaacccucccgauga

SEQ ID NO: 1026344 - RNA, 19 nt, Homo sapiens
  misc_RNA (1)...(19): siRNA sense strand
acuacugcuuugacuauaa

SEQ ID NO: 1026345 - RNA, 19 nt, Homo sapiens
  misc_RNA (1)...(19): siRNA sense strand
uugaauaucuggggucuua

SEQ ID NO: 1026346 - RNA, 19 nt, Homo sapiens
  misc_RNA (1)...(19): siRNA sense strand
auagagagcaccugaagga

SEQ ID NO: 1026347 - RNA, 19 nt, Homo sapiens
  misc_RNA (1)...(19): siRNA sense strand
aaggagcgcuuggccaaug

SEQ ID NO: 1026348 - RNA, 19 nt, Homo sapiens
  misc_RNA (1)...(19): siRNA sense strand
ggaugggccagaaucaguu

SEQ ID NO: 1026349 - RNA, 19 nt, Homo sapiens
  misc_RNA (1)...(19): siRNA sense strand
agacuacugcuuugacuau

SEQ ID NO: 1026350 - RNA, 19 nt, Homo sapiens
  misc_RNA (1)...(19): siRNA sense strand
gcuccaguguaaagacuuc

SEQ ID NO: 1026351 - RNA, 19 nt, Homo sapiens
  misc_RNA (1)...(19): siRNA sense strand
guauggauggaugaauuua

SEQ ID NO: 1026352 - RNA, 19 nt, Homo sapiens
  misc_RNA (1)...(19): siRNA sense strand
ggugggcuguuugcuguga

SEQ ID NO: 1026353 - RNA, 19 nt, Homo sapiens
  misc_RNA (1)...(19): siRNA sense strand
agaagaagugauccuugua

SEQ ID NO: 1026354 - RNA, 19 nt, Homo sapiens
  misc_RNA (1)...(19): siRNA sense strand
gaaggagucgagugacagu

SEQ ID NO: 1026355 - RNA, 19 nt, Homo sapiens
  misc_RNA (1)...(19): siRNA sense strand
gcuggaacccgcugugcaa

SEQ ID NO: 1026356 - RNA, 19 nt, Homo sapiens
  misc_RNA (1)...(19): siRNA sense strand
gcgcuuggccaaugagcuu

SEQ ID NO: 1026357 - RNA, 19 nt, Homo sapiens
  misc_RNA (1)...(19): siRNA sense strand
acaaggcucuggccaacag

SEQ ID NO: 1026358 - RNA, 19 nt, Homo sapiens
  misc_RNA (1)...(19): siRNA sense strand
ggucuuaugauacaggaau

SEQ ID NO: 1026359 - RNA, 19 nt, Homo sapiens
  misc_RNA (1)...(19): siRNA sense strand
gcugugaguaagaaauauu

SEQ ID NO: 1026360 - RNA, 19 nt, Homo sapiens
  misc_RNA (1)...(19): siRNA sense strand
ugcagaggauccaugaaga

SEQ ID NO: 1026361 - RNA, 19 nt, Homo sapiens
  misc_RNA (1)...(19): siRNA sense strand
gcagaggauccaugaagag

SEQ ID NO: 1026362 - RNA, 19 nt, Homo sapiens
  misc_RNA (1)...(19): siRNA sense strand
uuacgagacugcaccaacu

SEQ ID NO: 1026363 - RNA, 19 nt, Homo sapiens
  misc_RNA (1)...(19): siRNA sense strand
aaugaagccuggucaacuc

SEQ ID NO: 1026364 - RNA, 19 nt, Homo sapiens
  misc_RNA (1)...(19): siRNA sense strand
gaugugaucgacuggaaca

SEQ ID NO: 1026365 - RNA, 19 nt, Homo sapiens
  misc_RNA (1)...(19): siRNA sense strand
augcaucucugcgaagaaa

SEQ ID NO: 1026366 - RNA, 19 nt, Homo sapiens
  misc_RNA (1)...(19): siRNA sense strand
ucaugcaucucugcgaaga

SEQ ID NO: 1026367 - RNA, 19 nt, Homo sapiens
  misc_RNA (1)...(19): siRNA sense strand
gaugggccagaaucaguuu

SEQ ID NO: 1026368 - RNA, 19 nt, Homo sapiens
  misc_RNA (1)...(19): siRNA sense strand
cccaggacaucuguuauca

SEQ ID NO: 1026369 - RNA, 19 nt, Homo sapiens
  misc_RNA (1)...(19): siRNA sense strand
ccagaacaaaggacuaaca

SEQ ID NO: 1026370 - RNA, 19 nt, Homo sapiens
  misc_RNA (1)...(19): siRNA sense strand
acuggaacaccuucgaaua

SEQ ID NO: 1026371 - RNA, 19 nt, Homo sapiens
  misc_RNA (1)...(19): siRNA sense strand
aagugauccuuguagauga

SEQ ID NO: 1026372 - RNA, 19 nt, Homo sapiens
  misc_RNA (1)...(19): siRNA sense strand
gggaugggccagaaucagu

SEQ ID NO: 1026373 - RNA, 19 nt, Homo sapiens
  misc_RNA (1)...(19): siRNA sense strand
ucgggaugcuccagaacaa

SEQ ID NO: 1026374 - RNA, 19 nt, Homo sapiens
  misc_RNA (1)...(19): siRNA sense strand
gaaguauggauggaugaau

SEQ ID NO: 1026375 - RNA, 19 nt, Homo sapiens
  misc_RNA (1)...(19): siRNA sense strand
ucgugcagcugaaguaugg

SEQ ID NO: 1026376 - RNA, 19 nt, Homo sapiens
  misc_RNA (1)...(19): siRNA sense strand
cagagaaucagaaguucau

SEQ ID NO: 1026377 - RNA, 19 nt, Homo sapiens
  misc_RNA (1)...(19): siRNA sense strand
ccggauauccugcuagaag

SEQ ID NO: 1026378 - RNA, 19 nt, Homo sapiens
  misc_RNA (1)...(19): siRNA sense strand
ugugcaaagagaagaaaua

SEQ ID NO: 1026379 - RNA, 19 nt, Homo sapiens
  misc_RNA (1)...(19): siRNA sense strand
gcuagaagaagugauccuu

SEQ ID NO: 1026380 - RNA, 19 nt, Homo sapiens
  misc_RNA (1)...(19): siRNA sense strand
ccucagcgaccgcaucuca

SEQ ID NO: 1026381 - RNA, 19 nt, Homo sapiens
  misc_RNA (1)...(19): siRNA sense strand
guggaagcaggaauggaua

SEQ ID NO: 1026382 - RNA, 19 nt, Homo sapiens
  misc_RNA (1)...(19): siRNA sense strand
gacuguguauccagaacug

SEQ ID NO: 1026383 - RNA, 19 nt, Homo sapiens
  misc_RNA (1)...(19): siRNA sense strand
cagcugaaguauggaugga

SEQ ID NO: 1026384 - RNA, 19 nt, Homo sapiens
  misc_RNA (1)...(19): siRNA sense strand
caacucuccuucggacagu

SEQ ID NO: 1026385 - RNA, 19 nt, Homo sapiens
  misc_RNA (1)...(19): siRNA sense strand
ggaacaccuucgaauaccu

SEQ ID NO: 1026386 - RNA, 19 nt, Homo sapiens
  misc_RNA (1)...(19): siRNA sense strand
agaaucagaaguucaucuu

SEQ ID NO: 1026387 - RNA, 19 nt, Homo sapiens
  misc_RNA (1)...(19): siRNA sense strand
gagggacgcuucggaguua

SEQ ID NO: 1026388 - RNA, 19 nt, Homo sapiens
  misc_RNA (1)...(19): siRNA sense strand
gcucaggccucugggauua

SEQ ID NO: 1026389 - RNA, 19 nt, Homo sapiens
  misc_RNA (1)...(19): siRNA sense strand
gaucuacgcugccuucaag

SEQ ID NO: 1026390 - RNA, 19 nt, Homo sapiens
  misc_RNA (1)...(19): siRNA sense strand
gcaggaagaccuugaggaa

SEQ ID NO: 1026391 - RNA, 19 nt, Homo sapiens
  misc_RNA (1)...(19): siRNA sense strand
gagaagcaccuguacaaug

SEQ ID NO: 1026392 - RNA, 19 nt, Homo sapiens
  misc_RNA (1)...(19): siRNA sense strand
ccauugcacugcucuuuga

SEQ ID NO: 1026393 - RNA, 19 nt, Homo sapiens
  misc_RNA (1)...(19): siRNA sense strand
gcuacuccgugacaucuuu

SEQ ID NO: 1026394 - RNA, 19 nt, Homo sapiens
  misc_RNA (1)...(19): siRNA sense strand
gaaggaguauguggacugu

SEQ ID NO: 1026395 - RNA, 19 nt, Homo sapiens
  misc_RNA (1)...(19): siRNA sense strand
ugaaugcgaagaagagaua

SEQ ID NO: 1026396 - RNA, 19 nt, Homo sapiens
  misc_RNA (1)...(19): siRNA sense strand
caaugcugcugccuucaaa

SEQ ID NO: 1026397 - RNA, 19 nt, Homo sapiens
  misc_RNA (1)...(19): siRNA sense strand
ccucugggauuaguaguuu

SEQ ID NO: 1026398 - RNA, 19 nt, Homo sapiens
  misc_RNA (1)...(19): siRNA sense strand
aggaaaagcugaaggagua

SEQ ID NO: 1026399 - RNA, 19 nt, Homo sapiens
  misc_RNA (1)...(19): siRNA sense strand
gaaagggaagggcgaggaa

SEQ ID NO: 1026400 - RNA, 19 nt, Homo sapiens
  misc_RNA (1)...(19): siRNA sense strand
uaaccaccgugcacuuguu

SEQ ID NO: 1026401 - RNA, 19 nt, Homo sapiens
  misc_RNA (1)...(19): siRNA sense strand
gauagugcgcuucggcuuu

SEQ ID NO: 1026402 - RNA, 19 nt, Homo sapiens
  misc_RNA (1)...(19): siRNA sense strand
gggcauugcugcucaccau

SEQ ID NO: 1026403 - RNA, 19 nt, Homo sapiens
  misc_RNA (1)...(19): siRNA sense strand
gcuagccgaugcccuggaa

SEQ ID NO: 1026404 - RNA, 19 nt, Homo sapiens
  misc_RNA (1)...(19): siRNA sense strand
agaagcaccuguacaaugc

SEQ ID NO: 1026405 - RNA, 19 nt, Homo sapiens
  misc_RNA (1)...(19): siRNA sense strand
gcuuugaggugcucuacau

SEQ ID NO: 1026406 - RNA, 19 nt, Homo sapiens
  misc_RNA (1)...(19): siRNA sense strand
ggaaaagugccucaagaaa

SEQ ID NO: 1026407 - RNA, 19 nt, Homo sapiens
  misc_RNA (1)...(19): siRNA sense strand
gaaaagugccucaagaaag

SEQ ID NO: 1026408 - RNA, 19 nt, Homo sapiens
  misc_RNA (1)...(19): siRNA sense strand
cugcaagguuccacgcuuu

SEQ ID NO: 1026409 - RNA, 19 nt, Homo sapiens
  misc_RNA (1)...(19): siRNA sense strand
ugccuugccugcuuagaaa

SEQ ID NO: 1026410 - RNA, 19 nt, Homo sapiens
  misc_RNA (1)...(19): siRNA sense strand
ccaaaucagccacauccuu

SEQ ID NO: 1026411 - RNA, 19 nt, Homo sapiens
  misc_RNA (1)...(19): siRNA sense strand
cauugugggugcauaguuc

SEQ ID NO: 1026412 - RNA, 19 nt, Homo sapiens
  misc_RNA (1)...(19): siRNA sense strand
ggaugccacugcccugaag

SEQ ID NO: 1026413 - RNA, 19 nt, Homo sapiens
  misc_RNA (1)...(19): siRNA sense strand
aggaagaccuugaggaaaa

SEQ ID NO: 1026414 - RNA, 19 nt, Homo sapiens
  misc_RNA (1)...(19): siRNA sense strand
uugaggaggaguuuguuua

SEQ ID NO: 1026415 - RNA, 19 nt, Homo sapiens
  misc_RNA (1)...(19): siRNA sense strand
ccugaaggccugcaagguu

SEQ ID NO: 1026416 - RNA, 19 nt, Homo sapiens
  misc_RNA (1)...(19): siRNA sense strand
ucucuugccuugccugcuu

SEQ ID NO: 1026417 - RNA, 19 nt, Homo sapiens
  misc_RNA (1)...(19): siRNA sense strand
aggaggaguuuguuuacga

SEQ ID NO: 1026418 - RNA, 19 nt, Homo sapiens
  misc_RNA (1)...(19): siRNA sense strand
cagcucuuguccagugaaa

SEQ ID NO: 1026419 - RNA, 19 nt, Homo sapiens
  misc_RNA (1)...(19): siRNA sense strand
gcaagguuccacgcuuuga

SEQ ID NO: 1026420 - RNA, 19 nt, Homo sapiens
  misc_RNA (1)...(19): siRNA sense strand
gcucuuguccagugaaagu

SEQ ID NO: 1026421 - RNA, 19 nt, Homo sapiens
  misc_RNA (1)...(19): siRNA sense strand
ucuaagcccuucccauggu

SEQ ID NO: 1026422 - RNA, 19 nt, Homo sapiens
  misc_RNA (1)...(19): siRNA sense strand
gcauugugggugcauaguu

SEQ ID NO: 1026423 - RNA, 19 nt, Homo sapiens
  misc_RNA (1)...(19): siRNA sense strand
ccuguuaucccaagcucua

SEQ ID NO: 1026424 - RNA, 19 nt, Homo sapiens
  misc_RNA (1)...(19): siRNA sense strand
ccagaacaaugagcuacuc

SEQ ID NO: 1026425 - RNA, 19 nt, Homo sapiens
  misc_RNA (1)...(19): siRNA sense strand
gcugccaagugcccugaga

SEQ ID NO: 1026426 - RNA, 19 nt, Homo sapiens
  misc_RNA (1)...(19): siRNA sense strand
auagugcgcuucggcuuug

SEQ ID NO: 1026427 - RNA, 19 nt, Homo sapiens
  misc_RNA (1)...(19): siRNA sense strand
ggaccuugaggaggaguuu

SEQ ID NO: 1026428 - RNA, 19 nt, Homo sapiens
  misc_RNA (1)...(19): siRNA sense strand
gcacccaaaucagccacau

SEQ ID NO: 1026429 - RNA, 19 nt, Homo sapiens
  misc_RNA (1)...(19): siRNA sense strand
ugagggacgcuucggaguu

SEQ ID NO: 1026430 - RNA, 19 nt, Homo sapiens
  misc_RNA (1)...(19): siRNA sense strand
gcuggucucugugcucagu

SEQ ID NO: 1026431 - RNA, 19 nt, Homo sapiens
  misc_RNA (1)...(19): siRNA sense strand
caggaagaccuugaggaaa

SEQ ID NO: 1026432 - RNA, 19 nt, Homo sapiens
  misc_RNA (1)...(19): siRNA sense strand
uugagaagcaccuguacaa

SEQ ID NO: 1026433 - RNA, 19 nt, Homo sapiens
  misc_RNA (1)...(19): siRNA sense strand
aaaagugccucaagaaagg

SEQ ID NO: 1026434 - RNA, 19 nt, Homo sapiens
  misc_RNA (1)...(19): siRNA sense strand
ggaucuacgcugccuucaa

SEQ ID NO: 1026435 - RNA, 19 nt, Homo sapiens
  misc_RNA (1)...(19): siRNA sense strand
gagcuacuccgugacaucu

SEQ ID NO: 1026436 - RNA, 19 nt, Homo sapiens
  misc_RNA (1)...(19): siRNA sense strand
aggaguauguggacugucu

SEQ ID NO: 1026437 - RNA, 19 nt, Homo sapiens
  misc_RNA (1)...(19): siRNA sense strand
gggcggugaaugcgaagaa

SEQ ID NO: 1026438 - RNA, 19 nt, Homo sapiens
  misc_RNA (1)...(19): siRNA sense strand
ccuggcugcugcugugcua

SEQ ID NO: 1026439 - RNA, 19 nt, Homo sapiens
  misc_RNA (1)...(19): siRNA sense strand
ggcuguugcuccuguuauc

SEQ ID NO: 1026440 - RNA, 19 nt, Homo sapiens
  misc_RNA (1)...(19): siRNA sense strand
gaagccgugugcgggacaa

SEQ ID NO: 1026441 - RNA, 19 nt, Homo sapiens
  misc_RNA (1)...(19): siRNA sense strand
uugaggugcucuacaugga

SEQ ID NO: 1026442 - RNA, 19 nt, Homo sapiens
  misc_RNA (1)...(19): siRNA sense strand
guuaaccaccgugcacuug

SEQ ID NO: 1026443 - RNA, 19 nt, Homo sapiens
  misc_RNA (1)...(19): siRNA sense strand
gaggaggaguuuguuuacg

SEQ ID NO: 1026444 - RNA, 19 nt, Homo sapiens
  misc_RNA (1)...(19): siRNA sense strand
cgccagcgcucuacuuucc

SEQ ID NO: 1026445 - RNA, 19 nt, Homo sapiens
  misc_RNA (1)...(19): siRNA sense strand
gaagagaaaccugauguaa

SEQ ID NO: 1026446 - RNA, 19 nt, Homo sapiens
  misc_RNA (1)...(19): siRNA sense strand
agagaaaccugauguaaag

SEQ ID NO: 1026447 - RNA, 19 nt, Homo sapiens
  misc_RNA (1)...(19): siRNA sense strand
gaagggauccaccuauuca

SEQ ID NO: 1026448 - RNA, 19 nt, Homo sapiens
  misc_RNA (1)...(19): siRNA sense strand
guacagcagacgccuauaa

SEQ ID NO: 1026449 - RNA, 19 nt, Homo sapiens
  misc_RNA (1)...(19): siRNA sense strand
ggaagagaaaccugaugua

SEQ ID NO: 1026450 - RNA, 19 nt, Homo sapiens
  misc_RNA (1)...(19): siRNA sense strand
gaaaccugauguaaagcaa

SEQ ID NO: 1026451 - RNA, 19 nt, Homo sapiens
  misc_RNA (1)...(19): siRNA sense strand
aagaagggauccaccuauu

SEQ ID NO: 1026452 - RNA, 19 nt, Homo sapiens
  misc_RNA (1)...(19): siRNA sense strand
cagcagacgccuauaauuc

SEQ ID NO: 1026453 - RNA, 19 nt, Homo sapiens
  misc_RNA (1)...(19): siRNA sense strand
ggauccaccuauucaguuc

SEQ ID NO: 1026454 - RNA, 19 nt, Homo sapiens
  misc_RNA (1)...(19): siRNA sense strand
aagagaaaccugauguaaa

SEQ ID NO: 1026455 - RNA, 19 nt, Homo sapiens
  misc_RNA (1)...(19): siRNA sense strand
gaagaaaguggucguucca

SEQ ID NO: 1026456 - RNA, 19 nt, Homo sapiens
  misc_RNA (1)...(19): siRNA sense strand
aggagaaguugauggagaa

SEQ ID NO: 1026457 - RNA, 19 nt, Homo sapiens
  misc_RNA (1)...(19): siRNA sense strand
gccuauaauucacaucuca

SEQ ID NO: 1026458 - RNA, 19 nt, Homo sapiens
  misc_RNA (1)...(19): siRNA sense strand
gggauccaccuauucaguu

SEQ ID NO: 1026459 - RNA, 19 nt, Homo sapiens
  misc_RNA (1)...(19): siRNA sense strand
gaaugagacgcuagucagu

SEQ ID NO: 1026460 - RNA, 19 nt, Homo sapiens
  misc_RNA (1)...(19): siRNA sense strand
agaaguugauggagaagca

SEQ ID NO: 1026461 - RNA, 19 nt, Homo sapiens
  misc_RNA (1)...(19): siRNA sense strand
cuaaggagaaguugaugga

SEQ ID NO: 1026462 - RNA, 19 nt, Homo sapiens
  misc_RNA (1)...(19): siRNA sense strand
ggagugaccagcagagaac

SEQ ID NO: 1026463 - RNA, 19 nt, Homo sapiens
  misc_RNA (1)...(19): siRNA sense strand
aaagaagggauccaccuau

SEQ ID NO: 1026464 - RNA, 19 nt, Homo sapiens
  misc_RNA (1)...(19): siRNA sense strand
augagacgcuagucaguug

SEQ ID NO: 1026465 - RNA, 19 nt, Homo sapiens
  misc_RNA (1)...(19): siRNA sense strand
gcagacgccuauaauucac

SEQ ID NO: 1026466 - RNA, 19 nt, Homo sapiens
  misc_RNA (1)...(19): siRNA sense strand
gggagugaccagcagagaa

SEQ ID NO: 1026467 - RNA, 19 nt, Homo sapiens
  misc_RNA (1)...(19): siRNA sense strand
caaaaucuaaggagaaguu

SEQ ID NO: 1026468 - RNA, 19 nt, Homo sapiens
  misc_RNA (1)...(19): siRNA sense strand
gaccagcagagaaccauuc

SEQ ID NO: 1026469 - RNA, 19 nt, Homo sapiens
  misc_RNA (1)...(19): siRNA sense strand
acagcagacgccuauaauu

SEQ ID NO: 1026470 - RNA, 19 nt, Homo sapiens
  misc_RNA (1)...(19): siRNA sense strand
aaucuaaggagaaguugau

SEQ ID NO: 1026471 - RNA, 19 nt, Homo sapiens
  misc_RNA (1)...(19): siRNA sense strand
ccaccuauucaguuccaaa

SEQ ID NO: 1026472 - RNA, 19 nt, Homo sapiens
  misc_RNA (1)...(19): siRNA sense strand
caguacagcagacgccuau

SEQ ID NO: 1026473 - RNA, 19 nt, Homo sapiens
  misc_RNA (1)...(19): siRNA sense strand
gcaguuccagcgggaguga

SEQ ID NO: 1026474 - RNA, 19 nt, Homo sapiens
  misc_RNA (1)...(19): siRNA sense strand
agaagggauccaccuauuc

SEQ ID NO: 1026475 - RNA, 19 nt, Homo sapiens
  misc_RNA (1)...(19): siRNA sense strand
uggaagagaaaccugaugu

SEQ ID NO: 1026476 - RNA, 19 nt, Homo sapiens
  misc_RNA (1)...(19): siRNA sense strand
ggaauacgcugaauccaua

SEQ ID NO: 1026477 - RNA, 19 nt, Homo sapiens
  misc_RNA (1)...(19): siRNA sense strand
gaaagaacaugguccagaa

SEQ ID NO: 1026478 - RNA, 19 nt, Homo sapiens
  misc_RNA (1)...(19): siRNA sense strand
ggacacugcuggucaggaa

SEQ ID NO: 1026479 - RNA, 19 nt, Homo sapiens
  misc_RNA (1)...(19): siRNA sense strand
ugaaggaugcuaaggaaua

SEQ ID NO: 1026480 - RNA, 19 nt, Homo sapiens
  misc_RNA (1)...(19): siRNA sense strand
ggaacgguuucauucauug

SEQ ID NO: 1026481 - RNA, 19 nt, Homo sapiens
  misc_RNA (1)...(19): siRNA sense strand
caacaucagcccuacuauu

SEQ ID NO: 1026482 - RNA, 19 nt, Homo sapiens
  misc_RNA (1)...(19): siRNA sense strand
ggccaucgcuggaaacaag

SEQ ID NO: 1026483 - RNA, 19 nt, Homo sapiens
  misc_RNA (1)...(19): siRNA sense strand
gaaggaugcuaaggaauac

SEQ ID NO: 1026484 - RNA, 19 nt, Homo sapiens
  misc_RNA (1)...(19): siRNA sense strand
ggaaacaauggaacaauca

SEQ ID NO: 1026485 - RNA, 19 nt, Homo sapiens
  misc_RNA (1)...(19): siRNA sense strand
cagcuguuaucguguauga

SEQ ID NO: 1026486 - RNA, 19 nt, Homo sapiens
  misc_RNA (1)...(19): siRNA sense strand
gaaaucaagcaucgugugu

SEQ ID NO: 1026487 - RNA, 19 nt, Homo sapiens
  misc_RNA (1)...(19): siRNA sense strand
gauauuaccaagcaggauu

SEQ ID NO: 1026488 - RNA, 19 nt, Homo sapiens
  misc_RNA (1)...(19): siRNA sense strand
ggucaggaacgguuucauu

SEQ ID NO: 1026489 - RNA, 19 nt, Homo sapiens
  misc_RNA (1)...(19): siRNA sense strand
ccugaaggaugcuaaggaa

SEQ ID NO: 1026490 - RNA, 19 nt, Homo sapiens
  misc_RNA (1)...(19): siRNA sense strand
gaaacaauggaacaaucaa

SEQ ID NO: 1026491 - RNA, 19 nt, Homo sapiens
  misc_RNA (1)...(19): siRNA sense strand
caauggaacaaucaaaguu

SEQ ID NO: 1026492 - RNA, 19 nt, Homo sapiens
  misc_RNA (1)...(19): siRNA sense strand
uguaugauauuaccaagca

SEQ ID NO: 1026493 - RNA, 19 nt, Homo sapiens
  misc_RNA (1)...(19): siRNA sense strand
uuaccaagcaggauucauu

SEQ ID NO: 1026494 - RNA, 19 nt, Homo sapiens
  misc_RNA (1)...(19): siRNA sense strand
ugcgaccucucagauauua

SEQ ID NO: 1026495 - RNA, 19 nt, Homo sapiens
  misc_RNA (1)...(19): siRNA sense strand
aacaucagcccuacuauug

SEQ ID NO: 1026496 - RNA, 19 nt, Homo sapiens
  misc_RNA (1)...(19): siRNA sense strand
uaauggccaucgcuggaaa

SEQ ID NO: 1026497 - RNA, 19 nt, Homo sapiens
  misc_RNA (1)...(19): siRNA sense strand
caggaacgguuucauucau

SEQ ID NO: 1026498 - RNA, 19 nt, Homo sapiens
  misc_RNA (1)...(19): siRNA sense strand
cugcagcuguuaucgugua

SEQ ID NO: 1026499 - RNA, 19 nt, Homo sapiens
  misc_RNA (1)...(19): siRNA sense strand
aaacaagugcgaccucuca

SEQ ID NO: 1026500 - RNA, 19 nt, Homo sapiens
  misc_RNA (1)...(19): siRNA sense strand
gaaaauggaaacaauggaa

SEQ ID NO: 1026501 - RNA, 19 nt, Homo sapiens
  misc_RNA (1)...(19): siRNA sense strand
uggaaacaauggaacaauc

SEQ ID NO: 1026502 - RNA, 19 nt, Homo sapiens
  misc_RNA (1)...(19): siRNA sense strand
cacaacaucagcccuacua

SEQ ID NO: 1026503 - RNA, 19 nt, Homo sapiens
  misc_RNA (1)...(19): siRNA sense strand
ccaagcaggauucauuuua

SEQ ID NO: 1026504 - RNA, 19 nt, Homo sapiens
  misc_RNA (1)...(19): siRNA sense strand
gcuaaggaauacgcugaau

SEQ ID NO: 1026505 - RNA, 19 nt, Homo sapiens
  misc_RNA (1)...(19): siRNA sense strand
caagcaggauucauuuuau

SEQ ID NO: 1026506 - RNA, 19 nt, Homo sapiens
  misc_RNA (1)...(19): siRNA sense strand
aggaacgguuucauucauu

SEQ ID NO: 1026507 - RNA, 19 nt, Homo sapiens
  misc_RNA (1)...(19): siRNA sense strand
caagugcgaccucucagau

SEQ ID NO: 1026508 - RNA, 19 nt, Homo sapiens
  misc_RNA (1)...(19): siRNA sense strand
agugcgaccucucagauau

SEQ ID NO: 1026509 - RNA, 19 nt, Homo sapiens
  misc_RNA (1)...(19): siRNA sense strand
aaacugugccuuguggaaa

SEQ ID NO: 1026510 - RNA, 19 nt, Homo sapiens
  misc_RNA (1)...(19): siRNA sense strand
cauuggcucccauguacua

SEQ ID NO: 1026511 - RNA, 19 nt, Homo sapiens
  misc_RNA (1)...(19): siRNA sense strand
gauacgggagcucaaagug

SEQ ID NO: 1026512 - RNA, 19 nt, Homo sapiens
  misc_RNA (1)...(19): siRNA sense strand
uaccaagcaggauucauuu

SEQ ID NO: 1026513 - RNA, 19 nt, Homo sapiens
  misc_RNA (1)...(19): siRNA sense strand
uaggugccaucgugguuga

SEQ ID NO: 1026514 - RNA, 19 nt, Homo sapiens
  misc_RNA (1)...(19): siRNA sense strand
aaagaacaugguccagaaa

SEQ ID NO: 1026515 - RNA, 19 nt, Homo sapiens
  misc_RNA (1)...(19): siRNA sense strand
guaauggccaucgcuggaa

SEQ ID NO: 1026516 - RNA, 19 nt, Homo sapiens
  misc_RNA (1)...(19): siRNA sense strand
gaccaaaacugugccuugu

SEQ ID NO: 1026517 - RNA, 19 nt, Homo sapiens
  misc_RNA (1)...(19): siRNA sense strand
gucaggaacgguuucauuc

SEQ ID NO: 1026518 - RNA, 19 nt, Homo sapiens
  misc_RNA (1)...(19): siRNA sense strand
cuucacaaguuccucaucu

SEQ ID NO: 1026519 - RNA, 19 nt, Homo sapiens
  misc_RNA (1)...(19): siRNA sense strand
ucaggaacgguuucauuca

SEQ ID NO: 1026520 - RNA, 19 nt, Homo sapiens
  misc_RNA (1)...(19): siRNA sense strand
gaacaugguccagaaaaca

SEQ ID NO: 1026521 - RNA, 19 nt, Homo sapiens
  misc_RNA (1)...(19): siRNA sense strand
uaaggaauacgcugaaucc

SEQ ID NO: 1026522 - RNA, 19 nt, Homo sapiens
  misc_RNA (1)...(19): siRNA sense strand
ucacuuugaccacaacauc

SEQ ID NO: 1026523 - RNA, 19 nt, Homo sapiens
  misc_RNA (1)...(19): siRNA sense strand
aauggaacaaucaaaguug

SEQ ID NO: 1026524 - RNA, 19 nt, Homo sapiens
  misc_RNA (1)...(19): siRNA sense strand
gaacgguuucauucauugg

SEQ ID NO: 1026525 - RNA, 19 nt, Homo sapiens
  misc_RNA (1)...(19): siRNA sense strand
caucgugguugagacaagu

SEQ ID NO: 1026526 - RNA, 19 nt, Homo sapiens
  misc_RNA (1)...(19): siRNA sense strand
cauaggugccaucgugguu

SEQ ID NO: 1026527 - RNA, 19 nt, Homo sapiens
  misc_RNA (1)...(19): siRNA sense strand
uucauuggcucccauguac

SEQ ID NO: 1026528 - RNA, 19 nt, Homo sapiens
  misc_RNA (1)...(19): siRNA sense strand
gcucaaagugugccuucuc

SEQ ID NO: 1026529 - RNA, 19 nt, Homo sapiens
  misc_RNA (1)...(19): siRNA sense strand
gggaaaggcuucucuuaua

SEQ ID NO: 1026530 - RNA, 19 nt, Homo sapiens
  misc_RNA (1)...(19): siRNA sense strand
ggaaaggcuucucuuauaa

SEQ ID NO: 1026531 - RNA, 19 nt, Homo sapiens
  misc_RNA (1)...(19): siRNA sense strand
ggagaaagcuuaugaaugc

SEQ ID NO: 1026532 - RNA, 19 nt, Homo sapiens
  misc_RNA (1)...(19): siRNA sense strand
uaacucagaucucaguaua

SEQ ID NO: 1026533 - RNA, 19 nt, Homo sapiens
  misc_RNA (1)...(19): siRNA sense strand
ggacuggccuucauucaga

SEQ ID NO: 1026534 - RNA, 19 nt, Homo sapiens
  misc_RNA (1)...(19): siRNA sense strand
gggaagaccuuucgacaga

SEQ ID NO: 1026535 - RNA, 19 nt, Homo sapiens
  misc_RNA (1)...(19): siRNA sense strand
ggucaaaucucauuacaca

SEQ ID NO: 1026536 - RNA, 19 nt, Homo sapiens
  misc_RNA (1)...(19): siRNA sense strand
agagaaaucuuccauaugu

SEQ ID NO: 1026537 - RNA, 19 nt, Homo sapiens
  misc_RNA (1)...(19): siRNA sense strand
agagaaaccucauaaaugu

SEQ ID NO: 1026538 - RNA, 19 nt, Homo sapiens
  misc_RNA (1)...(19): siRNA sense strand
gagagaaacccuuuaaaug

SEQ ID NO: 1026539 - RNA, 19 nt, Homo sapiens
  misc_RNA (1)...(19): siRNA sense strand
gagagaagccuuaugaaug

SEQ ID NO: 1026540 - RNA, 19 nt, Homo sapiens
  misc_RNA (1)...(19): siRNA sense strand
gagagaaaccucauaaaug

SEQ ID NO: 1026541 - RNA, 19 nt, Homo sapiens
  misc_RNA (1)...(19): siRNA sense strand
ggucagaguugauuauuca

SEQ ID NO: 1026542 - RNA, 19 nt, Homo sapiens
  misc_RNA (1)...(19): siRNA sense strand
guacagaagccagaauuua

SEQ ID NO: 1026543 - RNA, 19 nt, Homo sapiens
  misc_RNA (1)...(19): siRNA sense strand
gaagucacaccucaauaua

SEQ ID NO: 1026544 - RNA, 19 nt, Homo sapiens
  misc_RNA (1)...(19): siRNA sense strand
gcaacuccauguucauaaa

SEQ ID NO: 1026545 - RNA, 19 nt, Homo sapiens
  misc_RNA (1)...(19): siRNA sense strand
ggagaagccuuaugaaugc

SEQ ID NO: 1026546 - RNA, 19 nt, Homo sapiens
  misc_RNA (1)...(19): siRNA sense strand
gagaaacccuuuaaaugca

SEQ ID NO: 1026547 - RNA, 19 nt, Homo sapiens
  misc_RNA (1)...(19): siRNA sense strand
ggaaaggcuucguucagaa

SEQ ID NO: 1026548 - RNA, 19 nt, Homo sapiens
  misc_RNA (1)...(19): siRNA sense strand
ggaaagccuucaaccagaa

SEQ ID NO: 1026549 - RNA, 19 nt, Homo sapiens
  misc_RNA (1)...(19): siRNA sense strand
ggaaagccuucacucagaa

SEQ ID NO: 1026550 - RNA, 19 nt, Homo sapiens
  misc_RNA (1)...(19): siRNA sense strand
gcacaccgaagaauucaua

SEQ ID NO: 1026551 - RNA, 19 nt, Homo sapiens
  misc_RNA (1)...(19): siRNA sense strand
ggagagaaaccucauaaau

SEQ ID NO: 1026552 - RNA, 19 nt, Homo sapiens
  misc_RNA (1)...(19): siRNA sense strand
gggaaagccuucacucaga

SEQ ID NO: 1026553 - RNA, 19 nt, Homo sapiens
  misc_RNA (1)...(19): siRNA sense strand
gagagaaaccuuaugaaug

SEQ ID NO: 1026554 - RNA, 19 nt, Homo sapiens
  misc_RNA (1)...(19): siRNA sense strand
gagaaaagcucuauguaug

SEQ ID NO: 1026555 - RNA, 19 nt, Homo sapiens
  misc_RNA (1)...(19): siRNA sense strand
ggagagaaacccuauguau

SEQ ID NO: 1026556 - RNA, 19 nt, Homo sapiens
  misc_RNA (1)...(19): siRNA sense strand
gugaagcccuauauaugua

SEQ ID NO: 1026557 - RNA, 19 nt, Homo sapiens
  misc_RNA (1)...(19): siRNA sense strand
ggaaauuguuuaccuccaa

SEQ ID NO: 1026558 - RNA, 19 nt, Homo sapiens
  misc_RNA (1)...(19): siRNA sense strand
gagaaaucuuccauaugua

SEQ ID NO: 1026559 - RNA, 19 nt, Homo sapiens
  misc_RNA (1)...(19): siRNA sense strand
gauuacacaucacagaauu

SEQ ID NO: 1026560 - RNA, 19 nt, Homo sapiens
  misc_RNA (1)...(19): siRNA sense strand
gaauaaacaucagacaaca

SEQ ID NO: 1026561 - RNA, 19 nt, Homo sapiens
  misc_RNA (1)...(19): siRNA sense strand
agagagaaaucuuccauau

SEQ ID NO: 1026562 - RNA, 19 nt, Homo sapiens
  misc_RNA (1)...(19): siRNA sense strand
gggaaaggcuucguucaga

SEQ ID NO: 1026563 - RNA, 19 nt, Homo sapiens
  misc_RNA (1)...(19): siRNA sense strand
gaagucacagcucaaagua

SEQ ID NO: 1026564 - RNA, 19 nt, Homo sapiens
  misc_RNA (1)...(19): siRNA sense strand
gggagaagccuuaugaaug

SEQ ID NO: 1026565 - RNA, 19 nt, Homo sapiens
  misc_RNA (1)...(19): siRNA sense strand
ggagagaaaccuuaugaau

SEQ ID NO: 1026566 - RNA, 19 nt, Homo sapiens
  misc_RNA (1)...(19): siRNA sense strand
ggucaaaucucaguaagca

SEQ ID NO: 1026567 - RNA, 19 nt, Homo sapiens
  misc_RNA (1)...(19): siRNA sense strand
gaaaagcccuacauuuguu

SEQ ID NO: 1026568 - RNA, 19 nt, Homo sapiens
  misc_RNA (1)...(19): siRNA sense strand
ggcaaagcauucacacaaa

SEQ ID NO: 1026569 - RNA, 19 nt, Homo sapiens
  misc_RNA (1)...(19): siRNA sense strand
gaaaggcuucguucagaaa

SEQ ID NO: 1026570 - RNA, 19 nt, Homo sapiens
  misc_RNA (1)...(19): siRNA sense strand
gggaaggccuuuacugaca

SEQ ID NO: 1026571 - RNA, 19 nt, Homo sapiens
  misc_RNA (1)...(19): siRNA sense strand
cgacagaagucagaguuga

SEQ ID NO: 1026572 - RNA, 19 nt, Homo sapiens
  misc_RNA (1)...(19): siRNA sense strand
ggagagaagccuuaugaau

SEQ ID NO: 1026573 - RNA, 19 nt, Homo sapiens
  misc_RNA (1)...(19): siRNA sense strand
ggaaaagccuucacucaga

SEQ ID NO: 1026574 - RNA, 19 nt, Homo sapiens
  misc_RNA (1)...(19): siRNA sense strand
agagaaaccuuaugaaugc

SEQ ID NO: 1026575 - RNA, 19 nt, Homo sapiens
  misc_RNA (1)...(19): siRNA sense strand
acacaucacagaauucaua

SEQ ID NO: 1026576 - RNA, 19 nt, Homo sapiens
  misc_RNA (1)...(19): siRNA sense strand
ggagagagacaguaugaau

SEQ ID NO: 1026577 - RNA, 19 nt, Homo sapiens
  misc_RNA (1)...(19): siRNA sense strand
aagcagagguggucauguu

SEQ ID NO: 1026578 - RNA, 19 nt, Homo sapiens
  misc_RNA (1)...(19): siRNA sense strand
gagaaaagcccuacauuug

SEQ ID NO: 1026579 - RNA, 19 nt, Homo sapiens
  misc_RNA (1)...(19): siRNA sense strand
ggagagaaacccuaugugu

SEQ ID NO: 1026580 - RNA, 19 nt, Homo sapiens
  misc_RNA (1)...(19): siRNA sense strand
gagagaaacccuauguaug

SEQ ID NO: 1026581 - RNA, 19 nt, Homo sapiens
  misc_RNA (1)...(19): siRNA sense strand
ggagagagacaccaugaau

SEQ ID NO: 1026582 - RNA, 19 nt, Homo sapiens
  misc_RNA (1)...(19): siRNA sense strand
ggucagacuugauuacaca

SEQ ID NO: 1026583 - RNA, 19 nt, Homo sapiens
  misc_RNA (1)...(19): siRNA sense strand
ccagaagacccauuugauu

SEQ ID NO: 1026584 - RNA, 19 nt, Homo sapiens
  misc_RNA (1)...(19): siRNA sense strand
cagaagccagaauuuauua

SEQ ID NO: 1026585 - RNA, 19 nt, Homo sapiens
  misc_RNA (1)...(19): siRNA sense strand
ggaaguccuuuaccuccaa

SEQ ID NO: 1026586 - RNA, 19 nt, Homo sapiens
  misc_RNA (1)...(19): siRNA sense strand
gagugaagcccuauauaug

SEQ ID NO: 1026587 - RNA, 19 nt, Homo sapiens
  misc_RNA (1)...(19): siRNA sense strand
cagaagacccauuugauug

SEQ ID NO: 1026588 - RNA, 19 nt, Homo sapiens
  misc_RNA (1)...(19): siRNA sense strand
ggagagaaaccuuaugagu

SEQ ID NO: 1026589 - RNA, 19 nt, Homo sapiens
  misc_RNA (1)...(19): siRNA sense strand
gggaaggccuuuaccuaca

SEQ ID NO: 1026590 - RNA, 19 nt, Homo sapiens
  misc_RNA (1)...(19): siRNA sense strand
ccagaaaucaauacucauu

SEQ ID NO: 1026591 - RNA, 19 nt, Homo sapiens
  misc_RNA (1)...(19): siRNA sense strand
gagaauucauacaggagaa

SEQ ID NO: 1026592 - RNA, 19 nt, Homo sapiens
  misc_RNA (1)...(19): siRNA sense strand
gcucaaaguacaccugaaa

SEQ ID NO: 1026593 - RNA, 19 nt, Homo sapiens
  misc_RNA (1)...(19): siRNA sense strand
agacaaacccuacaagugu

SEQ ID NO: 1026594 - RNA, 19 nt, Homo sapiens
  misc_RNA (1)...(19): siRNA sense strand
gagacaaacccuacaagug

SEQ ID NO: 1026595 - RNA, 19 nt, Homo sapiens
  misc_RNA (1)...(19): siRNA sense strand
gcaaagcauucacacaaaa

SEQ ID NO: 1026596 - RNA, 19 nt, Homo sapiens
  misc_RNA (1)...(19): siRNA sense strand
caaaguacaccugaaaguu

SEQ ID NO: 1026597 - RNA, 19 nt, Homo sapiens
  misc_RNA (1)...(19): siRNA sense strand
ucauaaauguggucacugu

SEQ ID NO: 1026598 - RNA, 19 nt, Homo sapiens
  misc_RNA (1)...(19): siRNA sense strand
gcaggucaaaucucaguaa

SEQ ID NO: 1026599 - RNA, 19 nt, Homo sapiens
  misc_RNA (1)...(19): siRNA sense strand
gaaaagccuucacucagaa

SEQ ID NO: 1026600 - RNA, 19 nt, Homo sapiens
  misc_RNA (1)...(19): siRNA sense strand
agagaagccuuacgugugu

SEQ ID NO: 1026601 - RNA, 19 nt, Homo sapiens
  misc_RNA (1)...(19): siRNA sense strand
gguccaauuugaauaaaca

SEQ ID NO: 1026602 - RNA, 19 nt, Homo sapiens
  misc_RNA (1)...(19): siRNA sense strand
ucagaaggcacacuugauu

SEQ ID NO: 1026603 - RNA, 19 nt, Homo sapiens
  misc_RNA (1)...(19): siRNA sense strand
cuacaaguguggcaucugu

SEQ ID NO: 1026604 - RNA, 19 nt, Homo sapiens
  misc_RNA (1)...(19): siRNA sense strand
gaagaccuuucgacagaag

SEQ ID NO: 1026605 - RNA, 19 nt, Homo sapiens
  misc_RNA (1)...(19): siRNA sense strand
ccucaguuauaaacaagua

SEQ ID NO: 1026606 - RNA, 19 nt, Homo sapiens
  misc_RNA (1)...(19): siRNA sense strand
caaaucucauuacacauca

SEQ ID NO: 1026607 - RNA, 19 nt, Homo sapiens
  misc_RNA (1)...(19): siRNA sense strand
ugagagagaaacccuuuaa

SEQ ID NO: 1026608 - RNA, 19 nt, Homo sapiens
  misc_RNA (1)...(19): siRNA sense strand
ggaagaccuuucgacagaa

SEQ ID NO: 1026609 - RNA, 19 nt, Homo sapiens
  misc_RNA (1)...(19): siRNA sense strand
aaccagaaaucaauacuca

SEQ ID NO: 1026610 - RNA, 19 nt, Homo sapiens
  misc_RNA (1)...(19): siRNA sense strand
ggaccauaaucaauguaga

SEQ ID NO: 1026611 - RNA, 19 nt, Homo sapiens
  misc_RNA (1)...(19): siRNA sense strand
aaacaaguauccucucaac

SEQ ID NO: 1026612 - RNA, 19 nt, Homo sapiens
  misc_RNA (1)...(19): siRNA sense strand
ccaagugcaucagcgaauu

SEQ ID NO: 1026613 - RNA, 19 nt, Homo sapiens
  misc_RNA (1)...(19): siRNA sense strand
ugggaagucuuucacuaaa

SEQ ID NO: 1026614 - RNA, 19 nt, Homo sapiens
  misc_RNA (1)...(19): siRNA sense strand
ggagaaaagcccuacauuu

SEQ ID NO: 1026615 - RNA, 19 nt, Homo sapiens
  misc_RNA (1)...(19): siRNA sense strand
gagagaaaucuuccauaug

SEQ ID NO: 1026616 - RNA, 19 nt, Homo sapiens
  misc_RNA (1)...(19): siRNA sense strand
gagaaacucuaugaaugca

SEQ ID NO: 1026617 - RNA, 19 nt, Homo sapiens
  misc_RNA (1)...(19): siRNA sense strand
gggagaaagcuuaugaaug

SEQ ID NO: 1026618 - RNA, 19 nt, Homo sapiens
  misc_RNA (1)...(19): siRNA sense strand
agagaagccuuaugaaugc

SEQ ID NO: 1026619 - RNA, 19 nt, Homo sapiens
  misc_RNA (1)...(19): siRNA sense strand
caucaaagaauucauacug

SEQ ID NO: 1026620 - RNA, 19 nt, Homo sapiens
  misc_RNA (1)...(19): siRNA sense strand
gagagagacaguaugaaug

SEQ ID NO: 1026621 - RNA, 19 nt, Homo sapiens
  misc_RNA (1)...(19): siRNA sense strand
gaccauaaucaauguagaa

SEQ ID NO: 1026622 - RNA, 19 nt, Homo sapiens
  misc_RNA (1)...(19): siRNA sense strand
caaaguagagagaaaucuu

SEQ ID NO: 1026623 - RNA, 19 nt, Homo sapiens
  misc_RNA (1)...(19): siRNA sense strand
ucagguacaucaacguguu

SEQ ID NO: 1026624 - RNA, 19 nt, Homo sapiens
  misc_RNA (1)...(19): siRNA sense strand
ucaguaggauaucaaguuc

SEQ ID NO: 1026625 - RNA, 19 nt, Homo sapiens
  misc_RNA (1)...(19): siRNA sense strand
uuacugacagguccaauuu

SEQ ID NO: 1026626 - RNA, 19 nt, Homo sapiens
  misc_RNA (1)...(19): siRNA sense strand
ugaaugcgccaaauuugaa

SEQ ID NO: 1026627 - RNA, 19 nt, Homo sapiens
  misc_RNA (1)...(19): siRNA sense strand
gagaaaagcccuauaugug

SEQ ID NO: 1026628 - RNA, 19 nt, Homo sapiens
  misc_RNA (1)...(19): siRNA sense strand
gagcugcccaggagagaaa

SEQ ID NO: 1026629 - RNA, 19 nt, Homo sapiens
  misc_RNA (1)...(19): siRNA sense strand
caacauaauugcagcauuu

SEQ ID NO: 1026630 - RNA, 19 nt, Homo sapiens
  misc_RNA (1)...(19): siRNA sense strand
gaagguagaugggaaauug

SEQ ID NO: 1026631 - RNA, 19 nt, Homo sapiens
  misc_RNA (1)...(19): siRNA sense strand
gcccaaaccuugucaguau

SEQ ID NO: 1026632 - RNA, 19 nt, Homo sapiens
  misc_RNA (1)...(19): siRNA sense strand
gaagaagauuacagaguug

SEQ ID NO: 1026633 - RNA, 19 nt, Homo sapiens
  misc_RNA (1)...(19): siRNA sense strand
agaagaagauuacagaguu

SEQ ID NO: 1026634 - RNA, 19 nt, Homo sapiens
  misc_RNA (1)...(19): siRNA sense strand
gaaagaugauagaaagaag

SEQ ID NO: 1026635 - RNA, 19 nt, Homo sapiens
  misc_RNA (1)...(19): siRNA sense strand
gagaaagagaagaagauua

SEQ ID NO: 1026636 - RNA, 19 nt, Homo sapiens
  misc_RNA (1)...(19): siRNA sense strand
ggaaagaugauagaaagaa

SEQ ID NO: 1026637 - RNA, 19 nt, Homo sapiens
  misc_RNA (1)...(19): siRNA sense strand
caggaaagaugauagaaag

SEQ ID NO: 1026638 - RNA, 19 nt, Homo sapiens
  misc_RNA (1)...(19): siRNA sense strand
caagaaaugugcucagaac

SEQ ID NO: 1026639 - RNA, 19 nt, Homo sapiens
  misc_RNA (1)...(19): siRNA sense strand
ccacaaagaagucacagaa

SEQ ID NO: 1026640 - RNA, 19 nt, Homo sapiens
  misc_RNA (1)...(19): siRNA sense strand
acaaagaagucacagaaca

SEQ ID NO: 1026641 - RNA, 19 nt, Homo sapiens
  misc_RNA (1)...(19): siRNA sense strand
ugccagcgcugcacaaauu

SEQ ID NO: 1026642 - RNA, 19 nt, Homo sapiens
  misc_RNA (1)...(19): siRNA sense strand
gugcacacuuucauacaaa

SEQ ID NO: 1026643 - RNA, 19 nt, Homo sapiens
  misc_RNA (1)...(19): siRNA sense strand
ggagaaaacccacaaagaa

SEQ ID NO: 1026644 - RNA, 19 nt, Homo sapiens
  misc_RNA (1)...(19): siRNA sense strand
ggaccacccuauucuugug

SEQ ID NO: 1026645 - RNA, 19 nt, Homo sapiens
  misc_RNA (1)...(19): siRNA sense strand
acaaacggguccuucagaa

SEQ ID NO: 1026646 - RNA, 19 nt, Homo sapiens
  misc_RNA (1)...(19): siRNA sense strand
caaagaagucacagaacaa

SEQ ID NO: 1026647 - RNA, 19 nt, Homo sapiens
  misc_RNA (1)...(19): siRNA sense strand
ccaaagagcagaggaaaca

SEQ ID NO: 1026648 - RNA, 19 nt, Homo sapiens
  misc_RNA (1)...(19): siRNA sense strand
gcaagaaaugugcucagaa

SEQ ID NO: 1026649 - RNA, 19 nt, Homo sapiens
  misc_RNA (1)...(19): siRNA sense strand
ucagagaagucaggagcua

SEQ ID NO: 1026650 - RNA, 19 nt, Homo sapiens
  misc_RNA (1)...(19): siRNA sense strand
ccaauacaauaugcaagaa

SEQ ID NO: 1026651 - RNA, 19 nt, Homo sapiens
  misc_RNA (1)...(19): siRNA sense strand
gagaagaagauuacagagu

SEQ ID NO: 1026652 - RNA, 19 nt, Homo sapiens
  misc_RNA (1)...(19): siRNA sense strand
gcaagcagcagugugcauu

SEQ ID NO: 1026653 - RNA, 19 nt, Homo sapiens
  misc_RNA (1)...(19): siRNA sense strand
uaccaggaaucgcagauga

SEQ ID NO: 1026654 - RNA, 19 nt, Homo sapiens
  misc_RNA (1)...(19): siRNA sense strand
gcaagaagucagagaaguc

SEQ ID NO: 1026655 - RNA, 19 nt, Homo sapiens
  misc_RNA (1)...(19): siRNA sense strand
gcucagaacgugcaguugu

SEQ ID NO: 1026656 - RNA, 19 nt, Homo sapiens
  misc_RNA (1)...(19): siRNA sense strand
gcagcugcuuuguccaaga

SEQ ID NO: 1026657 - RNA, 19 nt, Homo sapiens
  misc_RNA (1)...(19): siRNA sense strand
ugucaguauugcaacauaa

SEQ ID NO: 1026658 - RNA, 19 nt, Homo sapiens
  misc_RNA (1)...(19): siRNA sense strand
agaaguggcuacccugaag

SEQ ID NO: 1026659 - RNA, 19 nt, Homo sapiens
  misc_RNA (1)...(19): siRNA sense strand
agaaagagaagaagauuac

SEQ ID NO: 1026660 - RNA, 19 nt, Homo sapiens
  misc_RNA (1)...(19): siRNA sense strand
gcauuugacaggaaagaug

SEQ ID NO: 1026661 - RNA, 19 nt, Homo sapiens
  misc_RNA (1)...(19): siRNA sense strand
gagaagucaggagcuauaa

SEQ ID NO: 1026662 - RNA, 19 nt, Homo sapiens
  misc_RNA (1)...(19): siRNA sense strand
agagaagucaggagcuaua

SEQ ID NO: 1026663 - RNA, 19 nt, Homo sapiens
  misc_RNA (1)...(19): siRNA sense strand
gaguggugguggccauuau

SEQ ID NO: 1026664 - RNA, 19 nt, Homo sapiens
  misc_RNA (1)...(19): siRNA sense strand
gaccaaagagcagaggaaa

SEQ ID NO: 1026665 - RNA, 19 nt, Homo sapiens
  misc_RNA (1)...(19): siRNA sense strand
uggcuacccugaagaagau

SEQ ID NO: 1026666 - RNA, 19 nt, Homo sapiens
  misc_RNA (1)...(19): siRNA sense strand
gagucaaucacaacuaaug

SEQ ID NO: 1026667 - RNA, 19 nt, Homo sapiens
  misc_RNA (1)...(19): siRNA sense strand
gcaguauagucgccugagu

SEQ ID NO: 1026668 - RNA, 19 nt, Homo sapiens
  misc_RNA (1)...(19): siRNA sense strand
cagaggaaacaccugagua

SEQ ID NO: 1026669 - RNA, 19 nt, Homo sapiens
  misc_RNA (1)...(19): siRNA sense strand
cucagaacgugcaguugua

SEQ ID NO: 1026670 - RNA, 19 nt, Homo sapiens
  misc_RNA (1)...(19): siRNA sense strand
caaggaaugucggauugca

SEQ ID NO: 1026671 - RNA, 19 nt, Homo sapiens
  misc_RNA (1)...(19): siRNA sense strand
gaaguauggaccacccuau

SEQ ID NO: 1026672 - RNA, 19 nt, Homo sapiens
  misc_RNA (1)...(19): siRNA sense strand
gcacaaauucagaaaagaa

SEQ ID NO: 1026673 - RNA, 19 nt, Homo sapiens
  misc_RNA (1)...(19): siRNA sense strand
ugcaaggaaugucggauug

SEQ ID NO: 1026674 - RNA, 19 nt, Homo sapiens
  misc_RNA (1)...(19): siRNA sense strand
accaggcacugaccacuuu

SEQ ID NO: 1026675 - RNA, 19 nt, Homo sapiens
  misc_RNA (1)...(19): siRNA sense strand
ugacaggaaagaugauaga

SEQ ID NO: 1026676 - RNA, 19 nt, Homo sapiens
  misc_RNA (1)...(19): siRNA sense strand
caagaagucagagaaguca

SEQ ID NO: 1026677 - RNA, 19 nt, Homo sapiens
  misc_RNA (1)...(19): siRNA sense strand
ccaaaccuugucaguauug

SEQ ID NO: 1026678 - RNA, 19 nt, Homo sapiens
  misc_RNA (1)...(19): siRNA sense strand
aagagaagaagauuacaga

SEQ ID NO: 1026679 - RNA, 19 nt, Homo sapiens
  misc_RNA (1)...(19): siRNA sense strand
ggugguggccauuauaaca

SEQ ID NO: 1026680 - RNA, 19 nt, Homo sapiens
  misc_RNA (1)...(19): siRNA sense strand
aagcagcagugugcauuug

SEQ ID NO: 1026681 - RNA, 19 nt, Homo sapiens
  misc_RNA (1)...(19): siRNA sense strand
aaaugaaccagauggagaa

SEQ ID NO: 1026682 - RNA, 19 nt, Homo sapiens
  misc_RNA (1)...(19): siRNA sense strand
caucauugcccaacugaag

SEQ ID NO: 1026683 - RNA, 19 nt, Homo sapiens
  misc_RNA (1)...(19): siRNA sense strand
caacuaauggagacagcuu

SEQ ID NO: 1026684 - RNA, 19 nt, Homo sapiens
  misc_RNA (1)...(19): siRNA sense strand
gagaaggagcaguauaguc

SEQ ID NO: 1026685 - RNA, 19 nt, Homo sapiens
  misc_RNA (1)...(19): siRNA sense strand
acaggaaagaugauagaaa

SEQ ID NO: 1026686 - RNA, 19 nt, Homo sapiens
  misc_RNA (1)...(19): siRNA sense strand
caagcagcagugugcauuu

SEQ ID NO: 1026687 - RNA, 19 nt, Homo sapiens
  misc_RNA (1)...(19): siRNA sense strand
gagcaagaagucagagaag

SEQ ID NO: 1026688 - RNA, 19 nt, Homo sapiens
  misc_RNA (1)...(19): siRNA sense strand
gaagauuacagaguugaag

SEQ ID NO: 1026689 - RNA, 19 nt, Homo sapiens
  misc_RNA (1)...(19): siRNA sense strand
gaacgugcaguuguaugga

SEQ ID NO: 1026690 - RNA, 19 nt, Homo sapiens
  misc_RNA (1)...(19): siRNA sense strand
gaaguggcuacccugaaga

SEQ ID NO: 1026691 - RNA, 19 nt, Homo sapiens
  misc_RNA (1)...(19): siRNA sense strand
agaccuggcucuggacuca

SEQ ID NO: 1026692 - RNA, 19 nt, Homo sapiens
  misc_RNA (1)...(19): siRNA sense strand
gugcaaggaaugucggauu

SEQ ID NO: 1026693 - RNA, 19 nt, Homo sapiens
  misc_RNA (1)...(19): siRNA sense strand
accgagagcuccugaagca

SEQ ID NO: 1026694 - RNA, 19 nt, Homo sapiens
  misc_RNA (1)...(19): siRNA sense strand
cagaguugaaggcugauuu

SEQ ID NO: 1026695 - RNA, 19 nt, Homo sapiens
  misc_RNA (1)...(19): siRNA sense strand
aaagaagguagaugggaaa

SEQ ID NO: 1026696 - RNA, 19 nt, Homo sapiens
  misc_RNA (1)...(19): siRNA sense strand
caaaaugaaaucccaaaga

SEQ ID NO: 1026697 - RNA, 19 nt, Homo sapiens
  misc_RNA (1)...(19): siRNA sense strand
gcagaggaaacaccugagu

SEQ ID NO: 1026698 - RNA, 19 nt, Homo sapiens
  misc_RNA (1)...(19): siRNA sense strand
ugugcacacuuucauacaa

SEQ ID NO: 1026699 - RNA, 19 nt, Homo sapiens
  misc_RNA (1)...(19): siRNA sense strand
caggagaaggagcaguaua

SEQ ID NO: 1026700 - RNA, 19 nt, Homo sapiens
  misc_RNA (1)...(19): siRNA sense strand
ccaagagcaagaagucaga

SEQ ID NO: 1026701 - RNA, 19 nt, Homo sapiens
  misc_RNA (1)...(19): siRNA sense strand
cccaaaccuugucaguauu

SEQ ID NO: 1026702 - RNA, 19 nt, Homo sapiens
  misc_RNA (1)...(19): siRNA sense strand
ugcaagaaaugugcucaga

SEQ ID NO: 1026703 - RNA, 19 nt, Homo sapiens
  misc_RNA (1)...(19): siRNA sense strand
ggagaaggagcaguauagu

SEQ ID NO: 1026704 - RNA, 19 nt, Homo sapiens
  misc_RNA (1)...(19): siRNA sense strand
gaaagagaagaagauuaca

SEQ ID NO: 1026705 - RNA, 19 nt, Homo sapiens
  misc_RNA (1)...(19): siRNA sense strand
caguauugcaacauaauug

SEQ ID NO: 1026706 - RNA, 19 nt, Homo sapiens
  misc_RNA (1)...(19): siRNA sense strand
gcgcugcacaaauucagaa

SEQ ID NO: 1026707 - RNA, 19 nt, Homo sapiens
  misc_RNA (1)...(19): siRNA sense strand
gaacgcccaaaccuuguca

SEQ ID NO: 1026708 - RNA, 19 nt, Homo sapiens
  misc_RNA (1)...(19): siRNA sense strand
guggugguggccauuauaa

SEQ ID NO: 1026709 - RNA, 19 nt, Homo sapiens
  misc_RNA (1)...(19): siRNA sense strand
gcagcagugugcauuugac

SEQ ID NO: 1026710 - RNA, 19 nt, Homo sapiens
  misc_RNA (1)...(19): siRNA sense strand
gaagucaggagcuauaacc

SEQ ID NO: 1026711 - RNA, 19 nt, Homo sapiens
  misc_RNA (1)...(19): siRNA sense strand
ccaggaaucgcagaugaga

SEQ ID NO: 1026712 - RNA, 19 nt, Homo sapiens
  misc_RNA (1)...(19): siRNA sense strand
agagaaagagaagaagauu

SEQ ID NO: 1026713 - RNA, 19 nt, Homo sapiens
  misc_RNA (1)...(19): siRNA sense strand
uagagaaagagaagaagau

SEQ ID NO: 1026714 - RNA, 19 nt, Homo sapiens
  misc_RNA (1)...(19): siRNA sense strand
cauuugacaggaaagauga

SEQ ID NO: 1026715 - RNA, 19 nt, Homo sapiens
  misc_RNA (1)...(19): siRNA sense strand
cagaugagagccaaaauga

SEQ ID NO: 1026716 - RNA, 19 nt, Homo sapiens
  misc_RNA (1)...(19): siRNA sense strand
agaggaaacaccugaguag

SEQ ID NO: 1026717 - RNA, 19 nt, Homo sapiens
  misc_RNA (1)...(19): siRNA sense strand
gauagaaagaagguagaug

SEQ ID NO: 1026718 - RNA, 19 nt, Homo sapiens
  misc_RNA (1)...(19): siRNA sense strand
cuuucuacaucuucaauuc

SEQ ID NO: 1026719 - RNA, 19 nt, Homo sapiens
  misc_RNA (1)...(19): siRNA sense strand
cagcugcuuuguccaagag

SEQ ID NO: 1026720 - RNA, 19 nt, Homo sapiens
  misc_RNA (1)...(19): siRNA sense strand
gagaaaacccacaaagaag

SEQ ID NO: 1026721 - RNA, 19 nt, Homo sapiens
  misc_RNA (1)...(19): siRNA sense strand
gagccaaaaugaaccagau

SEQ ID NO: 1026722 - RNA, 19 nt, Homo sapiens
  misc_RNA (1)...(19): siRNA sense strand
guggcuacccugaagaaga

SEQ ID NO: 1026723 - RNA, 19 nt, Homo sapiens
  misc_RNA (1)...(19): siRNA sense strand
gacaggaaagaugauagaa

SEQ ID NO: 1026724 - RNA, 19 nt, Homo sapiens
  misc_RNA (1)...(19): siRNA sense strand
ugucaucauugcccaacug

SEQ ID NO: 1026725 - RNA, 19 nt, Homo sapiens
  misc_RNA (1)...(19): siRNA sense strand
gcaccuacugcaggacuga

SEQ ID NO: 1026726 - RNA, 19 nt, Homo sapiens
  misc_RNA (1)...(19): siRNA sense strand
ggauugcacacccuguugu

SEQ ID NO: 1026727 - RNA, 19 nt, Homo sapiens
  misc_RNA (1)...(19): siRNA sense strand
uugcccaacugaaggaaga

SEQ ID NO: 1026728 - RNA, 19 nt, Homo sapiens
  misc_RNA (1)...(19): siRNA sense strand
agaagucacagaacaacug

SEQ ID NO: 1026729 - RNA, 19 nt, Homo sapiens
  misc_RNA (1)...(19): siRNA sense strand
ugacuucaguggaauuaca

SEQ ID NO: 1026730 - RNA, 19 nt, Homo sapiens
  misc_RNA (1)...(19): siRNA sense strand
acagguaacucaagaacuc

SEQ ID NO: 1026731 - RNA, 19 nt, Homo sapiens
  misc_RNA (1)...(19): siRNA sense strand
gagcagccaggcacaggua

SEQ ID NO: 1026732 - RNA, 19 nt, Homo sapiens
  misc_RNA (1)...(19): siRNA sense strand
gcacagguaacucaagaac

SEQ ID NO: 1026733 - RNA, 19 nt, Homo sapiens
  misc_RNA (1)...(19): siRNA sense strand
aggcacagguaacucaaga

SEQ ID NO: 1026734 - RNA, 19 nt, Homo sapiens
  misc_RNA (1)...(19): siRNA sense strand
caugacuucaguggaauua

SEQ ID NO: 1026735 - RNA, 19 nt, Homo sapiens
  misc_RNA (1)...(19): siRNA sense strand
gggcuucuacugaggugaa

SEQ ID NO: 1026736 - RNA, 19 nt, Homo sapiens
  misc_RNA (1)...(19): siRNA sense strand
agaacugucugcacccaaa

SEQ ID NO: 1026737 - RNA, 19 nt, Homo sapiens
  misc_RNA (1)...(19): siRNA sense strand
gagacaggccucuggaugu

SEQ ID NO: 1026738 - RNA, 19 nt, Homo sapiens
  misc_RNA (1)...(19): siRNA sense strand
gaggagucagccaggauua

SEQ ID NO: 1026739 - RNA, 19 nt, Homo sapiens
  misc_RNA (1)...(19): siRNA sense strand
ccacagacugcccauagaa

SEQ ID NO: 1026740 - RNA, 19 nt, Homo sapiens
  misc_RNA (1)...(19): siRNA sense strand
ggaggagucagccaggauu

SEQ ID NO: 1026741 - RNA, 19 nt, Homo sapiens
  misc_RNA (1)...(19): siRNA sense strand
gaaugcagccagacucgau

SEQ ID NO: 1026742 - RNA, 19 nt, Homo sapiens
  misc_RNA (1)...(19): siRNA sense strand
gccacagacugcccauaga

SEQ ID NO: 1026743 - RNA, 19 nt, Homo sapiens
  misc_RNA (1)...(19): siRNA sense strand
ggagucagccaggauuaga

SEQ ID NO: 1026744 - RNA, 19 nt, Homo sapiens
  misc_RNA (1)...(19): siRNA sense strand
agacaggccucuggaugug

SEQ ID NO: 1026745 - RNA, 19 nt, Homo sapiens
  misc_RNA (1)...(19): siRNA sense strand
ugucugcaccugccuaauu

SEQ ID NO: 1026746 - RNA, 19 nt, Homo sapiens
  misc_RNA (1)...(19): siRNA sense strand
ggccacagacugcccauag

SEQ ID NO: 1026747 - RNA, 19 nt, Homo sapiens
  misc_RNA (1)...(19): siRNA sense strand
gucugcaccugccuaauuc

SEQ ID NO: 1026748 - RNA, 19 nt, Homo sapiens
  misc_RNA (1)...(19): siRNA sense strand
ugagagcuccugcgucagu

SEQ ID NO: 1026749 - RNA, 19 nt, Homo sapiens
  misc_RNA (1)...(19): siRNA sense strand
cgaugucccucagcacaca

SEQ ID NO: 1026750 - RNA, 19 nt, Homo sapiens
  misc_RNA (1)...(19): siRNA sense strand
gaucuucucuggucuuuug

SEQ ID NO: 1026751 - RNA, 19 nt, Homo sapiens
  misc_RNA (1)...(19): siRNA sense strand
acccagagccguuucuuua

SEQ ID NO: 1026752 - RNA, 19 nt, Homo sapiens
  misc_RNA (1)...(19): siRNA sense strand
cuuagagccuuccgugauu

SEQ ID NO: 1026753 - RNA, 19 nt, Homo sapiens
  misc_RNA (1)...(19): siRNA sense strand
ccacaguccugggaucuuc

SEQ ID NO: 1026754 - RNA, 19 nt, Homo sapiens
  misc_RNA (1)...(19): siRNA sense strand
ccagagcuuccaugacuuu

SEQ ID NO: 1026755 - RNA, 19 nt, Homo sapiens
  misc_RNA (1)...(19): siRNA sense strand
gggaucuucucuggucuuu

SEQ ID NO: 1026756 - RNA, 19 nt, Homo sapiens
  misc_RNA (1)...(19): siRNA sense strand
ggugugcucugagguguca

SEQ ID NO: 1026757 - RNA, 19 nt, Homo sapiens
  misc_RNA (1)...(19): siRNA sense strand
cuccagagcuuccaugacu

SEQ ID NO: 1026758 - RNA, 19 nt, Homo sapiens
  misc_RNA (1)...(19): siRNA sense strand
cccagagccguuucuuuaa

SEQ ID NO: 1026759 - RNA, 19 nt, Homo sapiens
  misc_RNA (1)...(19): siRNA sense strand
gccuucuguuggccucuua

SEQ ID NO: 1026760 - RNA, 19 nt, Homo sapiens
  misc_RNA (1)...(19): siRNA sense strand
ggguugcucuccgugucua

SEQ ID NO: 1026761 - RNA, 19 nt, Homo sapiens
  misc_RNA (1)...(19): siRNA sense strand
uuagagccuuccgugauug

SEQ ID NO: 1026762 - RNA, 19 nt, Homo sapiens
  misc_RNA (1)...(19): siRNA sense strand
gggagugccagaggccuuu

SEQ ID NO: 1026763 - RNA, 19 nt, Homo sapiens
  misc_RNA (1)...(19): siRNA sense strand
caucauagcuuucaucuug

SEQ ID NO: 1026764 - RNA, 19 nt, Homo sapiens
  misc_RNA (1)...(19): siRNA sense strand
acaaagaucugcugcacaa

SEQ ID NO: 1026765 - RNA, 19 nt, Homo sapiens
  misc_RNA (1)...(19): siRNA sense strand
guuuauaucuccacuguug

SEQ ID NO: 1026766 - RNA, 19 nt, Homo sapiens
  misc_RNA (1)...(19): siRNA sense strand
gauuguugcuucuugguuu

SEQ ID NO: 1026767 - RNA, 19 nt, Homo sapiens
  misc_RNA (1)...(19): siRNA sense strand
gaagagcacuguccaugac

SEQ ID NO: 1026768 - RNA, 19 nt, Homo sapiens
  misc_RNA (1)...(19): siRNA sense strand
caaaguaggagaaaccauu

SEQ ID NO: 1026769 - RNA, 19 nt, Homo sapiens
  misc_RNA (1)...(19): siRNA sense strand
ggaaguuagugccaugguu

SEQ ID NO: 1026770 - RNA, 19 nt, Homo sapiens
  misc_RNA (1)...(19): siRNA sense strand
gaagagugauccagaccau

SEQ ID NO: 1026771 - RNA, 19 nt, Homo sapiens
  misc_RNA (1)...(19): siRNA sense strand
ggaagagcacuguccauga

SEQ ID NO: 1026772 - RNA, 19 nt, Homo sapiens
  misc_RNA (1)...(19): siRNA sense strand
gcaaugacgugaguaaugc

SEQ ID NO: 1026773 - RNA, 19 nt, Homo sapiens
  misc_RNA (1)...(19): siRNA sense strand
gaaaccauucgcaaaggua

SEQ ID NO: 1026774 - RNA, 19 nt, Homo sapiens
  misc_RNA (1)...(19): siRNA sense strand
ggagaaaccauucgcaaag

SEQ ID NO: 1026775 - RNA, 19 nt, Homo sapiens
  misc_RNA (1)...(19): siRNA sense strand
gaaggacgcacccgagguu

SEQ ID NO: 1026776 - RNA, 19 nt, Homo sapiens
  misc_RNA (1)...(19): siRNA sense strand
gagcgacggucauguguac

SEQ ID NO: 1026777 - RNA, 19 nt, Homo sapiens
  misc_RNA (1)...(19): siRNA sense strand
cauuguggguucuacuaua

SEQ ID NO: 1026778 - RNA, 19 nt, Homo sapiens
  misc_RNA (1)...(19): siRNA sense strand
ggccauggaugaguauuug

SEQ ID NO: 1026779 - RNA, 19 nt, Homo sapiens
  misc_RNA (1)...(19): siRNA sense strand
ugaaaucgcccaucuccaa

SEQ ID NO: 1026780 - RNA, 19 nt, Homo sapiens
  misc_RNA (1)...(19): siRNA sense strand
ccaaaggugugcaguggau

SEQ ID NO: 1026781 - RNA, 19 nt, Homo sapiens
  misc_RNA (1)...(19): siRNA sense strand
ccauagcccucauuuccuu

SEQ ID NO: 1026782 - RNA, 19 nt, Homo sapiens
  misc_RNA (1)...(19): siRNA sense strand
gacgaaagccucaguaagg

SEQ ID NO: 1026783 - RNA, 19 nt, Homo sapiens
  misc_RNA (1)...(19): siRNA sense strand
ucauugacgugaaccugua

SEQ ID NO: 1026784 - RNA, 19 nt, Homo sapiens
  misc_RNA (1)...(19): siRNA sense strand
ggagaagccagcccaggaa

SEQ ID NO: 1026785 - RNA, 19 nt, Homo sapiens
  misc_RNA (1)...(19): siRNA sense strand
gagaaaccauucgcaaagg

SEQ ID NO: 1026786 - RNA, 19 nt, Homo sapiens
  misc_RNA (1)...(19): siRNA sense strand
ggcaaugacgugaguaaug

SEQ ID NO: 1026787 - RNA, 19 nt, Homo sapiens
  misc_RNA (1)...(19): siRNA sense strand
ggugaucgccuccaacauc

SEQ ID NO: 1026788 - RNA, 19 nt, Homo sapiens
  misc_RNA (1)...(19): siRNA sense strand
gcucugguguggugaccuu

SEQ ID NO: 1026789 - RNA, 19 nt, Homo sapiens
  misc_RNA (1)...(19): siRNA sense strand
gugccaaggcuaaugauga

SEQ ID NO: 1026790 - RNA, 19 nt, Homo sapiens
  misc_RNA (1)...(19): siRNA sense strand
ucacgaguaucugacgaaa

SEQ ID NO: 1026791 - RNA, 19 nt, Homo sapiens
  misc_RNA (1)...(19): siRNA sense strand
gcuacucgagcuacuguaa

SEQ ID NO: 1026792 - RNA, 19 nt, Homo sapiens
  misc_RNA (1)...(19): siRNA sense strand
ccauagcaaucaaugucuu

SEQ ID NO: 1026793 - RNA, 19 nt, Homo sapiens
  misc_RNA (1)...(19): siRNA sense strand
gagaagccagcccaggaaa

SEQ ID NO: 1026794 - RNA, 19 nt, Homo sapiens
  misc_RNA (1)...(19): siRNA sense strand
agaagaggcugcgcuacga

SEQ ID NO: 1026795 - RNA, 19 nt, Homo sapiens
  misc_RNA (1)...(19): siRNA sense strand
ugucuggccugcuguuugu

SEQ ID NO: 1026796 - RNA, 19 nt, Homo sapiens
  misc_RNA (1)...(19): siRNA sense strand
gauucucacuggucgcaau

SEQ ID NO: 1026797 - RNA, 19 nt, Homo sapiens
  misc_RNA (1)...(19): siRNA sense strand
ggagcgacggucaugugua

SEQ ID NO: 1026798 - RNA, 19 nt, Homo sapiens
  misc_RNA (1)...(19): siRNA sense strand
cauuuuggguuucaucaua

SEQ ID NO: 1026799 - RNA, 19 nt, Homo sapiens
  misc_RNA (1)...(19): siRNA sense strand
gauccuuccauauguguga

SEQ ID NO: 1026800 - RNA, 19 nt, Homo sapiens
  misc_RNA (1)...(19): siRNA sense strand
guaccacaccgugcacaaa

SEQ ID NO: 1026801 - RNA, 19 nt, Homo sapiens
  misc_RNA (1)...(19): siRNA sense strand
guucaccuccuguuccauu

SEQ ID NO: 1026802 - RNA, 19 nt, Homo sapiens
  misc_RNA (1)...(19): siRNA sense strand
acuguugucugguuucaug

SEQ ID NO: 1026803 - RNA, 19 nt, Homo sapiens
  misc_RNA (1)...(19): siRNA sense strand
gaagcagaguccccaguau

SEQ ID NO: 1026804 - RNA, 19 nt, Homo sapiens
  misc_RNA (1)...(19): siRNA sense strand
gaagacccuguucccaaug

SEQ ID NO: 1026805 - RNA, 19 nt, Homo sapiens
  misc_RNA (1)...(19): siRNA sense strand
gcagaguccccaguauuua

SEQ ID NO: 1026806 - RNA, 19 nt, Homo sapiens
  misc_RNA (1)...(19): siRNA sense strand
ggccauagcccucauuucc

SEQ ID NO: 1026807 - RNA, 19 nt, Homo sapiens
  misc_RNA (1)...(19): siRNA sense strand
cauagcaaucaaugucuuu

SEQ ID NO: 1026808 - RNA, 19 nt, Homo sapiens
  misc_RNA (1)...(19): siRNA sense strand
ccaguauucuaugcugcua

SEQ ID NO: 1026809 - RNA, 19 nt, Homo sapiens
  misc_RNA (1)...(19): siRNA sense strand
aaccaccggcuccguguua

SEQ ID NO: 1026810 - RNA, 19 nt, Homo sapiens
  misc_RNA (1)...(19): siRNA sense strand
cccaguauuuaaagagcua

SEQ ID NO: 1026811 - RNA, 19 nt, Homo sapiens
  misc_RNA (1)...(19): siRNA sense strand
acgaguaucugacgaaagc

SEQ ID NO: 1026812 - RNA, 19 nt, Homo sapiens
  misc_RNA (1)...(19): siRNA sense strand
ggugcuuuaucacgaguau

SEQ ID NO: 1026813 - RNA, 19 nt, Homo sapiens
  misc_RNA (1)...(19): siRNA sense strand
gcauuguggguucuacuau

SEQ ID NO: 1026814 - RNA, 19 nt, Homo sapiens
  misc_RNA (1)...(19): siRNA sense strand
gaggcaggcaugcauuuua

SEQ ID NO: 1026815 - RNA, 19 nt, Homo sapiens
  misc_RNA (1)...(19): siRNA sense strand
gcggcaaugacgugaguaa

SEQ ID NO: 1026816 - RNA, 19 nt, Homo sapiens
  misc_RNA (1)...(19): siRNA sense strand
cuacaccgcagccauuugu

SEQ ID NO: 1026817 - RNA, 19 nt, Homo sapiens
  misc_RNA (1)...(19): siRNA sense strand
ggaagcagaguccccagua

SEQ ID NO: 1026818 - RNA, 19 nt, Homo sapiens
  misc_RNA (1)...(19): siRNA sense strand
ccacuguugucugguuuca

SEQ ID NO: 1026819 - RNA, 19 nt, Homo sapiens
  misc_RNA (1)...(19): siRNA sense strand
ucgcaaagguaucauugac

SEQ ID NO: 1026820 - RNA, 19 nt, Homo sapiens
  misc_RNA (1)...(19): siRNA sense strand
gcacucccaguauucuaug

SEQ ID NO: 1026821 - RNA, 19 nt, Homo sapiens
  misc_RNA (1)...(19): siRNA sense strand
ucaggaacgcacugcauug

SEQ ID NO: 1026822 - RNA, 19 nt, Homo sapiens
  misc_RNA (1)...(19): siRNA sense strand
cgaaagccucaguaagguu

SEQ ID NO: 1026823 - RNA, 19 nt, Homo sapiens
  misc_RNA (1)...(19): siRNA sense strand
ugguuuauaucuccacugu

SEQ ID NO: 1026824 - RNA, 19 nt, Homo sapiens
  misc_RNA (1)...(19): siRNA sense strand
gcacugcauuguggguucu

SEQ ID NO: 1026825 - RNA, 19 nt, Homo sapiens
  misc_RNA (1)...(19): siRNA sense strand
agaaaccauucgcaaaggu

SEQ ID NO: 1026826 - RNA, 19 nt, Homo sapiens
  misc_RNA (1)...(19): siRNA sense strand
acccauggcucugugaaau

SEQ ID NO: 1026827 - RNA, 19 nt, Homo sapiens
  misc_RNA (1)...(19): siRNA sense strand
ggccugcuguuuguacuca

SEQ ID NO: 1026828 - RNA, 19 nt, Homo sapiens
  misc_RNA (1)...(19): siRNA sense strand
uggguuucaucauagcuuu

SEQ ID NO: 1026829 - RNA, 19 nt, Homo sapiens
  misc_RNA (1)...(19): siRNA sense strand
ggucgcaaucgguaccaaa

SEQ ID NO: 1026830 - RNA, 19 nt, Homo sapiens
  misc_RNA (1)...(19): siRNA sense strand
gcaccacgcacuguaaggu

SEQ ID NO: 1026831 - RNA, 19 nt, Homo sapiens
  misc_RNA (1)...(19): siRNA sense strand
ucagcaccacgcacuguaa

SEQ ID NO: 1026832 - RNA, 19 nt, Homo sapiens
  misc_RNA (1)...(19): siRNA sense strand
gacccauggcucugugaaa

SEQ ID NO: 1026833 - RNA, 19 nt, Homo sapiens
  misc_RNA (1)...(19): siRNA sense strand
uaccaggugccaaggcuaa

SEQ ID NO: 1026834 - RNA, 19 nt, Homo sapiens
  misc_RNA (1)...(19): siRNA sense strand
ugacgaaagccucaguaag

SEQ ID NO: 1026835 - RNA, 19 nt, Homo sapiens
  misc_RNA (1)...(19): siRNA sense strand
ccagugcucggccuuguuc

SEQ ID NO: 1026836 - RNA, 19 nt, Homo sapiens
  misc_RNA (1)...(19): siRNA sense strand
auuguugcuucuugguuua

SEQ ID NO: 1026837 - RNA, 19 nt, Homo sapiens
  misc_RNA (1)...(19): siRNA sense strand
acgugaaccuguacaacga

SEQ ID NO: 1026838 - RNA, 19 nt, Homo sapiens
  misc_RNA (1)...(19): siRNA sense strand
gccagugcacgccaccuuu

SEQ ID NO: 1026839 - RNA, 19 nt, Homo sapiens
  misc_RNA (1)...(19): siRNA sense strand
gaagccagcccaggaaagc

SEQ ID NO: 1026840 - RNA, 19 nt, Homo sapiens
  misc_RNA (1)...(19): siRNA sense strand
cgcaaucgguaccaaaggu

SEQ ID NO: 1026841 - RNA, 19 nt, Homo sapiens
  misc_RNA (1)...(19): siRNA sense strand
guugcuucuugguuuauau

SEQ ID NO: 1026842 - RNA, 19 nt, Homo sapiens
  misc_RNA (1)...(19): siRNA sense strand
ucucauguaugggauccuu

SEQ ID NO: 1026843 - RNA, 19 nt, Homo sapiens
  misc_RNA (1)...(19): siRNA sense strand
guggcugauuuacaaacaa

SEQ ID NO: 1026844 - RNA, 19 nt, Homo sapiens
  misc_RNA (1)...(19): siRNA sense strand
ggauggucauuuuggguuu

SEQ ID NO: 1026845 - RNA, 19 nt, Homo sapiens
  misc_RNA (1)...(19): siRNA sense strand
cugcagaggaggagaagga

SEQ ID NO: 1026846 - RNA, 19 nt, Homo sapiens
  misc_RNA (1)...(19): siRNA sense strand
ucugugaaaucgcccaucu

SEQ ID NO: 1026847 - RNA, 19 nt, Homo sapiens
  misc_RNA (1)...(19): siRNA sense strand
aaaguaggagaaaccauuc

SEQ ID NO: 1026848 - RNA, 19 nt, Homo sapiens
  misc_RNA (1)...(19): siRNA sense strand
caggugccaaggcuaauga

SEQ ID NO: 1026849 - RNA, 19 nt, Homo sapiens
  misc_RNA (1)...(19): siRNA sense strand
aggagaaaccauucgcaaa

SEQ ID NO: 1026850 - RNA, 19 nt, Homo sapiens
  misc_RNA (1)...(19): siRNA sense strand
uaccauagcaaucaauguc

SEQ ID NO: 1026851 - RNA, 19 nt, Homo sapiens
  misc_RNA (1)...(19): siRNA sense strand
gggcacucccaguauucua

SEQ ID NO: 1026852 - RNA, 19 nt, Homo sapiens
  misc_RNA (1)...(19): siRNA sense strand
ucuccacuguugucugguu

SEQ ID NO: 1026853 - RNA, 19 nt, Homo sapiens
  misc_RNA (1)...(19): siRNA sense strand
ggcagcugauugcuuccuu

SEQ ID NO: 1026854 - RNA, 19 nt, Homo sapiens
  misc_RNA (1)...(19): siRNA sense strand
ccgucuggcugcuguuuua

SEQ ID NO: 1026855 - RNA, 19 nt, Homo sapiens
  misc_RNA (1)...(19): siRNA sense strand
caggagcgacggucaugug

SEQ ID NO: 1026856 - RNA, 19 nt, Homo sapiens
  misc_RNA (1)...(19): siRNA sense strand
ccauggcucugugaaaucg

SEQ ID NO: 1026857 - RNA, 19 nt, Homo sapiens
  misc_RNA (1)...(19): siRNA sense strand
acgaaagccucaguaaggu

SEQ ID NO: 1026858 - RNA, 19 nt, Homo sapiens
  misc_RNA (1)...(19): siRNA sense strand
guacucaucagaauuuuca

SEQ ID NO: 1026859 - RNA, 19 nt, Homo sapiens
  misc_RNA (1)...(19): siRNA sense strand
ggaauaagcacuauggaaa

SEQ ID NO: 1026860 - RNA, 19 nt, Homo sapiens
  misc_RNA (1)...(19): siRNA sense strand
gcaaggguaucgaccaauu

SEQ ID NO: 1026861 - RNA, 19 nt, Homo sapiens
  misc_RNA (1)...(19): siRNA sense strand
gcagcaagauacuauuauu

SEQ ID NO: 1026862 - RNA, 19 nt, Homo sapiens
  misc_RNA (1)...(19): siRNA sense strand
ccaaagaccuccacugauc

SEQ ID NO: 1026863 - RNA, 19 nt, Homo sapiens
  misc_RNA (1)...(19): siRNA sense strand
aaauagagauguugguuga

SEQ ID NO: 1026864 - RNA, 19 nt, Homo sapiens
  misc_RNA (1)...(19): siRNA sense strand
gagcagcaagauacuauua

SEQ ID NO: 1026865 - RNA, 19 nt, Homo sapiens
  misc_RNA (1)...(19): siRNA sense strand
caucagacuuuaccagaaa

SEQ ID NO: 1026866 - RNA, 19 nt, Homo sapiens
  misc_RNA (1)...(19): siRNA sense strand
gcaaagaccggcuggaaga

SEQ ID NO: 1026867 - RNA, 19 nt, Homo sapiens
  misc_RNA (1)...(19): siRNA sense strand
gaaaacaaguucuucauuc

SEQ ID NO: 1026868 - RNA, 19 nt, Homo sapiens
  misc_RNA (1)...(19): siRNA sense strand
ggacaaauguuggaaaauu

SEQ ID NO: 1026869 - RNA, 19 nt, Homo sapiens
  misc_RNA (1)...(19): siRNA sense strand
gcagaugaaugaagagucu

SEQ ID NO: 1026870 - RNA, 19 nt, Homo sapiens
  misc_RNA (1)...(19): siRNA sense strand
gcucagaguuacaccuuug

SEQ ID NO: 1026871 - RNA, 19 nt, Homo sapiens
  misc_RNA (1)...(19): siRNA sense strand
aaagaucaguuugcacuaa

SEQ ID NO: 1026872 - RNA, 19 nt, Homo sapiens
  misc_RNA (1)...(19): siRNA sense strand
ugaugaaguuccagaguuu

SEQ ID NO: 1026873 - RNA, 19 nt, Homo sapiens
  misc_RNA (1)...(19): siRNA sense strand
cccggaagcucauauacua

SEQ ID NO: 1026874 - RNA, 19 nt, Homo sapiens
  misc_RNA (1)...(19): siRNA sense strand
ccgaagcucaucuuaaaua

SEQ ID NO: 1026875 - RNA, 19 nt, Homo sapiens
  misc_RNA (1)...(19): siRNA sense strand
ugacgucgcuguucauuac

SEQ ID NO: 1026876 - RNA, 19 nt, Homo sapiens
  misc_RNA (1)...(19): siRNA sense strand
ggacucaguguuauacaaa

SEQ ID NO: 1026877 - RNA, 19 nt, Homo sapiens
  misc_RNA (1)...(19): siRNA sense strand
gaagcacauuccaaacaug

SEQ ID NO: 1026878 - RNA, 19 nt, Homo sapiens
  misc_RNA (1)...(19): siRNA sense strand
gaaaauggcagauugauca

SEQ ID NO: 1026879 - RNA, 19 nt, Homo sapiens
  misc_RNA (1)...(19): siRNA sense strand
gaaggccucuauugcaaca

SEQ ID NO: 1026880 - RNA, 19 nt, Homo sapiens
  misc_RNA (1)...(19): siRNA sense strand
ggacuuacaggacgaugaa

SEQ ID NO: 1026881 - RNA, 19 nt, Homo sapiens
  misc_RNA (1)...(19): siRNA sense strand
uuccgaagcucaucuuaaa

SEQ ID NO: 1026882 - RNA, 19 nt, Homo sapiens
  misc_RNA (1)...(19): siRNA sense strand
gaagucagcccagacaugu

SEQ ID NO: 1026883 - RNA, 19 nt, Homo sapiens
  misc_RNA (1)...(19): siRNA sense strand
cgaagcucaucuuaaauau

SEQ ID NO: 1026884 - RNA, 19 nt, Homo sapiens
  misc_RNA (1)...(19): siRNA sense strand
caauuugggccuccuauga

SEQ ID NO: 1026885 - RNA, 19 nt, Homo sapiens
  misc_RNA (1)...(19): siRNA sense strand
caacagccaccgccucuau

SEQ ID NO: 1026886 - RNA, 19 nt, Homo sapiens
  misc_RNA (1)...(19): siRNA sense strand
ugacagagcagcaagauac

SEQ ID NO: 1026887 - RNA, 19 nt, Homo sapiens
  misc_RNA (1)...(19): siRNA sense strand
gaagcugaauggacacucu

SEQ ID NO: 1026888 - RNA, 19 nt, Homo sapiens
  misc_RNA (1)...(19): siRNA sense strand
ucucugaacaucaucauaa

SEQ ID NO: 1026889 - RNA, 19 nt, Homo sapiens
  misc_RNA (1)...(19): siRNA sense strand
gcccagacaugugcaucua

SEQ ID NO: 1026890 - RNA, 19 nt, Homo sapiens
  misc_RNA (1)...(19): siRNA sense strand
ggaagucagcccagacaug

SEQ ID NO: 1026891 - RNA, 19 nt, Homo sapiens
  misc_RNA (1)...(19): siRNA sense strand
acucuuggauugaccauga

SEQ ID NO: 1026892 - RNA, 19 nt, Homo sapiens
  misc_RNA (1)...(19): siRNA sense strand
ggaagaaagaggccagcaa

SEQ ID NO: 1026893 - RNA, 19 nt, Homo sapiens
  misc_RNA (1)...(19): siRNA sense strand
gaaguuccagaguuuguug

SEQ ID NO: 1026894 - RNA, 19 nt, Homo sapiens
  misc_RNA (1)...(19): siRNA sense strand
uggagcagaugaaugaaga

SEQ ID NO: 1026895 - RNA, 19 nt, Homo sapiens
  misc_RNA (1)...(19): siRNA sense strand
guucauuacuacagauugu

SEQ ID NO: 1026896 - RNA, 19 nt, Homo sapiens
  misc_RNA (1)...(19): siRNA sense strand
ugaagcacauuccaaacau

SEQ ID NO: 1026897 - RNA, 19 nt, Homo sapiens
  misc_RNA (1)...(19): siRNA sense strand
cagcaaggguaucgaccaa

SEQ ID NO: 1026898 - RNA, 19 nt, Homo sapiens
  misc_RNA (1)...(19): siRNA sense strand
ggacacugcucagaguuac

SEQ ID NO: 1026899 - RNA, 19 nt, Homo sapiens
  misc_RNA (1)...(19): siRNA sense strand
ccagacaccuccugcaacu

SEQ ID NO: 1026900 - RNA, 19 nt, Homo sapiens
  misc_RNA (1)...(19): siRNA sense strand
uuccaaacaugcacaaaga

SEQ ID NO: 1026901 - RNA, 19 nt, Homo sapiens
  misc_RNA (1)...(19): siRNA sense strand
ccagacaugugcaucuaca

SEQ ID NO: 1026902 - RNA, 19 nt, Homo sapiens
  misc_RNA (1)...(19): siRNA sense strand
uagagauguugguugauga

SEQ ID NO: 1026903 - RNA, 19 nt, Homo sapiens
  misc_RNA (1)...(19): siRNA sense strand
ccgggaaucuuacaucagu

SEQ ID NO: 1026904 - RNA, 19 nt, Homo sapiens
  misc_RNA (1)...(19): siRNA sense strand
gauucugugucaccaguug

SEQ ID NO: 1026905 - RNA, 19 nt, Homo sapiens
  misc_RNA (1)...(19): siRNA sense strand
ggacugccaccucuuugga

SEQ ID NO: 1026906 - RNA, 19 nt, Homo sapiens
  misc_RNA (1)...(19): siRNA sense strand
caaacaugcacaaagauca

SEQ ID NO: 1026907 - RNA, 19 nt, Homo sapiens
  misc_RNA (1)...(19): siRNA sense strand
ucaggacacugcucagagu

SEQ ID NO: 1026908 - RNA, 19 nt, Homo sapiens
  misc_RNA (1)...(19): siRNA sense strand
aaccaaagaccuccacuga

SEQ ID NO: 1026909 - RNA, 19 nt, Homo sapiens
  misc_RNA (1)...(19): siRNA sense strand
gacaaauguuggaaaauug

SEQ ID NO: 1026910 - RNA, 19 nt, Homo sapiens
  misc_RNA (1)...(19): siRNA sense strand
caaggguaucgaccaauuu

SEQ ID NO: 1026911 - RNA, 19 nt, Homo sapiens
  misc_RNA (1)...(19): siRNA sense strand
uuccagaguuuguugugua

SEQ ID NO: 1026912 - RNA, 19 nt, Homo sapiens
  misc_RNA (1)...(19): siRNA sense strand
aggaaggccucuauugcaa

SEQ ID NO: 1026913 - RNA, 19 nt, Homo sapiens
  misc_RNA (1)...(19): siRNA sense strand
caaccuggaccucgacaug

SEQ ID NO: 1026914 - RNA, 19 nt, Homo sapiens
  misc_RNA (1)...(19): siRNA sense strand
acgaagagaagaagcagua

SEQ ID NO: 1026915 - RNA, 19 nt, Homo sapiens
  misc_RNA (1)...(19): siRNA sense strand
aacaaguucuucauucuca

SEQ ID NO: 1026916 - RNA, 19 nt, Homo sapiens
  misc_RNA (1)...(19): siRNA sense strand
guuuguggguaagaaauuu

SEQ ID NO: 1026917 - RNA, 19 nt, Homo sapiens
  misc_RNA (1)...(19): siRNA sense strand
gcccagcagugcaucaaca

SEQ ID NO: 1026918 - RNA, 19 nt, Homo sapiens
  misc_RNA (1)...(19): siRNA sense strand
gaaagacuuccugcgcauu

SEQ ID NO: 1026919 - RNA, 19 nt, Homo sapiens
  misc_RNA (1)...(19): siRNA sense strand
acaacagagucaugcaaga

SEQ ID NO: 1026920 - RNA, 19 nt, Homo sapiens
  misc_RNA (1)...(19): siRNA sense strand
uaacaacagagucaugcaa

SEQ ID NO: 1026921 - RNA, 19 nt, Homo sapiens
  misc_RNA (1)...(19): siRNA sense strand
acaggacgaugaaauagag

SEQ ID NO: 1026922 - RNA, 19 nt, Homo sapiens
  misc_RNA (1)...(19): siRNA sense strand
gguggagaguggcggcaaa

SEQ ID NO: 1026923 - RNA, 19 nt, Homo sapiens
  misc_RNA (1)...(19): siRNA sense strand
gaauaagcacuauggaaaa

SEQ ID NO: 1026924 - RNA, 19 nt, Homo sapiens
  misc_RNA (1)...(19): siRNA sense strand
caaaagaaccagcaaauac

SEQ ID NO: 1026925 - RNA, 19 nt, Homo sapiens
  misc_RNA (1)...(19): siRNA sense strand
cuuacaggacgaugaaaua

SEQ ID NO: 1026926 - RNA, 19 nt, Homo sapiens
  misc_RNA (1)...(19): siRNA sense strand
gggaaucuuacaucaguga

SEQ ID NO: 1026927 - RNA, 19 nt, Homo sapiens
  misc_RNA (1)...(19): siRNA sense strand
gaguuacaccuuuggaugu

SEQ ID NO: 1026928 - RNA, 19 nt, Homo sapiens
  misc_RNA (1)...(19): siRNA sense strand
cgacauggaccagcuggaa

SEQ ID NO: 1026929 - RNA, 19 nt, Homo sapiens
  misc_RNA (1)...(19): siRNA sense strand
cagagcagcaagauacuau

SEQ ID NO: 1026930 - RNA, 19 nt, Homo sapiens
  misc_RNA (1)...(19): siRNA sense strand
auagagauguugguugaug

SEQ ID NO: 1026931 - RNA, 19 nt, Homo sapiens
  misc_RNA (1)...(19): siRNA sense strand
ugaaauagagauguugguu

SEQ ID NO: 1026932 - RNA, 19 nt, Homo sapiens
  misc_RNA (1)...(19): siRNA sense strand
gcauugaggcagacaccaa

SEQ ID NO: 1026933 - RNA, 19 nt, Homo sapiens
  misc_RNA (1)...(19): siRNA sense strand
gaagcaucgcugacucuug

SEQ ID NO: 1026934 - RNA, 19 nt, Homo sapiens
  misc_RNA (1)...(19): siRNA sense strand
gaggcuuacuucccaucuu

SEQ ID NO: 1026935 - RNA, 19 nt, Homo sapiens
  misc_RNA (1)...(19): siRNA sense strand
aggcuuacuucccaucuug

SEQ ID NO: 1026936 - RNA, 19 nt, Homo sapiens
  misc_RNA (1)...(19): siRNA sense strand
cugaacaucaucauaaaug

SEQ ID NO: 1026937 - RNA, 19 nt, Homo sapiens
  misc_RNA (1)...(19): siRNA sense strand
acaucagacuuuaccagaa

SEQ ID NO: 1026938 - RNA, 19 nt, Homo sapiens
  misc_RNA (1)...(19): siRNA sense strand
acgaugaaauagagauguu

SEQ ID NO: 1026939 - RNA, 19 nt, Homo sapiens
  misc_RNA (1)...(19): siRNA sense strand
ggacgaugaaauagagaug

SEQ ID NO: 1026940 - RNA, 19 nt, Homo sapiens
  misc_RNA (1)...(19): siRNA sense strand
agcaguaccgggaaucuua

SEQ ID NO: 1026941 - RNA, 19 nt, Homo sapiens
  misc_RNA (1)...(19): siRNA sense strand
caaaagaauggaagaaaga

SEQ ID NO: 1026942 - RNA, 19 nt, Homo sapiens
  misc_RNA (1)...(19): siRNA sense strand
uccagaguuuguuguguaa

SEQ ID NO: 1026943 - RNA, 19 nt, Homo sapiens
  misc_RNA (1)...(19): siRNA sense strand
aaagaaccagcaaauacuu

SEQ ID NO: 1026944 - RNA, 19 nt, Homo sapiens
  misc_RNA (1)...(19): siRNA sense strand
gcgcauugcaggucugugu

SEQ ID NO: 1026945 - RNA, 19 nt, Homo sapiens
  misc_RNA (1)...(19): siRNA sense strand
cagacuauaugucggaaac

SEQ ID NO: 1026946 - RNA, 19 nt, Homo sapiens
  misc_RNA (1)...(19): siRNA sense strand
aaucuuacaucagugacaa

SEQ ID NO: 1026947 - RNA, 19 nt, Homo sapiens
  misc_RNA (1)...(19): siRNA sense strand
aggcugaucuugggaacuu

SEQ ID NO: 1026948 - RNA, 19 nt, Homo sapiens
  misc_RNA (1)...(19): siRNA sense strand
gacauggaccagcuggaaa

SEQ ID NO: 1026949 - RNA, 19 nt, Homo sapiens
  misc_RNA (1)...(19): siRNA sense strand
uaccgggaaucuuacauca

SEQ ID NO: 1026950 - RNA, 19 nt, Homo sapiens
  misc_RNA (1)...(19): siRNA sense strand
gccaccgccucuauaugaa

SEQ ID NO: 1026951 - RNA, 19 nt, Homo sapiens
  misc_RNA (1)...(19): siRNA sense strand
ccaaacaugcacaaagauc

SEQ ID NO: 1026952 - RNA, 19 nt, Homo sapiens
  misc_RNA (1)...(19): siRNA sense strand
uggaugacgucgcuguuca

SEQ ID NO: 1026953 - RNA, 19 nt, Homo sapiens
  misc_RNA (1)...(19): siRNA sense strand
augaugaaguuccagaguu

SEQ ID NO: 1026954 - RNA, 19 nt, Homo sapiens
  misc_RNA (1)...(19): siRNA sense strand
ccacugaucgacacagcuu

SEQ ID NO: 1026955 - RNA, 19 nt, Homo sapiens
  misc_RNA (1)...(19): siRNA sense strand
ccaaaagaauggaagaaag

SEQ ID NO: 1026956 - RNA, 19 nt, Homo sapiens
  misc_RNA (1)...(19): siRNA sense strand
cagccuguccugcgccaua

SEQ ID NO: 1026957 - RNA, 19 nt, Homo sapiens
  misc_RNA (1)...(19): siRNA sense strand
agacaccuccugcaacuuc

SEQ ID NO: 1026958 - RNA, 19 nt, Homo sapiens
  misc_RNA (1)...(19): siRNA sense strand
ggguaagaaauuugagauu

SEQ ID NO: 1026959 - RNA, 19 nt, Homo sapiens
  misc_RNA (1)...(19): siRNA sense strand
gaaaggagcaucuauguug

SEQ ID NO: 1026960 - RNA, 19 nt, Homo sapiens
  misc_RNA (1)...(19): siRNA sense strand
gcucaaagaugggaagaua

SEQ ID NO: 1026961 - RNA, 19 nt, Homo sapiens
  misc_RNA (1)...(19): siRNA sense strand
guacuacuuugacguauuu

SEQ ID NO: 1026962 - RNA, 19 nt, Homo sapiens
  misc_RNA (1)...(19): siRNA sense strand
guaaauauuuccacaguca

SEQ ID NO: 1026963 - RNA, 19 nt, Homo sapiens
  misc_RNA (1)...(19): siRNA sense strand
gagaagagaugggaaacuu

SEQ ID NO: 1026964 - RNA, 19 nt, Homo sapiens
  misc_RNA (1)...(19): siRNA sense strand
gaugauaacuacaaugaag

SEQ ID NO: 1026965 - RNA, 19 nt, Homo sapiens
  misc_RNA (1)...(19): siRNA sense strand
ggaaacuucuucugucuca

SEQ ID NO: 1026966 - RNA, 19 nt, Homo sapiens
  misc_RNA (1)...(19): siRNA sense strand
gagcaccgcuuauguaggu

SEQ ID NO: 1026967 - RNA, 19 nt, Homo sapiens
  misc_RNA (1)...(19): siRNA sense strand
ggaagaagccaaacagaag

SEQ ID NO: 1026968 - RNA, 19 nt, Homo sapiens
  misc_RNA (1)...(19): siRNA sense strand
ggaaggcauucagcaguuu

SEQ ID NO: 1026969 - RNA, 19 nt, Homo sapiens
  misc_RNA (1)...(19): siRNA sense strand
caagguugauauucagaaa

SEQ ID NO: 1026970 - RNA, 19 nt, Homo sapiens
  misc_RNA (1)...(19): siRNA sense strand
gaccagauauaaggaagaa

SEQ ID NO: 1026971 - RNA, 19 nt, Homo sapiens
  misc_RNA (1)...(19): siRNA sense strand
gaaaagguccucuguaaau

SEQ ID NO: 1026972 - RNA, 19 nt, Homo sapiens
  misc_RNA (1)...(19): siRNA sense strand
gaagaagccaaacagaaga

SEQ ID NO: 1026973 - RNA, 19 nt, Homo sapiens
  misc_RNA (1)...(19): siRNA sense strand
gaagggagcaaaguuucua

SEQ ID NO: 1026974 - RNA, 19 nt, Homo sapiens
  misc_RNA (1)...(19): siRNA sense strand
caccgucucugaucugaaa

SEQ ID NO: 1026975 - RNA, 19 nt, Homo sapiens
  misc_RNA (1)...(19): siRNA sense strand
aaucuuaccugcuggaugu

SEQ ID NO: 1026976 - RNA, 19 nt, Homo sapiens
  misc_RNA (1)...(19): siRNA sense strand
ccacaaggccuacuaagca

SEQ ID NO: 1026977 - RNA, 19 nt, Homo sapiens
  misc_RNA (1)...(19): siRNA sense strand
gaagacagucgagcucaaa

SEQ ID NO: 1026978 - RNA, 19 nt, Homo sapiens
  misc_RNA (1)...(19): siRNA sense strand
gaaaggaaacaagaaagga

SEQ ID NO: 1026979 - RNA, 19 nt, Homo sapiens
  misc_RNA (1)...(19): siRNA sense strand
agaaagcagugaccacaga

SEQ ID NO: 1026980 - RNA, 19 nt, Homo sapiens
  misc_RNA (1)...(19): siRNA sense strand
ggauuuccuucugauaauu

SEQ ID NO: 1026981 - RNA, 19 nt, Homo sapiens
  misc_RNA (1)...(19): siRNA sense strand
caagaaaggagcaucuaug

SEQ ID NO: 1026982 - RNA, 19 nt, Homo sapiens
  misc_RNA (1)...(19): siRNA sense strand
ggcccaagguugauauuca

SEQ ID NO: 1026983 - RNA, 19 nt, Homo sapiens
  misc_RNA (1)...(19): siRNA sense strand
gagcaucuauguugaaaau

SEQ ID NO: 1026984 - RNA, 19 nt, Homo sapiens
  misc_RNA (1)...(19): siRNA sense strand
aaaggagcaucuauguuga

SEQ ID NO: 1026985 - RNA, 19 nt, Homo sapiens
  misc_RNA (1)...(19): siRNA sense strand
gaaaagagagcaaaaccaa

SEQ ID NO: 1026986 - RNA, 19 nt, Homo sapiens
  misc_RNA (1)...(19): siRNA sense strand
caugagcaccgcuuaugua

SEQ ID NO: 1026987 - RNA, 19 nt, Homo sapiens
  misc_RNA (1)...(19): siRNA sense strand
agaaguggaugauaacuac

SEQ ID NO: 1026988 - RNA, 19 nt, Homo sapiens
  misc_RNA (1)...(19): siRNA sense strand
gaggaaaaccuaaagcuaa

SEQ ID NO: 1026989 - RNA, 19 nt, Homo sapiens
  misc_RNA (1)...(19): siRNA sense strand
gaagacacaagaaucaaag

SEQ ID NO: 1026990 - RNA, 19 nt, Homo sapiens
  misc_RNA (1)...(19): siRNA sense strand
caacaucaacagcaacaug

SEQ ID NO: 1026991 - RNA, 19 nt, Homo sapiens
  misc_RNA (1)...(19): siRNA sense strand
auucagcaguuucagcuua

SEQ ID NO: 1026992 - RNA, 19 nt, Homo sapiens
  misc_RNA (1)...(19): siRNA sense strand
gcaacaugagcaccgcuua

SEQ ID NO: 1026993 - RNA, 19 nt, Homo sapiens
  misc_RNA (1)...(19): siRNA sense strand
caaugaagaccagaagaaa

SEQ ID NO: 1026994 - RNA, 19 nt, Homo sapiens
  misc_RNA (1)...(19): siRNA sense strand
gaccacagaaacaauuaaa

SEQ ID NO: 1026995 - RNA, 19 nt, Homo sapiens
  misc_RNA (1)...(19): siRNA sense strand
gaugggaaacuucuucugu

SEQ ID NO: 1026996 - RNA, 19 nt, Homo sapiens
  misc_RNA (1)...(19): siRNA sense strand
gaacaaguuuugcaucuac

SEQ ID NO: 1026997 - RNA, 19 nt, Homo sapiens
  misc_RNA (1)...(19): siRNA sense strand
cgacugaaaggaaacaaga

SEQ ID NO: 1026998 - RNA, 19 nt, Homo sapiens
  misc_RNA (1)...(19): siRNA sense strand
gaaagcagugaccacagaa

SEQ ID NO: 1026999 - RNA, 19 nt, Homo sapiens
  misc_RNA (1)...(19): siRNA sense strand
gcagugaccacagaaacaa

SEQ ID NO: 1027000 - RNA, 19 nt, Homo sapiens
  misc_RNA (1)...(19): siRNA sense strand
gaccaaggaagaagccaaa

SEQ ID NO: 1027001 - RNA, 19 nt, Homo sapiens
  misc_RNA (1)...(19): siRNA sense strand
ccacagaaacaauuaaagg

SEQ ID NO: 1027002 - RNA, 19 nt, Homo sapiens
  misc_RNA (1)...(19): siRNA sense strand
gacaagcuccguaccuguu

SEQ ID NO: 1027003 - RNA, 19 nt, Homo sapiens
  misc_RNA (1)...(19): siRNA sense strand
gcagucauuucccucucuu

SEQ ID NO: 1027004 - RNA, 19 nt, Homo sapiens
  misc_RNA (1)...(19): siRNA sense strand
aagguccucuguaaauauu

SEQ ID NO: 1027005 - RNA, 19 nt, Homo sapiens
  misc_RNA (1)...(19): siRNA sense strand
caacaugagcaccgcuuau

SEQ ID NO: 1027006 - RNA, 19 nt, Homo sapiens
  misc_RNA (1)...(19): siRNA sense strand
caaugucuaggaccagaua

SEQ ID NO: 1027007 - RNA, 19 nt, Homo sapiens
  misc_RNA (1)...(19): siRNA sense strand
uggaaggcauucagcaguu

SEQ ID NO: 1027008 - RNA, 19 nt, Homo sapiens
  misc_RNA (1)...(19): siRNA sense strand
gaaaccuggucuggacuuc

SEQ ID NO: 1027009 - RNA, 19 nt, Homo sapiens
  misc_RNA (1)...(19): siRNA sense strand
ggcaaagccuucuccaaaa

SEQ ID NO: 1027010 - RNA, 19 nt, Homo sapiens
  misc_RNA (1)...(19): siRNA sense strand
gaugggaagauaacagaug

SEQ ID NO: 1027011 - RNA, 19 nt, Homo sapiens
  misc_RNA (1)...(19): siRNA sense strand
gguccucuguaaauauuuc

SEQ ID NO: 1027012 - RNA, 19 nt, Homo sapiens
  misc_RNA (1)...(19): siRNA sense strand
aaaagguccucuguaaaua

SEQ ID NO: 1027013 - RNA, 19 nt, Homo sapiens
  misc_RNA (1)...(19): siRNA sense strand
acaaugaagaccagaagaa

SEQ ID NO: 1027014 - RNA, 19 nt, Homo sapiens
  misc_RNA (1)...(19): siRNA sense strand
ugaagacacaagaaucaaa

SEQ ID NO: 1027015 - RNA, 19 nt, Homo sapiens
  misc_RNA (1)...(19): siRNA sense strand
gcaucuauguugaaaauuc

SEQ ID NO: 1027016 - RNA, 19 nt, Homo sapiens
  misc_RNA (1)...(19): siRNA sense strand
ggaagauaacagauguauu

SEQ ID NO: 1027017 - RNA, 19 nt, Homo sapiens
  misc_RNA (1)...(19): siRNA sense strand
gggaagauaacagauguau

SEQ ID NO: 1027018 - RNA, 19 nt, Homo sapiens
  misc_RNA (1)...(19): siRNA sense strand
gaacaucuucaccgucucu

SEQ ID NO: 1027019 - RNA, 19 nt, Homo sapiens
  misc_RNA (1)...(19): siRNA sense strand
ggaacaaguuuugcaucua

SEQ ID NO: 1027020 - RNA, 19 nt, Homo sapiens
  misc_RNA (1)...(19): siRNA sense strand
uggaugauaacuacaauga

SEQ ID NO: 1027021 - RNA, 19 nt, Homo sapiens
  misc_RNA (1)...(19): siRNA sense strand
cuuaccugcuggauguuua

SEQ ID NO: 1027022 - RNA, 19 nt, Homo sapiens
  misc_RNA (1)...(19): siRNA sense strand
uaaaguaucagaguaaggu

SEQ ID NO: 1027023 - RNA, 19 nt, Homo sapiens
  misc_RNA (1)...(19): siRNA sense strand
aaaggaagggagcaaaguu

SEQ ID NO: 1027024 - RNA, 19 nt, Homo sapiens
  misc_RNA (1)...(19): siRNA sense strand
ccagauauaaggaagaagu

SEQ ID NO: 1027025 - RNA, 19 nt, Homo sapiens
  misc_RNA (1)...(19): siRNA sense strand
gcuaggcacucaggaaagg

SEQ ID NO: 1027026 - RNA, 19 nt, Homo sapiens
  misc_RNA (1)...(19): siRNA sense strand
uggauuuccuucugauaau

SEQ ID NO: 1027027 - RNA, 19 nt, Homo sapiens
  misc_RNA (1)...(19): siRNA sense strand
ucaggaaaggaacaaguuu

SEQ ID NO: 1027028 - RNA, 19 nt, Homo sapiens
  misc_RNA (1)...(19): siRNA sense strand
aaagguccucuguaaauau

SEQ ID NO: 1027029 - RNA, 19 nt, Homo sapiens
  misc_RNA (1)...(19): siRNA sense strand
ugucuaggaccagauauaa

SEQ ID NO: 1027030 - RNA, 19 nt, Homo sapiens
  misc_RNA (1)...(19): siRNA sense strand
ugacuuugcccacuuugga

SEQ ID NO: 1027031 - RNA, 19 nt, Homo sapiens
  misc_RNA (1)...(19): siRNA sense strand
aagaaaggagcaucuaugu

SEQ ID NO: 1027032 - RNA, 19 nt, Homo sapiens
  misc_RNA (1)...(19): siRNA sense strand
auaccucguucgacugaaa

SEQ ID NO: 1027033 - RNA, 19 nt, Homo sapiens
  misc_RNA (1)...(19): siRNA sense strand
ggaugauaacuacaaugaa

SEQ ID NO: 1027034 - RNA, 19 nt, Homo sapiens
  misc_RNA (1)...(19): siRNA sense strand
ggcacucuguaaaguauca

SEQ ID NO: 1027035 - RNA, 19 nt, Homo sapiens
  misc_RNA (1)...(19): siRNA sense strand
gugaccacagaaacaauua

SEQ ID NO: 1027036 - RNA, 19 nt, Homo sapiens
  misc_RNA (1)...(19): siRNA sense strand
gagcaaaaccaaugucuag

SEQ ID NO: 1027037 - RNA, 19 nt, Homo sapiens
  misc_RNA (1)...(19): siRNA sense strand
caaggaagaagccaaacag

SEQ ID NO: 1027038 - RNA, 19 nt, Homo sapiens
  misc_RNA (1)...(19): siRNA sense strand
aaggaagggagcaaaguuu

SEQ ID NO: 1027039 - RNA, 19 nt, Homo sapiens
  misc_RNA (1)...(19): siRNA sense strand
agaagacagucgagcucaa

SEQ ID NO: 1027040 - RNA, 19 nt, Homo sapiens
  misc_RNA (1)...(19): siRNA sense strand
gacagucgagcucaaagau

SEQ ID NO: 1027041 - RNA, 19 nt, Homo sapiens
  misc_RNA (1)...(19): siRNA sense strand
gcaaagccuucuccaaaac

SEQ ID NO: 1027042 - RNA, 19 nt, Homo sapiens
  misc_RNA (1)...(19): siRNA sense strand
aagaaguggaugauaacua

SEQ ID NO: 1027043 - RNA, 19 nt, Homo sapiens
  misc_RNA (1)...(19): siRNA sense strand
ccugaagacacaagaauca

SEQ ID NO: 1027044 - RNA, 19 nt, Homo sapiens
  misc_RNA (1)...(19): siRNA sense strand
guaaagaacgcaguuucca

SEQ ID NO: 1027045 - RNA, 19 nt, Homo sapiens
  misc_RNA (1)...(19): siRNA sense strand
ggaagggagcaaaguuucu

SEQ ID NO: 1027046 - RNA, 19 nt, Homo sapiens
  misc_RNA (1)...(19): siRNA sense strand
aggaagaagccaaacagaa

SEQ ID NO: 1027047 - RNA, 19 nt, Homo sapiens
  misc_RNA (1)...(19): siRNA sense strand
ggaccagauauaaggaaga

SEQ ID NO: 1027048 - RNA, 19 nt, Homo sapiens
  misc_RNA (1)...(19): siRNA sense strand
gcacucaggaaaggaacaa

SEQ ID NO: 1027049 - RNA, 19 nt, Homo sapiens
  misc_RNA (1)...(19): siRNA sense strand
ucaaagaugggaagauaac

SEQ ID NO: 1027050 - RNA, 19 nt, Homo sapiens
  misc_RNA (1)...(19): siRNA sense strand
gcauaggaaacaagaacau

SEQ ID NO: 1027051 - RNA, 19 nt, Homo sapiens
  misc_RNA (1)...(19): siRNA sense strand
agcaaaguuucuacgguuu

SEQ ID NO: 1027052 - RNA, 19 nt, Homo sapiens
  misc_RNA (1)...(19): siRNA sense strand
gaaacaauuaaaggucuuc

SEQ ID NO: 1027053 - RNA, 19 nt, Homo sapiens
  misc_RNA (1)...(19): siRNA sense strand
gcccaagguugauauucag

SEQ ID NO: 1027054 - RNA, 19 nt, Homo sapiens
  misc_RNA (1)...(19): siRNA sense strand
ugaaacccgacacgcagua

SEQ ID NO: 1027055 - RNA, 19 nt, Homo sapiens
  misc_RNA (1)...(19): siRNA sense strand
agaaaggagcaucuauguu

SEQ ID NO: 1027056 - RNA, 19 nt, Homo sapiens
  misc_RNA (1)...(19): siRNA sense strand
gaaggcauucagcaguuuc

SEQ ID NO: 1027057 - RNA, 19 nt, Homo sapiens
  misc_RNA (1)...(19): siRNA sense strand
uaaggaagaagucagaaaa

SEQ ID NO: 1027058 - RNA, 19 nt, Homo sapiens
  misc_RNA (1)...(19): siRNA sense strand
aaauaccucguucgacuga

SEQ ID NO: 1027059 - RNA, 19 nt, Homo sapiens
  misc_RNA (1)...(19): siRNA sense strand
gcaaugagcuuguaaagaa

SEQ ID NO: 1027060 - RNA, 19 nt, Homo sapiens
  misc_RNA (1)...(19): siRNA sense strand
gaaagccucuuguguagua

SEQ ID NO: 1027061 - RNA, 19 nt, Homo sapiens
  misc_RNA (1)...(19): siRNA sense strand
gaaagaacgugaaggcauu

SEQ ID NO: 1027062 - RNA, 19 nt, Homo sapiens
  misc_RNA (1)...(19): siRNA sense strand
agaaagcuauugagaagua

SEQ ID NO: 1027063 - RNA, 19 nt, Homo sapiens
  misc_RNA (1)...(19): siRNA sense strand
uaagaaagcuauugagaag

SEQ ID NO: 1027064 - RNA, 19 nt, Homo sapiens
  misc_RNA (1)...(19): siRNA sense strand
gaagggaaaccauaagaaa

SEQ ID NO: 1027065 - RNA, 19 nt, Homo sapiens
  misc_RNA (1)...(19): siRNA sense strand
caucaaagauugcacuuca

SEQ ID NO: 1027066 - RNA, 19 nt, Homo sapiens
  misc_RNA (1)...(19): siRNA sense strand
acaaagcacucaaggacua

SEQ ID NO: 1027067 - RNA, 19 nt, Homo sapiens
  misc_RNA (1)...(19): siRNA sense strand
guaaagaagggaaaccaua

SEQ ID NO: 1027068 - RNA, 19 nt, Homo sapiens
  misc_RNA (1)...(19): siRNA sense strand
gcagauugaugauaaugug

SEQ ID NO: 1027069 - RNA, 19 nt, Homo sapiens
  misc_RNA (1)...(19): siRNA sense strand
uaaagaagggaaaccauaa

SEQ ID NO: 1027070 - RNA, 19 nt, Homo sapiens
  misc_RNA (1)...(19): siRNA sense strand
gagacugcaucaaagauug

SEQ ID NO: 1027071 - RNA, 19 nt, Homo sapiens
  misc_RNA (1)...(19): siRNA sense strand
ggaaugguccugcacagaa

SEQ ID NO: 1027072 - RNA, 19 nt, Homo sapiens
  misc_RNA (1)...(19): siRNA sense strand
gaaggcaucaacagaauga

SEQ ID NO: 1027073 - RNA, 19 nt, Homo sapiens
  misc_RNA (1)...(19): siRNA sense strand
gaagcagaaccuacacuaa

SEQ ID NO: 1027074 - RNA, 19 nt, Homo sapiens
  misc_RNA (1)...(19): siRNA sense strand
agacugugcugcagauuga

SEQ ID NO: 1027075 - RNA, 19 nt, Homo sapiens
  misc_RNA (1)...(19): siRNA sense strand
gugaaagccucuuguguag

SEQ ID NO: 1027076 - RNA, 19 nt, Homo sapiens
  misc_RNA (1)...(19): siRNA sense strand
uggccuauguugacuauaa

SEQ ID NO: 1027077 - RNA, 19 nt, Homo sapiens
  misc_RNA (1)...(19): siRNA sense strand
gacuauaaauccagcuuug

SEQ ID NO: 1027078 - RNA, 19 nt, Homo sapiens
  misc_RNA (1)...(19): siRNA sense strand
guagaaggcaucaacagaa

SEQ ID NO: 1027079 - RNA, 19 nt, Homo sapiens
  misc_RNA (1)...(19): siRNA sense strand
gaaguacccuauggccuau

SEQ ID NO: 1027080 - RNA, 19 nt, Homo sapiens
  misc_RNA (1)...(19): siRNA sense strand
ggaagaaggcaaugagcuu

SEQ ID NO: 1027081 - RNA, 19 nt, Homo sapiens
  misc_RNA (1)...(19): siRNA sense strand
gaaaccacagcuacaaaga

SEQ ID NO: 1027082 - RNA, 19 nt, Homo sapiens
  misc_RNA (1)...(19): siRNA sense strand
ggcaggaagugaagcagaa

SEQ ID NO: 1027083 - RNA, 19 nt, Homo sapiens
  misc_RNA (1)...(19): siRNA sense strand
uugguucccuucagcauua

SEQ ID NO: 1027084 - RNA, 19 nt, Homo sapiens
  misc_RNA (1)...(19): siRNA sense strand
uagaaggcaucaacagaau

SEQ ID NO: 1027085 - RNA, 19 nt, Homo sapiens
  misc_RNA (1)...(19): siRNA sense strand
gcucagaagagguggaauu

SEQ ID NO: 1027086 - RNA, 19 nt, Homo sapiens
  misc_RNA (1)...(19): siRNA sense strand
gugaaggacugcacagaag

SEQ ID NO: 1027087 - RNA, 19 nt, Homo sapiens
  misc_RNA (1)...(19): siRNA sense strand
gaaaccauaagaaagcuau

SEQ ID NO: 1027088 - RNA, 19 nt, Homo sapiens
  misc_RNA (1)...(19): siRNA sense strand
gaaugguccugcacagaag

SEQ ID NO: 1027089 - RNA, 19 nt, Homo sapiens
  misc_RNA (1)...(19): siRNA sense strand
gcaaccuccuacagauuga

SEQ ID NO: 1027090 - RNA, 19 nt, Homo sapiens
  misc_RNA (1)...(19): siRNA sense strand
cauaagaaagcuauugaga

SEQ ID NO: 1027091 - RNA, 19 nt, Homo sapiens
  misc_RNA (1)...(19): siRNA sense strand
gaaggaagaaggcaaugag

SEQ ID NO: 1027092 - RNA, 19 nt, Homo sapiens
  misc_RNA (1)...(19): siRNA sense strand
gcacagaagcccucaagcu

SEQ ID NO: 1027093 - RNA, 19 nt, Homo sapiens
  misc_RNA (1)...(19): siRNA sense strand
caaagaaaccacagcuaca

SEQ ID NO: 1027094 - RNA, 19 nt, Homo sapiens
  misc_RNA (1)...(19): siRNA sense strand
ggacuauaaauccagcuuu

SEQ ID NO: 1027095 - RNA, 19 nt, Homo sapiens
  misc_RNA (1)...(19): siRNA sense strand
agugaaagccucuugugua

SEQ ID NO: 1027096 - RNA, 19 nt, Homo sapiens
  misc_RNA (1)...(19): siRNA sense strand
augaggcucuggagaagua

SEQ ID NO: 1027097 - RNA, 19 nt, Homo sapiens
  misc_RNA (1)...(19): siRNA sense strand
ucagcaaccuccuacagau

SEQ ID NO: 1027098 - RNA, 19 nt, Homo sapiens
  misc_RNA (1)...(19): siRNA sense strand
gcacucaaggacuauaaau

SEQ ID NO: 1027099 - RNA, 19 nt, Homo sapiens
  misc_RNA (1)...(19): siRNA sense strand
gaacgugaaggcauucuac

SEQ ID NO: 1027100 - RNA, 19 nt, Homo sapiens
  misc_RNA (1)...(19): siRNA sense strand
gcuauuugguccugaagca

SEQ ID NO: 1027101 - RNA, 19 nt, Homo sapiens
  misc_RNA (1)...(19): siRNA sense strand
gaaggcaaugagcuuguaa

SEQ ID NO: 1027102 - RNA, 19 nt, Homo sapiens
  misc_RNA (1)...(19): siRNA sense strand
agaaggcaaugagcuugua

SEQ ID NO: 1027103 - RNA, 19 nt, Homo sapiens
  misc_RNA (1)...(19): siRNA sense strand
acaaagagauggcuaaaag

SEQ ID NO: 1027104 - RNA, 19 nt, Homo sapiens
  misc_RNA (1)...(19): siRNA sense strand
ggagaaccacaaagagaug

SEQ ID NO: 1027105 - RNA, 19 nt, Homo sapiens
  misc_RNA (1)...(19): siRNA sense strand
aaaguguucucuacuccaa

SEQ ID NO: 1027106 - RNA, 19 nt, Homo sapiens
  misc_RNA (1)...(19): siRNA sense strand
guacacagaagcagugaag

SEQ ID NO: 1027107 - RNA, 19 nt, Homo sapiens
  misc_RNA (1)...(19): siRNA sense strand
caagcuggauggaaagaac

SEQ ID NO: 1027108 - RNA, 19 nt, Homo sapiens
  misc_RNA (1)...(19): siRNA sense strand
ugaagcagaaccuacacua

SEQ ID NO: 1027109 - RNA, 19 nt, Homo sapiens
  misc_RNA (1)...(19): siRNA sense strand
aaagaaaccacagcuacaa

SEQ ID NO: 1027110 - RNA, 19 nt, Homo sapiens
  misc_RNA (1)...(19): siRNA sense strand
ccacaaagagauggcuaaa

SEQ ID NO: 1027111 - RNA, 19 nt, Homo sapiens
  misc_RNA (1)...(19): siRNA sense strand
aaaccacagcuacaaagaa

SEQ ID NO: 1027112 - RNA, 19 nt, Homo sapiens
  misc_RNA (1)...(19): siRNA sense strand
guacagugaaagccucuug

SEQ ID NO: 1027113 - RNA, 19 nt, Homo sapiens
  misc_RNA (1)...(19): siRNA sense strand
ggaagugaagcagaaccua

SEQ ID NO: 1027114 - RNA, 19 nt, Homo sapiens
  misc_RNA (1)...(19): siRNA sense strand
caaugagcuuguaaagaag

SEQ ID NO: 1027115 - RNA, 19 nt, Homo sapiens
  misc_RNA (1)...(19): siRNA sense strand
acacagaagcagugaagga

SEQ ID NO: 1027116 - RNA, 19 nt, Homo sapiens
  misc_RNA (1)...(19): siRNA sense strand
ugcugcagauugaugauaa

SEQ ID NO: 1027117 - RNA, 19 nt, Homo sapiens
  misc_RNA (1)...(19): siRNA sense strand
cagcaaccuccuacagauu

SEQ ID NO: 1027118 - RNA, 19 nt, Homo sapiens
  misc_RNA (1)...(19): siRNA sense strand
cuauugagaaguacaguga

SEQ ID NO: 1027119 - RNA, 19 nt, Homo sapiens
  misc_RNA (1)...(19): siRNA sense strand
ggaaaccauaagaaagcua

SEQ ID NO: 1027120 - RNA, 19 nt, Homo sapiens
  misc_RNA (1)...(19): siRNA sense strand
cgugaaggcauucuacaga

SEQ ID NO: 1027121 - RNA, 19 nt, Homo sapiens
  misc_RNA (1)...(19): siRNA sense strand
agagauggcuaaaagcaaa

SEQ ID NO: 1027122 - RNA, 19 nt, Homo sapiens
  misc_RNA (1)...(19): siRNA sense strand
auugagaaguacagugaaa

SEQ ID NO: 1027123 - RNA, 19 nt, Homo sapiens
  misc_RNA (1)...(19): siRNA sense strand
gaaagcuauugagaaguac

SEQ ID NO: 1027124 - RNA, 19 nt, Homo sapiens
  misc_RNA (1)...(19): siRNA sense strand
uauggccuauguugacuau

SEQ ID NO: 1027125 - RNA, 19 nt, Homo sapiens
  misc_RNA (1)...(19): siRNA sense strand
cguagaaggcaucaacaga

SEQ ID NO: 1027126 - RNA, 19 nt, Homo sapiens
  misc_RNA (1)...(19): siRNA sense strand
cuuaugaggcucuggagaa

SEQ ID NO: 1027127 - RNA, 19 nt, Homo sapiens
  misc_RNA (1)...(19): siRNA sense strand
cccucaagcuggauggaaa

SEQ ID NO: 1027128 - RNA, 19 nt, Homo sapiens
  misc_RNA (1)...(19): siRNA sense strand
agaagggaaaccauaagaa

SEQ ID NO: 1027129 - RNA, 19 nt, Homo sapiens
  misc_RNA (1)...(19): siRNA sense strand
ggcaaugagcuuguaaaga

SEQ ID NO: 1027130 - RNA, 19 nt, Homo sapiens
  misc_RNA (1)...(19): siRNA sense strand
gcugcagauugaugauaau

SEQ ID NO: 1027131 - RNA, 19 nt, Homo sapiens
  misc_RNA (1)...(19): siRNA sense strand
cagauugagccuaggaaug

SEQ ID NO: 1027132 - RNA, 19 nt, Homo sapiens
  misc_RNA (1)...(19): siRNA sense strand
aaccacagcuacaaagaac

SEQ ID NO: 1027133 - RNA, 19 nt, Homo sapiens
  misc_RNA (1)...(19): siRNA sense strand
agacaucagcaaccuccua

SEQ ID NO: 1027134 - RNA, 19 nt, Homo sapiens
  misc_RNA (1)...(19): siRNA sense strand
agagacugcaucaaagauu

SEQ ID NO: 1027135 - RNA, 19 nt, Homo sapiens
  misc_RNA (1)...(19): siRNA sense strand
auaagacugugcugcagau

SEQ ID NO: 1027136 - RNA, 19 nt, Homo sapiens
  misc_RNA (1)...(19): siRNA sense strand
aagaagggaaaccauaaga

SEQ ID NO: 1027137 - RNA, 19 nt, Homo sapiens
  misc_RNA (1)...(19): siRNA sense strand
aagaaaccacagcuacaaa

SEQ ID NO: 1027138 - RNA, 19 nt, Homo sapiens
  misc_RNA (1)...(19): siRNA sense strand
cuucggagaaccacaaaga

SEQ ID NO: 1027139 - RNA, 19 nt, Homo sapiens
  misc_RNA (1)...(19): siRNA sense strand
ucggagaaccacaaagaga

SEQ ID NO: 1027140 - RNA, 19 nt, Homo sapiens
  misc_RNA (1)...(19): siRNA sense strand
gaaguugcggcaggaagug

SEQ ID NO: 1027141 - RNA, 19 nt, Homo sapiens
  misc_RNA (1)...(19): siRNA sense strand
aaauccagcuuugcagaca

SEQ ID NO: 1027142 - RNA, 19 nt, Homo sapiens
  misc_RNA (1)...(19): siRNA sense strand
gaagcaguacacagaagca

SEQ ID NO: 1027143 - RNA, 19 nt, Homo sapiens
  misc_RNA (1)...(19): siRNA sense strand
ugaaggaagaaggcaauga

SEQ ID NO: 1027144 - RNA, 19 nt, Homo sapiens
  misc_RNA (1)...(19): siRNA sense strand
ggccuauguugacuauaag

SEQ ID NO: 1027145 - RNA, 19 nt, Homo sapiens
  misc_RNA (1)...(19): siRNA sense strand
cuucagcacuggccuuggu

SEQ ID NO: 1027146 - RNA, 19 nt, Homo sapiens
  misc_RNA (1)...(19): siRNA sense strand
guggagaaagccagaguuc

SEQ ID NO: 1027147 - RNA, 19 nt, Homo sapiens
  misc_RNA (1)...(19): siRNA sense strand
ccagaagaagaaaguguuc

SEQ ID NO: 1027148 - RNA, 19 nt, Homo sapiens
  misc_RNA (1)...(19): siRNA sense strand
agaaugaccagagcucuca

SEQ ID NO: 1027149 - RNA, 19 nt, Homo sapiens
  misc_RNA (1)...(19): siRNA sense strand
cuggagaaguacccuaugg

SEQ ID NO: 1027150 - RNA, 19 nt, Homo sapiens
  misc_RNA (1)...(19): siRNA sense strand
gggaaaccauaagaaagcu

SEQ ID NO: 1027151 - RNA, 19 nt, Homo sapiens
  misc_RNA (1)...(19): siRNA sense strand
cggagaaccacaaagagau

SEQ ID NO: 1027152 - RNA, 19 nt, Homo sapiens
  misc_RNA (1)...(19): siRNA sense strand
gugcugcagauugaugaua

SEQ ID NO: 1027153 - RNA, 19 nt, Homo sapiens
  misc_RNA (1)...(19): siRNA sense strand
ccagacacauggagaaaua

SEQ ID NO: 1027154 - RNA, 19 nt, Homo sapiens
  misc_RNA (1)...(19): siRNA sense strand
gaaucaugaucaccaauaa

SEQ ID NO: 1027155 - RNA, 19 nt, Homo sapiens
  misc_RNA (1)...(19): siRNA sense strand
gcacagauccugcgauuca

SEQ ID NO: 1027156 - RNA, 19 nt, Homo sapiens
  misc_RNA (1)...(19): siRNA sense strand
gaccaugguuguuaauuau

SEQ ID NO: 1027157 - RNA, 19 nt, Homo sapiens
  misc_RNA (1)...(19): siRNA sense strand
agaccaugguuguuaauua

SEQ ID NO: 1027158 - RNA, 19 nt, Homo sapiens
  misc_RNA (1)...(19): siRNA sense strand
gauagaguuuaacgucuuu

SEQ ID NO: 1027159 - RNA, 19 nt, Homo sapiens
  misc_RNA (1)...(19): siRNA sense strand
ggacacagacagccaagaa

SEQ ID NO: 1027160 - RNA, 19 nt, Homo sapiens
  misc_RNA (1)...(19): siRNA sense strand
ccagcaggaucaucauuaa

SEQ ID NO: 1027161 - RNA, 19 nt, Homo sapiens
  misc_RNA (1)...(19): siRNA sense strand
gaaguacaaugugaagaug

SEQ ID NO: 1027162 - RNA, 19 nt, Homo sapiens
  misc_RNA (1)...(19): siRNA sense strand
gccaagaacugcacagauc

SEQ ID NO: 1027163 - RNA, 19 nt, Homo sapiens
  misc_RNA (1)...(19): siRNA sense strand
gaagcaacguguuugacau

SEQ ID NO: 1027164 - RNA, 19 nt, Homo sapiens
  misc_RNA (1)...(19): siRNA sense strand
ccaauggugugagcaguaa

SEQ ID NO: 1027165 - RNA, 19 nt, Homo sapiens
  misc_RNA (1)...(19): siRNA sense strand
caacauccugugcauaauu

SEQ ID NO: 1027166 - RNA, 19 nt, Homo sapiens
  misc_RNA (1)...(19): siRNA sense strand
guaacccggucaacaguga

SEQ ID NO: 1027167 - RNA, 19 nt, Homo sapiens
  misc_RNA (1)...(19): siRNA sense strand
gaucuguucuccaauaagg

SEQ ID NO: 1027168 - RNA, 19 nt, Homo sapiens
  misc_RNA (1)...(19): siRNA sense strand
ugaaggagaagccacagua

SEQ ID NO: 1027169 - RNA, 19 nt, Homo sapiens
  misc_RNA (1)...(19): siRNA sense strand
cgaaucaugaucaccaaua

SEQ ID NO: 1027170 - RNA, 19 nt, Homo sapiens
  misc_RNA (1)...(19): siRNA sense strand
cagaucuguucuccaauaa

SEQ ID NO: 1027171 - RNA, 19 nt, Homo sapiens
  misc_RNA (1)...(19): siRNA sense strand
caugaucaccaauaaguuu

SEQ ID NO: 1027172 - RNA, 19 nt, Homo sapiens
  misc_RNA (1)...(19): siRNA sense strand
gcucaucguguucauauau

SEQ ID NO: 1027173 - RNA, 19 nt, Homo sapiens
  misc_RNA (1)...(19): siRNA sense strand
aauuauggaucaacaguga

SEQ ID NO: 1027174 - RNA, 19 nt, Homo sapiens
  misc_RNA (1)...(19): siRNA sense strand
gccagcaggaucaucauua

SEQ ID NO: 1027175 - RNA, 19 nt, Homo sapiens
  misc_RNA (1)...(19): siRNA sense strand
gaaggagaagccacaguau

SEQ ID NO: 1027176 - RNA, 19 nt, Homo sapiens
  misc_RNA (1)...(19): siRNA sense strand
gugcuucuccauaaugaua

SEQ ID NO: 1027177 - RNA, 19 nt, Homo sapiens
  misc_RNA (1)...(19): siRNA sense strand
ggaagcaacguguuugaca

SEQ ID NO: 1027178 - RNA, 19 nt, Homo sapiens
  misc_RNA (1)...(19): siRNA sense strand
cgaagacccucagcagaau

SEQ ID NO: 1027179 - RNA, 19 nt, Homo sapiens
  misc_RNA (1)...(19): siRNA sense strand
ggaucgcuguguucuccua

SEQ ID NO: 1027180 - RNA, 19 nt, Homo sapiens
  misc_RNA (1)...(19): siRNA sense strand
ugauagaguuuaacgucuu

SEQ ID NO: 1027181 - RNA, 19 nt, Homo sapiens
  misc_RNA (1)...(19): siRNA sense strand
gcauccaccuaaacaagug

SEQ ID NO: 1027182 - RNA, 19 nt, Homo sapiens
  misc_RNA (1)...(19): siRNA sense strand
ccgaagacccucagcagaa

SEQ ID NO: 1027183 - RNA, 19 nt, Homo sapiens
  misc_RNA (1)...(19): siRNA sense strand
cauaggaagcaacguguuu

SEQ ID NO: 1027184 - RNA, 19 nt, Homo sapiens
  misc_RNA (1)...(19): siRNA sense strand
gcuguguucuccuacauca

SEQ ID NO: 1027185 - RNA, 19 nt, Homo sapiens
  misc_RNA (1)...(19): siRNA sense strand
agugugcgaugacuucuuu

SEQ ID NO: 1027186 - RNA, 19 nt, Homo sapiens
  misc_RNA (1)...(19): siRNA sense strand
ggagaaauagaaaguugau

SEQ ID NO: 1027187 - RNA, 19 nt, Homo sapiens
  misc_RNA (1)...(19): siRNA sense strand
cugcacagauccugcgauu

SEQ ID NO: 1027188 - RNA, 19 nt, Homo sapiens
  misc_RNA (1)...(19): siRNA sense strand
gaucaugaaguacaaugug

SEQ ID NO: 1027189 - RNA, 19 nt, Homo sapiens
  misc_RNA (1)...(19): siRNA sense strand
caucaucuuguauguguuu

SEQ ID NO: 1027190 - RNA, 19 nt, Homo sapiens
  misc_RNA (1)...(19): siRNA sense strand
gaacauugagaacgggaau

SEQ ID NO: 1027191 - RNA, 19 nt, Homo sapiens
  misc_RNA (1)...(19): siRNA sense strand
ugugagagacuccaucuga

SEQ ID NO: 1027192 - RNA, 19 nt, Homo sapiens
  misc_RNA (1)...(19): siRNA sense strand
ggaggcacgagaacauuga

SEQ ID NO: 1027193 - RNA, 19 nt, Homo sapiens
  misc_RNA (1)...(19): siRNA sense strand
acacauggagaaauagaaa

SEQ ID NO: 1027194 - RNA, 19 nt, Homo sapiens
  misc_RNA (1)...(19): siRNA sense strand
gggaaggccuggugcucau

SEQ ID NO: 1027195 - RNA, 19 nt, Homo sapiens
  misc_RNA (1)...(19): siRNA sense strand
ggagugugcggacuguuug

SEQ ID NO: 1027196 - RNA, 19 nt, Homo sapiens
  misc_RNA (1)...(19): siRNA sense strand
cugcagaccaugguuguua

SEQ ID NO: 1027197 - RNA, 19 nt, Homo sapiens
  misc_RNA (1)...(19): siRNA sense strand
gagcuguuugcgucuguua

SEQ ID NO: 1027198 - RNA, 19 nt, Homo sapiens
  misc_RNA (1)...(19): siRNA sense strand
ggcagagacugaucaacuc

SEQ ID NO: 1027199 - RNA, 19 nt, Homo sapiens
  misc_RNA (1)...(19): siRNA sense strand
cauccuuggugcucuguau

SEQ ID NO: 1027200 - RNA, 19 nt, Homo sapiens
  misc_RNA (1)...(19): siRNA sense strand
ugaaguacaaugugaagau

SEQ ID NO: 1027201 - RNA, 19 nt, Homo sapiens
  misc_RNA (1)...(19): siRNA sense strand
ugcgaugacuucuuuguuc

SEQ ID NO: 1027202 - RNA, 19 nt, Homo sapiens
  misc_RNA (1)...(19): siRNA sense strand
cugcauggccagccuaauu

SEQ ID NO: 1027203 - RNA, 19 nt, Homo sapiens
  misc_RNA (1)...(19): siRNA sense strand
gcuguuugcgucuguuauu

SEQ ID NO: 1027204 - RNA, 19 nt, Homo sapiens
  misc_RNA (1)...(19): siRNA sense strand
gaucaacucggccaauggu

SEQ ID NO: 1027205 - RNA, 19 nt, Homo sapiens
  misc_RNA (1)...(19): siRNA sense strand
ggcagucuccaacaccaua

SEQ ID NO: 1027206 - RNA, 19 nt, Homo sapiens
  misc_RNA (1)...(19): siRNA sense strand
ugguguggcuggugacuau

SEQ ID NO: 1027207 - RNA, 19 nt, Homo sapiens
  misc_RNA (1)...(19): siRNA sense strand
cgugggcucugcuguguuc

SEQ ID NO: 1027208 - RNA, 19 nt, Homo sapiens
  misc_RNA (1)...(19): siRNA sense strand
gccaauggugugagcagua

SEQ ID NO: 1027209 - RNA, 19 nt, Homo sapiens
  misc_RNA (1)...(19): siRNA sense strand
gcuccagcccucccaaguu

SEQ ID NO: 1027210 - RNA, 19 nt, Homo sapiens
  misc_RNA (1)...(19): siRNA sense strand
gugcucaucguguucauau

SEQ ID NO: 1027211 - RNA, 19 nt, Homo sapiens
  misc_RNA (1)...(19): siRNA sense strand
aacauccugugcauaauug

SEQ ID NO: 1027212 - RNA, 19 nt, Homo sapiens
  misc_RNA (1)...(19): siRNA sense strand
cuagagaagaucugugaga

SEQ ID NO: 1027213 - RNA, 19 nt, Homo sapiens
  misc_RNA (1)...(19): siRNA sense strand
gguuguuaauuauggauca

SEQ ID NO: 1027214 - RNA, 19 nt, Homo sapiens
  misc_RNA (1)...(19): siRNA sense strand
ugcagaccaugguuguuaa

SEQ ID NO: 1027215 - RNA, 19 nt, Homo sapiens
  misc_RNA (1)...(19): siRNA sense strand
cucaucaucuuguaugugu

SEQ ID NO: 1027216 - RNA, 19 nt, Homo sapiens
  misc_RNA (1)...(19): siRNA sense strand
uucaacauccugugcauaa

SEQ ID NO: 1027217 - RNA, 19 nt, Homo sapiens
  misc_RNA (1)...(19): siRNA sense strand
caucaugggcauuacuuuc

SEQ ID NO: 1027218 - RNA, 19 nt, Homo sapiens
  misc_RNA (1)...(19): siRNA sense strand
gcaggcuuacgaaucauga

SEQ ID NO: 1027219 - RNA, 19 nt, Homo sapiens
  misc_RNA (1)...(19): siRNA sense strand
auggagaaauagaaaguug

SEQ ID NO: 1027220 - RNA, 19 nt, Homo sapiens
  misc_RNA (1)...(19): siRNA sense strand
gccgagacuccguguacua

SEQ ID NO: 1027221 - RNA, 19 nt, Homo sapiens
  misc_RNA (1)...(19): siRNA sense strand
ucucuacgccaucuucuug

SEQ ID NO: 1027222 - RNA, 19 nt, Homo sapiens
  misc_RNA (1)...(19): siRNA sense strand
ggugaugguggacgagauu

SEQ ID NO: 1027223 - RNA, 19 nt, Homo sapiens
  misc_RNA (1)...(19): siRNA sense strand
gaugguggacgagauuaug

SEQ ID NO: 1027224 - RNA, 19 nt, Homo sapiens
  misc_RNA (1)...(19): siRNA sense strand
uuggugcucuguauauguu

SEQ ID NO: 1027225 - RNA, 19 nt, Homo sapiens
  misc_RNA (1)...(19): siRNA sense strand
aaacagcuucugcuagcaa

SEQ ID NO: 1027226 - RNA, 19 nt, Homo sapiens
  misc_RNA (1)...(19): siRNA sense strand
gcagcagggacaaguguuc

SEQ ID NO: 1027227 - RNA, 19 nt, Homo sapiens
  misc_RNA (1)...(19): siRNA sense strand
gggaggcacgagaacauug

SEQ ID NO: 1027228 - RNA, 19 nt, Homo sapiens
  misc_RNA (1)...(19): siRNA sense strand
cauagugugcgaugacuuc

SEQ ID NO: 1027229 - RNA, 19 nt, Homo sapiens
  misc_RNA (1)...(19): siRNA sense strand
caacagugaagaucaacag

SEQ ID NO: 1027230 - RNA, 19 nt, Homo sapiens
  misc_RNA (1)...(19): siRNA sense strand
guguggcuggugacuauua

SEQ ID NO: 1027231 - RNA, 19 nt, Homo sapiens
  misc_RNA (1)...(19): siRNA sense strand
cuccagcccucccaaguuc

SEQ ID NO: 1027232 - RNA, 19 nt, Homo sapiens
  misc_RNA (1)...(19): siRNA sense strand
gaaggccuggugcucauca

SEQ ID NO: 1027233 - RNA, 19 nt, Homo sapiens
  misc_RNA (1)...(19): siRNA sense strand
gagcggcagagacugauca

SEQ ID NO: 1027234 - RNA, 19 nt, Homo sapiens
  misc_RNA (1)...(19): siRNA sense strand
ucuacgugcugguucucua

SEQ ID NO: 1027235 - RNA, 19 nt, Homo sapiens
  misc_RNA (1)...(19): siRNA sense strand
ucaacauccugugcauaau

SEQ ID NO: 1027236 - RNA, 19 nt, Homo sapiens
  misc_RNA (1)...(19): siRNA sense strand
gcacgagaacauugagaac

SEQ ID NO: 1027237 - RNA, 19 nt, Homo sapiens
  misc_RNA (1)...(19): siRNA sense strand
ggcacgagaacauugagaa

SEQ ID NO: 1027238 - RNA, 19 nt, Homo sapiens
  misc_RNA (1)...(19): siRNA sense strand
gagccguccugcugcacau

SEQ ID NO: 1027239 - RNA, 19 nt, Homo sapiens
  misc_RNA (1)...(19): siRNA sense strand
ucuauuccgugguccuguu

SEQ ID NO: 1027240 - RNA, 19 nt, Homo sapiens
  misc_RNA (1)...(19): siRNA sense strand
cggcagagacugaucaacu

SEQ ID NO: 1027241 - RNA, 19 nt, Homo sapiens
  misc_RNA (1)...(19): siRNA sense strand
gacacauggagaaauagaa

SEQ ID NO: 1027242 - RNA, 19 nt, Homo sapiens
  misc_RNA (1)...(19): siRNA sense strand
gcagaccaugguuguuaau

SEQ ID NO: 1027243 - RNA, 19 nt, Homo sapiens
  misc_RNA (1)...(19): siRNA sense strand
guucaacauccugugcaua

SEQ ID NO: 1027244 - RNA, 19 nt, Homo sapiens
  misc_RNA (1)...(19): siRNA sense strand
cuucuugugcuucuccaua

SEQ ID NO: 1027245 - RNA, 19 nt, Homo sapiens
  misc_RNA (1)...(19): siRNA sense strand
ccugguaggacuuggugua

SEQ ID NO: 1027246 - RNA, 19 nt, Homo sapiens
  misc_RNA (1)...(19): siRNA sense strand
uuaaugagcggcagagacu

SEQ ID NO: 1027247 - RNA, 19 nt, Homo sapiens
  misc_RNA (1)...(19): siRNA sense strand
gccuggugcucaucaucuu

SEQ ID NO: 1027248 - RNA, 19 nt, Homo sapiens
  misc_RNA (1)...(19): siRNA sense strand
ucaucgugcucaucguguu

SEQ ID NO: 1027249 - RNA, 19 nt, Homo sapiens
  misc_RNA (1)...(19): siRNA sense strand
uggagugugcggacuguuu

SEQ ID NO: 1027250 - RNA, 19 nt, Homo sapiens
  misc_RNA (1)...(19): siRNA sense strand
gugcgaugacuucuuuguu

SEQ ID NO: 1027251 - RNA, 19 nt, Homo sapiens
  misc_RNA (1)...(19): siRNA sense strand
uaggaagcaacguguuuga

SEQ ID NO: 1027252 - RNA, 19 nt, Homo sapiens
  misc_RNA (1)...(19): siRNA sense strand
gcuucuccauaaugauaga

SEQ ID NO: 1027253 - RNA, 19 nt, Homo sapiens
  misc_RNA (1)...(19): siRNA sense strand
ccagacacauggagaaaua

SEQ ID NO: 1027254 - RNA, 19 nt, Homo sapiens
  misc_RNA (1)...(19): siRNA sense strand
gaaucaugaucaccaauaa

SEQ ID NO: 1027255 - RNA, 19 nt, Homo sapiens
  misc_RNA (1)...(19): siRNA sense strand
gcacagauccugcgauuca

SEQ ID NO: 1027256 - RNA, 19 nt, Homo sapiens
  misc_RNA (1)...(19): siRNA sense strand
gaccaugguuguuaauuau

SEQ ID NO: 1027257 - RNA, 19 nt, Homo sapiens
  misc_RNA (1)...(19): siRNA sense strand
agaccaugguuguuaauua

SEQ ID NO: 1027258 - RNA, 19 nt, Homo sapiens
  misc_RNA (1)...(19): siRNA sense strand
gauagaguuuaacgucuuu

SEQ ID NO: 1027259 - RNA, 19 nt, Homo sapiens
  misc_RNA (1)...(19): siRNA sense strand
ggacacagacagccaagaa

SEQ ID NO: 1027260 - RNA, 19 nt, Homo sapiens
  misc_RNA (1)...(19): siRNA sense strand
ccagcaggaucaucauuaa

SEQ ID NO: 1027261 - RNA, 19 nt, Homo sapiens
  misc_RNA (1)...(19): siRNA sense strand
gaaguacaaugugaagaug

SEQ ID NO: 1027262 - RNA, 19 nt, Homo sapiens
  misc_RNA (1)...(19): siRNA sense strand
gccaagaacugcacagauc

SEQ ID NO: 1027263 - RNA, 19 nt, Homo sapiens
  misc_RNA (1)...(19): siRNA sense strand
gaagcaacguguuugacau

SEQ ID NO: 1027264 - RNA, 19 nt, Homo sapiens
  misc_RNA (1)...(19): siRNA sense strand
ccaauggugugagcaguaa

SEQ ID NO: 1027265 - RNA, 19 nt, Homo sapiens
  misc_RNA (1)...(19): siRNA sense strand
caacauccugugcauaauu

SEQ ID NO: 1027266 - RNA, 19 nt, Homo sapiens
  misc_RNA (1)...(19): siRNA sense strand
guaacccggucaacaguga

SEQ ID NO: 1027267 - RNA, 19 nt, Homo sapiens
  misc_RNA (1)...(19): siRNA sense strand
gaucuguucuccaauaagg

SEQ ID NO: 1027268 - RNA, 19 nt, Homo sapiens
  misc_RNA (1)...(19): siRNA sense strand
ugaaggagaagccacagua

SEQ ID NO: 1027269 - RNA, 19 nt, Homo sapiens
  misc_RNA (1)...(19): siRNA sense strand
cgaaucaugaucaccaaua

SEQ ID NO: 1027270 - RNA, 19 nt, Homo sapiens
  misc_RNA (1)...(19): siRNA sense strand
cagaucuguucuccaauaa

SEQ ID NO: 1027271 - RNA, 19 nt, Homo sapiens
  misc_RNA (1)...(19): siRNA sense strand
caugaucaccaauaaguuu

SEQ ID NO: 1027272 - RNA, 19 nt, Homo sapiens
  misc_RNA (1)...(19): siRNA sense strand
gcucaucguguucauauau

SEQ ID NO: 1027273 - RNA, 19 nt, Homo sapiens
  misc_RNA (1)...(19): siRNA sense strand
aauuauggaucaacaguga

SEQ ID NO: 1027274 - RNA, 19 nt, Homo sapiens
  misc_RNA (1)...(19): siRNA sense strand
gccagcaggaucaucauua

SEQ ID NO: 1027275 - RNA, 19 nt, Homo sapiens
  misc_RNA (1)...(19): siRNA sense strand
gaaggagaagccacaguau

SEQ ID NO: 1027276 - RNA, 19 nt, Homo sapiens
  misc_RNA (1)...(19): siRNA sense strand
gugcuucuccauaaugaua

SEQ ID NO: 1027277 - RNA, 19 nt, Homo sapiens
  misc_RNA (1)...(19): siRNA sense strand
ggaagcaacguguuugaca

SEQ ID NO: 1027278 - RNA, 19 nt, Homo sapiens
  misc_RNA (1)...(19): siRNA sense strand
cgaagacccucagcagaau

SEQ ID NO: 1027279 - RNA, 19 nt, Homo sapiens
  misc_RNA (1)...(19): siRNA sense strand
ggaucgcuguguucuccua

SEQ ID NO: 1027280 - RNA, 19 nt, Homo sapiens
  misc_RNA (1)...(19): siRNA sense strand
ugauagaguuuaacgucuu

SEQ ID NO: 1027281 - RNA, 19 nt, Homo sapiens
  misc_RNA (1)...(19): siRNA sense strand
gcauccaccuaaacaagug

SEQ ID NO: 1027282 - RNA, 19 nt, Homo sapiens
  misc_RNA (1)...(19): siRNA sense strand
ccgaagacccucagcagaa

SEQ ID NO: 1027283 - RNA, 19 nt, Homo sapiens
  misc_RNA (1)...(19): siRNA sense strand
cauaggaagcaacguguuu

SEQ ID NO: 1027284 - RNA, 19 nt, Homo sapiens
  misc_RNA (1)...(19): siRNA sense strand
gcuguguucuccuacauca

SEQ ID NO: 1027285 - RNA, 19 nt, Homo sapiens
  misc_RNA (1)...(19): siRNA sense strand
agugugcgaugacuucuuu

SEQ ID NO: 1027286 - RNA, 19 nt, Homo sapiens
  misc_RNA (1)...(19): siRNA sense strand
ggagaaauagaaaguugau

SEQ ID NO: 1027287 - RNA, 19 nt, Homo sapiens
  misc_RNA (1)...(19): siRNA sense strand
cugcacagauccugcgauu

SEQ ID NO: 1027288 - RNA, 19 nt, Homo sapiens
  misc_RNA (1)...(19): siRNA sense strand
gaucaugaaguacaaugug

SEQ ID NO: 1027289 - RNA, 19 nt, Homo sapiens
  misc_RNA (1)...(19): siRNA sense strand
caucaucuuguauguguuu

SEQ ID NO: 1027290 - RNA, 19 nt, Homo sapiens
  misc_RNA (1)...(19): siRNA sense strand
gaacauugagaacgggaau

SEQ ID NO: 1027291 - RNA, 19 nt, Homo sapiens
  misc_RNA (1)...(19): siRNA sense strand
ugugagagacuccaucuga

SEQ ID NO: 1027292 - RNA, 19 nt, Homo sapiens
  misc_RNA (1)...(19): siRNA sense strand
ggaggcacgagaacauuga

SEQ ID NO: 1027293 - RNA, 19 nt, Homo sapiens
  misc_RNA (1)...(19): siRNA sense strand
acacauggagaaauagaaa

SEQ ID NO: 1027294 - RNA, 19 nt, Homo sapiens
  misc_RNA (1)...(19): siRNA sense strand
gggaaggccuggugcucau

SEQ ID NO: 1027295 - RNA, 19 nt, Homo sapiens
  misc_RNA (1)...(19): siRNA sense strand
ggagugugcggacuguuug

SEQ ID NO: 1027296 - RNA, 19 nt, Homo sapiens
  misc_RNA (1)...(19): siRNA sense strand
cugcagaccaugguuguua

SEQ ID NO: 1027297 - RNA, 19 nt, Homo sapiens
  misc_RNA (1)...(19): siRNA sense strand
gagcuguuugcgucuguua

SEQ ID NO: 1027298 - RNA, 19 nt, Homo sapiens
  misc_RNA (1)...(19): siRNA sense strand
ggcagagacugaucaacuc

SEQ ID NO: 1027299 - RNA, 19 nt, Homo sapiens
  misc_RNA (1)...(19): siRNA sense strand
cauccuuggugcucuguau

SEQ ID NO: 1027300 - RNA, 19 nt, Homo sapiens
  misc_RNA (1)...(19): siRNA sense strand
ugaaguacaaugugaagau

SEQ ID NO: 1027301 - RNA, 19 nt, Homo sapiens
  misc_RNA (1)...(19): siRNA sense strand
ugcgaugacuucuuuguuc

SEQ ID NO: 1027302 - RNA, 19 nt, Homo sapiens
  misc_RNA (1)...(19): siRNA sense strand
cugcauggccagccuaauu

SEQ ID NO: 1027303 - RNA, 19 nt, Homo sapiens
  misc_RNA (1)...(19): siRNA sense strand
gcuguuugcgucuguuauu

SEQ ID NO: 1027304 - RNA, 19 nt, Homo sapiens
  misc_RNA (1)...(19): siRNA sense strand
gaucaacucggccaauggu

SEQ ID NO: 1027305 - RNA, 19 nt, Homo sapiens
  misc_RNA (1)...(19): siRNA sense strand
ggcagucuccaacaccaua

SEQ ID NO: 1027306 - RNA, 19 nt, Homo sapiens
  misc_RNA (1)...(19): siRNA sense strand
ugguguggcuggugacuau

SEQ ID NO: 1027307 - RNA, 19 nt, Homo sapiens
  misc_RNA (1)...(19): siRNA sense strand
cgugggcucugcuguguuc

SEQ ID NO: 1027308 - RNA, 19 nt, Homo sapiens
  misc_RNA (1)...(19): siRNA sense strand
gccaauggugugagcagua

SEQ ID NO: 1027309 - RNA, 19 nt, Homo sapiens
  misc_RNA (1)...(19): siRNA sense strand
gcuccagcccucccaaguu

SEQ ID NO: 1027310 - RNA, 19 nt, Homo sapiens
  misc_RNA (1)...(19): siRNA sense strand
gugcucaucguguucauau

SEQ ID NO: 1027311 - RNA, 19 nt, Homo sapiens
  misc_RNA (1)...(19): siRNA sense strand
aacauccugugcauaauug

SEQ ID NO: 1027312 - RNA, 19 nt, Homo sapiens
  misc_RNA (1)...(19): siRNA sense strand
cuagagaagaucugugaga

SEQ ID NO: 1027313 - RNA, 19 nt, Homo sapiens
  misc_RNA (1)...(19): siRNA sense strand
gguuguuaauuauggauca

SEQ ID NO: 1027314 - RNA, 19 nt, Homo sapiens
  misc_RNA (1)...(19): siRNA sense strand
ugcagaccaugguuguuaa

SEQ ID NO: 1027315 - RNA, 19 nt, Homo sapiens
  misc_RNA (1)...(19): siRNA sense strand
cucaucaucuuguaugugu

SEQ ID NO: 1027316 - RNA, 19 nt, Homo sapiens
  misc_RNA (1)...(19): siRNA sense strand
uucaacauccugugcauaa

SEQ ID NO: 1027317 - RNA, 19 nt, Homo sapiens
  misc_RNA (1)...(19): siRNA sense strand
caucaugggcauuacuuuc

SEQ ID NO: 1027318 - RNA, 19 nt, Homo sapiens
  misc_RNA (1)...(19): siRNA sense strand
gcaggcuuacgaaucauga

SEQ ID NO: 1027319 - RNA, 19 nt, Homo sapiens
  misc_RNA (1)...(19): siRNA sense strand
auggagaaauagaaaguug

SEQ ID NO: 1027320 - RNA, 19 nt, Homo sapiens
  misc_RNA (1)...(19): siRNA sense strand
gccgagacuccguguacua

SEQ ID NO: 1027321 - RNA, 19 nt, Homo sapiens
  misc_RNA (1)...(19): siRNA sense strand
ucucuacgccaucuucuug

SEQ ID NO: 1027322 - RNA, 19 nt, Homo sapiens
  misc_RNA (1)...(19): siRNA sense strand
ggugaugguggacgagauu

SEQ ID NO: 1027323 - RNA, 19 nt, Homo sapiens
  misc_RNA (1)...(19): siRNA sense strand
gaugguggacgagauuaug

SEQ ID NO: 1027324 - RNA, 19 nt, Homo sapiens
  misc_RNA (1)...(19): siRNA sense strand
uuggugcucuguauauguu

SEQ ID NO: 1027325 - RNA, 19 nt, Homo sapiens
  misc_RNA (1)...(19): siRNA sense strand
aaacagcuucugcuagcaa

SEQ ID NO: 1027326 - RNA, 19 nt, Homo sapiens
  misc_RNA (1)...(19): siRNA sense strand
gcagcagggacaaguguuc

SEQ ID NO: 1027327 - RNA, 19 nt, Homo sapiens
  misc_RNA (1)...(19): siRNA sense strand
gggaggcacgagaacauug

SEQ ID NO: 1027328 - RNA, 19 nt, Homo sapiens
  misc_RNA (1)...(19): siRNA sense strand
cauagugugcgaugacuuc

SEQ ID NO: 1027329 - RNA, 19 nt, Homo sapiens
  misc_RNA (1)...(19): siRNA sense strand
caacagugaagaucaacag

SEQ ID NO: 1027330 - RNA, 19 nt, Homo sapiens
  misc_RNA (1)...(19): siRNA sense strand
guguggcuggugacuauua

SEQ ID NO: 1027331 - RNA, 19 nt, Homo sapiens
  misc_RNA (1)...(19): siRNA sense strand
cuccagcccucccaaguuc

SEQ ID NO: 1027332 - RNA, 19 nt, Homo sapiens
  misc_RNA (1)...(19): siRNA sense strand
gaaggccuggugcucauca

SEQ ID NO: 1027333 - RNA, 19 nt, Homo sapiens
  misc_RNA (1)...(19): siRNA sense strand
gagcggcagagacugauca

SEQ ID NO: 1027334 - RNA, 19 nt, Homo sapiens
  misc_RNA (1)...(19): siRNA sense strand
ucuacgugcugguucucua

SEQ ID NO: 1027335 - RNA, 19 nt, Homo sapiens
  misc_RNA (1)...(19): siRNA sense strand
ucaacauccugugcauaau

SEQ ID NO: 1027336 - RNA, 19 nt, Homo sapiens
  misc_RNA (1)...(19): siRNA sense strand
gcacgagaacauugagaac

SEQ ID NO: 1027337 - RNA, 19 nt, Homo sapiens
  misc_RNA (1)...(19): siRNA sense strand
ggcacgagaacauugagaa

SEQ ID NO: 1027338 - RNA, 19 nt, Homo sapiens
  misc_RNA (1)...(19): siRNA sense strand
gagccguccugcugcacau

SEQ ID NO: 1027339 - RNA, 19 nt, Homo sapiens
  misc_RNA (1)...(19): siRNA sense strand
ucuauuccgugguccuguu

SEQ ID NO: 1027340 - RNA, 19 nt, Homo sapiens
  misc_RNA (1)...(19): siRNA sense strand
cggcagagacugaucaacu

SEQ ID NO: 1027341 - RNA, 19 nt, Homo sapiens
  misc_RNA (1)...(19): siRNA sense strand
gacacauggagaaauagaa

SEQ ID NO: 1027342 - RNA, 19 nt, Homo sapiens
  misc_RNA (1)...(19): siRNA sense strand
gcagaccaugguuguuaau

SEQ ID NO: 1027343 - RNA, 19 nt, Homo sapiens
  misc_RNA (1)...(19): siRNA sense strand
guucaacauccugugcaua

SEQ ID NO: 1027344 - RNA, 19 nt, Homo sapiens
  misc_RNA (1)...(19): siRNA sense strand
cuucuugugcuucuccaua

SEQ ID NO: 1027345 - RNA, 19 nt, Homo sapiens
  misc_RNA (1)...(19): siRNA sense strand
ccugguaggacuuggugua

SEQ ID NO: 1027346 - RNA, 19 nt, Homo sapiens
  misc_RNA (1)...(19): siRNA sense strand
uuaaugagcggcagagacu

SEQ ID NO: 1027347 - RNA, 19 nt, Homo sapiens
  misc_RNA (1)...(19): siRNA sense strand
gccuggugcucaucaucuu

SEQ ID NO: 1027348 - RNA, 19 nt, Homo sapiens
  misc_RNA (1)...(19): siRNA sense strand
ucaucgugcucaucguguu

SEQ ID NO: 1027349 - RNA, 19 nt, Homo sapiens
  misc_RNA (1)...(19): siRNA sense strand
uggagugugcggacuguuu

SEQ ID NO: 1027350 - RNA, 19 nt, Homo sapiens
  misc_RNA (1)...(19): siRNA sense strand
gugcgaugacuucuuuguu

SEQ ID NO: 1027351 - RNA, 19 nt, Homo sapiens
  misc_RNA (1)...(19): siRNA sense strand
uaggaagcaacguguuuga

SEQ ID NO: 1027352 - RNA, 19 nt, Homo sapiens
  misc_RNA (1)...(19): siRNA sense strand
gcuucuccauaaugauaga

SEQ ID NO: 1027353 - RNA, 19 nt, Homo sapiens
  misc_RNA (1)...(19): siRNA sense strand
gaaucaugaucaccaauaa

SEQ ID NO: 1027354 - RNA, 19 nt, Homo sapiens
  misc_RNA (1)...(19): siRNA sense strand
gcacagauccugcgauuca

SEQ ID NO: 1027355 - RNA, 19 nt, Homo sapiens
  misc_RNA (1)...(19): siRNA sense strand
gaccaugguuguuaauuau

SEQ ID NO: 1027356 - RNA, 19 nt, Homo sapiens
  misc_RNA (1)...(19): siRNA sense strand
agaccaugguuguuaauua

SEQ ID NO: 1027357 - RNA, 19 nt, Homo sapiens
  misc_RNA (1)...(19): siRNA sense strand
gauagaguuuaacgucuuu

SEQ ID NO: 1027358 - RNA, 19 nt, Homo sapiens
  misc_RNA (1)...(19): siRNA sense strand
gaaguacaaugugaagaug

SEQ ID NO: 1027359 - RNA, 19 nt, Homo sapiens
  misc_RNA (1)...(19): siRNA sense strand
ggacacagacagccaagaa

SEQ ID NO: 1027360 - RNA, 19 nt, Homo sapiens
  misc_RNA (1)...(19): siRNA sense strand
ccagcaggaucaucauuaa

SEQ ID NO: 1027361 - RNA, 19 nt, Homo sapiens
  misc_RNA (1)...(19): siRNA sense strand
gccaagaacugcacagauc

SEQ ID NO: 1027362 - RNA, 19 nt, Homo sapiens
  misc_RNA (1)...(19): siRNA sense strand
gaagcaacguguuugacau

SEQ ID NO: 1027363 - RNA, 19 nt, Homo sapiens
  misc_RNA (1)...(19): siRNA sense strand
ccaauggugugagcaguaa

SEQ ID NO: 1027364 - RNA, 19 nt, Homo sapiens
  misc_RNA (1)...(19): siRNA sense strand
caacauccugugcauaauu

SEQ ID NO: 1027365 - RNA, 19 nt, Homo sapiens
  misc_RNA (1)...(19): siRNA sense strand
guaacccggucaacaguga

SEQ ID NO: 1027366 - RNA, 19 nt, Homo sapiens
  misc_RNA (1)...(19): siRNA sense strand
gaucuguucuccaauaagg

SEQ ID NO: 1027367 - RNA, 19 nt, Homo sapiens
  misc_RNA (1)...(19): siRNA sense strand
ugaaggagaagccacagua

SEQ ID NO: 1027368 - RNA, 19 nt, Homo sapiens
  misc_RNA (1)...(19): siRNA sense strand
cgaaucaugaucaccaaua

SEQ ID NO: 1027369 - RNA, 19 nt, Homo sapiens
  misc_RNA (1)...(19): siRNA sense strand
cagaucuguucuccaauaa

SEQ ID NO: 1027370 - RNA, 19 nt, Homo sapiens
  misc_RNA (1)...(19): siRNA sense strand
caugaucaccaauaaguuu

SEQ ID NO: 1027371 - RNA, 19 nt, Homo sapiens
  misc_RNA (1)...(19): siRNA sense strand
gcucaucguguucauauau

SEQ ID NO: 1027372 - RNA, 19 nt, Homo sapiens
  misc_RNA (1)...(19): siRNA sense strand
aauuauggaucaacaguga

SEQ ID NO: 1027373 - RNA, 19 nt, Homo sapiens
  misc_RNA (1)...(19): siRNA sense strand
gccagcaggaucaucauua

SEQ ID NO: 1027374 - RNA, 19 nt, Homo sapiens
  misc_RNA (1)...(19): siRNA sense strand
gaaggagaagccacaguau

SEQ ID NO: 1027375 - RNA, 19 nt, Homo sapiens
  misc_RNA (1)...(19): siRNA sense strand
gugcuucuccauaaugaua

SEQ ID NO: 1027376 - RNA, 19 nt, Homo sapiens
  misc_RNA (1)...(19): siRNA sense strand
ggaagcaacguguuugaca

SEQ ID NO: 1027377 - RNA, 19 nt, Homo sapiens
  misc_RNA (1)...(19): siRNA sense strand
cgaagacccucagcagaau

SEQ ID NO: 1027378 - RNA, 19 nt, Homo sapiens
  misc_RNA (1)...(19): siRNA sense strand
ggaucgcuguguucuccua

SEQ ID NO: 1027379 - RNA, 19 nt, Homo sapiens
  misc_RNA (1)...(19): siRNA sense strand
ugauagaguuuaacgucuu

SEQ ID NO: 1027380 - RNA, 19 nt, Homo sapiens
  misc_RNA (1)...(19): siRNA sense strand
gcauccaccuaaacaagug

SEQ ID NO: 1027381 - RNA, 19 nt, Homo sapiens
  misc_RNA (1)...(19): siRNA sense strand
ccgaagacccucagcagaa

SEQ ID NO: 1027382 - RNA, 19 nt, Homo sapiens
  misc_RNA (1)...(19): siRNA sense strand
cauaggaagcaacguguuu

SEQ ID NO: 1027383 - RNA, 19 nt, Homo sapiens
  misc_RNA (1)...(19): siRNA sense strand
gcuguguucuccuacauca

SEQ ID NO: 1027384 - RNA, 19 nt, Homo sapiens
  misc_RNA (1)...(19): siRNA sense strand
agugugcgaugacuucuuu

SEQ ID NO: 1027385 - RNA, 19 nt, Homo sapiens
  misc_RNA (1)...(19): siRNA sense strand
gaucaugaaguacaaugug

SEQ ID NO: 1027386 - RNA, 19 nt, Homo sapiens
  misc_RNA (1)...(19): siRNA sense strand
cugcacagauccugcgauu

SEQ ID NO: 1027387 - RNA, 19 nt, Homo sapiens
  misc_RNA (1)...(19): siRNA sense strand
caucaucuuguauguguuu

SEQ ID NO: 1027388 - RNA, 19 nt, Homo sapiens
  misc_RNA (1)...(19): siRNA sense strand
gaacauugagaacgggaau

SEQ ID NO: 1027389 - RNA, 19 nt, Homo sapiens
  misc_RNA (1)...(19): siRNA sense strand
ugugagagacuccaucuga

SEQ ID NO: 1027390 - RNA, 19 nt, Homo sapiens
  misc_RNA (1)...(19): siRNA sense strand
ggaggcacgagaacauuga

SEQ ID NO: 1027391 - RNA, 19 nt, Homo sapiens
  misc_RNA (1)...(19): siRNA sense strand
gggaaggccuggugcucau

SEQ ID NO: 1027392 - RNA, 19 nt, Homo sapiens
  misc_RNA (1)...(19): siRNA sense strand
ggagugugcggacuguuug

SEQ ID NO: 1027393 - RNA, 19 nt, Homo sapiens
  misc_RNA (1)...(19): siRNA sense strand
cugcagaccaugguuguua

SEQ ID NO: 1027394 - RNA, 19 nt, Homo sapiens
  misc_RNA (1)...(19): siRNA sense strand
gagcuguuugcgucuguua

SEQ ID NO: 1027395 - RNA, 19 nt, Homo sapiens
  misc_RNA (1)...(19): siRNA sense strand
ggcagagacugaucaacuc

SEQ ID NO: 1027396 - RNA, 19 nt, Homo sapiens
  misc_RNA (1)...(19): siRNA sense strand
cauccuuggugcucuguau

SEQ ID NO: 1027397 - RNA, 19 nt, Homo sapiens
  misc_RNA (1)...(19): siRNA sense strand
ugaaguacaaugugaagau

SEQ ID NO: 1027398 - RNA, 19 nt, Homo sapiens
  misc_RNA (1)...(19): siRNA sense strand
ugcgaugacuucuuuguuc

SEQ ID NO: 1027399 - RNA, 19 nt, Homo sapiens
  misc_RNA (1)...(19): siRNA sense strand
cugcauggccagccuaauu

SEQ ID NO: 1027400 - RNA, 19 nt, Homo sapiens
  misc_RNA (1)...(19): siRNA sense strand
gcuguuugcgucuguuauu

SEQ ID NO: 1027401 - RNA, 19 nt, Homo sapiens
  misc_RNA (1)...(19): siRNA sense strand
gaucaacucggccaauggu

SEQ ID NO: 1027402 - RNA, 19 nt, Homo sapiens
  misc_RNA (1)...(19): siRNA sense strand
ggcagucuccaacaccaua

SEQ ID NO: 1027403 - RNA, 19 nt, Homo sapiens
  misc_RNA (1)...(19): siRNA sense strand
ugguguggcuggugacuau

SEQ ID NO: 1027404 - RNA, 19 nt, Homo sapiens
  misc_RNA (1)...(19): siRNA sense strand
cgugggcucugcuguguuc

SEQ ID NO: 1027405 - RNA, 19 nt, Homo sapiens
  misc_RNA (1)...(19): siRNA sense strand
gccaauggugugagcagua

SEQ ID NO: 1027406 - RNA, 19 nt, Homo sapiens
  misc_RNA (1)...(19): siRNA sense strand
gcuccagcccucccaaguu

SEQ ID NO: 1027407 - RNA, 19 nt, Homo sapiens
  misc_RNA (1)...(19): siRNA sense strand
gugcucaucguguucauau

SEQ ID NO: 1027408 - RNA, 19 nt, Homo sapiens
  misc_RNA (1)...(19): siRNA sense strand
aacauccugugcauaauug

SEQ ID NO: 1027409 - RNA, 19 nt, Homo sapiens
  misc_RNA (1)...(19): siRNA sense strand
cuagagaagaucugugaga

SEQ ID NO: 1027410 - RNA, 19 nt, Homo sapiens
  misc_RNA (1)...(19): siRNA sense strand
gguuguuaauuauggauca

SEQ ID NO: 1027411 - RNA, 19 nt, Homo sapiens
  misc_RNA (1)...(19): siRNA sense strand
ugcagaccaugguuguuaa

SEQ ID NO: 1027412 - RNA, 19 nt, Homo sapiens
  misc_RNA (1)...(19): siRNA sense strand
cucaucaucuuguaugugu

SEQ ID NO: 1027413 - RNA, 19 nt, Homo sapiens
  misc_RNA (1)...(19): siRNA sense strand
uucaacauccugugcauaa

SEQ ID NO: 1027414 - RNA, 19 nt, Homo sapiens
  misc_RNA (1)...(19): siRNA sense strand
caucaugggcauuacuuuc

SEQ ID NO: 1027415 - RNA, 19 nt, Homo sapiens
  misc_RNA (1)...(19): siRNA sense strand
gcaggcuuacgaaucauga

SEQ ID NO: 1027416 - RNA, 19 nt, Homo sapiens
  misc_RNA (1)...(19): siRNA sense strand
gccgagacuccguguacua

SEQ ID NO: 1027417 - RNA, 19 nt, Homo sapiens
  misc_RNA (1)...(19): siRNA sense strand
ucucuacgccaucuucuug

SEQ ID NO: 1027418 - RNA, 19 nt, Homo sapiens
  misc_RNA (1)...(19): siRNA sense strand
ggugaugguggacgagauu

SEQ ID NO: 1027419 - RNA, 19 nt, Homo sapiens
  misc_RNA (1)...(19): siRNA sense strand
uuggugcucuguauauguu

SEQ ID NO: 1027420 - RNA, 19 nt, Homo sapiens
  misc_RNA (1)...(19): siRNA sense strand
gcagcagggacaaguguuc

SEQ ID NO: 1027421 - RNA, 19 nt, Homo sapiens
  misc_RNA (1)...(19): siRNA sense strand
gggaggcacgagaacauug

SEQ ID NO: 1027422 - RNA, 19 nt, Homo sapiens
  misc_RNA (1)...(19): siRNA sense strand
gaugguggacgagauuaug

SEQ ID NO: 1027423 - RNA, 19 nt, Homo sapiens
  misc_RNA (1)...(19): siRNA sense strand
gaaggccuggugcucauca

SEQ ID NO: 1027424 - RNA, 19 nt, Homo sapiens
  misc_RNA (1)...(19): siRNA sense strand
caacagugaagaucaacag

SEQ ID NO: 1027425 - RNA, 19 nt, Homo sapiens
  misc_RNA (1)...(19): siRNA sense strand
guguggcuggugacuauua

SEQ ID NO: 1027426 - RNA, 19 nt, Homo sapiens
  misc_RNA (1)...(19): siRNA sense strand
cauagugugcgaugacuuc

SEQ ID NO: 1027427 - RNA, 19 nt, Homo sapiens
  misc_RNA (1)...(19): siRNA sense strand
cuccagcccucccaaguuc

SEQ ID NO: 1027428 - RNA, 19 nt, Homo sapiens
  misc_RNA (1)...(19): siRNA sense strand
gagcggcagagacugauca

SEQ ID NO: 1027429 - RNA, 19 nt, Homo sapiens
  misc_RNA (1)...(19): siRNA sense strand
ucuacgugcugguucucua

SEQ ID NO: 1027430 - RNA, 19 nt, Homo sapiens
  misc_RNA (1)...(19): siRNA sense strand
ucaacauccugugcauaau

SEQ ID NO: 1027431 - RNA, 19 nt, Homo sapiens
  misc_RNA (1)...(19): siRNA sense strand
gcacgagaacauugagaac

SEQ ID NO: 1027432 - RNA, 19 nt, Homo sapiens
  misc_RNA (1)...(19): siRNA sense strand
ggcacgagaacauugagaa

SEQ ID NO: 1027433 - RNA, 19 nt, Homo sapiens
  misc_RNA (1)...(19): siRNA sense strand
cggcagagacugaucaacu

SEQ ID NO: 1027434 - RNA, 19 nt, Homo sapiens
  misc_RNA (1)...(19): siRNA sense strand
gagccguccugcugcacau

SEQ ID NO: 1027435 - RNA, 19 nt, Homo sapiens
  misc_RNA (1)...(19): siRNA sense strand
ucuauuccgugguccuguu

SEQ ID NO: 1027436 - RNA, 19 nt, Homo sapiens
  misc_RNA (1)...(19): siRNA sense strand
gcagaccaugguuguuaau

SEQ ID NO: 1027437 - RNA, 19 nt, Homo sapiens
  misc_RNA (1)...(19): siRNA sense strand
gugcgaugacuucuuuguu

SEQ ID NO: 1027438 - RNA, 19 nt, Homo sapiens
  misc_RNA (1)...(19): siRNA sense strand
cuucuugugcuucuccaua

SEQ ID NO: 1027439 - RNA, 19 nt, Homo sapiens
  misc_RNA (1)...(19): siRNA sense strand
ccugguaggacuuggugua

SEQ ID NO: 1027440 - RNA, 19 nt, Homo sapiens
  misc_RNA (1)...(19): siRNA sense strand
uuaaugagcggcagagacu

SEQ ID NO: 1027441 - RNA, 19 nt, Homo sapiens
  misc_RNA (1)...(19): siRNA sense strand
gccuggugcucaucaucuu

SEQ ID NO: 1027442 - RNA, 19 nt, Homo sapiens
  misc_RNA (1)...(19): siRNA sense strand
ucaucgugcucaucguguu

SEQ ID NO: 1027443 - RNA, 19 nt, Homo sapiens
  misc_RNA (1)...(19): siRNA sense strand
uggagugugcggacuguuu

SEQ ID NO: 1027444 - RNA, 19 nt, Homo sapiens
  misc_RNA (1)...(19): siRNA sense strand
guucaacauccugugcaua

SEQ ID NO: 1027445 - RNA, 19 nt, Homo sapiens
  misc_RNA (1)...(19): siRNA sense strand
gugcucaucaucuuguaug

SEQ ID NO: 1027446 - RNA, 19 nt, Homo sapiens
  misc_RNA (1)...(19): siRNA sense strand
gcuucuccauaaugauaga

SEQ ID NO: 1027447 - RNA, 19 nt, Homo sapiens
  misc_RNA (1)...(19): siRNA sense strand
uaggaagcaacguguuuga

SEQ ID NO: 1027448 - RNA, 19 nt, Homo sapiens
  misc_RNA (1)...(19): siRNA sense strand
gaagacccucagcagaauc

SEQ ID NO: 1027449 - RNA, 19 nt, Homo sapiens
  misc_RNA (1)...(19): siRNA sense strand
cugaucaacucggccaaug

SEQ ID NO: 1027450 - RNA, 19 nt, Homo sapiens
  misc_RNA (1)...(19): siRNA sense strand
aucaugaaguacaauguga

SEQ ID NO: 1027451 - RNA, 19 nt, Homo sapiens
  misc_RNA (1)...(19): siRNA sense strand
agcaggaucaucauuaaug

SEQ ID NO: 1027452 - RNA, 19 nt, Homo sapiens
  misc_RNA (1)...(19): siRNA sense strand
uucuugugcuucuccauaa

SEQ ID NO: 1027453 - RNA, 19 nt, Homo sapiens
  misc_RNA (1)...(19): siRNA sense strand
ccagacacauggagaaaua

SEQ ID NO: 1027454 - RNA, 19 nt, Homo sapiens
  misc_RNA (1)...(19): siRNA sense strand
gaaucaugaucaccaauaa

SEQ ID NO: 1027455 - RNA, 19 nt, Homo sapiens
  misc_RNA (1)...(19): siRNA sense strand
gcacagauccugcgauuca

SEQ ID NO: 1027456 - RNA, 19 nt, Homo sapiens
  misc_RNA (1)...(19): siRNA sense strand
gaccaugguuguuaauuau

SEQ ID NO: 1027457 - RNA, 19 nt, Homo sapiens
  misc_RNA (1)...(19): siRNA sense strand
agaccaugguuguuaauua

SEQ ID NO: 1027458 - RNA, 19 nt, Homo sapiens
  misc_RNA (1)...(19): siRNA sense strand
gauagaguuuaacgucuuu

SEQ ID NO: 1027459 - RNA, 19 nt, Homo sapiens
  misc_RNA (1)...(19): siRNA sense strand
ggacacagacagccaagaa

SEQ ID NO: 1027460 - RNA, 19 nt, Homo sapiens
  misc_RNA (1)...(19): siRNA sense strand
ccagcaggaucaucauuaa

SEQ ID NO: 1027461 - RNA, 19 nt, Homo sapiens
  misc_RNA (1)...(19): siRNA sense strand
gaaguacaaugugaagaug

SEQ ID NO: 1027462 - RNA, 19 nt, Homo sapiens
  misc_RNA (1)...(19): siRNA sense strand
gccaagaacugcacagauc

SEQ ID NO: 1027463 - RNA, 19 nt, Homo sapiens
  misc_RNA (1)...(19): siRNA sense strand
gaagcaacguguuugacau

SEQ ID NO: 1027464 - RNA, 19 nt, Homo sapiens
  misc_RNA (1)...(19): siRNA sense strand
ccaauggugugagcaguaa

SEQ ID NO: 1027465 - RNA, 19 nt, Homo sapiens
  misc_RNA (1)...(19): siRNA sense strand
caacauccugugcauaauu

SEQ ID NO: 1027466 - RNA, 19 nt, Homo sapiens
  misc_RNA (1)...(19): siRNA sense strand
guaacccggucaacaguga

SEQ ID NO: 1027467 - RNA, 19 nt, Homo sapiens
  misc_RNA (1)...(19): siRNA sense strand
gaucuguucuccaauaagg

SEQ ID NO: 1027468 - RNA, 19 nt, Homo sapiens
  misc_RNA (1)...(19): siRNA sense strand
ugaaggagaagccacagua

SEQ ID NO: 1027469 - RNA, 19 nt, Homo sapiens
  misc_RNA (1)...(19): siRNA sense strand
cgaaucaugaucaccaaua

SEQ ID NO: 1027470 - RNA, 19 nt, Homo sapiens
  misc_RNA (1)...(19): siRNA sense strand
cagaucuguucuccaauaa

SEQ ID NO: 1027471 - RNA, 19 nt, Homo sapiens
  misc_RNA (1)...(19): siRNA sense strand
caugaucaccaauaaguuu

SEQ ID NO: 1027472 - RNA, 19 nt, Homo sapiens
  misc_RNA (1)...(19): siRNA sense strand
gcucaucguguucauauau

SEQ ID NO: 1027473 - RNA, 19 nt, Homo sapiens
  misc_RNA (1)...(19): siRNA sense strand
aauuauggaucaacaguga

SEQ ID NO: 1027474 - RNA, 19 nt, Homo sapiens
  misc_RNA (1)...(19): siRNA sense strand
gccagcaggaucaucauua

SEQ ID NO: 1027475 - RNA, 19 nt, Homo sapiens
  misc_RNA (1)...(19): siRNA sense strand
gaaggagaagccacaguau

SEQ ID NO: 1027476 - RNA, 19 nt, Homo sapiens
  misc_RNA (1)...(19): siRNA sense strand
gugcuucuccauaaugaua

SEQ ID NO: 1027477 - RNA, 19 nt, Homo sapiens
  misc_RNA (1)...(19): siRNA sense strand
ggaagcaacguguuugaca

SEQ ID NO: 1027478 - RNA, 19 nt, Homo sapiens
  misc_RNA (1)...(19): siRNA sense strand
cgaagacccucagcagaau

SEQ ID NO: 1027479 - RNA, 19 nt, Homo sapiens
  misc_RNA (1)...(19): siRNA sense strand
ggaucgcuguguucuccua

SEQ ID NO: 1027480 - RNA, 19 nt, Homo sapiens
  misc_RNA (1)...(19): siRNA sense strand
ugauagaguuuaacgucuu

SEQ ID NO: 1027481 - RNA, 19 nt, Homo sapiens
  misc_RNA (1)...(19): siRNA sense strand
gcauccaccuaaacaagug

SEQ ID NO: 1027482 - RNA, 19 nt, Homo sapiens
  misc_RNA (1)...(19): siRNA sense strand
ccgaagacccucagcagaa

SEQ ID NO: 1027483 - RNA, 19 nt, Homo sapiens
  misc_RNA (1)...(19): siRNA sense strand
cauaggaagcaacguguuu

SEQ ID NO: 1027484 - RNA, 19 nt, Homo sapiens
  misc_RNA (1)...(19): siRNA sense strand
gcuguguucuccuacauca

SEQ ID NO: 1027485 - RNA, 19 nt, Homo sapiens
  misc_RNA (1)...(19): siRNA sense strand
agugugcgaugacuucuuu

SEQ ID NO: 1027486 - RNA, 19 nt, Homo sapiens
  misc_RNA (1)...(19): siRNA sense strand
ggagaaauagaaaguugau

SEQ ID NO: 1027487 - RNA, 19 nt, Homo sapiens
  misc_RNA (1)...(19): siRNA sense strand
cugcacagauccugcgauu

SEQ ID NO: 1027488 - RNA, 19 nt, Homo sapiens
  misc_RNA (1)...(19): siRNA sense strand
gaucaugaaguacaaugug

SEQ ID NO: 1027489 - RNA, 19 nt, Homo sapiens
  misc_RNA (1)...(19): siRNA sense strand
caucaucuuguauguguuu

SEQ ID NO: 1027490 - RNA, 19 nt, Homo sapiens
  misc_RNA (1)...(19): siRNA sense strand
gaacauugagaacgggaau

SEQ ID NO: 1027491 - RNA, 19 nt, Homo sapiens
  misc_RNA (1)...(19): siRNA sense strand
ugugagagacuccaucuga

SEQ ID NO: 1027492 - RNA, 19 nt, Homo sapiens
  misc_RNA (1)...(19): siRNA sense strand
ggaggcacgagaacauuga

SEQ ID NO: 1027493 - RNA, 19 nt, Homo sapiens
  misc_RNA (1)...(19): siRNA sense strand
acacauggagaaauagaaa

SEQ ID NO: 1027494 - RNA, 19 nt, Homo sapiens
  misc_RNA (1)...(19): siRNA sense strand
gggaaggccuggugcucau

SEQ ID NO: 1027495 - RNA, 19 nt, Homo sapiens
  misc_RNA (1)...(19): siRNA sense strand
ggagugugcggacuguuug

SEQ ID NO: 1027496 - RNA, 19 nt, Homo sapiens
  misc_RNA (1)...(19): siRNA sense strand
cugcagaccaugguuguua

SEQ ID NO: 1027497 - RNA, 19 nt, Homo sapiens
  misc_RNA (1)...(19): siRNA sense strand
gagcuguuugcgucuguua

SEQ ID NO: 1027498 - RNA, 19 nt, Homo sapiens
  misc_RNA (1)...(19): siRNA sense strand
ggcagagacugaucaacuc

SEQ ID NO: 1027499 - RNA, 19 nt, Homo sapiens
  misc_RNA (1)...(19): siRNA sense strand
cauccuuggugcucuguau

SEQ ID NO: 1027500 - RNA, 19 nt, Homo sapiens
  misc_RNA (1)...(19): siRNA sense strand
ugaaguacaaugugaagau

SEQ ID NO: 1027501 - RNA, 19 nt, Homo sapiens
  misc_RNA (1)...(19): siRNA sense strand
ugcgaugacuucuuuguuc

SEQ ID NO: 1027502 - RNA, 19 nt, Homo sapiens
  misc_RNA (1)...(19): siRNA sense strand
cugcauggccagccuaauu

SEQ ID NO: 1027503 - RNA, 19 nt, Homo sapiens
  misc_RNA (1)...(19): siRNA sense strand
gcuguuugcgucuguuauu

SEQ ID NO: 1027504 - RNA, 19 nt, Homo sapiens
  misc_RNA (1)...(19): siRNA sense strand
gaucaacucggccaauggu

SEQ ID NO: 1027505 - RNA, 19 nt, Homo sapiens
  misc_RNA (1)...(19): siRNA sense strand
ggcagucuccaacaccaua

SEQ ID NO: 1027506 - RNA, 19 nt, Homo sapiens
  misc_RNA (1)...(19): siRNA sense strand
ugguguggcuggugacuau

SEQ ID NO: 1027507 - RNA, 19 nt, Homo sapiens
  misc_RNA (1)...(19): siRNA sense strand
cgugggcucugcuguguuc

SEQ ID NO: 1027508 - RNA, 19 nt, Homo sapiens
  misc_RNA (1)...(19): siRNA sense strand
gccaauggugugagcagua

SEQ ID NO: 1027509 - RNA, 19 nt, Homo sapiens
  misc_RNA (1)...(19): siRNA sense strand
gcuccagcccucccaaguu

SEQ ID NO: 1027510 - RNA, 19 nt, Homo sapiens
  misc_RNA (1)...(19): siRNA sense strand
gugcucaucguguucauau

SEQ ID NO: 1027511 - RNA, 19 nt, Homo sapiens
  misc_RNA (1)...(19): siRNA sense strand
aacauccugugcauaauug

SEQ ID NO: 1027512 - RNA, 19 nt, Homo sapiens
  misc_RNA (1)...(19): siRNA sense strand
cuagagaagaucugugaga

SEQ ID NO: 1027513 - RNA, 19 nt, Homo sapiens
  misc_RNA (1)...(19): siRNA sense strand
gguuguuaauuauggauca

SEQ ID NO: 1027514 - RNA, 19 nt, Homo sapiens
  misc_RNA (1)...(19): siRNA sense strand
ugcagaccaugguuguuaa

SEQ ID NO: 1027515 - RNA, 19 nt, Homo sapiens
  misc_RNA (1)...(19): siRNA sense strand
cucaucaucuuguaugugu

SEQ ID NO: 1027516 - RNA, 19 nt, Homo sapiens
  misc_RNA (1)...(19): siRNA sense strand
uucaacauccugugcauaa

SEQ ID NO: 1027517 - RNA, 19 nt, Homo sapiens
  misc_RNA (1)...(19): siRNA sense strand
caucaugggcauuacuuuc

SEQ ID NO: 1027518 - RNA, 19 nt, Homo sapiens
  misc_RNA (1)...(19): siRNA sense strand
gcaggcuuacgaaucauga

SEQ ID NO: 1027519 - RNA, 19 nt, Homo sapiens
  misc_RNA (1)...(19): siRNA sense strand
auggagaaauagaaaguug

SEQ ID NO: 1027520 - RNA, 19 nt, Homo sapiens
  misc_RNA (1)...(19): siRNA sense strand
gccgagacuccguguacua

SEQ ID NO: 1027521 - RNA, 19 nt, Homo sapiens
  misc_RNA (1)...(19): siRNA sense strand
ucucuacgccaucuucuug

SEQ ID NO: 1027522 - RNA, 19 nt, Homo sapiens
  misc_RNA (1)...(19): siRNA sense strand
ggugaugguggacgagauu

SEQ ID NO: 1027523 - RNA, 19 nt, Homo sapiens
  misc_RNA (1)...(19): siRNA sense strand
gaugguggacgagauuaug

SEQ ID NO: 1027524 - RNA, 19 nt, Homo sapiens
  misc_RNA (1)...(19): siRNA sense strand
uuggugcucuguauauguu

SEQ ID NO: 1027525 - RNA, 19 nt, Homo sapiens
  misc_RNA (1)...(19): siRNA sense strand
aaacagcuucugcuagcaa

SEQ ID NO: 1027526 - RNA, 19 nt, Homo sapiens
  misc_RNA (1)...(19): siRNA sense strand
gcagcagggacaaguguuc

SEQ ID NO: 1027527 - RNA, 19 nt, Homo sapiens
  misc_RNA (1)...(19): siRNA sense strand
gggaggcacgagaacauug

SEQ ID NO: 1027528 - RNA, 19 nt, Homo sapiens
  misc_RNA (1)...(19): siRNA sense strand
cauagugugcgaugacuuc

SEQ ID NO: 1027529 - RNA, 19 nt, Homo sapiens
  misc_RNA (1)...(19): siRNA sense strand
caacagugaagaucaacag

SEQ ID NO: 1027530 - RNA, 19 nt, Homo sapiens
  misc_RNA (1)...(19): siRNA sense strand
guguggcuggugacuauua

SEQ ID NO: 1027531 - RNA, 19 nt, Homo sapiens
  misc_RNA (1)...(19): siRNA sense strand
cuccagcccucccaaguuc

SEQ ID NO: 1027532 - RNA, 19 nt, Homo sapiens
  misc_RNA (1)...(19): siRNA sense strand
gaaggccuggugcucauca

SEQ ID NO: 1027533 - RNA, 19 nt, Homo sapiens
  misc_RNA (1)...(19): siRNA sense strand
gagcggcagagacugauca

SEQ ID NO: 1027534 - RNA, 19 nt, Homo sapiens
  misc_RNA (1)...(19): siRNA sense strand
ucuacgugcugguucucua

SEQ ID NO: 1027535 - RNA, 19 nt, Homo sapiens
  misc_RNA (1)...(19): siRNA sense strand
ucaacauccugugcauaau

SEQ ID NO: 1027536 - RNA, 19 nt, Homo sapiens
  misc_RNA (1)...(19): siRNA sense strand
gcacgagaacauugagaac

SEQ ID NO: 1027537 - RNA, 19 nt, Homo sapiens
  misc_RNA (1)...(19): siRNA sense strand
ggcacgagaacauugagaa

SEQ ID NO: 1027538 - RNA, 19 nt, Homo sapiens
  misc_RNA (1)...(19): siRNA sense strand
gagccguccugcugcacau

SEQ ID NO: 1027539 - RNA, 19 nt, Homo sapiens
  misc_RNA (1)...(19): siRNA sense strand
ucuauuccgugguccuguu

SEQ ID NO: 1027540 - RNA, 19 nt, Homo sapiens
  misc_RNA (1)...(19): siRNA sense strand
cggcagagacugaucaacu

SEQ ID NO: 1027541 - RNA, 19 nt, Homo sapiens
  misc_RNA (1)...(19): siRNA sense strand
gacacauggagaaauagaa

SEQ ID NO: 1027542 - RNA, 19 nt, Homo sapiens
  misc_RNA (1)...(19): siRNA sense strand
gcagaccaugguuguuaau

SEQ ID NO: 1027543 - RNA, 19 nt, Homo sapiens
  misc_RNA (1)...(19): siRNA sense strand
guucaacauccugugcaua

SEQ ID NO: 1027544 - RNA, 19 nt, Homo sapiens
  misc_RNA (1)...(19): siRNA sense strand
cuucuugugcuucuccaua

SEQ ID NO: 1027545 - RNA, 19 nt, Homo sapiens
  misc_RNA (1)...(19): siRNA sense strand
ccugguaggacuuggugua

SEQ ID NO: 1027546 - RNA, 19 nt, Homo sapiens
  misc_RNA (1)...(19): siRNA sense strand
uuaaugagcggcagagacu

SEQ ID NO: 1027547 - RNA, 19 nt, Homo sapiens
  misc_RNA (1)...(19): siRNA sense strand
gccuggugcucaucaucuu

SEQ ID NO: 1027548 - RNA, 19 nt, Homo sapiens
  misc_RNA (1)...(19): siRNA sense strand
ucaucgugcucaucguguu

SEQ ID NO: 1027549 - RNA, 19 nt, Homo sapiens
  misc_RNA (1)...(19): siRNA sense strand
uggagugugcggacuguuu

SEQ ID NO: 1027550 - RNA, 19 nt, Homo sapiens
  misc_RNA (1)...(19): siRNA sense strand
gugcgaugacuucuuuguu

SEQ ID NO: 1027551 - RNA, 19 nt, Homo sapiens
  misc_RNA (1)...(19): siRNA sense strand
uaggaagcaacguguuuga

SEQ ID NO: 1027552 - RNA, 19 nt, Homo sapiens
  misc_RNA (1)...(19): siRNA sense strand
gcuucuccauaaugauaga

SEQ ID NO: 1027553 - RNA, 19 nt, Homo sapiens
  misc_RNA (1)...(19): siRNA sense strand
ccagacacauggagaaaua

SEQ ID NO: 1027554 - RNA, 19 nt, Homo sapiens
  misc_RNA (1)...(19): siRNA sense strand
gaaucaugaucaccaauaa

SEQ ID NO: 1027555 - RNA, 19 nt, Homo sapiens
  misc_RNA (1)...(19): siRNA sense strand
gcacagauccugcgauuca

SEQ ID NO: 1027556 - RNA, 19 nt, Homo sapiens
  misc_RNA (1)...(19): siRNA sense strand
gaccaugguuguuaauuau

SEQ ID NO: 1027557 - RNA, 19 nt, Homo sapiens
  misc_RNA (1)...(19): siRNA sense strand
agaccaugguuguuaauua

SEQ ID NO: 1027558 - RNA, 19 nt, Homo sapiens
  misc_RNA (1)...(19): siRNA sense strand
gauagaguuuaacgucuuu

SEQ ID NO: 1027559 - RNA, 19 nt, Homo sapiens
  misc_RNA (1)...(19): siRNA sense strand
ggacacagacagccaagaa

SEQ ID NO: 1027560 - RNA, 19 nt, Homo sapiens
  misc_RNA (1)...(19): siRNA sense strand
ccagcaggaucaucauuaa

SEQ ID NO: 1027561 - RNA, 19 nt, Homo sapiens
  misc_RNA (1)...(19): siRNA sense strand
gaaguacaaugugaagaug

SEQ ID NO: 1027562 - RNA, 19 nt, Homo sapiens
  misc_RNA (1)...(19): siRNA sense strand
gccaagaacugcacagauc

SEQ ID NO: 1027563 - RNA, 19 nt, Homo sapiens
  misc_RNA (1)...(19): siRNA sense strand
gaagcaacguguuugacau

SEQ ID NO: 1027564 - RNA, 19 nt, Homo sapiens
  misc_RNA (1)...(19): siRNA sense strand
ccaauggugugagcaguaa

SEQ ID NO: 1027565 - RNA, 19 nt, Homo sapiens
  misc_RNA (1)...(19): siRNA sense strand
caacauccugugcauaauu

SEQ ID NO: 1027566 - RNA, 19 nt, Homo sapiens
  misc_RNA (1)...(19): siRNA sense strand
guaacccggucaacaguga

SEQ ID NO: 1027567 - RNA, 19 nt, Homo sapiens
  misc_RNA (1)...(19): siRNA sense strand
gaucuguucuccaauaagg

SEQ ID NO: 1027568 - RNA, 19 nt, Homo sapiens
  misc_RNA (1)...(19): siRNA sense strand
ugaaggagaagccacagua

SEQ ID NO: 1027569 - RNA, 19 nt, Homo sapiens
  misc_RNA (1)...(19): siRNA sense strand
cgaaucaugaucaccaaua

SEQ ID NO: 1027570 - RNA, 19 nt, Homo sapiens
  misc_RNA (1)...(19): siRNA sense strand
cagaucuguucuccaauaa

SEQ ID NO: 1027571 - RNA, 19 nt, Homo sapiens
  misc_RNA (1)...(19): siRNA sense strand
caugaucaccaauaaguuu

SEQ ID NO: 1027572 - RNA, 19 nt, Homo sapiens
  misc_RNA (1)...(19): siRNA sense strand
gcucaucguguucauauau

SEQ ID NO: 1027573 - RNA, 19 nt, Homo sapiens
  misc_RNA (1)...(19): siRNA sense strand
aauuauggaucaacaguga

SEQ ID NO: 1027574 - RNA, 19 nt, Homo sapiens
  misc_RNA (1)...(19): siRNA sense strand
gccagcaggaucaucauua

SEQ ID NO: 1027575 - RNA, 19 nt, Homo sapiens
  misc_RNA (1)...(19): siRNA sense strand
gaaggagaagccacaguau

SEQ ID NO: 1027576 - RNA, 19 nt, Homo sapiens
  misc_RNA (1)...(19): siRNA sense strand
gugcuucuccauaaugaua

SEQ ID NO: 1027577 - RNA, 19 nt, Homo sapiens
  misc_RNA (1)...(19): siRNA sense strand
ggaagcaacguguuugaca

SEQ ID NO: 1027578 - RNA, 19 nt, Homo sapiens
  misc_RNA (1)...(19): siRNA sense strand
cgaagacccucagcagaau

SEQ ID NO: 1027579 - RNA, 19 nt, Homo sapiens
  misc_RNA (1)...(19): siRNA sense strand
ggaucgcuguguucuccua

SEQ ID NO: 1027580 - RNA, 19 nt, Homo sapiens
  misc_RNA (1)...(19): siRNA sense strand
ugauagaguuuaacgucuu

SEQ ID NO: 1027581 - RNA, 19 nt, Homo sapiens
  misc_RNA (1)...(19): siRNA sense strand
gcauccaccuaaacaagug

SEQ ID NO: 1027582 - RNA, 19 nt, Homo sapiens
  misc_RNA (1)...(19): siRNA sense strand
ccgaagacccucagcagaa

SEQ ID NO: 1027583 - RNA, 19 nt, Homo sapiens
  misc_RNA (1)...(19): siRNA sense strand
cauaggaagcaacguguuu

SEQ ID NO: 1027584 - RNA, 19 nt, Homo sapiens
  misc_RNA (1)...(19): siRNA sense strand
gcuguguucuccuacauca

SEQ ID NO: 1027585 - RNA, 19 nt, Homo sapiens
  misc_RNA (1)...(19): siRNA sense strand
agugugcgaugacuucuuu

SEQ ID NO: 1027586 - RNA, 19 nt, Homo sapiens
  misc_RNA (1)...(19): siRNA sense strand
ggagaaauagaaaguugau

SEQ ID NO: 1027587 - RNA, 19 nt, Homo sapiens
  misc_RNA (1)...(19): siRNA sense strand
cugcacagauccugcgauu

SEQ ID NO: 1027588 - RNA, 19 nt, Homo sapiens
  misc_RNA (1)...(19): siRNA sense strand
gaucaugaaguacaaugug

SEQ ID NO: 1027589 - RNA, 19 nt, Homo sapiens
  misc_RNA (1)...(19): siRNA sense strand
caucaucuuguauguguuu

SEQ ID NO: 1027590 - RNA, 19 nt, Homo sapiens
  misc_RNA (1)...(19): siRNA sense strand
gaacauugagaacgggaau

SEQ ID NO: 1027591 - RNA, 19 nt, Homo sapiens
  misc_RNA (1)...(19): siRNA sense strand
ugugagagacuccaucuga

SEQ ID NO: 1027592 - RNA, 19 nt, Homo sapiens
  misc_RNA (1)...(19): siRNA sense strand
ggaggcacgagaacauuga

SEQ ID NO: 1027593 - RNA, 19 nt, Homo sapiens
  misc_RNA (1)...(19): siRNA sense strand
acacauggagaaauagaaa

SEQ ID NO: 1027594 - RNA, 19 nt, Homo sapiens
  misc_RNA (1)...(19): siRNA sense strand
gggaaggccuggugcucau

SEQ ID NO: 1027595 - RNA, 19 nt, Homo sapiens
  misc_RNA (1)...(19): siRNA sense strand
ggagugugcggacuguuug

SEQ ID NO: 1027596 - RNA, 19 nt, Homo sapiens
  misc_RNA (1)...(19): siRNA sense strand
cugcagaccaugguuguua

SEQ ID NO: 1027597 - RNA, 19 nt, Homo sapiens
  misc_RNA (1)...(19): siRNA sense strand
gagcuguuugcgucuguua

SEQ ID NO: 1027598 - RNA, 19 nt, Homo sapiens
  misc_RNA (1)...(19): siRNA sense strand
ggcagagacugaucaacuc

SEQ ID NO: 1027599 - RNA, 19 nt, Homo sapiens
  misc_RNA (1)...(19): siRNA sense strand
cauccuuggugcucuguau

SEQ ID NO: 1027600 - RNA, 19 nt, Homo sapiens
  misc_RNA (1)...(19): siRNA sense strand
ugaaguacaaugugaagau

SEQ ID NO: 1027601 - RNA, 19 nt, Homo sapiens
  misc_RNA (1)...(19): siRNA sense strand
ugcgaugacuucuuuguuc

SEQ ID NO: 1027602 - RNA, 19 nt, Homo sapiens
  misc_RNA (1)...(19): siRNA sense strand
cugcauggccagccuaauu

SEQ ID NO: 1027603 - RNA, 19 nt, Homo sapiens
  misc_RNA (1)...(19): siRNA sense strand
gcuguuugcgucuguuauu

SEQ ID NO: 1027604 - RNA, 19 nt, Homo sapiens
  misc_RNA (1)...(19): siRNA sense strand
gaucaacucggccaauggu

SEQ ID NO: 1027605 - RNA, 19 nt, Homo sapiens
  misc_RNA (1)...(19): siRNA sense strand
ggcagucuccaacaccaua

SEQ ID NO: 1027606 - RNA, 19 nt, Homo sapiens
  misc_RNA (1)...(19): siRNA sense strand
ugguguggcuggugacuau

SEQ ID NO: 1027607 - RNA, 19 nt, Homo sapiens
  misc_RNA (1)...(19): siRNA sense strand
cgugggcucugcuguguuc

SEQ ID NO: 1027608 - RNA, 19 nt, Homo sapiens
  misc_RNA (1)...(19): siRNA sense strand
gccaauggugugagcagua

SEQ ID NO: 1027609 - RNA, 19 nt, Homo sapiens
  misc_RNA (1)...(19): siRNA sense strand
gcuccagcccucccaaguu

SEQ ID NO: 1027610 - RNA, 19 nt, Homo sapiens
  misc_RNA (1)...(19): siRNA sense strand
gugcucaucguguucauau

SEQ ID NO: 1027611 - RNA, 19 nt, Homo sapiens
  misc_RNA (1)...(19): siRNA sense strand
aacauccugugcauaauug

SEQ ID NO: 1027612 - RNA, 19 nt, Homo sapiens
  misc_RNA (1)...(19): siRNA sense strand
cuagagaagaucugugaga

SEQ ID NO: 1027613 - RNA, 19 nt, Homo sapiens
  misc_RNA (1)...(19): siRNA sense strand
gguuguuaauuauggauca

SEQ ID NO: 1027614 - RNA, 19 nt, Homo sapiens
  misc_RNA (1)...(19): siRNA sense strand
ugcagaccaugguuguuaa

SEQ ID NO: 1027615 - RNA, 19 nt, Homo sapiens
  misc_RNA (1)...(19): siRNA sense strand
cucaucaucuuguaugugu

SEQ ID NO: 1027616 - RNA, 19 nt, Homo sapiens
  misc_RNA (1)...(19): siRNA sense strand
uucaacauccugugcauaa

SEQ ID NO: 1027617 - RNA, 19 nt, Homo sapiens
  misc_RNA (1)...(19): siRNA sense strand
caucaugggcauuacuuuc

SEQ ID NO: 1027618 - RNA, 19 nt, Homo sapiens
  misc_RNA (1)...(19): siRNA sense strand
gcaggcuuacgaaucauga

SEQ ID NO: 1027619 - RNA, 19 nt, Homo sapiens
  misc_RNA (1)...(19): siRNA sense strand
auggagaaauagaaaguug

SEQ ID NO: 1027620 - RNA, 19 nt, Homo sapiens
  misc_RNA (1)...(19): siRNA sense strand
gccgagacuccguguacua

SEQ ID NO: 1027621 - RNA, 19 nt, Homo sapiens
  misc_RNA (1)...(19): siRNA sense strand
ucucuacgccaucuucuug

SEQ ID NO: 1027622 - RNA, 19 nt, Homo sapiens
  misc_RNA (1)...(19): siRNA sense strand
ggugaugguggacgagauu

SEQ ID NO: 1027623 - RNA, 19 nt, Homo sapiens
  misc_RNA (1)...(19): siRNA sense strand
gaugguggacgagauuaug

SEQ ID NO: 1027624 - RNA, 19 nt, Homo sapiens
  misc_RNA (1)...(19): siRNA sense strand
uuggugcucuguauauguu

SEQ ID NO: 1027625 - RNA, 19 nt, Homo sapiens
  misc_RNA (1)...(19): siRNA sense strand
aaacagcuucugcuagcaa

SEQ ID NO: 1027626 - RNA, 19 nt, Homo sapiens
  misc_RNA (1)...(19): siRNA sense strand
gcagcagggacaaguguuc

SEQ ID NO: 1027627 - RNA, 19 nt, Homo sapiens
  misc_RNA (1)...(19): siRNA sense strand
gggaggcacgagaacauug

SEQ ID NO: 1027628 - RNA, 19 nt, Homo sapiens
  misc_RNA (1)...(19): siRNA sense strand
cauagugugcgaugacuuc

SEQ ID NO: 1027629 - RNA, 19 nt, Homo sapiens
  misc_RNA (1)...(19): siRNA sense strand
caacagugaagaucaacag

SEQ ID NO: 1027630 - RNA, 19 nt, Homo sapiens
  misc_RNA (1)...(19): siRNA sense strand
guguggcuggugacuauua

SEQ ID NO: 1027631 - RNA, 19 nt, Homo sapiens
  misc_RNA (1)...(19): siRNA sense strand
cuccagcccucccaaguuc

SEQ ID NO: 1027632 - RNA, 19 nt, Homo sapiens
  misc_RNA (1)...(19): siRNA sense strand
gaaggccuggugcucauca

SEQ ID NO: 1027633 - RNA, 19 nt, Homo sapiens
  misc_RNA (1)...(19): siRNA sense strand
gagcggcagagacugauca

SEQ ID NO: 1027634 - RNA, 19 nt, Homo sapiens
  misc_RNA (1)...(19): siRNA sense strand
ucuacgugcugguucucua

SEQ ID NO: 1027635 - RNA, 19 nt, Homo sapiens
  misc_RNA (1)...(19): siRNA sense strand
ucaacauccugugcauaau

SEQ ID NO: 1027636 - RNA, 19 nt, Homo sapiens
  misc_RNA (1)...(19): siRNA sense strand
gcacgagaacauugagaac

SEQ ID NO: 1027637 - RNA, 19 nt, Homo sapiens
  misc_RNA (1)...(19): siRNA sense strand
ggcacgagaacauugagaa

SEQ ID NO: 1027638 - RNA, 19 nt, Homo sapiens
  misc_RNA (1)...(19): siRNA sense strand
gagccguccugcugcacau

SEQ ID NO: 1027639 - RNA, 19 nt, Homo sapiens
  misc_RNA (1)...(19): siRNA sense strand
ucuauuccgugguccuguu

SEQ ID NO: 1027640 - RNA, 19 nt, Homo sapiens
  misc_RNA (1)...(19): siRNA sense strand
cggcagagacugaucaacu

SEQ ID NO: 1027641 - RNA, 19 nt, Homo sapiens
  misc_RNA (1)...(19): siRNA sense strand
gacacauggagaaauagaa

SEQ ID NO: 1027642 - RNA, 19 nt, Homo sapiens
  misc_RNA (1)...(19): siRNA sense strand
gcagaccaugguuguuaau

SEQ ID NO: 1027643 - RNA, 19 nt, Homo sapiens
  misc_RNA (1)...(19): siRNA sense strand
guucaacauccugugcaua

SEQ ID NO: 1027644 - RNA, 19 nt, Homo sapiens
  misc_RNA (1)...(19): siRNA sense strand
cuucuugugcuucuccaua

SEQ ID NO: 1027645 - RNA, 19 nt, Homo sapiens
  misc_RNA (1)...(19): siRNA sense strand
ccugguaggacuuggugua

SEQ ID NO: 1027646 - RNA, 19 nt, Homo sapiens
  misc_RNA (1)...(19): siRNA sense strand
uuaaugagcggcagagacu

SEQ ID NO: 1027647 - RNA, 19 nt, Homo sapiens
  misc_RNA (1)...(19): siRNA sense strand
gccuggugcucaucaucuu

SEQ ID NO: 1027648 - RNA, 19 nt, Homo sapiens
  misc_RNA (1)...(19): siRNA sense strand
ucaucgugcucaucguguu

SEQ ID NO: 1027649 - RNA, 19 nt, Homo sapiens
  misc_RNA (1)...(19): siRNA sense strand
uggagugugcggacuguuu

SEQ ID NO: 1027650 - RNA, 19 nt, Homo sapiens
  misc_RNA (1)...(19): siRNA sense strand
gugcgaugacuucuuuguu

SEQ ID NO: 1027651 - RNA, 19 nt, Homo sapiens
  misc_RNA (1)...(19): siRNA sense strand
uaggaagcaacguguuuga

SEQ ID NO: 1027652 - RNA, 19 nt, Homo sapiens
  misc_RNA (1)...(19): siRNA sense strand
gcuucuccauaaugauaga

SEQ ID NO: 1027653 - RNA, 19 nt, Homo sapiens
  misc_RNA (1)...(19): siRNA sense strand
gaaucaugaucaccaauaa

SEQ ID NO: 1027654 - RNA, 19 nt, Homo sapiens
  misc_RNA (1)...(19): siRNA sense strand
gcacagauccugcgauuca

SEQ ID NO: 1027655 - RNA, 19 nt, Homo sapiens
  misc_RNA (1)...(19): siRNA sense strand
gaccaugguuguuaauuau

SEQ ID NO: 1027656 - RNA, 19 nt, Homo sapiens
  misc_RNA (1)...(19): siRNA sense strand
agaccaugguuguuaauua

SEQ ID NO: 1027657 - RNA, 19 nt, Homo sapiens
  misc_RNA (1)...(19): siRNA sense strand
gauagaguuuaacgucuuu

SEQ ID NO: 1027658 - RNA, 19 nt, Homo sapiens
  misc_RNA (1)...(19): siRNA sense strand
gaaguacaaugugaagaug

SEQ ID NO: 1027659 - RNA, 19 nt, Homo sapiens
  misc_RNA (1)...(19): siRNA sense strand
ggacacagacagccaagaa

SEQ ID NO: 1027660 - RNA, 19 nt, Homo sapiens
  misc_RNA (1)...(19): siRNA sense strand
ccagcaggaucaucauuaa

SEQ ID NO: 1027661 - RNA, 19 nt, Homo sapiens
  misc_RNA (1)...(19): siRNA sense strand
gccaagaacugcacagauc

SEQ ID NO: 1027662 - RNA, 19 nt, Homo sapiens
  misc_RNA (1)...(19): siRNA sense strand
gaagcaacguguuugacau

SEQ ID NO: 1027663 - RNA, 19 nt, Homo sapiens
  misc_RNA (1)...(19): siRNA sense strand
ccaauggugugagcaguaa

SEQ ID NO: 1027664 - RNA, 19 nt, Homo sapiens
  misc_RNA (1)...(19): siRNA sense strand
caacauccugugcauaauu

SEQ ID NO: 1027665 - RNA, 19 nt, Homo sapiens
  misc_RNA (1)...(19): siRNA sense strand
guaacccggucaacaguga

SEQ ID NO: 1027666 - RNA, 19 nt, Homo sapiens
  misc_RNA (1)...(19): siRNA sense strand
gaucuguucuccaauaagg

SEQ ID NO: 1027667 - RNA, 19 nt, Homo sapiens
  misc_RNA (1)...(19): siRNA sense strand
ugaaggagaagccacagua

SEQ ID NO: 1027668 - RNA, 19 nt, Homo sapiens
  misc_RNA (1)...(19): siRNA sense strand
cgaaucaugaucaccaaua

SEQ ID NO: 1027669 - RNA, 19 nt, Homo sapiens
  misc_RNA (1)...(19): siRNA sense strand
cagaucuguucuccaauaa

SEQ ID NO: 1027670 - RNA, 19 nt, Homo sapiens
  misc_RNA (1)...(19): siRNA sense strand
caugaucaccaauaaguuu

SEQ ID NO: 1027671 - RNA, 19 nt, Homo sapiens
  misc_RNA (1)...(19): siRNA sense strand
gcucaucguguucauauau

SEQ ID NO: 1027672 - RNA, 19 nt, Homo sapiens
  misc_RNA (1)...(19): siRNA sense strand
aauuauggaucaacaguga

SEQ ID NO: 1027673 - RNA, 19 nt, Homo sapiens
  misc_RNA (1)...(19): siRNA sense strand
gccagcaggaucaucauua

SEQ ID NO: 1027674 - RNA, 19 nt, Homo sapiens
  misc_RNA (1)...(19): siRNA sense strand
gaaggagaagccacaguau

SEQ ID NO: 1027675 - RNA, 19 nt, Homo sapiens
  misc_RNA (1)...(19): siRNA sense strand
gugcuucuccauaaugaua

SEQ ID NO: 1027676 - RNA, 19 nt, Homo sapiens
  misc_RNA (1)...(19): siRNA sense strand
ggaagcaacguguuugaca

SEQ ID NO: 1027677 - RNA, 19 nt, Homo sapiens
  misc_RNA (1)...(19): siRNA sense strand
cgaagacccucagcagaau

SEQ ID NO: 1027678 - RNA, 19 nt, Homo sapiens
  misc_RNA (1)...(19): siRNA sense strand
ggaucgcuguguucuccua

SEQ ID NO: 1027679 - RNA, 19 nt, Homo sapiens
  misc_RNA (1)...(19): siRNA sense strand
ugauagaguuuaacgucuu

SEQ ID NO: 1027680 - RNA, 19 nt, Homo sapiens
  misc_RNA (1)...(19): siRNA sense strand
gcauccaccuaaacaagug

SEQ ID NO: 1027681 - RNA, 19 nt, Homo sapiens
  misc_RNA (1)...(19): siRNA sense strand
ccgaagacccucagcagaa

SEQ ID NO: 1027682 - RNA, 19 nt, Homo sapiens
  misc_RNA (1)...(19): siRNA sense strand
cauaggaagcaacguguuu

SEQ ID NO: 1027683 - RNA, 19 nt, Homo sapiens
  misc_RNA (1)...(19): siRNA sense strand
gcuguguucuccuacauca

SEQ ID NO: 1027684 - RNA, 19 nt, Homo sapiens
  misc_RNA (1)...(19): siRNA sense strand
agugugcgaugacuucuuu

SEQ ID NO: 1027685 - RNA, 19 nt, Homo sapiens
  misc_RNA (1)...(19): siRNA sense strand
gaucaugaaguacaaugug

SEQ ID NO: 1027686 - RNA, 19 nt, Homo sapiens
  misc_RNA (1)...(19): siRNA sense strand
cugcacagauccugcgauu

SEQ ID NO: 1027687 - RNA, 19 nt, Homo sapiens
  misc_RNA (1)...(19): siRNA sense strand
caucaucuuguauguguuu

SEQ ID NO: 1027688 - RNA, 19 nt, Homo sapiens
  misc_RNA (1)...(19): siRNA sense strand
gaacauugagaacgggaau

SEQ ID NO: 1027689 - RNA, 19 nt, Homo sapiens
  misc_RNA (1)...(19): siRNA sense strand
ugugagagacuccaucuga

SEQ ID NO: 1027690 - RNA, 19 nt, Homo sapiens
  misc_RNA (1)...(19): siRNA sense strand
ggaggcacgagaacauuga

SEQ ID NO: 1027691 - RNA, 19 nt, Homo sapiens
  misc_RNA (1)...(19): siRNA sense strand
gggaaggccuggugcucau

SEQ ID NO: 1027692 - RNA, 19 nt, Homo sapiens
  misc_RNA (1)...(19): siRNA sense strand
ggagugugcggacuguuug

SEQ ID NO: 1027693 - RNA, 19 nt, Homo sapiens
  misc_RNA (1)...(19): siRNA sense strand
cugcagaccaugguuguua

SEQ ID NO: 1027694 - RNA, 19 nt, Homo sapiens
  misc_RNA (1)...(19): siRNA sense strand
gagcuguuugcgucuguua

SEQ ID NO: 1027695 - RNA, 19 nt, Homo sapiens
  misc_RNA (1)...(19): siRNA sense strand
ggcagagacugaucaacuc

SEQ ID NO: 1027696 - RNA, 19 nt, Homo sapiens
  misc_RNA (1)...(19): siRNA sense strand
cauccuuggugcucuguau

SEQ ID NO: 1027697 - RNA, 19 nt, Homo sapiens
  misc_RNA (1)...(19): siRNA sense strand
ugaaguacaaugugaagau

SEQ ID NO: 1027698 - RNA, 19 nt, Homo sapiens
  misc_RNA (1)...(19): siRNA sense strand
ugcgaugacuucuuuguuc

SEQ ID NO: 1027699 - RNA, 19 nt, Homo sapiens
  misc_RNA (1)...(19): siRNA sense strand
cugcauggccagccuaauu

SEQ ID NO: 1027700 - RNA, 19 nt, Homo sapiens
  misc_RNA (1)...(19): siRNA sense strand
gcuguuugcgucuguuauu

SEQ ID NO: 1027701 - RNA, 19 nt, Homo sapiens
  misc_RNA (1)...(19): siRNA sense strand
gaucaacucggccaauggu

SEQ ID NO: 1027702 - RNA, 19 nt, Homo sapiens
  misc_RNA (1)...(19): siRNA sense strand
ggcagucuccaacaccaua

SEQ ID NO: 1027703 - RNA, 19 nt, Homo sapiens
  misc_RNA (1)...(19): siRNA sense strand
ugguguggcuggugacuau

SEQ ID NO: 1027704 - RNA, 19 nt, Homo sapiens
  misc_RNA (1)...(19): siRNA sense strand
cgugggcucugcuguguuc

SEQ ID NO: 1027705 - RNA, 19 nt, Homo sapiens
  misc_RNA (1)...(19): siRNA sense strand
gccaauggugugagcagua

SEQ ID NO: 1027706 - RNA, 19 nt, Homo sapiens
  misc_RNA (1)...(19): siRNA sense strand
gcuccagcccucccaaguu

SEQ ID NO: 1027707 - RNA, 19 nt, Homo sapiens
  misc_RNA (1)...(19): siRNA sense strand
gugcucaucguguucauau

SEQ ID NO: 1027708 - RNA, 19 nt, Homo sapiens
  misc_RNA (1)...(19): siRNA sense strand
aacauccugugcauaauug

SEQ ID NO: 1027709 - RNA, 19 nt, Homo sapiens
  misc_RNA (1)...(19): siRNA sense strand
cuagagaagaucugugaga

SEQ ID NO: 1027710 - RNA, 19 nt, Homo sapiens
  misc_RNA (1)...(19): siRNA sense strand
gguuguuaauuauggauca

SEQ ID NO: 1027711 - RNA, 19 nt, Homo sapiens
  misc_RNA (1)...(19): siRNA sense strand
ugcagaccaugguuguuaa

SEQ ID NO: 1027712 - RNA, 19 nt, Homo sapiens
  misc_RNA (1)...(19): siRNA sense strand
cucaucaucuuguaugugu

SEQ ID NO: 1027713 - RNA, 19 nt, Homo sapiens
  misc_RNA (1)...(19): siRNA sense strand
uucaacauccugugcauaa

SEQ ID NO: 1027714 - RNA, 19 nt, Homo sapiens
  misc_RNA (1)...(19): siRNA sense strand
caucaugggcauuacuuuc

SEQ ID NO: 1027715 - RNA, 19 nt, Homo sapiens
  misc_RNA (1)...(19): siRNA sense strand
gcaggcuuacgaaucauga

SEQ ID NO: 1027716 - RNA, 19 nt, Homo sapiens
  misc_RNA (1)...(19): siRNA sense strand
gccgagacuccguguacua

SEQ ID NO: 1027717 - RNA, 19 nt, Homo sapiens
  misc_RNA (1)...(19): siRNA sense strand
ucucuacgccaucuucuug

SEQ ID NO: 1027718 - RNA, 19 nt, Homo sapiens
  misc_RNA (1)...(19): siRNA sense strand
ggugaugguggacgagauu

SEQ ID NO: 1027719 - RNA, 19 nt, Homo sapiens
  misc_RNA (1)...(19): siRNA sense strand
uuggugcucuguauauguu

SEQ ID NO: 1027720 - RNA, 19 nt, Homo sapiens
  misc_RNA (1)...(19): siRNA sense strand
gcagcagggacaaguguuc

SEQ ID NO: 1027721 - RNA, 19 nt, Homo sapiens
  misc_RNA (1)...(19): siRNA sense strand
gggaggcacgagaacauug

SEQ ID NO: 1027722 - RNA, 19 nt, Homo sapiens
  misc_RNA (1)...(19): siRNA sense strand
gaugguggacgagauuaug

SEQ ID NO: 1027723 - RNA, 19 nt, Homo sapiens
  misc_RNA (1)...(19): siRNA sense strand
gaaggccuggugcucauca

SEQ ID NO: 1027724 - RNA, 19 nt, Homo sapiens
  misc_RNA (1)...(19): siRNA sense strand
caacagugaagaucaacag

SEQ ID NO: 1027725 - RNA, 19 nt, Homo sapiens
  misc_RNA (1)...(19): siRNA sense strand
guguggcuggugacuauua

SEQ ID NO: 1027726 - RNA, 19 nt, Homo sapiens
  misc_RNA (1)...(19): siRNA sense strand
cauagugugcgaugacuuc

SEQ ID NO: 1027727 - RNA, 19 nt, Homo sapiens
  misc_RNA (1)...(19): siRNA sense strand
cuccagcccucccaaguuc

SEQ ID NO: 1027728 - RNA, 19 nt, Homo sapiens
  misc_RNA (1)...(19): siRNA sense strand
gagcggcagagacugauca

SEQ ID NO: 1027729 - RNA, 19 nt, Homo sapiens
  misc_RNA (1)...(19): siRNA sense strand
ucuacgugcugguucucua

SEQ ID NO: 1027730 - RNA, 19 nt, Homo sapiens
  misc_RNA (1)...(19): siRNA sense strand
ucaacauccugugcauaau

SEQ ID NO: 1027731 - RNA, 19 nt, Homo sapiens
  misc_RNA (1)...(19): siRNA sense strand
gcacgagaacauugagaac

SEQ ID NO: 1027732 - RNA, 19 nt, Homo sapiens
  misc_RNA (1)...(19): siRNA sense strand
ggcacgagaacauugagaa

SEQ ID NO: 1027733 - RNA, 19 nt, Homo sapiens
  misc_RNA (1)...(19): siRNA sense strand
cggcagagacugaucaacu

SEQ ID NO: 1027734 - RNA, 19 nt, Homo sapiens
  misc_RNA (1)...(19): siRNA sense strand
gagccguccugcugcacau

SEQ ID NO: 1027735 - RNA, 19 nt, Homo sapiens
  misc_RNA (1)...(19): siRNA sense strand
ucuauuccgugguccuguu

SEQ ID NO: 1027736 - RNA, 19 nt, Homo sapiens
  misc_RNA (1)...(19): siRNA sense strand
gcagaccaugguuguuaau

SEQ ID NO: 1027737 - RNA, 19 nt, Homo sapiens
  misc_RNA (1)...(19): siRNA sense strand
gugcgaugacuucuuuguu

SEQ ID NO: 1027738 - RNA, 19 nt, Homo sapiens
  misc_RNA (1)...(19): siRNA sense strand
cuucuugugcuucuccaua

SEQ ID NO: 1027739 - RNA, 19 nt, Homo sapiens
  misc_RNA (1)...(19): siRNA sense strand
ccugguaggacuuggugua

SEQ ID NO: 1027740 - RNA, 19 nt, Homo sapiens
  misc_RNA (1)...(19): siRNA sense strand
uuaaugagcggcagagacu

SEQ ID NO: 1027741 - RNA, 19 nt, Homo sapiens
  misc_RNA (1)...(19): siRNA sense strand
gccuggugcucaucaucuu

SEQ ID NO: 1027742 - RNA, 19 nt, Homo sapiens
  misc_RNA (1)...(19): siRNA sense strand
ucaucgugcucaucguguu

SEQ ID NO: 1027743 - RNA, 19 nt, Homo sapiens
  misc_RNA (1)...(19): siRNA sense strand
uggagugugcggacuguuu

SEQ ID NO: 1027744 - RNA, 19 nt, Homo sapiens
  misc_RNA (1)...(19): siRNA sense strand
guucaacauccugugcaua

SEQ ID NO: 1027745 - RNA, 19 nt, Homo sapiens
  misc_RNA (1)...(19): siRNA sense strand
gugcucaucaucuuguaug

SEQ ID NO: 1027746 - RNA, 19 nt, Homo sapiens
  misc_RNA (1)...(19): siRNA sense strand
gcuucuccauaaugauaga

SEQ ID NO: 1027747 - RNA, 19 nt, Homo sapiens
  misc_RNA (1)...(19): siRNA sense strand
uaggaagcaacguguuuga

SEQ ID NO: 1027748 - RNA, 19 nt, Homo sapiens
  misc_RNA (1)...(19): siRNA sense strand
gaagacccucagcagaauc

SEQ ID NO: 1027749 - RNA, 19 nt, Homo sapiens
  misc_RNA (1)...(19): siRNA sense strand
cugaucaacucggccaaug

SEQ ID NO: 1027750 - RNA, 19 nt, Homo sapiens
  misc_RNA (1)...(19): siRNA sense strand
aucaugaaguacaauguga

SEQ ID NO: 1027751 - RNA, 19 nt, Homo sapiens
  misc_RNA (1)...(19): siRNA sense strand
agcaggaucaucauuaaug

SEQ ID NO: 1027752 - RNA, 19 nt, Homo sapiens
  misc_RNA (1)...(19): siRNA sense strand
uucuugugcuucuccauaa

SEQ ID NO: 1027753 - RNA, 19 nt, Homo sapiens
  misc_RNA (1)...(19): siRNA sense strand
ccagacacauggagaaaua

SEQ ID NO: 1027754 - RNA, 19 nt, Homo sapiens
  misc_RNA (1)...(19): siRNA sense strand
gaaucaugaucaccaauaa

SEQ ID NO: 1027755 - RNA, 19 nt, Homo sapiens
  misc_RNA (1)...(19): siRNA sense strand
gcacagauccugcgauuca

SEQ ID NO: 1027756 - RNA, 19 nt, Homo sapiens
  misc_RNA (1)...(19): siRNA sense strand
gaccaugguuguuaauuau

SEQ ID NO: 1027757 - RNA, 19 nt, Homo sapiens
  misc_RNA (1)...(19): siRNA sense strand
agaccaugguuguuaauua

SEQ ID NO: 1027758 - RNA, 19 nt, Homo sapiens
  misc_RNA (1)...(19): siRNA sense strand
gauagaguuuaacgucuuu

SEQ ID NO: 1027759 - RNA, 19 nt, Homo sapiens
  misc_RNA (1)...(19): siRNA sense strand
ggacacagacagccaagaa

SEQ ID NO: 1027760 - RNA, 19 nt, Homo sapiens
  misc_RNA (1)...(19): siRNA sense strand
ccagcaggaucaucauuaa

SEQ ID NO: 1027761 - RNA, 19 nt, Homo sapiens
  misc_RNA (1)...(19): siRNA sense strand
gaaguacaaugugaagaug

SEQ ID NO: 1027762 - RNA, 19 nt, Homo sapiens
  misc_RNA (1)...(19): siRNA sense strand
gccaagaacugcacagauc

SEQ ID NO: 1027763 - RNA, 19 nt, Homo sapiens
  misc_RNA (1)...(19): siRNA sense strand
gaagcaacguguuugacau

SEQ ID NO: 1027764 - RNA, 19 nt, Homo sapiens
  misc_RNA (1)...(19): siRNA sense strand
ccaauggugugagcaguaa

SEQ ID NO: 1027765 - RNA, 19 nt, Homo sapiens
  misc_RNA (1)...(19): siRNA sense strand
caacauccugugcauaauu

SEQ ID NO: 1027766 - RNA, 19 nt, Homo sapiens
  misc_RNA (1)...(19): siRNA sense strand
guaacccggucaacaguga

SEQ ID NO: 1027767 - RNA, 19 nt, Homo sapiens
  misc_RNA (1)...(19): siRNA sense strand
gaucuguucuccaauaagg

SEQ ID NO: 1027768 - RNA, 19 nt, Homo sapiens
  misc_RNA (1)...(19): siRNA sense strand
ugaaggagaagccacagua

SEQ ID NO: 1027769 - RNA, 19 nt, Homo sapiens
  misc_RNA (1)...(19): siRNA sense strand
cgaaucaugaucaccaaua

SEQ ID NO: 1027770 - RNA, 19 nt, Homo sapiens
  misc_RNA (1)...(19): siRNA sense strand
cagaucuguucuccaauaa

SEQ ID NO: 1027771 - RNA, 19 nt, Homo sapiens
  misc_RNA (1)...(19): siRNA sense strand
caugaucaccaauaaguuu

SEQ ID NO: 1027772 - RNA, 19 nt, Homo sapiens
  misc_RNA (1)...(19): siRNA sense strand
gcucaucguguucauauau

SEQ ID NO: 1027773 - RNA, 19 nt, Homo sapiens
  misc_RNA (1)...(19): siRNA sense strand
aauuauggaucaacaguga

SEQ ID NO: 1027774 - RNA, 19 nt, Homo sapiens
  misc_RNA (1)...(19): siRNA sense strand
gccagcaggaucaucauua

SEQ ID NO: 1027775 - RNA, 19 nt, Homo sapiens
  misc_RNA (1)...(19): siRNA sense strand
gaaggagaagccacaguau

SEQ ID NO: 1027776 - RNA, 19 nt, Homo sapiens
  misc_RNA (1)...(19): siRNA sense strand
gugcuucuccauaaugaua

SEQ ID NO: 1027777 - RNA, 19 nt, Homo sapiens
  misc_RNA (1)...(19): siRNA sense strand
ggaagcaacguguuugaca

SEQ ID NO: 1027778 - RNA, 19 nt, Homo sapiens
  misc_RNA (1)...(19): siRNA sense strand
cgaagacccucagcagaau

SEQ ID NO: 1027779 - RNA, 19 nt, Homo sapiens
  misc_RNA (1)...(19): siRNA sense strand
ggaucgcuguguucuccua

SEQ ID NO: 1027780 - RNA, 19 nt, Homo sapiens
  misc_RNA (1)...(19): siRNA sense strand
ugauagaguuuaacgucuu

SEQ ID NO: 1027781 - RNA, 19 nt, Homo sapiens
  misc_RNA (1)...(19): siRNA sense strand
gcauccaccuaaacaagug

SEQ ID NO: 1027782 - RNA, 19 nt, Homo sapiens
  misc_RNA (1)...(19): siRNA sense strand
ccgaagacccucagcagaa

SEQ ID NO: 1027783 - RNA, 19 nt, Homo sapiens
  misc_RNA (1)...(19): siRNA sense strand
cauaggaagcaacguguuu

SEQ ID NO: 1027784 - RNA, 19 nt, Homo sapiens
  misc_RNA (1)...(19): siRNA sense strand
gcuguguucuccuacauca

SEQ ID NO: 1027785 - RNA, 19 nt, Homo sapiens
  misc_RNA (1)...(19): siRNA sense strand
agugugcgaugacuucuuu

SEQ ID NO: 1027786 - RNA, 19 nt, Homo sapiens
  misc_RNA (1)...(19): siRNA sense strand
ggagaaauagaaaguugau

SEQ ID NO: 1027787 - RNA, 19 nt, Homo sapiens
  misc_RNA (1)...(19): siRNA sense strand
cugcacagauccugcgauu

SEQ ID NO: 1027788 - RNA, 19 nt, Homo sapiens
  misc_RNA (1)...(19): siRNA sense strand
gaucaugaaguacaaugug

SEQ ID NO: 1027789 - RNA, 19 nt, Homo sapiens
  misc_RNA (1)...(19): siRNA sense strand
caucaucuuguauguguuu

SEQ ID NO: 1027790 - RNA, 19 nt, Homo sapiens
  misc_RNA (1)...(19): siRNA sense strand
gaacauugagaacgggaau

SEQ ID NO: 1027791 - RNA, 19 nt, Homo sapiens
  misc_RNA (1)...(19): siRNA sense strand
ugugagagacuccaucuga

SEQ ID NO: 1027792 - RNA, 19 nt, Homo sapiens
  misc_RNA (1)...(19): siRNA sense strand
ggaggcacgagaacauuga

SEQ ID NO: 1027793 - RNA, 19 nt, Homo sapiens
  misc_RNA (1)...(19): siRNA sense strand
acacauggagaaauagaaa

SEQ ID NO: 1027794 - RNA, 19 nt, Homo sapiens
  misc_RNA (1)...(19): siRNA sense strand
gggaaggccuggugcucau

SEQ ID NO: 1027795 - RNA, 19 nt, Homo sapiens
  misc_RNA (1)...(19): siRNA sense strand
ggagugugcggacuguuug

SEQ ID NO: 1027796 - RNA, 19 nt, Homo sapiens
  misc_RNA (1)...(19): siRNA sense strand
cugcagaccaugguuguua

SEQ ID NO: 1027797 - RNA, 19 nt, Homo sapiens
  misc_RNA (1)...(19): siRNA sense strand
gagcuguuugcgucuguua

SEQ ID NO: 1027798 - RNA, 19 nt, Homo sapiens
  misc_RNA (1)...(19): siRNA sense strand
ggcagagacugaucaacuc

SEQ ID NO: 1027799 - RNA, 19 nt, Homo sapiens
  misc_RNA (1)...(19): siRNA sense strand
cauccuuggugcucuguau

SEQ ID NO: 1027800 - RNA, 19 nt, Homo sapiens
  misc_RNA (1)...(19): siRNA sense strand
ugaaguacaaugugaagau

SEQ ID NO: 1027801 - RNA, 19 nt, Homo sapiens
  misc_RNA (1)...(19): siRNA sense strand
ugcgaugacuucuuuguuc

SEQ ID NO: 1027802 - RNA, 19 nt, Homo sapiens
  misc_RNA (1)...(19): siRNA sense strand
cugcauggccagccuaauu

SEQ ID NO: 1027803 - RNA, 19 nt, Homo sapiens
  misc_RNA (1)...(19): siRNA sense strand
gcuguuugcgucuguuauu

SEQ ID NO: 1027804 - RNA, 19 nt, Homo sapiens
  misc_RNA (1)...(19): siRNA sense strand
gaucaacucggccaauggu

SEQ ID NO: 1027805 - RNA, 19 nt, Homo sapiens
  misc_RNA (1)...(19): siRNA sense strand
ggcagucuccaacaccaua

SEQ ID NO: 1027806 - RNA, 19 nt, Homo sapiens
  misc_RNA (1)...(19): siRNA sense strand
ugguguggcuggugacuau

SEQ ID NO: 1027807 - RNA, 19 nt, Homo sapiens
  misc_RNA (1)...(19): siRNA sense strand
cgugggcucugcuguguuc

SEQ ID NO: 1027808 - RNA, 19 nt, Homo sapiens
  misc_RNA (1)...(19): siRNA sense strand
gccaauggugugagcagua

SEQ ID NO: 1027809 - RNA, 19 nt, Homo sapiens
  misc_RNA (1)...(19): siRNA sense strand
gcuccagcccucccaaguu

SEQ ID NO: 1027810 - RNA, 19 nt, Homo sapiens
  misc_RNA (1)...(19): siRNA sense strand
gugcucaucguguucauau

SEQ ID NO: 1027811 - RNA, 19 nt, Homo sapiens
  misc_RNA (1)...(19): siRNA sense strand
aacauccugugcauaauug

SEQ ID NO: 1027812 - RNA, 19 nt, Homo sapiens
  misc_RNA (1)...(19): siRNA sense strand
cuagagaagaucugugaga

SEQ ID NO: 1027813 - RNA, 19 nt, Homo sapiens
  misc_RNA (1)...(19): siRNA sense strand
gguuguuaauuauggauca

SEQ ID NO: 1027814 - RNA, 19 nt, Homo sapiens
  misc_RNA (1)...(19): siRNA sense strand
ugcagaccaugguuguuaa

SEQ ID NO: 1027815 - RNA, 19 nt, Homo sapiens
  misc_RNA (1)...(19): siRNA sense strand
cucaucaucuuguaugugu

SEQ ID NO: 1027816 - RNA, 19 nt, Homo sapiens
  misc_RNA (1)...(19): siRNA sense strand
uucaacauccugugcauaa

SEQ ID NO: 1027817 - RNA, 19 nt, Homo sapiens
  misc_RNA (1)...(19): siRNA sense strand
caucaugggcauuacuuuc

SEQ ID NO: 1027818 - RNA, 19 nt, Homo sapiens
  misc_RNA (1)...(19): siRNA sense strand
gcaggcuuacgaaucauga

SEQ ID NO: 1027819 - RNA, 19 nt, Homo sapiens
  misc_RNA (1)...(19): siRNA sense strand
auggagaaauagaaaguug

SEQ ID NO: 1027820 - RNA, 19 nt, Homo sapiens
  misc_RNA (1)...(19): siRNA sense strand
gccgagacuccguguacua

SEQ ID NO: 1027821 - RNA, 19 nt, Homo sapiens
  misc_RNA (1)...(19): siRNA sense strand
ucucuacgccaucuucuug

SEQ ID NO: 1027822 - RNA, 19 nt, Homo sapiens
  misc_RNA (1)...(19): siRNA sense strand
ggugaugguggacgagauu

SEQ ID NO: 1027823 - RNA, 19 nt, Homo sapiens
  misc_RNA (1)...(19): siRNA sense strand
gaugguggacgagauuaug

SEQ ID NO: 1027824 - RNA, 19 nt, Homo sapiens
  misc_RNA (1)...(19): siRNA sense strand
uuggugcucuguauauguu

SEQ ID NO: 1027825 - RNA, 19 nt, Homo sapiens
  misc_RNA (1)...(19): siRNA sense strand
aaacagcuucugcuagcaa

SEQ ID NO: 1027826 - RNA, 19 nt, Homo sapiens
  misc_RNA (1)...(19): siRNA sense strand
gcagcagggacaaguguuc

SEQ ID NO: 1027827 - RNA, 19 nt, Homo sapiens
  misc_RNA (1)...(19): siRNA sense strand
gggaggcacgagaacauug

SEQ ID NO: 1027828 - RNA, 19 nt, Homo sapiens
  misc_RNA (1)...(19): siRNA sense strand
cauagugugcgaugacuuc

SEQ ID NO: 1027829 - RNA, 19 nt, Homo sapiens
  misc_RNA (1)...(19): siRNA sense strand
caacagugaagaucaacag

SEQ ID NO: 1027830 - RNA, 19 nt, Homo sapiens
  misc_RNA (1)...(19): siRNA sense strand
guguggcuggugacuauua

SEQ ID NO: 1027831 - RNA, 19 nt, Homo sapiens
  misc_RNA (1)...(19): siRNA sense strand
cuccagcccucccaaguuc

SEQ ID NO: 1027832 - RNA, 19 nt, Homo sapiens
  misc_RNA (1)...(19): siRNA sense strand
gaaggccuggugcucauca

SEQ ID NO: 1027833 - RNA, 19 nt, Homo sapiens
  misc_RNA (1)...(19): siRNA sense strand
gagcggcagagacugauca

SEQ ID NO: 1027834 - RNA, 19 nt, Homo sapiens
  misc_RNA (1)...(19): siRNA sense strand
ucuacgugcugguucucua

SEQ ID NO: 1027835 - RNA, 19 nt, Homo sapiens
  misc_RNA (1)...(19): siRNA sense strand
ucaacauccugugcauaau

SEQ ID NO: 1027836 - RNA, 19 nt, Homo sapiens
  misc_RNA (1)...(19): siRNA sense strand
gcacgagaacauugagaac

SEQ ID NO: 1027837 - RNA, 19 nt, Homo sapiens
  misc_RNA (1)...(19): siRNA sense strand
ggcacgagaacauugagaa

SEQ ID NO: 1027838 - RNA, 19 nt, Homo sapiens
  misc_RNA (1)...(19): siRNA sense strand
gagccguccugcugcacau

SEQ ID NO: 1027839 - RNA, 19 nt, Homo sapiens
  misc_RNA (1)...(19): siRNA sense strand
ucuauuccgugguccuguu

SEQ ID NO: 1027840 - RNA, 19 nt, Homo sapiens
  misc_RNA (1)...(19): siRNA sense strand
cggcagagacugaucaacu

SEQ ID NO: 1027841 - RNA, 19 nt, Homo sapiens
  misc_RNA (1)...(19): siRNA sense strand
gacacauggagaaauagaa

SEQ ID NO: 1027842 - RNA, 19 nt, Homo sapiens
  misc_RNA (1)...(19): siRNA sense strand
gcagaccaugguuguuaau

SEQ ID NO: 1027843 - RNA, 19 nt, Homo sapiens
  misc_RNA (1)...(19): siRNA sense strand
guucaacauccugugcaua

SEQ ID NO: 1027844 - RNA, 19 nt, Homo sapiens
  misc_RNA (1)...(19): siRNA sense strand
cuucuugugcuucuccaua

SEQ ID NO: 1027845 - RNA, 19 nt, Homo sapiens
  misc_RNA (1)...(19): siRNA sense strand
ccugguaggacuuggugua

SEQ ID NO: 1027846 - RNA, 19 nt, Homo sapiens
  misc_RNA (1)...(19): siRNA sense strand
uuaaugagcggcagagacu

SEQ ID NO: 1027847 - RNA, 19 nt, Homo sapiens
  misc_RNA (1)...(19): siRNA sense strand
gccuggugcucaucaucuu

SEQ ID NO: 1027848 - RNA, 19 nt, Homo sapiens
  misc_RNA (1)...(19): siRNA sense strand
ucaucgugcucaucguguu

SEQ ID NO: 1027849 - RNA, 19 nt, Homo sapiens
  misc_RNA (1)...(19): siRNA sense strand
uggagugugcggacuguuu

SEQ ID NO: 1027850 - RNA, 19 nt, Homo sapiens
  misc_RNA (1)...(19): siRNA sense strand
gugcgaugacuucuuuguu

SEQ ID NO: 1027851 - RNA, 19 nt, Homo sapiens
  misc_RNA (1)...(19): siRNA sense strand
uaggaagcaacguguuuga

SEQ ID NO: 1027852 - RNA, 19 nt, Homo sapiens
  misc_RNA (1)...(19): siRNA sense strand
gcuucuccauaaugauaga

SEQ ID NO: 1027853 - RNA, 19 nt, Homo sapiens
  misc_RNA (1)...(19): siRNA sense strand
ccagacacauggagaaaua

SEQ ID NO: 1027854 - RNA, 19 nt, Homo sapiens
  misc_RNA (1)...(19): siRNA sense strand
gaaucaugaucaccaauaa

SEQ ID NO: 1027855 - RNA, 19 nt, Homo sapiens
  misc_RNA (1)...(19): siRNA sense strand
gcacagauccugcgauuca

SEQ ID NO: 1027856 - RNA, 19 nt, Homo sapiens
  misc_RNA (1)...(19): siRNA sense strand
gaccaugguuguuaauuau

SEQ ID NO: 1027857 - RNA, 19 nt, Homo sapiens
  misc_RNA (1)...(19): siRNA sense strand
agaccaugguuguuaauua

SEQ ID NO: 1027858 - RNA, 19 nt, Homo sapiens
  misc_RNA (1)...(19): siRNA sense strand
gauagaguuuaacgucuuu

SEQ ID NO: 1027859 - RNA, 19 nt, Homo sapiens
  misc_RNA (1)...(19): siRNA sense strand
ggacacagacagccaagaa

SEQ ID NO: 1027860 - RNA, 19 nt, Homo sapiens
  misc_RNA (1)...(19): siRNA sense strand
ccagcaggaucaucauuaa

SEQ ID NO: 1027861 - RNA, 19 nt, Homo sapiens
  misc_RNA (1)...(19): siRNA sense strand
gaaguacaaugugaagaug

SEQ ID NO: 1027862 - RNA, 19 nt, Homo sapiens
  misc_RNA (1)...(19): siRNA sense strand
gccaagaacugcacagauc

SEQ ID NO: 1027863 - RNA, 19 nt, Homo sapiens
  misc_RNA (1)...(19): siRNA sense strand
gaagcaacguguuugacau

SEQ ID NO: 1027864 - RNA, 19 nt, Homo sapiens
  misc_RNA (1)...(19): siRNA sense strand
ccaauggugugagcaguaa

SEQ ID NO: 1027865 - RNA, 19 nt, Homo sapiens
  misc_RNA (1)...(19): siRNA sense strand
caacauccugugcauaauu

SEQ ID NO: 1027866 - RNA, 19 nt, Homo sapiens
  misc_RNA (1)...(19): siRNA sense strand
guaacccggucaacaguga

SEQ ID NO: 1027867 - RNA, 19 nt, Homo sapiens
  misc_RNA (1)...(19): siRNA sense strand
gaucuguucuccaauaagg

SEQ ID NO: 1027868 - RNA, 19 nt, Homo sapiens
  misc_RNA (1)...(19): siRNA sense strand
ugaaggagaagccacagua

SEQ ID NO: 1027869 - RNA, 19 nt, Homo sapiens
  misc_RNA (1)...(19): siRNA sense strand
cgaaucaugaucaccaaua

SEQ ID NO: 1027870 - RNA, 19 nt, Homo sapiens
  misc_RNA (1)...(19): siRNA sense strand
cagaucuguucuccaauaa

SEQ ID NO: 1027871 - RNA, 19 nt, Homo sapiens
  misc_RNA (1)...(19): siRNA sense strand
caugaucaccaauaaguuu

SEQ ID NO: 1027872 - RNA, 19 nt, Homo sapiens
  misc_RNA (1)...(19): siRNA sense strand
gcucaucguguucauauau

SEQ ID NO: 1027873 - RNA, 19 nt, Homo sapiens
  misc_RNA (1)...(19): siRNA sense strand
aauuauggaucaacaguga

SEQ ID NO: 1027874 - RNA, 19 nt, Homo sapiens
  misc_RNA (1)...(19): siRNA sense strand
gccagcaggaucaucauua

SEQ ID NO: 1027875 - RNA, 19 nt, Homo sapiens
  misc_RNA (1)...(19): siRNA sense strand
gaaggagaagccacaguau

SEQ ID NO: 1027876 - RNA, 19 nt, Homo sapiens
  misc_RNA (1)...(19): siRNA sense strand
gugcuucuccauaaugaua

SEQ ID NO: 1027877 - RNA, 19 nt, Homo sapiens
  misc_RNA (1)...(19): siRNA sense strand
ggaagcaacguguuugaca

SEQ ID NO: 1027878 - RNA, 19 nt, Homo sapiens
  misc_RNA (1)...(19): siRNA sense strand
cgaagacccucagcagaau

SEQ ID NO: 1027879 - RNA, 19 nt, Homo sapiens
  misc_RNA (1)...(19): siRNA sense strand
ggaucgcuguguucuccua

SEQ ID NO: 1027880 - RNA, 19 nt, Homo sapiens
  misc_RNA (1)...(19): siRNA sense strand
ugauagaguuuaacgucuu

SEQ ID NO: 1027881 - RNA, 19 nt, Homo sapiens
  misc_RNA (1)...(19): siRNA sense strand
gcauccaccuaaacaagug

SEQ ID NO: 1027882 - RNA, 19 nt, Homo sapiens
  misc_RNA (1)...(19): siRNA sense strand
ccgaagacccucagcagaa

SEQ ID NO: 1027883 - RNA, 19 nt, Homo sapiens
  misc_RNA (1)...(19): siRNA sense strand
cauaggaagcaacguguuu

SEQ ID NO: 1027884 - RNA, 19 nt, Homo sapiens
  misc_RNA (1)...(19): siRNA sense strand
gcuguguucuccuacauca

SEQ ID NO: 1027885 - RNA, 19 nt, Homo sapiens
  misc_RNA (1)...(19): siRNA sense strand
agugugcgaugacuucuuu

SEQ ID NO: 1027886 - RNA, 19 nt, Homo sapiens
  misc_RNA (1)...(19): siRNA sense strand
ggagaaauagaaaguugau

SEQ ID NO: 1027887 - RNA, 19 nt, Homo sapiens
  misc_RNA (1)...(19): siRNA sense strand
cugcacagauccugcgauu

SEQ ID NO: 1027888 - RNA, 19 nt, Homo sapiens
  misc_RNA (1)...(19): siRNA sense strand
gaucaugaaguacaaugug

SEQ ID NO: 1027889 - RNA, 19 nt, Homo sapiens
  misc_RNA (1)...(19): siRNA sense strand
caucaucuuguauguguuu

SEQ ID NO: 1027890 - RNA, 19 nt, Homo sapiens
  misc_RNA (1)...(19): siRNA sense strand
gaacauugagaacgggaau

SEQ ID NO: 1027891 - RNA, 19 nt, Homo sapiens
  misc_RNA (1)...(19): siRNA sense strand
ugugagagacuccaucuga

SEQ ID NO: 1027892 - RNA, 19 nt, Homo sapiens
  misc_RNA (1)...(19): siRNA sense strand
ggaggcacgagaacauuga

SEQ ID NO: 1027893 - RNA, 19 nt, Homo sapiens
  misc_RNA (1)...(19): siRNA sense strand
acacauggagaaauagaaa

SEQ ID NO: 1027894 - RNA, 19 nt, Homo sapiens
  misc_RNA (1)...(19): siRNA sense strand
gggaaggccuggugcucau

SEQ ID NO: 1027895 - RNA, 19 nt, Homo sapiens
  misc_RNA (1)...(19): siRNA sense strand
ggagugugcggacuguuug

SEQ ID NO: 1027896 - RNA, 19 nt, Homo sapiens
  misc_RNA (1)...(19): siRNA sense strand
cugcagaccaugguuguua

SEQ ID NO: 1027897 - RNA, 19 nt, Homo sapiens
  misc_RNA (1)...(19): siRNA sense strand
gagcuguuugcgucuguua

SEQ ID NO: 1027898 - RNA, 19 nt, Homo sapiens
  misc_RNA (1)...(19): siRNA sense strand
ggcagagacugaucaacuc

SEQ ID NO: 1027899 - RNA, 19 nt, Homo sapiens
  misc_RNA (1)...(19): siRNA sense strand
cauccuuggugcucuguau

SEQ ID NO: 1027900 - RNA, 19 nt, Homo sapiens
  misc_RNA (1)...(19): siRNA sense strand
ugaaguacaaugugaagau

SEQ ID NO: 1027901 - RNA, 19 nt, Homo sapiens
  misc_RNA (1)...(19): siRNA sense strand
ugcgaugacuucuuuguuc

SEQ ID NO: 1027902 - RNA, 19 nt, Homo sapiens
  misc_RNA (1)...(19): siRNA sense strand
cugcauggccagccuaauu

SEQ ID NO: 1027903 - RNA, 19 nt, Homo sapiens
  misc_RNA (1)...(19): siRNA sense strand
gcuguuugcgucuguuauu

SEQ ID NO: 1027904 - RNA, 19 nt, Homo sapiens
  misc_RNA (1)...(19): siRNA sense strand
gaucaacucggccaauggu

SEQ ID NO: 1027905 - RNA, 19 nt, Homo sapiens
  misc_RNA (1)...(19): siRNA sense strand
ggcagucuccaacaccaua

SEQ ID NO: 1027906 - RNA, 19 nt, Homo sapiens
  misc_RNA (1)...(19): siRNA sense strand
ugguguggcuggugacuau

SEQ ID NO: 1027907 - RNA, 19 nt, Homo sapiens
  misc_RNA (1)...(19): siRNA sense strand
cgugggcucugcuguguuc

SEQ ID NO: 1027908 - RNA, 19 nt, Homo sapiens
  misc_RNA (1)...(19): siRNA sense strand
gccaauggugugagcagua

SEQ ID NO: 1027909 - RNA, 19 nt, Homo sapiens
  misc_RNA (1)...(19): siRNA sense strand
gcuccagcccucccaaguu

SEQ ID NO: 1027910 - RNA, 19 nt, Homo sapiens
  misc_RNA (1)...(19): siRNA sense strand
gugcucaucguguucauau

SEQ ID NO: 1027911 - RNA, 19 nt, Homo sapiens
  misc_RNA (1)...(19): siRNA sense strand
aacauccugugcauaauug

SEQ ID NO: 1027912 - RNA, 19 nt, Homo sapiens
  misc_RNA (1)...(19): siRNA sense strand
cuagagaagaucugugaga

SEQ ID NO: 1027913 - RNA, 19 nt, Homo sapiens
  misc_RNA (1)...(19): siRNA sense strand
gguuguuaauuauggauca

SEQ ID NO: 1027914 - RNA, 19 nt, Homo sapiens
  misc_RNA (1)...(19): siRNA sense strand
ugcagaccaugguuguuaa

SEQ ID NO: 1027915 - RNA, 19 nt, Homo sapiens
  misc_RNA (1)...(19): siRNA sense strand
cucaucaucuuguaugugu

SEQ ID NO: 1027916 - RNA, 19 nt, Homo sapiens
  misc_RNA (1)...(19): siRNA sense strand
uucaacauccugugcauaa

SEQ ID NO: 1027917 - RNA, 19 nt, Homo sapiens
  misc_RNA (1)...(19): siRNA sense strand
caucaugggcauuacuuuc

SEQ ID NO: 1027918 - RNA, 19 nt, Homo sapiens
  misc_RNA (1)...(19): siRNA sense strand
gcaggcuuacgaaucauga

SEQ ID NO: 1027919 - RNA, 19 nt, Homo sapiens
  misc_RNA (1)...(19): siRNA sense strand
auggagaaauagaaaguug

SEQ ID NO: 1027920 - RNA, 19 nt, Homo sapiens
  misc_RNA (1)...(19): siRNA sense strand
gccgagacuccguguacua

SEQ ID NO: 1027921 - RNA, 19 nt, Homo sapiens
  misc_RNA (1)...(19): siRNA sense strand
ucucuacgccaucuucuug

SEQ ID NO: 1027922 - RNA, 19 nt, Homo sapiens
  misc_RNA (1)...(19): siRNA sense strand
ggugaugguggacgagauu

SEQ ID NO: 1027923 - RNA, 19 nt, Homo sapiens
  misc_RNA (1)...(19): siRNA sense strand
gaugguggacgagauuaug

SEQ ID NO: 1027924 - RNA, 19 nt, Homo sapiens
  misc_RNA (1)...(19): siRNA sense strand
uuggugcucuguauauguu

SEQ ID NO: 1027925 - RNA, 19 nt, Homo sapiens
  misc_RNA (1)...(19): siRNA sense strand
aaacagcuucugcuagcaa

SEQ ID NO: 1027926 - RNA, 19 nt, Homo sapiens
  misc_RNA (1)...(19): siRNA sense strand
gcagcagggacaaguguuc

SEQ ID NO: 1027927 - RNA, 19 nt, Homo sapiens
  misc_RNA (1)...(19): siRNA sense strand
gggaggcacgagaacauug

SEQ ID NO: 1027928 - RNA, 19 nt, Homo sapiens
  misc_RNA (1)...(19): siRNA sense strand
cauagugugcgaugacuuc

SEQ ID NO: 1027929 - RNA, 19 nt, Homo sapiens
  misc_RNA (1)...(19): siRNA sense strand
caacagugaagaucaacag

SEQ ID NO: 1027930 - RNA, 19 nt, Homo sapiens
  misc_RNA (1)...(19): siRNA sense strand
guguggcuggugacuauua

SEQ ID NO: 1027931 - RNA, 19 nt, Homo sapiens
  misc_RNA (1)...(19): siRNA sense strand
cuccagcccucccaaguuc

SEQ ID NO: 1027932 - RNA, 19 nt, Homo sapiens
  misc_RNA (1)...(19): siRNA sense strand
gaaggccuggugcucauca

SEQ ID NO: 1027933 - RNA, 19 nt, Homo sapiens
  misc_RNA (1)...(19): siRNA sense strand
gagcggcagagacugauca

SEQ ID NO: 1027934 - RNA, 19 nt, Homo sapiens
  misc_RNA (1)...(19): siRNA sense strand
ucuacgugcugguucucua

SEQ ID NO: 1027935 - RNA, 19 nt, Homo sapiens
  misc_RNA (1)...(19): siRNA sense strand
ucaacauccugugcauaau

SEQ ID NO: 1027936 - RNA, 19 nt, Homo sapiens
  misc_RNA (1)...(19): siRNA sense strand
gcacgagaacauugagaac

SEQ ID NO: 1027937 - RNA, 19 nt, Homo sapiens
  misc_RNA (1)...(19): siRNA sense strand
ggcacgagaacauugagaa

SEQ ID NO: 1027938 - RNA, 19 nt, Homo sapiens
  misc_RNA (1)...(19): siRNA sense strand
gagccguccugcugcacau

SEQ ID NO: 1027939 - RNA, 19 nt, Homo sapiens
  misc_RNA (1)...(19): siRNA sense strand
ucuauuccgugguccuguu

SEQ ID NO: 1027940 - RNA, 19 nt, Homo sapiens
  misc_RNA (1)...(19): siRNA sense strand
cggcagagacugaucaacu

SEQ ID NO: 1027941 - RNA, 19 nt, Homo sapiens
  misc_RNA (1)...(19): siRNA sense strand
gacacauggagaaauagaa

SEQ ID NO: 1027942 - RNA, 19 nt, Homo sapiens
  misc_RNA (1)...(19): siRNA sense strand
gcagaccaugguuguuaau

SEQ ID NO: 1027943 - RNA, 19 nt, Homo sapiens
  misc_RNA (1)...(19): siRNA sense strand
guucaacauccugugcaua

SEQ ID NO: 1027944 - RNA, 19 nt, Homo sapiens
  misc_RNA (1)...(19): siRNA sense strand
cuucuugugcuucuccaua

SEQ ID NO: 1027945 - RNA, 19 nt, Homo sapiens
  misc_RNA (1)...(19): siRNA sense strand
ccugguaggacuuggugua

SEQ ID NO: 1027946 - RNA, 19 nt, Homo sapiens
  misc_RNA (1)...(19): siRNA sense strand
uuaaugagcggcagagacu

SEQ ID NO: 1027947 - RNA, 19 nt, Homo sapiens
  misc_RNA (1)...(19): siRNA sense strand
gccuggugcucaucaucuu

SEQ ID NO: 1027948 - RNA, 19 nt, Homo sapiens
  misc_RNA (1)...(19): siRNA sense strand
ucaucgugcucaucguguu

SEQ ID NO: 1027949 - RNA, 19 nt, Homo sapiens
  misc_RNA (1)...(19): siRNA sense strand
uggagugugcggacuguuu

SEQ ID NO: 1027950 - RNA, 19 nt, Homo sapiens
  misc_RNA (1)...(19): siRNA sense strand
gugcgaugacuucuuuguu

SEQ ID NO: 1027951 - RNA, 19 nt, Homo sapiens
  misc_RNA (1)...(19): siRNA sense strand
uaggaagcaacguguuuga

SEQ ID NO: 1027952 - RNA, 19 nt, Homo sapiens
  misc_RNA (1)...(19): siRNA sense strand
gcuucuccauaaugauaga

SEQ ID NO: 1027953 - RNA, 19 nt, Homo sapiens
  misc_RNA (1)...(19): siRNA sense strand
gaaucaugaucaccaauaa

SEQ ID NO: 1027954 - RNA, 19 nt, Homo sapiens
  misc_RNA (1)...(19): siRNA sense strand
gcacagauccugcgauuca

SEQ ID NO: 1027955 - RNA, 19 nt, Homo sapiens
  misc_RNA (1)...(19): siRNA sense strand
gaccaugguuguuaauuau

SEQ ID NO: 1027956 - RNA, 19 nt, Homo sapiens
  misc_RNA (1)...(19): siRNA sense strand
agaccaugguuguuaauua

SEQ ID NO: 1027957 - RNA, 19 nt, Homo sapiens
  misc_RNA (1)...(19): siRNA sense strand
gauagaguuuaacgucuuu

SEQ ID NO: 1027958 - RNA, 19 nt, Homo sapiens
  misc_RNA (1)...(19): siRNA sense strand
gaaguacaaugugaagaug

SEQ ID NO: 1027959 - RNA, 19 nt, Homo sapiens
  misc_RNA (1)...(19): siRNA sense strand
ggacacagacagccaagaa

SEQ ID NO: 1027960 - RNA, 19 nt, Homo sapiens
  misc_RNA (1)...(19): siRNA sense strand
ccagcaggaucaucauuaa

SEQ ID NO: 1027961 - RNA, 19 nt, Homo sapiens
  misc_RNA (1)...(19): siRNA sense strand
gccaagaacugcacagauc

SEQ ID NO: 1027962 - RNA, 19 nt, Homo sapiens
  misc_RNA (1)...(19): siRNA sense strand
gaagcaacguguuugacau

SEQ ID NO: 1027963 - RNA, 19 nt, Homo sapiens
  misc_RNA (1)...(19): siRNA sense strand
ccaauggugugagcaguaa

SEQ ID NO: 1027964 - RNA, 19 nt, Homo sapiens
  misc_RNA (1)...(19): siRNA sense strand
caacauccugugcauaauu

SEQ ID NO: 1027965 - RNA, 19 nt, Homo sapiens
  misc_RNA (1)...(19): siRNA sense strand
guaacccggucaacaguga

SEQ ID NO: 1027966 - RNA, 19 nt, Homo sapiens
  misc_RNA (1)...(19): siRNA sense strand
gaucuguucuccaauaagg

SEQ ID NO: 1027967 - RNA, 19 nt, Homo sapiens
  misc_RNA (1)...(19): siRNA sense strand
ugaaggagaagccacagua

SEQ ID NO: 1027968 - RNA, 19 nt, Homo sapiens
  misc_RNA (1)...(19): siRNA sense strand
cgaaucaugaucaccaaua

SEQ ID NO: 1027969 - RNA, 19 nt, Homo sapiens
  misc_RNA (1)...(19): siRNA sense strand
cagaucuguucuccaauaa

SEQ ID NO: 1027970 - RNA, 19 nt, Homo sapiens
  misc_RNA (1)...(19): siRNA sense strand
caugaucaccaauaaguuu

SEQ ID NO: 1027971 - RNA, 19 nt, Homo sapiens
  misc_RNA (1)...(19): siRNA sense strand
gcucaucguguucauauau

SEQ ID NO: 1027972 - RNA, 19 nt, Homo sapiens
  misc_RNA (1)...(19): siRNA sense strand
aauuauggaucaacaguga

SEQ ID NO: 1027973 - RNA, 19 nt, Homo sapiens
  misc_RNA (1)...(19): siRNA sense strand
gccagcaggaucaucauua

SEQ ID NO: 1027974 - RNA, 19 nt, Homo sapiens
  misc_RNA (1)...(19): siRNA sense strand
gaaggagaagccacaguau

SEQ ID NO: 1027975 - RNA, 19 nt, Homo sapiens
  misc_RNA (1)...(19): siRNA sense strand
gugcuucuccauaaugaua

SEQ ID NO: 1027976 - RNA, 19 nt, Homo sapiens
  misc_RNA (1)...(19): siRNA sense strand
ggaagcaacguguuugaca

SEQ ID NO: 1027977 - RNA, 19 nt, Homo sapiens
  misc_RNA (1)...(19): siRNA sense strand
cgaagacccucagcagaau

SEQ ID NO: 1027978 - RNA, 19 nt, Homo sapiens
  misc_RNA (1)...(19): siRNA sense strand
ggaucgcuguguucuccua

SEQ ID NO: 1027979 - RNA, 19 nt, Homo sapiens
  misc_RNA (1)...(19): siRNA sense strand
ugauagaguuuaacgucuu

SEQ ID NO: 1027980 - RNA, 19 nt, Homo sapiens
  misc_RNA (1)...(19): siRNA sense strand
gcauccaccuaaacaagug

SEQ ID NO: 1027981 - RNA, 19 nt, Homo sapiens
  misc_RNA (1)...(19): siRNA sense strand
ccgaagacccucagcagaa

SEQ ID NO: 1027982 - RNA, 19 nt, Homo sapiens
  misc_RNA (1)...(19): siRNA sense strand
cauaggaagcaacguguuu

SEQ ID NO: 1027983 - RNA, 19 nt, Homo sapiens
  misc_RNA (1)...(19): siRNA sense strand
gcuguguucuccuacauca

SEQ ID NO: 1027984 - RNA, 19 nt, Homo sapiens
  misc_RNA (1)...(19): siRNA sense strand
agugugcgaugacuucuuu

SEQ ID NO: 1027985 - RNA, 19 nt, Homo sapiens
  misc_RNA (1)...(19): siRNA sense strand
gaucaugaaguacaaugug

SEQ ID NO: 1027986 - RNA, 19 nt, Homo sapiens
  misc_RNA (1)...(19): siRNA sense strand
cugcacagauccugcgauu

SEQ ID NO: 1027987 - RNA, 19 nt, Homo sapiens
  misc_RNA (1)...(19): siRNA sense strand
caucaucuuguauguguuu

SEQ ID NO: 1027988 - RNA, 19 nt, Homo sapiens
  misc_RNA (1)...(19): siRNA sense strand
gaacauugagaacgggaau

SEQ ID NO: 1027989 - RNA, 19 nt, Homo sapiens
  misc_RNA (1)...(19): siRNA sense strand
ugugagagacuccaucuga

SEQ ID NO: 1027990 - RNA, 19 nt, Homo sapiens
  misc_RNA (1)...(19): siRNA sense strand
ggaggcacgagaacauuga

SEQ ID NO: 1027991 - RNA, 19 nt, Homo sapiens
  misc_RNA (1)...(19): siRNA sense strand
gggaaggccuggugcucau

SEQ ID NO: 1027992 - RNA, 19 nt, Homo sapiens
  misc_RNA (1)...(19): siRNA sense strand
ggagugugcggacuguuug

SEQ ID NO: 1027993 - RNA, 19 nt, Homo sapiens
  misc_RNA (1)...(19): siRNA sense strand
cugcagaccaugguuguua

SEQ ID NO: 1027994 - RNA, 19 nt, Homo sapiens
  misc_RNA (1)...(19): siRNA sense strand
gagcuguuugcgucuguua

SEQ ID NO: 1027995 - RNA, 19 nt, Homo sapiens
  misc_RNA (1)...(19): siRNA sense strand
ggcagagacugaucaacuc

SEQ ID NO: 1027996 - RNA, 19 nt, Homo sapiens
  misc_RNA (1)...(19): siRNA sense strand
cauccuuggugcucuguau

SEQ ID NO: 1027997 - RNA, 19 nt, Homo sapiens
  misc_RNA (1)...(19): siRNA sense strand
ugaaguacaaugugaagau

SEQ ID NO: 1027998 - RNA, 19 nt, Homo sapiens
  misc_RNA (1)...(19): siRNA sense strand
ugcgaugacuucuuuguuc

SEQ ID NO: 1027999 - RNA, 19 nt, Homo sapiens
  misc_RNA (1)...(19): siRNA sense strand
cugcauggccagccuaauu

SEQ ID NO: 1028000 - RNA, 19 nt, Homo sapiens
  misc_RNA (1)...(19): siRNA sense strand
gcuguuugcgucuguuauu

SEQ ID NO: 1028001 - RNA, 19 nt, Homo sapiens
  misc_RNA (1)...(19): siRNA sense strand
gaucaacucggccaauggu

SEQ ID NO: 1028002 - RNA, 19 nt, Homo sapiens
  misc_RNA (1)...(19): siRNA sense strand
ggcagucuccaacaccaua

SEQ ID NO: 1028003 - RNA, 19 nt, Homo sapiens
  misc_RNA (1)...(19): siRNA sense strand
ugguguggcuggugacuau

SEQ ID NO: 1028004 - RNA, 19 nt, Homo sapiens
  misc_RNA (1)...(19): siRNA sense strand
cgugggcucugcuguguuc

SEQ ID NO: 1028005 - RNA, 19 nt, Homo sapiens
  misc_RNA (1)...(19): siRNA sense strand
gccaauggugugagcagua

SEQ ID NO: 1028006 - RNA, 19 nt, Homo sapiens
  misc_RNA (1)...(19): siRNA sense strand
gcuccagcccucccaaguu

SEQ ID NO: 1028007 - RNA, 19 nt, Homo sapiens
  misc_RNA (1)...(19): siRNA sense strand
gugcucaucguguucauau

SEQ ID NO: 1028008 - RNA, 19 nt, Homo sapiens
  misc_RNA (1)...(19): siRNA sense strand
aacauccugugcauaauug

SEQ ID NO: 1028009 - RNA, 19 nt, Homo sapiens
  misc_RNA (1)...(19): siRNA sense strand
cuagagaagaucugugaga

SEQ ID NO: 1028010 - RNA, 19 nt, Homo sapiens
  misc_RNA (1)...(19): siRNA sense strand
gguuguuaauuauggauca

SEQ ID NO: 1028011 - RNA, 19 nt, Homo sapiens
  misc_RNA (1)...(19): siRNA sense strand
ugcagaccaugguuguuaa

SEQ ID NO: 1028012 - RNA, 19 nt, Homo sapiens
  misc_RNA (1)...(19): siRNA sense strand
cucaucaucuuguaugugu

SEQ ID NO: 1028013 - RNA, 19 nt, Homo sapiens
  misc_RNA (1)...(19): siRNA sense strand
uucaacauccugugcauaa

SEQ ID NO: 1028014 - RNA, 19 nt, Homo sapiens
  misc_RNA (1)...(19): siRNA sense strand
caucaugggcauuacuuuc

SEQ ID NO: 1028015 - RNA, 19 nt, Homo sapiens
  misc_RNA (1)...(19): siRNA sense strand
gcaggcuuacgaaucauga

SEQ ID NO: 1028016 - RNA, 19 nt, Homo sapiens
  misc_RNA (1)...(19): siRNA sense strand
gccgagacuccguguacua

SEQ ID NO: 1028017 - RNA, 19 nt, Homo sapiens
  misc_RNA (1)...(19): siRNA sense strand
ucucuacgccaucuucuug

SEQ ID NO: 1028018 - RNA, 19 nt, Homo sapiens
  misc_RNA (1)...(19): siRNA sense strand
ggugaugguggacgagauu

SEQ ID NO: 1028019 - RNA, 19 nt, Homo sapiens
  misc_RNA (1)...(19): siRNA sense strand
uuggugcucuguauauguu

SEQ ID NO: 1028020 - RNA, 19 nt, Homo sapiens
  misc_RNA (1)...(19): siRNA sense strand
gcagcagggacaaguguuc

SEQ ID NO: 1028021 - RNA, 19 nt, Homo sapiens
  misc_RNA (1)...(19): siRNA sense strand
gggaggcacgagaacauug

SEQ ID NO: 1028022 - RNA, 19 nt, Homo sapiens
  misc_RNA (1)...(19): siRNA sense strand
gaugguggacgagauuaug

SEQ ID NO: 1028023 - RNA, 19 nt, Homo sapiens
  misc_RNA (1)...(19): siRNA sense strand
gaaggccuggugcucauca

SEQ ID NO: 1028024 - RNA, 19 nt, Homo sapiens
  misc_RNA (1)...(19): siRNA sense strand
caacagugaagaucaacag

SEQ ID NO: 1028025 - RNA, 19 nt, Homo sapiens
  misc_RNA (1)...(19): siRNA sense strand
guguggcuggugacuauua

SEQ ID NO: 1028026 - RNA, 19 nt, Homo sapiens
  misc_RNA (1)...(19): siRNA sense strand
cauagugugcgaugacuuc

SEQ ID NO: 1028027 - RNA, 19 nt, Homo sapiens
  misc_RNA (1)...(19): siRNA sense strand
cuccagcccucccaaguuc

SEQ ID NO: 1028028 - RNA, 19 nt, Homo sapiens
  misc_RNA (1)...(19): siRNA sense strand
gagcggcagagacugauca

SEQ ID NO: 1028029 - RNA, 19 nt, Homo sapiens
  misc_RNA (1)...(19): siRNA sense strand
ucuacgugcugguucucua

SEQ ID NO: 1028030 - RNA, 19 nt, Homo sapiens
  misc_RNA (1)...(19): siRNA sense strand
ucaacauccugugcauaau

SEQ ID NO: 1028031 - RNA, 19 nt, Homo sapiens
  misc_RNA (1)...(19): siRNA sense strand
gcacgagaacauugagaac

SEQ ID NO: 1028032 - RNA, 19 nt, Homo sapiens
  misc_RNA (1)...(19): siRNA sense strand
ggcacgagaacauugagaa

SEQ ID NO: 1028033 - RNA, 19 nt, Homo sapiens
  misc_RNA (1)...(19): siRNA sense strand
cggcagagacugaucaacu

SEQ ID NO: 1028034 - RNA, 19 nt, Homo sapiens
  misc_RNA (1)...(19): siRNA sense strand
gagccguccugcugcacau

SEQ ID NO: 1028035 - RNA, 19 nt, Homo sapiens
  misc_RNA (1)...(19): siRNA sense strand
ucuauuccgugguccuguu

SEQ ID NO: 1028036 - RNA, 19 nt, Homo sapiens
  misc_RNA (1)...(19): siRNA sense strand
gcagaccaugguuguuaau

SEQ ID NO: 1028037 - RNA, 19 nt, Homo sapiens
  misc_RNA (1)...(19): siRNA sense strand
gugcgaugacuucuuuguu

SEQ ID NO: 1028038 - RNA, 19 nt, Homo sapiens
  misc_RNA (1)...(19): siRNA sense strand
cuucuugugcuucuccaua

SEQ ID NO: 1028039 - RNA, 19 nt, Homo sapiens
  misc_RNA (1)...(19): siRNA sense strand
ccugguaggacuuggugua

SEQ ID NO: 1028040 - RNA, 19 nt, Homo sapiens
  misc_RNA (1)...(19): siRNA sense strand
uuaaugagcggcagagacu

SEQ ID NO: 1028041 - RNA, 19 nt, Homo sapiens
  misc_RNA (1)...(19): siRNA sense strand
gccuggugcucaucaucuu

SEQ ID NO: 1028042 - RNA, 19 nt, Homo sapiens
  misc_RNA (1)...(19): siRNA sense strand
ucaucgugcucaucguguu

SEQ ID NO: 1028043 - RNA, 19 nt, Homo sapiens
  misc_RNA (1)...(19): siRNA sense strand
uggagugugcggacuguuu

SEQ ID NO: 1028044 - RNA, 19 nt, Homo sapiens
  misc_RNA (1)...(19): siRNA sense strand
guucaacauccugugcaua

SEQ ID NO: 1028045 - RNA, 19 nt, Homo sapiens
  misc_RNA (1)...(19): siRNA sense strand
gugcucaucaucuuguaug

SEQ ID NO: 1028046 - RNA, 19 nt, Homo sapiens
  misc_RNA (1)...(19): siRNA sense strand
gcuucuccauaaugauaga

SEQ ID NO: 1028047 - RNA, 19 nt, Homo sapiens
  misc_RNA (1)...(19): siRNA sense strand
uaggaagcaacguguuuga

SEQ ID NO: 1028048 - RNA, 19 nt, Homo sapiens
  misc_RNA (1)...(19): siRNA sense strand
gaagacccucagcagaauc

SEQ ID NO: 1028049 - RNA, 19 nt, Homo sapiens
  misc_RNA (1)...(19): siRNA sense strand
cugaucaacucggccaaug

SEQ ID NO: 1028050 - RNA, 19 nt, Homo sapiens
  misc_RNA (1)...(19): siRNA sense strand
aucaugaaguacaauguga

SEQ ID NO: 1028051 - RNA, 19 nt, Homo sapiens
  misc_RNA (1)...(19): siRNA sense strand
agcaggaucaucauuaaug

SEQ ID NO: 1028052 - RNA, 19 nt, Homo sapiens
  misc_RNA (1)...(19): siRNA sense strand
uucuugugcuucuccauaa

SEQ ID NO: 1028053 - RNA, 19 nt, Homo sapiens
  misc_RNA (1)...(19): siRNA sense strand
gaaagcaauugaacuguuu

SEQ ID NO: 1028054 - RNA, 19 nt, Homo sapiens
  misc_RNA (1)...(19): siRNA sense strand
gagaacaucuugcugcuaa

SEQ ID NO: 1028055 - RNA, 19 nt, Homo sapiens
  misc_RNA (1)...(19): siRNA sense strand
gcagauaagugaccugaga

SEQ ID NO: 1028056 - RNA, 19 nt, Homo sapiens
  misc_RNA (1)...(19): siRNA sense strand
cgaaagggcuucugaggaa

SEQ ID NO: 1028057 - RNA, 19 nt, Homo sapiens
  misc_RNA (1)...(19): siRNA sense strand
ggaaagcgcucagcucuca

SEQ ID NO: 1028058 - RNA, 19 nt, Homo sapiens
  misc_RNA (1)...(19): siRNA sense strand
gcgaagagaugcugguuug

SEQ ID NO: 1028059 - RNA, 19 nt, Homo sapiens
  misc_RNA (1)...(19): siRNA sense strand
gcaacagugugaaccuuaa

SEQ ID NO: 1028060 - RNA, 19 nt, Homo sapiens
  misc_RNA (1)...(19): siRNA sense strand
cacauaaccucaagaagaa

SEQ ID NO: 1028061 - RNA, 19 nt, Homo sapiens
  misc_RNA (1)...(19): siRNA sense strand
aaacgggaaugauguauau

SEQ ID NO: 1028062 - RNA, 19 nt, Homo sapiens
  misc_RNA (1)...(19): siRNA sense strand
ucacauaaccucaagaaga

SEQ ID NO: 1028063 - RNA, 19 nt, Homo sapiens
  misc_RNA (1)...(19): siRNA sense strand
caggaucccuuuccaauuc

SEQ ID NO: 1028064 - RNA, 19 nt, Homo sapiens
  misc_RNA (1)...(19): siRNA sense strand
gaacaagccgaaagcaaga

SEQ ID NO: 1028065 - RNA, 19 nt, Homo sapiens
  misc_RNA (1)...(19): siRNA sense strand
gaacaugggcgucgugaag

SEQ ID NO: 1028066 - RNA, 19 nt, Homo sapiens
  misc_RNA (1)...(19): siRNA sense strand
gaagaggacaggcuuggaa

SEQ ID NO: 1028067 - RNA, 19 nt, Homo sapiens
  misc_RNA (1)...(19): siRNA sense strand
cagaugacuuggauacaaa

SEQ ID NO: 1028068 - RNA, 19 nt, Homo sapiens
  misc_RNA (1)...(19): siRNA sense strand
ccuccgaccuucagaguaa

SEQ ID NO: 1028069 - RNA, 19 nt, Homo sapiens
  misc_RNA (1)...(19): siRNA sense strand
cugcagaucucauaggauu

SEQ ID NO: 1028070 - RNA, 19 nt, Homo sapiens
  misc_RNA (1)...(19): siRNA sense strand
gaagagaugcugguuuguu

SEQ ID NO: 1028071 - RNA, 19 nt, Homo sapiens
  misc_RNA (1)...(19): siRNA sense strand
gaagaagauccuccgcuuu

SEQ ID NO: 1028072 - RNA, 19 nt, Homo sapiens
  misc_RNA (1)...(19): siRNA sense strand
ugagcuagaugccgucaaa

SEQ ID NO: 1028073 - RNA, 19 nt, Homo sapiens
  misc_RNA (1)...(19): siRNA sense strand
gugugaaccuuaagaauuc

SEQ ID NO: 1028074 - RNA, 19 nt, Homo sapiens
  misc_RNA (1)...(19): siRNA sense strand
ucauaggauuguuggaaua

SEQ ID NO: 1028075 - RNA, 19 nt, Homo sapiens
  misc_RNA (1)...(19): siRNA sense strand
aaauuaaggccucacauaa

SEQ ID NO: 1028076 - RNA, 19 nt, Homo sapiens
  misc_RNA (1)...(19): siRNA sense strand
ccagaugacuuggauacaa

SEQ ID NO: 1028077 - RNA, 19 nt, Homo sapiens
  misc_RNA (1)...(19): siRNA sense strand
gcagucgccuggaggagaa

SEQ ID NO: 1028078 - RNA, 19 nt, Homo sapiens
  misc_RNA (1)...(19): siRNA sense strand
agugugaucuggugucuaa

SEQ ID NO: 1028079 - RNA, 19 nt, Homo sapiens
  misc_RNA (1)...(19): siRNA sense strand
gcaauuacaccaccaacug

SEQ ID NO: 1028080 - RNA, 19 nt, Homo sapiens
  misc_RNA (1)...(19): siRNA sense strand
uaaagaaggccacugugaa

SEQ ID NO: 1028081 - RNA, 19 nt, Homo sapiens
  misc_RNA (1)...(19): siRNA sense strand
agaaagcaauugaacuguu

SEQ ID NO: 1028082 - RNA, 19 nt, Homo sapiens
  misc_RNA (1)...(19): siRNA sense strand
cuaacucgguguucaguga

SEQ ID NO: 1028083 - RNA, 19 nt, Homo sapiens
  misc_RNA (1)...(19): siRNA sense strand
aagagaugcugguuuguug

SEQ ID NO: 1028084 - RNA, 19 nt, Homo sapiens
  misc_RNA (1)...(19): siRNA sense strand
uaagaaagcaauugaacug

SEQ ID NO: 1028085 - RNA, 19 nt, Homo sapiens
  misc_RNA (1)...(19): siRNA sense strand
gugcagagcccaauguuuc

SEQ ID NO: 1028086 - RNA, 19 nt, Homo sapiens
  misc_RNA (1)...(19): siRNA sense strand
gguguucagugaguguuua

SEQ ID NO: 1028087 - RNA, 19 nt, Homo sapiens
  misc_RNA (1)...(19): siRNA sense strand
ggacaggcuuggaaaccau

SEQ ID NO: 1028088 - RNA, 19 nt, Homo sapiens
  misc_RNA (1)...(19): siRNA sense strand
gaagaacuccagccugaag

SEQ ID NO: 1028089 - RNA, 19 nt, Homo sapiens
  misc_RNA (1)...(19): siRNA sense strand
gaggcgaccuugagucucu

SEQ ID NO: 1028090 - RNA, 19 nt, Homo sapiens
  misc_RNA (1)...(19): siRNA sense strand
ugacuuggauacaaauaag

SEQ ID NO: 1028091 - RNA, 19 nt, Homo sapiens
  misc_RNA (1)...(19): siRNA sense strand
caaaacagacaguuccuua

SEQ ID NO: 1028092 - RNA, 19 nt, Homo sapiens
  misc_RNA (1)...(19): siRNA sense strand
auaagaaacucaagaaagc

SEQ ID NO: 1028093 - RNA, 19 nt, Homo sapiens
  misc_RNA (1)...(19): siRNA sense strand
gacagcgagucgaguguga

SEQ ID NO: 1028094 - RNA, 19 nt, Homo sapiens
  misc_RNA (1)...(19): siRNA sense strand
aagagcaccuggagacaga

SEQ ID NO: 1028095 - RNA, 19 nt, Homo sapiens
  misc_RNA (1)...(19): siRNA sense strand
gcaguggucgaaagaauca

SEQ ID NO: 1028096 - RNA, 19 nt, Homo sapiens
  misc_RNA (1)...(19): siRNA sense strand
ggcaacagugugaaccuua

SEQ ID NO: 1028097 - RNA, 19 nt, Homo sapiens
  misc_RNA (1)...(19): siRNA sense strand
uuaauuuggucccaguuug

SEQ ID NO: 1028098 - RNA, 19 nt, Homo sapiens
  misc_RNA (1)...(19): siRNA sense strand
guaaggaccaacaaaccaa

SEQ ID NO: 1028099 - RNA, 19 nt, Homo sapiens
  misc_RNA (1)...(19): siRNA sense strand
uaccuucucugaacaaugg

SEQ ID NO: 1028100 - RNA, 19 nt, Homo sapiens
  misc_RNA (1)...(19): siRNA sense strand
gcagaucucauaggauugu

SEQ ID NO: 1028101 - RNA, 19 nt, Homo sapiens
  misc_RNA (1)...(19): siRNA sense strand
cgggauaccuucucugaac

SEQ ID NO: 1028102 - RNA, 19 nt, Homo sapiens
  misc_RNA (1)...(19): siRNA sense strand
gaugcugguuuguugaauc

SEQ ID NO: 1028103 - RNA, 19 nt, Homo sapiens
  misc_RNA (1)...(19): siRNA sense strand
caauguuucuccuuugucu

SEQ ID NO: 1028104 - RNA, 19 nt, Homo sapiens
  misc_RNA (1)...(19): siRNA sense strand
gcccaauguuucuccuuug

SEQ ID NO: 1028105 - RNA, 19 nt, Homo sapiens
  misc_RNA (1)...(19): siRNA sense strand
agaguaagcaccugccaaa

SEQ ID NO: 1028106 - RNA, 19 nt, Homo sapiens
  misc_RNA (1)...(19): siRNA sense strand
caccagcgacucugaagaa

SEQ ID NO: 1028107 - RNA, 19 nt, Homo sapiens
  misc_RNA (1)...(19): siRNA sense strand
gggcaacagugugaaccuu

SEQ ID NO: 1028108 - RNA, 19 nt, Homo sapiens
  misc_RNA (1)...(19): siRNA sense strand
cagcgacucugaagaaagc

SEQ ID NO: 1028109 - RNA, 19 nt, Homo sapiens
  misc_RNA (1)...(19): siRNA sense strand
gagaugcugguuuguugaa

SEQ ID NO: 1028110 - RNA, 19 nt, Homo sapiens
  misc_RNA (1)...(19): siRNA sense strand
ggucaaggcccaguuuauc

SEQ ID NO: 1028111 - RNA, 19 nt, Homo sapiens
  misc_RNA (1)...(19): siRNA sense strand
aagcaguggucgaaagaau

SEQ ID NO: 1028112 - RNA, 19 nt, Homo sapiens
  misc_RNA (1)...(19): siRNA sense strand
gggauaccuucucugaaca

SEQ ID NO: 1028113 - RNA, 19 nt, Homo sapiens
  misc_RNA (1)...(19): siRNA sense strand
aagaagauccuccgcuuuc

SEQ ID NO: 1028114 - RNA, 19 nt, Homo sapiens
  misc_RNA (1)...(19): siRNA sense strand
uaauucccuugaugucauu

SEQ ID NO: 1028115 - RNA, 19 nt, Homo sapiens
  misc_RNA (1)...(19): siRNA sense strand
cggccgagauuuccuacga

SEQ ID NO: 1028116 - RNA, 19 nt, Homo sapiens
  misc_RNA (1)...(19): siRNA sense strand
ggccaaaccuaagcacaag

SEQ ID NO: 1028117 - RNA, 19 nt, Homo sapiens
  misc_RNA (1)...(19): siRNA sense strand
auggauggcuacauucuga

SEQ ID NO: 1028118 - RNA, 19 nt, Homo sapiens
  misc_RNA (1)...(19): siRNA sense strand
cagaugugaaucccaagua

SEQ ID NO: 1028119 - RNA, 19 nt, Homo sapiens
  misc_RNA (1)...(19): siRNA sense strand
auaaagaaggccacuguga

SEQ ID NO: 1028120 - RNA, 19 nt, Homo sapiens
  misc_RNA (1)...(19): siRNA sense strand
ucaagaaagccuccuccaa

SEQ ID NO: 1028121 - RNA, 19 nt, Homo sapiens
  misc_RNA (1)...(19): siRNA sense strand
gaugacuuggauacaaaua

SEQ ID NO: 1028122 - RNA, 19 nt, Homo sapiens
  misc_RNA (1)...(19): siRNA sense strand
caagccagccucgcaagaa

SEQ ID NO: 1028123 - RNA, 19 nt, Homo sapiens
  misc_RNA (1)...(19): siRNA sense strand
agugugaaccuuaagaauu

SEQ ID NO: 1028124 - RNA, 19 nt, Homo sapiens
  misc_RNA (1)...(19): siRNA sense strand
uuaauucccuugaugucau

SEQ ID NO: 1028125 - RNA, 19 nt, Homo sapiens
  misc_RNA (1)...(19): siRNA sense strand
ggagaacaucuugcugcua

SEQ ID NO: 1028126 - RNA, 19 nt, Homo sapiens
  misc_RNA (1)...(19): siRNA sense strand
aggacgagcagagcaauua

SEQ ID NO: 1028127 - RNA, 19 nt, Homo sapiens
  misc_RNA (1)...(19): siRNA sense strand
gcuaagaaagcaauugaac

SEQ ID NO: 1028128 - RNA, 19 nt, Homo sapiens
  misc_RNA (1)...(19): siRNA sense strand
cgagggcucuucccaaagc

SEQ ID NO: 1028129 - RNA, 19 nt, Homo sapiens
  misc_RNA (1)...(19): siRNA sense strand
cgaagcaguggucgaaaga

SEQ ID NO: 1028130 - RNA, 19 nt, Homo sapiens
  misc_RNA (1)...(19): siRNA sense strand
cgggagcguuugugucaga

SEQ ID NO: 1028131 - RNA, 19 nt, Homo sapiens
  misc_RNA (1)...(19): siRNA sense strand
gugaguguuuauccaguug

SEQ ID NO: 1028132 - RNA, 19 nt, Homo sapiens
  misc_RNA (1)...(19): siRNA sense strand
aaagaaggccacugugaag

SEQ ID NO: 1028133 - RNA, 19 nt, Homo sapiens
  misc_RNA (1)...(19): siRNA sense strand
ggccgagauuuccuacgaa

SEQ ID NO: 1028134 - RNA, 19 nt, Homo sapiens
  misc_RNA (1)...(19): siRNA sense strand
ggauacaaauaagaaacuc

SEQ ID NO: 1028135 - RNA, 19 nt, Homo sapiens
  misc_RNA (1)...(19): siRNA sense strand
aagugucgcuucccagaug

SEQ ID NO: 1028136 - RNA, 19 nt, Homo sapiens
  misc_RNA (1)...(19): siRNA sense strand
gaccugagacuggauguag

SEQ ID NO: 1028137 - RNA, 19 nt, Homo sapiens
  misc_RNA (1)...(19): siRNA sense strand
ucaggaucccuuuccaauu

SEQ ID NO: 1028138 - RNA, 19 nt, Homo sapiens
  misc_RNA (1)...(19): siRNA sense strand
aaaauuaaggccucacaua

SEQ ID NO: 1028139 - RNA, 19 nt, Homo sapiens
  misc_RNA (1)...(19): siRNA sense strand
agcgagggcucuucccaaa

SEQ ID NO: 1028140 - RNA, 19 nt, Homo sapiens
  misc_RNA (1)...(19): siRNA sense strand
ccgaagcaguggucgaaag

SEQ ID NO: 1028141 - RNA, 19 nt, Homo sapiens
  misc_RNA (1)...(19): siRNA sense strand
gaaccuuaagaauucgaaa

SEQ ID NO: 1028142 - RNA, 19 nt, Homo sapiens
  misc_RNA (1)...(19): siRNA sense strand
ccucuccacaccacaauuu

SEQ ID NO: 1028143 - RNA, 19 nt, Homo sapiens
  misc_RNA (1)...(19): siRNA sense strand
aaaccaugccagugacauu

SEQ ID NO: 1028144 - RNA, 19 nt, Homo sapiens
  misc_RNA (1)...(19): siRNA sense strand
gagacuggauguagaaaag

SEQ ID NO: 1028145 - RNA, 19 nt, Homo sapiens
  misc_RNA (1)...(19): siRNA sense strand
caaccaccagcgacucuga

SEQ ID NO: 1028146 - RNA, 19 nt, Homo sapiens
  misc_RNA (1)...(19): siRNA sense strand
acaugggcgucgugaagaa

SEQ ID NO: 1028147 - RNA, 19 nt, Homo sapiens
  misc_RNA (1)...(19): siRNA sense strand
ggcgggauaccuucucuga

SEQ ID NO: 1028148 - RNA, 19 nt, Homo sapiens
  misc_RNA (1)...(19): siRNA sense strand
ccucacauaaccucaagaa

SEQ ID NO: 1028149 - RNA, 19 nt, Homo sapiens
  misc_RNA (1)...(19): siRNA sense strand
gcacaagcgaacugacuac

SEQ ID NO: 1028150 - RNA, 19 nt, Homo sapiens
  misc_RNA (1)...(19): siRNA sense strand
gauaccuucucugaacaau

SEQ ID NO: 1028151 - RNA, 19 nt, Homo sapiens
  misc_RNA (1)...(19): siRNA sense strand
gaaugauguauaucgcuau

SEQ ID NO: 1028152 - RNA, 19 nt, Homo sapiens
  misc_RNA (1)...(19): siRNA sense strand
gaagcaguggucgaaagaa

SEQ ID NO: 1028153 - RNA, 19 nt, Homo sapiens
  misc_RNA (1)...(19): siRNA sense strand
gaagaggccuuguauguua

SEQ ID NO: 1028154 - RNA, 19 nt, Homo sapiens
  misc_RNA (1)...(19): siRNA sense strand
ggaaauaaguggacaaaca

SEQ ID NO: 1028155 - RNA, 19 nt, Homo sapiens
  misc_RNA (1)...(19): siRNA sense strand
gcacagaauucucaacaaa

SEQ ID NO: 1028156 - RNA, 19 nt, Homo sapiens
  misc_RNA (1)...(19): siRNA sense strand
ccacuggacuguuacaaua

SEQ ID NO: 1028157 - RNA, 19 nt, Homo sapiens
  misc_RNA (1)...(19): siRNA sense strand
gaaguaauauggucucaug

SEQ ID NO: 1028158 - RNA, 19 nt, Homo sapiens
  misc_RNA (1)...(19): siRNA sense strand
gaaugccaguuaacaaaua

SEQ ID NO: 1028159 - RNA, 19 nt, Homo sapiens
  misc_RNA (1)...(19): siRNA sense strand
gaagaggucaguuaaauau

SEQ ID NO: 1028160 - RNA, 19 nt, Homo sapiens
  misc_RNA (1)...(19): siRNA sense strand
gcacugauguccaggaaga

SEQ ID NO: 1028161 - RNA, 19 nt, Homo sapiens
  misc_RNA (1)...(19): siRNA sense strand
gagaagaggccuuguaugu

SEQ ID NO: 1028162 - RNA, 19 nt, Homo sapiens
  misc_RNA (1)...(19): siRNA sense strand
cagagcaacuucaucauug

SEQ ID NO: 1028163 - RNA, 19 nt, Homo sapiens
  misc_RNA (1)...(19): siRNA sense strand
uuacagagaaugccaguua

SEQ ID NO: 1028164 - RNA, 19 nt, Homo sapiens
  misc_RNA (1)...(19): siRNA sense strand
cagaagaggucaguuaaau

SEQ ID NO: 1028165 - RNA, 19 nt, Homo sapiens
  misc_RNA (1)...(19): siRNA sense strand
gauaaagccauccuccaua

SEQ ID NO: 1028166 - RNA, 19 nt, Homo sapiens
  misc_RNA (1)...(19): siRNA sense strand
gagaaugccaguuaacaaa

SEQ ID NO: 1028167 - RNA, 19 nt, Homo sapiens
  misc_RNA (1)...(19): siRNA sense strand
caggcacgcuccuacaaua

SEQ ID NO: 1028168 - RNA, 19 nt, Homo sapiens
  misc_RNA (1)...(19): siRNA sense strand
gaccaugaguuucagauuc

SEQ ID NO: 1028169 - RNA, 19 nt, Homo sapiens
  misc_RNA (1)...(19): siRNA sense strand
ggacaaacacaucucauca

SEQ ID NO: 1028170 - RNA, 19 nt, Homo sapiens
  misc_RNA (1)...(19): siRNA sense strand
aauauggucucaugcgaua

SEQ ID NO: 1028171 - RNA, 19 nt, Homo sapiens
  misc_RNA (1)...(19): siRNA sense strand
gaugcgaccugcaauuuua

SEQ ID NO: 1028172 - RNA, 19 nt, Homo sapiens
  misc_RNA (1)...(19): siRNA sense strand
cagcauuccucacgucauu

SEQ ID NO: 1028173 - RNA, 19 nt, Homo sapiens
  misc_RNA (1)...(19): siRNA sense strand
gggcaguguuggcuuguuu

SEQ ID NO: 1028174 - RNA, 19 nt, Homo sapiens
  misc_RNA (1)...(19): siRNA sense strand
uaucagaagaggucaguua

SEQ ID NO: 1028175 - RNA, 19 nt, Homo sapiens
  misc_RNA (1)...(19): siRNA sense strand
gaucacuguucgggaaaua

SEQ ID NO: 1028176 - RNA, 19 nt, Homo sapiens
  misc_RNA (1)...(19): siRNA sense strand
ccgaaagucugcauccaaa

SEQ ID NO: 1028177 - RNA, 19 nt, Homo sapiens
  misc_RNA (1)...(19): siRNA sense strand
ggugggaggugguuugaug

SEQ ID NO: 1028178 - RNA, 19 nt, Homo sapiens
  misc_RNA (1)...(19): siRNA sense strand
uaagggagggacuaaauaa

SEQ ID NO: 1028179 - RNA, 19 nt, Homo sapiens
  misc_RNA (1)...(19): siRNA sense strand
aaugguggaucaagcaaua

SEQ ID NO: 1028180 - RNA, 19 nt, Homo sapiens
  misc_RNA (1)...(19): siRNA sense strand
ucaacaacuuuaaggauug

SEQ ID NO: 1028181 - RNA, 19 nt, Homo sapiens
  misc_RNA (1)...(19): siRNA sense strand
ggaggugguuugauguuuc

SEQ ID NO: 1028182 - RNA, 19 nt, Homo sapiens
  misc_RNA (1)...(19): siRNA sense strand
aauauucacuggccuauca

SEQ ID NO: 1028183 - RNA, 19 nt, Homo sapiens
  misc_RNA (1)...(19): siRNA sense strand
cggaggaucugauguguca

SEQ ID NO: 1028184 - RNA, 19 nt, Homo sapiens
  misc_RNA (1)...(19): siRNA sense strand
gugguuugauguuucauaa

SEQ ID NO: 1028185 - RNA, 19 nt, Homo sapiens
  misc_RNA (1)...(19): siRNA sense strand
caacuucaucauugucaua

SEQ ID NO: 1028186 - RNA, 19 nt, Homo sapiens
  misc_RNA (1)...(19): siRNA sense strand
ucacuggccuaucagaaga

SEQ ID NO: 1028187 - RNA, 19 nt, Homo sapiens
  misc_RNA (1)...(19): siRNA sense strand
gggacuaaauaaaccagaa

SEQ ID NO: 1028188 - RNA, 19 nt, Homo sapiens
  misc_RNA (1)...(19): siRNA sense strand
gguuugauguuucauaaag

SEQ ID NO: 1028189 - RNA, 19 nt, Homo sapiens
  misc_RNA (1)...(19): siRNA sense strand
gacagaaaaugacgacuuu

SEQ ID NO: 1028190 - RNA, 19 nt, Homo sapiens
  misc_RNA (1)...(19): siRNA sense strand
gaggucaguuaaauauuca

SEQ ID NO: 1028191 - RNA, 19 nt, Homo sapiens
  misc_RNA (1)...(19): siRNA sense strand
agaggucaguuaaauauuc

SEQ ID NO: 1028192 - RNA, 19 nt, Homo sapiens
  misc_RNA (1)...(19): siRNA sense strand
ggacuaaauaaaccagaaa

SEQ ID NO: 1028193 - RNA, 19 nt, Homo sapiens
  misc_RNA (1)...(19): siRNA sense strand
uggaaucguuggacagaaa

SEQ ID NO: 1028194 - RNA, 19 nt, Homo sapiens
  misc_RNA (1)...(19): siRNA sense strand
gggaggugguuugauguuu

SEQ ID NO: 1028195 - RNA, 19 nt, Homo sapiens
  misc_RNA (1)...(19): siRNA sense strand
caagcaauauggucuaaaa

SEQ ID NO: 1028196 - RNA, 19 nt, Homo sapiens
  misc_RNA (1)...(19): siRNA sense strand
gauguccaaugguacaaga

SEQ ID NO: 1028197 - RNA, 19 nt, Homo sapiens
  misc_RNA (1)...(19): siRNA sense strand
guacagcuccauccuagug

SEQ ID NO: 1028198 - RNA, 19 nt, Homo sapiens
  misc_RNA (1)...(19): siRNA sense strand
ccacacagagcaaacaaga

SEQ ID NO: 1028199 - RNA, 19 nt, Homo sapiens
  misc_RNA (1)...(19): siRNA sense strand
gaccagaagacaaguguau

SEQ ID NO: 1028200 - RNA, 19 nt, Homo sapiens
  misc_RNA (1)...(19): siRNA sense strand
ggaaaucccacugaaagau

SEQ ID NO: 1028201 - RNA, 19 nt, Homo sapiens
  misc_RNA (1)...(19): siRNA sense strand
uggcagauauugaaguaau

SEQ ID NO: 1028202 - RNA, 19 nt, Homo sapiens
  misc_RNA (1)...(19): siRNA sense strand
ucaucacccugaguauuua

SEQ ID NO: 1028203 - RNA, 19 nt, Homo sapiens
  misc_RNA (1)...(19): siRNA sense strand
gaacaggcacgcuccuaca

SEQ ID NO: 1028204 - RNA, 19 nt, Homo sapiens
  misc_RNA (1)...(19): siRNA sense strand
caaaauggccuuaaaaugg

SEQ ID NO: 1028205 - RNA, 19 nt, Homo sapiens
  misc_RNA (1)...(19): siRNA sense strand
ggacaucucugggcuucag

SEQ ID NO: 1028206 - RNA, 19 nt, Homo sapiens
  misc_RNA (1)...(19): siRNA sense strand
ccagagcaacuucaucauu

SEQ ID NO: 1028207 - RNA, 19 nt, Homo sapiens
  misc_RNA (1)...(19): siRNA sense strand
uuaagcagcacguguauug

SEQ ID NO: 1028208 - RNA, 19 nt, Homo sapiens
  misc_RNA (1)...(19): siRNA sense strand
gaaagaacuagugaauaug

SEQ ID NO: 1028209 - RNA, 19 nt, Homo sapiens
  misc_RNA (1)...(19): siRNA sense strand
agaagaggucaguuaaaua

SEQ ID NO: 1028210 - RNA, 19 nt, Homo sapiens
  misc_RNA (1)...(19): siRNA sense strand
uauaauaagcagcauguga

SEQ ID NO: 1028211 - RNA, 19 nt, Homo sapiens
  misc_RNA (1)...(19): siRNA sense strand
gaggugguuugauguuuca

SEQ ID NO: 1028212 - RNA, 19 nt, Homo sapiens
  misc_RNA (1)...(19): siRNA sense strand
cuaagggagggacuaaaua

SEQ ID NO: 1028213 - RNA, 19 nt, Homo sapiens
  misc_RNA (1)...(19): siRNA sense strand
gaaauaaguggacaaacac

SEQ ID NO: 1028214 - RNA, 19 nt, Homo sapiens
  misc_RNA (1)...(19): siRNA sense strand
ugucauacauccagguuca

SEQ ID NO: 1028215 - RNA, 19 nt, Homo sapiens
  misc_RNA (1)...(19): siRNA sense strand
gaucaagcaauauggucua

SEQ ID NO: 1028216 - RNA, 19 nt, Homo sapiens
  misc_RNA (1)...(19): siRNA sense strand
gugaaagaacuagugaaua

SEQ ID NO: 1028217 - RNA, 19 nt, Homo sapiens
  misc_RNA (1)...(19): siRNA sense strand
ggaauacucggcuuugucu

SEQ ID NO: 1028218 - RNA, 19 nt, Homo sapiens
  misc_RNA (1)...(19): siRNA sense strand
gagcaaauccagagcaacu

SEQ ID NO: 1028219 - RNA, 19 nt, Homo sapiens
  misc_RNA (1)...(19): siRNA sense strand
gaaaggaggggcaguguug

SEQ ID NO: 1028220 - RNA, 19 nt, Homo sapiens
  misc_RNA (1)...(19): siRNA sense strand
gcaaauccagagcaacuuc

SEQ ID NO: 1028221 - RNA, 19 nt, Homo sapiens
  misc_RNA (1)...(19): siRNA sense strand
gagcaaacaagaacagucu

SEQ ID NO: 1028222 - RNA, 19 nt, Homo sapiens
  misc_RNA (1)...(19): siRNA sense strand
uacagagaaugccaguuaa

SEQ ID NO: 1028223 - RNA, 19 nt, Homo sapiens
  misc_RNA (1)...(19): siRNA sense strand
cagaugcgaccugcaauuu

SEQ ID NO: 1028224 - RNA, 19 nt, Homo sapiens
  misc_RNA (1)...(19): siRNA sense strand
caggaacuguggauuuauc

SEQ ID NO: 1028225 - RNA, 19 nt, Homo sapiens
  misc_RNA (1)...(19): siRNA sense strand
ucacaaggccuaaggacau

SEQ ID NO: 1028226 - RNA, 19 nt, Homo sapiens
  misc_RNA (1)...(19): siRNA sense strand
ccugauaucuauaauaagc

SEQ ID NO: 1028227 - RNA, 19 nt, Homo sapiens
  misc_RNA (1)...(19): siRNA sense strand
gaacuagugaauaugauac

SEQ ID NO: 1028228 - RNA, 19 nt, Homo sapiens
  misc_RNA (1)...(19): siRNA sense strand
auaaagccauccuccauag

SEQ ID NO: 1028229 - RNA, 19 nt, Homo sapiens
  misc_RNA (1)...(19): siRNA sense strand
ggaccaugaguuucagauu

SEQ ID NO: 1028230 - RNA, 19 nt, Homo sapiens
  misc_RNA (1)...(19): siRNA sense strand
cugcaacaccuuaaagaaa

SEQ ID NO: 1028231 - RNA, 19 nt, Homo sapiens
  misc_RNA (1)...(19): siRNA sense strand
cauccagguucaacaacuu

SEQ ID NO: 1028232 - RNA, 19 nt, Homo sapiens
  misc_RNA (1)...(19): siRNA sense strand
gcuuuaccaguuucgauua

SEQ ID NO: 1028233 - RNA, 19 nt, Homo sapiens
  misc_RNA (1)...(19): siRNA sense strand
ucacgucauugcccgaaga

SEQ ID NO: 1028234 - RNA, 19 nt, Homo sapiens
  misc_RNA (1)...(19): siRNA sense strand
gagcuggguucccuuacag

SEQ ID NO: 1028235 - RNA, 19 nt, Homo sapiens
  misc_RNA (1)...(19): siRNA sense strand
aagcagcacguguauugua

SEQ ID NO: 1028236 - RNA, 19 nt, Homo sapiens
  misc_RNA (1)...(19): siRNA sense strand
uaagcagcaugugaaagaa

SEQ ID NO: 1028237 - RNA, 19 nt, Homo sapiens
  misc_RNA (1)...(19): siRNA sense strand
aagaggccuuguauguuaa

SEQ ID NO: 1028238 - RNA, 19 nt, Homo sapiens
  misc_RNA (1)...(19): siRNA sense strand
auaagcagcaugugaaaga

SEQ ID NO: 1028239 - RNA, 19 nt, Homo sapiens
  misc_RNA (1)...(19): siRNA sense strand
auaauaagcagcaugugaa

SEQ ID NO: 1028240 - RNA, 19 nt, Homo sapiens
  misc_RNA (1)...(19): siRNA sense strand
uaauaagcagcaugugaaa

SEQ ID NO: 1028241 - RNA, 19 nt, Homo sapiens
  misc_RNA (1)...(19): siRNA sense strand
ucugaugugucaagauguu

SEQ ID NO: 1028242 - RNA, 19 nt, Homo sapiens
  misc_RNA (1)...(19): siRNA sense strand
gaaaguaaugaacaaagac

SEQ ID NO: 1028243 - RNA, 19 nt, Homo sapiens
  misc_RNA (1)...(19): siRNA sense strand
ggcccucacugcacugaug

SEQ ID NO: 1028244 - RNA, 19 nt, Homo sapiens
  misc_RNA (1)...(19): siRNA sense strand
cagauucgacauccugauu

SEQ ID NO: 1028245 - RNA, 19 nt, Homo sapiens
  misc_RNA (1)...(19): siRNA sense strand
ucauuuagaucaggacauc

SEQ ID NO: 1028246 - RNA, 19 nt, Homo sapiens
  misc_RNA (1)...(19): siRNA sense strand
gcaacaccuuaaagaaacu

SEQ ID NO: 1028247 - RNA, 19 nt, Homo sapiens
  misc_RNA (1)...(19): siRNA sense strand
uggguucccuuacagagaa

SEQ ID NO: 1028248 - RNA, 19 nt, Homo sapiens
  misc_RNA (1)...(19): siRNA sense strand
caacaacuuuaaggauugg

SEQ ID NO: 1028249 - RNA, 19 nt, Homo sapiens
  misc_RNA (1)...(19): siRNA sense strand
ggagaagaggccuuguaug

SEQ ID NO: 1028250 - RNA, 19 nt, Homo sapiens
  misc_RNA (1)...(19): siRNA sense strand
ccacugaaagauuuaaagu

SEQ ID NO: 1028251 - RNA, 19 nt, Homo sapiens
  misc_RNA (1)...(19): siRNA sense strand
ucagaagaggucaguuaaa

SEQ ID NO: 1028252 - RNA, 19 nt, Homo sapiens
  misc_RNA (1)...(19): siRNA sense strand
agacugccaucucgcuguu

SEQ ID NO: 1028253 - RNA, 19 nt, Homo sapiens
  misc_RNA (1)...(19): siRNA sense strand
ggucagagccucccuauga

SEQ ID NO: 1028254 - RNA, 19 nt, Homo sapiens
  misc_RNA (1)...(19): siRNA sense strand
gaacuacaccuacauuugg

SEQ ID NO: 1028255 - RNA, 19 nt, Homo sapiens
  misc_RNA (1)...(19): siRNA sense strand
cauggaggcugugagcuua

SEQ ID NO: 1028256 - RNA, 19 nt, Homo sapiens
  misc_RNA (1)...(19): siRNA sense strand
gaaacaggacccuaucaau

SEQ ID NO: 1028257 - RNA, 19 nt, Homo sapiens
  misc_RNA (1)...(19): siRNA sense strand
aaacaggacccuaucaaug

SEQ ID NO: 1028258 - RNA, 19 nt, Homo sapiens
  misc_RNA (1)...(19): siRNA sense strand
ggaccucuaccauuacauu

SEQ ID NO: 1028259 - RNA, 19 nt, Homo sapiens
  misc_RNA (1)...(19): siRNA sense strand
cgcaggauccuacaccuua

SEQ ID NO: 1028260 - RNA, 19 nt, Homo sapiens
  misc_RNA (1)...(19): siRNA sense strand
acccuucauucaccuauua

SEQ ID NO: 1028261 - RNA, 19 nt, Homo sapiens
  misc_RNA (1)...(19): siRNA sense strand
gaccucuaccauuacauua

SEQ ID NO: 1028262 - RNA, 19 nt, Homo sapiens
  misc_RNA (1)...(19): siRNA sense strand
gaaagcuccaaauccauga

SEQ ID NO: 1028263 - RNA, 19 nt, Homo sapiens
  misc_RNA (1)...(19): siRNA sense strand
gaaaacaggauccucauuc

SEQ ID NO: 1028264 - RNA, 19 nt, Homo sapiens
  misc_RNA (1)...(19): siRNA sense strand
caagcuaccugugguggau

SEQ ID NO: 1028265 - RNA, 19 nt, Homo sapiens
  misc_RNA (1)...(19): siRNA sense strand
aaacaggauccucauucua

SEQ ID NO: 1028266 - RNA, 19 nt, Homo sapiens
  misc_RNA (1)...(19): siRNA sense strand
caucaccaucaacaacuua

SEQ ID NO: 1028267 - RNA, 19 nt, Homo sapiens
  misc_RNA (1)...(19): siRNA sense strand
agaacuacaccuacauuug

SEQ ID NO: 1028268 - RNA, 19 nt, Homo sapiens
  misc_RNA (1)...(19): siRNA sense strand
ccagggagaauaaggaugu

SEQ ID NO: 1028269 - RNA, 19 nt, Homo sapiens
  misc_RNA (1)...(19): siRNA sense strand
ccucuaccauuacauuaca

SEQ ID NO: 1028270 - RNA, 19 nt, Homo sapiens
  misc_RNA (1)...(19): siRNA sense strand
ggcuacaucugguacaaag

SEQ ID NO: 1028271 - RNA, 19 nt, Homo sapiens
  misc_RNA (1)...(19): siRNA sense strand
cagcaucguuggcaauagg

SEQ ID NO: 1028272 - RNA, 19 nt, Homo sapiens
  misc_RNA (1)...(19): siRNA sense strand
ugaaacaggacccuaucaa

SEQ ID NO: 1028273 - RNA, 19 nt, Homo sapiens
  misc_RNA (1)...(19): siRNA sense strand
caucccugcugauccagaa

SEQ ID NO: 1028274 - RNA, 19 nt, Homo sapiens
  misc_RNA (1)...(19): siRNA sense strand
gcaggauccuacaccuuac

SEQ ID NO: 1028275 - RNA, 19 nt, Homo sapiens
  misc_RNA (1)...(19): siRNA sense strand
caucuccagcagcaacuua

SEQ ID NO: 1028276 - RNA, 19 nt, Homo sapiens
  misc_RNA (1)...(19): siRNA sense strand
aacaggacccuaucaaugu

SEQ ID NO: 1028277 - RNA, 19 nt, Homo sapiens
  misc_RNA (1)...(19): siRNA sense strand
aaaugaaacaggacccuau

SEQ ID NO: 1028278 - RNA, 19 nt, Homo sapiens
  misc_RNA (1)...(19): siRNA sense strand
acaggacccuaucaaugug

SEQ ID NO: 1028279 - RNA, 19 nt, Homo sapiens
  misc_RNA (1)...(19): siRNA sense strand
gauccuacaccuuacacau

SEQ ID NO: 1028280 - RNA, 19 nt, Homo sapiens
  misc_RNA (1)...(19): siRNA sense strand
uaccugugguggaugaaug

SEQ ID NO: 1028281 - RNA, 19 nt, Homo sapiens
  misc_RNA (1)...(19): siRNA sense strand
ccauggaggcugugagcuu

SEQ ID NO: 1028282 - RNA, 19 nt, Homo sapiens
  misc_RNA (1)...(19): siRNA sense strand
gucgaagucucugguaagu

SEQ ID NO: 1028283 - RNA, 19 nt, Homo sapiens
  misc_RNA (1)...(19): siRNA sense strand
gggagaauaaggaugucuu

SEQ ID NO: 1028284 - RNA, 19 nt, Homo sapiens
  misc_RNA (1)...(19): siRNA sense strand
ccagaccuccccagaauuu

SEQ ID NO: 1028285 - RNA, 19 nt, Homo sapiens
  misc_RNA (1)...(19): siRNA sense strand
ccuguucugcggacucuaa

SEQ ID NO: 1028286 - RNA, 19 nt, Homo sapiens
  misc_RNA (1)...(19): siRNA sense strand
cuacaucaccaucaacaac

SEQ ID NO: 1028287 - RNA, 19 nt, Homo sapiens
  misc_RNA (1)...(19): siRNA sense strand
guccagaccuccccagaau

SEQ ID NO: 1028288 - RNA, 19 nt, Homo sapiens
  misc_RNA (1)...(19): siRNA sense strand
acaucaccaucaacaacuu

SEQ ID NO: 1028289 - RNA, 19 nt, Homo sapiens
  misc_RNA (1)...(19): siRNA sense strand
gaagacaguuggccucuac

SEQ ID NO: 1028290 - RNA, 19 nt, Homo sapiens
  misc_RNA (1)...(19): siRNA sense strand
ggaagcaguucuacaagca

SEQ ID NO: 1028291 - RNA, 19 nt, Homo sapiens
  misc_RNA (1)...(19): siRNA sense strand
ggagaaagacgccaaccaa

SEQ ID NO: 1028292 - RNA, 19 nt, Homo sapiens
  misc_RNA (1)...(19): siRNA sense strand
ugaacaacauccucaaguu

SEQ ID NO: 1028293 - RNA, 19 nt, Homo sapiens
  misc_RNA (1)...(19): siRNA sense strand
aggacgagaugcuaaauuu

SEQ ID NO: 1028294 - RNA, 19 nt, Homo sapiens
  misc_RNA (1)...(19): siRNA sense strand
gcaggaggaugacaaacuc

SEQ ID NO: 1028295 - RNA, 19 nt, Homo sapiens
  misc_RNA (1)...(19): siRNA sense strand
cagagaaugucaccaaugg

SEQ ID NO: 1028296 - RNA, 19 nt, Homo sapiens
  misc_RNA (1)...(19): siRNA sense strand
gacaaacucuuccucaaaa

SEQ ID NO: 1028297 - RNA, 19 nt, Homo sapiens
  misc_RNA (1)...(19): siRNA sense strand
caaccugccucuccagauc

SEQ ID NO: 1028298 - RNA, 19 nt, Homo sapiens
  misc_RNA (1)...(19): siRNA sense strand
ugacaaacucuuccucaaa

SEQ ID NO: 1028299 - RNA, 19 nt, Homo sapiens
  misc_RNA (1)...(19): siRNA sense strand
guaccgagccagagaaugu

SEQ ID NO: 1028300 - RNA, 19 nt, Homo sapiens
  misc_RNA (1)...(19): siRNA sense strand
ggaaucaagcucaucuaug

SEQ ID NO: 1028301 - RNA, 19 nt, Homo sapiens
  misc_RNA (1)...(19): siRNA sense strand
uuuauugccuugaugauug

SEQ ID NO: 1028302 - RNA, 19 nt, Homo sapiens
  misc_RNA (1)...(19): siRNA sense strand
caaccaaggcgagaagaaa

SEQ ID NO: 1028303 - RNA, 19 nt, Homo sapiens
  misc_RNA (1)...(19): siRNA sense strand
ggacgagaugcuaaauuug

SEQ ID NO: 1028304 - RNA, 19 nt, Homo sapiens
  misc_RNA (1)...(19): siRNA sense strand
uuccucaacugcuucuuua

SEQ ID NO: 1028305 - RNA, 19 nt, Homo sapiens
  misc_RNA (1)...(19): siRNA sense strand
gaccuucaccucauuaaca

SEQ ID NO: 1028306 - RNA, 19 nt, Homo sapiens
  misc_RNA (1)...(19): siRNA sense strand
ucacagggaagcaguucua

SEQ ID NO: 1028307 - RNA, 19 nt, Homo sapiens
  misc_RNA (1)...(19): siRNA sense strand
guaucgucauggacaagua

SEQ ID NO: 1028308 - RNA, 19 nt, Homo sapiens
  misc_RNA (1)...(19): siRNA sense strand
cagggaagcaguucuacaa

SEQ ID NO: 1028309 - RNA, 19 nt, Homo sapiens
  misc_RNA (1)...(19): siRNA sense strand
cauuaacacugcccaacau

SEQ ID NO: 1028310 - RNA, 19 nt, Homo sapiens
  misc_RNA (1)...(19): siRNA sense strand
uaaauuuggccuucacugu

SEQ ID NO: 1028311 - RNA, 19 nt, Homo sapiens
  misc_RNA (1)...(19): siRNA sense strand
guacggagcaaguaaacca

SEQ ID NO: 1028312 - RNA, 19 nt, Homo sapiens
  misc_RNA (1)...(19): siRNA sense strand
ccaggaggccuucguguag

SEQ ID NO: 1028313 - RNA, 19 nt, Homo sapiens
  misc_RNA (1)...(19): siRNA sense strand
ccacguuuauugccuugau

SEQ ID NO: 1028314 - RNA, 19 nt, Homo sapiens
  misc_RNA (1)...(19): siRNA sense strand
gaggaggugagcuggauga

SEQ ID NO: 1028315 - RNA, 19 nt, Homo sapiens
  misc_RNA (1)...(19): siRNA sense strand
gacgagaugcuaaauuugg

SEQ ID NO: 1028316 - RNA, 19 nt, Homo sapiens
  misc_RNA (1)...(19): siRNA sense strand
gcucaagucagagggcuuu

SEQ ID NO: 1028317 - RNA, 19 nt, Homo sapiens
  misc_RNA (1)...(19): siRNA sense strand
caacauguucggcgaccuu

SEQ ID NO: 1028318 - RNA, 19 nt, Homo sapiens
  misc_RNA (1)...(19): siRNA sense strand
uccagaagaucacuaaugc

SEQ ID NO: 1028319 - RNA, 19 nt, Homo sapiens
  misc_RNA (1)...(19): siRNA sense strand
ucaucaugcucaagucaga

SEQ ID NO: 1028320 - RNA, 19 nt, Homo sapiens
  misc_RNA (1)...(19): siRNA sense strand
gccagagaaugucaccaau

SEQ ID NO: 1028321 - RNA, 19 nt, Homo sapiens
  misc_RNA (1)...(19): siRNA sense strand
ggacuacucggugaagauc

SEQ ID NO: 1028322 - RNA, 19 nt, Homo sapiens
  misc_RNA (1)...(19): siRNA sense strand
ggaggaugacaaacucuuc

SEQ ID NO: 1028323 - RNA, 19 nt, Homo sapiens
  misc_RNA (1)...(19): siRNA sense strand
ccagagaaugucaccaaug

SEQ ID NO: 1028324 - RNA, 19 nt, Homo sapiens
  misc_RNA (1)...(19): siRNA sense strand
ucaacugcuucuuuaacug

SEQ ID NO: 1028325 - RNA, 19 nt, Homo sapiens
  misc_RNA (1)...(19): siRNA sense strand
gaggcaggaggaugacaaa

SEQ ID NO: 1028326 - RNA, 19 nt, Homo sapiens
  misc_RNA (1)...(19): siRNA sense strand
ggccggaggacauggacua

SEQ ID NO: 1028327 - RNA, 19 nt, Homo sapiens
  misc_RNA (1)...(19): siRNA sense strand
cggaggacauggacuacuc

SEQ ID NO: 1028328 - RNA, 19 nt, Homo sapiens
  misc_RNA (1)...(19): siRNA sense strand
ccucuacaccuccaucuuc

SEQ ID NO: 1028329 - RNA, 19 nt, Homo sapiens
  misc_RNA (1)...(19): siRNA sense strand
ggggugaccugccucauuc

SEQ ID NO: 1028330 - RNA, 19 nt, Homo sapiens
  misc_RNA (1)...(19): siRNA sense strand
gcccaggacgagaugcuaa

SEQ ID NO: 1028331 - RNA, 19 nt, Homo sapiens
  misc_RNA (1)...(19): siRNA sense strand
agaagacaguuggccucua

SEQ ID NO: 1028332 - RNA, 19 nt, Homo sapiens
  misc_RNA (1)...(19): siRNA sense strand
acaaguauggcccgaggaa

SEQ ID NO: 1028333 - RNA, 19 nt, Homo sapiens
  misc_RNA (1)...(19): siRNA sense strand
gcucaucaugcucaaguca

SEQ ID NO: 1028334 - RNA, 19 nt, Homo sapiens
  misc_RNA (1)...(19): siRNA sense strand
gcuucugccucccgcucua

SEQ ID NO: 1028335 - RNA, 19 nt, Homo sapiens
  misc_RNA (1)...(19): siRNA sense strand
cgaggagcccgaggagaaa

SEQ ID NO: 1028336 - RNA, 19 nt, Homo sapiens
  misc_RNA (1)...(19): siRNA sense strand
ggaggcugaaggaguguga

SEQ ID NO: 1028337 - RNA, 19 nt, Homo sapiens
  misc_RNA (1)...(19): siRNA sense strand
cgucauuggcuacaucaug

SEQ ID NO: 1028338 - RNA, 19 nt, Homo sapiens
  misc_RNA (1)...(19): siRNA sense strand
gaucacagggaagcaguuc

SEQ ID NO: 1028339 - RNA, 19 nt, Homo sapiens
  misc_RNA (1)...(19): siRNA sense strand
caggacgagaugcuaaauu

SEQ ID NO: 1028340 - RNA, 19 nt, Homo sapiens
  misc_RNA (1)...(19): siRNA sense strand
ccaaccaaggcgagaagaa

SEQ ID NO: 1028341 - RNA, 19 nt, Homo sapiens
  misc_RNA (1)...(19): siRNA sense strand
ggauguguaugaccuucac

SEQ ID NO: 1028342 - RNA, 19 nt, Homo sapiens
  misc_RNA (1)...(19): siRNA sense strand
cgcucuaccugaucugcua

SEQ ID NO: 1028343 - RNA, 19 nt, Homo sapiens
  misc_RNA (1)...(19): siRNA sense strand
guuuauugccuugaugauu

SEQ ID NO: 1028344 - RNA, 19 nt, Homo sapiens
  misc_RNA (1)...(19): siRNA sense strand
gcuucgcgguuuccugcuu

SEQ ID NO: 1028345 - RNA, 19 nt, Homo sapiens
  misc_RNA (1)...(19): siRNA sense strand
gggcuuugaccacaagauc

SEQ ID NO: 1028346 - RNA, 19 nt, Homo sapiens
  misc_RNA (1)...(19): siRNA sense strand
ucaucgcccuggcucugaa

SEQ ID NO: 1028347 - RNA, 19 nt, Homo sapiens
  misc_RNA (1)...(19): siRNA sense strand
gcugggcuuugaccacaag

SEQ ID NO: 1028348 - RNA, 19 nt, Homo sapiens
  misc_RNA (1)...(19): siRNA sense strand
acuacucggugaagaucaa

SEQ ID NO: 1028349 - RNA, 19 nt, Homo sapiens
  misc_RNA (1)...(19): siRNA sense strand
ggacagauaugaagaguuu

SEQ ID NO: 1028350 - RNA, 19 nt, Homo sapiens
  misc_RNA (1)...(19): siRNA sense strand
gcaaguccauucaugucua

SEQ ID NO: 1028351 - RNA, 19 nt, Homo sapiens
  misc_RNA (1)...(19): siRNA sense strand
uacaggagcugaaggcuuu

SEQ ID NO: 1028352 - RNA, 19 nt, Homo sapiens
  misc_RNA (1)...(19): siRNA sense strand
gaaaagacuuguagccaaa

SEQ ID NO: 1028353 - RNA, 19 nt, Homo sapiens
  misc_RNA (1)...(19): siRNA sense strand
ugaaagagcagcuuaguca

SEQ ID NO: 1028354 - RNA, 19 nt, Homo sapiens
  misc_RNA (1)...(19): siRNA sense strand
gagaacaggcgucuagcua

SEQ ID NO: 1028355 - RNA, 19 nt, Homo sapiens
  misc_RNA (1)...(19): siRNA sense strand
gaccagagacagagaugua

SEQ ID NO: 1028356 - RNA, 19 nt, Homo sapiens
  misc_RNA (1)...(19): siRNA sense strand
gaacaggcgucuagcuacu

SEQ ID NO: 1028357 - RNA, 19 nt, Homo sapiens
  misc_RNA (1)...(19): siRNA sense strand
gacagaggcugagaaagug

SEQ ID NO: 1028358 - RNA, 19 nt, Homo sapiens
  misc_RNA (1)...(19): siRNA sense strand
gcagcuugauggccuagaa

SEQ ID NO: 1028359 - RNA, 19 nt, Homo sapiens
  misc_RNA (1)...(19): siRNA sense strand
ugacagaggcugagaaagu

SEQ ID NO: 1028360 - RNA, 19 nt, Homo sapiens
  misc_RNA (1)...(19): siRNA sense strand
ggaggacagucaguacuug

SEQ ID NO: 1028361 - RNA, 19 nt, Homo sapiens
  misc_RNA (1)...(19): siRNA sense strand
caacaggaacaccaucuau

SEQ ID NO: 1028362 - RNA, 19 nt, Homo sapiens
  misc_RNA (1)...(19): siRNA sense strand
agauguagauguccuuuca

SEQ ID NO: 1028363 - RNA, 19 nt, Homo sapiens
  misc_RNA (1)...(19): siRNA sense strand
gcacagcauucagcaacga

SEQ ID NO: 1028364 - RNA, 19 nt, Homo sapiens
  misc_RNA (1)...(19): siRNA sense strand
gggcugagaggaccaagaa

SEQ ID NO: 1028365 - RNA, 19 nt, Homo sapiens
  misc_RNA (1)...(19): siRNA sense strand
gggaaagucaugagaagga

SEQ ID NO: 1028366 - RNA, 19 nt, Homo sapiens
  misc_RNA (1)...(19): siRNA sense strand
ccaggcaaguccauucaug

SEQ ID NO: 1028367 - RNA, 19 nt, Homo sapiens
  misc_RNA (1)...(19): siRNA sense strand
ccaagaggccauucgagaa

SEQ ID NO: 1028368 - RNA, 19 nt, Homo sapiens
  misc_RNA (1)...(19): siRNA sense strand
aaagagcagcuuagucauu

SEQ ID NO: 1028369 - RNA, 19 nt, Homo sapiens
  misc_RNA (1)...(19): siRNA sense strand
caagaacuggucccucauu

SEQ ID NO: 1028370 - RNA, 19 nt, Homo sapiens
  misc_RNA (1)...(19): siRNA sense strand
gcgggaaagucaugagaag

SEQ ID NO: 1028371 - RNA, 19 nt, Homo sapiens
  misc_RNA (1)...(19): siRNA sense strand
aagagcagcuuagucauuc

SEQ ID NO: 1028372 - RNA, 19 nt, Homo sapiens
  misc_RNA (1)...(19): siRNA sense strand
ggacagucaguacuuggaa

SEQ ID NO: 1028373 - RNA, 19 nt, Homo sapiens
  misc_RNA (1)...(19): siRNA sense strand
ggugacagaggcugagaaa

SEQ ID NO: 1028374 - RNA, 19 nt, Homo sapiens
  misc_RNA (1)...(19): siRNA sense strand
caaguccauucaugucuag

SEQ ID NO: 1028375 - RNA, 19 nt, Homo sapiens
  misc_RNA (1)...(19): siRNA sense strand
gcacccuggucaccugugu

SEQ ID NO: 1028376 - RNA, 19 nt, Homo sapiens
  misc_RNA (1)...(19): siRNA sense strand
gcuauucaaagccagcuaa

SEQ ID NO: 1028377 - RNA, 19 nt, Homo sapiens
  misc_RNA (1)...(19): siRNA sense strand
aagaacuggucccucauug

SEQ ID NO: 1028378 - RNA, 19 nt, Homo sapiens
  misc_RNA (1)...(19): siRNA sense strand
ccaaauggcuggggugguu

SEQ ID NO: 1028379 - RNA, 19 nt, Homo sapiens
  misc_RNA (1)...(19): siRNA sense strand
agacuuggugggacagaua

SEQ ID NO: 1028380 - RNA, 19 nt, Homo sapiens
  misc_RNA (1)...(19): siRNA sense strand
gggaggacagucaguacuu

SEQ ID NO: 1028381 - RNA, 19 nt, Homo sapiens
  misc_RNA (1)...(19): siRNA sense strand
acaggaacaccaucuauag

SEQ ID NO: 1028382 - RNA, 19 nt, Homo sapiens
  misc_RNA (1)...(19): siRNA sense strand
aacaggaacaccaucuaua

SEQ ID NO: 1028383 - RNA, 19 nt, Homo sapiens
  misc_RNA (1)...(19): siRNA sense strand
gaaagagcagcuuagucau

SEQ ID NO: 1028384 - RNA, 19 nt, Homo sapiens
  misc_RNA (1)...(19): siRNA sense strand
aaagacuuguagccaaaug

SEQ ID NO: 1028385 - RNA, 19 nt, Homo sapiens
  misc_RNA (1)...(19): siRNA sense strand
ccagggaggacagucagua

SEQ ID NO: 1028386 - RNA, 19 nt, Homo sapiens
  misc_RNA (1)...(19): siRNA sense strand
gcucuacaugcuauucaaa

SEQ ID NO: 1028387 - RNA, 19 nt, Homo sapiens
  misc_RNA (1)...(19): siRNA sense strand
gagaggcucgggaggacuu

SEQ ID NO: 1028388 - RNA, 19 nt, Homo sapiens
  misc_RNA (1)...(19): siRNA sense strand
ugguucagcuuguaaaguc

SEQ ID NO: 1028389 - RNA, 19 nt, Homo sapiens
  misc_RNA (1)...(19): siRNA sense strand
ggaccuccacaaucucaug

SEQ ID NO: 1028390 - RNA, 19 nt, Homo sapiens
  misc_RNA (1)...(19): siRNA sense strand
ccugugcucuacaugcuau

SEQ ID NO: 1028391 - RNA, 19 nt, Homo sapiens
  misc_RNA (1)...(19): siRNA sense strand
caagaggccauucgagaac

SEQ ID NO: 1028392 - RNA, 19 nt, Homo sapiens
  misc_RNA (1)...(19): siRNA sense strand
ucaacaggaacaccaucua

SEQ ID NO: 1028393 - RNA, 19 nt, Homo sapiens
  misc_RNA (1)...(19): siRNA sense strand
caagccagcccggagagaa

SEQ ID NO: 1028394 - RNA, 19 nt, Homo sapiens
  misc_RNA (1)...(19): siRNA sense strand
aagcccaagucaacaggaa

SEQ ID NO: 1028395 - RNA, 19 nt, Homo sapiens
  misc_RNA (1)...(19): siRNA sense strand
cugagaaaguguucauggu

SEQ ID NO: 1028396 - RNA, 19 nt, Homo sapiens
  misc_RNA (1)...(19): siRNA sense strand
gagacagagauguagaugu

SEQ ID NO: 1028397 - RNA, 19 nt, Homo sapiens
  misc_RNA (1)...(19): siRNA sense strand
ccagagacagagauguaga

SEQ ID NO: 1028398 - RNA, 19 nt, Homo sapiens
  misc_RNA (1)...(19): siRNA sense strand
gcugagaggaccaagaacu

SEQ ID NO: 1028399 - RNA, 19 nt, Homo sapiens
  misc_RNA (1)...(19): siRNA sense strand
acacggagcagagacuaga

SEQ ID NO: 1028400 - RNA, 19 nt, Homo sapiens
  misc_RNA (1)...(19): siRNA sense strand
guccauucaugucuagaag

SEQ ID NO: 1028401 - RNA, 19 nt, Homo sapiens
  misc_RNA (1)...(19): siRNA sense strand
cagcugugcgggaaaguca

SEQ ID NO: 1028402 - RNA, 19 nt, Homo sapiens
  misc_RNA (1)...(19): siRNA sense strand
acagauaugaagaguuugu

SEQ ID NO: 1028403 - RNA, 19 nt, Homo sapiens
  misc_RNA (1)...(19): siRNA sense strand
gaauuccaguggccucauu

SEQ ID NO: 1028404 - RNA, 19 nt, Homo sapiens
  misc_RNA (1)...(19): siRNA sense strand
gccagaaccugacuuaaac

SEQ ID NO: 1028405 - RNA, 19 nt, Homo sapiens
  misc_RNA (1)...(19): siRNA sense strand
ggccggacaugguacauuc

SEQ ID NO: 1028406 - RNA, 19 nt, Homo sapiens
  misc_RNA (1)...(19): siRNA sense strand
ggacaugguacauucuuuc

SEQ ID NO: 1028407 - RNA, 19 nt, Homo sapiens
  misc_RNA (1)...(19): siRNA sense strand
gugacaaagacgagcauua

SEQ ID NO: 1028408 - RNA, 19 nt, Homo sapiens
  misc_RNA (1)...(19): siRNA sense strand
gagcauuaccggaccuaug

SEQ ID NO: 1028409 - RNA, 19 nt, Homo sapiens
  misc_RNA (1)...(19): siRNA sense strand
gagauccucaacauacgua

SEQ ID NO: 1028410 - RNA, 19 nt, Homo sapiens
  misc_RNA (1)...(19): siRNA sense strand
cuacaagcgugacaaagac

SEQ ID NO: 1028411 - RNA, 19 nt, Homo sapiens
  misc_RNA (1)...(19): siRNA sense strand
uaugaugccuacuccacuu

SEQ ID NO: 1028412 - RNA, 19 nt, Homo sapiens
  misc_RNA (1)...(19): siRNA sense strand
caugguacauucuuucacu

SEQ ID NO: 1028413 - RNA, 19 nt, Homo sapiens
  misc_RNA (1)...(19): siRNA sense strand
acugaugccuucacacuca

SEQ ID NO: 1028414 - RNA, 19 nt, Homo sapiens
  misc_RNA (1)...(19): siRNA sense strand
ugacaaagacgagcauuac

SEQ ID NO: 1028415 - RNA, 19 nt, Homo sapiens
  misc_RNA (1)...(19): siRNA sense strand
cccaagcucuuccuucagu

SEQ ID NO: 1028416 - RNA, 19 nt, Homo sapiens
  misc_RNA (1)...(19): siRNA sense strand
agccagaaccugacuuaaa

SEQ ID NO: 1028417 - RNA, 19 nt, Homo sapiens
  misc_RNA (1)...(19): siRNA sense strand
ucuacaagcgugacaaaga

SEQ ID NO: 1028418 - RNA, 19 nt, Homo sapiens
  misc_RNA (1)...(19): siRNA sense strand
uaugagagacugagacaag

SEQ ID NO: 1028419 - RNA, 19 nt, Homo sapiens
  misc_RNA (1)...(19): siRNA sense strand
caacgccugugaagaagcu

SEQ ID NO: 1028420 - RNA, 19 nt, Homo sapiens
  misc_RNA (1)...(19): siRNA sense strand
gaggaacaucugucuguca

SEQ ID NO: 1028421 - RNA, 19 nt, Homo sapiens
  misc_RNA (1)...(19): siRNA sense strand
cggacaugguacauucuuu

SEQ ID NO: 1028422 - RNA, 19 nt, Homo sapiens
  misc_RNA (1)...(19): siRNA sense strand
cuccaacgccugugaagaa

SEQ ID NO: 1028423 - RNA, 19 nt, Homo sapiens
  misc_RNA (1)...(19): siRNA sense strand
agagccagaaccugacuua

SEQ ID NO: 1028424 - RNA, 19 nt, Homo sapiens
  misc_RNA (1)...(19): siRNA sense strand
gacaugguacauucuuuca

SEQ ID NO: 1028425 - RNA, 19 nt, Homo sapiens
  misc_RNA (1)...(19): siRNA sense strand
aaacugaugccuucacacu

SEQ ID NO: 1028426 - RNA, 19 nt, Homo sapiens
  misc_RNA (1)...(19): siRNA sense strand
ggaccuaugaugccuacuc

SEQ ID NO: 1028427 - RNA, 19 nt, Homo sapiens
  misc_RNA (1)...(19): siRNA sense strand
guucuacaagcgugacaaa

SEQ ID NO: 1028428 - RNA, 19 nt, Homo sapiens
  misc_RNA (1)...(19): siRNA sense strand
gagccagaaccugacuuaa

SEQ ID NO: 1028429 - RNA, 19 nt, Homo sapiens
  misc_RNA (1)...(19): siRNA sense strand
auaaacugaugccuucaca

SEQ ID NO: 1028430 - RNA, 19 nt, Homo sapiens
  misc_RNA (1)...(19): siRNA sense strand
gccaucgucuagauaaacu

SEQ ID NO: 1028431 - RNA, 19 nt, Homo sapiens
  misc_RNA (1)...(19): siRNA sense strand
agcauuaccggaccuauga

SEQ ID NO: 1028432 - RNA, 19 nt, Homo sapiens
  misc_RNA (1)...(19): siRNA sense strand
aggaacaucugucugucau

SEQ ID NO: 1028433 - RNA, 19 nt, Homo sapiens
  misc_RNA (1)...(19): siRNA sense strand
caucgucuagauaaacuga

SEQ ID NO: 1028434 - RNA, 19 nt, Homo sapiens
  misc_RNA (1)...(19): siRNA sense strand
uucccaagcucuuccuuca

SEQ ID NO: 1028435 - RNA, 19 nt, Homo sapiens
  misc_RNA (1)...(19): siRNA sense strand
acuuaaaccuguguuccaa

SEQ ID NO: 1028436 - RNA, 19 nt, Homo sapiens
  misc_RNA (1)...(19): siRNA sense strand
agaagaagcuccugaguaa

SEQ ID NO: 1028437 - RNA, 19 nt, Homo sapiens
  misc_RNA (1)...(19): siRNA sense strand
gcagugaggugcuggauga

SEQ ID NO: 1028438 - RNA, 19 nt, Homo sapiens
  misc_RNA (1)...(19): siRNA sense strand
gcaaggaggcccagaagau

SEQ ID NO: 1028439 - RNA, 19 nt, Homo sapiens
  misc_RNA (1)...(19): siRNA sense strand
cagaagaagcuccugagua

SEQ ID NO: 1028440 - RNA, 19 nt, Homo sapiens
  misc_RNA (1)...(19): siRNA sense strand
ugaguaagauggcguccaa

SEQ ID NO: 1028441 - RNA, 19 nt, Homo sapiens
  misc_RNA (1)...(19): siRNA sense strand
cccagaagaugcucaagaa

SEQ ID NO: 1028442 - RNA, 19 nt, Homo sapiens
  misc_RNA (1)...(19): siRNA sense strand
aagaagcuccugaguaaga

SEQ ID NO: 1028443 - RNA, 19 nt, Homo sapiens
  misc_RNA (1)...(19): siRNA sense strand
caaggaggcccagaagaug

SEQ ID NO: 1028444 - RNA, 19 nt, Homo sapiens
  misc_RNA (1)...(19): siRNA sense strand
gcccagaagaugcucaaga

SEQ ID NO: 1028445 - RNA, 19 nt, Homo sapiens
  misc_RNA (1)...(19): siRNA sense strand
gcagaagaagcuccugagu

SEQ ID NO: 1028446 - RNA, 19 nt, Homo sapiens
  misc_RNA (1)...(19): siRNA sense strand
uggccgugcugguggauga

SEQ ID NO: 1028447 - RNA, 19 nt, Homo sapiens
  misc_RNA (1)...(19): siRNA sense strand
agaagaugcucaagaaccu

SEQ ID NO: 1028448 - RNA, 19 nt, Homo sapiens
  misc_RNA (1)...(19): siRNA sense strand
ccacguguucggccaccua

SEQ ID NO: 1028449 - RNA, 19 nt, Homo sapiens
  misc_RNA (1)...(19): siRNA sense strand
ccgcaucaaccacguguuc

SEQ ID NO: 1028450 - RNA, 19 nt, Homo sapiens
  misc_RNA (1)...(19): siRNA sense strand
gaagaagcuccugaguaag

SEQ ID NO: 1028451 - RNA, 19 nt, Homo sapiens
  misc_RNA (1)...(19): siRNA sense strand
gaucccagcuccugacaaa

SEQ ID NO: 1028452 - RNA, 19 nt, Homo sapiens
  misc_RNA (1)...(19): siRNA sense strand
gaugaaauguacccuaguu

SEQ ID NO: 1028453 - RNA, 19 nt, Homo sapiens
  misc_RNA (1)...(19): siRNA sense strand
gagaagacccucacucuag

SEQ ID NO: 1028454 - RNA, 19 nt, Homo sapiens
  misc_RNA (1)...(19): siRNA sense strand
gaaauguacccuaguuaga

SEQ ID NO: 1028455 - RNA, 19 nt, Homo sapiens
  misc_RNA (1)...(19): siRNA sense strand
gaucccggcuccugacaaa

SEQ ID NO: 1028456 - RNA, 19 nt, Homo sapiens
  misc_RNA (1)...(19): siRNA sense strand
gauaaagucccuaauccaa

SEQ ID NO: 1028457 - RNA, 19 nt, Homo sapiens
  misc_RNA (1)...(19): siRNA sense strand
gaaggucaaguacuuugua

SEQ ID NO: 1028458 - RNA, 19 nt, Homo sapiens
  misc_RNA (1)...(19): siRNA sense strand
caccagagaugacauucaa

SEQ ID NO: 1028459 - RNA, 19 nt, Homo sapiens
  misc_RNA (1)...(19): siRNA sense strand
gggaguggcuuccaaagag

SEQ ID NO: 1028460 - RNA, 19 nt, Homo sapiens
  misc_RNA (1)...(19): siRNA sense strand
gagaugacauucaauucca

SEQ ID NO: 1028461 - RNA, 19 nt, Homo sapiens
  misc_RNA (1)...(19): siRNA sense strand
uaaagucccuaauccaaag

SEQ ID NO: 1028462 - RNA, 19 nt, Homo sapiens
  misc_RNA (1)...(19): siRNA sense strand
ccagagaugacauucaauu

SEQ ID NO: 1028463 - RNA, 19 nt, Homo sapiens
  misc_RNA (1)...(19): siRNA sense strand
ccaaagaggauccaucauc

SEQ ID NO: 1028464 - RNA, 19 nt, Homo sapiens
  misc_RNA (1)...(19): siRNA sense strand
ggaaguggcuccaaaagag

SEQ ID NO: 1028465 - RNA, 19 nt, Homo sapiens
  misc_RNA (1)...(19): siRNA sense strand
ucacuucucuucggaggaa

SEQ ID NO: 1028466 - RNA, 19 nt, Homo sapiens
  misc_RNA (1)...(19): siRNA sense strand
gcagaaggucaaguacuuu

SEQ ID NO: 1028467 - RNA, 19 nt, Homo sapiens
  misc_RNA (1)...(19): siRNA sense strand
aagaggaaguggcuccaaa

SEQ ID NO: 1028468 - RNA, 19 nt, Homo sapiens
  misc_RNA (1)...(19): siRNA sense strand
ggaggcaccuuccaaugac

SEQ ID NO: 1028469 - RNA, 19 nt, Homo sapiens
  misc_RNA (1)...(19): siRNA sense strand
ucaauuccaucacuucucu

SEQ ID NO: 1028470 - RNA, 19 nt, Homo sapiens
  misc_RNA (1)...(19): siRNA sense strand
aagaggaggugacccugaa

SEQ ID NO: 1028471 - RNA, 19 nt, Homo sapiens
  misc_RNA (1)...(19): siRNA sense strand
ugggagagaugaaauguac

SEQ ID NO: 1028472 - RNA, 19 nt, Homo sapiens
  misc_RNA (1)...(19): siRNA sense strand
ugcagaaggucaaguacuu

SEQ ID NO: 1028473 - RNA, 19 nt, Homo sapiens
  misc_RNA (1)...(19): siRNA sense strand
ggaggaagcccugcagaag

SEQ ID NO: 1028474 - RNA, 19 nt, Homo sapiens
  misc_RNA (1)...(19): siRNA sense strand
gacauucaauuccaucacu

SEQ ID NO: 1028475 - RNA, 19 nt, Homo sapiens
  misc_RNA (1)...(19): siRNA sense strand
cagaggagacccugacugu

SEQ ID NO: 1028476 - RNA, 19 nt, Homo sapiens
  misc_RNA (1)...(19): siRNA sense strand
gaggaggcaccuuccaaug

SEQ ID NO: 1028477 - RNA, 19 nt, Homo sapiens
  misc_RNA (1)...(19): siRNA sense strand
ugaaauguacccuaguuag

SEQ ID NO: 1028478 - RNA, 19 nt, Homo sapiens
  misc_RNA (1)...(19): siRNA sense strand
ccuccagacucccaagaga

SEQ ID NO: 1028479 - RNA, 19 nt, Homo sapiens
  misc_RNA (1)...(19): siRNA sense strand
gacccugacuguggacgaa

SEQ ID NO: 1028480 - RNA, 19 nt, Homo sapiens
  misc_RNA (1)...(19): siRNA sense strand
auaaagucccuaauccaaa

SEQ ID NO: 1028481 - RNA, 19 nt, Homo sapiens
  misc_RNA (1)...(19): siRNA sense strand
cagaaggucaaguacuuug

SEQ ID NO: 1028482 - RNA, 19 nt, Homo sapiens
  misc_RNA (1)...(19): siRNA sense strand
cauccaggccugcccuuga

SEQ ID NO: 1028483 - RNA, 19 nt, Homo sapiens
  misc_RNA (1)...(19): siRNA sense strand
aggaagcccugcagaaggu

SEQ ID NO: 1028484 - RNA, 19 nt, Homo sapiens
  misc_RNA (1)...(19): siRNA sense strand
ccgcaaaacuacacggaaa

SEQ ID NO: 1028485 - RNA, 19 nt, Homo sapiens
  misc_RNA (1)...(19): siRNA sense strand
aggaggcaccuuccaauga

SEQ ID NO: 1028486 - RNA, 19 nt, Homo sapiens
  misc_RNA (1)...(19): siRNA sense strand
gagaggugccugggagaga

SEQ ID NO: 1028487 - RNA, 19 nt, Homo sapiens
  misc_RNA (1)...(19): siRNA sense strand
cagagaugacauucaauuc

SEQ ID NO: 1028488 - RNA, 19 nt, Homo sapiens
  misc_RNA (1)...(19): siRNA sense strand
gaacccuccacuccagaga

SEQ ID NO: 1028489 - RNA, 19 nt, Homo sapiens
  misc_RNA (1)...(19): siRNA sense strand
ggaggugacccugaaagag

SEQ ID NO: 1028490 - RNA, 19 nt, Homo sapiens
  misc_RNA (1)...(19): siRNA sense strand
cagaggaggcaccuuccaa

SEQ ID NO: 1028491 - RNA, 19 nt, Homo sapiens
  misc_RNA (1)...(19): siRNA sense strand
aagagggaguggcuuccaa

SEQ ID NO: 1028492 - RNA, 19 nt, Homo sapiens
  misc_RNA (1)...(19): siRNA sense strand
cagccuccuuccucagaga

SEQ ID NO: 1028493 - RNA, 19 nt, Homo sapiens
  misc_RNA (1)...(19): siRNA sense strand
cggaggaagcccugcagaa

SEQ ID NO: 1028494 - RNA, 19 nt, Homo sapiens
  misc_RNA (1)...(19): siRNA sense strand
cggaggacaaggcuucuau

SEQ ID NO: 1028495 - RNA, 19 nt, Homo sapiens
  misc_RNA (1)...(19): siRNA sense strand
gaucacaacuggaggaaga

SEQ ID NO: 1028496 - RNA, 19 nt, Homo sapiens
  misc_RNA (1)...(19): siRNA sense strand
gcaaguagcccuaggaauc

SEQ ID NO: 1028497 - RNA, 19 nt, Homo sapiens
  misc_RNA (1)...(19): siRNA sense strand
gaaaucacccagcggcaua

SEQ ID NO: 1028498 - RNA, 19 nt, Homo sapiens
  misc_RNA (1)...(19): siRNA sense strand
ggucccaacuccucucuaa

SEQ ID NO: 1028499 - RNA, 19 nt, Homo sapiens
  misc_RNA (1)...(19): siRNA sense strand
gggagaaaguauaaaugaa

SEQ ID NO: 1028500 - RNA, 19 nt, Homo sapiens
  misc_RNA (1)...(19): siRNA sense strand
uaccaucgaugacaacaaa

SEQ ID NO: 1028501 - RNA, 19 nt, Homo sapiens
  misc_RNA (1)...(19): siRNA sense strand
ucaaggcacuggcagauuc

SEQ ID NO: 1028502 - RNA, 19 nt, Homo sapiens
  misc_RNA (1)...(19): siRNA sense strand
ggacaaagccaaggugaag

SEQ ID NO: 1028503 - RNA, 19 nt, Homo sapiens
  misc_RNA (1)...(19): siRNA sense strand
ccacacagccagaaacaga

SEQ ID NO: 1028504 - RNA, 19 nt, Homo sapiens
  misc_RNA (1)...(19): siRNA sense strand
gaagcuacagaaagaguuu

SEQ ID NO: 1028505 - RNA, 19 nt, Homo sapiens
  misc_RNA (1)...(19): siRNA sense strand
ggagaaaguauaaaugaag

SEQ ID NO: 1028506 - RNA, 19 nt, Homo sapiens
  misc_RNA (1)...(19): siRNA sense strand
gcugggaaguccaagauca

SEQ ID NO: 1028507 - RNA, 19 nt, Homo sapiens
  misc_RNA (1)...(19): siRNA sense strand
gaagaaaagagaagguaua

SEQ ID NO: 1028508 - RNA, 19 nt, Homo sapiens
  misc_RNA (1)...(19): siRNA sense strand
caacuccucucuaacaaaa

SEQ ID NO: 1028509 - RNA, 19 nt, Homo sapiens
  misc_RNA (1)...(19): siRNA sense strand
caucaucgccuucaucaag

SEQ ID NO: 1028510 - RNA, 19 nt, Homo sapiens
  misc_RNA (1)...(19): siRNA sense strand
gaagcaagaaguaaaauug

SEQ ID NO: 1028511 - RNA, 19 nt, Homo sapiens
  misc_RNA (1)...(19): siRNA sense strand
gaagccauuucuccagaca

SEQ ID NO: 1028512 - RNA, 19 nt, Homo sapiens
  misc_RNA (1)...(19): siRNA sense strand
ggacaucaucgccuucauc

SEQ ID NO: 1028513 - RNA, 19 nt, Homo sapiens
  misc_RNA (1)...(19): siRNA sense strand
gaugacaacaaacagauuc

SEQ ID NO: 1028514 - RNA, 19 nt, Homo sapiens
  misc_RNA (1)...(19): siRNA sense strand
caaggugaagcuacagaaa

SEQ ID NO: 1028515 - RNA, 19 nt, Homo sapiens
  misc_RNA (1)...(19): siRNA sense strand
gaagacagcauccccaaga

SEQ ID NO: 1028516 - RNA, 19 nt, Homo sapiens
  misc_RNA (1)...(19): siRNA sense strand
uaaauucuccagcagugaa

SEQ ID NO: 1028517 - RNA, 19 nt, Homo sapiens
  misc_RNA (1)...(19): siRNA sense strand
gagaagguauaaaacaaug

SEQ ID NO: 1028518 - RNA, 19 nt, Homo sapiens
  misc_RNA (1)...(19): siRNA sense strand
ugggagaaaguauaaauga

SEQ ID NO: 1028519 - RNA, 19 nt, Homo sapiens
  misc_RNA (1)...(19): siRNA sense strand
ccaggaggcuuuugaaauc

SEQ ID NO: 1028520 - RNA, 19 nt, Homo sapiens
  misc_RNA (1)...(19): siRNA sense strand
cgaugucugugaugugaau

SEQ ID NO: 1028521 - RNA, 19 nt, Homo sapiens
  misc_RNA (1)...(19): siRNA sense strand
ugacagcguuaccaucgau

SEQ ID NO: 1028522 - RNA, 19 nt, Homo sapiens
  misc_RNA (1)...(19): siRNA sense strand
aggugaagcuacagaaaga

SEQ ID NO: 1028523 - RNA, 19 nt, Homo sapiens
  misc_RNA (1)...(19): siRNA sense strand
gcccugggagaaaguauaa

SEQ ID NO: 1028524 - RNA, 19 nt, Homo sapiens
  misc_RNA (1)...(19): siRNA sense strand
ugaugugaaugccaggaaa

SEQ ID NO: 1028525 - RNA, 19 nt, Homo sapiens
  misc_RNA (1)...(19): siRNA sense strand
acagaaagaguuugaaguc

SEQ ID NO: 1028526 - RNA, 19 nt, Homo sapiens
  misc_RNA (1)...(19): siRNA sense strand
gacaucaucgccuucauca

SEQ ID NO: 1028527 - RNA, 19 nt, Homo sapiens
  misc_RNA (1)...(19): siRNA sense strand
gaucaaggcacuggcagau

SEQ ID NO: 1028528 - RNA, 19 nt, Homo sapiens
  misc_RNA (1)...(19): siRNA sense strand
cagaaagaguuugaagucu

SEQ ID NO: 1028529 - RNA, 19 nt, Homo sapiens
  misc_RNA (1)...(19): siRNA sense strand
ccaaggcccugggagaaag

SEQ ID NO: 1028530 - RNA, 19 nt, Homo sapiens
  misc_RNA (1)...(19): siRNA sense strand
caucugacucccagcauga

SEQ ID NO: 1028531 - RNA, 19 nt, Homo sapiens
  misc_RNA (1)...(19): siRNA sense strand
aggagaagcugcgaucaca

SEQ ID NO: 1028532 - RNA, 19 nt, Homo sapiens
  misc_RNA (1)...(19): siRNA sense strand
gaucacacgaagccauuuc

SEQ ID NO: 1028533 - RNA, 19 nt, Homo sapiens
  misc_RNA (1)...(19): siRNA sense strand
gagaagcugcgaucacaac

SEQ ID NO: 1028534 - RNA, 19 nt, Homo sapiens
  misc_RNA (1)...(19): siRNA sense strand
gauucgaugucugugaugu

SEQ ID NO: 1028535 - RNA, 19 nt, Homo sapiens
  misc_RNA (1)...(19): siRNA sense strand
gcguuaccaucgaugacaa

SEQ ID NO: 1028536 - RNA, 19 nt, Homo sapiens
  misc_RNA (1)...(19): siRNA sense strand
uaaaauuggucaccugaag

SEQ ID NO: 1028537 - RNA, 19 nt, Homo sapiens
  misc_RNA (1)...(19): siRNA sense strand
gcacuggcagauucgaugu

SEQ ID NO: 1028538 - RNA, 19 nt, Homo sapiens
  misc_RNA (1)...(19): siRNA sense strand
ccaacuccucucuaacaaa

SEQ ID NO: 1028539 - RNA, 19 nt, Homo sapiens
  misc_RNA (1)...(19): siRNA sense strand
caaguagcccuaggaaucu

SEQ ID NO: 1028540 - RNA, 19 nt, Homo sapiens
  misc_RNA (1)...(19): siRNA sense strand
aagccaaggugaagcuaca

SEQ ID NO: 1028541 - RNA, 19 nt, Homo sapiens
  misc_RNA (1)...(19): siRNA sense strand
gccaaggcccugggagaaa

SEQ ID NO: 1028542 - RNA, 19 nt, Homo sapiens
  misc_RNA (1)...(19): siRNA sense strand
ggagaagcugcgaucacaa

SEQ ID NO: 1028543 - RNA, 19 nt, Homo sapiens
  misc_RNA (1)...(19): siRNA sense strand
cagacggacucggacauca

SEQ ID NO: 1028544 - RNA, 19 nt, Homo sapiens
  misc_RNA (1)...(19): siRNA sense strand
ccaaggugaagcuacagaa

SEQ ID NO: 1028545 - RNA, 19 nt, Homo sapiens
  misc_RNA (1)...(19): siRNA sense strand
uaggaugccaggaggcuuu

SEQ ID NO: 1028546 - RNA, 19 nt, Homo sapiens
  misc_RNA (1)...(19): siRNA sense strand
cagcaaguagcccuaggaa

SEQ ID NO: 1028547 - RNA, 19 nt, Homo sapiens
  misc_RNA (1)...(19): siRNA sense strand
cccaacuccucucuaacaa

SEQ ID NO: 1028548 - RNA, 19 nt, Homo sapiens
  misc_RNA (1)...(19): siRNA sense strand
guaaauucuccagcaguga

SEQ ID NO: 1028549 - RNA, 19 nt, Homo sapiens
  misc_RNA (1)...(19): siRNA sense strand
cggcauauacagcaaguag

SEQ ID NO: 1028550 - RNA, 19 nt, Homo sapiens
  misc_RNA (1)...(19): siRNA sense strand
uuggucaccugaaggaaga

SEQ ID NO: 1028551 - RNA, 19 nt, Homo sapiens
  misc_RNA (1)...(19): siRNA sense strand
gcacuugcagcugcucaug

SEQ ID NO: 1028552 - RNA, 19 nt, Homo sapiens
  misc_RNA (1)...(19): siRNA sense strand
cagaccagcaggaggagaa

SEQ ID NO: 1028553 - RNA, 19 nt, Homo sapiens
  misc_RNA (1)...(19): siRNA sense strand
gaagcugcgaucacaacug

SEQ ID NO: 1028554 - RNA, 19 nt, Homo sapiens
  misc_RNA (1)...(19): siRNA sense strand
gcccuaggaaucucggaaa

SEQ ID NO: 1028555 - RNA, 19 nt, Homo sapiens
  misc_RNA (1)...(19): siRNA sense strand
cuacagaaagaguuugaag

SEQ ID NO: 1028556 - RNA, 19 nt, Homo sapiens
  misc_RNA (1)...(19): siRNA sense strand
guauaaaugaagcaagaag

SEQ ID NO: 1028557 - RNA, 19 nt, Homo sapiens
  misc_RNA (1)...(19): siRNA sense strand
cgaugacaacaaacagauu

SEQ ID NO: 1028558 - RNA, 19 nt, Homo sapiens
  misc_RNA (1)...(19): siRNA sense strand
ggcccugggagaaaguaua

SEQ ID NO: 1028559 - RNA, 19 nt, Homo sapiens
  misc_RNA (1)...(19): siRNA sense strand
aaauuggucaccugaagga

SEQ ID NO: 1028560 - RNA, 19 nt, Homo sapiens
  misc_RNA (1)...(19): siRNA sense strand
ucacccagcggcauauaca

SEQ ID NO: 1028561 - RNA, 19 nt, Homo sapiens
  misc_RNA (1)...(19): siRNA sense strand
gaacugcacugaugaagga

SEQ ID NO: 1028562 - RNA, 19 nt, Homo sapiens
  misc_RNA (1)...(19): siRNA sense strand
ggagacagcuguugaucuu

SEQ ID NO: 1028563 - RNA, 19 nt, Homo sapiens
  misc_RNA (1)...(19): siRNA sense strand
ugucagaaguuccuaauuc

SEQ ID NO: 1028564 - RNA, 19 nt, Homo sapiens
  misc_RNA (1)...(19): siRNA sense strand
agaaguuccuaauucagua

SEQ ID NO: 1028565 - RNA, 19 nt, Homo sapiens
  misc_RNA (1)...(19): siRNA sense strand
gggaagcuauccagaaguc

SEQ ID NO: 1028566 - RNA, 19 nt, Homo sapiens
  misc_RNA (1)...(19): siRNA sense strand
gcgggaagcuauccagaag

SEQ ID NO: 1028567 - RNA, 19 nt, Homo sapiens
  misc_RNA (1)...(19): siRNA sense strand
ugaggaggcugcagaagca

SEQ ID NO: 1028568 - RNA, 19 nt, Homo sapiens
  misc_RNA (1)...(19): siRNA sense strand
gucagaaguuccuaauuca

SEQ ID NO: 1028569 - RNA, 19 nt, Homo sapiens
  misc_RNA (1)...(19): siRNA sense strand
acaauaagaacaugucaga

SEQ ID NO: 1028570 - RNA, 19 nt, Homo sapiens
  misc_RNA (1)...(19): siRNA sense strand
agacagcuguugaucuugu

SEQ ID NO: 1028571 - RNA, 19 nt, Homo sapiens
  misc_RNA (1)...(19): siRNA sense strand
auaagaacaugucagaagu

SEQ ID NO: 1028572 - RNA, 19 nt, Homo sapiens
  misc_RNA (1)...(19): siRNA sense strand
ucugcgaacuggugucuga

SEQ ID NO: 1028573 - RNA, 19 nt, Homo sapiens
  misc_RNA (1)...(19): siRNA sense strand
uaagaacaugucagaaguu

SEQ ID NO: 1028574 - RNA, 19 nt, Homo sapiens
  misc_RNA (1)...(19): siRNA sense strand
agaagucugugacaagaag

SEQ ID NO: 1028575 - RNA, 19 nt, Homo sapiens
  misc_RNA (1)...(19): siRNA sense strand
gaaggagagcgggaagcua

SEQ ID NO: 1028576 - RNA, 19 nt, Homo sapiens
  misc_RNA (1)...(19): siRNA sense strand
aauaagaacaugucagaag

SEQ ID NO: 1028577 - RNA, 19 nt, Homo sapiens
  misc_RNA (1)...(19): siRNA sense strand
gacagcuguugaucuuguu

SEQ ID NO: 1028578 - RNA, 19 nt, Homo sapiens
  misc_RNA (1)...(19): siRNA sense strand
cagaaguuccuaauucagu

SEQ ID NO: 1028579 - RNA, 19 nt, Homo sapiens
  misc_RNA (1)...(19): siRNA sense strand
aaggagagcgggaagcuau

SEQ ID NO: 1028580 - RNA, 19 nt, Homo sapiens
  misc_RNA (1)...(19): siRNA sense strand
guacaauaagaacauguca

SEQ ID NO: 1028581 - RNA, 19 nt, Homo sapiens
  misc_RNA (1)...(19): siRNA sense strand
ggaggcugcagaagcaaug

SEQ ID NO: 1028582 - RNA, 19 nt, Homo sapiens
  misc_RNA (1)...(19): siRNA sense strand
caauaagaacaugucagaa

SEQ ID NO: 1028583 - RNA, 19 nt, Homo sapiens
  misc_RNA (1)...(19): siRNA sense strand
ccagggugcacggaacuuu

SEQ ID NO: 1028584 - RNA, 19 nt, Homo sapiens
  misc_RNA (1)...(19): siRNA sense strand
gaaguuccuaauucaguac

SEQ ID NO: 1028585 - RNA, 19 nt, Homo sapiens
  misc_RNA (1)...(19): siRNA sense strand
ucugcgaacuggugucuga

SEQ ID NO: 1028586 - RNA, 19 nt, Homo sapiens
  misc_RNA (1)...(19): siRNA sense strand
ccagggugcacggaacuuu

SEQ ID NO: 1028587 - RNA, 19 nt, Homo sapiens
  misc_RNA (1)...(19): siRNA sense strand
gaacugcacugaugaagga

SEQ ID NO: 1028588 - RNA, 19 nt, Homo sapiens
  misc_RNA (1)...(19): siRNA sense strand
ggagacagcuguugaucuu

SEQ ID NO: 1028589 - RNA, 19 nt, Homo sapiens
  misc_RNA (1)...(19): siRNA sense strand
ugucagaaguuccuaauuc

SEQ ID NO: 1028590 - RNA, 19 nt, Homo sapiens
  misc_RNA (1)...(19): siRNA sense strand
agaaguuccuaauucagua

SEQ ID NO: 1028591 - RNA, 19 nt, Homo sapiens
  misc_RNA (1)...(19): siRNA sense strand
gggaagcuauccagaaguc

SEQ ID NO: 1028592 - RNA, 19 nt, Homo sapiens
  misc_RNA (1)...(19): siRNA sense strand
gcgggaagcuauccagaag

SEQ ID NO: 1028593 - RNA, 19 nt, Homo sapiens
  misc_RNA (1)...(19): siRNA sense strand
ugaggaggcugcagaagca

SEQ ID NO: 1028594 - RNA, 19 nt, Homo sapiens
  misc_RNA (1)...(19): siRNA sense strand
gucagaaguuccuaauuca

SEQ ID NO: 1028595 - RNA, 19 nt, Homo sapiens
  misc_RNA (1)...(19): siRNA sense strand
acaauaagaacaugucaga

SEQ ID NO: 1028596 - RNA, 19 nt, Homo sapiens
  misc_RNA (1)...(19): siRNA sense strand
agacagcuguugaucuugu

SEQ ID NO: 1028597 - RNA, 19 nt, Homo sapiens
  misc_RNA (1)...(19): siRNA sense strand
auaagaacaugucagaagu

SEQ ID NO: 1028598 - RNA, 19 nt, Homo sapiens
  misc_RNA (1)...(19): siRNA sense strand
ucugcgaacuggugucuga

SEQ ID NO: 1028599 - RNA, 19 nt, Homo sapiens
  misc_RNA (1)...(19): siRNA sense strand
uaagaacaugucagaaguu

SEQ ID NO: 1028600 - RNA, 19 nt, Homo sapiens
  misc_RNA (1)...(19): siRNA sense strand
agaagucugugacaagaag

SEQ ID NO: 1028601 - RNA, 19 nt, Homo sapiens
  misc_RNA (1)...(19): siRNA sense strand
gaaggagagcgggaagcua

SEQ ID NO: 1028602 - RNA, 19 nt, Homo sapiens
  misc_RNA (1)...(19): siRNA sense strand
aauaagaacaugucagaag

SEQ ID NO: 1028603 - RNA, 19 nt, Homo sapiens
  misc_RNA (1)...(19): siRNA sense strand
gacagcuguugaucuuguu

SEQ ID NO: 1028604 - RNA, 19 nt, Homo sapiens
  misc_RNA (1)...(19): siRNA sense strand
cagaaguuccuaauucagu

SEQ ID NO: 1028605 - RNA, 19 nt, Homo sapiens
  misc_RNA (1)...(19): siRNA sense strand
aaggagagcgggaagcuau

SEQ ID NO: 1028606 - RNA, 19 nt, Homo sapiens
  misc_RNA (1)...(19): siRNA sense strand
guacaauaagaacauguca

SEQ ID NO: 1028607 - RNA, 19 nt, Homo sapiens
  misc_RNA (1)...(19): siRNA sense strand
ggaggcugcagaagcaaug

SEQ ID NO: 1028608 - RNA, 19 nt, Homo sapiens
  misc_RNA (1)...(19): siRNA sense strand
caauaagaacaugucagaa

SEQ ID NO: 1028609 - RNA, 19 nt, Homo sapiens
  misc_RNA (1)...(19): siRNA sense strand
ccagggugcacggaacuuu

SEQ ID NO: 1028610 - RNA, 19 nt, Homo sapiens
  misc_RNA (1)...(19): siRNA sense strand
gaaguuccuaauucaguac

SEQ ID NO: 1028611 - RNA, 19 nt, Homo sapiens
  misc_RNA (1)...(19): siRNA sense strand
gaaagccuauugugaacga

SEQ ID NO: 1028612 - RNA, 19 nt, Homo sapiens
  misc_RNA (1)...(19): siRNA sense strand
agacacaccugcacaguug

SEQ ID NO: 1028613 - RNA, 19 nt, Homo sapiens
  misc_RNA (1)...(19): siRNA sense strand
guggugcaguuuaagauua

SEQ ID NO: 1028614 - RNA, 19 nt, Homo sapiens
  misc_RNA (1)...(19): siRNA sense strand
gacgggaggugucuacuga

SEQ ID NO: 1028615 - RNA, 19 nt, Homo sapiens
  misc_RNA (1)...(19): siRNA sense strand
cagaucagauuccgauuug

SEQ ID NO: 1028616 - RNA, 19 nt, Homo sapiens
  misc_RNA (1)...(19): siRNA sense strand
ggaaauggaggaugaagau

SEQ ID NO: 1028617 - RNA, 19 nt, Homo sapiens
  misc_RNA (1)...(19): siRNA sense strand
ggaugaagauacaauugau

SEQ ID NO: 1028618 - RNA, 19 nt, Homo sapiens
  misc_RNA (1)...(19): siRNA sense strand
gcagaucagauuccgauuu

SEQ ID NO: 1028619 - RNA, 19 nt, Homo sapiens
  misc_RNA (1)...(19): siRNA sense strand
guucuguggugcaguuuaa

SEQ ID NO: 1028620 - RNA, 19 nt, Homo sapiens
  misc_RNA (1)...(19): siRNA sense strand
gaagauacaauugaugugu

SEQ ID NO: 1028621 - RNA, 19 nt, Homo sapiens
  misc_RNA (1)...(19): siRNA sense strand
gaaauggaggaugaagaua

SEQ ID NO: 1028622 - RNA, 19 nt, Homo sapiens
  misc_RNA (1)...(19): siRNA sense strand
gcauacaccacuuaguaaa

SEQ ID NO: 1028623 - RNA, 19 nt, Homo sapiens
  misc_RNA (1)...(19): siRNA sense strand
uaaugaaagccuauuguga

SEQ ID NO: 1028624 - RNA, 19 nt, Homo sapiens
  misc_RNA (1)...(19): siRNA sense strand
caaugaggcagaucagauu

SEQ ID NO: 1028625 - RNA, 19 nt, Homo sapiens
  misc_RNA (1)...(19): siRNA sense strand
aaugaaagccuauugugaa

SEQ ID NO: 1028626 - RNA, 19 nt, Homo sapiens
  misc_RNA (1)...(19): siRNA sense strand
agacugagaacaacaauca

SEQ ID NO: 1028627 - RNA, 19 nt, Homo sapiens
  misc_RNA (1)...(19): siRNA sense strand
aggcauacaccacuuagua

SEQ ID NO: 1028628 - RNA, 19 nt, Homo sapiens
  misc_RNA (1)...(19): siRNA sense strand
ggaggaugaagauacaauu

SEQ ID NO: 1028629 - RNA, 19 nt, Homo sapiens
  misc_RNA (1)...(19): siRNA sense strand
uaagaggcauacaccacuu

SEQ ID NO: 1028630 - RNA, 19 nt, Homo sapiens
  misc_RNA (1)...(19): siRNA sense strand
gaggaugaagauacaauug

SEQ ID NO: 1028631 - RNA, 19 nt, Homo sapiens
  misc_RNA (1)...(19): siRNA sense strand
gggcaaccaaucaaugaaa

SEQ ID NO: 1028632 - RNA, 19 nt, Homo sapiens
  misc_RNA (1)...(19): siRNA sense strand
ggcauacaccacuuaguaa

SEQ ID NO: 1028633 - RNA, 19 nt, Homo sapiens
  misc_RNA (1)...(19): siRNA sense strand
acugagaacaacaaucaua

SEQ ID NO: 1028634 - RNA, 19 nt, Homo sapiens
  misc_RNA (1)...(19): siRNA sense strand
gaugaagauacaauugaug

SEQ ID NO: 1028635 - RNA, 19 nt, Homo sapiens
  misc_RNA (1)...(19): siRNA sense strand
agauacaauugauguguuc

SEQ ID NO: 1028636 - RNA, 19 nt, Homo sapiens
  misc_RNA (1)...(19): siRNA sense strand
ucaaugaggcagaucagau

SEQ ID NO: 1028637 - RNA, 19 nt, Homo sapiens
  misc_RNA (1)...(19): siRNA sense strand
aauggaggaugaagauaca

SEQ ID NO: 1028638 - RNA, 19 nt, Homo sapiens
  misc_RNA (1)...(19): siRNA sense strand
gaucagauuccgauuugac

SEQ ID NO: 1028639 - RNA, 19 nt, Homo sapiens
  misc_RNA (1)...(19): siRNA sense strand
cugcacaguuggaaaugga

SEQ ID NO: 1028640 - RNA, 19 nt, Homo sapiens
  misc_RNA (1)...(19): siRNA sense strand
aguuggaaauggaggauga

SEQ ID NO: 1028641 - RNA, 19 nt, Homo sapiens
  misc_RNA (1)...(19): siRNA sense strand
cuaaugaaagccuauugug

SEQ ID NO: 1028642 - RNA, 19 nt, Homo sapiens
  misc_RNA (1)...(19): siRNA sense strand
ucaagacugagaacaacaa

SEQ ID NO: 1028643 - RNA, 19 nt, Homo sapiens
  misc_RNA (1)...(19): siRNA sense strand
gcaaccaaucaaugaaaca

SEQ ID NO: 1028644 - RNA, 19 nt, Homo sapiens
  misc_RNA (1)...(19): siRNA sense strand
ggcaaccaaucaaugaaac

SEQ ID NO: 1028645 - RNA, 19 nt, Homo sapiens
  misc_RNA (1)...(19): siRNA sense strand
cagacacaccugcacaguu

SEQ ID NO: 1028646 - RNA, 19 nt, Homo sapiens
  misc_RNA (1)...(19): siRNA sense strand
aagaggcauacaccacuua

SEQ ID NO: 1028647 - RNA, 19 nt, Homo sapiens
  misc_RNA (1)...(19): siRNA sense strand
uacaauugauguguuccaa

SEQ ID NO: 1028648 - RNA, 19 nt, Homo sapiens
  misc_RNA (1)...(19): siRNA sense strand
aggaugaagauacaauuga

SEQ ID NO: 1028649 - RNA, 19 nt, Homo sapiens
  misc_RNA (1)...(19): siRNA sense strand
auacaccacuuaguaaacu

SEQ ID NO: 1028650 - RNA, 19 nt, Homo sapiens
  misc_RNA (1)...(19): siRNA sense strand
cugagaacaacaaucauau

SEQ ID NO: 1028651 - RNA, 19 nt, Homo sapiens
  misc_RNA (1)...(19): siRNA sense strand
gacgggcaaccaaucaaug

SEQ ID NO: 1028652 - RNA, 19 nt, Homo sapiens
  misc_RNA (1)...(19): siRNA sense strand
aaauggaggaugaagauac

SEQ ID NO: 1028653 - RNA, 19 nt, Homo sapiens
  misc_RNA (1)...(19): siRNA sense strand
ggagaaaucuuaugaaugu

SEQ ID NO: 1028654 - RNA, 19 nt, Homo sapiens
  misc_RNA (1)...(19): siRNA sense strand
gaaagagacuuagugagua

SEQ ID NO: 1028655 - RNA, 19 nt, Homo sapiens
  misc_RNA (1)...(19): siRNA sense strand
gagaaacccuauauuugua

SEQ ID NO: 1028656 - RNA, 19 nt, Homo sapiens
  misc_RNA (1)...(19): siRNA sense strand
gggaaggccuuuagaauga

SEQ ID NO: 1028657 - RNA, 19 nt, Homo sapiens
  misc_RNA (1)...(19): siRNA sense strand
ggaauucacucagaagaaa

SEQ ID NO: 1028658 - RNA, 19 nt, Homo sapiens
  misc_RNA (1)...(19): siRNA sense strand
gaaggcaaaucuuacugua

SEQ ID NO: 1028659 - RNA, 19 nt, Homo sapiens
  misc_RNA (1)...(19): siRNA sense strand
gaaaagcccuauauuugua

SEQ ID NO: 1028660 - RNA, 19 nt, Homo sapiens
  misc_RNA (1)...(19): siRNA sense strand
gaggagaaacccuauauuu

SEQ ID NO: 1028661 - RNA, 19 nt, Homo sapiens
  misc_RNA (1)...(19): siRNA sense strand
gaagucaaaucccauaauc

SEQ ID NO: 1028662 - RNA, 19 nt, Homo sapiens
  misc_RNA (1)...(19): siRNA sense strand
gcacagucauuuggauaua

SEQ ID NO: 1028663 - RNA, 19 nt, Homo sapiens
  misc_RNA (1)...(19): siRNA sense strand
gaaagcaacccucacugua

SEQ ID NO: 1028664 - RNA, 19 nt, Homo sapiens
  misc_RNA (1)...(19): siRNA sense strand
ggagaaacccuauauuugu

SEQ ID NO: 1028665 - RNA, 19 nt, Homo sapiens
  misc_RNA (1)...(19): siRNA sense strand
ggagaaaucguaugaaugu

SEQ ID NO: 1028666 - RNA, 19 nt, Homo sapiens
  misc_RNA (1)...(19): siRNA sense strand
gaccaaaccugaugugauc

SEQ ID NO: 1028667 - RNA, 19 nt, Homo sapiens
  misc_RNA (1)...(19): siRNA sense strand
ggagagaaaccauauaaau

SEQ ID NO: 1028668 - RNA, 19 nt, Homo sapiens
  misc_RNA (1)...(19): siRNA sense strand
gaagagcaaccaauauuga

SEQ ID NO: 1028669 - RNA, 19 nt, Homo sapiens
  misc_RNA (1)...(19): siRNA sense strand
gagaaaucauuccuucaaa

SEQ ID NO: 1028670 - RNA, 19 nt, Homo sapiens
  misc_RNA (1)...(19): siRNA sense strand
gaaaagacauuuacucuag

SEQ ID NO: 1028671 - RNA, 19 nt, Homo sapiens
  misc_RNA (1)...(19): siRNA sense strand
gcacaucagagaacacaua

SEQ ID NO: 1028672 - RNA, 19 nt, Homo sapiens
  misc_RNA (1)...(19): siRNA sense strand
gaaguauucuagaucaguu

SEQ ID NO: 1028673 - RNA, 19 nt, Homo sapiens
  misc_RNA (1)...(19): siRNA sense strand
gagagaaaccauauaaaug

SEQ ID NO: 1028674 - RNA, 19 nt, Homo sapiens
  misc_RNA (1)...(19): siRNA sense strand
ccagaaauccuaugaaugu

SEQ ID NO: 1028675 - RNA, 19 nt, Homo sapiens
  misc_RNA (1)...(19): siRNA sense strand
agacaaaucucaaucuaca

SEQ ID NO: 1028676 - RNA, 19 nt, Homo sapiens
  misc_RNA (1)...(19): siRNA sense strand
gguaaaucauucagucaaa

SEQ ID NO: 1028677 - RNA, 19 nt, Homo sapiens
  misc_RNA (1)...(19): siRNA sense strand
gguaagucuuucaguuaua

SEQ ID NO: 1028678 - RNA, 19 nt, Homo sapiens
  misc_RNA (1)...(19): siRNA sense strand
ggagagaaaccauaugaau

SEQ ID NO: 1028679 - RNA, 19 nt, Homo sapiens
  misc_RNA (1)...(19): siRNA sense strand
gagaaaccauaugaaugua

SEQ ID NO: 1028680 - RNA, 19 nt, Homo sapiens
  misc_RNA (1)...(19): siRNA sense strand
ggaaguccuuucaccagaa

SEQ ID NO: 1028681 - RNA, 19 nt, Homo sapiens
  misc_RNA (1)...(19): siRNA sense strand
guacaucagagaacucaua

SEQ ID NO: 1028682 - RNA, 19 nt, Homo sapiens
  misc_RNA (1)...(19): siRNA sense strand
aaaucuaccuccugaauau

SEQ ID NO: 1028683 - RNA, 19 nt, Homo sapiens
  misc_RNA (1)...(19): siRNA sense strand
agucauaucucauucauca

SEQ ID NO: 1028684 - RNA, 19 nt, Homo sapiens
  misc_RNA (1)...(19): siRNA sense strand
gaagucauaucucauucau

SEQ ID NO: 1028685 - RNA, 19 nt, Homo sapiens
  misc_RNA (1)...(19): siRNA sense strand
gaagacaacacucucucua

SEQ ID NO: 1028686 - RNA, 19 nt, Homo sapiens
  misc_RNA (1)...(19): siRNA sense strand
gaagagccauggacaucau

SEQ ID NO: 1028687 - RNA, 19 nt, Homo sapiens
  misc_RNA (1)...(19): siRNA sense strand
agaaggaaaucauaucuca

SEQ ID NO: 1028688 - RNA, 19 nt, Homo sapiens
  misc_RNA (1)...(19): siRNA sense strand
caagaaagagacuuaguga

SEQ ID NO: 1028689 - RNA, 19 nt, Homo sapiens
  misc_RNA (1)...(19): siRNA sense strand
ggccagaaauccuaugaau

SEQ ID NO: 1028690 - RNA, 19 nt, Homo sapiens
  misc_RNA (1)...(19): siRNA sense strand
agucauaccucauugauca

SEQ ID NO: 1028691 - RNA, 19 nt, Homo sapiens
  misc_RNA (1)...(19): siRNA sense strand
gagagaaaccauaugaaug

SEQ ID NO: 1028692 - RNA, 19 nt, Homo sapiens
  misc_RNA (1)...(19): siRNA sense strand
gaaaacccaucuguauaua

SEQ ID NO: 1028693 - RNA, 19 nt, Homo sapiens
  misc_RNA (1)...(19): siRNA sense strand
agacagcccucacugauca

SEQ ID NO: 1028694 - RNA, 19 nt, Homo sapiens
  misc_RNA (1)...(19): siRNA sense strand
ggaaaucauaucucauuga

SEQ ID NO: 1028695 - RNA, 19 nt, Homo sapiens
  misc_RNA (1)...(19): siRNA sense strand
gacauuuacucuaggcaaa

SEQ ID NO: 1028696 - RNA, 19 nt, Homo sapiens
  misc_RNA (1)...(19): siRNA sense strand
gcaagaaagagacuuagug

SEQ ID NO: 1028697 - RNA, 19 nt, Homo sapiens
  misc_RNA (1)...(19): siRNA sense strand
ggagagaaaccauaugagu

SEQ ID NO: 1028698 - RNA, 19 nt, Homo sapiens
  misc_RNA (1)...(19): siRNA sense strand
gugguaagucuuucaguua

SEQ ID NO: 1028699 - RNA, 19 nt, Homo sapiens
  misc_RNA (1)...(19): siRNA sense strand
gagaaaccauaugagugua

SEQ ID NO: 1028700 - RNA, 19 nt, Homo sapiens
  misc_RNA (1)...(19): siRNA sense strand
aaagagacuuagugaguau

SEQ ID NO: 1028701 - RNA, 19 nt, Homo sapiens
  misc_RNA (1)...(19): siRNA sense strand
gaaagugcuuccgccagaa

SEQ ID NO: 1028702 - RNA, 19 nt, Homo sapiens
  misc_RNA (1)...(19): siRNA sense strand
gaaaguccuuccgccagaa

SEQ ID NO: 1028703 - RNA, 19 nt, Homo sapiens
  misc_RNA (1)...(19): siRNA sense strand
agacaacccuugcucuuca

SEQ ID NO: 1028704 - RNA, 19 nt, Homo sapiens
  misc_RNA (1)...(19): siRNA sense strand
caccagaaggcaaaucuua

SEQ ID NO: 1028705 - RNA, 19 nt, Homo sapiens
  misc_RNA (1)...(19): siRNA sense strand
aggaaugccuucagauuga

SEQ ID NO: 1028706 - RNA, 19 nt, Homo sapiens
  misc_RNA (1)...(19): siRNA sense strand
gaaaccauaugaguguaau

SEQ ID NO: 1028707 - RNA, 19 nt, Homo sapiens
  misc_RNA (1)...(19): siRNA sense strand
gaucaucaccgaacucaca

SEQ ID NO: 1028708 - RNA, 19 nt, Homo sapiens
  misc_RNA (1)...(19): siRNA sense strand
gaaauucaaggaacaccaa

SEQ ID NO: 1028709 - RNA, 19 nt, Homo sapiens
  misc_RNA (1)...(19): siRNA sense strand
caucaucaaagaacucaua

SEQ ID NO: 1028710 - RNA, 19 nt, Homo sapiens
  misc_RNA (1)...(19): siRNA sense strand
guaggaaugccuucagauu

SEQ ID NO: 1028711 - RNA, 19 nt, Homo sapiens
  misc_RNA (1)...(19): siRNA sense strand
gccagagcuuucagucaua

SEQ ID NO: 1028712 - RNA, 19 nt, Homo sapiens
  misc_RNA (1)...(19): siRNA sense strand
cuacaucagagaauucaua

SEQ ID NO: 1028713 - RNA, 19 nt, Homo sapiens
  misc_RNA (1)...(19): siRNA sense strand
ggaaggccuuuagaaugaa

SEQ ID NO: 1028714 - RNA, 19 nt, Homo sapiens
  misc_RNA (1)...(19): siRNA sense strand
gggaaaagcccuauauuug

SEQ ID NO: 1028715 - RNA, 19 nt, Homo sapiens
  misc_RNA (1)...(19): siRNA sense strand
ccagagcuuucagucauaa

SEQ ID NO: 1028716 - RNA, 19 nt, Homo sapiens
  misc_RNA (1)...(19): siRNA sense strand
agacaacacucucucuaca

SEQ ID NO: 1028717 - RNA, 19 nt, Homo sapiens
  misc_RNA (1)...(19): siRNA sense strand
uaaucuaaauccugcaaga

SEQ ID NO: 1028718 - RNA, 19 nt, Homo sapiens
  misc_RNA (1)...(19): siRNA sense strand
gaaaccucauuguccauca

SEQ ID NO: 1028719 - RNA, 19 nt, Homo sapiens
  misc_RNA (1)...(19): siRNA sense strand
ggagaaaacccaucuguau

SEQ ID NO: 1028720 - RNA, 19 nt, Homo sapiens
  misc_RNA (1)...(19): siRNA sense strand
caaaucccauaaucaaagu

SEQ ID NO: 1028721 - RNA, 19 nt, Homo sapiens
  misc_RNA (1)...(19): siRNA sense strand
uaauggauaugggaaauca

SEQ ID NO: 1028722 - RNA, 19 nt, Homo sapiens
  misc_RNA (1)...(19): siRNA sense strand
agagaaaccauaugaaugu

SEQ ID NO: 1028723 - RNA, 19 nt, Homo sapiens
  misc_RNA (1)...(19): siRNA sense strand
agaaagagacuuagugagu

SEQ ID NO: 1028724 - RNA, 19 nt, Homo sapiens
  misc_RNA (1)...(19): siRNA sense strand
gaacucauacgggagagaa

SEQ ID NO: 1028725 - RNA, 19 nt, Homo sapiens
  misc_RNA (1)...(19): siRNA sense strand
caaucuacaucagagaauu

SEQ ID NO: 1028726 - RNA, 19 nt, Homo sapiens
  misc_RNA (1)...(19): siRNA sense strand
gaagucauaccucauugau

SEQ ID NO: 1028727 - RNA, 19 nt, Homo sapiens
  misc_RNA (1)...(19): siRNA sense strand
guaugaaugucugcaaugu

SEQ ID NO: 1028728 - RNA, 19 nt, Homo sapiens
  misc_RNA (1)...(19): siRNA sense strand
aagaagagcaaccaauauu

SEQ ID NO: 1028729 - RNA, 19 nt, Homo sapiens
  misc_RNA (1)...(19): siRNA sense strand
gagaaaacccaucuguaua

SEQ ID NO: 1028730 - RNA, 19 nt, Homo sapiens
  misc_RNA (1)...(19): siRNA sense strand
ucagggaauucacucagaa

SEQ ID NO: 1028731 - RNA, 19 nt, Homo sapiens
  misc_RNA (1)...(19): siRNA sense strand
gagaagagccauggacauc

SEQ ID NO: 1028732 - RNA, 19 nt, Homo sapiens
  misc_RNA (1)...(19): siRNA sense strand
ggaaguccuuucgccagaa

SEQ ID NO: 1028733 - RNA, 19 nt, Homo sapiens
  misc_RNA (1)...(19): siRNA sense strand
ucaaggaacaccaagagaa

SEQ ID NO: 1028734 - RNA, 19 nt, Homo sapiens
  misc_RNA (1)...(19): siRNA sense strand
gaacaccaagagaaguauu

SEQ ID NO: 1028735 - RNA, 19 nt, Homo sapiens
  misc_RNA (1)...(19): siRNA sense strand
gaauguaaugaauguggua

SEQ ID NO: 1028736 - RNA, 19 nt, Homo sapiens
  misc_RNA (1)...(19): siRNA sense strand
aggcaaaucuuacuguaca

SEQ ID NO: 1028737 - RNA, 19 nt, Homo sapiens
  misc_RNA (1)...(19): siRNA sense strand
caagacagcccucacugau

SEQ ID NO: 1028738 - RNA, 19 nt, Homo sapiens
  misc_RNA (1)...(19): siRNA sense strand
ugagaaaucauuccuucaa

SEQ ID NO: 1028739 - RNA, 19 nt, Homo sapiens
  misc_RNA (1)...(19): siRNA sense strand
uauaagagaaaccucauug

SEQ ID NO: 1028740 - RNA, 19 nt, Homo sapiens
  misc_RNA (1)...(19): siRNA sense strand
caggagagaaaccauauga

SEQ ID NO: 1028741 - RNA, 19 nt, Homo sapiens
  misc_RNA (1)...(19): siRNA sense strand
gaacucacacgggagagaa

SEQ ID NO: 1028742 - RNA, 19 nt, Homo sapiens
  misc_RNA (1)...(19): siRNA sense strand
ggaaaagcccuauauuugu

SEQ ID NO: 1028743 - RNA, 19 nt, Homo sapiens
  misc_RNA (1)...(19): siRNA sense strand
ucucauucaucaucaaaga

SEQ ID NO: 1028744 - RNA, 19 nt, Homo sapiens
  misc_RNA (1)...(19): siRNA sense strand
cacagucauuuggauauaa

SEQ ID NO: 1028745 - RNA, 19 nt, Homo sapiens
  misc_RNA (1)...(19): siRNA sense strand
cgggagagaaaccauauaa

SEQ ID NO: 1028746 - RNA, 19 nt, Homo sapiens
  misc_RNA (1)...(19): siRNA sense strand
gaaguccuuucaccagaag

SEQ ID NO: 1028747 - RNA, 19 nt, Homo sapiens
  misc_RNA (1)...(19): siRNA sense strand
cuacaucagagaauccaua

SEQ ID NO: 1028748 - RNA, 19 nt, Homo sapiens
  misc_RNA (1)...(19): siRNA sense strand
caaugaaugugggaaaucu

SEQ ID NO: 1028749 - RNA, 19 nt, Homo sapiens
  misc_RNA (1)...(19): siRNA sense strand
cauaguagaccuuacaaag

SEQ ID NO: 1028750 - RNA, 19 nt, Homo sapiens
  misc_RNA (1)...(19): siRNA sense strand
ggaggccugauuacacaua

SEQ ID NO: 1028751 - RNA, 19 nt, Homo sapiens
  misc_RNA (1)...(19): siRNA sense strand
gggagaaaucuuaugaaug

SEQ ID NO: 1028752 - RNA, 19 nt, Homo sapiens
  misc_RNA (1)...(19): siRNA sense strand
caggaagucauaucucauu

SEQ ID NO: 1028753 - RNA, 19 nt, Homo sapiens
  misc_RNA (1)...(19): siRNA sense strand
ggaaaggccuucaguugua

SEQ ID NO: 1028754 - RNA, 19 nt, Homo sapiens
  misc_RNA (1)...(19): siRNA sense strand
agucagaacucacaauuua

SEQ ID NO: 1028755 - RNA, 19 nt, Homo sapiens
  misc_RNA (1)...(19): siRNA sense strand
acuaagagcucacaacuuu

SEQ ID NO: 1028756 - RNA, 19 nt, Homo sapiens
  misc_RNA (1)...(19): siRNA sense strand
gggaaggccuuuaguuauu

SEQ ID NO: 1028757 - RNA, 19 nt, Homo sapiens
  misc_RNA (1)...(19): siRNA sense strand
gcucagcacuuacuaauca

SEQ ID NO: 1028758 - RNA, 19 nt, Homo sapiens
  misc_RNA (1)...(19): siRNA sense strand
gaauacaugcccacauuua

SEQ ID NO: 1028759 - RNA, 19 nt, Homo sapiens
  misc_RNA (1)...(19): siRNA sense strand
gcucauaccuuucucaaca

SEQ ID NO: 1028760 - RNA, 19 nt, Homo sapiens
  misc_RNA (1)...(19): siRNA sense strand
acucagaacucacaacuuu

SEQ ID NO: 1028761 - RNA, 19 nt, Homo sapiens
  misc_RNA (1)...(19): siRNA sense strand
caacugggauauccaaaug

SEQ ID NO: 1028762 - RNA, 19 nt, Homo sapiens
  misc_RNA (1)...(19): siRNA sense strand
gagaaacccuaugauugua

SEQ ID NO: 1028763 - RNA, 19 nt, Homo sapiens
  misc_RNA (1)...(19): siRNA sense strand
gagaaacccuaugaaugua

SEQ ID NO: 1028764 - RNA, 19 nt, Homo sapiens
  misc_RNA (1)...(19): siRNA sense strand
caacagacauuccuuacuc

SEQ ID NO: 1028765 - RNA, 19 nt, Homo sapiens
  misc_RNA (1)...(19): siRNA sense strand
uaagaaacccuaugaaugu

SEQ ID NO: 1028766 - RNA, 19 nt, Homo sapiens
  misc_RNA (1)...(19): siRNA sense strand
caagugaucuccuuauugg

SEQ ID NO: 1028767 - RNA, 19 nt, Homo sapiens
  misc_RNA (1)...(19): siRNA sense strand
gggaaggccuuuacucaga

SEQ ID NO: 1028768 - RNA, 19 nt, Homo sapiens
  misc_RNA (1)...(19): siRNA sense strand
caacaucagagaauucaua

SEQ ID NO: 1028769 - RNA, 19 nt, Homo sapiens
  misc_RNA (1)...(19): siRNA sense strand
caacaucagagaauucaua

SEQ ID NO: 1028770 - RNA, 19 nt, Homo sapiens
  misc_RNA (1)...(19): siRNA sense strand
gaagacagacccuaugaau

SEQ ID NO: 1028771 - RNA, 19 nt, Homo sapiens
  misc_RNA (1)...(19): siRNA sense strand
gaaaagcccuauaacugua

SEQ ID NO: 1028772 - RNA, 19 nt, Homo sapiens
  misc_RNA (1)...(19): siRNA sense strand
guaagaaacccuaugaaug

SEQ ID NO: 1028773 - RNA, 19 nt, Homo sapiens
  misc_RNA (1)...(19): siRNA sense strand
caucagagaauucauauug

SEQ ID NO: 1028774 - RNA, 19 nt, Homo sapiens
  misc_RNA (1)...(19): siRNA sense strand
guucagaucuggaaucgau

SEQ ID NO: 1028775 - RNA, 19 nt, Homo sapiens
  misc_RNA (1)...(19): siRNA sense strand
ggaaggccuuuaguuauug

SEQ ID NO: 1028776 - RNA, 19 nt, Homo sapiens
  misc_RNA (1)...(19): siRNA sense strand
ggaaggccuuuacucagaa

SEQ ID NO: 1028777 - RNA, 19 nt, Homo sapiens
  misc_RNA (1)...(19): siRNA sense strand
gagaugugauguuggagaa

SEQ ID NO: 1028778 - RNA, 19 nt, Homo sapiens
  misc_RNA (1)...(19): siRNA sense strand
caacaucagagaauccaua

SEQ ID NO: 1028779 - RNA, 19 nt, Homo sapiens
  misc_RNA (1)...(19): siRNA sense strand
ugagaaacccuaugaaugu

SEQ ID NO: 1028780 - RNA, 19 nt, Homo sapiens
  misc_RNA (1)...(19): siRNA sense strand
ugagaaacccuuugaaugu

SEQ ID NO: 1028781 - RNA, 19 nt, Homo sapiens
  misc_RNA (1)...(19): siRNA sense strand
gaacuacggcaaucugguu

SEQ ID NO: 1028782 - RNA, 19 nt, Homo sapiens
  misc_RNA (1)...(19): siRNA sense strand
gggaaauucuuuaguugug

SEQ ID NO: 1028783 - RNA, 19 nt, Homo sapiens
  misc_RNA (1)...(19): siRNA sense strand
agacagacccuaugaaugu

SEQ ID NO: 1028784 - RNA, 19 nt, Homo sapiens
  misc_RNA (1)...(19): siRNA sense strand
caagaggccuguguucaga

SEQ ID NO: 1028785 - RNA, 19 nt, Homo sapiens
  misc_RNA (1)...(19): siRNA sense strand
auacagagaugugauguug

SEQ ID NO: 1028786 - RNA, 19 nt, Homo sapiens
  misc_RNA (1)...(19): siRNA sense strand
gugggaaggccuuuaguua

SEQ ID NO: 1028787 - RNA, 19 nt, Homo sapiens
  misc_RNA (1)...(19): siRNA sense strand
gaaaccaaguuauuaucuc

SEQ ID NO: 1028788 - RNA, 19 nt, Homo sapiens
  misc_RNA (1)...(19): siRNA sense strand
gcucacagcuucgucaaca

SEQ ID NO: 1028789 - RNA, 19 nt, Homo sapiens
  misc_RNA (1)...(19): siRNA sense strand
guaaagagugugggaaauu

SEQ ID NO: 1028790 - RNA, 19 nt, Homo sapiens
  misc_RNA (1)...(19): siRNA sense strand
gagaaacccuuugaauguc

SEQ ID NO: 1028791 - RNA, 19 nt, Homo sapiens
  misc_RNA (1)...(19): siRNA sense strand
cagcaugcacgaauucaua

SEQ ID NO: 1028792 - RNA, 19 nt, Homo sapiens
  misc_RNA (1)...(19): siRNA sense strand
uaaagagugugggaaauuc

SEQ ID NO: 1028793 - RNA, 19 nt, Homo sapiens
  misc_RNA (1)...(19): siRNA sense strand
gaaagagcccuggaugguu

SEQ ID NO: 1028794 - RNA, 19 nt, Homo sapiens
  misc_RNA (1)...(19): siRNA sense strand
ucagugauguguccauaga

SEQ ID NO: 1028795 - RNA, 19 nt, Homo sapiens
  misc_RNA (1)...(19): siRNA sense strand
gugagaaacccuaugauug

SEQ ID NO: 1028796 - RNA, 19 nt, Homo sapiens
  misc_RNA (1)...(19): siRNA sense strand
gguaagaaacccuaugaau

SEQ ID NO: 1028797 - RNA, 19 nt, Homo sapiens
  misc_RNA (1)...(19): siRNA sense strand
ucagugauguucagugaug

SEQ ID NO: 1028798 - RNA, 19 nt, Homo sapiens
  misc_RNA (1)...(19): siRNA sense strand
cugaauacaugcccacauu

SEQ ID NO: 1028799 - RNA, 19 nt, Homo sapiens
  misc_RNA (1)...(19): siRNA sense strand
ggaaagagcccuggauggu

SEQ ID NO: 1028800 - RNA, 19 nt, Homo sapiens
  misc_RNA (1)...(19): siRNA sense strand
ugagaaacccuaugauugu

SEQ ID NO: 1028801 - RNA, 19 nt, Homo sapiens
  misc_RNA (1)...(19): siRNA sense strand
ggugagaaacccuaugauu

SEQ ID NO: 1028802 - RNA, 19 nt, Homo sapiens
  misc_RNA (1)...(19): siRNA sense strand
gaaaggccuucaguuguag

SEQ ID NO: 1028803 - RNA, 19 nt, Homo sapiens
  misc_RNA (1)...(19): siRNA sense strand
gacagacccuaugaaugua

SEQ ID NO: 1028804 - RNA, 19 nt, Homo sapiens
  misc_RNA (1)...(19): siRNA sense strand
caucagggaauucauacua

SEQ ID NO: 1028805 - RNA, 19 nt, Homo sapiens
  misc_RNA (1)...(19): siRNA sense strand
gagauaaugggacuuacaa

SEQ ID NO: 1028806 - RNA, 19 nt, Homo sapiens
  misc_RNA (1)...(19): siRNA sense strand
caaaucuuauugaccauca

SEQ ID NO: 1028807 - RNA, 19 nt, Homo sapiens
  misc_RNA (1)...(19): siRNA sense strand
aguuguagcucauaccuuu

SEQ ID NO: 1028808 - RNA, 19 nt, Homo sapiens
  misc_RNA (1)...(19): siRNA sense strand
acagagaugugauguugga

SEQ ID NO: 1028809 - RNA, 19 nt, Homo sapiens
  misc_RNA (1)...(19): siRNA sense strand
cagcaucagagaauucaua

SEQ ID NO: 1028810 - RNA, 19 nt, Homo sapiens
  misc_RNA (1)...(19): siRNA sense strand
ucagagaauucauacagau

SEQ ID NO: 1028811 - RNA, 19 nt, Homo sapiens
  misc_RNA (1)...(19): siRNA sense strand
uaaugggacuuacaaagca

SEQ ID NO: 1028812 - RNA, 19 nt, Homo sapiens
  misc_RNA (1)...(19): siRNA sense strand
gaaacccuaugauuguaag

SEQ ID NO: 1028813 - RNA, 19 nt, Homo sapiens
  misc_RNA (1)...(19): siRNA sense strand
gaaacccuaugaauguaag

SEQ ID NO: 1028814 - RNA, 19 nt, Homo sapiens
  misc_RNA (1)...(19): siRNA sense strand
gaaacccuaugaauguaag

SEQ ID NO: 1028815 - RNA, 19 nt, Homo sapiens
  misc_RNA (1)...(19): siRNA sense strand
ggacuuauacagagaugug

SEQ ID NO: 1028816 - RNA, 19 nt, Homo sapiens
  misc_RNA (1)...(19): siRNA sense strand
gugggaaauucuuuaguug

SEQ ID NO: 1028817 - RNA, 19 nt, Homo sapiens
  misc_RNA (1)...(19): siRNA sense strand
ugugggaaauucuuuaguu

SEQ ID NO: 1028818 - RNA, 19 nt, Homo sapiens
  misc_RNA (1)...(19): siRNA sense strand
caaagcauggccuugagua

SEQ ID NO: 1028819 - RNA, 19 nt, Homo sapiens
  misc_RNA (1)...(19): siRNA sense strand
guucagugauguguccaua

SEQ ID NO: 1028820 - RNA, 19 nt, Homo sapiens
  misc_RNA (1)...(19): siRNA sense strand
gugagaaacccuuugaaug

SEQ ID NO: 1028821 - RNA, 19 nt, Homo sapiens
  misc_RNA (1)...(19): siRNA sense strand
gugagaaacccuaugaaug

SEQ ID NO: 1028822 - RNA, 19 nt, Homo sapiens
  misc_RNA (1)...(19): siRNA sense strand
aagaaacccuaugaaugua

SEQ ID NO: 1028823 - RNA, 19 nt, Homo sapiens
  misc_RNA (1)...(19): siRNA sense strand
gauaaugggacuuacaaag

SEQ ID NO: 1028824 - RNA, 19 nt, Homo sapiens
  misc_RNA (1)...(19): siRNA sense strand
guggaaaggccuucaguug

SEQ ID NO: 1028825 - RNA, 19 nt, Homo sapiens
  misc_RNA (1)...(19): siRNA sense strand
caucagagaauucauacug

SEQ ID NO: 1028826 - RNA, 19 nt, Homo sapiens
  misc_RNA (1)...(19): siRNA sense strand
ggagauguuuuggaauaua

SEQ ID NO: 1028827 - RNA, 19 nt, Homo sapiens
  misc_RNA (1)...(19): siRNA sense strand
ucagagggacuuauacaga

SEQ ID NO: 1028828 - RNA, 19 nt, Homo sapiens
  misc_RNA (1)...(19): siRNA sense strand
ggugagaaacccuuugaau

SEQ ID NO: 1028829 - RNA, 19 nt, Homo sapiens
  misc_RNA (1)...(19): siRNA sense strand
ggugagaaacccuaugaau

SEQ ID NO: 1028830 - RNA, 19 nt, Homo sapiens
  misc_RNA (1)...(19): siRNA sense strand
gaauguaagaaauguggaa

SEQ ID NO: 1028831 - RNA, 19 nt, Homo sapiens
  misc_RNA (1)...(19): siRNA sense strand
gaugugugaaaccaaguua

SEQ ID NO: 1028832 - RNA, 19 nt, Homo sapiens
  misc_RNA (1)...(19): siRNA sense strand
cagggaauucauacuaaua

SEQ ID NO: 1028833 - RNA, 19 nt, Homo sapiens
  misc_RNA (1)...(19): siRNA sense strand
gaaacccuuugaaugucuu

SEQ ID NO: 1028834 - RNA, 19 nt, Homo sapiens
  misc_RNA (1)...(19): siRNA sense strand
gagaauccauaccgguaag

SEQ ID NO: 1028835 - RNA, 19 nt, Homo sapiens
  misc_RNA (1)...(19): siRNA sense strand
ucagagaauucauauuggu

SEQ ID NO: 1028836 - RNA, 19 nt, Homo sapiens
  misc_RNA (1)...(19): siRNA sense strand
gugugaaaccaaguuauua

SEQ ID NO: 1028837 - RNA, 19 nt, Homo sapiens
  misc_RNA (1)...(19): siRNA sense strand
gcacuuacuaaucaucaga

SEQ ID NO: 1028838 - RNA, 19 nt, Homo sapiens
  misc_RNA (1)...(19): siRNA sense strand
gaauguaaggaauguggaa

SEQ ID NO: 1028839 - RNA, 19 nt, Homo sapiens
  misc_RNA (1)...(19): siRNA sense strand
gaagccaccuugcaaaaca

SEQ ID NO: 1028840 - RNA, 19 nt, Homo sapiens
  misc_RNA (1)...(19): siRNA sense strand
ucagggaauucauacuaau

SEQ ID NO: 1028841 - RNA, 19 nt, Homo sapiens
  misc_RNA (1)...(19): siRNA sense strand
ucaagugaucuccuuauug

SEQ ID NO: 1028842 - RNA, 19 nt, Homo sapiens
  misc_RNA (1)...(19): siRNA sense strand
ggagauaaugggacuuaca

SEQ ID NO: 1028843 - RNA, 19 nt, Homo sapiens
  misc_RNA (1)...(19): siRNA sense strand
cgucaucagggaauucaua

SEQ ID NO: 1028844 - RNA, 19 nt, Homo sapiens
  misc_RNA (1)...(19): siRNA sense strand
uuacaaagcauggccuuga

SEQ ID NO: 1028845 - RNA, 19 nt, Homo sapiens
  misc_RNA (1)...(19): siRNA sense strand
uauagaagccaccuugcaa

SEQ ID NO: 1028846 - RNA, 19 nt, Homo sapiens
  misc_RNA (1)...(19): siRNA sense strand
gagugugggaaauucuuua

SEQ ID NO: 1028847 - RNA, 19 nt, Homo sapiens
  misc_RNA (1)...(19): siRNA sense strand
auacaugcccacauuuauu

SEQ ID NO: 1028848 - RNA, 19 nt, Homo sapiens
  misc_RNA (1)...(19): siRNA sense strand
gaauucauacuggugagaa

SEQ ID NO: 1028849 - RNA, 19 nt, Homo sapiens
  misc_RNA (1)...(19): siRNA sense strand
cccuauaacuguaaggaau

SEQ ID NO: 1028850 - RNA, 19 nt, Homo sapiens
  misc_RNA (1)...(19): siRNA sense strand
gaauguaaugaauguggaa

SEQ ID NO: 1028851 - RNA, 19 nt, Homo sapiens
  misc_RNA (1)...(19): siRNA sense strand
gaaugugggaaggccuuua

SEQ ID NO: 1028852 - RNA, 19 nt, Homo sapiens
  misc_RNA (1)...(19): siRNA sense strand
ggagaacuacggcaaucug

SEQ ID NO: 1028853 - RNA, 19 nt, Homo sapiens
  misc_RNA (1)...(19): siRNA sense strand
ggagaaacccuaugaaugu

SEQ ID NO: 1028854 - RNA, 19 nt, Homo sapiens
  misc_RNA (1)...(19): siRNA sense strand
gagaaacccuaucagugua

SEQ ID NO: 1028855 - RNA, 19 nt, Homo sapiens
  misc_RNA (1)...(19): siRNA sense strand
ggaaggccuuugcuuguuu

SEQ ID NO: 1028856 - RNA, 19 nt, Homo sapiens
  misc_RNA (1)...(19): siRNA sense strand
gagaaacccuaugaaugua

SEQ ID NO: 1028857 - RNA, 19 nt, Homo sapiens
  misc_RNA (1)...(19): siRNA sense strand
gagaaacccuaugaaugua

SEQ ID NO: 1028858 - RNA, 19 nt, Homo sapiens
  misc_RNA (1)...(19): siRNA sense strand
ugacaaacccuaugaaugu

SEQ ID NO: 1028859 - RNA, 19 nt, Homo sapiens
  misc_RNA (1)...(19): siRNA sense strand
gcagagagcccaucuuagu

SEQ ID NO: 1028860 - RNA, 19 nt, Homo sapiens
  misc_RNA (1)...(19): siRNA sense strand
uuacuuggcuuucaaacuu

SEQ ID NO: 1028861 - RNA, 19 nt, Homo sapiens
  misc_RNA (1)...(19): siRNA sense strand
gacaaacccuaugaaugua

SEQ ID NO: 1028862 - RNA, 19 nt, Homo sapiens
  misc_RNA (1)...(19): siRNA sense strand
ugagaaacccuuugaaugu

SEQ ID NO: 1028863 - RNA, 19 nt, Homo sapiens
  misc_RNA (1)...(19): siRNA sense strand
ugagaaacccuaugaaugu

SEQ ID NO: 1028864 - RNA, 19 nt, Homo sapiens
  misc_RNA (1)...(19): siRNA sense strand
uaaagaaugugggaagguu

SEQ ID NO: 1028865 - RNA, 19 nt, Homo sapiens
  misc_RNA (1)...(19): siRNA sense strand
gaaacccuaugaauguaau

SEQ ID NO: 1028866 - RNA, 19 nt, Homo sapiens
  misc_RNA (1)...(19): siRNA sense strand
gaaacccuaugaauguaau

SEQ ID NO: 1028867 - RNA, 19 nt, Homo sapiens
  misc_RNA (1)...(19): siRNA sense strand
caacaucaaagaauuccua

SEQ ID NO: 1028868 - RNA, 19 nt, Homo sapiens
  misc_RNA (1)...(19): siRNA sense strand
aagcagagagcccaucuua

SEQ ID NO: 1028869 - RNA, 19 nt, Homo sapiens
  misc_RNA (1)...(19): siRNA sense strand
gaauguaaggaauguguaa

SEQ ID NO: 1028870 - RNA, 19 nt, Homo sapiens
  misc_RNA (1)...(19): siRNA sense strand
ucagagaauucacaaagga

SEQ ID NO: 1028871 - RNA, 19 nt, Homo sapiens
  misc_RNA (1)...(19): siRNA sense strand
ggccuuugcuuguuuccua

SEQ ID NO: 1028872 - RNA, 19 nt, Homo sapiens
  misc_RNA (1)...(19): siRNA sense strand
gggagaaacccuaugaaug

SEQ ID NO: 1028873 - RNA, 19 nt, Homo sapiens
  misc_RNA (1)...(19): siRNA sense strand
gagaaacccuuugaauguc

SEQ ID NO: 1028874 - RNA, 19 nt, Homo sapiens
  misc_RNA (1)...(19): siRNA sense strand
ccuaugaguuuaaggaaug

SEQ ID NO: 1028875 - RNA, 19 nt, Homo sapiens
  misc_RNA (1)...(19): siRNA sense strand
gggaaggccuuugcuuguu

SEQ ID NO: 1028876 - RNA, 19 nt, Homo sapiens
  misc_RNA (1)...(19): siRNA sense strand
gugaaacccuaugaaugua

SEQ ID NO: 1028877 - RNA, 19 nt, Homo sapiens
  misc_RNA (1)...(19): siRNA sense strand
gggcgcaucuuacucaaca

SEQ ID NO: 1028878 - RNA, 19 nt, Homo sapiens
  misc_RNA (1)...(19): siRNA sense strand
caaacccuaugaauguaaa

SEQ ID NO: 1028879 - RNA, 19 nt, Homo sapiens
  misc_RNA (1)...(19): siRNA sense strand
ggagagaaacccuaucagu

SEQ ID NO: 1028880 - RNA, 19 nt, Homo sapiens
  misc_RNA (1)...(19): siRNA sense strand
gaaacccuaucaguguaaa

SEQ ID NO: 1028881 - RNA, 19 nt, Homo sapiens
  misc_RNA (1)...(19): siRNA sense strand
gaaacccuaugaauguaag

SEQ ID NO: 1028882 - RNA, 19 nt, Homo sapiens
  misc_RNA (1)...(19): siRNA sense strand
gaauguaggaaggccuuua

SEQ ID NO: 1028883 - RNA, 19 nt, Homo sapiens
  misc_RNA (1)...(19): siRNA sense strand
gugagaaacccuaugaguu

SEQ ID NO: 1028884 - RNA, 19 nt, Homo sapiens
  misc_RNA (1)...(19): siRNA sense strand
gugagaaacccuaugaaug

SEQ ID NO: 1028885 - RNA, 19 nt, Homo sapiens
  misc_RNA (1)...(19): siRNA sense strand
gugagaaacccuuugaaug

SEQ ID NO: 1028886 - RNA, 19 nt, Homo sapiens
  misc_RNA (1)...(19): siRNA sense strand
caaaggagagaaacccuau

SEQ ID NO: 1028887 - RNA, 19 nt, Homo sapiens
  misc_RNA (1)...(19): siRNA sense strand
gaaugcagcaaggccuuua

SEQ ID NO: 1028888 - RNA, 19 nt, Homo sapiens
  misc_RNA (1)...(19): siRNA sense strand
agagaaacccuaucagugu

SEQ ID NO: 1028889 - RNA, 19 nt, Homo sapiens
  misc_RNA (1)...(19): siRNA sense strand
aaucagagaauucacacua

SEQ ID NO: 1028890 - RNA, 19 nt, Homo sapiens
  misc_RNA (1)...(19): siRNA sense strand
gaaggccuuugcuuguuuc

SEQ ID NO: 1028891 - RNA, 19 nt, Homo sapiens
  misc_RNA (1)...(19): siRNA sense strand
caucaaagaauuccuacug

SEQ ID NO: 1028892 - RNA, 19 nt, Homo sapiens
  misc_RNA (1)...(19): siRNA sense strand
caucuuagucaacaucaaa

SEQ ID NO: 1028893 - RNA, 19 nt, Homo sapiens
  misc_RNA (1)...(19): siRNA sense strand
ggugagaaacccuaugaau

SEQ ID NO: 1028894 - RNA, 19 nt, Homo sapiens
  misc_RNA (1)...(19): siRNA sense strand
aggcagagggcgcaucuua

SEQ ID NO: 1028895 - RNA, 19 nt, Homo sapiens
  misc_RNA (1)...(19): siRNA sense strand
ggugagaaacccuuugaau

SEQ ID NO: 1028896 - RNA, 19 nt, Homo sapiens
  misc_RNA (1)...(19): siRNA sense strand
ugugaaacccuaugaaugu

SEQ ID NO: 1028897 - RNA, 19 nt, Homo sapiens
  misc_RNA (1)...(19): siRNA sense strand
gcagcaaggccuuuaagca

SEQ ID NO: 1028898 - RNA, 19 nt, Homo sapiens
  misc_RNA (1)...(19): siRNA sense strand
uguaaggaauguguaaaga

SEQ ID NO: 1028899 - RNA, 19 nt, Homo sapiens
  misc_RNA (1)...(19): siRNA sense strand
gcaucuuacucaacaucaa

SEQ ID NO: 1028900 - RNA, 19 nt, Homo sapiens
  misc_RNA (1)...(19): siRNA sense strand
caucagagaauucacaaag

SEQ ID NO: 1028901 - RNA, 19 nt, Homo sapiens
  misc_RNA (1)...(19): siRNA sense strand
gagcccaucuuagucaaca

SEQ ID NO: 1028902 - RNA, 19 nt, Homo sapiens
  misc_RNA (1)...(19): siRNA sense strand
cuuguuuccuaccuuaaua

SEQ ID NO: 1028903 - RNA, 19 nt, Homo sapiens
  misc_RNA (1)...(19): siRNA sense strand
caucaaagaauucauacca

SEQ ID NO: 1028904 - RNA, 19 nt, Homo sapiens
  misc_RNA (1)...(19): siRNA sense strand
ucagagaauucacacuagu

SEQ ID NO: 1028905 - RNA, 19 nt, Homo sapiens
  misc_RNA (1)...(19): siRNA sense strand
caacacuauagaacucaua

SEQ ID NO: 1028906 - RNA, 19 nt, Homo sapiens
  misc_RNA (1)...(19): siRNA sense strand
ugagaaaccuaugaauguc

SEQ ID NO: 1028907 - RNA, 19 nt, Homo sapiens
  misc_RNA (1)...(19): siRNA sense strand
gcagagggcgcaucuuacu

SEQ ID NO: 1028908 - RNA, 19 nt, Homo sapiens
  misc_RNA (1)...(19): siRNA sense strand
gagagcccaucuuagucaa

SEQ ID NO: 1028909 - RNA, 19 nt, Homo sapiens
  misc_RNA (1)...(19): siRNA sense strand
gaccuuuacuuggcuuuca

SEQ ID NO: 1028910 - RNA, 19 nt, Homo sapiens
  misc_RNA (1)...(19): siRNA sense strand
agaaacccuuugaauguca

SEQ ID NO: 1028911 - RNA, 19 nt, Homo sapiens
  misc_RNA (1)...(19): siRNA sense strand
gagaaaccuaugaauguca

SEQ ID NO: 1028912 - RNA, 19 nt, Homo sapiens
  misc_RNA (1)...(19): siRNA sense strand
gugacaaacccuaugaaug

SEQ ID NO: 1028913 - RNA, 19 nt, Homo sapiens
  misc_RNA (1)...(19): siRNA sense strand
cacuauagaacucauacua

SEQ ID NO: 1028914 - RNA, 19 nt, Homo sapiens
  misc_RNA (1)...(19): siRNA sense strand
cuaaugagaaaccuaugaa

SEQ ID NO: 1028915 - RNA, 19 nt, Homo sapiens
  misc_RNA (1)...(19): siRNA sense strand
gaauguaaugaaugugaga

SEQ ID NO: 1028916 - RNA, 19 nt, Homo sapiens
  misc_RNA (1)...(19): siRNA sense strand
uugcuuguuuccuaccuua

SEQ ID NO: 1028917 - RNA, 19 nt, Homo sapiens
  misc_RNA (1)...(19): siRNA sense strand
ggugagaaacccuaugagu

SEQ ID NO: 1028918 - RNA, 19 nt, Homo sapiens
  misc_RNA (1)...(19): siRNA sense strand
cuucuugucuuucauaggu

SEQ ID NO: 1028919 - RNA, 19 nt, Homo sapiens
  misc_RNA (1)...(19): siRNA sense strand
caucuuacucaacaucaaa

SEQ ID NO: 1028920 - RNA, 19 nt, Homo sapiens
  misc_RNA (1)...(19): siRNA sense strand
ugaaacccuaugaauguaa

SEQ ID NO: 1028921 - RNA, 19 nt, Homo sapiens
  misc_RNA (1)...(19): siRNA sense strand
aaugagaaaccuaugaaug

SEQ ID NO: 1028922 - RNA, 19 nt, Homo sapiens
  misc_RNA (1)...(19): siRNA sense strand
cccuaugaauguaaagauu

SEQ ID NO: 1028923 - RNA, 19 nt, Homo sapiens
  misc_RNA (1)...(19): siRNA sense strand
ggugacaaacccuaugaau

SEQ ID NO: 1028924 - RNA, 19 nt, Homo sapiens
  misc_RNA (1)...(19): siRNA sense strand
aaacaucagacaauucaca

SEQ ID NO: 1028925 - RNA, 19 nt, Homo sapiens
  misc_RNA (1)...(19): siRNA sense strand
ggaaugcagcaaggccuuu

SEQ ID NO: 1028926 - RNA, 19 nt, Homo sapiens
  misc_RNA (1)...(19): siRNA sense strand
uguaaugaaugugggaaug

SEQ ID NO: 1028927 - RNA, 19 nt, Homo sapiens
  misc_RNA (1)...(19): siRNA sense strand
ggccucuucuugucuuuca

SEQ ID NO: 1028928 - RNA, 19 nt, Homo sapiens
  misc_RNA (1)...(19): siRNA sense strand
gugugaaacccuaugaaug

SEQ ID NO: 1028929 - RNA, 19 nt, Homo sapiens
  misc_RNA (1)...(19): siRNA sense strand
caacucuuacucaacauca

SEQ ID NO: 1028930 - RNA, 19 nt, Homo sapiens
  misc_RNA (1)...(19): siRNA sense strand
gaaugucaggaauguagga

SEQ ID NO: 1028931 - RNA, 19 nt, Homo sapiens
  misc_RNA (1)...(19): siRNA sense strand
augagaaaccuaugaaugu

SEQ ID NO: 1028932 - RNA, 19 nt, Homo sapiens
  misc_RNA (1)...(19): siRNA sense strand
aaagaauucauaccagugu

SEQ ID NO: 1028933 - RNA, 19 nt, Homo sapiens
  misc_RNA (1)...(19): siRNA sense strand
ccuaugaauguaaagauug

SEQ ID NO: 1028934 - RNA, 19 nt, Homo sapiens
  misc_RNA (1)...(19): siRNA sense strand
agaaacccuaugaauguaa

SEQ ID NO: 1028935 - RNA, 19 nt, Homo sapiens
  misc_RNA (1)...(19): siRNA sense strand
agaaacccuaugaauguaa

SEQ ID NO: 1028936 - RNA, 19 nt, Homo sapiens
  misc_RNA (1)...(19): siRNA sense strand
gagggcgcaucuuacucaa

SEQ ID NO: 1028937 - RNA, 19 nt, Homo sapiens
  misc_RNA (1)...(19): siRNA sense strand
acaaacccuaugaauguaa

SEQ ID NO: 1028938 - RNA, 19 nt, Homo sapiens
  misc_RNA (1)...(19): siRNA sense strand
uauucauacuggugagaaa

SEQ ID NO: 1028939 - RNA, 19 nt, Homo sapiens
  misc_RNA (1)...(19): siRNA sense strand
cuaugaauguaaggaaugu

SEQ ID NO: 1028940 - RNA, 19 nt, Homo sapiens
  misc_RNA (1)...(19): siRNA sense strand
ccucuucuugucuuucaua

SEQ ID NO: 1028941 - RNA, 19 nt, Homo sapiens
  misc_RNA (1)...(19): siRNA sense strand
uaacaccagagaauucaca

SEQ ID NO: 1028942 - RNA, 19 nt, Homo sapiens
  misc_RNA (1)...(19): siRNA sense strand
agagagcccaucuuaguca

SEQ ID NO: 1028943 - RNA, 19 nt, Homo sapiens
  misc_RNA (1)...(19): siRNA sense strand
aaagaaugugggaagguuu

SEQ ID NO: 1028944 - RNA, 19 nt, Homo sapiens
  misc_RNA (1)...(19): siRNA sense strand
agaaacccuaucaguguaa

SEQ ID NO: 1028945 - RNA, 19 nt, Homo sapiens
  misc_RNA (1)...(19): siRNA sense strand
agaaaucagagaauucaca

SEQ ID NO: 1028946 - RNA, 19 nt, Homo sapiens
  misc_RNA (1)...(19): siRNA sense strand
ugaauguaaggaaugugua

SEQ ID NO: 1028947 - RNA, 19 nt, Homo sapiens
  misc_RNA (1)...(19): siRNA sense strand
cccuaugaauguaaugaau

SEQ ID NO: 1028948 - RNA, 19 nt, Homo sapiens
  misc_RNA (1)...(19): siRNA sense strand
agagggcgcaucuuacuca

SEQ ID NO: 1028949 - RNA, 19 nt, Homo sapiens
  misc_RNA (1)...(19): siRNA sense strand
gacaucagagaauucacaa

SEQ ID NO: 1028950 - RNA, 19 nt, Homo sapiens
  misc_RNA (1)...(19): siRNA sense strand
cccuaugaauguaaugaau

SEQ ID NO: 1028951 - RNA, 19 nt, Homo sapiens
  misc_RNA (1)...(19): siRNA sense strand
guaaggaauguguaaagac

SEQ ID NO: 1028952 - RNA, 19 nt, Homo sapiens
  misc_RNA (1)...(19): siRNA sense strand
gaauuccuacuggugagaa

SEQ ID NO: 1028953 - RNA, 19 nt, Homo sapiens
  misc_RNA (1)...(19): siRNA sense strand
gggaaggccuuuagacuua

SEQ ID NO: 1028954 - RNA, 19 nt, Homo sapiens
  misc_RNA (1)...(19): siRNA sense strand
gggaagaccuuuagauuug

SEQ ID NO: 1028955 - RNA, 19 nt, Homo sapiens
  misc_RNA (1)...(19): siRNA sense strand
agucauagcuaucaacuua

SEQ ID NO: 1028956 - RNA, 19 nt, Homo sapiens
  misc_RNA (1)...(19): siRNA sense strand
cgaguucguucucaaauua

SEQ ID NO: 1028957 - RNA, 19 nt, Homo sapiens
  misc_RNA (1)...(19): siRNA sense strand
guacagagaugugauguug

SEQ ID NO: 1028958 - RNA, 19 nt, Homo sapiens
  misc_RNA (1)...(19): siRNA sense strand
gaacaucagagacuucaua

SEQ ID NO: 1028959 - RNA, 19 nt, Homo sapiens
  misc_RNA (1)...(19): siRNA sense strand
gggaaggccuuuagucgua

SEQ ID NO: 1028960 - RNA, 19 nt, Homo sapiens
  misc_RNA (1)...(19): siRNA sense strand
gggaagaccuuucgaguuc

SEQ ID NO: 1028961 - RNA, 19 nt, Homo sapiens
  misc_RNA (1)...(19): siRNA sense strand
gaaaucaguuuauccaaag

SEQ ID NO: 1028962 - RNA, 19 nt, Homo sapiens
  misc_RNA (1)...(19): siRNA sense strand
gaaaauagauucugaugug

SEQ ID NO: 1028963 - RNA, 19 nt, Homo sapiens
  misc_RNA (1)...(19): siRNA sense strand
gaaaagcccuauaaaugua

SEQ ID NO: 1028964 - RNA, 19 nt, Homo sapiens
  misc_RNA (1)...(19): siRNA sense strand
caacagggacuuaaagaaa

SEQ ID NO: 1028965 - RNA, 19 nt, Homo sapiens
  misc_RNA (1)...(19): siRNA sense strand
gauuagaacuuacucaaca

SEQ ID NO: 1028966 - RNA, 19 nt, Homo sapiens
  misc_RNA (1)...(19): siRNA sense strand
gaagaacucaugcagguaa

SEQ ID NO: 1028967 - RNA, 19 nt, Homo sapiens
  misc_RNA (1)...(19): siRNA sense strand
caucagagauuucauacug

SEQ ID NO: 1028968 - RNA, 19 nt, Homo sapiens
  misc_RNA (1)...(19): siRNA sense strand
uaagaaacccuaugaaugu

SEQ ID NO: 1028969 - RNA, 19 nt, Homo sapiens
  misc_RNA (1)...(19): siRNA sense strand
agacuuaauucacaccuua

SEQ ID NO: 1028970 - RNA, 19 nt, Homo sapiens
  misc_RNA (1)...(19): siRNA sense strand
gaacacagaagaacucaug

SEQ ID NO: 1028971 - RNA, 19 nt, Homo sapiens
  misc_RNA (1)...(19): siRNA sense strand
gcauaagaccaagaaauua

SEQ ID NO: 1028972 - RNA, 19 nt, Homo sapiens
  misc_RNA (1)...(19): siRNA sense strand
gcuauagacuucucucaga

SEQ ID NO: 1028973 - RNA, 19 nt, Homo sapiens
  misc_RNA (1)...(19): siRNA sense strand
guaagaaacccuaugaaug

SEQ ID NO: 1028974 - RNA, 19 nt, Homo sapiens
  misc_RNA (1)...(19): siRNA sense strand
caacuuacccgucaucaga

SEQ ID NO: 1028975 - RNA, 19 nt, Homo sapiens
  misc_RNA (1)...(19): siRNA sense strand
ccaaagagaguauaauaga

SEQ ID NO: 1028976 - RNA, 19 nt, Homo sapiens
  misc_RNA (1)...(19): siRNA sense strand
gaaaugaguggcagaacaa

SEQ ID NO: 1028977 - RNA, 19 nt, Homo sapiens
  misc_RNA (1)...(19): siRNA sense strand
ggagagaaaccauaugaau

SEQ ID NO: 1028978 - RNA, 19 nt, Homo sapiens
  misc_RNA (1)...(19): siRNA sense strand
gagaaaccauaugaaugua

SEQ ID NO: 1028979 - RNA, 19 nt, Homo sapiens
  misc_RNA (1)...(19): siRNA sense strand
ggacauucaugaaaucagu

SEQ ID NO: 1028980 - RNA, 19 nt, Homo sapiens
  misc_RNA (1)...(19): siRNA sense strand
gagaaacccuaugagugua

SEQ ID NO: 1028981 - RNA, 19 nt, Homo sapiens
  misc_RNA (1)...(19): siRNA sense strand
gagaaacccuaugagugua

SEQ ID NO: 1028982 - RNA, 19 nt, Homo sapiens
  misc_RNA (1)...(19): siRNA sense strand
ggauguggcuauagacuuc

SEQ ID NO: 1028983 - RNA, 19 nt, Homo sapiens
  misc_RNA (1)...(19): siRNA sense strand
gagaugugauguuggagaa

SEQ ID NO: 1028984 - RNA, 19 nt, Homo sapiens
  misc_RNA (1)...(19): siRNA sense strand
gaugugauguuggagaauu

SEQ ID NO: 1028985 - RNA, 19 nt, Homo sapiens
  misc_RNA (1)...(19): siRNA sense strand
gaaaccauaugaauguaag

SEQ ID NO: 1028986 - RNA, 19 nt, Homo sapiens
  misc_RNA (1)...(19): siRNA sense strand
ggcauaagaccaagaaauu

SEQ ID NO: 1028987 - RNA, 19 nt, Homo sapiens
  misc_RNA (1)...(19): siRNA sense strand
ugagaaacccuaugaaugu

SEQ ID NO: 1028988 - RNA, 19 nt, Homo sapiens
  misc_RNA (1)...(19): siRNA sense strand
gagagaaaccauaugaaug

SEQ ID NO: 1028989 - RNA, 19 nt, Homo sapiens
  misc_RNA (1)...(19): siRNA sense strand
agaaagaucuaucagucaa

SEQ ID NO: 1028990 - RNA, 19 nt, Homo sapiens
  misc_RNA (1)...(19): siRNA sense strand
ggaaggccuuuagacuuaa

SEQ ID NO: 1028991 - RNA, 19 nt, Homo sapiens
  misc_RNA (1)...(19): siRNA sense strand
gaccuuagaauacaucaaa

SEQ ID NO: 1028992 - RNA, 19 nt, Homo sapiens
  misc_RNA (1)...(19): siRNA sense strand
ugagaaaugugggaaaguu

SEQ ID NO: 1028993 - RNA, 19 nt, Homo sapiens
  misc_RNA (1)...(19): siRNA sense strand
gaacaucagagaauucaca

SEQ ID NO: 1028994 - RNA, 19 nt, Homo sapiens
  misc_RNA (1)...(19): siRNA sense strand
gaaaaggacauucaugaaa

SEQ ID NO: 1028995 - RNA, 19 nt, Homo sapiens
  misc_RNA (1)...(19): siRNA sense strand
ggacuuaaagaaagaucua

SEQ ID NO: 1028996 - RNA, 19 nt, Homo sapiens
  misc_RNA (1)...(19): siRNA sense strand
gagaaggcuuuuaguuaua

SEQ ID NO: 1028997 - RNA, 19 nt, Homo sapiens
  misc_RNA (1)...(19): siRNA sense strand
guucagggauguggcuaua

SEQ ID NO: 1028998 - RNA, 19 nt, Homo sapiens
  misc_RNA (1)...(19): siRNA sense strand
gguaagaaacccuaugaau

SEQ ID NO: 1028999 - RNA, 19 nt, Homo sapiens
  misc_RNA (1)...(19): siRNA sense strand
caacuuaaucgacaucaga

SEQ ID NO: 1029000 - RNA, 19 nt, Homo sapiens
  misc_RNA (1)...(19): siRNA sense strand
gaaacccuaugaaugucaa

SEQ ID NO: 1029001 - RNA, 19 nt, Homo sapiens
  misc_RNA (1)...(19): siRNA sense strand
gaaugugggaaguccuuua

SEQ ID NO: 1029002 - RNA, 19 nt, Homo sapiens
  misc_RNA (1)...(19): siRNA sense strand
agauuugguuucuaccuua

SEQ ID NO: 1029003 - RNA, 19 nt, Homo sapiens
  misc_RNA (1)...(19): siRNA sense strand
gaaugugggaagaccuuua

SEQ ID NO: 1029004 - RNA, 19 nt, Homo sapiens
  misc_RNA (1)...(19): siRNA sense strand
ucagggauguggcuauaga

SEQ ID NO: 1029005 - RNA, 19 nt, Homo sapiens
  misc_RNA (1)...(19): siRNA sense strand
ugagaaacccuaugagugu

SEQ ID NO: 1029006 - RNA, 19 nt, Homo sapiens
  misc_RNA (1)...(19): siRNA sense strand
gaaacccuaugaguguaaa

SEQ ID NO: 1029007 - RNA, 19 nt, Homo sapiens
  misc_RNA (1)...(19): siRNA sense strand
ugagaaacccuaugagugu

SEQ ID NO: 1029008 - RNA, 19 nt, Homo sapiens
  misc_RNA (1)...(19): siRNA sense strand
acagagaugugauguugga

SEQ ID NO: 1029009 - RNA, 19 nt, Homo sapiens
  misc_RNA (1)...(19): siRNA sense strand
caucagagacuucauacug

SEQ ID NO: 1029010 - RNA, 19 nt, Homo sapiens
  misc_RNA (1)...(19): siRNA sense strand
gagagaauucauacaggua

SEQ ID NO: 1029011 - RNA, 19 nt, Homo sapiens
  misc_RNA (1)...(19): siRNA sense strand
gagaaaugugggaaaguuu

SEQ ID NO: 1029012 - RNA, 19 nt, Homo sapiens
  misc_RNA (1)...(19): siRNA sense strand
gaaauuguacagagaugug

SEQ ID NO: 1029013 - RNA, 19 nt, Homo sapiens
  misc_RNA (1)...(19): siRNA sense strand
cuaugaaugucaagaaugu

SEQ ID NO: 1029014 - RNA, 19 nt, Homo sapiens
  misc_RNA (1)...(19): siRNA sense strand
ucagagaauucacaauagu

SEQ ID NO: 1029015 - RNA, 19 nt, Homo sapiens
  misc_RNA (1)...(19): siRNA sense strand
agagaaaccauaugaaugu

SEQ ID NO: 1029016 - RNA, 19 nt, Homo sapiens
  misc_RNA (1)...(19): siRNA sense strand
gaaaauucauacuggugua

SEQ ID NO: 1029017 - RNA, 19 nt, Homo sapiens
  misc_RNA (1)...(19): siRNA sense strand
gaaacccuaugaauguaag

SEQ ID NO: 1029018 - RNA, 19 nt, Homo sapiens
  misc_RNA (1)...(19): siRNA sense strand
gugagaaacccuaugaaug

SEQ ID NO: 1029019 - RNA, 19 nt, Homo sapiens
  misc_RNA (1)...(19): siRNA sense strand
caucaaagaauucauacug

SEQ ID NO: 1029020 - RNA, 19 nt, Homo sapiens
  misc_RNA (1)...(19): siRNA sense strand
uaguguagaccuuagaaua

SEQ ID NO: 1029021 - RNA, 19 nt, Homo sapiens
  misc_RNA (1)...(19): siRNA sense strand
gugaagcccuacgaaugua

SEQ ID NO: 1029022 - RNA, 19 nt, Homo sapiens
  misc_RNA (1)...(19): siRNA sense strand
cauguaaggugugugagaa

SEQ ID NO: 1029023 - RNA, 19 nt, Homo sapiens
  misc_RNA (1)...(19): siRNA sense strand
aagaaacccuaugaaugua

SEQ ID NO: 1029024 - RNA, 19 nt, Homo sapiens
  misc_RNA (1)...(19): siRNA sense strand
agaaaugaguggcagaaca

SEQ ID NO: 1029025 - RNA, 19 nt, Homo sapiens
  misc_RNA (1)...(19): siRNA sense strand
gaacucaugcagguaagaa

SEQ ID NO: 1029026 - RNA, 19 nt, Homo sapiens
  misc_RNA (1)...(19): siRNA sense strand
gaaagaucuaucagucaaa

SEQ ID NO: 1029027 - RNA, 19 nt, Homo sapiens
  misc_RNA (1)...(19): siRNA sense strand
gagaaacccuaugaauguc

SEQ ID NO: 1029028 - RNA, 19 nt, Homo sapiens
  misc_RNA (1)...(19): siRNA sense strand
gcucaaagccagaugugau

SEQ ID NO: 1029029 - RNA, 19 nt, Homo sapiens
  misc_RNA (1)...(19): siRNA sense strand
ccauaugaauguaaggaau

SEQ ID NO: 1029030 - RNA, 19 nt, Homo sapiens
  misc_RNA (1)...(19): siRNA sense strand
gaauucauacugguaagaa

SEQ ID NO: 1029031 - RNA, 19 nt, Homo sapiens
  misc_RNA (1)...(19): siRNA sense strand
gaacaccagagaauucaca

SEQ ID NO: 1029032 - RNA, 19 nt, Homo sapiens
  misc_RNA (1)...(19): siRNA sense strand
gugaagcccuacaaaugug

SEQ ID NO: 1029033 - RNA, 19 nt, Homo sapiens
  misc_RNA (1)...(19): siRNA sense strand
ugagaaggcuuuuaguuau

SEQ ID NO: 1029034 - RNA, 19 nt, Homo sapiens
  misc_RNA (1)...(19): siRNA sense strand
gaauguaaagaauguggaa

SEQ ID NO: 1029035 - RNA, 19 nt, Homo sapiens
  misc_RNA (1)...(19): siRNA sense strand
agaggaaauuguacagaga

SEQ ID NO: 1029036 - RNA, 19 nt, Homo sapiens
  misc_RNA (1)...(19): siRNA sense strand
gaaggccuuuagacuuaau

SEQ ID NO: 1029037 - RNA, 19 nt, Homo sapiens
  misc_RNA (1)...(19): siRNA sense strand
gugaaaagcccuauaaaug

SEQ ID NO: 1029038 - RNA, 19 nt, Homo sapiens
  misc_RNA (1)...(19): siRNA sense strand
gugggaagaccuuuagauu

SEQ ID NO: 1029039 - RNA, 19 nt, Homo sapiens
  misc_RNA (1)...(19): siRNA sense strand
gaugugaagcccuacaaau

SEQ ID NO: 1029040 - RNA, 19 nt, Homo sapiens
  misc_RNA (1)...(19): siRNA sense strand
ggacagcuuaaucggcaua

SEQ ID NO: 1029041 - RNA, 19 nt, Homo sapiens
  misc_RNA (1)...(19): siRNA sense strand
uaaggagugugggaaauca

SEQ ID NO: 1029042 - RNA, 19 nt, Homo sapiens
  misc_RNA (1)...(19): siRNA sense strand
ggugagaaacccuaugaau

SEQ ID NO: 1029043 - RNA, 19 nt, Homo sapiens
  misc_RNA (1)...(19): siRNA sense strand
aaaggacauucaugaaauc

SEQ ID NO: 1029044 - RNA, 19 nt, Homo sapiens
  misc_RNA (1)...(19): siRNA sense strand
ugggaagaccuuuagauuu

SEQ ID NO: 1029045 - RNA, 19 nt, Homo sapiens
  misc_RNA (1)...(19): siRNA sense strand
gugagaaggcuuuuaguua

SEQ ID NO: 1029046 - RNA, 19 nt, Homo sapiens
  misc_RNA (1)...(19): siRNA sense strand
gggauauucuggcucaaag

SEQ ID NO: 1029047 - RNA, 19 nt, Homo sapiens
  misc_RNA (1)...(19): siRNA sense strand
uguaaagaaugugggagua

SEQ ID NO: 1029048 - RNA, 19 nt, Homo sapiens
  misc_RNA (1)...(19): siRNA sense strand
gaaugugggaguacuuuua

SEQ ID NO: 1029049 - RNA, 19 nt, Homo sapiens
  misc_RNA (1)...(19): siRNA sense strand
ggaagaccuuuagauuugg

SEQ ID NO: 1029050 - RNA, 19 nt, Homo sapiens
  misc_RNA (1)...(19): siRNA sense strand
gaauguaaggaauguggaa

SEQ ID NO: 1029051 - RNA, 19 nt, Homo sapiens
  misc_RNA (1)...(19): siRNA sense strand
guaaaacccuacgaaugua

SEQ ID NO: 1029052 - RNA, 19 nt, Homo sapiens
  misc_RNA (1)...(19): siRNA sense strand
ugggaaagcuuuuagugua

SEQ ID NO: 1029053 - RNA, 19 nt, Homo sapiens
  misc_RNA (1)...(19): siRNA sense strand
gaacuuaacucacaucaca

SEQ ID NO: 1029054 - RNA, 19 nt, Homo sapiens
  misc_RNA (1)...(19): siRNA sense strand
gcaaaggccugccagauga

SEQ ID NO: 1029055 - RNA, 19 nt, Homo sapiens
  misc_RNA (1)...(19): siRNA sense strand
ccagggaacugaugaauuu

SEQ ID NO: 1029056 - RNA, 19 nt, Homo sapiens
  misc_RNA (1)...(19): siRNA sense strand
agaagaagcugaugaagga

SEQ ID NO: 1029057 - RNA, 19 nt, Homo sapiens
  misc_RNA (1)...(19): siRNA sense strand
ugacaucucugcuguuuau

SEQ ID NO: 1029058 - RNA, 19 nt, Homo sapiens
  misc_RNA (1)...(19): siRNA sense strand
aaagcgaccuugagacaua

SEQ ID NO: 1029059 - RNA, 19 nt, Homo sapiens
  misc_RNA (1)...(19): siRNA sense strand
uagaagaacuuaacucaca

SEQ ID NO: 1029060 - RNA, 19 nt, Homo sapiens
  misc_RNA (1)...(19): siRNA sense strand
caagagcuuuguagaagaa

SEQ ID NO: 1029061 - RNA, 19 nt, Homo sapiens
  misc_RNA (1)...(19): siRNA sense strand
gccuagaagucaucaauuu

SEQ ID NO: 1029062 - RNA, 19 nt, Homo sapiens
  misc_RNA (1)...(19): siRNA sense strand
ggagcaagccacugccuua

SEQ ID NO: 1029063 - RNA, 19 nt, Homo sapiens
  misc_RNA (1)...(19): siRNA sense strand
gcaagaagaagcugaugaa

SEQ ID NO: 1029064 - RNA, 19 nt, Homo sapiens
  misc_RNA (1)...(19): siRNA sense strand
gcaagccacugccuuaugg

SEQ ID NO: 1029065 - RNA, 19 nt, Homo sapiens
  misc_RNA (1)...(19): siRNA sense strand
ggacuuacagcuccaaaga

SEQ ID NO: 1029066 - RNA, 19 nt, Homo sapiens
  misc_RNA (1)...(19): siRNA sense strand
acaccaagcuggaggagaa

SEQ ID NO: 1029067 - RNA, 19 nt, Homo sapiens
  misc_RNA (1)...(19): siRNA sense strand
ggaagaaguucagcaccuu

SEQ ID NO: 1029068 - RNA, 19 nt, Homo sapiens
  misc_RNA (1)...(19): siRNA sense strand
ggaaaggccuagaagucau

SEQ ID NO: 1029069 - RNA, 19 nt, Homo sapiens
  misc_RNA (1)...(19): siRNA sense strand
uaacucacaucacaauaag

SEQ ID NO: 1029070 - RNA, 19 nt, Homo sapiens
  misc_RNA (1)...(19): siRNA sense strand
uagaacagcugcgggagaa

SEQ ID NO: 1029071 - RNA, 19 nt, Homo sapiens
  misc_RNA (1)...(19): siRNA sense strand
guaccaggccaucaugaaa

SEQ ID NO: 1029072 - RNA, 19 nt, Homo sapiens
  misc_RNA (1)...(19): siRNA sense strand
ucaagagcuuuguagaaga

SEQ ID NO: 1029073 - RNA, 19 nt, Homo sapiens
  misc_RNA (1)...(19): siRNA sense strand
gcacuacuccaugcagaaa

SEQ ID NO: 1029074 - RNA, 19 nt, Homo sapiens
  misc_RNA (1)...(19): siRNA sense strand
gugcagagccacagguuug

SEQ ID NO: 1029075 - RNA, 19 nt, Homo sapiens
  misc_RNA (1)...(19): siRNA sense strand
ccuacaaccucaaagacuu

SEQ ID NO: 1029076 - RNA, 19 nt, Homo sapiens
  misc_RNA (1)...(19): siRNA sense strand
ccacagguuugacaucucu

SEQ ID NO: 1029077 - RNA, 19 nt, Homo sapiens
  misc_RNA (1)...(19): siRNA sense strand
gaauuucaagagcuuugua

SEQ ID NO: 1029078 - RNA, 19 nt, Homo sapiens
  misc_RNA (1)...(19): siRNA sense strand
cuacagagaggauuuacug

SEQ ID NO: 1029079 - RNA, 19 nt, Homo sapiens
  misc_RNA (1)...(19): siRNA sense strand
acuuacagcuccaaagaga

SEQ ID NO: 1029080 - RNA, 19 nt, Homo sapiens
  misc_RNA (1)...(19): siRNA sense strand
uuugacaucucugcuguuu

SEQ ID NO: 1029081 - RNA, 19 nt, Homo sapiens
  misc_RNA (1)...(19): siRNA sense strand
guuucuggcuuccacaaga

SEQ ID NO: 1029082 - RNA, 19 nt, Homo sapiens
  misc_RNA (1)...(19): siRNA sense strand
gaaaggccuagaagucauc

SEQ ID NO: 1029083 - RNA, 19 nt, Homo sapiens
  misc_RNA (1)...(19): siRNA sense strand
cacaagagaagaaaugcaa

SEQ ID NO: 1029084 - RNA, 19 nt, Homo sapiens
  misc_RNA (1)...(19): siRNA sense strand
aagagaagcggcugaagga

SEQ ID NO: 1029085 - RNA, 19 nt, Homo sapiens
  misc_RNA (1)...(19): siRNA sense strand
gaaaugcaaacccgucaac

SEQ ID NO: 1029086 - RNA, 19 nt, Homo sapiens
  misc_RNA (1)...(19): siRNA sense strand
uaucccaacuggaagaagu

SEQ ID NO: 1029087 - RNA, 19 nt, Homo sapiens
  misc_RNA (1)...(19): siRNA sense strand
acauaggcccugggacuua

SEQ ID NO: 1029088 - RNA, 19 nt, Homo sapiens
  misc_RNA (1)...(19): siRNA sense strand
ggacaggcggcagcgauau

SEQ ID NO: 1029089 - RNA, 19 nt, Homo sapiens
  misc_RNA (1)...(19): siRNA sense strand
acucacaucacaauaagaa

SEQ ID NO: 1029090 - RNA, 19 nt, Homo sapiens
  misc_RNA (1)...(19): siRNA sense strand
gcuccuacaaccucaaaga

SEQ ID NO: 1029091 - RNA, 19 nt, Homo sapiens
  misc_RNA (1)...(19): siRNA sense strand
gaacagcugcgggagaaac

SEQ ID NO: 1029092 - RNA, 19 nt, Homo sapiens
  misc_RNA (1)...(19): siRNA sense strand
gaagaacuuaacucacauc

SEQ ID NO: 1029093 - RNA, 19 nt, Homo sapiens
  misc_RNA (1)...(19): siRNA sense strand
gagcaagccacugccuuau

SEQ ID NO: 1029094 - RNA, 19 nt, Homo sapiens
  misc_RNA (1)...(19): siRNA sense strand
gcaccuacuucuucaaaag

SEQ ID NO: 1029095 - RNA, 19 nt, Homo sapiens
  misc_RNA (1)...(19): siRNA sense strand
uucaagagcuuuguagaag

SEQ ID NO: 1029096 - RNA, 19 nt, Homo sapiens
  misc_RNA (1)...(19): siRNA sense strand
uguagaagaacuuaacuca

SEQ ID NO: 1029097 - RNA, 19 nt, Homo sapiens
  misc_RNA (1)...(19): siRNA sense strand
cgauaucgaucccuauucc

SEQ ID NO: 1029098 - RNA, 19 nt, Homo sapiens
  misc_RNA (1)...(19): siRNA sense strand
ugaaagagaagcggcugaa

SEQ ID NO: 1029099 - RNA, 19 nt, Homo sapiens
  misc_RNA (1)...(19): siRNA sense strand
gccuggaaccggucucauu

SEQ ID NO: 1029100 - RNA, 19 nt, Homo sapiens
  misc_RNA (1)...(19): siRNA sense strand
gagcuuuguagaagaacuu

SEQ ID NO: 1029101 - RNA, 19 nt, Homo sapiens
  misc_RNA (1)...(19): siRNA sense strand
aaaucaggcuguuuuguug

SEQ ID NO: 1029102 - RNA, 19 nt, Homo sapiens
  misc_RNA (1)...(19): siRNA sense strand
agaagaacuuaacucacau

SEQ ID NO: 1029103 - RNA, 19 nt, Homo sapiens
  misc_RNA (1)...(19): siRNA sense strand
gaaagagaagcggcugaag

SEQ ID NO: 1029104 - RNA, 19 nt, Homo sapiens
  misc_RNA (1)...(19): siRNA sense strand
ggccuagaagucaucaauu

SEQ ID NO: 1029105 - RNA, 19 nt, Homo sapiens
  misc_RNA (1)...(19): siRNA sense strand
uggaaaggccuagaaguca

SEQ ID NO: 1029106 - RNA, 19 nt, Homo sapiens
  misc_RNA (1)...(19): siRNA sense strand
caagagaagaaaugcaaac

SEQ ID NO: 1029107 - RNA, 19 nt, Homo sapiens
  misc_RNA (1)...(19): siRNA sense strand
uuucaagagcuuuguagaa

SEQ ID NO: 1029108 - RNA, 19 nt, Homo sapiens
  misc_RNA (1)...(19): siRNA sense strand
cggcaccuacuucuucaaa

SEQ ID NO: 1029109 - RNA, 19 nt, Homo sapiens
  misc_RNA (1)...(19): siRNA sense strand
ugcaaaggccugccagaug

SEQ ID NO: 1029110 - RNA, 19 nt, Homo sapiens
  misc_RNA (1)...(19): siRNA sense strand
gcguuauucuacccaagug

SEQ ID NO: 1029111 - RNA, 19 nt, Homo sapiens
  misc_RNA (1)...(19): siRNA sense strand
caaaagcgaccuugagaca

SEQ ID NO: 1029112 - RNA, 19 nt, Homo sapiens
  misc_RNA (1)...(19): siRNA sense strand
ccaaagagaccugcuucag

SEQ ID NO: 1029113 - RNA, 19 nt, Homo sapiens
  misc_RNA (1)...(19): siRNA sense strand
accaggccaucaugaaaga

SEQ ID NO: 1029114 - RNA, 19 nt, Homo sapiens
  misc_RNA (1)...(19): siRNA sense strand
ccuggcugauggagacaaa

SEQ ID NO: 1029115 - RNA, 19 nt, Homo sapiens
  misc_RNA (1)...(19): siRNA sense strand
uggaggagaaugccuggaa

SEQ ID NO: 1029116 - RNA, 19 nt, Homo sapiens
  misc_RNA (1)...(19): siRNA sense strand
gugcaaaggccugccagau

SEQ ID NO: 1029117 - RNA, 19 nt, Homo sapiens
  misc_RNA (1)...(19): siRNA sense strand
cauaggcccugggacuuac

SEQ ID NO: 1029118 - RNA, 19 nt, Homo sapiens
  misc_RNA (1)...(19): siRNA sense strand
ggaaagaguugcugaggua

SEQ ID NO: 1029119 - RNA, 19 nt, Homo sapiens
  misc_RNA (1)...(19): siRNA sense strand
guaaagaacccauagaaga

SEQ ID NO: 1029120 - RNA, 19 nt, Homo sapiens
  misc_RNA (1)...(19): siRNA sense strand
gaaaugcaauggagcuguu

SEQ ID NO: 1029121 - RNA, 19 nt, Homo sapiens
  misc_RNA (1)...(19): siRNA sense strand
gcucaaaugugaacugaug

SEQ ID NO: 1029122 - RNA, 19 nt, Homo sapiens
  misc_RNA (1)...(19): siRNA sense strand
uggagaagcucaaauguga

SEQ ID NO: 1029123 - RNA, 19 nt, Homo sapiens
  misc_RNA (1)...(19): siRNA sense strand
caauggagcuguuuauagu

SEQ ID NO: 1029124 - RNA, 19 nt, Homo sapiens
  misc_RNA (1)...(19): siRNA sense strand
gcaauggccuacuaaaucu

SEQ ID NO: 1029125 - RNA, 19 nt, Homo sapiens
  misc_RNA (1)...(19): siRNA sense strand
gaauaaggauaaagagaca

SEQ ID NO: 1029126 - RNA, 19 nt, Homo sapiens
  misc_RNA (1)...(19): siRNA sense strand
caagaugguuucagcagaa

SEQ ID NO: 1029127 - RNA, 19 nt, Homo sapiens
  misc_RNA (1)...(19): siRNA sense strand
gaagacaaccaaucgagaa

SEQ ID NO: 1029128 - RNA, 19 nt, Homo sapiens
  misc_RNA (1)...(19): siRNA sense strand
ggaaacgcaguuauugaua

SEQ ID NO: 1029129 - RNA, 19 nt, Homo sapiens
  misc_RNA (1)...(19): siRNA sense strand
gggcuggacugaauaagga

SEQ ID NO: 1029130 - RNA, 19 nt, Homo sapiens
  misc_RNA (1)...(19): siRNA sense strand
aaacggcaauggccuacua

SEQ ID NO: 1029131 - RNA, 19 nt, Homo sapiens
  misc_RNA (1)...(19): siRNA sense strand
gaauacagaccauggauca

SEQ ID NO: 1029132 - RNA, 19 nt, Homo sapiens
  misc_RNA (1)...(19): siRNA sense strand
gcaccaagcacuucaggaa

SEQ ID NO: 1029133 - RNA, 19 nt, Homo sapiens
  misc_RNA (1)...(19): siRNA sense strand
gaagaaggcagagaguaaa

SEQ ID NO: 1029134 - RNA, 19 nt, Homo sapiens
  misc_RNA (1)...(19): siRNA sense strand
gcaaauugacccggcuuua

SEQ ID NO: 1029135 - RNA, 19 nt, Homo sapiens
  misc_RNA (1)...(19): siRNA sense strand
gcaauggagcuguuuauag

SEQ ID NO: 1029136 - RNA, 19 nt, Homo sapiens
  misc_RNA (1)...(19): siRNA sense strand
ucagaggacuggcaaagga

SEQ ID NO: 1029137 - RNA, 19 nt, Homo sapiens
  misc_RNA (1)...(19): siRNA sense strand
ccaaagagcacauggaaag

SEQ ID NO: 1029138 - RNA, 19 nt, Homo sapiens
  misc_RNA (1)...(19): siRNA sense strand
ggauaaagagacagaagaa

SEQ ID NO: 1029139 - RNA, 19 nt, Homo sapiens
  misc_RNA (1)...(19): siRNA sense strand
gaagagacccaggagaaga

SEQ ID NO: 1029140 - RNA, 19 nt, Homo sapiens
  misc_RNA (1)...(19): siRNA sense strand
gaguaaagaacccauagaa

SEQ ID NO: 1029141 - RNA, 19 nt, Homo sapiens
  misc_RNA (1)...(19): siRNA sense strand
cagcagaaaucagugagaa

SEQ ID NO: 1029142 - RNA, 19 nt, Homo sapiens
  misc_RNA (1)...(19): siRNA sense strand
gaagaagcaccaagcacuu

SEQ ID NO: 1029143 - RNA, 19 nt, Homo sapiens
  misc_RNA (1)...(19): siRNA sense strand
gaaggcagagaguaaagaa

SEQ ID NO: 1029144 - RNA, 19 nt, Homo sapiens
  misc_RNA (1)...(19): siRNA sense strand
gaaggagacuacgcgaugu

SEQ ID NO: 1029145 - RNA, 19 nt, Homo sapiens
  misc_RNA (1)...(19): siRNA sense strand
cagaagagacccaggagaa

SEQ ID NO: 1029146 - RNA, 19 nt, Homo sapiens
  misc_RNA (1)...(19): siRNA sense strand
ggcaauggccuacuaaauc

SEQ ID NO: 1029147 - RNA, 19 nt, Homo sapiens
  misc_RNA (1)...(19): siRNA sense strand
gguagcaccugaagaaagg

SEQ ID NO: 1029148 - RNA, 19 nt, Homo sapiens
  misc_RNA (1)...(19): siRNA sense strand
ggaaagaggagaugcuucu

SEQ ID NO: 1029149 - RNA, 19 nt, Homo sapiens
  misc_RNA (1)...(19): siRNA sense strand
agaagaaggcagagaguaa

SEQ ID NO: 1029150 - RNA, 19 nt, Homo sapiens
  misc_RNA (1)...(19): siRNA sense strand
gagaagaaggcagagagua

SEQ ID NO: 1029151 - RNA, 19 nt, Homo sapiens
  misc_RNA (1)...(19): siRNA sense strand
cgagaguagugaauacaga

SEQ ID NO: 1029152 - RNA, 19 nt, Homo sapiens
  misc_RNA (1)...(19): siRNA sense strand
gaccauggaucaccagaac

SEQ ID NO: 1029153 - RNA, 19 nt, Homo sapiens
  misc_RNA (1)...(19): siRNA sense strand
guggaaaacuucuuuguga

SEQ ID NO: 1029154 - RNA, 19 nt, Homo sapiens
  misc_RNA (1)...(19): siRNA sense strand
caaauugacccggcuuuau

SEQ ID NO: 1029155 - RNA, 19 nt, Homo sapiens
  misc_RNA (1)...(19): siRNA sense strand
gcagaaaucagugagaauc

SEQ ID NO: 1029156 - RNA, 19 nt, Homo sapiens
  misc_RNA (1)...(19): siRNA sense strand
aaauugacccggcuuuauu

SEQ ID NO: 1029157 - RNA, 19 nt, Homo sapiens
  misc_RNA (1)...(19): siRNA sense strand
aaagcaggaugguuacaga

SEQ ID NO: 1029158 - RNA, 19 nt, Homo sapiens
  misc_RNA (1)...(19): siRNA sense strand
gaguucagaugaugacagu

SEQ ID NO: 1029159 - RNA, 19 nt, Homo sapiens
  misc_RNA (1)...(19): siRNA sense strand
uaaagaacccauagaagag

SEQ ID NO: 1029160 - RNA, 19 nt, Homo sapiens
  misc_RNA (1)...(19): siRNA sense strand
uagcaauggugucgagaug

SEQ ID NO: 1029161 - RNA, 19 nt, Homo sapiens
  misc_RNA (1)...(19): siRNA sense strand
guucagaugaugacaguga

SEQ ID NO: 1029162 - RNA, 19 nt, Homo sapiens
  misc_RNA (1)...(19): siRNA sense strand
gauaaagagacagaagaaa

SEQ ID NO: 1029163 - RNA, 19 nt, Homo sapiens
  misc_RNA (1)...(19): siRNA sense strand
gcaggaugguuacagaaac

SEQ ID NO: 1029164 - RNA, 19 nt, Homo sapiens
  misc_RNA (1)...(19): siRNA sense strand
caggaaagccagccaggaa

SEQ ID NO: 1029165 - RNA, 19 nt, Homo sapiens
  misc_RNA (1)...(19): siRNA sense strand
gcacuucaggaauggguuu

SEQ ID NO: 1029166 - RNA, 19 nt, Homo sapiens
  misc_RNA (1)...(19): siRNA sense strand
ccaggaaacgcaguuauug

SEQ ID NO: 1029167 - RNA, 19 nt, Homo sapiens
  misc_RNA (1)...(19): siRNA sense strand
ggaggcauauuuuagaaga

SEQ ID NO: 1029168 - RNA, 19 nt, Homo sapiens
  misc_RNA (1)...(19): siRNA sense strand
uggcaaaggagcaaauuga

SEQ ID NO: 1029169 - RNA, 19 nt, Homo sapiens
  misc_RNA (1)...(19): siRNA sense strand
gcacugccaagaucagaau

SEQ ID NO: 1029170 - RNA, 19 nt, Homo sapiens
  misc_RNA (1)...(19): siRNA sense strand
gccaggaaacgcaguuauu

SEQ ID NO: 1029171 - RNA, 19 nt, Homo sapiens
  misc_RNA (1)...(19): siRNA sense strand
gagacuacgcgaugucaau

SEQ ID NO: 1029172 - RNA, 19 nt, Homo sapiens
  misc_RNA (1)...(19): siRNA sense strand
gauggcccuuggacugaaa

SEQ ID NO: 1029173 - RNA, 19 nt, Homo sapiens
  misc_RNA (1)...(19): siRNA sense strand
cuacuaaaucucaaacaga

SEQ ID NO: 1029174 - RNA, 19 nt, Homo sapiens
  misc_RNA (1)...(19): siRNA sense strand
caggaaacgcaguuauuga

SEQ ID NO: 1029175 - RNA, 19 nt, Homo sapiens
  misc_RNA (1)...(19): siRNA sense strand
ggaaaacuucuuugugaaa

SEQ ID NO: 1029176 - RNA, 19 nt, Homo sapiens
  misc_RNA (1)...(19): siRNA sense strand
caggaugguuacagaaaca

SEQ ID NO: 1029177 - RNA, 19 nt, Homo sapiens
  misc_RNA (1)...(19): siRNA sense strand
auggaaagcaggaugguua

SEQ ID NO: 1029178 - RNA, 19 nt, Homo sapiens
  misc_RNA (1)...(19): siRNA sense strand
gggcgagaguagugaauac

SEQ ID NO: 1029179 - RNA, 19 nt, Homo sapiens
  misc_RNA (1)...(19): siRNA sense strand
uaaagagacagaagaaagg

SEQ ID NO: 1029180 - RNA, 19 nt, Homo sapiens
  misc_RNA (1)...(19): siRNA sense strand
auggagcuguuuauaguuu

SEQ ID NO: 1029181 - RNA, 19 nt, Homo sapiens
  misc_RNA (1)...(19): siRNA sense strand
accaagcacuucaggaaug

SEQ ID NO: 1029182 - RNA, 19 nt, Homo sapiens
  misc_RNA (1)...(19): siRNA sense strand
gagaguaaagaacccauag

SEQ ID NO: 1029183 - RNA, 19 nt, Homo sapiens
  misc_RNA (1)...(19): siRNA sense strand
gcaauggcugaauggguaa

SEQ ID NO: 1029184 - RNA, 19 nt, Homo sapiens
  misc_RNA (1)...(19): siRNA sense strand
aagcucaaaugugaacuga

SEQ ID NO: 1029185 - RNA, 19 nt, Homo sapiens
  misc_RNA (1)...(19): siRNA sense strand
uacgcgaugucaaucauga

SEQ ID NO: 1029186 - RNA, 19 nt, Homo sapiens
  misc_RNA (1)...(19): siRNA sense strand
ccauggaucaccagaacaa

SEQ ID NO: 1029187 - RNA, 19 nt, Homo sapiens
  misc_RNA (1)...(19): siRNA sense strand
gacugaauaaggauaaaga

SEQ ID NO: 1029188 - RNA, 19 nt, Homo sapiens
  misc_RNA (1)...(19): siRNA sense strand
ggagaagaaggcagagagu

SEQ ID NO: 1029189 - RNA, 19 nt, Homo sapiens
  misc_RNA (1)...(19): siRNA sense strand
gaugguuacagaaacagaa

SEQ ID NO: 1029190 - RNA, 19 nt, Homo sapiens
  misc_RNA (1)...(19): siRNA sense strand
gcagcggaagcuuguagaa

SEQ ID NO: 1029191 - RNA, 19 nt, Homo sapiens
  misc_RNA (1)...(19): siRNA sense strand
ggagaagcucaaaugugaa

SEQ ID NO: 1029192 - RNA, 19 nt, Homo sapiens
  misc_RNA (1)...(19): siRNA sense strand
gaaggguccaacucugaga

SEQ ID NO: 1029193 - RNA, 19 nt, Homo sapiens
  misc_RNA (1)...(19): siRNA sense strand
gacaaccaaucgagaagcu

SEQ ID NO: 1029194 - RNA, 19 nt, Homo sapiens
  misc_RNA (1)...(19): siRNA sense strand
gagaaucggaaacggcaau

SEQ ID NO: 1029195 - RNA, 19 nt, Homo sapiens
  misc_RNA (1)...(19): siRNA sense strand
gaaagcaggaugguuacag

SEQ ID NO: 1029196 - RNA, 19 nt, Homo sapiens
  misc_RNA (1)...(19): siRNA sense strand
gaagcucaaaugugaacug

SEQ ID NO: 1029197 - RNA, 19 nt, Homo sapiens
  misc_RNA (1)...(19): siRNA sense strand
ggaaagccagccaggaaac

SEQ ID NO: 1029198 - RNA, 19 nt, Homo sapiens
  misc_RNA (1)...(19): siRNA sense strand
auaaagagacagaagaaag

SEQ ID NO: 1029199 - RNA, 19 nt, Homo sapiens
  misc_RNA (1)...(19): siRNA sense strand
gagaagcucaaaugugaac

SEQ ID NO: 1029200 - RNA, 19 nt, Homo sapiens
  misc_RNA (1)...(19): siRNA sense strand
ccuacuaaaucucaaacag

SEQ ID NO: 1029201 - RNA, 19 nt, Homo sapiens
  misc_RNA (1)...(19): siRNA sense strand
aaacuucuuugugaaaugc

SEQ ID NO: 1029202 - RNA, 19 nt, Homo sapiens
  misc_RNA (1)...(19): siRNA sense strand
ggagcuguuuauaguuugg

SEQ ID NO: 1029203 - RNA, 19 nt, Homo sapiens
  misc_RNA (1)...(19): siRNA sense strand
ccaagcacuucaggaaugg

SEQ ID NO: 1029204 - RNA, 19 nt, Homo sapiens
  misc_RNA (1)...(19): siRNA sense strand
gauuccguccucaaaggua

SEQ ID NO: 1029205 - RNA, 19 nt, Homo sapiens
  misc_RNA (1)...(19): siRNA sense strand
ucagagggcgagaguagug

SEQ ID NO: 1029206 - RNA, 19 nt, Homo sapiens
  misc_RNA (1)...(19): siRNA sense strand
ugaugacagugaagaagca

SEQ ID NO: 1029207 - RNA, 19 nt, Homo sapiens
  misc_RNA (1)...(19): siRNA sense strand
gaggagccagugcgggaaa

SEQ ID NO: 1029208 - RNA, 19 nt, Homo sapiens
  misc_RNA (1)...(19): siRNA sense strand
cggcaauggccuacuaaau

SEQ ID NO: 1029209 - RNA, 19 nt, Homo sapiens
  misc_RNA (1)...(19): siRNA sense strand
ggugcaccguccgggauuu

SEQ ID NO: 1029210 - RNA, 19 nt, Homo sapiens
  misc_RNA (1)...(19): siRNA sense strand
gcaccugaagaaagggaaa

SEQ ID NO: 1029211 - RNA, 19 nt, Homo sapiens
  misc_RNA (1)...(19): siRNA sense strand
cugccaagaucagaauguu

SEQ ID NO: 1029212 - RNA, 19 nt, Homo sapiens
  misc_RNA (1)...(19): siRNA sense strand
aauugacccggcuuuauuu

SEQ ID NO: 1029213 - RNA, 19 nt, Homo sapiens
  misc_RNA (1)...(19): siRNA sense strand
gggcauggagggacuagag

SEQ ID NO: 1029214 - RNA, 19 nt, Homo sapiens
  misc_RNA (1)...(19): siRNA sense strand
gaugaugacagugaagaag

SEQ ID NO: 1029215 - RNA, 19 nt, Homo sapiens
  misc_RNA (1)...(19): siRNA sense strand
gcccuuggacugaaaugug

SEQ ID NO: 1029216 - RNA, 19 nt, Homo sapiens
  misc_RNA (1)...(19): siRNA sense strand
aagagacccaggagaagaa

SEQ ID NO: 1029217 - RNA, 19 nt, Homo sapiens
  misc_RNA (1)...(19): siRNA sense strand
gacucugggaggcauauuu

SEQ ID NO: 1029218 - RNA, 19 nt, Homo sapiens
  misc_RNA (1)...(19): siRNA sense strand
gcaagaagcuuuccuaugu

SEQ ID NO: 1029219 - RNA, 19 nt, Homo sapiens
  misc_RNA (1)...(19): siRNA sense strand
cagaggagcuguugaaugu

SEQ ID NO: 1029220 - RNA, 19 nt, Homo sapiens
  misc_RNA (1)...(19): siRNA sense strand
gaacuucuccagaggauaa

SEQ ID NO: 1029221 - RNA, 19 nt, Homo sapiens
  misc_RNA (1)...(19): siRNA sense strand
gaggagcuguugaauguuu

SEQ ID NO: 1029222 - RNA, 19 nt, Homo sapiens
  misc_RNA (1)...(19): siRNA sense strand
caaaggaaguggaagauca

SEQ ID NO: 1029223 - RNA, 19 nt, Homo sapiens
  misc_RNA (1)...(19): siRNA sense strand
agaaacacaucucaucuuu

SEQ ID NO: 1029224 - RNA, 19 nt, Homo sapiens
  misc_RNA (1)...(19): siRNA sense strand
cuaaacagcuccaccuuug

SEQ ID NO: 1029225 - RNA, 19 nt, Homo sapiens
  misc_RNA (1)...(19): siRNA sense strand
gcaaucgauucccaagaua

SEQ ID NO: 1029226 - RNA, 19 nt, Homo sapiens
  misc_RNA (1)...(19): siRNA sense strand
ugaaaugggucuacagaga

SEQ ID NO: 1029227 - RNA, 19 nt, Homo sapiens
  misc_RNA (1)...(19): siRNA sense strand
gaagaacuaagguuaaaga

SEQ ID NO: 1029228 - RNA, 19 nt, Homo sapiens
  misc_RNA (1)...(19): siRNA sense strand
cagaagaacuaagguuaaa

SEQ ID NO: 1029229 - RNA, 19 nt, Homo sapiens
  misc_RNA (1)...(19): siRNA sense strand
ggagcuuguugaauuuaua

SEQ ID NO: 1029230 - RNA, 19 nt, Homo sapiens
  misc_RNA (1)...(19): siRNA sense strand
ucagaaacccuaaugauga

SEQ ID NO: 1029231 - RNA, 19 nt, Homo sapiens
  misc_RNA (1)...(19): siRNA sense strand
aauaagagccacaaaguaa

SEQ ID NO: 1029232 - RNA, 19 nt, Homo sapiens
  misc_RNA (1)...(19): siRNA sense strand
gaaaugggucuacagagaa

SEQ ID NO: 1029233 - RNA, 19 nt, Homo sapiens
  misc_RNA (1)...(19): siRNA sense strand
caauauaagugaugaggau

SEQ ID NO: 1029234 - RNA, 19 nt, Homo sapiens
  misc_RNA (1)...(19): siRNA sense strand
gcacugugaugcaugugaa

SEQ ID NO: 1029235 - RNA, 19 nt, Homo sapiens
  misc_RNA (1)...(19): siRNA sense strand
cagaaacccuaaugaugaa

SEQ ID NO: 1029236 - RNA, 19 nt, Homo sapiens
  misc_RNA (1)...(19): siRNA sense strand
acaagccacuccuuuauga

SEQ ID NO: 1029237 - RNA, 19 nt, Homo sapiens
  misc_RNA (1)...(19): siRNA sense strand
gcuguugaauguuuauuug

SEQ ID NO: 1029238 - RNA, 19 nt, Homo sapiens
  misc_RNA (1)...(19): siRNA sense strand
gaauggaaauugcgaucug

SEQ ID NO: 1029239 - RNA, 19 nt, Homo sapiens
  misc_RNA (1)...(19): siRNA sense strand
gaaagaucguuauguucga

SEQ ID NO: 1029240 - RNA, 19 nt, Homo sapiens
  misc_RNA (1)...(19): siRNA sense strand
gagaguagcccgaggugaa

SEQ ID NO: 1029241 - RNA, 19 nt, Homo sapiens
  misc_RNA (1)...(19): siRNA sense strand
caaauaagagccacaaagu

SEQ ID NO: 1029242 - RNA, 19 nt, Homo sapiens
  misc_RNA (1)...(19): siRNA sense strand
ugugaaagaucguuauguu

SEQ ID NO: 1029243 - RNA, 19 nt, Homo sapiens
  misc_RNA (1)...(19): siRNA sense strand
cuggauggcucaaauaaga

SEQ ID NO: 1029244 - RNA, 19 nt, Homo sapiens
  misc_RNA (1)...(19): siRNA sense strand
guuugaagcucgcuauguu

SEQ ID NO: 1029245 - RNA, 19 nt, Homo sapiens
  misc_RNA (1)...(19): siRNA sense strand
gaaaaguuaucgagagcua

SEQ ID NO: 1029246 - RNA, 19 nt, Homo sapiens
  misc_RNA (1)...(19): siRNA sense strand
gccagaagaacuaagguua

SEQ ID NO: 1029247 - RNA, 19 nt, Homo sapiens
  misc_RNA (1)...(19): siRNA sense strand
gauauaauaacccugagaa

SEQ ID NO: 1029248 - RNA, 19 nt, Homo sapiens
  misc_RNA (1)...(19): siRNA sense strand
gccacuccuuuaugaaaua

SEQ ID NO: 1029249 - RNA, 19 nt, Homo sapiens
  misc_RNA (1)...(19): siRNA sense strand
gcgagugggccaauuguuu

SEQ ID NO: 1029250 - RNA, 19 nt, Homo sapiens
  misc_RNA (1)...(19): siRNA sense strand
ccaagcugcugcucaccua

SEQ ID NO: 1029251 - RNA, 19 nt, Homo sapiens
  misc_RNA (1)...(19): siRNA sense strand
aagcuuaaaugaccaugaa

SEQ ID NO: 1029252 - RNA, 19 nt, Homo sapiens
  misc_RNA (1)...(19): siRNA sense strand
gaauuaagcagaggagaug

SEQ ID NO: 1029253 - RNA, 19 nt, Homo sapiens
  misc_RNA (1)...(19): siRNA sense strand
gaugucacuuggcgauauu

SEQ ID NO: 1029254 - RNA, 19 nt, Homo sapiens
  misc_RNA (1)...(19): siRNA sense strand
uaauaacccugagaaacuu

SEQ ID NO: 1029255 - RNA, 19 nt, Homo sapiens
  misc_RNA (1)...(19): siRNA sense strand
aaacacaucucaucuuucc

SEQ ID NO: 1029256 - RNA, 19 nt, Homo sapiens
  misc_RNA (1)...(19): siRNA sense strand
ccagaagaacuaagguuaa

SEQ ID NO: 1029257 - RNA, 19 nt, Homo sapiens
  misc_RNA (1)...(19): siRNA sense strand
gugacaagccacuccuuua

SEQ ID NO: 1029258 - RNA, 19 nt, Homo sapiens
  misc_RNA (1)...(19): siRNA sense strand
ugacucagccauucuagaa

SEQ ID NO: 1029259 - RNA, 19 nt, Homo sapiens
  misc_RNA (1)...(19): siRNA sense strand
guacccagcuuccuacaac

SEQ ID NO: 1029260 - RNA, 19 nt, Homo sapiens
  misc_RNA (1)...(19): siRNA sense strand
caucucaucuuuccuaaaa

SEQ ID NO: 1029261 - RNA, 19 nt, Homo sapiens
  misc_RNA (1)...(19): siRNA sense strand
uuacuucgagacacuauua

SEQ ID NO: 1029262 - RNA, 19 nt, Homo sapiens
  misc_RNA (1)...(19): siRNA sense strand
aaauaagagccacaaagua

SEQ ID NO: 1029263 - RNA, 19 nt, Homo sapiens
  misc_RNA (1)...(19): siRNA sense strand
cagaggagauggugauguc

SEQ ID NO: 1029264 - RNA, 19 nt, Homo sapiens
  misc_RNA (1)...(19): siRNA sense strand
gaaauugcgaucugauaca

SEQ ID NO: 1029265 - RNA, 19 nt, Homo sapiens
  misc_RNA (1)...(19): siRNA sense strand
cgauauuccugcaaacaug

SEQ ID NO: 1029266 - RNA, 19 nt, Homo sapiens
  misc_RNA (1)...(19): siRNA sense strand
cugccgagcuguaggguuu

SEQ ID NO: 1029267 - RNA, 19 nt, Homo sapiens
  misc_RNA (1)...(19): siRNA sense strand
gaaguggggugcaaaggaa

SEQ ID NO: 1029268 - RNA, 19 nt, Homo sapiens
  misc_RNA (1)...(19): siRNA sense strand
gcacugguuuaaggaagaa

SEQ ID NO: 1029269 - RNA, 19 nt, Homo sapiens
  misc_RNA (1)...(19): siRNA sense strand
cuacaacaccaucuucaaa

SEQ ID NO: 1029270 - RNA, 19 nt, Homo sapiens
  misc_RNA (1)...(19): siRNA sense strand
aaaugggucuacagagaaa

SEQ ID NO: 1029271 - RNA, 19 nt, Homo sapiens
  misc_RNA (1)...(19): siRNA sense strand
uaacagucuucacuccuau

SEQ ID NO: 1029272 - RNA, 19 nt, Homo sapiens
  misc_RNA (1)...(19): siRNA sense strand
caagggcagucaucagauc

SEQ ID NO: 1029273 - RNA, 19 nt, Homo sapiens
  misc_RNA (1)...(19): siRNA sense strand
gaacugacaggcgauaaca

SEQ ID NO: 1029274 - RNA, 19 nt, Homo sapiens
  misc_RNA (1)...(19): siRNA sense strand
gucaguggcuuggagagua

SEQ ID NO: 1029275 - RNA, 19 nt, Homo sapiens
  misc_RNA (1)...(19): siRNA sense strand
uggaagaucauuacuguga

SEQ ID NO: 1029276 - RNA, 19 nt, Homo sapiens
  misc_RNA (1)...(19): siRNA sense strand
guucuucaguccaacauuc

SEQ ID NO: 1029277 - RNA, 19 nt, Homo sapiens
  misc_RNA (1)...(19): siRNA sense strand
acacccagcuguuuagaca

SEQ ID NO: 1029278 - RNA, 19 nt, Homo sapiens
  misc_RNA (1)...(19): siRNA sense strand
aagaugagguaguugaugu

SEQ ID NO: 1029279 - RNA, 19 nt, Homo sapiens
  misc_RNA (1)...(19): siRNA sense strand
gaaauaggauggggcaaga

SEQ ID NO: 1029280 - RNA, 19 nt, Homo sapiens
  misc_RNA (1)...(19): siRNA sense strand
ugacaagccacuccuuuau

SEQ ID NO: 1029281 - RNA, 19 nt, Homo sapiens
  misc_RNA (1)...(19): siRNA sense strand
ggaaguggaagaucauuac

SEQ ID NO: 1029282 - RNA, 19 nt, Homo sapiens
  misc_RNA (1)...(19): siRNA sense strand
ugauacagcacaaguagaa

SEQ ID NO: 1029283 - RNA, 19 nt, Homo sapiens
  misc_RNA (1)...(19): siRNA sense strand
gaacaguagaauggaaauu

SEQ ID NO: 1029284 - RNA, 19 nt, Homo sapiens
  misc_RNA (1)...(19): siRNA sense strand
acacaucucaucuuuccua

SEQ ID NO: 1029285 - RNA, 19 nt, Homo sapiens
  misc_RNA (1)...(19): siRNA sense strand
uuguggagcuuguugaauu

SEQ ID NO: 1029286 - RNA, 19 nt, Homo sapiens
  misc_RNA (1)...(19): siRNA sense strand
gaggauaauuguggagcuu

SEQ ID NO: 1029287 - RNA, 19 nt, Homo sapiens
  misc_RNA (1)...(19): siRNA sense strand
gaagagggagaaacacauc

SEQ ID NO: 1029288 - RNA, 19 nt, Homo sapiens
  misc_RNA (1)...(19): siRNA sense strand
caagaagcuuuccuauguc

SEQ ID NO: 1029289 - RNA, 19 nt, Homo sapiens
  misc_RNA (1)...(19): siRNA sense strand
uaaaccagcacacaaggaa

SEQ ID NO: 1029290 - RNA, 19 nt, Homo sapiens
  misc_RNA (1)...(19): siRNA sense strand
auaacagucuucacuccua

SEQ ID NO: 1029291 - RNA, 19 nt, Homo sapiens
  misc_RNA (1)...(19): siRNA sense strand
ggaaauugcgaucugauac

SEQ ID NO: 1029292 - RNA, 19 nt, Homo sapiens
  misc_RNA (1)...(19): siRNA sense strand
caaaugugguggacagacu

SEQ ID NO: 1029293 - RNA, 19 nt, Homo sapiens
  misc_RNA (1)...(19): siRNA sense strand
acuggcacaugguauauuu

SEQ ID NO: 1029294 - RNA, 19 nt, Homo sapiens
  misc_RNA (1)...(19): siRNA sense strand
ggauaauuguggagcuugu

SEQ ID NO: 1029295 - RNA, 19 nt, Homo sapiens
  misc_RNA (1)...(19): siRNA sense strand
gguuaaagaagcauuacuu

SEQ ID NO: 1029296 - RNA, 19 nt, Homo sapiens
  misc_RNA (1)...(19): siRNA sense strand
cagacuggauggcucaaau

SEQ ID NO: 1029297 - RNA, 19 nt, Homo sapiens
  misc_RNA (1)...(19): siRNA sense strand
ugaaaugggcuuugaagag

SEQ ID NO: 1029298 - RNA, 19 nt, Homo sapiens
  misc_RNA (1)...(19): siRNA sense strand
guucgaguuucaaauaaca

SEQ ID NO: 1029299 - RNA, 19 nt, Homo sapiens
  misc_RNA (1)...(19): siRNA sense strand
aaacagaaggaaagaacuu

SEQ ID NO: 1029300 - RNA, 19 nt, Homo sapiens
  misc_RNA (1)...(19): siRNA sense strand
gacuggauggcucaaauaa

SEQ ID NO: 1029301 - RNA, 19 nt, Homo sapiens
  misc_RNA (1)...(19): siRNA sense strand
ucagaaaaguugaaacaga

SEQ ID NO: 1029302 - RNA, 19 nt, Homo sapiens
  misc_RNA (1)...(19): siRNA sense strand
gagaauggcguguggaaaa

SEQ ID NO: 1029303 - RNA, 19 nt, Homo sapiens
  misc_RNA (1)...(19): siRNA sense strand
uguggagcuuguugaauuu

SEQ ID NO: 1029304 - RNA, 19 nt, Homo sapiens
  misc_RNA (1)...(19): siRNA sense strand
gauauuccugcaaacauga

SEQ ID NO: 1029305 - RNA, 19 nt, Homo sapiens
  misc_RNA (1)...(19): siRNA sense strand
gacaagccacuccuuuaug

SEQ ID NO: 1029306 - RNA, 19 nt, Homo sapiens
  misc_RNA (1)...(19): siRNA sense strand
aguggaagaucauuacugu

SEQ ID NO: 1029307 - RNA, 19 nt, Homo sapiens
  misc_RNA (1)...(19): siRNA sense strand
acaacaccaucuucaaauc

SEQ ID NO: 1029308 - RNA, 19 nt, Homo sapiens
  misc_RNA (1)...(19): siRNA sense strand
cagacuggcacaugguaua

SEQ ID NO: 1029309 - RNA, 19 nt, Homo sapiens
  misc_RNA (1)...(19): siRNA sense strand
cccuaaaccuggagaacuu

SEQ ID NO: 1029310 - RNA, 19 nt, Homo sapiens
  misc_RNA (1)...(19): siRNA sense strand
gugauugccagaagaacua

SEQ ID NO: 1029311 - RNA, 19 nt, Homo sapiens
  misc_RNA (1)...(19): siRNA sense strand
gaagaggugauugccagaa

SEQ ID NO: 1029312 - RNA, 19 nt, Homo sapiens
  misc_RNA (1)...(19): siRNA sense strand
aaucgauucccaagauaua

SEQ ID NO: 1029313 - RNA, 19 nt, Homo sapiens
  misc_RNA (1)...(19): siRNA sense strand
ggaaaucacaagaaaaguu

SEQ ID NO: 1029314 - RNA, 19 nt, Homo sapiens
  misc_RNA (1)...(19): siRNA sense strand
aaaauucagugaccuuuga

SEQ ID NO: 1029315 - RNA, 19 nt, Homo sapiens
  misc_RNA (1)...(19): siRNA sense strand
caccuaugcugacaacauc

SEQ ID NO: 1029316 - RNA, 19 nt, Homo sapiens
  misc_RNA (1)...(19): siRNA sense strand
ggugaaaugggucuacaga

SEQ ID NO: 1029317 - RNA, 19 nt, Homo sapiens
  misc_RNA (1)...(19): siRNA sense strand
aagaagcuuuccuauguca

SEQ ID NO: 1029318 - RNA, 19 nt, Homo sapiens
  misc_RNA (1)...(19): siRNA sense strand
gagaugaccucgagagauu

SEQ ID NO: 1029319 - RNA, 19 nt, Homo sapiens
  misc_RNA (1)...(19): siRNA sense strand
gcuacugucuguucuauga

SEQ ID NO: 1029320 - RNA, 19 nt, Homo sapiens
  misc_RNA (1)...(19): siRNA sense strand
gaccaaugccuguuugaua

SEQ ID NO: 1029321 - RNA, 19 nt, Homo sapiens
  misc_RNA (1)...(19): siRNA sense strand
gaagagcuaucguucacau

SEQ ID NO: 1029322 - RNA, 19 nt, Homo sapiens
  misc_RNA (1)...(19): siRNA sense strand
caacaucaucaccauauuu

SEQ ID NO: 1029323 - RNA, 19 nt, Homo sapiens
  misc_RNA (1)...(19): siRNA sense strand
gagaaugucuauggcuuug

SEQ ID NO: 1029324 - RNA, 19 nt, Homo sapiens
  misc_RNA (1)...(19): siRNA sense strand
ggaaaucuacgggaccaua

SEQ ID NO: 1029325 - RNA, 19 nt, Homo sapiens
  misc_RNA (1)...(19): siRNA sense strand
cgacuccuaugcccacuuu

SEQ ID NO: 1029326 - RNA, 19 nt, Homo sapiens
  misc_RNA (1)...(19): siRNA sense strand
agaccucgauuucacagua

SEQ ID NO: 1029327 - RNA, 19 nt, Homo sapiens
  misc_RNA (1)...(19): siRNA sense strand
ggaacuccauguaccacaa

SEQ ID NO: 1029328 - RNA, 19 nt, Homo sapiens
  misc_RNA (1)...(19): siRNA sense strand
ggacaacaucaucaccaua

SEQ ID NO: 1029329 - RNA, 19 nt, Homo sapiens
  misc_RNA (1)...(19): siRNA sense strand
gaucgaaugcuccaguauu

SEQ ID NO: 1029330 - RNA, 19 nt, Homo sapiens
  misc_RNA (1)...(19): siRNA sense strand
ggacagcugugugaaacau

SEQ ID NO: 1029331 - RNA, 19 nt, Homo sapiens
  misc_RNA (1)...(19): siRNA sense strand
accaaugccuguuugauaa

SEQ ID NO: 1029332 - RNA, 19 nt, Homo sapiens
  misc_RNA (1)...(19): siRNA sense strand
aggaaaugcugaaggauga

SEQ ID NO: 1029333 - RNA, 19 nt, Homo sapiens
  misc_RNA (1)...(19): siRNA sense strand
guacugggauccuuuccau

SEQ ID NO: 1029334 - RNA, 19 nt, Homo sapiens
  misc_RNA (1)...(19): siRNA sense strand
ggacaaagugguacuggau

SEQ ID NO: 1029335 - RNA, 19 nt, Homo sapiens
  misc_RNA (1)...(19): siRNA sense strand
gggaucgaaugcuccagua

SEQ ID NO: 1029336 - RNA, 19 nt, Homo sapiens
  misc_RNA (1)...(19): siRNA sense strand
gacaacaucaucaccauau

SEQ ID NO: 1029337 - RNA, 19 nt, Homo sapiens
  misc_RNA (1)...(19): siRNA sense strand
gcuccaguauuucugacua

SEQ ID NO: 1029338 - RNA, 19 nt, Homo sapiens
  misc_RNA (1)...(19): siRNA sense strand
ccauauccaugaagccaaa

SEQ ID NO: 1029339 - RNA, 19 nt, Homo sapiens
  misc_RNA (1)...(19): siRNA sense strand
ggagaaugucuauggcuuu

SEQ ID NO: 1029340 - RNA, 19 nt, Homo sapiens
  misc_RNA (1)...(19): siRNA sense strand
gaagguguuugggaucgaa

SEQ ID NO: 1029341 - RNA, 19 nt, Homo sapiens
  misc_RNA (1)...(19): siRNA sense strand
caucguggauccaaagcaa

SEQ ID NO: 1029342 - RNA, 19 nt, Homo sapiens
  misc_RNA (1)...(19): siRNA sense strand
ugaccucgagagauuauua

SEQ ID NO: 1029343 - RNA, 19 nt, Homo sapiens
  misc_RNA (1)...(19): siRNA sense strand
gaaaucuacgggaccauau

SEQ ID NO: 1029344 - RNA, 19 nt, Homo sapiens
  misc_RNA (1)...(19): siRNA sense strand
gauaaaggagguggacauu

SEQ ID NO: 1029345 - RNA, 19 nt, Homo sapiens
  misc_RNA (1)...(19): siRNA sense strand
ucagggacguggccaugaa

SEQ ID NO: 1029346 - RNA, 19 nt, Homo sapiens
  misc_RNA (1)...(19): siRNA sense strand
gugaaacaucuguaucuaa

SEQ ID NO: 1029347 - RNA, 19 nt, Homo sapiens
  misc_RNA (1)...(19): siRNA sense strand
acaagcacguguucaagga

SEQ ID NO: 1029348 - RNA, 19 nt, Homo sapiens
  misc_RNA (1)...(19): siRNA sense strand
gcucaacacggugaucuuu

SEQ ID NO: 1029349 - RNA, 19 nt, Homo sapiens
  misc_RNA (1)...(19): siRNA sense strand
gaagguggacaucaucauc

SEQ ID NO: 1029350 - RNA, 19 nt, Homo sapiens
  misc_RNA (1)...(19): siRNA sense strand
guucaaggacaaaguggua

SEQ ID NO: 1029351 - RNA, 19 nt, Homo sapiens
  misc_RNA (1)...(19): siRNA sense strand
cucgagagauuauuacuuc

SEQ ID NO: 1029352 - RNA, 19 nt, Homo sapiens
  misc_RNA (1)...(19): siRNA sense strand
gggcuacugucuguucuau

SEQ ID NO: 1029353 - RNA, 19 nt, Homo sapiens
  misc_RNA (1)...(19): siRNA sense strand
gaaugucuauggcuuugac

SEQ ID NO: 1029354 - RNA, 19 nt, Homo sapiens
  misc_RNA (1)...(19): siRNA sense strand
ggugaccaaugccuguuug

SEQ ID NO: 1029355 - RNA, 19 nt, Homo sapiens
  misc_RNA (1)...(19): siRNA sense strand
gucuauggcuuugacauga

SEQ ID NO: 1029356 - RNA, 19 nt, Homo sapiens
  misc_RNA (1)...(19): siRNA sense strand
ugugaaacaucuguaucua

SEQ ID NO: 1029357 - RNA, 19 nt, Homo sapiens
  misc_RNA (1)...(19): siRNA sense strand
ggacaucguggauccaaag

SEQ ID NO: 1029358 - RNA, 19 nt, Homo sapiens
  misc_RNA (1)...(19): siRNA sense strand
acaaagugguacuggaugu

SEQ ID NO: 1029359 - RNA, 19 nt, Homo sapiens
  misc_RNA (1)...(19): siRNA sense strand
aucgaaugcuccaguauuu

SEQ ID NO: 1029360 - RNA, 19 nt, Homo sapiens
  misc_RNA (1)...(19): siRNA sense strand
acgaggaaaugcugaagga

SEQ ID NO: 1029361 - RNA, 19 nt, Homo sapiens
  misc_RNA (1)...(19): siRNA sense strand
gaaacaucuguaucuaaug

SEQ ID NO: 1029362 - RNA, 19 nt, Homo sapiens
  misc_RNA (1)...(19): siRNA sense strand
ucacaguagacuuggauuu

SEQ ID NO: 1029363 - RNA, 19 nt, Homo sapiens
  misc_RNA (1)...(19): siRNA sense strand
ggagaugaccucgagagau

SEQ ID NO: 1029364 - RNA, 19 nt, Homo sapiens
  misc_RNA (1)...(19): siRNA sense strand
acucacagaagaucauuaa

SEQ ID NO: 1029365 - RNA, 19 nt, Homo sapiens
  misc_RNA (1)...(19): siRNA sense strand
ucacagaagaucauuaagg

SEQ ID NO: 1029366 - RNA, 19 nt, Homo sapiens
  misc_RNA (1)...(19): siRNA sense strand
gagcuaucguucacaucug

SEQ ID NO: 1029367 - RNA, 19 nt, Homo sapiens
  misc_RNA (1)...(19): siRNA sense strand
ggagguggacauuuacaca

SEQ ID NO: 1029368 - RNA, 19 nt, Homo sapiens
  misc_RNA (1)...(19): siRNA sense strand
gguagcgauugaagacaga

SEQ ID NO: 1029369 - RNA, 19 nt, Homo sapiens
  misc_RNA (1)...(19): siRNA sense strand
uggaugggcuacugucugu

SEQ ID NO: 1029370 - RNA, 19 nt, Homo sapiens
  misc_RNA (1)...(19): siRNA sense strand
ucaccauauuuaaggguaa

SEQ ID NO: 1029371 - RNA, 19 nt, Homo sapiens
  misc_RNA (1)...(19): siRNA sense strand
acaacaucaucaccauauu

SEQ ID NO: 1029372 - RNA, 19 nt, Homo sapiens
  misc_RNA (1)...(19): siRNA sense strand
cauuaaggccaaccacuug

SEQ ID NO: 1029373 - RNA, 19 nt, Homo sapiens
  misc_RNA (1)...(19): siRNA sense strand
acaguagacuuggauuuua

SEQ ID NO: 1029374 - RNA, 19 nt, Homo sapiens
  misc_RNA (1)...(19): siRNA sense strand
guggacauuuacacaguga

SEQ ID NO: 1029375 - RNA, 19 nt, Homo sapiens
  misc_RNA (1)...(19): siRNA sense strand
ggagaagguggacaucauc

SEQ ID NO: 1029376 - RNA, 19 nt, Homo sapiens
  misc_RNA (1)...(19): siRNA sense strand
caucaucaccauauuuaag

SEQ ID NO: 1029377 - RNA, 19 nt, Homo sapiens
  misc_RNA (1)...(19): siRNA sense strand
guacaaggacuucaaaauc

SEQ ID NO: 1029378 - RNA, 19 nt, Homo sapiens
  misc_RNA (1)...(19): siRNA sense strand
uggagaagguggacaucau

SEQ ID NO: 1029379 - RNA, 19 nt, Homo sapiens
  misc_RNA (1)...(19): siRNA sense strand
cggaagagcuaucguucac

SEQ ID NO: 1029380 - RNA, 19 nt, Homo sapiens
  misc_RNA (1)...(19): siRNA sense strand
ccaaugccuguuugauaaa

SEQ ID NO: 1029381 - RNA, 19 nt, Homo sapiens
  misc_RNA (1)...(19): siRNA sense strand
gcgaguggaugggcuacug

SEQ ID NO: 1029382 - RNA, 19 nt, Homo sapiens
  misc_RNA (1)...(19): siRNA sense strand
ggagcugccuguggagaag

SEQ ID NO: 1029383 - RNA, 19 nt, Homo sapiens
  misc_RNA (1)...(19): siRNA sense strand
cgauuucacaguagacuug

SEQ ID NO: 1029384 - RNA, 19 nt, Homo sapiens
  misc_RNA (1)...(19): siRNA sense strand
ggacauuuacacagugaag

SEQ ID NO: 1029385 - RNA, 19 nt, Homo sapiens
  misc_RNA (1)...(19): siRNA sense strand
ucaacacggugaucuuugc

SEQ ID NO: 1029386 - RNA, 19 nt, Homo sapiens
  misc_RNA (1)...(19): siRNA sense strand
gaugggcuacugucuguuc

SEQ ID NO: 1029387 - RNA, 19 nt, Homo sapiens
  misc_RNA (1)...(19): siRNA sense strand
gagaagguggacaucauca

SEQ ID NO: 1029388 - RNA, 19 nt, Homo sapiens
  misc_RNA (1)...(19): siRNA sense strand
gaugaccucgagagauuau

SEQ ID NO: 1029389 - RNA, 19 nt, Homo sapiens
  misc_RNA (1)...(19): siRNA sense strand
agauacagcgcaacgacua

SEQ ID NO: 1029390 - RNA, 19 nt, Homo sapiens
  misc_RNA (1)...(19): siRNA sense strand
ggugggagaaugucuaugg

SEQ ID NO: 1029391 - RNA, 19 nt, Homo sapiens
  misc_RNA (1)...(19): siRNA sense strand
ccacuuggacaacaucauc

SEQ ID NO: 1029392 - RNA, 19 nt, Homo sapiens
  misc_RNA (1)...(19): siRNA sense strand
uuaagggacagcuguguga

SEQ ID NO: 1029393 - RNA, 19 nt, Homo sapiens
  misc_RNA (1)...(19): siRNA sense strand
caguagacuuggauuuuaa

SEQ ID NO: 1029394 - RNA, 19 nt, Homo sapiens
  misc_RNA (1)...(19): siRNA sense strand
gaccucgauuucacaguag

SEQ ID NO: 1029395 - RNA, 19 nt, Homo sapiens
  misc_RNA (1)...(19): siRNA sense strand
gacaguacaaggacuucaa

SEQ ID NO: 1029396 - RNA, 19 nt, Homo sapiens
  misc_RNA (1)...(19): siRNA sense strand
cgaaugcuccaguauuucu

SEQ ID NO: 1029397 - RNA, 19 nt, Homo sapiens
  misc_RNA (1)...(19): siRNA sense strand
auuauuacuucgacuccua

SEQ ID NO: 1029398 - RNA, 19 nt, Homo sapiens
  misc_RNA (1)...(19): siRNA sense strand
uaccaagugccacaagaaa

SEQ ID NO: 1029399 - RNA, 19 nt, Homo sapiens
  misc_RNA (1)...(19): siRNA sense strand
gcuuugacaugaccugcau

SEQ ID NO: 1029400 - RNA, 19 nt, Homo sapiens
  misc_RNA (1)...(19): siRNA sense strand
ucauuaaggccaaccacuu

SEQ ID NO: 1029401 - RNA, 19 nt, Homo sapiens
  misc_RNA (1)...(19): siRNA sense strand
gcacguguucaaggacaaa

SEQ ID NO: 1029402 - RNA, 19 nt, Homo sapiens
  misc_RNA (1)...(19): siRNA sense strand
ucacuuaccggaacuccau

SEQ ID NO: 1029403 - RNA, 19 nt, Homo sapiens
  misc_RNA (1)...(19): siRNA sense strand
gauugaagacagacaguac

SEQ ID NO: 1029404 - RNA, 19 nt, Homo sapiens
  misc_RNA (1)...(19): siRNA sense strand
aaaccuggagggcuuaugu

SEQ ID NO: 1029405 - RNA, 19 nt, Homo sapiens
  misc_RNA (1)...(19): siRNA sense strand
caugaaggagccucuagug

SEQ ID NO: 1029406 - RNA, 19 nt, Homo sapiens
  misc_RNA (1)...(19): siRNA sense strand
agacggaagagcuaucguu

SEQ ID NO: 1029407 - RNA, 19 nt, Homo sapiens
  misc_RNA (1)...(19): siRNA sense strand
caaugccuguuugauaaag

SEQ ID NO: 1029408 - RNA, 19 nt, Homo sapiens
  misc_RNA (1)...(19): siRNA sense strand
gaccgucuucuacuuggaa

SEQ ID NO: 1029409 - RNA, 19 nt, Homo sapiens
  misc_RNA (1)...(19): siRNA sense strand
ccauguaccacaacaagca

SEQ ID NO: 1029410 - RNA, 19 nt, Homo sapiens
  misc_RNA (1)...(19): siRNA sense strand
caugaagccaaaugccaaa

SEQ ID NO: 1029411 - RNA, 19 nt, Homo sapiens
  misc_RNA (1)...(19): siRNA sense strand
ggugcggacucucacuuac

SEQ ID NO: 1029412 - RNA, 19 nt, Homo sapiens
  misc_RNA (1)...(19): siRNA sense strand
cgagagauuauuacuucga

SEQ ID NO: 1029413 - RNA, 19 nt, Homo sapiens
  misc_RNA (1)...(19): siRNA sense strand
ugggauccuuuccauguuc

SEQ ID NO: 1029414 - RNA, 19 nt, Homo sapiens
  misc_RNA (1)...(19): siRNA sense strand
uacgggaccauauccauga

SEQ ID NO: 1029415 - RNA, 19 nt, Homo sapiens
  misc_RNA (1)...(19): siRNA sense strand
cuuggaagauuaccucacu

SEQ ID NO: 1029416 - RNA, 19 nt, Homo sapiens
  misc_RNA (1)...(19): siRNA sense strand
uuaccaagugccacaagaa

SEQ ID NO: 1029417 - RNA, 19 nt, Homo sapiens
  misc_RNA (1)...(19): siRNA sense strand
gaggugcggacucucacuu

SEQ ID NO: 1029418 - RNA, 19 nt, Homo sapiens
  misc_RNA (1)...(19): siRNA sense strand
caacuucccucguguacuu

SEQ ID NO: 1029419 - RNA, 19 nt, Homo sapiens
  misc_RNA (1)...(19): siRNA sense strand
gggcauaaagucuauauuu

SEQ ID NO: 1029420 - RNA, 19 nt, Homo sapiens
  misc_RNA (1)...(19): siRNA sense strand
gcaagggccugaccauugu

SEQ ID NO: 1029421 - RNA, 19 nt, Homo sapiens
  misc_RNA (1)...(19): siRNA sense strand
ggaauugacuacuaugaca

SEQ ID NO: 1029422 - RNA, 19 nt, Homo sapiens
  misc_RNA (1)...(19): siRNA sense strand
ccagaggaauugacuacua

SEQ ID NO: 1029423 - RNA, 19 nt, Homo sapiens
  misc_RNA (1)...(19): siRNA sense strand
ggcauaaagucuauauuug

SEQ ID NO: 1029424 - RNA, 19 nt, Homo sapiens
  misc_RNA (1)...(19): siRNA sense strand
ggacauccgcccaaaggua

SEQ ID NO: 1029425 - RNA, 19 nt, Homo sapiens
  misc_RNA (1)...(19): siRNA sense strand
ccaaagguaucgucucuuc

SEQ ID NO: 1029426 - RNA, 19 nt, Homo sapiens
  misc_RNA (1)...(19): siRNA sense strand
ucaagaacaugauggaaau

SEQ ID NO: 1029427 - RNA, 19 nt, Homo sapiens
  misc_RNA (1)...(19): siRNA sense strand
ggaccuggcugucuuucug

SEQ ID NO: 1029428 - RNA, 19 nt, Homo sapiens
  misc_RNA (1)...(19): siRNA sense strand
ggucaaguaugugaacaaa

SEQ ID NO: 1029429 - RNA, 19 nt, Homo sapiens
  misc_RNA (1)...(19): siRNA sense strand
ggacaaguauggcgauggu

SEQ ID NO: 1029430 - RNA, 19 nt, Homo sapiens
  misc_RNA (1)...(19): siRNA sense strand
acagugacaucucugcaua

SEQ ID NO: 1029431 - RNA, 19 nt, Homo sapiens
  misc_RNA (1)...(19): siRNA sense strand
cagaggaauugacuacuau

SEQ ID NO: 1029432 - RNA, 19 nt, Homo sapiens
  misc_RNA (1)...(19): siRNA sense strand
gugcuuaucugcugcuguu

SEQ ID NO: 1029433 - RNA, 19 nt, Homo sapiens
  misc_RNA (1)...(19): siRNA sense strand
cagaauaucuuugggguua

SEQ ID NO: 1029434 - RNA, 19 nt, Homo sapiens
  misc_RNA (1)...(19): siRNA sense strand
cauaaggucuggaggaagu

SEQ ID NO: 1029435 - RNA, 19 nt, Homo sapiens
  misc_RNA (1)...(19): siRNA sense strand
uaucgucucuucugggaaa

SEQ ID NO: 1029436 - RNA, 19 nt, Homo sapiens
  misc_RNA (1)...(19): siRNA sense strand
gagcagaccaucaagaaca

SEQ ID NO: 1029437 - RNA, 19 nt, Homo sapiens
  misc_RNA (1)...(19): siRNA sense strand
caucauggcuggcucaaac

SEQ ID NO: 1029438 - RNA, 19 nt, Homo sapiens
  misc_RNA (1)...(19): siRNA sense strand
ccacccagcuauggaguuu

SEQ ID NO: 1029439 - RNA, 19 nt, Homo sapiens
  misc_RNA (1)...(19): siRNA sense strand
gcauaacagugacaucucu

SEQ ID NO: 1029440 - RNA, 19 nt, Homo sapiens
  misc_RNA (1)...(19): siRNA sense strand
acaaauacaucgaguacca

SEQ ID NO: 1029441 - RNA, 19 nt, Homo sapiens
  misc_RNA (1)...(19): siRNA sense strand
ggcaugaucuacaaauaca

SEQ ID NO: 1029442 - RNA, 19 nt, Homo sapiens
  misc_RNA (1)...(19): siRNA sense strand
gaaugccacuuugaacaau

SEQ ID NO: 1029443 - RNA, 19 nt, Homo sapiens
  misc_RNA (1)...(19): siRNA sense strand
gggagcuggugcacauuaa

SEQ ID NO: 1029444 - RNA, 19 nt, Homo sapiens
  misc_RNA (1)...(19): siRNA sense strand
ggcaagggccugaccauug

SEQ ID NO: 1029445 - RNA, 19 nt, Homo sapiens
  misc_RNA (1)...(19): siRNA sense strand
ggaccaguuugacaucugu

SEQ ID NO: 1029446 - RNA, 19 nt, Homo sapiens
  misc_RNA (1)...(19): siRNA sense strand
ugacaucugugccaagaca

SEQ ID NO: 1029447 - RNA, 19 nt, Homo sapiens
  misc_RNA (1)...(19): siRNA sense strand
gaacaauaugcguguguau

SEQ ID NO: 1029448 - RNA, 19 nt, Homo sapiens
  misc_RNA (1)...(19): siRNA sense strand
cagcuguaguggacaauga

SEQ ID NO: 1029449 - RNA, 19 nt, Homo sapiens
  misc_RNA (1)...(19): siRNA sense strand
gcagugugguucucuuugg

SEQ ID NO: 1029450 - RNA, 19 nt, Homo sapiens
  misc_RNA (1)...(19): siRNA sense strand
cagaugagacugaccaaga

SEQ ID NO: 1029451 - RNA, 19 nt, Homo sapiens
  misc_RNA (1)...(19): siRNA sense strand
agaaggaccuggcugucuu

SEQ ID NO: 1029452 - RNA, 19 nt, Homo sapiens
  misc_RNA (1)...(19): siRNA sense strand
cgucaucggcuccuucuuu

SEQ ID NO: 1029453 - RNA, 19 nt, Homo sapiens
  misc_RNA (1)...(19): siRNA sense strand
agaacaugauggaaauuga

SEQ ID NO: 1029454 - RNA, 19 nt, Homo sapiens
  misc_RNA (1)...(19): siRNA sense strand
caucuuauccauguucuuu

SEQ ID NO: 1029455 - RNA, 19 nt, Homo sapiens
  misc_RNA (1)...(19): siRNA sense strand
gcccaaagguaucgucucu

SEQ ID NO: 1029456 - RNA, 19 nt, Homo sapiens
  misc_RNA (1)...(19): siRNA sense strand
gaaggaccuggcugucuuu

SEQ ID NO: 1029457 - RNA, 19 nt, Homo sapiens
  misc_RNA (1)...(19): siRNA sense strand
gagagcagcccuuuucuuu

SEQ ID NO: 1029458 - RNA, 19 nt, Homo sapiens
  misc_RNA (1)...(19): siRNA sense strand
ugaacaauaugcgugugua

SEQ ID NO: 1029459 - RNA, 19 nt, Homo sapiens
  misc_RNA (1)...(19): siRNA sense strand
ccggcaugaucuacaaaua

SEQ ID NO: 1029460 - RNA, 19 nt, Homo sapiens
  misc_RNA (1)...(19): siRNA sense strand
ucaacaaugugaccgagau

SEQ ID NO: 1029461 - RNA, 19 nt, Homo sapiens
  misc_RNA (1)...(19): siRNA sense strand
gcucaugacacgucgaaug

SEQ ID NO: 1029462 - RNA, 19 nt, Homo sapiens
  misc_RNA (1)...(19): siRNA sense strand
gaggaauugacuacuauga

SEQ ID NO: 1029463 - RNA, 19 nt, Homo sapiens
  misc_RNA (1)...(19): siRNA sense strand
cgaaugccacuuugaacaa

SEQ ID NO: 1029464 - RNA, 19 nt, Homo sapiens
  misc_RNA (1)...(19): siRNA sense strand
gaacaugauggaaauugag

SEQ ID NO: 1029465 - RNA, 19 nt, Homo sapiens
  misc_RNA (1)...(19): siRNA sense strand
caaauuugccucgcucuuc

SEQ ID NO: 1029466 - RNA, 19 nt, Homo sapiens
  misc_RNA (1)...(19): siRNA sense strand
ggaccauucuggccaucau

SEQ ID NO: 1029467 - RNA, 19 nt, Homo sapiens
  misc_RNA (1)...(19): siRNA sense strand
cuucuucccuucuguaaca

SEQ ID NO: 1029468 - RNA, 19 nt, Homo sapiens
  misc_RNA (1)...(19): siRNA sense strand
cuuaucugcugcuguugua

SEQ ID NO: 1029469 - RNA, 19 nt, Homo sapiens
  misc_RNA (1)...(19): siRNA sense strand
aagcccagcuggucaagga

SEQ ID NO: 1029470 - RNA, 19 nt, Homo sapiens
  misc_RNA (1)...(19): siRNA sense strand
acacgucgaaugccacuuu

SEQ ID NO: 1029471 - RNA, 19 nt, Homo sapiens
  misc_RNA (1)...(19): siRNA sense strand
ggacgaggaagaugagucu

SEQ ID NO: 1029472 - RNA, 19 nt, Homo sapiens
  misc_RNA (1)...(19): siRNA sense strand
ugauggaaauugagaaggu

SEQ ID NO: 1029473 - RNA, 19 nt, Homo sapiens
  misc_RNA (1)...(19): siRNA sense strand
gacaguggccacccagcua

SEQ ID NO: 1029474 - RNA, 19 nt, Homo sapiens
  misc_RNA (1)...(19): siRNA sense strand
gggcuccuauuucaugauc

SEQ ID NO: 1029475 - RNA, 19 nt, Homo sapiens
  misc_RNA (1)...(19): siRNA sense strand
gacauccgcccaaagguau

SEQ ID NO: 1029476 - RNA, 19 nt, Homo sapiens
  misc_RNA (1)...(19): siRNA sense strand
agacagcuguaguggacaa

SEQ ID NO: 1029477 - RNA, 19 nt, Homo sapiens
  misc_RNA (1)...(19): siRNA sense strand
gcgauggugucagcaggaa

SEQ ID NO: 1029478 - RNA, 19 nt, Homo sapiens
  misc_RNA (1)...(19): siRNA sense strand
gacaaguacaugacugaga

SEQ ID NO: 1029479 - RNA, 19 nt, Homo sapiens
  misc_RNA (1)...(19): siRNA sense strand
gagaagcccagcuggucaa

SEQ ID NO: 1029480 - RNA, 19 nt, Homo sapiens
  misc_RNA (1)...(19): siRNA sense strand
gggacaaguacaugacuga

SEQ ID NO: 1029481 - RNA, 19 nt, Homo sapiens
  misc_RNA (1)...(19): siRNA sense strand
gcugacaagauccagauga

SEQ ID NO: 1029482 - RNA, 19 nt, Homo sapiens
  misc_RNA (1)...(19): siRNA sense strand
aaugccacuuugaacaaua

SEQ ID NO: 1029483 - RNA, 19 nt, Homo sapiens
  misc_RNA (1)...(19): siRNA sense strand
cugugaagcucaaugaagu

SEQ ID NO: 1029484 - RNA, 19 nt, Homo sapiens
  misc_RNA (1)...(19): siRNA sense strand
ccgagcagaccaucaagaa

SEQ ID NO: 1029485 - RNA, 19 nt, Homo sapiens
  misc_RNA (1)...(19): siRNA sense strand
ucaugacccuggugguguu

SEQ ID NO: 1029486 - RNA, 19 nt, Homo sapiens
  misc_RNA (1)...(19): siRNA sense strand
guacuucagcagugugguu

SEQ ID NO: 1029487 - RNA, 19 nt, Homo sapiens
  misc_RNA (1)...(19): siRNA sense strand
gaagucaucaccaucuacu

SEQ ID NO: 1029488 - RNA, 19 nt, Homo sapiens
  misc_RNA (1)...(19): siRNA sense strand
cuacaaauacaucgaguac

SEQ ID NO: 1029489 - RNA, 19 nt, Homo sapiens
  misc_RNA (1)...(19): siRNA sense strand
acacugcugugaagcucaa

SEQ ID NO: 1029490 - RNA, 19 nt, Homo sapiens
  misc_RNA (1)...(19): siRNA sense strand
ugagugccaucgccaccaa

SEQ ID NO: 1029491 - RNA, 19 nt, Homo sapiens
  misc_RNA (1)...(19): siRNA sense strand
acauuaagccggaccaauc

SEQ ID NO: 1029492 - RNA, 19 nt, Homo sapiens
  misc_RNA (1)...(19): siRNA sense strand
cgggagcuggugcacauua

SEQ ID NO: 1029493 - RNA, 19 nt, Homo sapiens
  misc_RNA (1)...(19): siRNA sense strand
gccuggcccuuauguuugu

SEQ ID NO: 1029494 - RNA, 19 nt, Homo sapiens
  misc_RNA (1)...(19): siRNA sense strand
cgucgaaugccacuuugaa

SEQ ID NO: 1029495 - RNA, 19 nt, Homo sapiens
  misc_RNA (1)...(19): siRNA sense strand
guacguggucgcugacauc

SEQ ID NO: 1029496 - RNA, 19 nt, Homo sapiens
  misc_RNA (1)...(19): siRNA sense strand
ggaccagggacaaguacau

SEQ ID NO: 1029497 - RNA, 19 nt, Homo sapiens
  misc_RNA (1)...(19): siRNA sense strand
cuaccuggagggccacaua

SEQ ID NO: 1029498 - RNA, 19 nt, Homo sapiens
  misc_RNA (1)...(19): siRNA sense strand
gcuacaggcccuccucauc

SEQ ID NO: 1029499 - RNA, 19 nt, Homo sapiens
  misc_RNA (1)...(19): siRNA sense strand
cugccuggcccuuauguuu

SEQ ID NO: 1029500 - RNA, 19 nt, Homo sapiens
  misc_RNA (1)...(19): siRNA sense strand
ugugcuaccuguucgugaa

SEQ ID NO: 1029501 - RNA, 19 nt, Homo sapiens
  misc_RNA (1)...(19): siRNA sense strand
ucucuuuggugccugcauu

SEQ ID NO: 1029502 - RNA, 19 nt, Homo sapiens
  misc_RNA (1)...(19): siRNA sense strand
cagcagugugguucucuuu

SEQ ID NO: 1029503 - RNA, 19 nt, Homo sapiens
  misc_RNA (1)...(19): siRNA sense strand
ucgcugacaucgccacauc

SEQ ID NO: 1029504 - RNA, 19 nt, Homo sapiens
  misc_RNA (1)...(19): siRNA sense strand
uuauccauguucuuucuga

SEQ ID NO: 1029505 - RNA, 19 nt, Homo sapiens
  misc_RNA (1)...(19): siRNA sense strand
gaaccuggcacuguuugag

SEQ ID NO: 1029506 - RNA, 19 nt, Homo sapiens
  misc_RNA (1)...(19): siRNA sense strand
gcuccuauuucaugaucuc

SEQ ID NO: 1029507 - RNA, 19 nt, Homo sapiens
  misc_RNA (1)...(19): siRNA sense strand
gcugugaagcucaaugaag

SEQ ID NO: 1029508 - RNA, 19 nt, Homo sapiens
  misc_RNA (1)...(19): siRNA sense strand
aaagguaucgucucuucug

SEQ ID NO: 1029509 - RNA, 19 nt, Homo sapiens
  misc_RNA (1)...(19): siRNA sense strand
ugacggccaucuccaugag

SEQ ID NO: 1029510 - RNA, 19 nt, Homo sapiens
  misc_RNA (1)...(19): siRNA sense strand
gggaccaguuugacaucug

SEQ ID NO: 1029511 - RNA, 19 nt, Homo sapiens
  misc_RNA (1)...(19): siRNA sense strand
agggugacaucguggagaa

SEQ ID NO: 1029512 - RNA, 19 nt, Homo sapiens
  misc_RNA (1)...(19): siRNA sense strand
gcgacgagaacuacaugga

SEQ ID NO: 1029513 - RNA, 19 nt, Homo sapiens
  misc_RNA (1)...(19): siRNA sense strand
ugagacugaccaagacuga

SEQ ID NO: 1029514 - RNA, 19 nt, Homo sapiens
  misc_RNA (1)...(19): siRNA sense strand
caagaacaugauggaaauu

SEQ ID NO: 1029515 - RNA, 19 nt, Homo sapiens
  misc_RNA (1)...(19): siRNA sense strand
acagagagagcagcccuuu

SEQ ID NO: 1029516 - RNA, 19 nt, Homo sapiens
  misc_RNA (1)...(19): siRNA sense strand
caucuucuucccuucugua

SEQ ID NO: 1029517 - RNA, 19 nt, Homo sapiens
  misc_RNA (1)...(19): siRNA sense strand
gaggugguggagaugcaua

SEQ ID NO: 1029518 - RNA, 19 nt, Homo sapiens
  misc_RNA (1)...(19): siRNA sense strand
gaaauggagucugcaauua

SEQ ID NO: 1029519 - RNA, 19 nt, Homo sapiens
  misc_RNA (1)...(19): siRNA sense strand
gagaaauccucuacaauaa

SEQ ID NO: 1029520 - RNA, 19 nt, Homo sapiens
  misc_RNA (1)...(19): siRNA sense strand
ggagaaauccucuacaaua

SEQ ID NO: 1029521 - RNA, 19 nt, Homo sapiens
  misc_RNA (1)...(19): siRNA sense strand
ggaagaagcuaauggagau

SEQ ID NO: 1029522 - RNA, 19 nt, Homo sapiens
  misc_RNA (1)...(19): siRNA sense strand
gaaccaaagugccuagaga

SEQ ID NO: 1029523 - RNA, 19 nt, Homo sapiens
  misc_RNA (1)...(19): siRNA sense strand
gaacuggacucucucaucu

SEQ ID NO: 1029524 - RNA, 19 nt, Homo sapiens
  misc_RNA (1)...(19): siRNA sense strand
gaaagcagcugugacaaca

SEQ ID NO: 1029525 - RNA, 19 nt, Homo sapiens
  misc_RNA (1)...(19): siRNA sense strand
uaaaggacauuguucucua

SEQ ID NO: 1029526 - RNA, 19 nt, Homo sapiens
  misc_RNA (1)...(19): siRNA sense strand
ggacuaugaugcacucuuc

SEQ ID NO: 1029527 - RNA, 19 nt, Homo sapiens
  misc_RNA (1)...(19): siRNA sense strand
uacaauaacuuccucuuug

SEQ ID NO: 1029528 - RNA, 19 nt, Homo sapiens
  misc_RNA (1)...(19): siRNA sense strand
gaaauccucuacaauaacu

SEQ ID NO: 1029529 - RNA, 19 nt, Homo sapiens
  misc_RNA (1)...(19): siRNA sense strand
ugacaugccucuccuggaa

SEQ ID NO: 1029530 - RNA, 19 nt, Homo sapiens
  misc_RNA (1)...(19): siRNA sense strand
cuucaggucuucagcaaua

SEQ ID NO: 1029531 - RNA, 19 nt, Homo sapiens
  misc_RNA (1)...(19): siRNA sense strand
uuacacagcagccaaguua

SEQ ID NO: 1029532 - RNA, 19 nt, Homo sapiens
  misc_RNA (1)...(19): siRNA sense strand
ggaguuugcugaacgacaa

SEQ ID NO: 1029533 - RNA, 19 nt, Homo sapiens
  misc_RNA (1)...(19): siRNA sense strand
ggacauuguucucuaccuu

SEQ ID NO: 1029534 - RNA, 19 nt, Homo sapiens
  misc_RNA (1)...(19): siRNA sense strand
ccaaagaucacuucauuuc

SEQ ID NO: 1029535 - RNA, 19 nt, Homo sapiens
  misc_RNA (1)...(19): siRNA sense strand
ggaauuaaaggacauuguu

SEQ ID NO: 1029536 - RNA, 19 nt, Homo sapiens
  misc_RNA (1)...(19): siRNA sense strand
gagcaggugaucaacaaua

SEQ ID NO: 1029537 - RNA, 19 nt, Homo sapiens
  misc_RNA (1)...(19): siRNA sense strand
acaauaacuuccucuuuga

SEQ ID NO: 1029538 - RNA, 19 nt, Homo sapiens
  misc_RNA (1)...(19): siRNA sense strand
caggaaagcugaggacuuc

SEQ ID NO: 1029539 - RNA, 19 nt, Homo sapiens
  misc_RNA (1)...(19): siRNA sense strand
ggaaagccacagaugcuaa

SEQ ID NO: 1029540 - RNA, 19 nt, Homo sapiens
  misc_RNA (1)...(19): siRNA sense strand
ggccuugccucacgauaaa

SEQ ID NO: 1029541 - RNA, 19 nt, Homo sapiens
  misc_RNA (1)...(19): siRNA sense strand
cagacuagcuuccuucuac

SEQ ID NO: 1029542 - RNA, 19 nt, Homo sapiens
  misc_RNA (1)...(19): siRNA sense strand
ggaggaggaugacgacgau

SEQ ID NO: 1029543 - RNA, 19 nt, Homo sapiens
  misc_RNA (1)...(19): siRNA sense strand
agaagugccuggacuccua

SEQ ID NO: 1029544 - RNA, 19 nt, Homo sapiens
  misc_RNA (1)...(19): siRNA sense strand
cagagcaggugaucaacaa

SEQ ID NO: 1029545 - RNA, 19 nt, Homo sapiens
  misc_RNA (1)...(19): siRNA sense strand
gaaagccacagaugcuaaa

SEQ ID NO: 1029546 - RNA, 19 nt, Homo sapiens
  misc_RNA (1)...(19): siRNA sense strand
cgaaauggagucugcaauu

SEQ ID NO: 1029547 - RNA, 19 nt, Homo sapiens
  misc_RNA (1)...(19): siRNA sense strand
ggaacgcgccaccuucgua

SEQ ID NO: 1029548 - RNA, 19 nt, Homo sapiens
  misc_RNA (1)...(19): siRNA sense strand
gcagaaggcagaccgguau

SEQ ID NO: 1029549 - RNA, 19 nt, Homo sapiens
  misc_RNA (1)...(19): siRNA sense strand
caaccuagacagagaaaug

SEQ ID NO: 1029550 - RNA, 19 nt, Homo sapiens
  misc_RNA (1)...(19): siRNA sense strand
agaggaggcuugaagauag

SEQ ID NO: 1029551 - RNA, 19 nt, Homo sapiens
  misc_RNA (1)...(19): siRNA sense strand
ggaagaaggaagccaacaa

SEQ ID NO: 1029552 - RNA, 19 nt, Homo sapiens
  misc_RNA (1)...(19): siRNA sense strand
ugacgagacucuacagaag

SEQ ID NO: 1029553 - RNA, 19 nt, Homo sapiens
  misc_RNA (1)...(19): siRNA sense strand
gaagaaggaagccaacaag

SEQ ID NO: 1029554 - RNA, 19 nt, Homo sapiens
  misc_RNA (1)...(19): siRNA sense strand
ucucucaucucccaaguga

SEQ ID NO: 1029555 - RNA, 19 nt, Homo sapiens
  misc_RNA (1)...(19): siRNA sense strand
aagcagcugugacaacauu

SEQ ID NO: 1029556 - RNA, 19 nt, Homo sapiens
  misc_RNA (1)...(19): siRNA sense strand
uaggaaacaucuuuacaca

SEQ ID NO: 1029557 - RNA, 19 nt, Homo sapiens
  misc_RNA (1)...(19): siRNA sense strand
cagaagcgccuccaucgaa

SEQ ID NO: 1029558 - RNA, 19 nt, Homo sapiens
  misc_RNA (1)...(19): siRNA sense strand
ggugccaggugaucuuuga

SEQ ID NO: 1029559 - RNA, 19 nt, Homo sapiens
  misc_RNA (1)...(19): siRNA sense strand
gaagaggaggcuugaagau

SEQ ID NO: 1029560 - RNA, 19 nt, Homo sapiens
  misc_RNA (1)...(19): siRNA sense strand
uccagaagaugauaggaaa

SEQ ID NO: 1029561 - RNA, 19 nt, Homo sapiens
  misc_RNA (1)...(19): siRNA sense strand
cagcaggccucaucagucu

SEQ ID NO: 1029562 - RNA, 19 nt, Homo sapiens
  misc_RNA (1)...(19): siRNA sense strand
auccaaagaucacuucauu

SEQ ID NO: 1029563 - RNA, 19 nt, Homo sapiens
  misc_RNA (1)...(19): siRNA sense strand
aaauggagucugcaauuaa

SEQ ID NO: 1029564 - RNA, 19 nt, Homo sapiens
  misc_RNA (1)...(19): siRNA sense strand
gaugaaacccugccuacca

SEQ ID NO: 1029565 - RNA, 19 nt, Homo sapiens
  misc_RNA (1)...(19): siRNA sense strand
cacaacgucuuccagaaug

SEQ ID NO: 1029566 - RNA, 19 nt, Homo sapiens
  misc_RNA (1)...(19): siRNA sense strand
cuacaauaacuuccucuuu

SEQ ID NO: 1029567 - RNA, 19 nt, Homo sapiens
  misc_RNA (1)...(19): siRNA sense strand
uaacuuccucuuugacauu

SEQ ID NO: 1029568 - RNA, 19 nt, Homo sapiens
  misc_RNA (1)...(19): siRNA sense strand
ccacugcuccagaagauga

SEQ ID NO: 1029569 - RNA, 19 nt, Homo sapiens
  misc_RNA (1)...(19): siRNA sense strand
ugaguacgaugacacauac

SEQ ID NO: 1029570 - RNA, 19 nt, Homo sapiens
  misc_RNA (1)...(19): siRNA sense strand
ugacgaguuugauguguuc

SEQ ID NO: 1029571 - RNA, 19 nt, Homo sapiens
  misc_RNA (1)...(19): siRNA sense strand
gaauuaaaggacauuguuc

SEQ ID NO: 1029572 - RNA, 19 nt, Homo sapiens
  misc_RNA (1)...(19): siRNA sense strand
gcagccaaguuacuacagu

SEQ ID NO: 1029573 - RNA, 19 nt, Homo sapiens
  misc_RNA (1)...(19): siRNA sense strand
gauaggaaacaucuuuaca

SEQ ID NO: 1029574 - RNA, 19 nt, Homo sapiens
  misc_RNA (1)...(19): siRNA sense strand
ggaacuggacucucucauc

SEQ ID NO: 1029575 - RNA, 19 nt, Homo sapiens
  misc_RNA (1)...(19): siRNA sense strand
ggaugacgacgaugaggaa

SEQ ID NO: 1029576 - RNA, 19 nt, Homo sapiens
  misc_RNA (1)...(19): siRNA sense strand
ccacaacgucuuccagaau

SEQ ID NO: 1029577 - RNA, 19 nt, Homo sapiens
  misc_RNA (1)...(19): siRNA sense strand
gccacaacgucuuccagaa

SEQ ID NO: 1029578 - RNA, 19 nt, Homo sapiens
  misc_RNA (1)...(19): siRNA sense strand
aagcagcaauucccgaaau

SEQ ID NO: 1029579 - RNA, 19 nt, Homo sapiens
  misc_RNA (1)...(19): siRNA sense strand
gacaagagccaaccacaac

SEQ ID NO: 1029580 - RNA, 19 nt, Homo sapiens
  misc_RNA (1)...(19): siRNA sense strand
acagugaccuggaugaaac

SEQ ID NO: 1029581 - RNA, 19 nt, Homo sapiens
  misc_RNA (1)...(19): siRNA sense strand
gaaugacgaguuugaugug

SEQ ID NO: 1029582 - RNA, 19 nt, Homo sapiens
  misc_RNA (1)...(19): siRNA sense strand
ggcagucagucaagcauca

SEQ ID NO: 1029583 - RNA, 19 nt, Homo sapiens
  misc_RNA (1)...(19): siRNA sense strand
cuagaaagcagcugugaca

SEQ ID NO: 1029584 - RNA, 19 nt, Homo sapiens
  misc_RNA (1)...(19): siRNA sense strand
aagaggaggcuugaagaua

SEQ ID NO: 1029585 - RNA, 19 nt, Homo sapiens
  misc_RNA (1)...(19): siRNA sense strand
cuggauaucuucccuuugg

SEQ ID NO: 1029586 - RNA, 19 nt, Homo sapiens
  misc_RNA (1)...(19): siRNA sense strand
ggguggaacuggacucucu

SEQ ID NO: 1029587 - RNA, 19 nt, Homo sapiens
  misc_RNA (1)...(19): siRNA sense strand
caucaucacauccggagaa

SEQ ID NO: 1029588 - RNA, 19 nt, Homo sapiens
  misc_RNA (1)...(19): siRNA sense strand
gcaggccucaucagucuug

SEQ ID NO: 1029589 - RNA, 19 nt, Homo sapiens
  misc_RNA (1)...(19): siRNA sense strand
ggaccgcaaccuagacaga

SEQ ID NO: 1029590 - RNA, 19 nt, Homo sapiens
  misc_RNA (1)...(19): siRNA sense strand
cagcagaggcagucaguca

SEQ ID NO: 1029591 - RNA, 19 nt, Homo sapiens
  misc_RNA (1)...(19): siRNA sense strand
ggaauccaaagaucacuuc

SEQ ID NO: 1029592 - RNA, 19 nt, Homo sapiens
  misc_RNA (1)...(19): siRNA sense strand
cgacaagagccaaccacaa

SEQ ID NO: 1029593 - RNA, 19 nt, Homo sapiens
  misc_RNA (1)...(19): siRNA sense strand
uggccugccuggaguacua

SEQ ID NO: 1029594 - RNA, 19 nt, Homo sapiens
  misc_RNA (1)...(19): siRNA sense strand
gcacgacuuuuguuacaga

SEQ ID NO: 1029595 - RNA, 19 nt, Homo sapiens
  misc_RNA (1)...(19): siRNA sense strand
gacauuguucucuaccuuu

SEQ ID NO: 1029596 - RNA, 19 nt, Homo sapiens
  misc_RNA (1)...(19): siRNA sense strand
uuggagaaauccucuacaa

SEQ ID NO: 1029597 - RNA, 19 nt, Homo sapiens
  misc_RNA (1)...(19): siRNA sense strand
ggaccucugcgugcucuuu

SEQ ID NO: 1029598 - RNA, 19 nt, Homo sapiens
  misc_RNA (1)...(19): siRNA sense strand
uaaagacccaucggugauu

SEQ ID NO: 1029599 - RNA, 19 nt, Homo sapiens
  misc_RNA (1)...(19): siRNA sense strand
ccaccuucguagccaauga

SEQ ID NO: 1029600 - RNA, 19 nt, Homo sapiens
  misc_RNA (1)...(19): siRNA sense strand
guucucuaccuuugugaua

SEQ ID NO: 1029601 - RNA, 19 nt, Homo sapiens
  misc_RNA (1)...(19): siRNA sense strand
caccacugcuccagaagau

SEQ ID NO: 1029602 - RNA, 19 nt, Homo sapiens
  misc_RNA (1)...(19): siRNA sense strand
gauaccugcaccacacuuu

SEQ ID NO: 1029603 - RNA, 19 nt, Homo sapiens
  misc_RNA (1)...(19): siRNA sense strand
aaagacccaucggugauug

SEQ ID NO: 1029604 - RNA, 19 nt, Homo sapiens
  misc_RNA (1)...(19): siRNA sense strand
gaagcagcaauucccgaaa

SEQ ID NO: 1029605 - RNA, 19 nt, Homo sapiens
  misc_RNA (1)...(19): siRNA sense strand
gggccuuucuggauaucuu

SEQ ID NO: 1029606 - RNA, 19 nt, Homo sapiens
  misc_RNA (1)...(19): siRNA sense strand
agaccgguauuuuguguua

SEQ ID NO: 1029607 - RNA, 19 nt, Homo sapiens
  misc_RNA (1)...(19): siRNA sense strand
gcaagagcaccaggaagga

SEQ ID NO: 1029608 - RNA, 19 nt, Homo sapiens
  misc_RNA (1)...(19): siRNA sense strand
cuuccagaaugacgaguuu

SEQ ID NO: 1029609 - RNA, 19 nt, Homo sapiens
  misc_RNA (1)...(19): siRNA sense strand
ccaggaagaagcuaaugga

SEQ ID NO: 1029610 - RNA, 19 nt, Homo sapiens
  misc_RNA (1)...(19): siRNA sense strand
acucaccacugcuccagaa

SEQ ID NO: 1029611 - RNA, 19 nt, Homo sapiens
  misc_RNA (1)...(19): siRNA sense strand
acaugccucuccuggaauu

SEQ ID NO: 1029612 - RNA, 19 nt, Homo sapiens
  misc_RNA (1)...(19): siRNA sense strand
uuacuacagugaccuggau

SEQ ID NO: 1029613 - RNA, 19 nt, Homo sapiens
  misc_RNA (1)...(19): siRNA sense strand
guucagcagggacucagua

SEQ ID NO: 1029614 - RNA, 19 nt, Homo sapiens
  misc_RNA (1)...(19): siRNA sense strand
cagaaugacgaguuugaug

SEQ ID NO: 1029615 - RNA, 19 nt, Homo sapiens
  misc_RNA (1)...(19): siRNA sense strand
gaaccagaucugccuccuu

SEQ ID NO: 1029616 - RNA, 19 nt, Homo sapiens
  misc_RNA (1)...(19): siRNA sense strand
aauggagucugcaauuaag

SEQ ID NO: 1029617 - RNA, 19 nt, Homo sapiens
  misc_RNA (1)...(19): siRNA sense strand
cuuugggccuuucuggaua

SEQ ID NO: 1029618 - RNA, 19 nt, Homo sapiens
  misc_RNA (1)...(19): siRNA sense strand
gacaagacauuucaaagaa

SEQ ID NO: 1029619 - RNA, 19 nt, Homo sapiens
  misc_RNA (1)...(19): siRNA sense strand
ggaaugggaugaacaagau

SEQ ID NO: 1029620 - RNA, 19 nt, Homo sapiens
  misc_RNA (1)...(19): siRNA sense strand
ggugagagcugccuuguac

SEQ ID NO: 1029621 - RNA, 19 nt, Homo sapiens
  misc_RNA (1)...(19): siRNA sense strand
agaacaaggugacacauau

SEQ ID NO: 1029622 - RNA, 19 nt, Homo sapiens
  misc_RNA (1)...(19): siRNA sense strand
gaacaaggugacacauauu

SEQ ID NO: 1029623 - RNA, 19 nt, Homo sapiens
  misc_RNA (1)...(19): siRNA sense strand
guacaucggcaacuucaaa

SEQ ID NO: 1029624 - RNA, 19 nt, Homo sapiens
  misc_RNA (1)...(19): siRNA sense strand
ggcaguggcugaaggaaga

SEQ ID NO: 1029625 - RNA, 19 nt, Homo sapiens
  misc_RNA (1)...(19): siRNA sense strand
ugacaagacauuucaaaga

SEQ ID NO: 1029626 - RNA, 19 nt, Homo sapiens
  misc_RNA (1)...(19): siRNA sense strand
ugacacuggugaucgcaua

SEQ ID NO: 1029627 - RNA, 19 nt, Homo sapiens
  misc_RNA (1)...(19): siRNA sense strand
gcggaacaauugagcaaga

SEQ ID NO: 1029628 - RNA, 19 nt, Homo sapiens
  misc_RNA (1)...(19): siRNA sense strand
ccagagacgcggaacaauu

SEQ ID NO: 1029629 - RNA, 19 nt, Homo sapiens
  misc_RNA (1)...(19): siRNA sense strand
cagagacgcggaacaauug

SEQ ID NO: 1029630 - RNA, 19 nt, Homo sapiens
  misc_RNA (1)...(19): siRNA sense strand
caacgugggcuuccagaga

SEQ ID NO: 1029631 - RNA, 19 nt, Homo sapiens
  misc_RNA (1)...(19): siRNA sense strand
gaacaauugagcaagaaca

SEQ ID NO: 1029632 - RNA, 19 nt, Homo sapiens
  misc_RNA (1)...(19): siRNA sense strand
agcaugagguccaucagua

SEQ ID NO: 1029633 - RNA, 19 nt, Homo sapiens
  misc_RNA (1)...(19): siRNA sense strand
gcaagaacaaggugacaca

SEQ ID NO: 1029634 - RNA, 19 nt, Homo sapiens
  misc_RNA (1)...(19): siRNA sense strand
gggaaugggaugaacaaga

SEQ ID NO: 1029635 - RNA, 19 nt, Homo sapiens
  misc_RNA (1)...(19): siRNA sense strand
aagaacaaggugacacaua

SEQ ID NO: 1029636 - RNA, 19 nt, Homo sapiens
  misc_RNA (1)...(19): siRNA sense strand
gcaugagguccaucaguau

SEQ ID NO: 1029637 - RNA, 19 nt, Homo sapiens
  misc_RNA (1)...(19): siRNA sense strand
ggaugcagaagaagccaaa

SEQ ID NO: 1029638 - RNA, 19 nt, Homo sapiens
  misc_RNA (1)...(19): siRNA sense strand
cggaacaauugagcaagaa

SEQ ID NO: 1029639 - RNA, 19 nt, Homo sapiens
  misc_RNA (1)...(19): siRNA sense strand
gcugaaggaagaauaugga

SEQ ID NO: 1029640 - RNA, 19 nt, Homo sapiens
  misc_RNA (1)...(19): siRNA sense strand
gcggauucaccaucucaaa

SEQ ID NO: 1029641 - RNA, 19 nt, Homo sapiens
  misc_RNA (1)...(19): siRNA sense strand
caaggugacacauauucug

SEQ ID NO: 1029642 - RNA, 19 nt, Homo sapiens
  misc_RNA (1)...(19): siRNA sense strand
agagagcccuuugcaggau

SEQ ID NO: 1029643 - RNA, 19 nt, Homo sapiens
  misc_RNA (1)...(19): siRNA sense strand
caucggcaacuucaaagau

SEQ ID NO: 1029644 - RNA, 19 nt, Homo sapiens
  misc_RNA (1)...(19): siRNA sense strand
uauguuggagggaguuaaa

SEQ ID NO: 1029645 - RNA, 19 nt, Homo sapiens
  misc_RNA (1)...(19): siRNA sense strand
uguuggagggaguuaaaua

SEQ ID NO: 1029646 - RNA, 19 nt, Homo sapiens
  misc_RNA (1)...(19): siRNA sense strand
ccugacaagacauuucaaa

SEQ ID NO: 1029647 - RNA, 19 nt, Homo sapiens
  misc_RNA (1)...(19): siRNA sense strand
uccaggaguuugagaagca

SEQ ID NO: 1029648 - RNA, 19 nt, Homo sapiens
  misc_RNA (1)...(19): siRNA sense strand
gugccaggccuauguugga

SEQ ID NO: 1029649 - RNA, 19 nt, Homo sapiens
  misc_RNA (1)...(19): siRNA sense strand
gaaguucugggccuuucuc

SEQ ID NO: 1029650 - RNA, 19 nt, Homo sapiens
  misc_RNA (1)...(19): siRNA sense strand
ggaaacccauucuugauaa

SEQ ID NO: 1029651 - RNA, 19 nt, Homo sapiens
  misc_RNA (1)...(19): siRNA sense strand
gcaagcaccuauuauggua

SEQ ID NO: 1029652 - RNA, 19 nt, Homo sapiens
  misc_RNA (1)...(19): siRNA sense strand
gaagaagcgucuagauuca

SEQ ID NO: 1029653 - RNA, 19 nt, Homo sapiens
  misc_RNA (1)...(19): siRNA sense strand
gaucaauuguggacucaua

SEQ ID NO: 1029654 - RNA, 19 nt, Homo sapiens
  misc_RNA (1)...(19): siRNA sense strand
ggaauuggguucagguguu

SEQ ID NO: 1029655 - RNA, 19 nt, Homo sapiens
  misc_RNA (1)...(19): siRNA sense strand
gucaacagcccaacaaaua

SEQ ID NO: 1029656 - RNA, 19 nt, Homo sapiens
  misc_RNA (1)...(19): siRNA sense strand
ggagaaaguuccaguuggu

SEQ ID NO: 1029657 - RNA, 19 nt, Homo sapiens
  misc_RNA (1)...(19): siRNA sense strand
gggaaacccauucuugaua

SEQ ID NO: 1029658 - RNA, 19 nt, Homo sapiens
  misc_RNA (1)...(19): siRNA sense strand
gaaguuggcccaguucuga

SEQ ID NO: 1029659 - RNA, 19 nt, Homo sapiens
  misc_RNA (1)...(19): siRNA sense strand
auacugagccugaucauuu

SEQ ID NO: 1029660 - RNA, 19 nt, Homo sapiens
  misc_RNA (1)...(19): siRNA sense strand
cuucgaaacucacuaaaug

SEQ ID NO: 1029661 - RNA, 19 nt, Homo sapiens
  misc_RNA (1)...(19): siRNA sense strand
guucagguguucuguaaug

SEQ ID NO: 1029662 - RNA, 19 nt, Homo sapiens
  misc_RNA (1)...(19): siRNA sense strand
ugguuuagcuggauuacua

SEQ ID NO: 1029663 - RNA, 19 nt, Homo sapiens
  misc_RNA (1)...(19): siRNA sense strand
ggguucagguguucuguaa

SEQ ID NO: 1029664 - RNA, 19 nt, Homo sapiens
  misc_RNA (1)...(19): siRNA sense strand
gcagggaaacccauucuug

SEQ ID NO: 1029665 - RNA, 19 nt, Homo sapiens
  misc_RNA (1)...(19): siRNA sense strand
caccuauuaugguaacuua

SEQ ID NO: 1029666 - RNA, 19 nt, Homo sapiens
  misc_RNA (1)...(19): siRNA sense strand
gauaacaaccugggagaaa

SEQ ID NO: 1029667 - RNA, 19 nt, Homo sapiens
  misc_RNA (1)...(19): siRNA sense strand
gaaggugggcaaaggaauu

SEQ ID NO: 1029668 - RNA, 19 nt, Homo sapiens
  misc_RNA (1)...(19): siRNA sense strand
gaucauuugcauuucguua

SEQ ID NO: 1029669 - RNA, 19 nt, Homo sapiens
  misc_RNA (1)...(19): siRNA sense strand
ugaagaagcgucuagauuc

SEQ ID NO: 1029670 - RNA, 19 nt, Homo sapiens
  misc_RNA (1)...(19): siRNA sense strand
ugacugcaagcaccuauua

SEQ ID NO: 1029671 - RNA, 19 nt, Homo sapiens
  misc_RNA (1)...(19): siRNA sense strand
gcacuggcaugguggucaa

SEQ ID NO: 1029672 - RNA, 19 nt, Homo sapiens
  misc_RNA (1)...(19): siRNA sense strand
gugaagaagcgucuagauu

SEQ ID NO: 1029673 - RNA, 19 nt, Homo sapiens
  misc_RNA (1)...(19): siRNA sense strand
gaacuggcccugcuguaca

SEQ ID NO: 1029674 - RNA, 19 nt, Homo sapiens
  misc_RNA (1)...(19): siRNA sense strand
gggcuacaaugcaguauac

SEQ ID NO: 1029675 - RNA, 19 nt, Homo sapiens
  misc_RNA (1)...(19): siRNA sense strand
gcuagucguuggauuuauc

SEQ ID NO: 1029676 - RNA, 19 nt, Homo sapiens
  misc_RNA (1)...(19): siRNA sense strand
gaauuggguucagguguuc

SEQ ID NO: 1029677 - RNA, 19 nt, Homo sapiens
  misc_RNA (1)...(19): siRNA sense strand
ucaacagcccaacaaauaa

SEQ ID NO: 1029678 - RNA, 19 nt, Homo sapiens
  misc_RNA (1)...(19): siRNA sense strand
gggcuagucguuggauuua

SEQ ID NO: 1029679 - RNA, 19 nt, Homo sapiens
  misc_RNA (1)...(19): siRNA sense strand
guucugaucgucucuaaug

SEQ ID NO: 1029680 - RNA, 19 nt, Homo sapiens
  misc_RNA (1)...(19): siRNA sense strand
ggauuacuaggaucaauug

SEQ ID NO: 1029681 - RNA, 19 nt, Homo sapiens
  misc_RNA (1)...(19): siRNA sense strand
cauugcaaauuucagcuuu

SEQ ID NO: 1029682 - RNA, 19 nt, Homo sapiens
  misc_RNA (1)...(19): siRNA sense strand
caacgcagugaaucuguuu

SEQ ID NO: 1029683 - RNA, 19 nt, Homo sapiens
  misc_RNA (1)...(19): siRNA sense strand
uaaggaaggugggcaaagg

SEQ ID NO: 1029684 - RNA, 19 nt, Homo sapiens
  misc_RNA (1)...(19): siRNA sense strand
cagggaaacccauucuuga

SEQ ID NO: 1029685 - RNA, 19 nt, Homo sapiens
  misc_RNA (1)...(19): siRNA sense strand
gagaaaguuccaguuggua

SEQ ID NO: 1029686 - RNA, 19 nt, Homo sapiens
  misc_RNA (1)...(19): siRNA sense strand
gcaaaggaauuggguucag

SEQ ID NO: 1029687 - RNA, 19 nt, Homo sapiens
  misc_RNA (1)...(19): siRNA sense strand
ggaagggagaagugaagaa

SEQ ID NO: 1029688 - RNA, 19 nt, Homo sapiens
  misc_RNA (1)...(19): siRNA sense strand
gaagugaagaagcgucuag

SEQ ID NO: 1029689 - RNA, 19 nt, Homo sapiens
  misc_RNA (1)...(19): siRNA sense strand
uccuaaccauugcaaauuu

SEQ ID NO: 1029690 - RNA, 19 nt, Homo sapiens
  misc_RNA (1)...(19): siRNA sense strand
gaagggagaagugaagaag

SEQ ID NO: 1029691 - RNA, 19 nt, Homo sapiens
  misc_RNA (1)...(19): siRNA sense strand
gaaacccauucuugauaac

SEQ ID NO: 1029692 - RNA, 19 nt, Homo sapiens
  misc_RNA (1)...(19): siRNA sense strand
uucguuagcuuucuggauu

SEQ ID NO: 1029693 - RNA, 19 nt, Homo sapiens
  misc_RNA (1)...(19): siRNA sense strand
ggucaacagcccaacaaau

SEQ ID NO: 1029694 - RNA, 19 nt, Homo sapiens
  misc_RNA (1)...(19): siRNA sense strand
aauuguggacucauacuua

SEQ ID NO: 1029695 - RNA, 19 nt, Homo sapiens
  misc_RNA (1)...(19): siRNA sense strand
uauugcauuuggugguuua

SEQ ID NO: 1029696 - RNA, 19 nt, Homo sapiens
  misc_RNA (1)...(19): siRNA sense strand
gaguaaaaguucuccaaga

SEQ ID NO: 1029697 - RNA, 19 nt, Homo sapiens
  misc_RNA (1)...(19): siRNA sense strand
agaagcgucuagauucaga

SEQ ID NO: 1029698 - RNA, 19 nt, Homo sapiens
  misc_RNA (1)...(19): siRNA sense strand
guucuguaauggagcugua

SEQ ID NO: 1029699 - RNA, 19 nt, Homo sapiens
  misc_RNA (1)...(19): siRNA sense strand
caacagcccaacaaauaag

SEQ ID NO: 1029700 - RNA, 19 nt, Homo sapiens
  misc_RNA (1)...(19): siRNA sense strand
uauacuggguuggaugaaa

SEQ ID NO: 1029701 - RNA, 19 nt, Homo sapiens
  misc_RNA (1)...(19): siRNA sense strand
uaacuuacgaccuauuucu

SEQ ID NO: 1029702 - RNA, 19 nt, Homo sapiens
  misc_RNA (1)...(19): siRNA sense strand
gauaacaacgcagugaauc

SEQ ID NO: 1029703 - RNA, 19 nt, Homo sapiens
  misc_RNA (1)...(19): siRNA sense strand
ucguuagcuuucuggauua

SEQ ID NO: 1029704 - RNA, 19 nt, Homo sapiens
  misc_RNA (1)...(19): siRNA sense strand
uaaauggaagggagaagug

SEQ ID NO: 1029705 - RNA, 19 nt, Homo sapiens
  misc_RNA (1)...(19): siRNA sense strand
ggauguguuugucucucuu

SEQ ID NO: 1029706 - RNA, 19 nt, Homo sapiens
  misc_RNA (1)...(19): siRNA sense strand
ccuaaccauugcaaauuuc

SEQ ID NO: 1029707 - RNA, 19 nt, Homo sapiens
  misc_RNA (1)...(19): siRNA sense strand
uaacaacgcagugaaucug

SEQ ID NO: 1029708 - RNA, 19 nt, Homo sapiens
  misc_RNA (1)...(19): siRNA sense strand
aaauaaggcaaggcacaua

SEQ ID NO: 1029709 - RNA, 19 nt, Homo sapiens
  misc_RNA (1)...(19): siRNA sense strand
gcauuucguuagcuuucug

SEQ ID NO: 1029710 - RNA, 19 nt, Homo sapiens
  misc_RNA (1)...(19): siRNA sense strand
uacugagccugaucauuug

SEQ ID NO: 1029711 - RNA, 19 nt, Homo sapiens
  misc_RNA (1)...(19): siRNA sense strand
cgaaacucacuaaauggaa

SEQ ID NO: 1029712 - RNA, 19 nt, Homo sapiens
  misc_RNA (1)...(19): siRNA sense strand
acaacgcagugaaucuguu

SEQ ID NO: 1029713 - RNA, 19 nt, Homo sapiens
  misc_RNA (1)...(19): siRNA sense strand
gagggcuagucguuggauu

SEQ ID NO: 1029714 - RNA, 19 nt, Homo sapiens
  misc_RNA (1)...(19): siRNA sense strand
uaacaaccugggagaaagu

SEQ ID NO: 1029715 - RNA, 19 nt, Homo sapiens
  misc_RNA (1)...(19): siRNA sense strand
ggaaggugggcaaaggaau

SEQ ID NO: 1029716 - RNA, 19 nt, Homo sapiens
  misc_RNA (1)...(19): siRNA sense strand
agccugaucauuugcauuu

SEQ ID NO: 1029717 - RNA, 19 nt, Homo sapiens
  misc_RNA (1)...(19): siRNA sense strand
ucuccaagacugauaacaa

SEQ ID NO: 1029718 - RNA, 19 nt, Homo sapiens
  misc_RNA (1)...(19): siRNA sense strand
ggagacacaugggcuucag

SEQ ID NO: 1029719 - RNA, 19 nt, Homo sapiens
  misc_RNA (1)...(19): siRNA sense strand
gcccugcuguacaugauag

SEQ ID NO: 1029720 - RNA, 19 nt, Homo sapiens
  misc_RNA (1)...(19): siRNA sense strand
uauccuaaccauugcaaau

SEQ ID NO: 1029721 - RNA, 19 nt, Homo sapiens
  misc_RNA (1)...(19): siRNA sense strand
caaauaaggcaaggcacau

SEQ ID NO: 1029722 - RNA, 19 nt, Homo sapiens
  misc_RNA (1)...(19): siRNA sense strand
cgucucuaauggccuuaaa

SEQ ID NO: 1029723 - RNA, 19 nt, Homo sapiens
  misc_RNA (1)...(19): siRNA sense strand
cagugaaucuguuuucuuc

SEQ ID NO: 1029724 - RNA, 19 nt, Homo sapiens
  misc_RNA (1)...(19): siRNA sense strand
auacuggguuggaugaaag

SEQ ID NO: 1029725 - RNA, 19 nt, Homo sapiens
  misc_RNA (1)...(19): siRNA sense strand
uuagcuggauuacuaggau

SEQ ID NO: 1029726 - RNA, 19 nt, Homo sapiens
  misc_RNA (1)...(19): siRNA sense strand
ucuccuuggugguaccuuu

SEQ ID NO: 1029727 - RNA, 19 nt, Homo sapiens
  misc_RNA (1)...(19): siRNA sense strand
agacacaugggcuucagaa

SEQ ID NO: 1029728 - RNA, 19 nt, Homo sapiens
  misc_RNA (1)...(19): siRNA sense strand
gcaccuauuaugguaacuu

SEQ ID NO: 1029729 - RNA, 19 nt, Homo sapiens
  misc_RNA (1)...(19): siRNA sense strand
uuaccucuuugcugauguu

SEQ ID NO: 1029730 - RNA, 19 nt, Homo sapiens
  misc_RNA (1)...(19): siRNA sense strand
uugcauacuuccucacaca

SEQ ID NO: 1029731 - RNA, 19 nt, Homo sapiens
  misc_RNA (1)...(19): siRNA sense strand
caagcaccuauuaugguaa

SEQ ID NO: 1029732 - RNA, 19 nt, Homo sapiens
  misc_RNA (1)...(19): siRNA sense strand
ucgaaacucacuaaaugga

SEQ ID NO: 1029733 - RNA, 19 nt, Homo sapiens
  misc_RNA (1)...(19): siRNA sense strand
ugauaacaacgcagugaau

SEQ ID NO: 1029734 - RNA, 19 nt, Homo sapiens
  misc_RNA (1)...(19): siRNA sense strand
gacagaucuuaacgacaau

SEQ ID NO: 1029735 - RNA, 19 nt, Homo sapiens
  misc_RNA (1)...(19): siRNA sense strand
auaacaaccugggagaaag

SEQ ID NO: 1029736 - RNA, 19 nt, Homo sapiens
  misc_RNA (1)...(19): siRNA sense strand
cuccaagacugauaacaac

SEQ ID NO: 1029737 - RNA, 19 nt, Homo sapiens
  misc_RNA (1)...(19): siRNA sense strand
gauuuauccuaaccauugc

SEQ ID NO: 1029738 - RNA, 19 nt, Homo sapiens
  misc_RNA (1)...(19): siRNA sense strand
aacccauucuugauaacaa

SEQ ID NO: 1029739 - RNA, 19 nt, Homo sapiens
  misc_RNA (1)...(19): siRNA sense strand
ugggagaaaguuccaguug

SEQ ID NO: 1029740 - RNA, 19 nt, Homo sapiens
  misc_RNA (1)...(19): siRNA sense strand
cagaacuggcccugcugua

SEQ ID NO: 1029741 - RNA, 19 nt, Homo sapiens
  misc_RNA (1)...(19): siRNA sense strand
caauuguggacucauacuu

SEQ ID NO: 1029742 - RNA, 19 nt, Homo sapiens
  misc_RNA (1)...(19): siRNA sense strand
uucagaaguuggcccaguu

SEQ ID NO: 1029743 - RNA, 19 nt, Homo sapiens
  misc_RNA (1)...(19): siRNA sense strand
cgagcacgguggugaagua

SEQ ID NO: 1029744 - RNA, 19 nt, Homo sapiens
  misc_RNA (1)...(19): siRNA sense strand
gacgauugaugaacuguau

SEQ ID NO: 1029745 - RNA, 19 nt, Homo sapiens
  misc_RNA (1)...(19): siRNA sense strand
gcagagcccaugacgauug

SEQ ID NO: 1029746 - RNA, 19 nt, Homo sapiens
  misc_RNA (1)...(19): siRNA sense strand
gcuacgagccaaccaucua

SEQ ID NO: 1029747 - RNA, 19 nt, Homo sapiens
  misc_RNA (1)...(19): siRNA sense strand
caggagcuauuuaacgaau

SEQ ID NO: 1029748 - RNA, 19 nt, Homo sapiens
  misc_RNA (1)...(19): siRNA sense strand
cagagcccaugacgauuga

SEQ ID NO: 1029749 - RNA, 19 nt, Homo sapiens
  misc_RNA (1)...(19): siRNA sense strand
ccgcagagcccaugacgau

SEQ ID NO: 1029750 - RNA, 19 nt, Homo sapiens
  misc_RNA (1)...(19): siRNA sense strand
ggacucacugugcccauug

SEQ ID NO: 1029751 - RNA, 19 nt, Homo sapiens
  misc_RNA (1)...(19): siRNA sense strand
uuaccggucgcuaccauua

SEQ ID NO: 1029752 - RNA, 19 nt, Homo sapiens
  misc_RNA (1)...(19): siRNA sense strand
gcacgguggugaaguaccu

SEQ ID NO: 1029753 - RNA, 19 nt, Homo sapiens
  misc_RNA (1)...(19): siRNA sense strand
gggacucacugugcccauu

SEQ ID NO: 1029754 - RNA, 19 nt, Homo sapiens
  misc_RNA (1)...(19): siRNA sense strand
accaggagcuauuuaacga

SEQ ID NO: 1029755 - RNA, 19 nt, Homo sapiens
  misc_RNA (1)...(19): siRNA sense strand
cagccagacuugcucaucu

SEQ ID NO: 1029756 - RNA, 19 nt, Homo sapiens
  misc_RNA (1)...(19): siRNA sense strand
cagcguggaccaacuuaug

SEQ ID NO: 1029757 - RNA, 19 nt, Homo sapiens
  misc_RNA (1)...(19): siRNA sense strand
ggaccaacuuauggaacug

SEQ ID NO: 1029758 - RNA, 19 nt, Homo sapiens
  misc_RNA (1)...(19): siRNA sense strand
ccaugacgauugaugaacu

SEQ ID NO: 1029759 - RNA, 19 nt, Homo sapiens
  misc_RNA (1)...(19): siRNA sense strand
gcucgacaccucaaacucu

SEQ ID NO: 1029760 - RNA, 19 nt, Homo sapiens
  misc_RNA (1)...(19): siRNA sense strand
cacccuacccugacacuga

SEQ ID NO: 1029761 - RNA, 19 nt, Homo sapiens
  misc_RNA (1)...(19): siRNA sense strand
cgauugaugaacuguauga

SEQ ID NO: 1029762 - RNA, 19 nt, Homo sapiens
  misc_RNA (1)...(19): siRNA sense strand
acgagccaaccaucuauua

SEQ ID NO: 1029763 - RNA, 19 nt, Homo sapiens
  misc_RNA (1)...(19): siRNA sense strand
cuacuguccuggucaucug

SEQ ID NO: 1029764 - RNA, 19 nt, Homo sapiens
  misc_RNA (1)...(19): siRNA sense strand
ggagggauccagccagacu

SEQ ID NO: 1029765 - RNA, 19 nt, Homo sapiens
  misc_RNA (1)...(19): siRNA sense strand
ggaccaggagcuauuuaac

SEQ ID NO: 1029766 - RNA, 19 nt, Homo sapiens
  misc_RNA (1)...(19): siRNA sense strand
gcccaugacgauugaugaa

SEQ ID NO: 1029767 - RNA, 19 nt, Homo sapiens
  misc_RNA (1)...(19): siRNA sense strand
gaauaauggaggagauggu

SEQ ID NO: 1029768 - RNA, 19 nt, Homo sapiens
  misc_RNA (1)...(19): siRNA sense strand
caugacgauugaugaacug

SEQ ID NO: 1029769 - RNA, 19 nt, Homo sapiens
  misc_RNA (1)...(19): siRNA sense strand
cauccugaguguccugaag

SEQ ID NO: 1029770 - RNA, 19 nt, Homo sapiens
  misc_RNA (1)...(19): siRNA sense strand
caggaugggacguggagaa

SEQ ID NO: 1029771 - RNA, 19 nt, Homo sapiens
  misc_RNA (1)...(19): siRNA sense strand
ggacguggagaagggaaau

SEQ ID NO: 1029772 - RNA, 19 nt, Homo sapiens
  misc_RNA (1)...(19): siRNA sense strand
gggaauaauggaggagaug

SEQ ID NO: 1029773 - RNA, 19 nt, Homo sapiens
  misc_RNA (1)...(19): siRNA sense strand
gaccaggagcuauuuaacg

SEQ ID NO: 1029774 - RNA, 19 nt, Homo sapiens
  misc_RNA (1)...(19): siRNA sense strand
cuacgagccaaccaucuau

SEQ ID NO: 1029775 - RNA, 19 nt, Homo sapiens
  misc_RNA (1)...(19): siRNA sense strand
gagcccaugacgauugaug

SEQ ID NO: 1029776 - RNA, 19 nt, Homo sapiens
  misc_RNA (1)...(19): siRNA sense strand
caccagacauccauugaua

SEQ ID NO: 1029777 - RNA, 19 nt, Homo sapiens
  misc_RNA (1)...(19): siRNA sense strand
agacauccauugauaguga

SEQ ID NO: 1029778 - RNA, 19 nt, Homo sapiens
  misc_RNA (1)...(19): siRNA sense strand
gcccgagccuucucacuga

SEQ ID NO: 1029779 - RNA, 19 nt, Homo sapiens
  misc_RNA (1)...(19): siRNA sense strand
gcacggaggcagaacugaa

SEQ ID NO: 1029780 - RNA, 19 nt, Homo sapiens
  misc_RNA (1)...(19): siRNA sense strand
gacaggaguccagcucaua

SEQ ID NO: 1029781 - RNA, 19 nt, Homo sapiens
  misc_RNA (1)...(19): siRNA sense strand
ggaggcguguauuguggaa

SEQ ID NO: 1029782 - RNA, 19 nt, Homo sapiens
  misc_RNA (1)...(19): siRNA sense strand
gaagggacuccgagcacuu

SEQ ID NO: 1029783 - RNA, 19 nt, Homo sapiens
  misc_RNA (1)...(19): siRNA sense strand
gcaagggcacugcuaugga

SEQ ID NO: 1029784 - RNA, 19 nt, Homo sapiens
  misc_RNA (1)...(19): siRNA sense strand
ggcguugugucccuacauu

SEQ ID NO: 1029785 - RNA, 19 nt, Homo sapiens
  misc_RNA (1)...(19): siRNA sense strand
ccuugaaacuguggacaaa

SEQ ID NO: 1029786 - RNA, 19 nt, Homo sapiens
  misc_RNA (1)...(19): siRNA sense strand
gaaacuguggacaaacaug

SEQ ID NO: 1029787 - RNA, 19 nt, Homo sapiens
  misc_RNA (1)...(19): siRNA sense strand
caccaugggcggucaagaa

SEQ ID NO: 1029788 - RNA, 19 nt, Homo sapiens
  misc_RNA (1)...(19): siRNA sense strand
gagcaccagacauccauug

SEQ ID NO: 1029789 - RNA, 19 nt, Homo sapiens
  misc_RNA (1)...(19): siRNA sense strand
gcaccagacauccauugau

SEQ ID NO: 1029790 - RNA, 19 nt, Homo sapiens
  misc_RNA (1)...(19): siRNA sense strand
uugaaacuguggacaaaca

SEQ ID NO: 1029791 - RNA, 19 nt, Homo sapiens
  misc_RNA (1)...(19): siRNA sense strand
gcgcggacccuaauuuggu

SEQ ID NO: 1029792 - RNA, 19 nt, Homo sapiens
  misc_RNA (1)...(19): siRNA sense strand
gcacuuggcccagaguuuu

SEQ ID NO: 1029793 - RNA, 19 nt, Homo sapiens
  misc_RNA (1)...(19): siRNA sense strand
ccagacauccauugauagu

SEQ ID NO: 1029794 - RNA, 19 nt, Homo sapiens
  misc_RNA (1)...(19): siRNA sense strand
ggacccuaauuuggugcua

SEQ ID NO: 1029795 - RNA, 19 nt, Homo sapiens
  misc_RNA (1)...(19): siRNA sense strand
gaggaugaggcaagcucua

SEQ ID NO: 1029796 - RNA, 19 nt, Homo sapiens
  misc_RNA (1)...(19): siRNA sense strand
uuucauccgugccaucuuc

SEQ ID NO: 1029797 - RNA, 19 nt, Homo sapiens
  misc_RNA (1)...(19): siRNA sense strand
ucucuggaccuaccgauga

SEQ ID NO: 1029798 - RNA, 19 nt, Homo sapiens
  misc_RNA (1)...(19): siRNA sense strand
ggugacaacagggacauug

SEQ ID NO: 1029799 - RNA, 19 nt, Homo sapiens
  misc_RNA (1)...(19): siRNA sense strand
ccaaggugcgucagaucuu

SEQ ID NO: 1029800 - RNA, 19 nt, Homo sapiens
  misc_RNA (1)...(19): siRNA sense strand
aagucuagcuucacguauc

SEQ ID NO: 1029801 - RNA, 19 nt, Homo sapiens
  misc_RNA (1)...(19): siRNA sense strand
cagcucagacgccucuuuc

SEQ ID NO: 1029802 - RNA, 19 nt, Homo sapiens
  misc_RNA (1)...(19): siRNA sense strand
gaggaggagccguguagag

SEQ ID NO: 1029803 - RNA, 19 nt, Homo sapiens
  misc_RNA (1)...(19): siRNA sense strand
acagggacauuggcuugga

SEQ ID NO: 1029804 - RNA, 19 nt, Homo sapiens
  misc_RNA (1)...(19): siRNA sense strand
cagauguccaggcagauga

SEQ ID NO: 1029805 - RNA, 19 nt, Homo sapiens
  misc_RNA (1)...(19): siRNA sense strand
gcucagacgccucuuucgu

SEQ ID NO: 1029806 - RNA, 19 nt, Homo sapiens
  misc_RNA (1)...(19): siRNA sense strand
ggauccagacgcucaccaa

SEQ ID NO: 1029807 - RNA, 19 nt, Homo sapiens
  misc_RNA (1)...(19): siRNA sense strand
gacgggcuguauuccagau

SEQ ID NO: 1029808 - RNA, 19 nt, Homo sapiens
  misc_RNA (1)...(19): siRNA sense strand
uccagacgcucaccaacca

SEQ ID NO: 1029809 - RNA, 19 nt, Homo sapiens
  misc_RNA (1)...(19): siRNA sense strand
gagaugaaguggagaagua

SEQ ID NO: 1029810 - RNA, 19 nt, Homo sapiens
  misc_RNA (1)...(19): siRNA sense strand
caagcaagauccauauaua

SEQ ID NO: 1029811 - RNA, 19 nt, Homo sapiens
  misc_RNA (1)...(19): siRNA sense strand
acagggauguuaacuauua

SEQ ID NO: 1029812 - RNA, 19 nt, Homo sapiens
  misc_RNA (1)...(19): siRNA sense strand
gaacacaugugaauccaau

SEQ ID NO: 1029813 - RNA, 19 nt, Homo sapiens
  misc_RNA (1)...(19): siRNA sense strand
ggucgagacucuaucauaa

SEQ ID NO: 1029814 - RNA, 19 nt, Homo sapiens
  misc_RNA (1)...(19): siRNA sense strand
gaagggacaggaagauuua

SEQ ID NO: 1029815 - RNA, 19 nt, Homo sapiens
  misc_RNA (1)...(19): siRNA sense strand
ugucacaacuucuucuuua

SEQ ID NO: 1029816 - RNA, 19 nt, Homo sapiens
  misc_RNA (1)...(19): siRNA sense strand
gacaaugacuguacaaauc

SEQ ID NO: 1029817 - RNA, 19 nt, Homo sapiens
  misc_RNA (1)...(19): siRNA sense strand
cagcagagauguauagcaa

SEQ ID NO: 1029818 - RNA, 19 nt, Homo sapiens
  misc_RNA (1)...(19): siRNA sense strand
gugaaggcauugcuauuaa

SEQ ID NO: 1029819 - RNA, 19 nt, Homo sapiens
  misc_RNA (1)...(19): siRNA sense strand
gugcagguuuccuauguua

SEQ ID NO: 1029820 - RNA, 19 nt, Homo sapiens
  misc_RNA (1)...(19): siRNA sense strand
guaaaggccuuagcauaug

SEQ ID NO: 1029821 - RNA, 19 nt, Homo sapiens
  misc_RNA (1)...(19): siRNA sense strand
gaaggcauguaaaguugaa

SEQ ID NO: 1029822 - RNA, 19 nt, Homo sapiens
  misc_RNA (1)...(19): siRNA sense strand
ggaagggacaggaagauuu

SEQ ID NO: 1029823 - RNA, 19 nt, Homo sapiens
  misc_RNA (1)...(19): siRNA sense strand
gcagagauguauagcaaca

SEQ ID NO: 1029824 - RNA, 19 nt, Homo sapiens
  misc_RNA (1)...(19): siRNA sense strand
ugacaucacuguggauaaa

SEQ ID NO: 1029825 - RNA, 19 nt, Homo sapiens
  misc_RNA (1)...(19): siRNA sense strand
acaacuaagucuacaguaa

SEQ ID NO: 1029826 - RNA, 19 nt, Homo sapiens
  misc_RNA (1)...(19): siRNA sense strand
uaaggacacauaaggauua

SEQ ID NO: 1029827 - RNA, 19 nt, Homo sapiens
  misc_RNA (1)...(19): siRNA sense strand
caacauaccgaguccauga

SEQ ID NO: 1029828 - RNA, 19 nt, Homo sapiens
  misc_RNA (1)...(19): siRNA sense strand
accacuagcucuucuaaua

SEQ ID NO: 1029829 - RNA, 19 nt, Homo sapiens
  misc_RNA (1)...(19): siRNA sense strand
gaaguaaaccauguaaaug

SEQ ID NO: 1029830 - RNA, 19 nt, Homo sapiens
  misc_RNA (1)...(19): siRNA sense strand
caaauugguucucaguaga

SEQ ID NO: 1029831 - RNA, 19 nt, Homo sapiens
  misc_RNA (1)...(19): siRNA sense strand
caacuaagucuacaguaaa

SEQ ID NO: 1029832 - RNA, 19 nt, Homo sapiens
  misc_RNA (1)...(19): siRNA sense strand
caaccgaaauggagucaau

SEQ ID NO: 1029833 - RNA, 19 nt, Homo sapiens
  misc_RNA (1)...(19): siRNA sense strand
gaauauggagugucaauca

SEQ ID NO: 1029834 - RNA, 19 nt, Homo sapiens
  misc_RNA (1)...(19): siRNA sense strand
aaagauagacucucugcua

SEQ ID NO: 1029835 - RNA, 19 nt, Homo sapiens
  misc_RNA (1)...(19): siRNA sense strand
ugaauacucuaacagcauu

SEQ ID NO: 1029836 - RNA, 19 nt, Homo sapiens
  misc_RNA (1)...(19): siRNA sense strand
uagcauaugccaaggauaa

SEQ ID NO: 1029837 - RNA, 19 nt, Homo sapiens
  misc_RNA (1)...(19): siRNA sense strand
gauagacucucugcuagug

SEQ ID NO: 1029838 - RNA, 19 nt, Homo sapiens
  misc_RNA (1)...(19): siRNA sense strand
ccaauaauaauguggcaua

SEQ ID NO: 1029839 - RNA, 19 nt, Homo sapiens
  misc_RNA (1)...(19): siRNA sense strand
gcacaagcaagauccauau

SEQ ID NO: 1029840 - RNA, 19 nt, Homo sapiens
  misc_RNA (1)...(19): siRNA sense strand
caacuuggauaaugagucu

SEQ ID NO: 1029841 - RNA, 19 nt, Homo sapiens
  misc_RNA (1)...(19): siRNA sense strand
gaaaagguguuacggguau

SEQ ID NO: 1029842 - RNA, 19 nt, Homo sapiens
  misc_RNA (1)...(19): siRNA sense strand
gagacucuaucauaagaau

SEQ ID NO: 1029843 - RNA, 19 nt, Homo sapiens
  misc_RNA (1)...(19): siRNA sense strand
agucuaugcuucuuaauga

SEQ ID NO: 1029844 - RNA, 19 nt, Homo sapiens
  misc_RNA (1)...(19): siRNA sense strand
caacauuaaggacacauaa

SEQ ID NO: 1029845 - RNA, 19 nt, Homo sapiens
  misc_RNA (1)...(19): siRNA sense strand
uuaaagggcacacggauaa

SEQ ID NO: 1029846 - RNA, 19 nt, Homo sapiens
  misc_RNA (1)...(19): siRNA sense strand
gacauucgggugcuaauuu

SEQ ID NO: 1029847 - RNA, 19 nt, Homo sapiens
  misc_RNA (1)...(19): siRNA sense strand
ugaaggcauugcuauuaaa

SEQ ID NO: 1029848 - RNA, 19 nt, Homo sapiens
  misc_RNA (1)...(19): siRNA sense strand
ggaaugcacacaagggauu

SEQ ID NO: 1029849 - RNA, 19 nt, Homo sapiens
  misc_RNA (1)...(19): siRNA sense strand
ccacuagcucuucuaauaa

SEQ ID NO: 1029850 - RNA, 19 nt, Homo sapiens
  misc_RNA (1)...(19): siRNA sense strand
gaauuuaggaggacuuuua

SEQ ID NO: 1029851 - RNA, 19 nt, Homo sapiens
  misc_RNA (1)...(19): siRNA sense strand
gcagguuuccuauguuauu

SEQ ID NO: 1029852 - RNA, 19 nt, Homo sapiens
  misc_RNA (1)...(19): siRNA sense strand
gguaugggauccaagaaca

SEQ ID NO: 1029853 - RNA, 19 nt, Homo sapiens
  misc_RNA (1)...(19): siRNA sense strand
cguaaaggccuuagcauau

SEQ ID NO: 1029854 - RNA, 19 nt, Homo sapiens
  misc_RNA (1)...(19): siRNA sense strand
aagaagauauugcuguguu

SEQ ID NO: 1029855 - RNA, 19 nt, Homo sapiens
  misc_RNA (1)...(19): siRNA sense strand
acaggaagauuuauuguac

SEQ ID NO: 1029856 - RNA, 19 nt, Homo sapiens
  misc_RNA (1)...(19): siRNA sense strand
gacaggaagauuuauugua

SEQ ID NO: 1029857 - RNA, 19 nt, Homo sapiens
  misc_RNA (1)...(19): siRNA sense strand
uauaacaccucuuuguaca

SEQ ID NO: 1029858 - RNA, 19 nt, Homo sapiens
  misc_RNA (1)...(19): siRNA sense strand
agauggagcuugauagauc

SEQ ID NO: 1029859 - RNA, 19 nt, Homo sapiens
  misc_RNA (1)...(19): siRNA sense strand
gaaaaguuauggaacaugu

SEQ ID NO: 1029860 - RNA, 19 nt, Homo sapiens
  misc_RNA (1)...(19): siRNA sense strand
auaagaauauggaguguca

SEQ ID NO: 1029861 - RNA, 19 nt, Homo sapiens
  misc_RNA (1)...(19): siRNA sense strand
uaacaccucuuuguacaca

SEQ ID NO: 1029862 - RNA, 19 nt, Homo sapiens
  misc_RNA (1)...(19): siRNA sense strand
ggacagacaaauauuccuu

SEQ ID NO: 1029863 - RNA, 19 nt, Homo sapiens
  misc_RNA (1)...(19): siRNA sense strand
ggauaaagaacuaguagca

SEQ ID NO: 1029864 - RNA, 19 nt, Homo sapiens
  misc_RNA (1)...(19): siRNA sense strand
gaaguacaaccgaaaugga

SEQ ID NO: 1029865 - RNA, 19 nt, Homo sapiens
  misc_RNA (1)...(19): siRNA sense strand
ggugcuaauuugugaagaa

SEQ ID NO: 1029866 - RNA, 19 nt, Homo sapiens
  misc_RNA (1)...(19): siRNA sense strand
gacauuguacucuguugua

SEQ ID NO: 1029867 - RNA, 19 nt, Homo sapiens
  misc_RNA (1)...(19): siRNA sense strand
gcagaagggaaauggauau

SEQ ID NO: 1029868 - RNA, 19 nt, Homo sapiens
  misc_RNA (1)...(19): siRNA sense strand
ggaugaaagugauuguuuu

SEQ ID NO: 1029869 - RNA, 19 nt, Homo sapiens
  misc_RNA (1)...(19): siRNA sense strand
gcaaaacuaaugaagcuua

SEQ ID NO: 1029870 - RNA, 19 nt, Homo sapiens
  misc_RNA (1)...(19): siRNA sense strand
ugaaucaacugggaacaau

SEQ ID NO: 1029871 - RNA, 19 nt, Homo sapiens
  misc_RNA (1)...(19): siRNA sense strand
acauaaggauuacguaaag

SEQ ID NO: 1029872 - RNA, 19 nt, Homo sapiens
  misc_RNA (1)...(19): siRNA sense strand
aaugaugccuucacacaug

SEQ ID NO: 1029873 - RNA, 19 nt, Homo sapiens
  misc_RNA (1)...(19): siRNA sense strand
ggaugugaauacucuaaca

SEQ ID NO: 1029874 - RNA, 19 nt, Homo sapiens
  misc_RNA (1)...(19): siRNA sense strand
caagauccauauauagcau

SEQ ID NO: 1029875 - RNA, 19 nt, Homo sapiens
  misc_RNA (1)...(19): siRNA sense strand
aagcacuccuggaauauug

SEQ ID NO: 1029876 - RNA, 19 nt, Homo sapiens
  misc_RNA (1)...(19): siRNA sense strand
ccuaagaaacccugacauu

SEQ ID NO: 1029877 - RNA, 19 nt, Homo sapiens
  misc_RNA (1)...(19): siRNA sense strand
ucaaucagcacaagcaaga

SEQ ID NO: 1029878 - RNA, 19 nt, Homo sapiens
  misc_RNA (1)...(19): siRNA sense strand
cauguaaaguugaagaucu

SEQ ID NO: 1029879 - RNA, 19 nt, Homo sapiens
  misc_RNA (1)...(19): siRNA sense strand
ccuauaacaccucuuugua

SEQ ID NO: 1029880 - RNA, 19 nt, Homo sapiens
  misc_RNA (1)...(19): siRNA sense strand
gugcuaauuugugaagaaa

SEQ ID NO: 1029881 - RNA, 19 nt, Homo sapiens
  misc_RNA (1)...(19): siRNA sense strand
ugugaaggcauugcuauua

SEQ ID NO: 1029882 - RNA, 19 nt, Homo sapiens
  misc_RNA (1)...(19): siRNA sense strand
gucacaacuucuucuuuaa

SEQ ID NO: 1029883 - RNA, 19 nt, Homo sapiens
  misc_RNA (1)...(19): siRNA sense strand
uaauaucugcuucuucuga

SEQ ID NO: 1029884 - RNA, 19 nt, Homo sapiens
  misc_RNA (1)...(19): siRNA sense strand
aaacgacauuguacucugu

SEQ ID NO: 1029885 - RNA, 19 nt, Homo sapiens
  misc_RNA (1)...(19): siRNA sense strand
ucgagacucuaucauaaga

SEQ ID NO: 1029886 - RNA, 19 nt, Homo sapiens
  misc_RNA (1)...(19): siRNA sense strand
ugccaaggauaaagaacua

SEQ ID NO: 1029887 - RNA, 19 nt, Homo sapiens
  misc_RNA (1)...(19): siRNA sense strand
ggacaggaagauuuauugu

SEQ ID NO: 1029888 - RNA, 19 nt, Homo sapiens
  misc_RNA (1)...(19): siRNA sense strand
caaauaacacugucacaac

SEQ ID NO: 1029889 - RNA, 19 nt, Homo sapiens
  misc_RNA (1)...(19): siRNA sense strand
uaagaaacccugacauucg

SEQ ID NO: 1029890 - RNA, 19 nt, Homo sapiens
  misc_RNA (1)...(19): siRNA sense strand
caaggauaaagaacuagua

SEQ ID NO: 1029891 - RNA, 19 nt, Homo sapiens
  misc_RNA (1)...(19): siRNA sense strand
caacaaaauuccuuucuac

SEQ ID NO: 1029892 - RNA, 19 nt, Homo sapiens
  misc_RNA (1)...(19): siRNA sense strand
gaugggacaauucgccuuu

SEQ ID NO: 1029893 - RNA, 19 nt, Homo sapiens
  misc_RNA (1)...(19): siRNA sense strand
aaauaacacugucacaacu

SEQ ID NO: 1029894 - RNA, 19 nt, Homo sapiens
  misc_RNA (1)...(19): siRNA sense strand
ggaacaccauacugauugg

SEQ ID NO: 1029895 - RNA, 19 nt, Homo sapiens
  misc_RNA (1)...(19): siRNA sense strand
ccaaauauggaccuucgaa

SEQ ID NO: 1029896 - RNA, 19 nt, Homo sapiens
  misc_RNA (1)...(19): siRNA sense strand
cacuagcucuucuaauaau

SEQ ID NO: 1029897 - RNA, 19 nt, Homo sapiens
  misc_RNA (1)...(19): siRNA sense strand
ggaggucgcacacuguuca

SEQ ID NO: 1029898 - RNA, 19 nt, Homo sapiens
  misc_RNA (1)...(19): siRNA sense strand
uugaaggcauguaaaguug

SEQ ID NO: 1029899 - RNA, 19 nt, Homo sapiens
  misc_RNA (1)...(19): siRNA sense strand
ggagaaguacaaccgaaau

SEQ ID NO: 1029900 - RNA, 19 nt, Homo sapiens
  misc_RNA (1)...(19): siRNA sense strand
acacauaaggauuacguaa

SEQ ID NO: 1029901 - RNA, 19 nt, Homo sapiens
  misc_RNA (1)...(19): siRNA sense strand
gggacaggaagauuuauug

SEQ ID NO: 1029902 - RNA, 19 nt, Homo sapiens
  misc_RNA (1)...(19): siRNA sense strand
cugagucuaugcuucuuaa

SEQ ID NO: 1029903 - RNA, 19 nt, Homo sapiens
  misc_RNA (1)...(19): siRNA sense strand
gcaagauccauauauagca

SEQ ID NO: 1029904 - RNA, 19 nt, Homo sapiens
  misc_RNA (1)...(19): siRNA sense strand
ugacaaugacuguacaaau

SEQ ID NO: 1029905 - RNA, 19 nt, Homo sapiens
  misc_RNA (1)...(19): siRNA sense strand
caacaacuaagucuacagu

SEQ ID NO: 1029906 - RNA, 19 nt, Homo sapiens
  misc_RNA (1)...(19): siRNA sense strand
gauccaagaacaugugcaa

SEQ ID NO: 1029907 - RNA, 19 nt, Homo sapiens
  misc_RNA (1)...(19): siRNA sense strand
ugguguaugugccaaauug

SEQ ID NO: 1029908 - RNA, 19 nt, Homo sapiens
  misc_RNA (1)...(19): siRNA sense strand
gagaaguacaaccgaaaug

SEQ ID NO: 1029909 - RNA, 19 nt, Homo sapiens
  misc_RNA (1)...(19): siRNA sense strand
gaagguagauuuggaguaa

SEQ ID NO: 1029910 - RNA, 19 nt, Homo sapiens
  misc_RNA (1)...(19): siRNA sense strand
gaggaaggcugucaucaaa

SEQ ID NO: 1029911 - RNA, 19 nt, Homo sapiens
  misc_RNA (1)...(19): siRNA sense strand
gugacaagcuggaagauuu

SEQ ID NO: 1029912 - RNA, 19 nt, Homo sapiens
  misc_RNA (1)...(19): siRNA sense strand
gagaagaaauggcuuugga

SEQ ID NO: 1029913 - RNA, 19 nt, Homo sapiens
  misc_RNA (1)...(19): siRNA sense strand
gagaagcacuugcaaagca

SEQ ID NO: 1029914 - RNA, 19 nt, Homo sapiens
  misc_RNA (1)...(19): siRNA sense strand
gagcacagguuauugaaag

SEQ ID NO: 1029915 - RNA, 19 nt, Homo sapiens
  misc_RNA (1)...(19): siRNA sense strand
ggacuuuccuuccuugaau

SEQ ID NO: 1029916 - RNA, 19 nt, Homo sapiens
  misc_RNA (1)...(19): siRNA sense strand
gaagaaauggcuuuggaaa

SEQ ID NO: 1029917 - RNA, 19 nt, Homo sapiens
  misc_RNA (1)...(19): siRNA sense strand
cgacauaauuccucugaug

SEQ ID NO: 1029918 - RNA, 19 nt, Homo sapiens
  misc_RNA (1)...(19): siRNA sense strand
gaauagagacugugacaag

SEQ ID NO: 1029919 - RNA, 19 nt, Homo sapiens
  misc_RNA (1)...(19): siRNA sense strand
ucaaggaguuccacaugaa

SEQ ID NO: 1029920 - RNA, 19 nt, Homo sapiens
  misc_RNA (1)...(19): siRNA sense strand
gcagagcacagguuauuga

SEQ ID NO: 1029921 - RNA, 19 nt, Homo sapiens
  misc_RNA (1)...(19): siRNA sense strand
gaaagaagacaagguggaa

SEQ ID NO: 1029922 - RNA, 19 nt, Homo sapiens
  misc_RNA (1)...(19): siRNA sense strand
cagagcagcugagaagaaa

SEQ ID NO: 1029923 - RNA, 19 nt, Homo sapiens
  misc_RNA (1)...(19): siRNA sense strand
gaagagugaguuccugaaa

SEQ ID NO: 1029924 - RNA, 19 nt, Homo sapiens
  misc_RNA (1)...(19): siRNA sense strand
caucagccaugcagaccua

SEQ ID NO: 1029925 - RNA, 19 nt, Homo sapiens
  misc_RNA (1)...(19): siRNA sense strand
aggaugagcucaaggaguu

SEQ ID NO: 1029926 - RNA, 19 nt, Homo sapiens
  misc_RNA (1)...(19): siRNA sense strand
caacaccacagucagcuaa

SEQ ID NO: 1029927 - RNA, 19 nt, Homo sapiens
  misc_RNA (1)...(19): siRNA sense strand
ggaggaaggcugucaucaa

SEQ ID NO: 1029928 - RNA, 19 nt, Homo sapiens
  misc_RNA (1)...(19): siRNA sense strand
ccuaaugcauggaaagcua

SEQ ID NO: 1029929 - RNA, 19 nt, Homo sapiens
  misc_RNA (1)...(19): siRNA sense strand
ccaagaugcuaguuaucaa

SEQ ID NO: 1029930 - RNA, 19 nt, Homo sapiens
  misc_RNA (1)...(19): siRNA sense strand
cagaggagaagguagauuu

SEQ ID NO: 1029931 - RNA, 19 nt, Homo sapiens
  misc_RNA (1)...(19): siRNA sense strand
ugaaaacucugaaggauga

SEQ ID NO: 1029932 - RNA, 19 nt, Homo sapiens
  misc_RNA (1)...(19): siRNA sense strand
cagcacaccugaaccaaag

SEQ ID NO: 1029933 - RNA, 19 nt, Homo sapiens
  misc_RNA (1)...(19): siRNA sense strand
gcauucaccucaccaggau

SEQ ID NO: 1029934 - RNA, 19 nt, Homo sapiens
  misc_RNA (1)...(19): siRNA sense strand
gaaaccaguagcagugaaa

SEQ ID NO: 1029935 - RNA, 19 nt, Homo sapiens
  misc_RNA (1)...(19): siRNA sense strand
ugggacaccuucuggagua

SEQ ID NO: 1029936 - RNA, 19 nt, Homo sapiens
  misc_RNA (1)...(19): siRNA sense strand
gcucugaguucucccaaag

SEQ ID NO: 1029937 - RNA, 19 nt, Homo sapiens
  misc_RNA (1)...(19): siRNA sense strand
caaauugucauccgugguu

SEQ ID NO: 1029938 - RNA, 19 nt, Homo sapiens
  misc_RNA (1)...(19): siRNA sense strand
gaacugcaggagauucuug

SEQ ID NO: 1029939 - RNA, 19 nt, Homo sapiens
  misc_RNA (1)...(19): siRNA sense strand
gcaccuacccagaggagaa

SEQ ID NO: 1029940 - RNA, 19 nt, Homo sapiens
  misc_RNA (1)...(19): siRNA sense strand
uccaaucucuguuaccaaa

SEQ ID NO: 1029941 - RNA, 19 nt, Homo sapiens
  misc_RNA (1)...(19): siRNA sense strand
gagcagcugagaagaaaug

SEQ ID NO: 1029942 - RNA, 19 nt, Homo sapiens
  misc_RNA (1)...(19): siRNA sense strand
ccuccaagaugcuaguuau

SEQ ID NO: 1029943 - RNA, 19 nt, Homo sapiens
  misc_RNA (1)...(19): siRNA sense strand
ggaaggcugucaucaaaau

SEQ ID NO: 1029944 - RNA, 19 nt, Homo sapiens
  misc_RNA (1)...(19): siRNA sense strand
gagaauagagacugugaca

SEQ ID NO: 1029945 - RNA, 19 nt, Homo sapiens
  misc_RNA (1)...(19): siRNA sense strand
cauaauuccucugaugguu

SEQ ID NO: 1029946 - RNA, 19 nt, Homo sapiens
  misc_RNA (1)...(19): siRNA sense strand
gaagacagagcagcugaga

SEQ ID NO: 1029947 - RNA, 19 nt, Homo sapiens
  misc_RNA (1)...(19): siRNA sense strand
caagcaacccuccaagaug

SEQ ID NO: 1029948 - RNA, 19 nt, Homo sapiens
  misc_RNA (1)...(19): siRNA sense strand
ggaaccaucgccauuggaa

SEQ ID NO: 1029949 - RNA, 19 nt, Homo sapiens
  misc_RNA (1)...(19): siRNA sense strand
agaagcagagcacagguua

SEQ ID NO: 1029950 - RNA, 19 nt, Homo sapiens
  misc_RNA (1)...(19): siRNA sense strand
caagaugcuaguuaucaaa

SEQ ID NO: 1029951 - RNA, 19 nt, Homo sapiens
  misc_RNA (1)...(19): siRNA sense strand
ccucucgucugaccaaguu

SEQ ID NO: 1029952 - RNA, 19 nt, Homo sapiens
  misc_RNA (1)...(19): siRNA sense strand
ccaagcaacccuccaagau

SEQ ID NO: 1029953 - RNA, 19 nt, Homo sapiens
  misc_RNA (1)...(19): siRNA sense strand
ggacaacagcacaccugaa

SEQ ID NO: 1029954 - RNA, 19 nt, Homo sapiens
  misc_RNA (1)...(19): siRNA sense strand
gcuauggguuggcaggaau

SEQ ID NO: 1029955 - RNA, 19 nt, Homo sapiens
  misc_RNA (1)...(19): siRNA sense strand
agacagagcagcugagaag

SEQ ID NO: 1029956 - RNA, 19 nt, Homo sapiens
  misc_RNA (1)...(19): siRNA sense strand
gcucaaggaguuccacaug

SEQ ID NO: 1029957 - RNA, 19 nt, Homo sapiens
  misc_RNA (1)...(19): siRNA sense strand
ggacucuggugucucuaag

SEQ ID NO: 1029958 - RNA, 19 nt, Homo sapiens
  misc_RNA (1)...(19): siRNA sense strand
caguagcagugaaacauca

SEQ ID NO: 1029959 - RNA, 19 nt, Homo sapiens
  misc_RNA (1)...(19): siRNA sense strand
cgaaaccaguagcagugaa

SEQ ID NO: 1029960 - RNA, 19 nt, Homo sapiens
  misc_RNA (1)...(19): siRNA sense strand
ggaauauccugaaaaugau

SEQ ID NO: 1029961 - RNA, 19 nt, Homo sapiens
  misc_RNA (1)...(19): siRNA sense strand
cuaacaggauggagcacaa

SEQ ID NO: 1029962 - RNA, 19 nt, Homo sapiens
  misc_RNA (1)...(19): siRNA sense strand
guuccugcuuggcuaaauu

SEQ ID NO: 1029963 - RNA, 19 nt, Homo sapiens
  misc_RNA (1)...(19): siRNA sense strand
ggcaugagccaacguagug

SEQ ID NO: 1029964 - RNA, 19 nt, Homo sapiens
  misc_RNA (1)...(19): siRNA sense strand
uggaagauuuggaggacaa

SEQ ID NO: 1029965 - RNA, 19 nt, Homo sapiens
  misc_RNA (1)...(19): siRNA sense strand
aagcagagcacagguuauu

SEQ ID NO: 1029966 - RNA, 19 nt, Homo sapiens
  misc_RNA (1)...(19): siRNA sense strand
caacagcacaccugaacca

SEQ ID NO: 1029967 - RNA, 19 nt, Homo sapiens
  misc_RNA (1)...(19): siRNA sense strand
ccuacgaacugcaggagau

SEQ ID NO: 1029968 - RNA, 19 nt, Homo sapiens
  misc_RNA (1)...(19): siRNA sense strand
ugaccggaauggagacuuc

SEQ ID NO: 1029969 - RNA, 19 nt, Homo sapiens
  misc_RNA (1)...(19): siRNA sense strand
cuauggagauuagggaaga

SEQ ID NO: 1029970 - RNA, 19 nt, Homo sapiens
  misc_RNA (1)...(19): siRNA sense strand
ucacagaggaugagcucaa

SEQ ID NO: 1029971 - RNA, 19 nt, Homo sapiens
  misc_RNA (1)...(19): siRNA sense strand
gcugagaagaaauggcuuu

SEQ ID NO: 1029972 - RNA, 19 nt, Homo sapiens
  misc_RNA (1)...(19): siRNA sense strand
ucagcuaagucaccuacug

SEQ ID NO: 1029973 - RNA, 19 nt, Homo sapiens
  misc_RNA (1)...(19): siRNA sense strand
ucagacaccgaaaccagua

SEQ ID NO: 1029974 - RNA, 19 nt, Homo sapiens
  misc_RNA (1)...(19): siRNA sense strand
cacagguuauugaaagcua

SEQ ID NO: 1029975 - RNA, 19 nt, Homo sapiens
  misc_RNA (1)...(19): siRNA sense strand
uuccaagugucuauaagaa

SEQ ID NO: 1029976 - RNA, 19 nt, Homo sapiens
  misc_RNA (1)...(19): siRNA sense strand
ggucuugcccucccuguag

SEQ ID NO: 1029977 - RNA, 19 nt, Homo sapiens
  misc_RNA (1)...(19): siRNA sense strand
gcacuugcaaagcagaguu

SEQ ID NO: 1029978 - RNA, 19 nt, Homo sapiens
  misc_RNA (1)...(19): siRNA sense strand
cucaaggaguuccacauga

SEQ ID NO: 1029979 - RNA, 19 nt, Homo sapiens
  misc_RNA (1)...(19): siRNA sense strand
uggaaaaguugcaguuuga

SEQ ID NO: 1029980 - RNA, 19 nt, Homo sapiens
  misc_RNA (1)...(19): siRNA sense strand
ggaaagcuaacaggaugga

SEQ ID NO: 1029981 - RNA, 19 nt, Homo sapiens
  misc_RNA (1)...(19): siRNA sense strand
acagagcagcugagaagaa

SEQ ID NO: 1029982 - RNA, 19 nt, Homo sapiens
  misc_RNA (1)...(19): siRNA sense strand
gacaacagcacaccugaac

SEQ ID NO: 1029983 - RNA, 19 nt, Homo sapiens
  misc_RNA (1)...(19): siRNA sense strand
aggagaagguagauuugga

SEQ ID NO: 1029984 - RNA, 19 nt, Homo sapiens
  misc_RNA (1)...(19): siRNA sense strand
ccaccgacaggaagaguga

SEQ ID NO: 1029985 - RNA, 19 nt, Homo sapiens
  misc_RNA (1)...(19): siRNA sense strand
caggaucucaccaugcaaa

SEQ ID NO: 1029986 - RNA, 19 nt, Homo sapiens
  misc_RNA (1)...(19): siRNA sense strand
ugacaagcuggaagauuug

SEQ ID NO: 1029987 - RNA, 19 nt, Homo sapiens
  misc_RNA (1)...(19): siRNA sense strand
cagagaauagagacuguga

SEQ ID NO: 1029988 - RNA, 19 nt, Homo sapiens
  misc_RNA (1)...(19): siRNA sense strand
ucugaaggaugaccggaau

SEQ ID NO: 1029989 - RNA, 19 nt, Homo sapiens
  misc_RNA (1)...(19): siRNA sense strand
aaagccaccuauggagauu

SEQ ID NO: 1029990 - RNA, 19 nt, Homo sapiens
  misc_RNA (1)...(19): siRNA sense strand
gcacaccugaaccaaagga

SEQ ID NO: 1029991 - RNA, 19 nt, Homo sapiens
  misc_RNA (1)...(19): siRNA sense strand
ugccuucucugcugcauuc

SEQ ID NO: 1029992 - RNA, 19 nt, Homo sapiens
  misc_RNA (1)...(19): siRNA sense strand
gaaccaucgccauuggaau

SEQ ID NO: 1029993 - RNA, 19 nt, Homo sapiens
  misc_RNA (1)...(19): siRNA sense strand
gaagcagagcacagguuau

SEQ ID NO: 1029994 - RNA, 19 nt, Homo sapiens
  misc_RNA (1)...(19): siRNA sense strand
caagccuaaugcauggaaa

SEQ ID NO: 1029995 - RNA, 19 nt, Homo sapiens
  misc_RNA (1)...(19): siRNA sense strand
guuccaagugucuauaaga

SEQ ID NO: 1029996 - RNA, 19 nt, Homo sapiens
  misc_RNA (1)...(19): siRNA sense strand
gccaagcaacccuccaaga

SEQ ID NO: 1029997 - RNA, 19 nt, Homo sapiens
  misc_RNA (1)...(19): siRNA sense strand
cauccgugguuccaagugu

SEQ ID NO: 1029998 - RNA, 19 nt, Homo sapiens
  misc_RNA (1)...(19): siRNA sense strand
cagccaugcagaccuauug

SEQ ID NO: 1029999 - RNA, 19 nt, Homo sapiens
  misc_RNA (1)...(19): siRNA sense strand
cagaugacgaugccuggaa

SEQ ID NO: 1030000 - RNA, 19 nt, Homo sapiens
  misc_RNA (1)...(19): siRNA sense strand
cagaggaugagcucaagga

SEQ ID NO: 1030001 - RNA, 19 nt, Homo sapiens
  misc_RNA (1)...(19): siRNA sense strand
uaacaaugguccccuacga

SEQ ID NO: 1030002 - RNA, 19 nt, Homo sapiens
  misc_RNA (1)...(19): siRNA sense strand
gaaggaugaccggaaugga

SEQ ID NO: 1030003 - RNA, 19 nt, Homo sapiens
  misc_RNA (1)...(19): siRNA sense strand
augcaaaugggaacaaauu

SEQ ID NO: 1030004 - RNA, 19 nt, Homo sapiens
  misc_RNA (1)...(19): siRNA sense strand
guggaaaaguugcaguuug

SEQ ID NO: 1030005 - RNA, 19 nt, Homo sapiens
  misc_RNA (1)...(19): siRNA sense strand
uaauuccucugaugguuuu

SEQ ID NO: 1030006 - RNA, 19 nt, Homo sapiens
  misc_RNA (1)...(19): siRNA sense strand
gcaccaccccuccaauuga

SEQ ID NO: 1030007 - RNA, 19 nt, Homo sapiens
  misc_RNA (1)...(19): siRNA sense strand
agaagaaauggcuuuggaa

SEQ ID NO: 1030008 - RNA, 19 nt, Homo sapiens
  misc_RNA (1)...(19): siRNA sense strand
cgacaggaagagugaguuc

SEQ ID NO: 1030009 - RNA, 19 nt, Homo sapiens
  misc_RNA (1)...(19): siRNA sense strand
gagcuaagccagcacauga

SEQ ID NO: 1030010 - RNA, 19 nt, Homo sapiens
  misc_RNA (1)...(19): siRNA sense strand
gaggucaucuucccacuca

SEQ ID NO: 1030011 - RNA, 19 nt, Homo sapiens
  misc_RNA (1)...(19): siRNA sense strand
gaaaucuccaucugggaua

SEQ ID NO: 1030012 - RNA, 19 nt, Homo sapiens
  misc_RNA (1)...(19): siRNA sense strand
gaugaccgcuucuuguaag

SEQ ID NO: 1030013 - RNA, 19 nt, Homo sapiens
  misc_RNA (1)...(19): siRNA sense strand
gcgcaaccaucuguacuug

SEQ ID NO: 1030014 - RNA, 19 nt, Homo sapiens
  misc_RNA (1)...(19): siRNA sense strand
uuaacaaucuccaagacuu

SEQ ID NO: 1030015 - RNA, 19 nt, Homo sapiens
  misc_RNA (1)...(19): siRNA sense strand
ugaaugcccuggaggaaca

SEQ ID NO: 1030016 - RNA, 19 nt, Homo sapiens
  misc_RNA (1)...(19): siRNA sense strand
ccuacacgcugcuuaacaa

SEQ ID NO: 1030017 - RNA, 19 nt, Homo sapiens
  misc_RNA (1)...(19): siRNA sense strand
gugaugaccgcuucuugua

SEQ ID NO: 1030018 - RNA, 19 nt, Homo sapiens
  misc_RNA (1)...(19): siRNA sense strand
caccagaggucagagauca

SEQ ID NO: 1030019 - RNA, 19 nt, Homo sapiens
  misc_RNA (1)...(19): siRNA sense strand
aagcugcccuucacucaga

SEQ ID NO: 1030020 - RNA, 19 nt, Homo sapiens
  misc_RNA (1)...(19): siRNA sense strand
gcuaagccagcacaugaaa

SEQ ID NO: 1030021 - RNA, 19 nt, Homo sapiens
  misc_RNA (1)...(19): siRNA sense strand
caaagcugcccuucacuca

SEQ ID NO: 1030022 - RNA, 19 nt, Homo sapiens
  misc_RNA (1)...(19): siRNA sense strand
ccuguggccucuccuguug

SEQ ID NO: 1030023 - RNA, 19 nt, Homo sapiens
  misc_RNA (1)...(19): siRNA sense strand
caucugggauauccgaauc

SEQ ID NO: 1030024 - RNA, 19 nt, Homo sapiens
  misc_RNA (1)...(19): siRNA sense strand
gguggaacccgucaaguag

SEQ ID NO: 1030025 - RNA, 19 nt, Homo sapiens
  misc_RNA (1)...(19): siRNA sense strand
acacgcugcuuaacaaucu

SEQ ID NO: 1030026 - RNA, 19 nt, Homo sapiens
  misc_RNA (1)...(19): siRNA sense strand
ccaguuaucuaccugucau

SEQ ID NO: 1030027 - RNA, 19 nt, Homo sapiens
  misc_RNA (1)...(19): siRNA sense strand
ucaccuacacgcugcuuaa

SEQ ID NO: 1030028 - RNA, 19 nt, Homo sapiens
  misc_RNA (1)...(19): siRNA sense strand
gccagcacaugaaacugaa

SEQ ID NO: 1030029 - RNA, 19 nt, Homo sapiens
  misc_RNA (1)...(19): siRNA sense strand
cagaggagccugggcagaa

SEQ ID NO: 1030030 - RNA, 19 nt, Homo sapiens
  misc_RNA (1)...(19): siRNA sense strand
ggacaccuaaggccaagau

SEQ ID NO: 1030031 - RNA, 19 nt, Homo sapiens
  misc_RNA (1)...(19): siRNA sense strand
ccucaacaaccuuggcuuu

SEQ ID NO: 1030032 - RNA, 19 nt, Homo sapiens
  misc_RNA (1)...(19): siRNA sense strand
cuggaaagcagcuguguga

SEQ ID NO: 1030033 - RNA, 19 nt, Homo sapiens
  misc_RNA (1)...(19): siRNA sense strand
caaugucugucaccagucu

SEQ ID NO: 1030034 - RNA, 19 nt, Homo sapiens
  misc_RNA (1)...(19): siRNA sense strand
ccaagauuguagugacugu

SEQ ID NO: 1030035 - RNA, 19 nt, Homo sapiens
  misc_RNA (1)...(19): siRNA sense strand
caccuaaggccaagauugu

SEQ ID NO: 1030036 - RNA, 19 nt, Homo sapiens
  misc_RNA (1)...(19): siRNA sense strand
caaggagggccuggaaguu

SEQ ID NO: 1030037 - RNA, 19 nt, Homo sapiens
  misc_RNA (1)...(19): siRNA sense strand
cuucaacgccaguuaucua

SEQ ID NO: 1030038 - RNA, 19 nt, Homo sapiens
  misc_RNA (1)...(19): siRNA sense strand
uaacaaucuccaagacuuc

SEQ ID NO: 1030039 - RNA, 19 nt, Homo sapiens
  misc_RNA (1)...(19): siRNA sense strand
uguggaagcgggagauuga

SEQ ID NO: 1030040 - RNA, 19 nt, Homo sapiens
  misc_RNA (1)...(19): siRNA sense strand
ccaaggagggccuggaagu

SEQ ID NO: 1030041 - RNA, 19 nt, Homo sapiens
  misc_RNA (1)...(19): siRNA sense strand
ugguggaacccgucaagua

SEQ ID NO: 1030042 - RNA, 19 nt, Homo sapiens
  misc_RNA (1)...(19): siRNA sense strand
gcuuaacaaucuccaagac

SEQ ID NO: 1030043 - RNA, 19 nt, Homo sapiens
  misc_RNA (1)...(19): siRNA sense strand
ugaugaccgcuucuuguaa

SEQ ID NO: 1030044 - RNA, 19 nt, Homo sapiens
  misc_RNA (1)...(19): siRNA sense strand
caacgccaguuaucuaccu

SEQ ID NO: 1030045 - RNA, 19 nt, Homo sapiens
  misc_RNA (1)...(19): siRNA sense strand
uacgagcguuucacuguca

SEQ ID NO: 1030046 - RNA, 19 nt, Homo sapiens
  misc_RNA (1)...(19): siRNA sense strand
gagcaucuacacccacuac

SEQ ID NO: 1030047 - RNA, 19 nt, Homo sapiens
  misc_RNA (1)...(19): siRNA sense strand
ccuacgagcguuucacugu

SEQ ID NO: 1030048 - RNA, 19 nt, Homo sapiens
  misc_RNA (1)...(19): siRNA sense strand
gcgacuacucgauguacuu

SEQ ID NO: 1030049 - RNA, 19 nt, Homo sapiens
  misc_RNA (1)...(19): siRNA sense strand
ucccgaagccaccucauga

SEQ ID NO: 1030050 - RNA, 19 nt, Homo sapiens
  misc_RNA (1)...(19): siRNA sense strand
ggccaagauuguagugacu

SEQ ID NO: 1030051 - RNA, 19 nt, Homo sapiens
  misc_RNA (1)...(19): siRNA sense strand
gcugaaugcccuggaggaa

SEQ ID NO: 1030052 - RNA, 19 nt, Homo sapiens
  misc_RNA (1)...(19): siRNA sense strand
acaccuaaggccaagauug

SEQ ID NO: 1030053 - RNA, 19 nt, Homo sapiens
  misc_RNA (1)...(19): siRNA sense strand
gcgagcagagcgcuuucaa

SEQ ID NO: 1030054 - RNA, 19 nt, Homo sapiens
  misc_RNA (1)...(19): siRNA sense strand
gcaccagaggucagagauc

SEQ ID NO: 1030055 - RNA, 19 nt, Homo sapiens
  misc_RNA (1)...(19): siRNA sense strand
uaagccagcacaugaaacu

SEQ ID NO: 1030056 - RNA, 19 nt, Homo sapiens
  misc_RNA (1)...(19): siRNA sense strand
gagcaugcacaggcuggaa

SEQ ID NO: 1030057 - RNA, 19 nt, Homo sapiens
  misc_RNA (1)...(19): siRNA sense strand
ucaaggcuaccugcgauug

SEQ ID NO: 1030058 - RNA, 19 nt, Homo sapiens
  misc_RNA (1)...(19): siRNA sense strand
gcgaagguguuuaagagua

SEQ ID NO: 1030059 - RNA, 19 nt, Homo sapiens
  misc_RNA (1)...(19): siRNA sense strand
cgaagguguuuaagaguaa

SEQ ID NO: 1030060 - RNA, 19 nt, Homo sapiens
  misc_RNA (1)...(19): siRNA sense strand
ccagaccaaugaacuguga

SEQ ID NO: 1030061 - RNA, 19 nt, Homo sapiens
  misc_RNA (1)...(19): siRNA sense strand
gcuguguucuggaaaguug

SEQ ID NO: 1030062 - RNA, 19 nt, Homo sapiens
  misc_RNA (1)...(19): siRNA sense strand
agagugaacagaauacuuu

SEQ ID NO: 1030063 - RNA, 19 nt, Homo sapiens
  misc_RNA (1)...(19): siRNA sense strand
cuggaaaguuguaggagaa

SEQ ID NO: 1030064 - RNA, 19 nt, Homo sapiens
  misc_RNA (1)...(19): siRNA sense strand
ggaaaguuguaggagaauc

SEQ ID NO: 1030065 - RNA, 19 nt, Homo sapiens
  misc_RNA (1)...(19): siRNA sense strand
gcagaccauuccagaacuc

SEQ ID NO: 1030066 - RNA, 19 nt, Homo sapiens
  misc_RNA (1)...(19): siRNA sense strand
uguaggagaaucccucuug

SEQ ID NO: 1030067 - RNA, 19 nt, Homo sapiens
  misc_RNA (1)...(19): siRNA sense strand
caccacagccagaccaaug

SEQ ID NO: 1030068 - RNA, 19 nt, Homo sapiens
  misc_RNA (1)...(19): siRNA sense strand
ccagaacucccucccucuu

SEQ ID NO: 1030069 - RNA, 19 nt, Homo sapiens
  misc_RNA (1)...(19): siRNA sense strand
cagaacucccucccucuug

SEQ ID NO: 1030070 - RNA, 19 nt, Homo sapiens
  misc_RNA (1)...(19): siRNA sense strand
ccacagccagaccaaugaa

SEQ ID NO: 1030071 - RNA, 19 nt, Homo sapiens
  misc_RNA (1)...(19): siRNA sense strand
gaaaguuguaggagaaucc

SEQ ID NO: 1030072 - RNA, 19 nt, Homo sapiens
  misc_RNA (1)...(19): siRNA sense strand
cagagugaacagaauacuu

SEQ ID NO: 1030073 - RNA, 19 nt, Homo sapiens
  misc_RNA (1)...(19): siRNA sense strand
ucccagagugaacagaaua

SEQ ID NO: 1030074 - RNA, 19 nt, Homo sapiens
  misc_RNA (1)...(19): siRNA sense strand
gaacugcugucaucaauuu

SEQ ID NO: 1030075 - RNA, 19 nt, Homo sapiens
  misc_RNA (1)...(19): siRNA sense strand
ggaaauaguucgaggcaua

SEQ ID NO: 1030076 - RNA, 19 nt, Homo sapiens
  misc_RNA (1)...(19): siRNA sense strand
gaaaguggauaucacauuu

SEQ ID NO: 1030077 - RNA, 19 nt, Homo sapiens
  misc_RNA (1)...(19): siRNA sense strand
gagaaucgcuaauaaacua

SEQ ID NO: 1030078 - RNA, 19 nt, Homo sapiens
  misc_RNA (1)...(19): siRNA sense strand
gauagcagccgguuuaaua

SEQ ID NO: 1030079 - RNA, 19 nt, Homo sapiens
  misc_RNA (1)...(19): siRNA sense strand
caacucaacuccuuuaaau

SEQ ID NO: 1030080 - RNA, 19 nt, Homo sapiens
  misc_RNA (1)...(19): siRNA sense strand
gaaagggaaauuugucuua

SEQ ID NO: 1030081 - RNA, 19 nt, Homo sapiens
  misc_RNA (1)...(19): siRNA sense strand
gaacacaccacuucauuau

SEQ ID NO: 1030082 - RNA, 19 nt, Homo sapiens
  misc_RNA (1)...(19): siRNA sense strand
gaugugaccugaaauggaa

SEQ ID NO: 1030083 - RNA, 19 nt, Homo sapiens
  misc_RNA (1)...(19): siRNA sense strand
cuacaaaguucuucaaugu

SEQ ID NO: 1030084 - RNA, 19 nt, Homo sapiens
  misc_RNA (1)...(19): siRNA sense strand
cgagagagguuuacacaug

SEQ ID NO: 1030085 - RNA, 19 nt, Homo sapiens
  misc_RNA (1)...(19): siRNA sense strand
gcagagagaaucgcuaaua

SEQ ID NO: 1030086 - RNA, 19 nt, Homo sapiens
  misc_RNA (1)...(19): siRNA sense strand
ggaaagaaagggaaauuug

SEQ ID NO: 1030087 - RNA, 19 nt, Homo sapiens
  misc_RNA (1)...(19): siRNA sense strand
gaccugaaauggaagaauu

SEQ ID NO: 1030088 - RNA, 19 nt, Homo sapiens
  misc_RNA (1)...(19): siRNA sense strand
cagagagaaucgcuaauaa

SEQ ID NO: 1030089 - RNA, 19 nt, Homo sapiens
  misc_RNA (1)...(19): siRNA sense strand
gagagagguuuacacauga

SEQ ID NO: 1030090 - RNA, 19 nt, Homo sapiens
  misc_RNA (1)...(19): siRNA sense strand
caacaauucuaccuaugaa

SEQ ID NO: 1030091 - RNA, 19 nt, Homo sapiens
  misc_RNA (1)...(19): siRNA sense strand
ggaucuggcuucucugaaa

SEQ ID NO: 1030092 - RNA, 19 nt, Homo sapiens
  misc_RNA (1)...(19): siRNA sense strand
ggaacacaccacuucauua

SEQ ID NO: 1030093 - RNA, 19 nt, Homo sapiens
  misc_RNA (1)...(19): siRNA sense strand
gugcagaugucaacaauuc

SEQ ID NO: 1030094 - RNA, 19 nt, Homo sapiens
  misc_RNA (1)...(19): siRNA sense strand
gaacuuacagaucuacaaa

SEQ ID NO: 1030095 - RNA, 19 nt, Homo sapiens
  misc_RNA (1)...(19): siRNA sense strand
caagacaccuccuauacug

SEQ ID NO: 1030096 - RNA, 19 nt, Homo sapiens
  misc_RNA (1)...(19): siRNA sense strand
caacaacucaacuccuuua

SEQ ID NO: 1030097 - RNA, 19 nt, Homo sapiens
  misc_RNA (1)...(19): siRNA sense strand
ccgcacagcuuuaauggaa

SEQ ID NO: 1030098 - RNA, 19 nt, Homo sapiens
  misc_RNA (1)...(19): siRNA sense strand
gaaagaaagggaaauuugu

SEQ ID NO: 1030099 - RNA, 19 nt, Homo sapiens
  misc_RNA (1)...(19): siRNA sense strand
ggaaccagauauuuaaaca

SEQ ID NO: 1030100 - RNA, 19 nt, Homo sapiens
  misc_RNA (1)...(19): siRNA sense strand
gcgaggaugugaccugaaa

SEQ ID NO: 1030101 - RNA, 19 nt, Homo sapiens
  misc_RNA (1)...(19): siRNA sense strand
ggaaagaggaggugaagug

SEQ ID NO: 1030102 - RNA, 19 nt, Homo sapiens
  misc_RNA (1)...(19): siRNA sense strand
gaggugaagugaaugcauu

SEQ ID NO: 1030103 - RNA, 19 nt, Homo sapiens
  misc_RNA (1)...(19): siRNA sense strand
gcccugaaauuaagaaaga

SEQ ID NO: 1030104 - RNA, 19 nt, Homo sapiens
  misc_RNA (1)...(19): siRNA sense strand
uuacagaucuacaaaguuc

SEQ ID NO: 1030105 - RNA, 19 nt, Homo sapiens
  misc_RNA (1)...(19): siRNA sense strand
gaauaccuguggauaugaa

SEQ ID NO: 1030106 - RNA, 19 nt, Homo sapiens
  misc_RNA (1)...(19): siRNA sense strand
gaaauacgccgagcagaga

SEQ ID NO: 1030107 - RNA, 19 nt, Homo sapiens
  misc_RNA (1)...(19): siRNA sense strand
gcaaaggcauaugcugauu

SEQ ID NO: 1030108 - RNA, 19 nt, Homo sapiens
  misc_RNA (1)...(19): siRNA sense strand
gaaagcugcagacuggaua

SEQ ID NO: 1030109 - RNA, 19 nt, Homo sapiens
  misc_RNA (1)...(19): siRNA sense strand
agaagaacaucacagagaa

SEQ ID NO: 1030110 - RNA, 19 nt, Homo sapiens
  misc_RNA (1)...(19): siRNA sense strand
gagcagagagaaucgcuaa

SEQ ID NO: 1030111 - RNA, 19 nt, Homo sapiens
  misc_RNA (1)...(19): siRNA sense strand
ccuuagagcuugugaagau

SEQ ID NO: 1030112 - RNA, 19 nt, Homo sapiens
  misc_RNA (1)...(19): siRNA sense strand
ggcauaugcugauuauaga

SEQ ID NO: 1030113 - RNA, 19 nt, Homo sapiens
  misc_RNA (1)...(19): siRNA sense strand
caaaggcauaugcugauua

SEQ ID NO: 1030114 - RNA, 19 nt, Homo sapiens
  misc_RNA (1)...(19): siRNA sense strand
uguugaaucuggagcuuua

SEQ ID NO: 1030115 - RNA, 19 nt, Homo sapiens
  misc_RNA (1)...(19): siRNA sense strand
gcagauaagagacuugaga

SEQ ID NO: 1030116 - RNA, 19 nt, Homo sapiens
  misc_RNA (1)...(19): siRNA sense strand
caaagcagcaagcaaagaa

SEQ ID NO: 1030117 - RNA, 19 nt, Homo sapiens
  misc_RNA (1)...(19): siRNA sense strand
acaaaguucuucaaugugu

SEQ ID NO: 1030118 - RNA, 19 nt, Homo sapiens
  misc_RNA (1)...(19): siRNA sense strand
acaagaaugucacugauag

SEQ ID NO: 1030119 - RNA, 19 nt, Homo sapiens
  misc_RNA (1)...(19): siRNA sense strand
gaggaggggucaauauuaa

SEQ ID NO: 1030120 - RNA, 19 nt, Homo sapiens
  misc_RNA (1)...(19): siRNA sense strand
gaaagccaauauuccuuag

SEQ ID NO: 1030121 - RNA, 19 nt, Homo sapiens
  misc_RNA (1)...(19): siRNA sense strand
gaaagaggaggugaaguga

SEQ ID NO: 1030122 - RNA, 19 nt, Homo sapiens
  misc_RNA (1)...(19): siRNA sense strand
aaaggcauaugcugauuau

SEQ ID NO: 1030123 - RNA, 19 nt, Homo sapiens
  misc_RNA (1)...(19): siRNA sense strand
gaagaacaucacagagaaa

SEQ ID NO: 1030124 - RNA, 19 nt, Homo sapiens
  misc_RNA (1)...(19): siRNA sense strand
gcacuuagccucaguuucc

SEQ ID NO: 1030125 - RNA, 19 nt, Homo sapiens
  misc_RNA (1)...(19): siRNA sense strand
gcagaugucaacaauucua

SEQ ID NO: 1030126 - RNA, 19 nt, Homo sapiens
  misc_RNA (1)...(19): siRNA sense strand
gaacugggccaugaauugu

SEQ ID NO: 1030127 - RNA, 19 nt, Homo sapiens
  misc_RNA (1)...(19): siRNA sense strand
ugaaggcccugaaauuaag

SEQ ID NO: 1030128 - RNA, 19 nt, Homo sapiens
  misc_RNA (1)...(19): siRNA sense strand
cuagauaacuugccgaaac

SEQ ID NO: 1030129 - RNA, 19 nt, Homo sapiens
  misc_RNA (1)...(19): siRNA sense strand
ggcaaaggcugauaugacu

SEQ ID NO: 1030130 - RNA, 19 nt, Homo sapiens
  misc_RNA (1)...(19): siRNA sense strand
acaagaagcagauagagaa

SEQ ID NO: 1030131 - RNA, 19 nt, Homo sapiens
  misc_RNA (1)...(19): siRNA sense strand
uuaauggacuuagugcuuu

SEQ ID NO: 1030132 - RNA, 19 nt, Homo sapiens
  misc_RNA (1)...(19): siRNA sense strand
cagaagaacaucacagaga

SEQ ID NO: 1030133 - RNA, 19 nt, Homo sapiens
  misc_RNA (1)...(19): siRNA sense strand
auaagagacuugagaacuu

SEQ ID NO: 1030134 - RNA, 19 nt, Homo sapiens
  misc_RNA (1)...(19): siRNA sense strand
ugauauuggugcuaaauuc

SEQ ID NO: 1030135 - RNA, 19 nt, Homo sapiens
  misc_RNA (1)...(19): siRNA sense strand
aagaggaggugaagugaau

SEQ ID NO: 1030136 - RNA, 19 nt, Homo sapiens
  misc_RNA (1)...(19): siRNA sense strand
cauuaucgcugugcucuga

SEQ ID NO: 1030137 - RNA, 19 nt, Homo sapiens
  misc_RNA (1)...(19): siRNA sense strand
guggauaucacauuuauuc

SEQ ID NO: 1030138 - RNA, 19 nt, Homo sapiens
  misc_RNA (1)...(19): siRNA sense strand
gagagaaucgcuaauaaac

SEQ ID NO: 1030139 - RNA, 19 nt, Homo sapiens
  misc_RNA (1)...(19): siRNA sense strand
ccagauauuuaaacaaguc

SEQ ID NO: 1030140 - RNA, 19 nt, Homo sapiens
  misc_RNA (1)...(19): siRNA sense strand
gcugauaugacuauaguug

SEQ ID NO: 1030141 - RNA, 19 nt, Homo sapiens
  misc_RNA (1)...(19): siRNA sense strand
uuuaauagaugcagcuuca

SEQ ID NO: 1030142 - RNA, 19 nt, Homo sapiens
  misc_RNA (1)...(19): siRNA sense strand
gggaacacaccacuucauu

SEQ ID NO: 1030143 - RNA, 19 nt, Homo sapiens
  misc_RNA (1)...(19): siRNA sense strand
aagaggaacugcugucauc

SEQ ID NO: 1030144 - RNA, 19 nt, Homo sapiens
  misc_RNA (1)...(19): siRNA sense strand
gagguggacuucgacgauu

SEQ ID NO: 1030145 - RNA, 19 nt, Homo sapiens
  misc_RNA (1)...(19): siRNA sense strand
uagccucaguuuccaauga

SEQ ID NO: 1030146 - RNA, 19 nt, Homo sapiens
  misc_RNA (1)...(19): siRNA sense strand
gagaagguauuuucaaaca

SEQ ID NO: 1030147 - RNA, 19 nt, Homo sapiens
  misc_RNA (1)...(19): siRNA sense strand
gaaauaguucgaggcauau

SEQ ID NO: 1030148 - RNA, 19 nt, Homo sapiens
  misc_RNA (1)...(19): siRNA sense strand
ccacaggccgcacagcuuu

SEQ ID NO: 1030149 - RNA, 19 nt, Homo sapiens
  misc_RNA (1)...(19): siRNA sense strand
gagccaauccuaaugcaau

SEQ ID NO: 1030150 - RNA, 19 nt, Homo sapiens
  misc_RNA (1)...(19): siRNA sense strand
gggcuguacucccacaaug

SEQ ID NO: 1030151 - RNA, 19 nt, Homo sapiens
  misc_RNA (1)...(19): siRNA sense strand
caaaggcugauaugacuau

SEQ ID NO: 1030152 - RNA, 19 nt, Homo sapiens
  misc_RNA (1)...(19): siRNA sense strand
gguaaugugguucaucuga

SEQ ID NO: 1030153 - RNA, 19 nt, Homo sapiens
  misc_RNA (1)...(19): siRNA sense strand
acagaaggguaaugugguu

SEQ ID NO: 1030154 - RNA, 19 nt, Homo sapiens
  misc_RNA (1)...(19): siRNA sense strand
acugaaggcccugaaauua

SEQ ID NO: 1030155 - RNA, 19 nt, Homo sapiens
  misc_RNA (1)...(19): siRNA sense strand
gacugaaggcccugaaauu

SEQ ID NO: 1030156 - RNA, 19 nt, Homo sapiens
  misc_RNA (1)...(19): siRNA sense strand
aaaaggagcuaacguuaau

SEQ ID NO: 1030157 - RNA, 19 nt, Homo sapiens
  misc_RNA (1)...(19): siRNA sense strand
gcaaguggaaacauagaug

SEQ ID NO: 1030158 - RNA, 19 nt, Homo sapiens
  misc_RNA (1)...(19): siRNA sense strand
ggaggaggggucaauauua

SEQ ID NO: 1030159 - RNA, 19 nt, Homo sapiens
  misc_RNA (1)...(19): siRNA sense strand
acacaccacuucauuaugc

SEQ ID NO: 1030160 - RNA, 19 nt, Homo sapiens
  misc_RNA (1)...(19): siRNA sense strand
gcaucacgcugcucauuuu

SEQ ID NO: 1030161 - RNA, 19 nt, Homo sapiens
  misc_RNA (1)...(19): siRNA sense strand
ugucaacaauucuaccuau

SEQ ID NO: 1030162 - RNA, 19 nt, Homo sapiens
  misc_RNA (1)...(19): siRNA sense strand
ucaacaauucuaccuauga

SEQ ID NO: 1030163 - RNA, 19 nt, Homo sapiens
  misc_RNA (1)...(19): siRNA sense strand
gacaagaagcagauagaga

SEQ ID NO: 1030164 - RNA, 19 nt, Homo sapiens
  misc_RNA (1)...(19): siRNA sense strand
gaaaauagaaaagggcaua

SEQ ID NO: 1030165 - RNA, 19 nt, Homo sapiens
  misc_RNA (1)...(19): siRNA sense strand
uaacguuaaugcaacagau

SEQ ID NO: 1030166 - RNA, 19 nt, Homo sapiens
  misc_RNA (1)...(19): siRNA sense strand
ggagcuaacguuaaugcaa

SEQ ID NO: 1030167 - RNA, 19 nt, Homo sapiens
  misc_RNA (1)...(19): siRNA sense strand
gugugcaaguggaaacaua

SEQ ID NO: 1030168 - RNA, 19 nt, Homo sapiens
  misc_RNA (1)...(19): siRNA sense strand
gcagccgguuuaauagaga

SEQ ID NO: 1030169 - RNA, 19 nt, Homo sapiens
  misc_RNA (1)...(19): siRNA sense strand
acugauagcagccgguuua

SEQ ID NO: 1030170 - RNA, 19 nt, Homo sapiens
  misc_RNA (1)...(19): siRNA sense strand
ugauugagaccuacaagaa

SEQ ID NO: 1030171 - RNA, 19 nt, Homo sapiens
  misc_RNA (1)...(19): siRNA sense strand
gaucguauggaccuaagaa

SEQ ID NO: 1030172 - RNA, 19 nt, Homo sapiens
  misc_RNA (1)...(19): siRNA sense strand
cuaaugcaaucaacucauc

SEQ ID NO: 1030173 - RNA, 19 nt, Homo sapiens
  misc_RNA (1)...(19): siRNA sense strand
ugaaggaaagccaauauuc

SEQ ID NO: 1030174 - RNA, 19 nt, Homo sapiens
  misc_RNA (1)...(19): siRNA sense strand
gaacugcugucaucaauuu

SEQ ID NO: 1030175 - RNA, 19 nt, Homo sapiens
  misc_RNA (1)...(19): siRNA sense strand
ggaaauaguucgaggcaua

SEQ ID NO: 1030176 - RNA, 19 nt, Homo sapiens
  misc_RNA (1)...(19): siRNA sense strand
gaaaguggauaucacauuu

SEQ ID NO: 1030177 - RNA, 19 nt, Homo sapiens
  misc_RNA (1)...(19): siRNA sense strand
gagaaucgcuaauaaacua

SEQ ID NO: 1030178 - RNA, 19 nt, Homo sapiens
  misc_RNA (1)...(19): siRNA sense strand
gauagcagccgguuuaaua

SEQ ID NO: 1030179 - RNA, 19 nt, Homo sapiens
  misc_RNA (1)...(19): siRNA sense strand
caacucaacuccuuuaaau

SEQ ID NO: 1030180 - RNA, 19 nt, Homo sapiens
  misc_RNA (1)...(19): siRNA sense strand
gaaagggaaauuugucuua

SEQ ID NO: 1030181 - RNA, 19 nt, Homo sapiens
  misc_RNA (1)...(19): siRNA sense strand
gaacacaccacuucauuau

SEQ ID NO: 1030182 - RNA, 19 nt, Homo sapiens
  misc_RNA (1)...(19): siRNA sense strand
gaugugaccugaaauggaa

SEQ ID NO: 1030183 - RNA, 19 nt, Homo sapiens
  misc_RNA (1)...(19): siRNA sense strand
cuacaaaguucuucaaugu

SEQ ID NO: 1030184 - RNA, 19 nt, Homo sapiens
  misc_RNA (1)...(19): siRNA sense strand
cgagagagguuuacacaug

SEQ ID NO: 1030185 - RNA, 19 nt, Homo sapiens
  misc_RNA (1)...(19): siRNA sense strand
gcagagagaaucgcuaaua

SEQ ID NO: 1030186 - RNA, 19 nt, Homo sapiens
  misc_RNA (1)...(19): siRNA sense strand
ggaaagaaagggaaauuug

SEQ ID NO: 1030187 - RNA, 19 nt, Homo sapiens
  misc_RNA (1)...(19): siRNA sense strand
gaccugaaauggaagaauu

SEQ ID NO: 1030188 - RNA, 19 nt, Homo sapiens
  misc_RNA (1)...(19): siRNA sense strand
cagagagaaucgcuaauaa

SEQ ID NO: 1030189 - RNA, 19 nt, Homo sapiens
  misc_RNA (1)...(19): siRNA sense strand
gagagagguuuacacauga

SEQ ID NO: 1030190 - RNA, 19 nt, Homo sapiens
  misc_RNA (1)...(19): siRNA sense strand
caacaauucuaccuaugaa

SEQ ID NO: 1030191 - RNA, 19 nt, Homo sapiens
  misc_RNA (1)...(19): siRNA sense strand
ggaucuggcuucucugaaa

SEQ ID NO: 1030192 - RNA, 19 nt, Homo sapiens
  misc_RNA (1)...(19): siRNA sense strand
ggaacacaccacuucauua

SEQ ID NO: 1030193 - RNA, 19 nt, Homo sapiens
  misc_RNA (1)...(19): siRNA sense strand
gugcagaugucaacaauuc

SEQ ID NO: 1030194 - RNA, 19 nt, Homo sapiens
  misc_RNA (1)...(19): siRNA sense strand
gaacuuacagaucuacaaa

SEQ ID NO: 1030195 - RNA, 19 nt, Homo sapiens
  misc_RNA (1)...(19): siRNA sense strand
caagacaccuccuauacug

SEQ ID NO: 1030196 - RNA, 19 nt, Homo sapiens
  misc_RNA (1)...(19): siRNA sense strand
caacaacucaacuccuuua

SEQ ID NO: 1030197 - RNA, 19 nt, Homo sapiens
  misc_RNA (1)...(19): siRNA sense strand
ccgcacagcuuuaauggaa

SEQ ID NO: 1030198 - RNA, 19 nt, Homo sapiens
  misc_RNA (1)...(19): siRNA sense strand
gaaagaaagggaaauuugu

SEQ ID NO: 1030199 - RNA, 19 nt, Homo sapiens
  misc_RNA (1)...(19): siRNA sense strand
ggaaccagauauuuaaaca

SEQ ID NO: 1030200 - RNA, 19 nt, Homo sapiens
  misc_RNA (1)...(19): siRNA sense strand
gcgaggaugugaccugaaa

SEQ ID NO: 1030201 - RNA, 19 nt, Homo sapiens
  misc_RNA (1)...(19): siRNA sense strand
ggaaagaggaggugaagug

SEQ ID NO: 1030202 - RNA, 19 nt, Homo sapiens
  misc_RNA (1)...(19): siRNA sense strand
gaggugaagugaaugcauu

SEQ ID NO: 1030203 - RNA, 19 nt, Homo sapiens
  misc_RNA (1)...(19): siRNA sense strand
gcccugaaauuaagaaaga

SEQ ID NO: 1030204 - RNA, 19 nt, Homo sapiens
  misc_RNA (1)...(19): siRNA sense strand
uuacagaucuacaaaguuc

SEQ ID NO: 1030205 - RNA, 19 nt, Homo sapiens
  misc_RNA (1)...(19): siRNA sense strand
gaauaccuguggauaugaa

SEQ ID NO: 1030206 - RNA, 19 nt, Homo sapiens
  misc_RNA (1)...(19): siRNA sense strand
gaaauacgccgagcagaga

SEQ ID NO: 1030207 - RNA, 19 nt, Homo sapiens
  misc_RNA (1)...(19): siRNA sense strand
gcaaaggcauaugcugauu

SEQ ID NO: 1030208 - RNA, 19 nt, Homo sapiens
  misc_RNA (1)...(19): siRNA sense strand
gaaagcugcagacuggaua

SEQ ID NO: 1030209 - RNA, 19 nt, Homo sapiens
  misc_RNA (1)...(19): siRNA sense strand
agaagaacaucacagagaa

SEQ ID NO: 1030210 - RNA, 19 nt, Homo sapiens
  misc_RNA (1)...(19): siRNA sense strand
gagcagagagaaucgcuaa

SEQ ID NO: 1030211 - RNA, 19 nt, Homo sapiens
  misc_RNA (1)...(19): siRNA sense strand
ccuuagagcuugugaagau

SEQ ID NO: 1030212 - RNA, 19 nt, Homo sapiens
  misc_RNA (1)...(19): siRNA sense strand
ggcauaugcugauuauaga

SEQ ID NO: 1030213 - RNA, 19 nt, Homo sapiens
  misc_RNA (1)...(19): siRNA sense strand
caaaggcauaugcugauua

SEQ ID NO: 1030214 - RNA, 19 nt, Homo sapiens
  misc_RNA (1)...(19): siRNA sense strand
uguugaaucuggagcuuua

SEQ ID NO: 1030215 - RNA, 19 nt, Homo sapiens
  misc_RNA (1)...(19): siRNA sense strand
gcagauaagagacuugaga

SEQ ID NO: 1030216 - RNA, 19 nt, Homo sapiens
  misc_RNA (1)...(19): siRNA sense strand
caaagcagcaagcaaagaa

SEQ ID NO: 1030217 - RNA, 19 nt, Homo sapiens
  misc_RNA (1)...(19): siRNA sense strand
acaaaguucuucaaugugu

SEQ ID NO: 1030218 - RNA, 19 nt, Homo sapiens
  misc_RNA (1)...(19): siRNA sense strand
acaagaaugucacugauag

SEQ ID NO: 1030219 - RNA, 19 nt, Homo sapiens
  misc_RNA (1)...(19): siRNA sense strand
gaggaggggucaauauuaa

SEQ ID NO: 1030220 - RNA, 19 nt, Homo sapiens
  misc_RNA (1)...(19): siRNA sense strand
gaaagccaauauuccuuag

SEQ ID NO: 1030221 - RNA, 19 nt, Homo sapiens
  misc_RNA (1)...(19): siRNA sense strand
gaaagaggaggugaaguga

SEQ ID NO: 1030222 - RNA, 19 nt, Homo sapiens
  misc_RNA (1)...(19): siRNA sense strand
aaaggcauaugcugauuau

SEQ ID NO: 1030223 - RNA, 19 nt, Homo sapiens
  misc_RNA (1)...(19): siRNA sense strand
gaagaacaucacagagaaa

SEQ ID NO: 1030224 - RNA, 19 nt, Homo sapiens
  misc_RNA (1)...(19): siRNA sense strand
gcacuuagccucaguuucc

SEQ ID NO: 1030225 - RNA, 19 nt, Homo sapiens
  misc_RNA (1)...(19): siRNA sense strand
gcagaugucaacaauucua

SEQ ID NO: 1030226 - RNA, 19 nt, Homo sapiens
  misc_RNA (1)...(19): siRNA sense strand
gaacugggccaugaauugu

SEQ ID NO: 1030227 - RNA, 19 nt, Homo sapiens
  misc_RNA (1)...(19): siRNA sense strand
ugaaggcccugaaauuaag

SEQ ID NO: 1030228 - RNA, 19 nt, Homo sapiens
  misc_RNA (1)...(19): siRNA sense strand
cuagauaacuugccgaaac

SEQ ID NO: 1030229 - RNA, 19 nt, Homo sapiens
  misc_RNA (1)...(19): siRNA sense strand
ggcaaaggcugauaugacu

SEQ ID NO: 1030230 - RNA, 19 nt, Homo sapiens
  misc_RNA (1)...(19): siRNA sense strand
acaagaagcagauagagaa

SEQ ID NO: 1030231 - RNA, 19 nt, Homo sapiens
  misc_RNA (1)...(19): siRNA sense strand
uuaauggacuuagugcuuu

SEQ ID NO: 1030232 - RNA, 19 nt, Homo sapiens
  misc_RNA (1)...(19): siRNA sense strand
cagaagaacaucacagaga

SEQ ID NO: 1030233 - RNA, 19 nt, Homo sapiens
  misc_RNA (1)...(19): siRNA sense strand
auaagagacuugagaacuu

SEQ ID NO: 1030234 - RNA, 19 nt, Homo sapiens
  misc_RNA (1)...(19): siRNA sense strand
ugauauuggugcuaaauuc

SEQ ID NO: 1030235 - RNA, 19 nt, Homo sapiens
  misc_RNA (1)...(19): siRNA sense strand
aagaggaggugaagugaau

SEQ ID NO: 1030236 - RNA, 19 nt, Homo sapiens
  misc_RNA (1)...(19): siRNA sense strand
cauuaucgcugugcucuga

SEQ ID NO: 1030237 - RNA, 19 nt, Homo sapiens
  misc_RNA (1)...(19): siRNA sense strand
guggauaucacauuuauuc

SEQ ID NO: 1030238 - RNA, 19 nt, Homo sapiens
  misc_RNA (1)...(19): siRNA sense strand
gagagaaucgcuaauaaac

SEQ ID NO: 1030239 - RNA, 19 nt, Homo sapiens
  misc_RNA (1)...(19): siRNA sense strand
ccagauauuuaaacaaguc

SEQ ID NO: 1030240 - RNA, 19 nt, Homo sapiens
  misc_RNA (1)...(19): siRNA sense strand
gcugauaugacuauaguug

SEQ ID NO: 1030241 - RNA, 19 nt, Homo sapiens
  misc_RNA (1)...(19): siRNA sense strand
uuuaauagaugcagcuuca

SEQ ID NO: 1030242 - RNA, 19 nt, Homo sapiens
  misc_RNA (1)...(19): siRNA sense strand
gggaacacaccacuucauu

SEQ ID NO: 1030243 - RNA, 19 nt, Homo sapiens
  misc_RNA (1)...(19): siRNA sense strand
aagaggaacugcugucauc

SEQ ID NO: 1030244 - RNA, 19 nt, Homo sapiens
  misc_RNA (1)...(19): siRNA sense strand
gagguggacuucgacgauu

SEQ ID NO: 1030245 - RNA, 19 nt, Homo sapiens
  misc_RNA (1)...(19): siRNA sense strand
uagccucaguuuccaauga

SEQ ID NO: 1030246 - RNA, 19 nt, Homo sapiens
  misc_RNA (1)...(19): siRNA sense strand
gagaagguauuuucaaaca

SEQ ID NO: 1030247 - RNA, 19 nt, Homo sapiens
  misc_RNA (1)...(19): siRNA sense strand
gaaauaguucgaggcauau

SEQ ID NO: 1030248 - RNA, 19 nt, Homo sapiens
  misc_RNA (1)...(19): siRNA sense strand
ccacaggccgcacagcuuu

SEQ ID NO: 1030249 - RNA, 19 nt, Homo sapiens
  misc_RNA (1)...(19): siRNA sense strand
gagccaauccuaaugcaau

SEQ ID NO: 1030250 - RNA, 19 nt, Homo sapiens
  misc_RNA (1)...(19): siRNA sense strand
gggcuguacucccacaaug

SEQ ID NO: 1030251 - RNA, 19 nt, Homo sapiens
  misc_RNA (1)...(19): siRNA sense strand
caaaggcugauaugacuau

SEQ ID NO: 1030252 - RNA, 19 nt, Homo sapiens
  misc_RNA (1)...(19): siRNA sense strand
gguaaugugguucaucuga

SEQ ID NO: 1030253 - RNA, 19 nt, Homo sapiens
  misc_RNA (1)...(19): siRNA sense strand
acagaaggguaaugugguu

SEQ ID NO: 1030254 - RNA, 19 nt, Homo sapiens
  misc_RNA (1)...(19): siRNA sense strand
acugaaggcccugaaauua

SEQ ID NO: 1030255 - RNA, 19 nt, Homo sapiens
  misc_RNA (1)...(19): siRNA sense strand
gacugaaggcccugaaauu

SEQ ID NO: 1030256 - RNA, 19 nt, Homo sapiens
  misc_RNA (1)...(19): siRNA sense strand
aaaaggagcuaacguuaau

SEQ ID NO: 1030257 - RNA, 19 nt, Homo sapiens
  misc_RNA (1)...(19): siRNA sense strand
gcaaguggaaacauagaug

SEQ ID NO: 1030258 - RNA, 19 nt, Homo sapiens
  misc_RNA (1)...(19): siRNA sense strand
ggaggaggggucaauauua

SEQ ID NO: 1030259 - RNA, 19 nt, Homo sapiens
  misc_RNA (1)...(19): siRNA sense strand
acacaccacuucauuaugc

SEQ ID NO: 1030260 - RNA, 19 nt, Homo sapiens
  misc_RNA (1)...(19): siRNA sense strand
gcaucacgcugcucauuuu

SEQ ID NO: 1030261 - RNA, 19 nt, Homo sapiens
  misc_RNA (1)...(19): siRNA sense strand
ugucaacaauucuaccuau

SEQ ID NO: 1030262 - RNA, 19 nt, Homo sapiens
  misc_RNA (1)...(19): siRNA sense strand
ucaacaauucuaccuauga

SEQ ID NO: 1030263 - RNA, 19 nt, Homo sapiens
  misc_RNA (1)...(19): siRNA sense strand
gacaagaagcagauagaga

SEQ ID NO: 1030264 - RNA, 19 nt, Homo sapiens
  misc_RNA (1)...(19): siRNA sense strand
gaaaauagaaaagggcaua

SEQ ID NO: 1030265 - RNA, 19 nt, Homo sapiens
  misc_RNA (1)...(19): siRNA sense strand
uaacguuaaugcaacagau

SEQ ID NO: 1030266 - RNA, 19 nt, Homo sapiens
  misc_RNA (1)...(19): siRNA sense strand
ggagcuaacguuaaugcaa

SEQ ID NO: 1030267 - RNA, 19 nt, Homo sapiens
  misc_RNA (1)...(19): siRNA sense strand
gugugcaaguggaaacaua

SEQ ID NO: 1030268 - RNA, 19 nt, Homo sapiens
  misc_RNA (1)...(19): siRNA sense strand
gcagccgguuuaauagaga

SEQ ID NO: 1030269 - RNA, 19 nt, Homo sapiens
  misc_RNA (1)...(19): siRNA sense strand
acugauagcagccgguuua

SEQ ID NO: 1030270 - RNA, 19 nt, Homo sapiens
  misc_RNA (1)...(19): siRNA sense strand
ugauugagaccuacaagaa

SEQ ID NO: 1030271 - RNA, 19 nt, Homo sapiens
  misc_RNA (1)...(19): siRNA sense strand
gaucguauggaccuaagaa

SEQ ID NO: 1030272 - RNA, 19 nt, Homo sapiens
  misc_RNA (1)...(19): siRNA sense strand
cuaaugcaaucaacucauc

SEQ ID NO: 1030273 - RNA, 19 nt, Homo sapiens
  misc_RNA (1)...(19): siRNA sense strand
ugaaggaaagccaauauuc

SEQ ID NO: 1030274 - RNA, 19 nt, Homo sapiens
  misc_RNA (1)...(19): siRNA sense strand
ugacagggacggccauuua

SEQ ID NO: 1030275 - RNA, 19 nt, Homo sapiens
  misc_RNA (1)...(19): siRNA sense strand
uacugggacuguucuauua

SEQ ID NO: 1030276 - RNA, 19 nt, Homo sapiens
  misc_RNA (1)...(19): siRNA sense strand
cagcuacucugaggaauau

SEQ ID NO: 1030277 - RNA, 19 nt, Homo sapiens
  misc_RNA (1)...(19): siRNA sense strand
gaagauacugggacuguuc

SEQ ID NO: 1030278 - RNA, 19 nt, Homo sapiens
  misc_RNA (1)...(19): siRNA sense strand
gccauauucuguuggauga

SEQ ID NO: 1030279 - RNA, 19 nt, Homo sapiens
  misc_RNA (1)...(19): siRNA sense strand
gcagcuacucugaggaaua

SEQ ID NO: 1030280 - RNA, 19 nt, Homo sapiens
  misc_RNA (1)...(19): siRNA sense strand
ggaagugugcuacaucuca

SEQ ID NO: 1030281 - RNA, 19 nt, Homo sapiens
  misc_RNA (1)...(19): siRNA sense strand
ugcccaagaucuacaagua

SEQ ID NO: 1030282 - RNA, 19 nt, Homo sapiens
  misc_RNA (1)...(19): siRNA sense strand
ggaagauacugggacuguu

SEQ ID NO: 1030283 - RNA, 19 nt, Homo sapiens
  misc_RNA (1)...(19): siRNA sense strand
gcagccaccuuucuucucu

SEQ ID NO: 1030284 - RNA, 19 nt, Homo sapiens
  misc_RNA (1)...(19): siRNA sense strand
gagcagcuacucugaggaa

SEQ ID NO: 1030285 - RNA, 19 nt, Homo sapiens
  misc_RNA (1)...(19): siRNA sense strand
gccaagccauauucuguug

SEQ ID NO: 1030286 - RNA, 19 nt, Homo sapiens
  misc_RNA (1)...(19): siRNA sense strand
gagcugcccuggacuugag

SEQ ID NO: 1030287 - RNA, 19 nt, Homo sapiens
  misc_RNA (1)...(19): siRNA sense strand
caagccauauucuguugga

SEQ ID NO: 1030288 - RNA, 19 nt, Homo sapiens
  misc_RNA (1)...(19): siRNA sense strand
gcccagcccuguggauuuc

SEQ ID NO: 1030289 - RNA, 19 nt, Homo sapiens
  misc_RNA (1)...(19): siRNA sense strand
caucucagccuuggucuug

SEQ ID NO: 1030290 - RNA, 19 nt, Homo sapiens
  misc_RNA (1)...(19): siRNA sense strand
gcucuaugcagccaccuuu

SEQ ID NO: 1030291 - RNA, 19 nt, Homo sapiens
  misc_RNA (1)...(19): siRNA sense strand
gcugugauccugcagaaca

SEQ ID NO: 1030292 - RNA, 19 nt, Homo sapiens
  misc_RNA (1)...(19): siRNA sense strand
ccuacacgcugcugcacaa

SEQ ID NO: 1030293 - RNA, 19 nt, Homo sapiens
  misc_RNA (1)...(19): siRNA sense strand
gauuccaucucccgcugaa

SEQ ID NO: 1030294 - RNA, 19 nt, Homo sapiens
  misc_RNA (1)...(19): siRNA sense strand
gcuacuacacguaccgaaa

SEQ ID NO: 1030295 - RNA, 19 nt, Homo sapiens
  misc_RNA (1)...(19): siRNA sense strand
gcuccucucugcccucuac

SEQ ID NO: 1030296 - RNA, 19 nt, Homo sapiens
  misc_RNA (1)...(19): siRNA sense strand
gcucaugccugugcuccau

SEQ ID NO: 1030297 - RNA, 19 nt, Homo sapiens
  misc_RNA (1)...(19): siRNA sense strand
cuccugagcucccuguguu

SEQ ID NO: 1030298 - RNA, 19 nt, Homo sapiens
  misc_RNA (1)...(19): siRNA sense strand
cuacaacgccauccaccuu

SEQ ID NO: 1030299 - RNA, 19 nt, Homo sapiens
  misc_RNA (1)...(19): siRNA sense strand
ccacggaugucuccuaccu

SEQ ID NO: 1030300 - RNA, 19 nt, Homo sapiens
  misc_RNA (1)...(19): siRNA sense strand
gcagcuaccacaccuccaa

SEQ ID NO: 1030301 - RNA, 19 nt, Homo sapiens
  misc_RNA (1)...(19): siRNA sense strand
ccuggagacucaugaugga

SEQ ID NO: 1030302 - RNA, 19 nt, Homo sapiens
  misc_RNA (1)...(19): siRNA sense strand
gcagcugguacaucgauga

SEQ ID NO: 1030303 - RNA, 19 nt, Homo sapiens
  misc_RNA (1)...(19): siRNA sense strand
ugguggagcuggugaagca

SEQ ID NO: 1030304 - RNA, 19 nt, Homo sapiens
  misc_RNA (1)...(19): siRNA sense strand
gggaugcagcugcuacaga

SEQ ID NO: 1030305 - RNA, 19 nt, Homo sapiens
  misc_RNA (1)...(19): siRNA sense strand
ggucuuguccugcuuacuc

SEQ ID NO: 1030306 - RNA, 19 nt, Homo sapiens
  misc_RNA (1)...(19): siRNA sense strand
auacugggacuguucuauu

SEQ ID NO: 1030307 - RNA, 19 nt, Homo sapiens
  misc_RNA (1)...(19): siRNA sense strand
gaggagcugcccuggacuu

SEQ ID NO: 1030308 - RNA, 19 nt, Homo sapiens
  misc_RNA (1)...(19): siRNA sense strand
uggcugugauccugcagaa

SEQ ID NO: 1030309 - RNA, 19 nt, Homo sapiens
  misc_RNA (1)...(19): siRNA sense strand
cuauuaugcugcccucuac

SEQ ID NO: 1030310 - RNA, 19 nt, Homo sapiens
  misc_RNA (1)...(19): siRNA sense strand
gauacugggacuguucuau

SEQ ID NO: 1030311 - RNA, 19 nt, Homo sapiens
  misc_RNA (1)...(19): siRNA sense strand
cuacacguaccgaaacuuc

SEQ ID NO: 1030312 - RNA, 19 nt, Homo sapiens
  misc_RNA (1)...(19): siRNA sense strand
cccaagaucuacaaguacu

SEQ ID NO: 1030313 - RNA, 19 nt, Homo sapiens
  misc_RNA (1)...(19): siRNA sense strand
ccaagaucuacaaguacua

SEQ ID NO: 1030314 - RNA, 19 nt, Homo sapiens
  misc_RNA (1)...(19): siRNA sense strand
ccgccaagccauauucugu

SEQ ID NO: 1030315 - RNA, 19 nt, Homo sapiens
  misc_RNA (1)...(19): siRNA sense strand
ggagcugcccuggacuuga

SEQ ID NO: 1030316 - RNA, 19 nt, Homo sapiens
  misc_RNA (1)...(19): siRNA sense strand
ucugugggcucuggaagug

SEQ ID NO: 1030317 - RNA, 19 nt, Homo sapiens
  misc_RNA (1)...(19): siRNA sense strand
ucuauuaugcugcccucua

SEQ ID NO: 1030318 - RNA, 19 nt, Homo sapiens
  misc_RNA (1)...(19): siRNA sense strand
acacguaccgaaacuucuu

SEQ ID NO: 1030319 - RNA, 19 nt, Homo sapiens
  misc_RNA (1)...(19): siRNA sense strand
cugggacuguucuauuaug

SEQ ID NO: 1030320 - RNA, 19 nt, Homo sapiens
  misc_RNA (1)...(19): siRNA sense strand
ucaccacggaugucuccua

SEQ ID NO: 1030321 - RNA, 19 nt, Homo sapiens
  misc_RNA (1)...(19): siRNA sense strand
gguacccacuauccagaag

SEQ ID NO: 1030322 - RNA, 19 nt, Homo sapiens
  misc_RNA (1)...(19): siRNA sense strand
caaccaaagucgaauauga

SEQ ID NO: 1030323 - RNA, 19 nt, Homo sapiens
  misc_RNA (1)...(19): siRNA sense strand
gagaagauguccauggaaa

SEQ ID NO: 1030324 - RNA, 19 nt, Homo sapiens
  misc_RNA (1)...(19): siRNA sense strand
gcaaguggguggacuauuc

SEQ ID NO: 1030325 - RNA, 19 nt, Homo sapiens
  misc_RNA (1)...(19): siRNA sense strand
gaagaucacccuccuuaaa

SEQ ID NO: 1030326 - RNA, 19 nt, Homo sapiens
  misc_RNA (1)...(19): siRNA sense strand
gaagauguccauggaaaua

SEQ ID NO: 1030327 - RNA, 19 nt, Homo sapiens
  misc_RNA (1)...(19): siRNA sense strand
gcaagaaagggcacaguuu

SEQ ID NO: 1030328 - RNA, 19 nt, Homo sapiens
  misc_RNA (1)...(19): siRNA sense strand
caacacgccucauccucua

SEQ ID NO: 1030329 - RNA, 19 nt, Homo sapiens
  misc_RNA (1)...(19): siRNA sense strand
gggagaagauguccaugga

SEQ ID NO: 1030330 - RNA, 19 nt, Homo sapiens
  misc_RNA (1)...(19): siRNA sense strand
caagaagaaugaauacagu

SEQ ID NO: 1030331 - RNA, 19 nt, Homo sapiens
  misc_RNA (1)...(19): siRNA sense strand
ggaucaagaagaaugaaua

SEQ ID NO: 1030332 - RNA, 19 nt, Homo sapiens
  misc_RNA (1)...(19): siRNA sense strand
gccaguaccugcaccgaaa

SEQ ID NO: 1030333 - RNA, 19 nt, Homo sapiens
  misc_RNA (1)...(19): siRNA sense strand
gcaccgaaaccgaguuauu

SEQ ID NO: 1030334 - RNA, 19 nt, Homo sapiens
  misc_RNA (1)...(19): siRNA sense strand
ggaggaaagcccugacuga

SEQ ID NO: 1030335 - RNA, 19 nt, Homo sapiens
  misc_RNA (1)...(19): siRNA sense strand
ucacccuccuuaaauauuu

SEQ ID NO: 1030336 - RNA, 19 nt, Homo sapiens
  misc_RNA (1)...(19): siRNA sense strand
aagaagaucacccuccuua

SEQ ID NO: 1030337 - RNA, 19 nt, Homo sapiens
  misc_RNA (1)...(19): siRNA sense strand
gcacauaccgccugagucu

SEQ ID NO: 1030338 - RNA, 19 nt, Homo sapiens
  misc_RNA (1)...(19): siRNA sense strand
agaucacccuccuuaaaua

SEQ ID NO: 1030339 - RNA, 19 nt, Homo sapiens
  misc_RNA (1)...(19): siRNA sense strand
gcaagauugugccuaaguc

SEQ ID NO: 1030340 - RNA, 19 nt, Homo sapiens
  misc_RNA (1)...(19): siRNA sense strand
ugaccuacaucgacgagaa

SEQ ID NO: 1030341 - RNA, 19 nt, Homo sapiens
  misc_RNA (1)...(19): siRNA sense strand
ucacaguccucaauaaagg

SEQ ID NO: 1030342 - RNA, 19 nt, Homo sapiens
  misc_RNA (1)...(19): siRNA sense strand
gcucuucaaugacucaaca

SEQ ID NO: 1030343 - RNA, 19 nt, Homo sapiens
  misc_RNA (1)...(19): siRNA sense strand
gauacuaccuacggcaaau

SEQ ID NO: 1030344 - RNA, 19 nt, Homo sapiens
  misc_RNA (1)...(19): siRNA sense strand
ugugugggacuccuaauua

SEQ ID NO: 1030345 - RNA, 19 nt, Homo sapiens
  misc_RNA (1)...(19): siRNA sense strand
gcacuaugguggacaagcu

SEQ ID NO: 1030346 - RNA, 19 nt, Homo sapiens
  misc_RNA (1)...(19): siRNA sense strand
gaucacccuccuuaaauau

SEQ ID NO: 1030347 - RNA, 19 nt, Homo sapiens
  misc_RNA (1)...(19): siRNA sense strand
guucuuuacuucuggcuau

SEQ ID NO: 1030348 - RNA, 19 nt, Homo sapiens
  misc_RNA (1)...(19): siRNA sense strand
cuaagucucugcugcucaa

SEQ ID NO: 1030349 - RNA, 19 nt, Homo sapiens
  misc_RNA (1)...(19): siRNA sense strand
ccaccaagguuuucgauug

SEQ ID NO: 1030350 - RNA, 19 nt, Homo sapiens
  misc_RNA (1)...(19): siRNA sense strand
augaagaucuggaggugaa

SEQ ID NO: 1030351 - RNA, 19 nt, Homo sapiens
  misc_RNA (1)...(19): siRNA sense strand
gacgaguucuuuacuucug

SEQ ID NO: 1030352 - RNA, 19 nt, Homo sapiens
  misc_RNA (1)...(19): siRNA sense strand
ucaauaaaggcuuggagaa

SEQ ID NO: 1030353 - RNA, 19 nt, Homo sapiens
  misc_RNA (1)...(19): siRNA sense strand
gaucaagaagaaugaauac

SEQ ID NO: 1030354 - RNA, 19 nt, Homo sapiens
  misc_RNA (1)...(19): siRNA sense strand
ccuuaaauauuuccgcaau

SEQ ID NO: 1030355 - RNA, 19 nt, Homo sapiens
  misc_RNA (1)...(19): siRNA sense strand
gcaagaggaggcugaggau

SEQ ID NO: 1030356 - RNA, 19 nt, Homo sapiens
  misc_RNA (1)...(19): siRNA sense strand
gaccauuccaccaagguuu

SEQ ID NO: 1030357 - RNA, 19 nt, Homo sapiens
  misc_RNA (1)...(19): siRNA sense strand
ccucacaguccucaauaaa

SEQ ID NO: 1030358 - RNA, 19 nt, Homo sapiens
  misc_RNA (1)...(19): siRNA sense strand
gcgugcagaucaacuucuu

SEQ ID NO: 1030359 - RNA, 19 nt, Homo sapiens
  misc_RNA (1)...(19): siRNA sense strand
ggagaagauguccauggaa

SEQ ID NO: 1030360 - RNA, 19 nt, Homo sapiens
  misc_RNA (1)...(19): siRNA sense strand
uuugagacuucuugccuaa

SEQ ID NO: 1030361 - RNA, 19 nt, Homo sapiens
  misc_RNA (1)...(19): siRNA sense strand
cuuaaugacgaguucuuua

SEQ ID NO: 1030362 - RNA, 19 nt, Homo sapiens
  misc_RNA (1)...(19): siRNA sense strand
aaaccgaguuauucaucga

SEQ ID NO: 1030363 - RNA, 19 nt, Homo sapiens
  misc_RNA (1)...(19): siRNA sense strand
gaucaacuucuuccaggau

SEQ ID NO: 1030364 - RNA, 19 nt, Homo sapiens
  misc_RNA (1)...(19): siRNA sense strand
gaagaagaucacccuccuu

SEQ ID NO: 1030365 - RNA, 19 nt, Homo sapiens
  misc_RNA (1)...(19): siRNA sense strand
ugggacuccuaauuacaua

SEQ ID NO: 1030366 - RNA, 19 nt, Homo sapiens
  misc_RNA (1)...(19): siRNA sense strand
aagaucacccuccuuaaau

SEQ ID NO: 1030367 - RNA, 19 nt, Homo sapiens
  misc_RNA (1)...(19): siRNA sense strand
ggugacagccugcaguaca

SEQ ID NO: 1030368 - RNA, 19 nt, Homo sapiens
  misc_RNA (1)...(19): siRNA sense strand
cgaaaccgaguuauucauc

SEQ ID NO: 1030369 - RNA, 19 nt, Homo sapiens
  misc_RNA (1)...(19): siRNA sense strand
ucaagaagaaugaauacag

SEQ ID NO: 1030370 - RNA, 19 nt, Homo sapiens
  misc_RNA (1)...(19): siRNA sense strand
ccgccucccucauccagaa

SEQ ID NO: 1030371 - RNA, 19 nt, Homo sapiens
  misc_RNA (1)...(19): siRNA sense strand
aaugacgaguucuuuacuu

SEQ ID NO: 1030372 - RNA, 19 nt, Homo sapiens
  misc_RNA (1)...(19): siRNA sense strand
gccaagugcuucgagaucu

SEQ ID NO: 1030373 - RNA, 19 nt, Homo sapiens
  misc_RNA (1)...(19): siRNA sense strand
gaucacaccaagcucaucu

SEQ ID NO: 1030374 - RNA, 19 nt, Homo sapiens
  misc_RNA (1)...(19): siRNA sense strand
agaccuaccuccggaucaa

SEQ ID NO: 1030375 - RNA, 19 nt, Homo sapiens
  misc_RNA (1)...(19): siRNA sense strand
uccauuggguguaucaugu

SEQ ID NO: 1030376 - RNA, 19 nt, Homo sapiens
  misc_RNA (1)...(19): siRNA sense strand
caccgaaaccgaguuauuc

SEQ ID NO: 1030377 - RNA, 19 nt, Homo sapiens
  misc_RNA (1)...(19): siRNA sense strand
gugacagccugcaguacau

SEQ ID NO: 1030378 - RNA, 19 nt, Homo sapiens
  misc_RNA (1)...(19): siRNA sense strand
gcagcgugcagaucaacuu

SEQ ID NO: 1030379 - RNA, 19 nt, Homo sapiens
  misc_RNA (1)...(19): siRNA sense strand
cauuggguguaucauguau

SEQ ID NO: 1030380 - RNA, 19 nt, Homo sapiens
  misc_RNA (1)...(19): siRNA sense strand
ugagacuucuugccuaaaa

SEQ ID NO: 1030381 - RNA, 19 nt, Homo sapiens
  misc_RNA (1)...(19): siRNA sense strand
gcuuaaugacgaguucuuu

SEQ ID NO: 1030382 - RNA, 19 nt, Homo sapiens
  misc_RNA (1)...(19): siRNA sense strand
gagcgugacggcacugagu

SEQ ID NO: 1030383 - RNA, 19 nt, Homo sapiens
  misc_RNA (1)...(19): siRNA sense strand
caauaaaggcuuggagaac

SEQ ID NO: 1030384 - RNA, 19 nt, Homo sapiens
  misc_RNA (1)...(19): siRNA sense strand
ggcaaccaaagucgaauau

SEQ ID NO: 1030385 - RNA, 19 nt, Homo sapiens
  misc_RNA (1)...(19): siRNA sense strand
gugugggacuccuaauuac

SEQ ID NO: 1030386 - RNA, 19 nt, Homo sapiens
  misc_RNA (1)...(19): siRNA sense strand
ugacagccugcaguacaua

SEQ ID NO: 1030387 - RNA, 19 nt, Homo sapiens
  misc_RNA (1)...(19): siRNA sense strand
cguaggauuccacggcuuu

SEQ ID NO: 1030388 - RNA, 19 nt, Homo sapiens
  misc_RNA (1)...(19): siRNA sense strand
ccauuggguguaucaugua

SEQ ID NO: 1030389 - RNA, 19 nt, Homo sapiens
  misc_RNA (1)...(19): siRNA sense strand
gcugcuuaaugacgaguuc

SEQ ID NO: 1030390 - RNA, 19 nt, Homo sapiens
  misc_RNA (1)...(19): siRNA sense strand
agauguccauggaaauauc

SEQ ID NO: 1030391 - RNA, 19 nt, Homo sapiens
  misc_RNA (1)...(19): siRNA sense strand
uggacuauucggacaagua

SEQ ID NO: 1030392 - RNA, 19 nt, Homo sapiens
  misc_RNA (1)...(19): siRNA sense strand
ccaagugcuucgagaucuc

SEQ ID NO: 1030393 - RNA, 19 nt, Homo sapiens
  misc_RNA (1)...(19): siRNA sense strand
gcaaccaaagucgaauaug

SEQ ID NO: 1030394 - RNA, 19 nt, Homo sapiens
  misc_RNA (1)...(19): siRNA sense strand
uggcagccgugaccuacau

SEQ ID NO: 1030395 - RNA, 19 nt, Homo sapiens
  misc_RNA (1)...(19): siRNA sense strand
agaagaucacccuccuuaa

SEQ ID NO: 1030396 - RNA, 19 nt, Homo sapiens
  misc_RNA (1)...(19): siRNA sense strand
ugacucaacacgccucauc

SEQ ID NO: 1030397 - RNA, 19 nt, Homo sapiens
  misc_RNA (1)...(19): siRNA sense strand
uggcaaccaaagucgaaua

SEQ ID NO: 1030398 - RNA, 19 nt, Homo sapiens
  misc_RNA (1)...(19): siRNA sense strand
ucauguauaccuuguuagu

SEQ ID NO: 1030399 - RNA, 19 nt, Homo sapiens
  misc_RNA (1)...(19): siRNA sense strand
caccagagggagaagaugu

SEQ ID NO: 1030400 - RNA, 19 nt, Homo sapiens
  misc_RNA (1)...(19): siRNA sense strand
ucaacuucuuccaggauca

SEQ ID NO: 1030401 - RNA, 19 nt, Homo sapiens
  misc_RNA (1)...(19): siRNA sense strand
uuacaugagcgagcacuug

SEQ ID NO: 1030402 - RNA, 19 nt, Homo sapiens
  misc_RNA (1)...(19): siRNA sense strand
cccucacaguccucaauaa

SEQ ID NO: 1030403 - RNA, 19 nt, Homo sapiens
  misc_RNA (1)...(19): siRNA sense strand
augacgaguucuuuacuuc

SEQ ID NO: 1030404 - RNA, 19 nt, Homo sapiens
  misc_RNA (1)...(19): siRNA sense strand
accauuaacgagcugcuua

SEQ ID NO: 1030405 - RNA, 19 nt, Homo sapiens
  misc_RNA (1)...(19): siRNA sense strand
ugaagcuggugauguauua

SEQ ID NO: 1030406 - RNA, 19 nt, Homo sapiens
  misc_RNA (1)...(19): siRNA sense strand
gagaugcccaguauuuaua

SEQ ID NO: 1030407 - RNA, 19 nt, Homo sapiens
  misc_RNA (1)...(19): siRNA sense strand
cagaaguacugaauauaga

SEQ ID NO: 1030408 - RNA, 19 nt, Homo sapiens
  misc_RNA (1)...(19): siRNA sense strand
ggugauguauuauucauuc

SEQ ID NO: 1030409 - RNA, 19 nt, Homo sapiens
  misc_RNA (1)...(19): siRNA sense strand
gacaaagccuacagcaaga

SEQ ID NO: 1030410 - RNA, 19 nt, Homo sapiens
  misc_RNA (1)...(19): siRNA sense strand
ccuugaagcuggugaugua

SEQ ID NO: 1030411 - RNA, 19 nt, Homo sapiens
  misc_RNA (1)...(19): siRNA sense strand
aucaagagcugcacaaauu

SEQ ID NO: 1030412 - RNA, 19 nt, Homo sapiens
  misc_RNA (1)...(19): siRNA sense strand
aaacagauaccuauggaaa

SEQ ID NO: 1030413 - RNA, 19 nt, Homo sapiens
  misc_RNA (1)...(19): siRNA sense strand
uaauacaagugacaggaaa

SEQ ID NO: 1030414 - RNA, 19 nt, Homo sapiens
  misc_RNA (1)...(19): siRNA sense strand
gcuagaagauaugaauguu

SEQ ID NO: 1030415 - RNA, 19 nt, Homo sapiens
  misc_RNA (1)...(19): siRNA sense strand
ccaucugaaugcuaugaua

SEQ ID NO: 1030416 - RNA, 19 nt, Homo sapiens
  misc_RNA (1)...(19): siRNA sense strand
acccagacuuggcuaaaua

SEQ ID NO: 1030417 - RNA, 19 nt, Homo sapiens
  misc_RNA (1)...(19): siRNA sense strand
gaaaacacuggccgaguua

SEQ ID NO: 1030418 - RNA, 19 nt, Homo sapiens
  misc_RNA (1)...(19): siRNA sense strand
acagauaccuauggaaaca

SEQ ID NO: 1030419 - RNA, 19 nt, Homo sapiens
  misc_RNA (1)...(19): siRNA sense strand
ggacagagccuugaaaaca

SEQ ID NO: 1030420 - RNA, 19 nt, Homo sapiens
  misc_RNA (1)...(19): siRNA sense strand
cgagaugcccaguauuuau

SEQ ID NO: 1030421 - RNA, 19 nt, Homo sapiens
  misc_RNA (1)...(19): siRNA sense strand
caucugaaugcuaugauaa

SEQ ID NO: 1030422 - RNA, 19 nt, Homo sapiens
  misc_RNA (1)...(19): siRNA sense strand
gauaugaauguucccuuga

SEQ ID NO: 1030423 - RNA, 19 nt, Homo sapiens
  misc_RNA (1)...(19): siRNA sense strand
ggagugggagugaauaucu

SEQ ID NO: 1030424 - RNA, 19 nt, Homo sapiens
  misc_RNA (1)...(19): siRNA sense strand
cgaguuaccagaggaauau

SEQ ID NO: 1030425 - RNA, 19 nt, Homo sapiens
  misc_RNA (1)...(19): siRNA sense strand
agauaccuauggaaacaaa

SEQ ID NO: 1030426 - RNA, 19 nt, Homo sapiens
  misc_RNA (1)...(19): siRNA sense strand
gagugggagugaauaucuu

SEQ ID NO: 1030427 - RNA, 19 nt, Homo sapiens
  misc_RNA (1)...(19): siRNA sense strand
ugaaaacacuggccgaguu

SEQ ID NO: 1030428 - RNA, 19 nt, Homo sapiens
  misc_RNA (1)...(19): siRNA sense strand
agacuuggcuaaauaucca

SEQ ID NO: 1030429 - RNA, 19 nt, Homo sapiens
  misc_RNA (1)...(19): siRNA sense strand
gaugcccaguauuuauauu

SEQ ID NO: 1030430 - RNA, 19 nt, Homo sapiens
  misc_RNA (1)...(19): siRNA sense strand
uaaaacagauaccuaugga

SEQ ID NO: 1030431 - RNA, 19 nt, Homo sapiens
  misc_RNA (1)...(19): siRNA sense strand
uuccaaggcuagaagauau

SEQ ID NO: 1030432 - RNA, 19 nt, Homo sapiens
  misc_RNA (1)...(19): siRNA sense strand
caucaagagcugcacaaau

SEQ ID NO: 1030433 - RNA, 19 nt, Homo sapiens
  misc_RNA (1)...(19): siRNA sense strand
auaugaauguucccuugaa

SEQ ID NO: 1030434 - RNA, 19 nt, Homo sapiens
  misc_RNA (1)...(19): siRNA sense strand
gagugaauaucuuuuggaa

SEQ ID NO: 1030435 - RNA, 19 nt, Homo sapiens
  misc_RNA (1)...(19): siRNA sense strand
ucgagaugcccaguauuua

SEQ ID NO: 1030436 - RNA, 19 nt, Homo sapiens
  misc_RNA (1)...(19): siRNA sense strand
ccuacacauucaagacaaa

SEQ ID NO: 1030437 - RNA, 19 nt, Homo sapiens
  misc_RNA (1)...(19): siRNA sense strand
gacgaaugguccuacacau

SEQ ID NO: 1030438 - RNA, 19 nt, Homo sapiens
  misc_RNA (1)...(19): siRNA sense strand
ggaaacaaagauccuacag

SEQ ID NO: 1030439 - RNA, 19 nt, Homo sapiens
  misc_RNA (1)...(19): siRNA sense strand
cgacgaaugguccuacaca

SEQ ID NO: 1030440 - RNA, 19 nt, Homo sapiens
  misc_RNA (1)...(19): siRNA sense strand
gcaucaagagcugcacaaa

SEQ ID NO: 1030441 - RNA, 19 nt, Homo sapiens
  misc_RNA (1)...(19): siRNA sense strand
cucgagaugcccaguauuu

SEQ ID NO: 1030442 - RNA, 19 nt, Homo sapiens
  misc_RNA (1)...(19): siRNA sense strand
uaacccagacuuggcuaaa

SEQ ID NO: 1030443 - RNA, 19 nt, Homo sapiens
  misc_RNA (1)...(19): siRNA sense strand
caagagcugcacaaauucu

SEQ ID NO: 1030444 - RNA, 19 nt, Homo sapiens
  misc_RNA (1)...(19): siRNA sense strand
aggaauauagggacuucua

SEQ ID NO: 1030445 - RNA, 19 nt, Homo sapiens
  misc_RNA (1)...(19): siRNA sense strand
ccgaguuaccagaggaaua

SEQ ID NO: 1030446 - RNA, 19 nt, Homo sapiens
  misc_RNA (1)...(19): siRNA sense strand
ggcuagaagauaugaaugu

SEQ ID NO: 1030447 - RNA, 19 nt, Homo sapiens
  misc_RNA (1)...(19): siRNA sense strand
aaagcguguuguacucuuc

SEQ ID NO: 1030448 - RNA, 19 nt, Homo sapiens
  misc_RNA (1)...(19): siRNA sense strand
agaggaauauagggacuuc

SEQ ID NO: 1030449 - RNA, 19 nt, Homo sapiens
  misc_RNA (1)...(19): siRNA sense strand
uuggcuaaauauccacuuu

SEQ ID NO: 1030450 - RNA, 19 nt, Homo sapiens
  misc_RNA (1)...(19): siRNA sense strand
auucauuccugcuuuaugg

SEQ ID NO: 1030451 - RNA, 19 nt, Homo sapiens
  misc_RNA (1)...(19): siRNA sense strand
uaugaauguucccuugaag

SEQ ID NO: 1030452 - RNA, 19 nt, Homo sapiens
  misc_RNA (1)...(19): siRNA sense strand
ucaagagcugcacaaauuc

SEQ ID NO: 1030453 - RNA, 19 nt, Homo sapiens
  misc_RNA (1)...(19): siRNA sense strand
ccaaggcuagaagauauga

SEQ ID NO: 1030454 - RNA, 19 nt, Homo sapiens
  misc_RNA (1)...(19): siRNA sense strand
uuaauacaagugacaggaa

SEQ ID NO: 1030455 - RNA, 19 nt, Homo sapiens
  misc_RNA (1)...(19): siRNA sense strand
uauagauaacccagacuug

SEQ ID NO: 1030456 - RNA, 19 nt, Homo sapiens
  misc_RNA (1)...(19): siRNA sense strand
ccuuccaucugaaugcuau

SEQ ID NO: 1030457 - RNA, 19 nt, Homo sapiens
  misc_RNA (1)...(19): siRNA sense strand
gaagagcacuaaucaacuu

SEQ ID NO: 1030458 - RNA, 19 nt, Homo sapiens
  misc_RNA (1)...(19): siRNA sense strand
cagacuaccuuaacgauuu

SEQ ID NO: 1030459 - RNA, 19 nt, Homo sapiens
  misc_RNA (1)...(19): siRNA sense strand
gguacuaggucuuccuuaa

SEQ ID NO: 1030460 - RNA, 19 nt, Homo sapiens
  misc_RNA (1)...(19): siRNA sense strand
caacauccuuuacacuauu

SEQ ID NO: 1030461 - RNA, 19 nt, Homo sapiens
  misc_RNA (1)...(19): siRNA sense strand
gcacauaaccaacauugau

SEQ ID NO: 1030462 - RNA, 19 nt, Homo sapiens
  misc_RNA (1)...(19): siRNA sense strand
gaaccucggccaucccaua

SEQ ID NO: 1030463 - RNA, 19 nt, Homo sapiens
  misc_RNA (1)...(19): siRNA sense strand
gcacugugauauguacuuu

SEQ ID NO: 1030464 - RNA, 19 nt, Homo sapiens
  misc_RNA (1)...(19): siRNA sense strand
gacaacauccuuuacacua

SEQ ID NO: 1030465 - RNA, 19 nt, Homo sapiens
  misc_RNA (1)...(19): siRNA sense strand
ucacccaucuguugaaguu

SEQ ID NO: 1030466 - RNA, 19 nt, Homo sapiens
  misc_RNA (1)...(19): siRNA sense strand
ucagggagcuggaacagau

SEQ ID NO: 1030467 - RNA, 19 nt, Homo sapiens
  misc_RNA (1)...(19): siRNA sense strand
cccaagaacucaugguuga

SEQ ID NO: 1030468 - RNA, 19 nt, Homo sapiens
  misc_RNA (1)...(19): siRNA sense strand
cagacugacuccuaugaaa

SEQ ID NO: 1030469 - RNA, 19 nt, Homo sapiens
  misc_RNA (1)...(19): siRNA sense strand
guaguucccugcccugaug

SEQ ID NO: 1030470 - RNA, 19 nt, Homo sapiens
  misc_RNA (1)...(19): siRNA sense strand
ugaaucagcucucgacucu

SEQ ID NO: 1030471 - RNA, 19 nt, Homo sapiens
  misc_RNA (1)...(19): siRNA sense strand
caagcaaucugggcuauag

SEQ ID NO: 1030472 - RNA, 19 nt, Homo sapiens
  misc_RNA (1)...(19): siRNA sense strand
ggaaacagccagccaagca

SEQ ID NO: 1030473 - RNA, 19 nt, Homo sapiens
  misc_RNA (1)...(19): siRNA sense strand
caagaacucaugguugaua

SEQ ID NO: 1030474 - RNA, 19 nt, Homo sapiens
  misc_RNA (1)...(19): siRNA sense strand
caucgaaggcgcaagcaua

SEQ ID NO: 1030475 - RNA, 19 nt, Homo sapiens
  misc_RNA (1)...(19): siRNA sense strand
gaacagauggugaucaaaa

SEQ ID NO: 1030476 - RNA, 19 nt, Homo sapiens
  misc_RNA (1)...(19): siRNA sense strand
gcacuaaucaacuuaaguc

SEQ ID NO: 1030477 - RNA, 19 nt, Homo sapiens
  misc_RNA (1)...(19): siRNA sense strand
cacgagcacucccagcaua

SEQ ID NO: 1030478 - RNA, 19 nt, Homo sapiens
  misc_RNA (1)...(19): siRNA sense strand
ucccaaauauccagacuga

SEQ ID NO: 1030479 - RNA, 19 nt, Homo sapiens
  misc_RNA (1)...(19): siRNA sense strand
caagagggcacauaaccaa

SEQ ID NO: 1030480 - RNA, 19 nt, Homo sapiens
  misc_RNA (1)...(19): siRNA sense strand
aaucagcucucgacucuag

SEQ ID NO: 1030481 - RNA, 19 nt, Homo sapiens
  misc_RNA (1)...(19): siRNA sense strand
gcagacaacauccuuuaca

SEQ ID NO: 1030482 - RNA, 19 nt, Homo sapiens
  misc_RNA (1)...(19): siRNA sense strand
gaugaaaacucaggaaugu

SEQ ID NO: 1030483 - RNA, 19 nt, Homo sapiens
  misc_RNA (1)...(19): siRNA sense strand
guagacggguuugaaagga

SEQ ID NO: 1030484 - RNA, 19 nt, Homo sapiens
  misc_RNA (1)...(19): siRNA sense strand
uggaacagauggugaucaa

SEQ ID NO: 1030485 - RNA, 19 nt, Homo sapiens
  misc_RNA (1)...(19): siRNA sense strand
acaacauccuuuacacuau

SEQ ID NO: 1030486 - RNA, 19 nt, Homo sapiens
  misc_RNA (1)...(19): siRNA sense strand
gauauguacuuugcagaca

SEQ ID NO: 1030487 - RNA, 19 nt, Homo sapiens
  misc_RNA (1)...(19): siRNA sense strand
gaaaccagacuaccuuaac

SEQ ID NO: 1030488 - RNA, 19 nt, Homo sapiens
  misc_RNA (1)...(19): siRNA sense strand
caacuaugccagcaaagga

SEQ ID NO: 1030489 - RNA, 19 nt, Homo sapiens
  misc_RNA (1)...(19): siRNA sense strand
ugaaaacucaggaauguua

SEQ ID NO: 1030490 - RNA, 19 nt, Homo sapiens
  misc_RNA (1)...(19): siRNA sense strand
guugauaacccuuugaauc

SEQ ID NO: 1030491 - RNA, 19 nt, Homo sapiens
  misc_RNA (1)...(19): siRNA sense strand
ugucaucuuuguccauuug

SEQ ID NO: 1030492 - RNA, 19 nt, Homo sapiens
  misc_RNA (1)...(19): siRNA sense strand
auauguggaugcaaaugua

SEQ ID NO: 1030493 - RNA, 19 nt, Homo sapiens
  misc_RNA (1)...(19): siRNA sense strand
aagaacucaugguugauaa

SEQ ID NO: 1030494 - RNA, 19 nt, Homo sapiens
  misc_RNA (1)...(19): siRNA sense strand
gagcacuaaucaacuuaag

SEQ ID NO: 1030495 - RNA, 19 nt, Homo sapiens
  misc_RNA (1)...(19): siRNA sense strand
cagaagagcacuaaucaac

SEQ ID NO: 1030496 - RNA, 19 nt, Homo sapiens
  misc_RNA (1)...(19): siRNA sense strand
uaugggaugucauggguau

SEQ ID NO: 1030497 - RNA, 19 nt, Homo sapiens
  misc_RNA (1)...(19): siRNA sense strand
cccacgaaaucccaaauau

SEQ ID NO: 1030498 - RNA, 19 nt, Homo sapiens
  misc_RNA (1)...(19): siRNA sense strand
gggcacauaaccaacauug

SEQ ID NO: 1030499 - RNA, 19 nt, Homo sapiens
  misc_RNA (1)...(19): siRNA sense strand
uauccagacugacuccuau

SEQ ID NO: 1030500 - RNA, 19 nt, Homo sapiens
  misc_RNA (1)...(19): siRNA sense strand
ccaaauauccagacugacu

SEQ ID NO: 1030501 - RNA, 19 nt, Homo sapiens
  misc_RNA (1)...(19): siRNA sense strand
uaacuugucccaucaucga

SEQ ID NO: 1030502 - RNA, 19 nt, Homo sapiens
  misc_RNA (1)...(19): siRNA sense strand
gcagaagagcacuaaucaa

SEQ ID NO: 1030503 - RNA, 19 nt, Homo sapiens
  misc_RNA (1)...(19): siRNA sense strand
gcagacccaucacgugaac

SEQ ID NO: 1030504 - RNA, 19 nt, Homo sapiens
  misc_RNA (1)...(19): siRNA sense strand
ugacuccuaugaaaguaug

SEQ ID NO: 1030505 - RNA, 19 nt, Homo sapiens
  misc_RNA (1)...(19): siRNA sense strand
cagaaaccagacuaccuua

SEQ ID NO: 1030506 - RNA, 19 nt, Homo sapiens
  misc_RNA (1)...(19): siRNA sense strand
ucagaaaccagacuaccuu

SEQ ID NO: 1030507 - RNA, 19 nt, Homo sapiens
  misc_RNA (1)...(19): siRNA sense strand
ugacucagcagacccauca

SEQ ID NO: 1030508 - RNA, 19 nt, Homo sapiens
  misc_RNA (1)...(19): siRNA sense strand
cugcaacuaugccagcaaa

SEQ ID NO: 1030509 - RNA, 19 nt, Homo sapiens
  misc_RNA (1)...(19): siRNA sense strand
gauuuugccugucauuuug

SEQ ID NO: 1030510 - RNA, 19 nt, Homo sapiens
  misc_RNA (1)...(19): siRNA sense strand
guacuuugcagacaacauc

SEQ ID NO: 1030511 - RNA, 19 nt, Homo sapiens
  misc_RNA (1)...(19): siRNA sense strand
gaucacccaucuguugaag

SEQ ID NO: 1030512 - RNA, 19 nt, Homo sapiens
  misc_RNA (1)...(19): siRNA sense strand
aaccagagccuuuggacuu

SEQ ID NO: 1030513 - RNA, 19 nt, Homo sapiens
  misc_RNA (1)...(19): siRNA sense strand
ccaauuaaagguacuaggu

SEQ ID NO: 1030514 - RNA, 19 nt, Homo sapiens
  misc_RNA (1)...(19): siRNA sense strand
gcgcaagcauaaaauggua

SEQ ID NO: 1030515 - RNA, 19 nt, Homo sapiens
  misc_RNA (1)...(19): siRNA sense strand
aaacucaggaauguuagua

SEQ ID NO: 1030516 - RNA, 19 nt, Homo sapiens
  misc_RNA (1)...(19): siRNA sense strand
cacauaaccaacauugauu

SEQ ID NO: 1030517 - RNA, 19 nt, Homo sapiens
  misc_RNA (1)...(19): siRNA sense strand
acucaggaauguuaguaga

SEQ ID NO: 1030518 - RNA, 19 nt, Homo sapiens
  misc_RNA (1)...(19): siRNA sense strand
gcaagagggcacauaacca

SEQ ID NO: 1030519 - RNA, 19 nt, Homo sapiens
  misc_RNA (1)...(19): siRNA sense strand
uugcagacaacauccuuua

SEQ ID NO: 1030520 - RNA, 19 nt, Homo sapiens
  misc_RNA (1)...(19): siRNA sense strand
ccacgaaaucccaaauauc

SEQ ID NO: 1030521 - RNA, 19 nt, Homo sapiens
  misc_RNA (1)...(19): siRNA sense strand
guacuaggucuuccuuaag

SEQ ID NO: 1030522 - RNA, 19 nt, Homo sapiens
  misc_RNA (1)...(19): siRNA sense strand
aguaguuucugccguauca

SEQ ID NO: 1030523 - RNA, 19 nt, Homo sapiens
  misc_RNA (1)...(19): siRNA sense strand
gagggcacauaaccaacau

SEQ ID NO: 1030524 - RNA, 19 nt, Homo sapiens
  misc_RNA (1)...(19): siRNA sense strand
gcacucccagcauaggaaa

SEQ ID NO: 1030525 - RNA, 19 nt, Homo sapiens
  misc_RNA (1)...(19): siRNA sense strand
guuaguagacggguuugaa

SEQ ID NO: 1030526 - RNA, 19 nt, Homo sapiens
  misc_RNA (1)...(19): siRNA sense strand
cauaaccaacauugauuga

SEQ ID NO: 1030527 - RNA, 19 nt, Homo sapiens
  misc_RNA (1)...(19): siRNA sense strand
uagcagaagagcacuaauc

SEQ ID NO: 1030528 - RNA, 19 nt, Homo sapiens
  misc_RNA (1)...(19): siRNA sense strand
ccagacuaccuuaacgauu

SEQ ID NO: 1030529 - RNA, 19 nt, Homo sapiens
  misc_RNA (1)...(19): siRNA sense strand
uguaauauauguggaugca

SEQ ID NO: 1030530 - RNA, 19 nt, Homo sapiens
  misc_RNA (1)...(19): siRNA sense strand
ccuuuacacuauucauaug

SEQ ID NO: 1030531 - RNA, 19 nt, Homo sapiens
  misc_RNA (1)...(19): siRNA sense strand
ugccagcacugugauaugu

SEQ ID NO: 1030532 - RNA, 19 nt, Homo sapiens
  misc_RNA (1)...(19): siRNA sense strand
ccuaugaaaguauggcaaa

SEQ ID NO: 1030533 - RNA, 19 nt, Homo sapiens
  misc_RNA (1)...(19): siRNA sense strand
uggacuucgugaaagauuu

SEQ ID NO: 1030534 - RNA, 19 nt, Homo sapiens
  misc_RNA (1)...(19): siRNA sense strand
ccagcacugugauauguac

SEQ ID NO: 1030535 - RNA, 19 nt, Homo sapiens
  misc_RNA (1)...(19): siRNA sense strand
uuaguagacggguuugaaa

SEQ ID NO: 1030536 - RNA, 19 nt, Homo sapiens
  misc_RNA (1)...(19): siRNA sense strand
gcagcccucuacccaagca

SEQ ID NO: 1030537 - RNA, 19 nt, Homo sapiens
  misc_RNA (1)...(19): siRNA sense strand
gaccuuugaugggaagcuu

SEQ ID NO: 1030538 - RNA, 19 nt, Homo sapiens
  misc_RNA (1)...(19): siRNA sense strand
cuugaucacccaucuguug

SEQ ID NO: 1030539 - RNA, 19 nt, Homo sapiens
  misc_RNA (1)...(19): siRNA sense strand
aaaccagacuaccuuaacg

SEQ ID NO: 1030540 - RNA, 19 nt, Homo sapiens
  misc_RNA (1)...(19): siRNA sense strand
agaaaccagacuaccuuaa

SEQ ID NO: 1030541 - RNA, 19 nt, Homo sapiens
  misc_RNA (1)...(19): siRNA sense strand
uauagcagaagagcacuaa

SEQ ID NO: 1030542 - RNA, 19 nt, Homo sapiens
  misc_RNA (1)...(19): siRNA sense strand
ccauuugcaucugcuuaug

SEQ ID NO: 1030543 - RNA, 19 nt, Homo sapiens
  misc_RNA (1)...(19): siRNA sense strand
gcaacuaugccagcaaagg

SEQ ID NO: 1030544 - RNA, 19 nt, Homo sapiens
  misc_RNA (1)...(19): siRNA sense strand
cagacaacauccuuuacac

SEQ ID NO: 1030545 - RNA, 19 nt, Homo sapiens
  misc_RNA (1)...(19): siRNA sense strand
gaagaaaacaagcaaucug

SEQ ID NO: 1030546 - RNA, 19 nt, Homo sapiens
  misc_RNA (1)...(19): siRNA sense strand
gagcacucccagcauagga

SEQ ID NO: 1030547 - RNA, 19 nt, Homo sapiens
  misc_RNA (1)...(19): siRNA sense strand
gacugacuccuaugaaagu

SEQ ID NO: 1030548 - RNA, 19 nt, Homo sapiens
  misc_RNA (1)...(19): siRNA sense strand
ccagacugacuccuaugaa

SEQ ID NO: 1030549 - RNA, 19 nt, Homo sapiens
  misc_RNA (1)...(19): siRNA sense strand
ugucgguacugcaacuaug

SEQ ID NO: 1030550 - RNA, 19 nt, Homo sapiens
  misc_RNA (1)...(19): siRNA sense strand
gacuugaucacccaucugu

SEQ ID NO: 1030551 - RNA, 19 nt, Homo sapiens
  misc_RNA (1)...(19): siRNA sense strand
ccgcugcagugaucgaagu

SEQ ID NO: 1030552 - RNA, 19 nt, Homo sapiens
  misc_RNA (1)...(19): siRNA sense strand
ggacuucgugaaagauuuu

SEQ ID NO: 1030553 - RNA, 19 nt, Homo sapiens
  misc_RNA (1)...(19): siRNA sense strand
gccuuuggacuucgugaaa

SEQ ID NO: 1030554 - RNA, 19 nt, Homo sapiens
  misc_RNA (1)...(19): siRNA sense strand
ccaggacccucagcuucug

SEQ ID NO: 1030555 - RNA, 19 nt, Homo sapiens
  misc_RNA (1)...(19): siRNA sense strand
ccucggccaucccauaguc

SEQ ID NO: 1030556 - RNA, 19 nt, Homo sapiens
  misc_RNA (1)...(19): siRNA sense strand
cacgaaaucccaaauaucc

SEQ ID NO: 1030557 - RNA, 19 nt, Homo sapiens
  misc_RNA (1)...(19): siRNA sense strand
gagcauagcauuuagauua

SEQ ID NO: 1030558 - RNA, 19 nt, Homo sapiens
  misc_RNA (1)...(19): siRNA sense strand
guagaaagcuugccaaaga

SEQ ID NO: 1030559 - RNA, 19 nt, Homo sapiens
  misc_RNA (1)...(19): siRNA sense strand
gcagcuggaugguuuaaua

SEQ ID NO: 1030560 - RNA, 19 nt, Homo sapiens
  misc_RNA (1)...(19): siRNA sense strand
gagaugaugucuugauaaa

SEQ ID NO: 1030561 - RNA, 19 nt, Homo sapiens
  misc_RNA (1)...(19): siRNA sense strand
ugaacaagaugguauagua

SEQ ID NO: 1030562 - RNA, 19 nt, Homo sapiens
  misc_RNA (1)...(19): siRNA sense strand
gaauccagcaugaauauua

SEQ ID NO: 1030563 - RNA, 19 nt, Homo sapiens
  misc_RNA (1)...(19): siRNA sense strand
gaaagaauccagcaugaau

SEQ ID NO: 1030564 - RNA, 19 nt, Homo sapiens
  misc_RNA (1)...(19): siRNA sense strand
cagcgggucugucaguuua

SEQ ID NO: 1030565 - RNA, 19 nt, Homo sapiens
  misc_RNA (1)...(19): siRNA sense strand
ugaccuagcuucugcaaga

SEQ ID NO: 1030566 - RNA, 19 nt, Homo sapiens
  misc_RNA (1)...(19): siRNA sense strand
cgaaggagcauagcauuua

SEQ ID NO: 1030567 - RNA, 19 nt, Homo sapiens
  misc_RNA (1)...(19): siRNA sense strand
gaacuuggacagcagguuu

SEQ ID NO: 1030568 - RNA, 19 nt, Homo sapiens
  misc_RNA (1)...(19): siRNA sense strand
gcuguaacuucuuguauau

SEQ ID NO: 1030569 - RNA, 19 nt, Homo sapiens
  misc_RNA (1)...(19): siRNA sense strand
uauaguaccuucagaaugg

SEQ ID NO: 1030570 - RNA, 19 nt, Homo sapiens
  misc_RNA (1)...(19): siRNA sense strand
ccaaagauggugaauacua

SEQ ID NO: 1030571 - RNA, 19 nt, Homo sapiens
  misc_RNA (1)...(19): siRNA sense strand
gaacaacuggcuaucaaau

SEQ ID NO: 1030572 - RNA, 19 nt, Homo sapiens
  misc_RNA (1)...(19): siRNA sense strand
guaucgagaugaugucuug

SEQ ID NO: 1030573 - RNA, 19 nt, Homo sapiens
  misc_RNA (1)...(19): siRNA sense strand
aggaguacauccaaauaua

SEQ ID NO: 1030574 - RNA, 19 nt, Homo sapiens
  misc_RNA (1)...(19): siRNA sense strand
gaccuucccuuuauauauc

SEQ ID NO: 1030575 - RNA, 19 nt, Homo sapiens
  misc_RNA (1)...(19): siRNA sense strand
gaaggagcauagcauuuag

SEQ ID NO: 1030576 - RNA, 19 nt, Homo sapiens
  misc_RNA (1)...(19): siRNA sense strand
gguagggccucaagaaauc

SEQ ID NO: 1030577 - RNA, 19 nt, Homo sapiens
  misc_RNA (1)...(19): siRNA sense strand
ggagaagaauggcgauuac

SEQ ID NO: 1030578 - RNA, 19 nt, Homo sapiens
  misc_RNA (1)...(19): siRNA sense strand
acagugacauuaagauuug

SEQ ID NO: 1030579 - RNA, 19 nt, Homo sapiens
  misc_RNA (1)...(19): siRNA sense strand
gaauggcugucuucugugu

SEQ ID NO: 1030580 - RNA, 19 nt, Homo sapiens
  misc_RNA (1)...(19): siRNA sense strand
uugaauggcuucuaaacaa

SEQ ID NO: 1030581 - RNA, 19 nt, Homo sapiens
  misc_RNA (1)...(19): siRNA sense strand
uagaacaacuggcuaucaa

SEQ ID NO: 1030582 - RNA, 19 nt, Homo sapiens
  misc_RNA (1)...(19): siRNA sense strand
caaagauggugaauacuac

SEQ ID NO: 1030583 - RNA, 19 nt, Homo sapiens
  misc_RNA (1)...(19): siRNA sense strand
gaaggaaacaauuaaugug

SEQ ID NO: 1030584 - RNA, 19 nt, Homo sapiens
  misc_RNA (1)...(19): siRNA sense strand
gauuugugcucuaggagaa

SEQ ID NO: 1030585 - RNA, 19 nt, Homo sapiens
  misc_RNA (1)...(19): siRNA sense strand
gaauacuacugguguugga

SEQ ID NO: 1030586 - RNA, 19 nt, Homo sapiens
  misc_RNA (1)...(19): siRNA sense strand
uggauuagauucuguaaag

SEQ ID NO: 1030587 - RNA, 19 nt, Homo sapiens
  misc_RNA (1)...(19): siRNA sense strand
cgguauaaaugucaugaaa

SEQ ID NO: 1030588 - RNA, 19 nt, Homo sapiens
  misc_RNA (1)...(19): siRNA sense strand
uaacuucggcuuugaccua

SEQ ID NO: 1030589 - RNA, 19 nt, Homo sapiens
  misc_RNA (1)...(19): siRNA sense strand
ggaguacauccaaauauau

SEQ ID NO: 1030590 - RNA, 19 nt, Homo sapiens
  misc_RNA (1)...(19): siRNA sense strand
gaauggcgauuacacaaaa

SEQ ID NO: 1030591 - RNA, 19 nt, Homo sapiens
  misc_RNA (1)...(19): siRNA sense strand
uaagauuugugcucuagga

SEQ ID NO: 1030592 - RNA, 19 nt, Homo sapiens
  misc_RNA (1)...(19): siRNA sense strand
uaaggaguacauccaaaua

SEQ ID NO: 1030593 - RNA, 19 nt, Homo sapiens
  misc_RNA (1)...(19): siRNA sense strand
gaagaauggcgauuacaca

SEQ ID NO: 1030594 - RNA, 19 nt, Homo sapiens
  misc_RNA (1)...(19): siRNA sense strand
guucagugguucuuggaaa

SEQ ID NO: 1030595 - RNA, 19 nt, Homo sapiens
  misc_RNA (1)...(19): siRNA sense strand
ucgagaugaugucuugaua

SEQ ID NO: 1030596 - RNA, 19 nt, Homo sapiens
  misc_RNA (1)...(19): siRNA sense strand
ggaaagaauccagcaugaa

SEQ ID NO: 1030597 - RNA, 19 nt, Homo sapiens
  misc_RNA (1)...(19): siRNA sense strand
aaguggagauggauguaua

SEQ ID NO: 1030598 - RNA, 19 nt, Homo sapiens
  misc_RNA (1)...(19): siRNA sense strand
aaagaacucgguauaaaug

SEQ ID NO: 1030599 - RNA, 19 nt, Homo sapiens
  misc_RNA (1)...(19): siRNA sense strand
ggagauuccugaccagaac

SEQ ID NO: 1030600 - RNA, 19 nt, Homo sapiens
  misc_RNA (1)...(19): siRNA sense strand
gggcagaacaagaccauga

SEQ ID NO: 1030601 - RNA, 19 nt, Homo sapiens
  misc_RNA (1)...(19): siRNA sense strand
uuucugaccuucccuuuau

SEQ ID NO: 1030602 - RNA, 19 nt, Homo sapiens
  misc_RNA (1)...(19): siRNA sense strand
aaagaauccagcaugaaua

SEQ ID NO: 1030603 - RNA, 19 nt, Homo sapiens
  misc_RNA (1)...(19): siRNA sense strand
gauuacgcuuggcuucuuu

SEQ ID NO: 1030604 - RNA, 19 nt, Homo sapiens
  misc_RNA (1)...(19): siRNA sense strand
gaauggcuucuaaacaauu

SEQ ID NO: 1030605 - RNA, 19 nt, Homo sapiens
  misc_RNA (1)...(19): siRNA sense strand
ucuaguauguucagugguu

SEQ ID NO: 1030606 - RNA, 19 nt, Homo sapiens
  misc_RNA (1)...(19): siRNA sense strand
ugccaaagauggugaauac

SEQ ID NO: 1030607 - RNA, 19 nt, Homo sapiens
  misc_RNA (1)...(19): siRNA sense strand
agaacaagaccaugaggua

SEQ ID NO: 1030608 - RNA, 19 nt, Homo sapiens
  misc_RNA (1)...(19): siRNA sense strand
gaacaagaugguauaguac

SEQ ID NO: 1030609 - RNA, 19 nt, Homo sapiens
  misc_RNA (1)...(19): siRNA sense strand
ucaccagaauguuaaacuu

SEQ ID NO: 1030610 - RNA, 19 nt, Homo sapiens
  misc_RNA (1)...(19): siRNA sense strand
gacaaugaaggaaacaauu

SEQ ID NO: 1030611 - RNA, 19 nt, Homo sapiens
  misc_RNA (1)...(19): siRNA sense strand
gaacucgguauaaauguca

SEQ ID NO: 1030612 - RNA, 19 nt, Homo sapiens
  misc_RNA (1)...(19): siRNA sense strand
caaacgcaauacacugaau

SEQ ID NO: 1030613 - RNA, 19 nt, Homo sapiens
  misc_RNA (1)...(19): siRNA sense strand
ugaauggcuucuaaacaau

SEQ ID NO: 1030614 - RNA, 19 nt, Homo sapiens
  misc_RNA (1)...(19): siRNA sense strand
acaacuggcuaucaaauac

SEQ ID NO: 1030615 - RNA, 19 nt, Homo sapiens
  misc_RNA (1)...(19): siRNA sense strand
ggauguuccuucaacuugu

SEQ ID NO: 1030616 - RNA, 19 nt, Homo sapiens
  misc_RNA (1)...(19): siRNA sense strand
ugacucaccagaauguuaa

SEQ ID NO: 1030617 - RNA, 19 nt, Homo sapiens
  misc_RNA (1)...(19): siRNA sense strand
gauguauacaccacucuaa

SEQ ID NO: 1030618 - RNA, 19 nt, Homo sapiens
  misc_RNA (1)...(19): siRNA sense strand
gaacaaguggugaugaacu

SEQ ID NO: 1030619 - RNA, 19 nt, Homo sapiens
  misc_RNA (1)...(19): siRNA sense strand
gaauggaucuuuaaaacag

SEQ ID NO: 1030620 - RNA, 19 nt, Homo sapiens
  misc_RNA (1)...(19): siRNA sense strand
gcaguguggugagacaaug

SEQ ID NO: 1030621 - RNA, 19 nt, Homo sapiens
  misc_RNA (1)...(19): siRNA sense strand
ugcuguaacuucuuguaua

SEQ ID NO: 1030622 - RNA, 19 nt, Homo sapiens
  misc_RNA (1)...(19): siRNA sense strand
gauuagauucuguaaagga

SEQ ID NO: 1030623 - RNA, 19 nt, Homo sapiens
  misc_RNA (1)...(19): siRNA sense strand
cgagcuacggcuucuguua

SEQ ID NO: 1030624 - RNA, 19 nt, Homo sapiens
  misc_RNA (1)...(19): siRNA sense strand
uaucugcuguaacuucuug

SEQ ID NO: 1030625 - RNA, 19 nt, Homo sapiens
  misc_RNA (1)...(19): siRNA sense strand
caacaccccugcaaggaaa

SEQ ID NO: 1030626 - RNA, 19 nt, Homo sapiens
  misc_RNA (1)...(19): siRNA sense strand
gcagcgggucugucaguuu

SEQ ID NO: 1030627 - RNA, 19 nt, Homo sapiens
  misc_RNA (1)...(19): siRNA sense strand
gcuuugaccuacuuguaau

SEQ ID NO: 1030628 - RNA, 19 nt, Homo sapiens
  misc_RNA (1)...(19): siRNA sense strand
caauaaagaagaccuagag

SEQ ID NO: 1030629 - RNA, 19 nt, Homo sapiens
  misc_RNA (1)...(19): siRNA sense strand
cgagaugaugucuugauaa

SEQ ID NO: 1030630 - RNA, 19 nt, Homo sapiens
  misc_RNA (1)...(19): siRNA sense strand
uagaaagcuugccaaagau

SEQ ID NO: 1030631 - RNA, 19 nt, Homo sapiens
  misc_RNA (1)...(19): siRNA sense strand
gauguuccuucaacuugug

SEQ ID NO: 1030632 - RNA, 19 nt, Homo sapiens
  misc_RNA (1)...(19): siRNA sense strand
caccagaauguuaaacuuu

SEQ ID NO: 1030633 - RNA, 19 nt, Homo sapiens
  misc_RNA (1)...(19): siRNA sense strand
gaugaugucuugauaaaac

SEQ ID NO: 1030634 - RNA, 19 nt, Homo sapiens
  misc_RNA (1)...(19): siRNA sense strand
ggugagacaaugaaggaaa

SEQ ID NO: 1030635 - RNA, 19 nt, Homo sapiens
  misc_RNA (1)...(19): siRNA sense strand
caacuugugccuucuugga

SEQ ID NO: 1030636 - RNA, 19 nt, Homo sapiens
  misc_RNA (1)...(19): siRNA sense strand
gcaaguggagauggaugua

SEQ ID NO: 1030637 - RNA, 19 nt, Homo sapiens
  misc_RNA (1)...(19): siRNA sense strand
ugccuugaauggcuucuaa

SEQ ID NO: 1030638 - RNA, 19 nt, Homo sapiens
  misc_RNA (1)...(19): siRNA sense strand
ggugaauacuacugguguu

SEQ ID NO: 1030639 - RNA, 19 nt, Homo sapiens
  misc_RNA (1)...(19): siRNA sense strand
ugucuucuguguauaaaca

SEQ ID NO: 1030640 - RNA, 19 nt, Homo sapiens
  misc_RNA (1)...(19): siRNA sense strand
cauugguuccucuaacuua

SEQ ID NO: 1030641 - RNA, 19 nt, Homo sapiens
  misc_RNA (1)...(19): siRNA sense strand
gagacgaugcggcgagcua

SEQ ID NO: 1030642 - RNA, 19 nt, Homo sapiens
  misc_RNA (1)...(19): siRNA sense strand
ugaccuucccuuuauauau

SEQ ID NO: 1030643 - RNA, 19 nt, Homo sapiens
  misc_RNA (1)...(19): siRNA sense strand
gaaaacagugacauuaaga

SEQ ID NO: 1030644 - RNA, 19 nt, Homo sapiens
  misc_RNA (1)...(19): siRNA sense strand
aggaacaaguggugaugaa

SEQ ID NO: 1030645 - RNA, 19 nt, Homo sapiens
  misc_RNA (1)...(19): siRNA sense strand
caugaggugugguagaaag

SEQ ID NO: 1030646 - RNA, 19 nt, Homo sapiens
  misc_RNA (1)...(19): siRNA sense strand
guauaguaccuucagaaug

SEQ ID NO: 1030647 - RNA, 19 nt, Homo sapiens
  misc_RNA (1)...(19): siRNA sense strand
cugcaagaauuauugaaca

SEQ ID NO: 1030648 - RNA, 19 nt, Homo sapiens
  misc_RNA (1)...(19): siRNA sense strand
gucaguauucagacauuua

SEQ ID NO: 1030649 - RNA, 19 nt, Homo sapiens
  misc_RNA (1)...(19): siRNA sense strand
aaacagcuuuugacagaaa

SEQ ID NO: 1030650 - RNA, 19 nt, Homo sapiens
  misc_RNA (1)...(19): siRNA sense strand
gaagaccuagagggaagua

SEQ ID NO: 1030651 - RNA, 19 nt, Homo sapiens
  misc_RNA (1)...(19): siRNA sense strand
guagaacaacuggcuauca

SEQ ID NO: 1030652 - RNA, 19 nt, Homo sapiens
  misc_RNA (1)...(19): siRNA sense strand
uuacaccaauggauacauc

SEQ ID NO: 1030653 - RNA, 19 nt, Homo sapiens
  misc_RNA (1)...(19): siRNA sense strand
ggauguauacaccacucua

SEQ ID NO: 1030654 - RNA, 19 nt, Homo sapiens
  misc_RNA (1)...(19): siRNA sense strand
ggcuuugaccuacuuguaa

SEQ ID NO: 1030655 - RNA, 19 nt, Homo sapiens
  misc_RNA (1)...(19): siRNA sense strand
cuagagggaaguagcauga

SEQ ID NO: 1030656 - RNA, 19 nt, Homo sapiens
  misc_RNA (1)...(19): siRNA sense strand
gaaaaccauuugugucagu

SEQ ID NO: 1030657 - RNA, 19 nt, Homo sapiens
  misc_RNA (1)...(19): siRNA sense strand
ggaaaucgaugaugcauug

SEQ ID NO: 1030658 - RNA, 19 nt, Homo sapiens
  misc_RNA (1)...(19): siRNA sense strand
ccacagaacuggaaccaua

SEQ ID NO: 1030659 - RNA, 19 nt, Homo sapiens
  misc_RNA (1)...(19): siRNA sense strand
caaaguaacugguggcuau

SEQ ID NO: 1030660 - RNA, 19 nt, Homo sapiens
  misc_RNA (1)...(19): siRNA sense strand
gcaaacaaauccuggcauu

SEQ ID NO: 1030661 - RNA, 19 nt, Homo sapiens
  misc_RNA (1)...(19): siRNA sense strand
gaagaacuguugaaacuag

SEQ ID NO: 1030662 - RNA, 19 nt, Homo sapiens
  misc_RNA (1)...(19): siRNA sense strand
gaaacuagcaacaucuaua

SEQ ID NO: 1030663 - RNA, 19 nt, Homo sapiens
  misc_RNA (1)...(19): siRNA sense strand
gcagaugcccucuugaaua

SEQ ID NO: 1030664 - RNA, 19 nt, Homo sapiens
  misc_RNA (1)...(19): siRNA sense strand
gagauaaguuugaaaguuc

SEQ ID NO: 1030665 - RNA, 19 nt, Homo sapiens
  misc_RNA (1)...(19): siRNA sense strand
ccaacaagauucagaagaa

SEQ ID NO: 1030666 - RNA, 19 nt, Homo sapiens
  misc_RNA (1)...(19): siRNA sense strand
gcgcauagcugguaaaauu

SEQ ID NO: 1030667 - RNA, 19 nt, Homo sapiens
  misc_RNA (1)...(19): siRNA sense strand
gaccacagaucucuccuuu

SEQ ID NO: 1030668 - RNA, 19 nt, Homo sapiens
  misc_RNA (1)...(19): siRNA sense strand
ggaaccaacuucuuucuca

SEQ ID NO: 1030669 - RNA, 19 nt, Homo sapiens
  misc_RNA (1)...(19): siRNA sense strand
gaagagaagccugauguaa

SEQ ID NO: 1030670 - RNA, 19 nt, Homo sapiens
  misc_RNA (1)...(19): siRNA sense strand
uaacuuagccauuccaauu

SEQ ID NO: 1030671 - RNA, 19 nt, Homo sapiens
  misc_RNA (1)...(19): siRNA sense strand
caucacagcugcaucaaau

SEQ ID NO: 1030672 - RNA, 19 nt, Homo sapiens
  misc_RNA (1)...(19): siRNA sense strand
gcaguuacaauucaugaua

SEQ ID NO: 1030673 - RNA, 19 nt, Homo sapiens
  misc_RNA (1)...(19): siRNA sense strand
acacauagauuucaucaca

SEQ ID NO: 1030674 - RNA, 19 nt, Homo sapiens
  misc_RNA (1)...(19): siRNA sense strand
gcauagcuguccaaguuaa

SEQ ID NO: 1030675 - RNA, 19 nt, Homo sapiens
  misc_RNA (1)...(19): siRNA sense strand
ggaauuuggucaagguuau

SEQ ID NO: 1030676 - RNA, 19 nt, Homo sapiens
  misc_RNA (1)...(19): siRNA sense strand
agauagauaugaugccuua

SEQ ID NO: 1030677 - RNA, 19 nt, Homo sapiens
  misc_RNA (1)...(19): siRNA sense strand
aggcauagcuguccaaguu

SEQ ID NO: 1030678 - RNA, 19 nt, Homo sapiens
  misc_RNA (1)...(19): siRNA sense strand
cagaugcccucuugaauau

SEQ ID NO: 1030679 - RNA, 19 nt, Homo sapiens
  misc_RNA (1)...(19): siRNA sense strand
gaagcuguacuuaaacaua

SEQ ID NO: 1030680 - RNA, 19 nt, Homo sapiens
  misc_RNA (1)...(19): siRNA sense strand
cagaagaacuguugaaacu

SEQ ID NO: 1030681 - RNA, 19 nt, Homo sapiens
  misc_RNA (1)...(19): siRNA sense strand
ugauuucggugaugaauuu

SEQ ID NO: 1030682 - RNA, 19 nt, Homo sapiens
  misc_RNA (1)...(19): siRNA sense strand
gcaaaucuaaggccucuuu

SEQ ID NO: 1030683 - RNA, 19 nt, Homo sapiens
  misc_RNA (1)...(19): siRNA sense strand
uaaaugcagucaaagagaa

SEQ ID NO: 1030684 - RNA, 19 nt, Homo sapiens
  misc_RNA (1)...(19): siRNA sense strand
ggaaugacagguuuaaaug

SEQ ID NO: 1030685 - RNA, 19 nt, Homo sapiens
  misc_RNA (1)...(19): siRNA sense strand
gauagagaaauccaacuua

SEQ ID NO: 1030686 - RNA, 19 nt, Homo sapiens
  misc_RNA (1)...(19): siRNA sense strand
gauccugacuugauagaga

SEQ ID NO: 1030687 - RNA, 19 nt, Homo sapiens
  misc_RNA (1)...(19): siRNA sense strand
gcagaagaccuagaaauug

SEQ ID NO: 1030688 - RNA, 19 nt, Homo sapiens
  misc_RNA (1)...(19): siRNA sense strand
gaauucaagccuuccaaua

SEQ ID NO: 1030689 - RNA, 19 nt, Homo sapiens
  misc_RNA (1)...(19): siRNA sense strand
ggcugaagcuguacuuaaa

SEQ ID NO: 1030690 - RNA, 19 nt, Homo sapiens
  misc_RNA (1)...(19): siRNA sense strand
ccaauaagguuguucaaac

SEQ ID NO: 1030691 - RNA, 19 nt, Homo sapiens
  misc_RNA (1)...(19): siRNA sense strand
ggacuggcagcacaaauaa

SEQ ID NO: 1030692 - RNA, 19 nt, Homo sapiens
  misc_RNA (1)...(19): siRNA sense strand
ggacaauuccuaacauuuc

SEQ ID NO: 1030693 - RNA, 19 nt, Homo sapiens
  misc_RNA (1)...(19): siRNA sense strand
agaagaagaucaaugacuu

SEQ ID NO: 1030694 - RNA, 19 nt, Homo sapiens
  misc_RNA (1)...(19): siRNA sense strand
cgacagagguacguucuug

SEQ ID NO: 1030695 - RNA, 19 nt, Homo sapiens
  misc_RNA (1)...(19): siRNA sense strand
cagcagauauuguugaauc

SEQ ID NO: 1030696 - RNA, 19 nt, Homo sapiens
  misc_RNA (1)...(19): siRNA sense strand
gaagaagaucaaugacuuu

SEQ ID NO: 1030697 - RNA, 19 nt, Homo sapiens
  misc_RNA (1)...(19): siRNA sense strand
cauccaaagugccuuauug

SEQ ID NO: 1030698 - RNA, 19 nt, Homo sapiens
  misc_RNA (1)...(19): siRNA sense strand
ugauggagaugaagauuug

SEQ ID NO: 1030699 - RNA, 19 nt, Homo sapiens
  misc_RNA (1)...(19): siRNA sense strand
gggacacacugaaguuauu

SEQ ID NO: 1030700 - RNA, 19 nt, Homo sapiens
  misc_RNA (1)...(19): siRNA sense strand
cuuaagagcuugcauugga

SEQ ID NO: 1030701 - RNA, 19 nt, Homo sapiens
  misc_RNA (1)...(19): siRNA sense strand
agagaagccugauguaaau

SEQ ID NO: 1030702 - RNA, 19 nt, Homo sapiens
  misc_RNA (1)...(19): siRNA sense strand
ggugaugaauuugaaguuu

SEQ ID NO: 1030703 - RNA, 19 nt, Homo sapiens
  misc_RNA (1)...(19): siRNA sense strand
ugaggcaccuuuagagauu

SEQ ID NO: 1030704 - RNA, 19 nt, Homo sapiens
  misc_RNA (1)...(19): siRNA sense strand
gaugaugcauuguauaguc

SEQ ID NO: 1030705 - RNA, 19 nt, Homo sapiens
  misc_RNA (1)...(19): siRNA sense strand
uugcagaacuaaauccaua

SEQ ID NO: 1030706 - RNA, 19 nt, Homo sapiens
  misc_RNA (1)...(19): siRNA sense strand
aaagagaaguauggaauug

SEQ ID NO: 1030707 - RNA, 19 nt, Homo sapiens
  misc_RNA (1)...(19): siRNA sense strand
ccauaaggcucuucagcuu

SEQ ID NO: 1030708 - RNA, 19 nt, Homo sapiens
  misc_RNA (1)...(19): siRNA sense strand
ccacugagaccauuuacaa

SEQ ID NO: 1030709 - RNA, 19 nt, Homo sapiens
  misc_RNA (1)...(19): siRNA sense strand
gauuaaggcaguuacaauu

SEQ ID NO: 1030710 - RNA, 19 nt, Homo sapiens
  misc_RNA (1)...(19): siRNA sense strand
gcuauccauuugaagcuua

SEQ ID NO: 1030711 - RNA, 19 nt, Homo sapiens
  misc_RNA (1)...(19): siRNA sense strand
cagaagaccuagaaauugg

SEQ ID NO: 1030712 - RNA, 19 nt, Homo sapiens
  misc_RNA (1)...(19): siRNA sense strand
gcacuaagggacacacuga

SEQ ID NO: 1030713 - RNA, 19 nt, Homo sapiens
  misc_RNA (1)...(19): siRNA sense strand
ucucagugcccuccaauua

SEQ ID NO: 1030714 - RNA, 19 nt, Homo sapiens
  misc_RNA (1)...(19): siRNA sense strand
gaaauuggucccagugugu

SEQ ID NO: 1030715 - RNA, 19 nt, Homo sapiens
  misc_RNA (1)...(19): siRNA sense strand
uggcagugcuuucauuuga

SEQ ID NO: 1030716 - RNA, 19 nt, Homo sapiens
  misc_RNA (1)...(19): siRNA sense strand
uaaauaccaguguguagua

SEQ ID NO: 1030717 - RNA, 19 nt, Homo sapiens
  misc_RNA (1)...(19): siRNA sense strand
cguagacagucguugcuua

SEQ ID NO: 1030718 - RNA, 19 nt, Homo sapiens
  misc_RNA (1)...(19): siRNA sense strand
cauaggcugugaaauguug

SEQ ID NO: 1030719 - RNA, 19 nt, Homo sapiens
  misc_RNA (1)...(19): siRNA sense strand
ggucuugguuuggaaauug

SEQ ID NO: 1030720 - RNA, 19 nt, Homo sapiens
  misc_RNA (1)...(19): siRNA sense strand
gucccaguguguagaauua

SEQ ID NO: 1030721 - RNA, 19 nt, Homo sapiens
  misc_RNA (1)...(19): siRNA sense strand
gggacuggcagcacaaaua

SEQ ID NO: 1030722 - RNA, 19 nt, Homo sapiens
  misc_RNA (1)...(19): siRNA sense strand
gaacuggaaccauauuuac

SEQ ID NO: 1030723 - RNA, 19 nt, Homo sapiens
  misc_RNA (1)...(19): siRNA sense strand
caacuucuuucucagugaa

SEQ ID NO: 1030724 - RNA, 19 nt, Homo sapiens
  misc_RNA (1)...(19): siRNA sense strand
uuaauggaaugacagguuu

SEQ ID NO: 1030725 - RNA, 19 nt, Homo sapiens
  misc_RNA (1)...(19): siRNA sense strand
gccgggaccuccaguaaga

SEQ ID NO: 1030726 - RNA, 19 nt, Homo sapiens
  misc_RNA (1)...(19): siRNA sense strand
agacauugauggagaugaa

SEQ ID NO: 1030727 - RNA, 19 nt, Homo sapiens
  misc_RNA (1)...(19): siRNA sense strand
ggaagagaagccugaugua

SEQ ID NO: 1030728 - RNA, 19 nt, Homo sapiens
  misc_RNA (1)...(19): siRNA sense strand
gcagauguacauggaauuu

SEQ ID NO: 1030729 - RNA, 19 nt, Homo sapiens
  misc_RNA (1)...(19): siRNA sense strand
agaaauauguggaucuuac

SEQ ID NO: 1030730 - RNA, 19 nt, Homo sapiens
  misc_RNA (1)...(19): siRNA sense strand
gaugagaggaaugcaauuu

SEQ ID NO: 1030731 - RNA, 19 nt, Homo sapiens
  misc_RNA (1)...(19): siRNA sense strand
agaugaaacugcaaggaaa

SEQ ID NO: 1030732 - RNA, 19 nt, Homo sapiens
  misc_RNA (1)...(19): siRNA sense strand
gaugcccucuugaauauuc

SEQ ID NO: 1030733 - RNA, 19 nt, Homo sapiens
  misc_RNA (1)...(19): siRNA sense strand
cagugaagaugauguuguu

SEQ ID NO: 1030734 - RNA, 19 nt, Homo sapiens
  misc_RNA (1)...(19): siRNA sense strand
gauacuacuucagucauga

SEQ ID NO: 1030735 - RNA, 19 nt, Homo sapiens
  misc_RNA (1)...(19): siRNA sense strand
caaagagaaguauggaauu

SEQ ID NO: 1030736 - RNA, 19 nt, Homo sapiens
  misc_RNA (1)...(19): siRNA sense strand
caaagcgcauagcugguaa

SEQ ID NO: 1030737 - RNA, 19 nt, Homo sapiens
  misc_RNA (1)...(19): siRNA sense strand
ggcaagagauaaguuugaa

SEQ ID NO: 1030738 - RNA, 19 nt, Homo sapiens
  misc_RNA (1)...(19): siRNA sense strand
caaccacugagaccauuua

SEQ ID NO: 1030739 - RNA, 19 nt, Homo sapiens
  misc_RNA (1)...(19): siRNA sense strand
gaaaggaaugauuacaguu

SEQ ID NO: 1030740 - RNA, 19 nt, Homo sapiens
  misc_RNA (1)...(19): siRNA sense strand
gccauaggcugugaaaugu

SEQ ID NO: 1030741 - RNA, 19 nt, Homo sapiens
  misc_RNA (1)...(19): siRNA sense strand
uagauaugaugccuuaaga

SEQ ID NO: 1030742 - RNA, 19 nt, Homo sapiens
  misc_RNA (1)...(19): siRNA sense strand
caacaaauaacggugauau

SEQ ID NO: 1030743 - RNA, 19 nt, Homo sapiens
  misc_RNA (1)...(19): siRNA sense strand
agaacuaaauccauacguu

SEQ ID NO: 1030744 - RNA, 19 nt, Homo sapiens
  misc_RNA (1)...(19): siRNA sense strand
gggcugaagcuguacuuaa

SEQ ID NO: 1030745 - RNA, 19 nt, Homo sapiens
  misc_RNA (1)...(19): siRNA sense strand
cuauucaucugcagaagaa

SEQ ID NO: 1030746 - RNA, 19 nt, Homo sapiens
  misc_RNA (1)...(19): siRNA sense strand
gaaguuauuguaccgcauu

SEQ ID NO: 1030747 - RNA, 19 nt, Homo sapiens
  misc_RNA (1)...(19): siRNA sense strand
uacagauccugacuugaua

SEQ ID NO: 1030748 - RNA, 19 nt, Homo sapiens
  misc_RNA (1)...(19): siRNA sense strand
caaagagaaaggaaugauu

SEQ ID NO: 1030749 - RNA, 19 nt, Homo sapiens
  misc_RNA (1)...(19): siRNA sense strand
gucagaaacugcaaaauuu

SEQ ID NO: 1030750 - RNA, 19 nt, Homo sapiens
  misc_RNA (1)...(19): siRNA sense strand
aggcaaaccugaaugugaa

SEQ ID NO: 1030751 - RNA, 19 nt, Homo sapiens
  misc_RNA (1)...(19): siRNA sense strand
aagagaagccugauguaaa

SEQ ID NO: 1030752 - RNA, 19 nt, Homo sapiens
  misc_RNA (1)...(19): siRNA sense strand
acacagcaaugcagaagau

SEQ ID NO: 1030753 - RNA, 19 nt, Homo sapiens
  misc_RNA (1)...(19): siRNA sense strand
uuacuuagcagaagaccua

SEQ ID NO: 1030754 - RNA, 19 nt, Homo sapiens
  misc_RNA (1)...(19): siRNA sense strand
agaaaggaaugauuacagu

SEQ ID NO: 1030755 - RNA, 19 nt, Homo sapiens
  misc_RNA (1)...(19): siRNA sense strand
ugaaccagcugaccguuuc

SEQ ID NO: 1030756 - RNA, 19 nt, Homo sapiens
  misc_RNA (1)...(19): siRNA sense strand
gucauuugcuccagacauu

SEQ ID NO: 1030757 - RNA, 19 nt, Homo sapiens
  misc_RNA (1)...(19): siRNA sense strand
ccacuuugaucuucuauaa

SEQ ID NO: 1030758 - RNA, 19 nt, Homo sapiens
  misc_RNA (1)...(19): siRNA sense strand
ccagaaggcugcuguggua

SEQ ID NO: 1030759 - RNA, 19 nt, Homo sapiens
  misc_RNA (1)...(19): siRNA sense strand
gaagagagacccugaagug

SEQ ID NO: 1030760 - RNA, 19 nt, Homo sapiens
  misc_RNA (1)...(19): siRNA sense strand
ugaagaagcugagauccua

SEQ ID NO: 1030761 - RNA, 19 nt, Homo sapiens
  misc_RNA (1)...(19): siRNA sense strand
aagagcagaugcacacuua

SEQ ID NO: 1030762 - RNA, 19 nt, Homo sapiens
  misc_RNA (1)...(19): siRNA sense strand
ugagaaugcugccuuuaaa

SEQ ID NO: 1030763 - RNA, 19 nt, Homo sapiens
  misc_RNA (1)...(19): siRNA sense strand
gacagaagguccagaaagu

SEQ ID NO: 1030764 - RNA, 19 nt, Homo sapiens
  misc_RNA (1)...(19): siRNA sense strand
gaaagucucucccauucag

SEQ ID NO: 1030765 - RNA, 19 nt, Homo sapiens
  misc_RNA (1)...(19): siRNA sense strand
caaguucugugaauagcua

SEQ ID NO: 1030766 - RNA, 19 nt, Homo sapiens
  misc_RNA (1)...(19): siRNA sense strand
cagaaagucucucccauuc

SEQ ID NO: 1030767 - RNA, 19 nt, Homo sapiens
  misc_RNA (1)...(19): siRNA sense strand
gcaggagaccacaaucaua

SEQ ID NO: 1030768 - RNA, 19 nt, Homo sapiens
  misc_RNA (1)...(19): siRNA sense strand
gcuagaggaggaaacauua

SEQ ID NO: 1030769 - RNA, 19 nt, Homo sapiens
  misc_RNA (1)...(19): siRNA sense strand
ccacaaucauagcaaguaa

SEQ ID NO: 1030770 - RNA, 19 nt, Homo sapiens
  misc_RNA (1)...(19): siRNA sense strand
cuacaccucuucccagaaa

SEQ ID NO: 1030771 - RNA, 19 nt, Homo sapiens
  misc_RNA (1)...(19): siRNA sense strand
ccacauggacucagacaaa

SEQ ID NO: 1030772 - RNA, 19 nt, Homo sapiens
  misc_RNA (1)...(19): siRNA sense strand
gcagagaggacggaaguuu

SEQ ID NO: 1030773 - RNA, 19 nt, Homo sapiens
  misc_RNA (1)...(19): siRNA sense strand
gaggaaacauuagaagcaa

SEQ ID NO: 1030774 - RNA, 19 nt, Homo sapiens
  misc_RNA (1)...(19): siRNA sense strand
caaagaccaccaagaggua

SEQ ID NO: 1030775 - RNA, 19 nt, Homo sapiens
  misc_RNA (1)...(19): siRNA sense strand
ugacggaacuggagcaucu

SEQ ID NO: 1030776 - RNA, 19 nt, Homo sapiens
  misc_RNA (1)...(19): siRNA sense strand
gguccugacuguucugcua

SEQ ID NO: 1030777 - RNA, 19 nt, Homo sapiens
  misc_RNA (1)...(19): siRNA sense strand
gcagaugccuacaccucuu

SEQ ID NO: 1030778 - RNA, 19 nt, Homo sapiens
  misc_RNA (1)...(19): siRNA sense strand
gcaagagggugaggauaca

SEQ ID NO: 1030779 - RNA, 19 nt, Homo sapiens
  misc_RNA (1)...(19): siRNA sense strand
ggaagucauccacaacaaa

SEQ ID NO: 1030780 - RNA, 19 nt, Homo sapiens
  misc_RNA (1)...(19): siRNA sense strand
ggaggaaacauuagaagca

SEQ ID NO: 1030781 - RNA, 19 nt, Homo sapiens
  misc_RNA (1)...(19): siRNA sense strand
aaacagaagaugagaacaa

SEQ ID NO: 1030782 - RNA, 19 nt, Homo sapiens
  misc_RNA (1)...(19): siRNA sense strand
gaacaggggugccuuuucu

SEQ ID NO: 1030783 - RNA, 19 nt, Homo sapiens
  misc_RNA (1)...(19): siRNA sense strand
gcuauggguuugagaaugg

SEQ ID NO: 1030784 - RNA, 19 nt, Homo sapiens
  misc_RNA (1)...(19): siRNA sense strand
ccaugagacagauuaauaa

SEQ ID NO: 1030785 - RNA, 19 nt, Homo sapiens
  misc_RNA (1)...(19): siRNA sense strand
ggcaucaccucccuucaga

SEQ ID NO: 1030786 - RNA, 19 nt, Homo sapiens
  misc_RNA (1)...(19): siRNA sense strand
gcagauacaggugauaaau

SEQ ID NO: 1030787 - RNA, 19 nt, Homo sapiens
  misc_RNA (1)...(19): siRNA sense strand
gaugagaacaagcagaguu

SEQ ID NO: 1030788 - RNA, 19 nt, Homo sapiens
  misc_RNA (1)...(19): siRNA sense strand
ccagaaagucucucccauu

SEQ ID NO: 1030789 - RNA, 19 nt, Homo sapiens
  misc_RNA (1)...(19): siRNA sense strand
ccagccaccaucauauuua

SEQ ID NO: 1030790 - RNA, 19 nt, Homo sapiens
  misc_RNA (1)...(19): siRNA sense strand
gaagagcagaugcacacuu

SEQ ID NO: 1030791 - RNA, 19 nt, Homo sapiens
  misc_RNA (1)...(19): siRNA sense strand
guauugugaucaugagaau

SEQ ID NO: 1030792 - RNA, 19 nt, Homo sapiens
  misc_RNA (1)...(19): siRNA sense strand
caucaccucccuucagaaa

SEQ ID NO: 1030793 - RNA, 19 nt, Homo sapiens
  misc_RNA (1)...(19): siRNA sense strand
gagcuauggcccugugauu

SEQ ID NO: 1030794 - RNA, 19 nt, Homo sapiens
  misc_RNA (1)...(19): siRNA sense strand
gaaugcugccuuuaaagau

SEQ ID NO: 1030795 - RNA, 19 nt, Homo sapiens
  misc_RNA (1)...(19): siRNA sense strand
ucaugagaaugcugccuuu

SEQ ID NO: 1030796 - RNA, 19 nt, Homo sapiens
  misc_RNA (1)...(19): siRNA sense strand
ggacuuagggaaccucaag

SEQ ID NO: 1030797 - RNA, 19 nt, Homo sapiens
  misc_RNA (1)...(19): siRNA sense strand
gccagugaguagcauagaa

SEQ ID NO: 1030798 - RNA, 19 nt, Homo sapiens
  misc_RNA (1)...(19): siRNA sense strand
ucaaccacauggacucaga

SEQ ID NO: 1030799 - RNA, 19 nt, Homo sapiens
  misc_RNA (1)...(19): siRNA sense strand
gcuccacuuugaucuucua

SEQ ID NO: 1030800 - RNA, 19 nt, Homo sapiens
  misc_RNA (1)...(19): siRNA sense strand
guggcaaguucugugaaua

SEQ ID NO: 1030801 - RNA, 19 nt, Homo sapiens
  misc_RNA (1)...(19): siRNA sense strand
gacaccaugagacagauua

SEQ ID NO: 1030802 - RNA, 19 nt, Homo sapiens
  misc_RNA (1)...(19): siRNA sense strand
gaagucauccacaacaaac

SEQ ID NO: 1030803 - RNA, 19 nt, Homo sapiens
  misc_RNA (1)...(19): siRNA sense strand
aaucagaaaguccagauga

SEQ ID NO: 1030804 - RNA, 19 nt, Homo sapiens
  misc_RNA (1)...(19): siRNA sense strand
ggaaacauuagaagcaagu

SEQ ID NO: 1030805 - RNA, 19 nt, Homo sapiens
  misc_RNA (1)...(19): siRNA sense strand
gagccaccauguugcagau

SEQ ID NO: 1030806 - RNA, 19 nt, Homo sapiens
  misc_RNA (1)...(19): siRNA sense strand
accaugagacagauuaaua

SEQ ID NO: 1030807 - RNA, 19 nt, Homo sapiens
  misc_RNA (1)...(19): siRNA sense strand
cauggacucagacaaauug

SEQ ID NO: 1030808 - RNA, 19 nt, Homo sapiens
  misc_RNA (1)...(19): siRNA sense strand
uagcaaagaccaccaagag

SEQ ID NO: 1030809 - RNA, 19 nt, Homo sapiens
  misc_RNA (1)...(19): siRNA sense strand
agaaugcugccuuuaaaga

SEQ ID NO: 1030810 - RNA, 19 nt, Homo sapiens
  misc_RNA (1)...(19): siRNA sense strand
ggaagcgagugacggaacu

SEQ ID NO: 1030811 - RNA, 19 nt, Homo sapiens
  misc_RNA (1)...(19): siRNA sense strand
caggagaccacaaucauag

SEQ ID NO: 1030812 - RNA, 19 nt, Homo sapiens
  misc_RNA (1)...(19): siRNA sense strand
ugagccagccaccaucaua

SEQ ID NO: 1030813 - RNA, 19 nt, Homo sapiens
  misc_RNA (1)...(19): siRNA sense strand
gugcagauacaggugauaa

SEQ ID NO: 1030814 - RNA, 19 nt, Homo sapiens
  misc_RNA (1)...(19): siRNA sense strand
gccagccaccaucauauuu

SEQ ID NO: 1030815 - RNA, 19 nt, Homo sapiens
  misc_RNA (1)...(19): siRNA sense strand
gagccagccaccaucauau

SEQ ID NO: 1030816 - RNA, 19 nt, Homo sapiens
  misc_RNA (1)...(19): siRNA sense strand
uuagccaauuggaagauaa

SEQ ID NO: 1030817 - RNA, 19 nt, Homo sapiens
  misc_RNA (1)...(19): siRNA sense strand
gaucccagccauucuccaa

SEQ ID NO: 1030818 - RNA, 19 nt, Homo sapiens
  misc_RNA (1)...(19): siRNA sense strand
accaagagguagagacaga

SEQ ID NO: 1030819 - RNA, 19 nt, Homo sapiens
  misc_RNA (1)...(19): siRNA sense strand
gagaaugcugccuuuaaag

SEQ ID NO: 1030820 - RNA, 19 nt, Homo sapiens
  misc_RNA (1)...(19): siRNA sense strand
cacauggacucagacaaau

SEQ ID NO: 1030821 - RNA, 19 nt, Homo sapiens
  misc_RNA (1)...(19): siRNA sense strand
gcgcaggagaccacaauca

SEQ ID NO: 1030822 - RNA, 19 nt, Homo sapiens
  misc_RNA (1)...(19): siRNA sense strand
aaugcugccuuuaaagaug

SEQ ID NO: 1030823 - RNA, 19 nt, Homo sapiens
  misc_RNA (1)...(19): siRNA sense strand
cagaagaugagaacaagca

SEQ ID NO: 1030824 - RNA, 19 nt, Homo sapiens
  misc_RNA (1)...(19): siRNA sense strand
acaaucauagcaaguaaug

SEQ ID NO: 1030825 - RNA, 19 nt, Homo sapiens
  misc_RNA (1)...(19): siRNA sense strand
ucucucccauucagauuga

SEQ ID NO: 1030826 - RNA, 19 nt, Homo sapiens
  misc_RNA (1)...(19): siRNA sense strand
gagacagaagguccagaaa

SEQ ID NO: 1030827 - RNA, 19 nt, Homo sapiens
  misc_RNA (1)...(19): siRNA sense strand
ccacugagccagccaccau

SEQ ID NO: 1030828 - RNA, 19 nt, Homo sapiens
  misc_RNA (1)...(19): siRNA sense strand
gagcagaugcacacuuagg

SEQ ID NO: 1030829 - RNA, 19 nt, Homo sapiens
  misc_RNA (1)...(19): siRNA sense strand
gagcuauggguuugagaau

SEQ ID NO: 1030830 - RNA, 19 nt, Homo sapiens
  misc_RNA (1)...(19): siRNA sense strand
ggaagagagacccugaagu

SEQ ID NO: 1030831 - RNA, 19 nt, Homo sapiens
  misc_RNA (1)...(19): siRNA sense strand
ucucaggaaccaccuacua

SEQ ID NO: 1030832 - RNA, 19 nt, Homo sapiens
  misc_RNA (1)...(19): siRNA sense strand
gcucuguggcccucccuaa

SEQ ID NO: 1030833 - RNA, 19 nt, Homo sapiens
  misc_RNA (1)...(19): siRNA sense strand
ggacaccaugagacagauu

SEQ ID NO: 1030834 - RNA, 19 nt, Homo sapiens
  misc_RNA (1)...(19): siRNA sense strand
ugaguagcauagaagaaca

SEQ ID NO: 1030835 - RNA, 19 nt, Homo sapiens
  misc_RNA (1)...(19): siRNA sense strand
uaaguauugugaucaugag

SEQ ID NO: 1030836 - RNA, 19 nt, Homo sapiens
  misc_RNA (1)...(19): siRNA sense strand
gcuauggcccugugauucu

SEQ ID NO: 1030837 - RNA, 19 nt, Homo sapiens
  misc_RNA (1)...(19): siRNA sense strand
cagccaccaucauauuuac

SEQ ID NO: 1030838 - RNA, 19 nt, Homo sapiens
  misc_RNA (1)...(19): siRNA sense strand
ccgaauuucacaccuggua

SEQ ID NO: 1030839 - RNA, 19 nt, Homo sapiens
  misc_RNA (1)...(19): siRNA sense strand
ccugccggcuccacuuuga

SEQ ID NO: 1030840 - RNA, 19 nt, Homo sapiens
  misc_RNA (1)...(19): siRNA sense strand
caagguaggaagagcagau

SEQ ID NO: 1030841 - RNA, 19 nt, Homo sapiens
  misc_RNA (1)...(19): siRNA sense strand
caagggaaacggaagaaaa

SEQ ID NO: 1030842 - RNA, 19 nt, Homo sapiens
  misc_RNA (1)...(19): siRNA sense strand
aacauuagaagcaagugua

SEQ ID NO: 1030843 - RNA, 19 nt, Homo sapiens
  misc_RNA (1)...(19): siRNA sense strand
ccaccaagagguagagaca

SEQ ID NO: 1030844 - RNA, 19 nt, Homo sapiens
  misc_RNA (1)...(19): siRNA sense strand
uaaaucagaaaguccagau

SEQ ID NO: 1030845 - RNA, 19 nt, Homo sapiens
  misc_RNA (1)...(19): siRNA sense strand
gggaagagagacccugaag

SEQ ID NO: 1030846 - RNA, 19 nt, Homo sapiens
  misc_RNA (1)...(19): siRNA sense strand
caggacaccaugagacaga

SEQ ID NO: 1030847 - RNA, 19 nt, Homo sapiens
  misc_RNA (1)...(19): siRNA sense strand
ggcaagagggugaggauac

SEQ ID NO: 1030848 - RNA, 19 nt, Homo sapiens
  misc_RNA (1)...(19): siRNA sense strand
uaaagaacccuuggaucca

SEQ ID NO: 1030849 - RNA, 19 nt, Homo sapiens
  misc_RNA (1)...(19): siRNA sense strand
gaagaacaggggugccuuu

SEQ ID NO: 1030850 - RNA, 19 nt, Homo sapiens
  misc_RNA (1)...(19): siRNA sense strand
gaggaggaaacauuagaag

SEQ ID NO: 1030851 - RNA, 19 nt, Homo sapiens
  misc_RNA (1)...(19): siRNA sense strand
uagaggaggaaacauuaga

SEQ ID NO: 1030852 - RNA, 19 nt, Homo sapiens
  misc_RNA (1)...(19): siRNA sense strand
ggagaccacaaucauagca

SEQ ID NO: 1030853 - RNA, 19 nt, Homo sapiens
  misc_RNA (1)...(19): siRNA sense strand
gcccugguccugacuguuc

SEQ ID NO: 1030854 - RNA, 19 nt, Homo sapiens
  misc_RNA (1)...(19): siRNA sense strand
caugagaaugcugccuuua

SEQ ID NO: 1030855 - RNA, 19 nt, Homo sapiens
  misc_RNA (1)...(19): siRNA sense strand
cacucugccuguggucuua

SEQ ID NO: 1030856 - RNA, 19 nt, Homo sapiens
  misc_RNA (1)...(19): siRNA sense strand
cagagaggacggaaguuuc

SEQ ID NO: 1030857 - RNA, 19 nt, Homo sapiens
  misc_RNA (1)...(19): siRNA sense strand
caaagaagcuaagcacauu

SEQ ID NO: 1030858 - RNA, 19 nt, Homo sapiens
  misc_RNA (1)...(19): siRNA sense strand
guaaguuggugaucauuga

SEQ ID NO: 1030859 - RNA, 19 nt, Homo sapiens
  misc_RNA (1)...(19): siRNA sense strand
ggaaauccaacucaaagaa

SEQ ID NO: 1030860 - RNA, 19 nt, Homo sapiens
  misc_RNA (1)...(19): siRNA sense strand
gacaauugaugaccuggaa

SEQ ID NO: 1030861 - RNA, 19 nt, Homo sapiens
  misc_RNA (1)...(19): siRNA sense strand
agagguggcucguaaguug

SEQ ID NO: 1030862 - RNA, 19 nt, Homo sapiens
  misc_RNA (1)...(19): siRNA sense strand
gagagagguaugaagguua

SEQ ID NO: 1030863 - RNA, 19 nt, Homo sapiens
  misc_RNA (1)...(19): siRNA sense strand
gguaugaagguuauugaaa

SEQ ID NO: 1030864 - RNA, 19 nt, Homo sapiens
  misc_RNA (1)...(19): siRNA sense strand
cuaagcacauugcagaaga

SEQ ID NO: 1030865 - RNA, 19 nt, Homo sapiens
  misc_RNA (1)...(19): siRNA sense strand
augaagagguggcucguaa

SEQ ID NO: 1030866 - RNA, 19 nt, Homo sapiens
  misc_RNA (1)...(19): siRNA sense strand
gcucguaaguuggugauca

SEQ ID NO: 1030867 - RNA, 19 nt, Homo sapiens
  misc_RNA (1)...(19): siRNA sense strand
ugagagagguaugaagguu

SEQ ID NO: 1030868 - RNA, 19 nt, Homo sapiens
  misc_RNA (1)...(19): siRNA sense strand
gaaauccaacucaaagaag

SEQ ID NO: 1030869 - RNA, 19 nt, Homo sapiens
  misc_RNA (1)...(19): siRNA sense strand
gaugagagugagagaggua

SEQ ID NO: 1030870 - RNA, 19 nt, Homo sapiens
  misc_RNA (1)...(19): siRNA sense strand
gaagagguggcucguaagu

SEQ ID NO: 1030871 - RNA, 19 nt, Homo sapiens
  misc_RNA (1)...(19): siRNA sense strand
agagagguaugaagguuau

SEQ ID NO: 1030872 - RNA, 19 nt, Homo sapiens
  misc_RNA (1)...(19): siRNA sense strand
ccaggaaauccaacucaaa

SEQ ID NO: 1030873 - RNA, 19 nt, Homo sapiens
  misc_RNA (1)...(19): siRNA sense strand
ucaaagaagcuaagcacau

SEQ ID NO: 1030874 - RNA, 19 nt, Homo sapiens
  misc_RNA (1)...(19): siRNA sense strand
gagguaugaagguuauuga

SEQ ID NO: 1030875 - RNA, 19 nt, Homo sapiens
  misc_RNA (1)...(19): siRNA sense strand
gagagugagagagguauga

SEQ ID NO: 1030876 - RNA, 19 nt, Homo sapiens
  misc_RNA (1)...(19): siRNA sense strand
caauugaugaccuggaaga

SEQ ID NO: 1030877 - RNA, 19 nt, Homo sapiens
  misc_RNA (1)...(19): siRNA sense strand
caggaaauccaacucaaag

SEQ ID NO: 1030878 - RNA, 19 nt, Homo sapiens
  misc_RNA (1)...(19): siRNA sense strand
ggaacuccaggaaauccaa

SEQ ID NO: 1030879 - RNA, 19 nt, Homo sapiens
  misc_RNA (1)...(19): siRNA sense strand
uaagcacauugcagaagag

SEQ ID NO: 1030880 - RNA, 19 nt, Homo sapiens
  misc_RNA (1)...(19): siRNA sense strand
uccaggaaauccaacucaa

SEQ ID NO: 1030881 - RNA, 19 nt, Homo sapiens
  misc_RNA (1)...(19): siRNA sense strand
uaaguuggugaucauugaa

SEQ ID NO: 1030882 - RNA, 19 nt, Homo sapiens
  misc_RNA (1)...(19): siRNA sense strand
gcuaagcacauugcagaag

SEQ ID NO: 1030883 - RNA, 19 nt, Homo sapiens
  misc_RNA (1)...(19): siRNA sense strand
caaagaagcuaagcacauu

SEQ ID NO: 1030884 - RNA, 19 nt, Homo sapiens
  misc_RNA (1)...(19): siRNA sense strand
guaaguuggugaucauuga

SEQ ID NO: 1030885 - RNA, 19 nt, Homo sapiens
  misc_RNA (1)...(19): siRNA sense strand
ggaaauccaacucaaagaa

SEQ ID NO: 1030886 - RNA, 19 nt, Homo sapiens
  misc_RNA (1)...(19): siRNA sense strand
gacaauugaugaccuggaa

SEQ ID NO: 1030887 - RNA, 19 nt, Homo sapiens
  misc_RNA (1)...(19): siRNA sense strand
agagguggcucguaaguug

SEQ ID NO: 1030888 - RNA, 19 nt, Homo sapiens
  misc_RNA (1)...(19): siRNA sense strand
gagagagguaugaagguua

SEQ ID NO: 1030889 - RNA, 19 nt, Homo sapiens
  misc_RNA (1)...(19): siRNA sense strand
gguaugaagguuauugaaa

SEQ ID NO: 1030890 - RNA, 19 nt, Homo sapiens
  misc_RNA (1)...(19): siRNA sense strand
cuaagcacauugcagaaga

SEQ ID NO: 1030891 - RNA, 19 nt, Homo sapiens
  misc_RNA (1)...(19): siRNA sense strand
augaagagguggcucguaa

SEQ ID NO: 1030892 - RNA, 19 nt, Homo sapiens
  misc_RNA (1)...(19): siRNA sense strand
gcucguaaguuggugauca

SEQ ID NO: 1030893 - RNA, 19 nt, Homo sapiens
  misc_RNA (1)...(19): siRNA sense strand
gaucauugaaggagacuug

SEQ ID NO: 1030894 - RNA, 19 nt, Homo sapiens
  misc_RNA (1)...(19): siRNA sense strand
ugagagagguaugaagguu

SEQ ID NO: 1030895 - RNA, 19 nt, Homo sapiens
  misc_RNA (1)...(19): siRNA sense strand
gaaauccaacucaaagaag

SEQ ID NO: 1030896 - RNA, 19 nt, Homo sapiens
  misc_RNA (1)...(19): siRNA sense strand
agagagguaugaagguuau

SEQ ID NO: 1030897 - RNA, 19 nt, Homo sapiens
  misc_RNA (1)...(19): siRNA sense strand
gaagagguggcucguaagu

SEQ ID NO: 1030898 - RNA, 19 nt, Homo sapiens
  misc_RNA (1)...(19): siRNA sense strand
gaugagagugagagaggua

SEQ ID NO: 1030899 - RNA, 19 nt, Homo sapiens
  misc_RNA (1)...(19): siRNA sense strand
gcagauaggaaguaugaag

SEQ ID NO: 1030900 - RNA, 19 nt, Homo sapiens
  misc_RNA (1)...(19): siRNA sense strand
cagaagaggcagauaggaa

SEQ ID NO: 1030901 - RNA, 19 nt, Homo sapiens
  misc_RNA (1)...(19): siRNA sense strand
agagacccgugcugaguuu

SEQ ID NO: 1030902 - RNA, 19 nt, Homo sapiens
  misc_RNA (1)...(19): siRNA sense strand
ccaggaaauccaacucaaa

SEQ ID NO: 1030903 - RNA, 19 nt, Homo sapiens
  misc_RNA (1)...(19): siRNA sense strand
gcagagacccgugcugagu

SEQ ID NO: 1030904 - RNA, 19 nt, Homo sapiens
  misc_RNA (1)...(19): siRNA sense strand
ucaaagaagcuaagcacau

SEQ ID NO: 1030905 - RNA, 19 nt, Homo sapiens
  misc_RNA (1)...(19): siRNA sense strand
gagguaugaagguuauuga

SEQ ID NO: 1030906 - RNA, 19 nt, Homo sapiens
  misc_RNA (1)...(19): siRNA sense strand
cagauaggaaguaugaaga

SEQ ID NO: 1030907 - RNA, 19 nt, Homo sapiens
  misc_RNA (1)...(19): siRNA sense strand
gagagugagagagguauga

SEQ ID NO: 1030908 - RNA, 19 nt, Homo sapiens
  misc_RNA (1)...(19): siRNA sense strand
aggcagauaggaaguauga

SEQ ID NO: 1030909 - RNA, 19 nt, Homo sapiens
  misc_RNA (1)...(19): siRNA sense strand
gaagaggcagauaggaagu

SEQ ID NO: 1030910 - RNA, 19 nt, Homo sapiens
  misc_RNA (1)...(19): siRNA sense strand
caauugaugaccuggaaga

SEQ ID NO: 1030911 - RNA, 19 nt, Homo sapiens
  misc_RNA (1)...(19): siRNA sense strand
caggaaauccaacucaaag

SEQ ID NO: 1030912 - RNA, 19 nt, Homo sapiens
  misc_RNA (1)...(19): siRNA sense strand
ggaacuccaggaaauccaa

SEQ ID NO: 1030913 - RNA, 19 nt, Homo sapiens
  misc_RNA (1)...(19): siRNA sense strand
gcagaagaggcagauagga

SEQ ID NO: 1030914 - RNA, 19 nt, Homo sapiens
  misc_RNA (1)...(19): siRNA sense strand
gauucuuacugauaaacuc

SEQ ID NO: 1030915 - RNA, 19 nt, Homo sapiens
  misc_RNA (1)...(19): siRNA sense strand
agaggcagauaggaaguau

SEQ ID NO: 1030916 - RNA, 19 nt, Homo sapiens
  misc_RNA (1)...(19): siRNA sense strand
cagagacccgugcugaguu

SEQ ID NO: 1030917 - RNA, 19 nt, Homo sapiens
  misc_RNA (1)...(19): siRNA sense strand
uaagcacauugcagaagag

SEQ ID NO: 1030918 - RNA, 19 nt, Homo sapiens
  misc_RNA (1)...(19): siRNA sense strand
cauugaaggagacuuggaa

SEQ ID NO: 1030919 - RNA, 19 nt, Homo sapiens
  misc_RNA (1)...(19): siRNA sense strand
uccaggaaauccaacucaa

SEQ ID NO: 1030920 - RNA, 19 nt, Homo sapiens
  misc_RNA (1)...(19): siRNA sense strand
uaaguuggugaucauugaa

SEQ ID NO: 1030921 - RNA, 19 nt, Homo sapiens
  misc_RNA (1)...(19): siRNA sense strand
gcuaagcacauugcagaag

SEQ ID NO: 1030922 - RNA, 19 nt, Homo sapiens
  misc_RNA (1)...(19): siRNA sense strand
agagaucgguagccaagcu

SEQ ID NO: 1030923 - RNA, 19 nt, Homo sapiens
  misc_RNA (1)...(19): siRNA sense strand
uuacugauaaacucaagga

SEQ ID NO: 1030924 - RNA, 19 nt, Homo sapiens
  misc_RNA (1)...(19): siRNA sense strand
gagaauaacugcagaagaa

SEQ ID NO: 1030925 - RNA, 19 nt, Homo sapiens
  misc_RNA (1)...(19): siRNA sense strand
ggagagagaugaagcaauu

SEQ ID NO: 1030926 - RNA, 19 nt, Homo sapiens
  misc_RNA (1)...(19): siRNA sense strand
gaaauccacugaauuaguu

SEQ ID NO: 1030927 - RNA, 19 nt, Homo sapiens
  misc_RNA (1)...(19): siRNA sense strand
gaaauuggcuaaagaagau

SEQ ID NO: 1030928 - RNA, 19 nt, Homo sapiens
  misc_RNA (1)...(19): siRNA sense strand
gggcagagaucaacgaauu

SEQ ID NO: 1030929 - RNA, 19 nt, Homo sapiens
  misc_RNA (1)...(19): siRNA sense strand
agaaaugagugcacuaaua

SEQ ID NO: 1030930 - RNA, 19 nt, Homo sapiens
  misc_RNA (1)...(19): siRNA sense strand
gaaagaaacagaagcuaaa

SEQ ID NO: 1030931 - RNA, 19 nt, Homo sapiens
  misc_RNA (1)...(19): siRNA sense strand
gaauggagcuauaauugug

SEQ ID NO: 1030932 - RNA, 19 nt, Homo sapiens
  misc_RNA (1)...(19): siRNA sense strand
gagcaaauauggaauuaca

SEQ ID NO: 1030933 - RNA, 19 nt, Homo sapiens
  misc_RNA (1)...(19): siRNA sense strand
gaaauaacaugugagaaca

SEQ ID NO: 1030934 - RNA, 19 nt, Homo sapiens
  misc_RNA (1)...(19): siRNA sense strand
ggauagcuauucagaagaa

SEQ ID NO: 1030935 - RNA, 19 nt, Homo sapiens
  misc_RNA (1)...(19): siRNA sense strand
gacaauagcauuucuucua

SEQ ID NO: 1030936 - RNA, 19 nt, Homo sapiens
  misc_RNA (1)...(19): siRNA sense strand
gaaaugagugcacuaauag

SEQ ID NO: 1030937 - RNA, 19 nt, Homo sapiens
  misc_RNA (1)...(19): siRNA sense strand
gaagaauggagcuauaauu

SEQ ID NO: 1030938 - RNA, 19 nt, Homo sapiens
  misc_RNA (1)...(19): siRNA sense strand
gaagaaaugagugcacuaa

SEQ ID NO: 1030939 - RNA, 19 nt, Homo sapiens
  misc_RNA (1)...(19): siRNA sense strand
ggaaaugucucuaaaagug

SEQ ID NO: 1030940 - RNA, 19 nt, Homo sapiens
  misc_RNA (1)...(19): siRNA sense strand
ucagaagaauggagcuaua

SEQ ID NO: 1030941 - RNA, 19 nt, Homo sapiens
  misc_RNA (1)...(19): siRNA sense strand
gcgagcaaauauggaauua

SEQ ID NO: 1030942 - RNA, 19 nt, Homo sapiens
  misc_RNA (1)...(19): siRNA sense strand
cagcagcucugguugaaga

SEQ ID NO: 1030943 - RNA, 19 nt, Homo sapiens
  misc_RNA (1)...(19): siRNA sense strand
gcaaaguuguuaucuaugc

SEQ ID NO: 1030944 - RNA, 19 nt, Homo sapiens
  misc_RNA (1)...(19): siRNA sense strand
gaaccagacuucagcaaac

SEQ ID NO: 1030945 - RNA, 19 nt, Homo sapiens
  misc_RNA (1)...(19): siRNA sense strand
gaagauaaagaacagagaa

SEQ ID NO: 1030946 - RNA, 19 nt, Homo sapiens
  misc_RNA (1)...(19): siRNA sense strand
ugacagagcgagcaaauau

SEQ ID NO: 1030947 - RNA, 19 nt, Homo sapiens
  misc_RNA (1)...(19): siRNA sense strand
gaaggaacgugaugaagcu

SEQ ID NO: 1030948 - RNA, 19 nt, Homo sapiens
  misc_RNA (1)...(19): siRNA sense strand
ggaauuacugaacagaaua

SEQ ID NO: 1030949 - RNA, 19 nt, Homo sapiens
  misc_RNA (1)...(19): siRNA sense strand
ggaacuggcuacucaacug

SEQ ID NO: 1030950 - RNA, 19 nt, Homo sapiens
  misc_RNA (1)...(19): siRNA sense strand
gaugagcaacugacuauga

SEQ ID NO: 1030951 - RNA, 19 nt, Homo sapiens
  misc_RNA (1)...(19): siRNA sense strand
ucggaaauccacugaauua

SEQ ID NO: 1030952 - RNA, 19 nt, Homo sapiens
  misc_RNA (1)...(19): siRNA sense strand
gcagaaauuggcuaaagaa

SEQ ID NO: 1030953 - RNA, 19 nt, Homo sapiens
  misc_RNA (1)...(19): siRNA sense strand
gcaaacaacaugagacauc

SEQ ID NO: 1030954 - RNA, 19 nt, Homo sapiens
  misc_RNA (1)...(19): siRNA sense strand
ccacaguuaucuugaacaa

SEQ ID NO: 1030955 - RNA, 19 nt, Homo sapiens
  misc_RNA (1)...(19): siRNA sense strand
gacaugacauuacaggaau

SEQ ID NO: 1030956 - RNA, 19 nt, Homo sapiens
  misc_RNA (1)...(19): siRNA sense strand
guacauaugaagaagcuuu

SEQ ID NO: 1030957 - RNA, 19 nt, Homo sapiens
  misc_RNA (1)...(19): siRNA sense strand
caucggaaauccacugaau

SEQ ID NO: 1030958 - RNA, 19 nt, Homo sapiens
  misc_RNA (1)...(19): siRNA sense strand
aggcaaaguuguuaucuau

SEQ ID NO: 1030959 - RNA, 19 nt, Homo sapiens
  misc_RNA (1)...(19): siRNA sense strand
ugaugaagcuguuaugucu

SEQ ID NO: 1030960 - RNA, 19 nt, Homo sapiens
  misc_RNA (1)...(19): siRNA sense strand
ggaaauccacugaauuagu

SEQ ID NO: 1030961 - RNA, 19 nt, Homo sapiens
  misc_RNA (1)...(19): siRNA sense strand
gacagcagcucugguugaa

SEQ ID NO: 1030962 - RNA, 19 nt, Homo sapiens
  misc_RNA (1)...(19): siRNA sense strand
gagcaacugacuaugaauu

SEQ ID NO: 1030963 - RNA, 19 nt, Homo sapiens
  misc_RNA (1)...(19): siRNA sense strand
uggaaaggcugguggaugu

SEQ ID NO: 1030964 - RNA, 19 nt, Homo sapiens
  misc_RNA (1)...(19): siRNA sense strand
gaucaucaguucuuaucca

SEQ ID NO: 1030965 - RNA, 19 nt, Homo sapiens
  misc_RNA (1)...(19): siRNA sense strand
gcagaaggaacgugaugaa

SEQ ID NO: 1030966 - RNA, 19 nt, Homo sapiens
  misc_RNA (1)...(19): siRNA sense strand
gagccaagcauauggaaau

SEQ ID NO: 1030967 - RNA, 19 nt, Homo sapiens
  misc_RNA (1)...(19): siRNA sense strand
ggaacgugaugaagcuguu

SEQ ID NO: 1030968 - RNA, 19 nt, Homo sapiens
  misc_RNA (1)...(19): siRNA sense strand
gaauuacaacuucaacaug

SEQ ID NO: 1030969 - RNA, 19 nt, Homo sapiens
  misc_RNA (1)...(19): siRNA sense strand
ggaauuacaacuucaacau

SEQ ID NO: 1030970 - RNA, 19 nt, Homo sapiens
  misc_RNA (1)...(19): siRNA sense strand
gaaacuacggggauaaaua

SEQ ID NO: 1030971 - RNA, 19 nt, Homo sapiens
  misc_RNA (1)...(19): siRNA sense strand
acacagggauagcuauuca

SEQ ID NO: 1030972 - RNA, 19 nt, Homo sapiens
  misc_RNA (1)...(19): siRNA sense strand
gaugcugccuugucuaagu

SEQ ID NO: 1030973 - RNA, 19 nt, Homo sapiens
  misc_RNA (1)...(19): siRNA sense strand
caucaguucuuauccagau

SEQ ID NO: 1030974 - RNA, 19 nt, Homo sapiens
  misc_RNA (1)...(19): siRNA sense strand
gcaacaagccagagaaacu

SEQ ID NO: 1030975 - RNA, 19 nt, Homo sapiens
  misc_RNA (1)...(19): siRNA sense strand
ucaagaacgugcucugaag

SEQ ID NO: 1030976 - RNA, 19 nt, Homo sapiens
  misc_RNA (1)...(19): siRNA sense strand
ugagugcacuaauagaaga

SEQ ID NO: 1030977 - RNA, 19 nt, Homo sapiens
  misc_RNA (1)...(19): siRNA sense strand
agaaagaaacagaagcuaa

SEQ ID NO: 1030978 - RNA, 19 nt, Homo sapiens
  misc_RNA (1)...(19): siRNA sense strand
cagcagaaauuggcuaaag

SEQ ID NO: 1030979 - RNA, 19 nt, Homo sapiens
  misc_RNA (1)...(19): siRNA sense strand
guucuuauccagaugauga

SEQ ID NO: 1030980 - RNA, 19 nt, Homo sapiens
  misc_RNA (1)...(19): siRNA sense strand
ugaagagaaugacaugaca

SEQ ID NO: 1030981 - RNA, 19 nt, Homo sapiens
  misc_RNA (1)...(19): siRNA sense strand
gagcaggagcuucaucaug

SEQ ID NO: 1030982 - RNA, 19 nt, Homo sapiens
  misc_RNA (1)...(19): siRNA sense strand
uuacaggaauuacugaaca

SEQ ID NO: 1030983 - RNA, 19 nt, Homo sapiens
  misc_RNA (1)...(19): siRNA sense strand
ugacaugacauuacaggaa

SEQ ID NO: 1030984 - RNA, 19 nt, Homo sapiens
  misc_RNA (1)...(19): siRNA sense strand
gaacgugaugaagcuguua

SEQ ID NO: 1030985 - RNA, 19 nt, Homo sapiens
  misc_RNA (1)...(19): siRNA sense strand
gaacuggucaaaagacaua

SEQ ID NO: 1030986 - RNA, 19 nt, Homo sapiens
  misc_RNA (1)...(19): siRNA sense strand
gggaugcugccuugucuaa

SEQ ID NO: 1030987 - RNA, 19 nt, Homo sapiens
  misc_RNA (1)...(19): siRNA sense strand
gaauaacugcagaagaaau

SEQ ID NO: 1030988 - RNA, 19 nt, Homo sapiens
  misc_RNA (1)...(19): siRNA sense strand
aagaauggagcuauaauug

SEQ ID NO: 1030989 - RNA, 19 nt, Homo sapiens
  misc_RNA (1)...(19): siRNA sense strand
gcagacacagggauagcua

SEQ ID NO: 1030990 - RNA, 19 nt, Homo sapiens
  misc_RNA (1)...(19): siRNA sense strand
uauuaacccugaagagaau

SEQ ID NO: 1030991 - RNA, 19 nt, Homo sapiens
  misc_RNA (1)...(19): siRNA sense strand
ccaagcauauggaaauguc

SEQ ID NO: 1030992 - RNA, 19 nt, Homo sapiens
  misc_RNA (1)...(19): siRNA sense strand
gaacuccaagagaaagaaa

SEQ ID NO: 1030993 - RNA, 19 nt, Homo sapiens
  misc_RNA (1)...(19): siRNA sense strand
cagaugagcaacugacuau

SEQ ID NO: 1030994 - RNA, 19 nt, Homo sapiens
  misc_RNA (1)...(19): siRNA sense strand
gcaaauauggaauuacaac

SEQ ID NO: 1030995 - RNA, 19 nt, Homo sapiens
  misc_RNA (1)...(19): siRNA sense strand
caaacaacaugagacaucu

SEQ ID NO: 1030996 - RNA, 19 nt, Homo sapiens
  misc_RNA (1)...(19): siRNA sense strand
gcaggagcuucaucaugug

SEQ ID NO: 1030997 - RNA, 19 nt, Homo sapiens
  misc_RNA (1)...(19): siRNA sense strand
gaacagaauaaacaaugca

SEQ ID NO: 1030998 - RNA, 19 nt, Homo sapiens
  misc_RNA (1)...(19): siRNA sense strand
gauaaagagaagacaauag

SEQ ID NO: 1030999 - RNA, 19 nt, Homo sapiens
  misc_RNA (1)...(19): siRNA sense strand
aaaguacgcagccagauga

SEQ ID NO: 1031000 - RNA, 19 nt, Homo sapiens
  misc_RNA (1)...(19): siRNA sense strand
aaagacagcagcucugguu

SEQ ID NO: 1031001 - RNA, 19 nt, Homo sapiens
  misc_RNA (1)...(19): siRNA sense strand
gaacagagaaaacuaaagu

SEQ ID NO: 1031002 - RNA, 19 nt, Homo sapiens
  misc_RNA (1)...(19): siRNA sense strand
gagaagacaauagcauuuc

SEQ ID NO: 1031003 - RNA, 19 nt, Homo sapiens
  misc_RNA (1)...(19): siRNA sense strand
agcaggagcuucaucaugu

SEQ ID NO: 1031004 - RNA, 19 nt, Homo sapiens
  misc_RNA (1)...(19): siRNA sense strand
aauaaacaaugcagacaca

SEQ ID NO: 1031005 - RNA, 19 nt, Homo sapiens
  misc_RNA (1)...(19): siRNA sense strand
ugaaauaacaugugagaac

SEQ ID NO: 1031006 - RNA, 19 nt, Homo sapiens
  misc_RNA (1)...(19): siRNA sense strand
gcaacugacuaugaauucu

SEQ ID NO: 1031007 - RNA, 19 nt, Homo sapiens
  misc_RNA (1)...(19): siRNA sense strand
cauauggaaaugucucuaa

SEQ ID NO: 1031008 - RNA, 19 nt, Homo sapiens
  misc_RNA (1)...(19): siRNA sense strand
ggcuaaagaagauaaagaa

SEQ ID NO: 1031009 - RNA, 19 nt, Homo sapiens
  misc_RNA (1)...(19): siRNA sense strand
aagaaaaucugaaggauca

SEQ ID NO: 1031010 - RNA, 19 nt, Homo sapiens
  misc_RNA (1)...(19): siRNA sense strand
cagaagaauggagcuauaa

SEQ ID NO: 1031011 - RNA, 19 nt, Homo sapiens
  misc_RNA (1)...(19): siRNA sense strand
agaaauuggcuaaagaaga

SEQ ID NO: 1031012 - RNA, 19 nt, Homo sapiens
  misc_RNA (1)...(19): siRNA sense strand
agacucagauaaagagaag

SEQ ID NO: 1031013 - RNA, 19 nt, Homo sapiens
  misc_RNA (1)...(19): siRNA sense strand
cagagaggccucccaagug

SEQ ID NO: 1031014 - RNA, 19 nt, Homo sapiens
  misc_RNA (1)...(19): siRNA sense strand
ggagcuauaauuguggaua

SEQ ID NO: 1031015 - RNA, 19 nt, Homo sapiens
  misc_RNA (1)...(19): siRNA sense strand
agggauagcuauucagaag

SEQ ID NO: 1031016 - RNA, 19 nt, Homo sapiens
  misc_RNA (1)...(19): siRNA sense strand
agagaagacaauagcauuu

SEQ ID NO: 1031017 - RNA, 19 nt, Homo sapiens
  misc_RNA (1)...(19): siRNA sense strand
ucucagaacaagcaauaaa

SEQ ID NO: 1031018 - RNA, 19 nt, Homo sapiens
  misc_RNA (1)...(19): siRNA sense strand
ccagagaggccucccaagu

SEQ ID NO: 1031019 - RNA, 19 nt, Homo sapiens
  misc_RNA (1)...(19): siRNA sense strand
aaggcaaaguuguuaucua

SEQ ID NO: 1031020 - RNA, 19 nt, Homo sapiens
  misc_RNA (1)...(19): siRNA sense strand
gaaucuacaagaccaagga

SEQ ID NO: 1031021 - RNA, 19 nt, Homo sapiens
  misc_RNA (1)...(19): siRNA sense strand
caaugcagacacagggaua

SEQ ID NO: 1031022 - RNA, 19 nt, Homo sapiens
  misc_RNA (1)...(19): siRNA sense strand
aggaauuacugaacagaau

SEQ ID NO: 1031023 - RNA, 19 nt, Homo sapiens
  misc_RNA (1)...(19): siRNA sense strand
gagaaagaaacagaagcua

SEQ ID NO: 1031024 - RNA, 19 nt, Homo sapiens
  misc_RNA (1)...(19): siRNA sense strand
gcaagaucgucaacuauua

SEQ ID NO: 1031025 - RNA, 19 nt, Homo sapiens
  misc_RNA (1)...(19): siRNA sense strand
ggaagcagaucagcaaaua

SEQ ID NO: 1031026 - RNA, 19 nt, Homo sapiens
  misc_RNA (1)...(19): siRNA sense strand
uaacgaaggugcagcagua

SEQ ID NO: 1031027 - RNA, 19 nt, Homo sapiens
  misc_RNA (1)...(19): siRNA sense strand
aagcgaagauugcacauua

SEQ ID NO: 1031028 - RNA, 19 nt, Homo sapiens
  misc_RNA (1)...(19): siRNA sense strand
cagaacaacuugaagauau

SEQ ID NO: 1031029 - RNA, 19 nt, Homo sapiens
  misc_RNA (1)...(19): siRNA sense strand
ucagcuaccuuuagaguuu

SEQ ID NO: 1031030 - RNA, 19 nt, Homo sapiens
  misc_RNA (1)...(19): siRNA sense strand
gaagaccucggaagagaua

SEQ ID NO: 1031031 - RNA, 19 nt, Homo sapiens
  misc_RNA (1)...(19): siRNA sense strand
gaagccagcccuuucagua

SEQ ID NO: 1031032 - RNA, 19 nt, Homo sapiens
  misc_RNA (1)...(19): siRNA sense strand
ggaagaagaccucggaaga

SEQ ID NO: 1031033 - RNA, 19 nt, Homo sapiens
  misc_RNA (1)...(19): siRNA sense strand
gcacagaacaacuugaaga

SEQ ID NO: 1031034 - RNA, 19 nt, Homo sapiens
  misc_RNA (1)...(19): siRNA sense strand
uaaccagacuccaaaccua

SEQ ID NO: 1031035 - RNA, 19 nt, Homo sapiens
  misc_RNA (1)...(19): siRNA sense strand
gaagauugcacauuaguuc

SEQ ID NO: 1031036 - RNA, 19 nt, Homo sapiens
  misc_RNA (1)...(19): siRNA sense strand
cgcaugagaugaagcauaa

SEQ ID NO: 1031037 - RNA, 19 nt, Homo sapiens
  misc_RNA (1)...(19): siRNA sense strand
gcacauuaguucuccacaa

SEQ ID NO: 1031038 - RNA, 19 nt, Homo sapiens
  misc_RNA (1)...(19): siRNA sense strand
cuaugugccuuccuaauuu

SEQ ID NO: 1031039 - RNA, 19 nt, Homo sapiens
  misc_RNA (1)...(19): siRNA sense strand
ggacugcuccaucaugauu

SEQ ID NO: 1031040 - RNA, 19 nt, Homo sapiens
  misc_RNA (1)...(19): siRNA sense strand
guguagagauuaagccaaa

SEQ ID NO: 1031041 - RNA, 19 nt, Homo sapiens
  misc_RNA (1)...(19): siRNA sense strand
acaaauagaugggccuuau

SEQ ID NO: 1031042 - RNA, 19 nt, Homo sapiens
  misc_RNA (1)...(19): siRNA sense strand
gaagauggacgagaaugaa

SEQ ID NO: 1031043 - RNA, 19 nt, Homo sapiens
  misc_RNA (1)...(19): siRNA sense strand
gcuaugugccuuccuaauu

SEQ ID NO: 1031044 - RNA, 19 nt, Homo sapiens
  misc_RNA (1)...(19): siRNA sense strand
gaaguuuccuccaaauagg

SEQ ID NO: 1031045 - RNA, 19 nt, Homo sapiens
  misc_RNA (1)...(19): siRNA sense strand
gaugccagcucugaucaaa

SEQ ID NO: 1031046 - RNA, 19 nt, Homo sapiens
  misc_RNA (1)...(19): siRNA sense strand
aaacagagaaugcacuuug

SEQ ID NO: 1031047 - RNA, 19 nt, Homo sapiens
  misc_RNA (1)...(19): siRNA sense strand
gaaugcacuuugccuugaa

SEQ ID NO: 1031048 - RNA, 19 nt, Homo sapiens
  misc_RNA (1)...(19): siRNA sense strand
gccaaggacugcuccauca

SEQ ID NO: 1031049 - RNA, 19 nt, Homo sapiens
  misc_RNA (1)...(19): siRNA sense strand
uaugugccuuccuaauuua

SEQ ID NO: 1031050 - RNA, 19 nt, Homo sapiens
  misc_RNA (1)...(19): siRNA sense strand
ggaagauggacgagaauga

SEQ ID NO: 1031051 - RNA, 19 nt, Homo sapiens
  misc_RNA (1)...(19): siRNA sense strand
cggaagagauauuucaaca

SEQ ID NO: 1031052 - RNA, 19 nt, Homo sapiens
  misc_RNA (1)...(19): siRNA sense strand
gaaggccucuacccucugu

SEQ ID NO: 1031053 - RNA, 19 nt, Homo sapiens
  misc_RNA (1)...(19): siRNA sense strand
acaaggaccuggauacucu

SEQ ID NO: 1031054 - RNA, 19 nt, Homo sapiens
  misc_RNA (1)...(19): siRNA sense strand
uaagaauggugagcugauu

SEQ ID NO: 1031055 - RNA, 19 nt, Homo sapiens
  misc_RNA (1)...(19): siRNA sense strand
uagaugggccuuaugauga

SEQ ID NO: 1031056 - RNA, 19 nt, Homo sapiens
  misc_RNA (1)...(19): siRNA sense strand
aagaagaccucggaagaga

SEQ ID NO: 1031057 - RNA, 19 nt, Homo sapiens
  misc_RNA (1)...(19): siRNA sense strand
gaucgucaacuauuauuca

SEQ ID NO: 1031058 - RNA, 19 nt, Homo sapiens
  misc_RNA (1)...(19): siRNA sense strand
uggauacucucagugguua

SEQ ID NO: 1031059 - RNA, 19 nt, Homo sapiens
  misc_RNA (1)...(19): siRNA sense strand
cauaaggucugucgauacu

SEQ ID NO: 1031060 - RNA, 19 nt, Homo sapiens
  misc_RNA (1)...(19): siRNA sense strand
ggaccuggauacucucagu

SEQ ID NO: 1031061 - RNA, 19 nt, Homo sapiens
  misc_RNA (1)...(19): siRNA sense strand
ggcaagaucgucaacuauu

SEQ ID NO: 1031062 - RNA, 19 nt, Homo sapiens
  misc_RNA (1)...(19): siRNA sense strand
caagaucgucaacuauuau

SEQ ID NO: 1031063 - RNA, 19 nt, Homo sapiens
  misc_RNA (1)...(19): siRNA sense strand
gauucuguguguagagauu

SEQ ID NO: 1031064 - RNA, 19 nt, Homo sapiens
  misc_RNA (1)...(19): siRNA sense strand
cgucaacuauuauucaaag

SEQ ID NO: 1031065 - RNA, 19 nt, Homo sapiens
  misc_RNA (1)...(19): siRNA sense strand
aaauguggguuuauuccuu

SEQ ID NO: 1031066 - RNA, 19 nt, Homo sapiens
  misc_RNA (1)...(19): siRNA sense strand
gaagaagaccucggaagag

SEQ ID NO: 1031067 - RNA, 19 nt, Homo sapiens
  misc_RNA (1)...(19): siRNA sense strand
aaauagaugggccuuauga

SEQ ID NO: 1031068 - RNA, 19 nt, Homo sapiens
  misc_RNA (1)...(19): siRNA sense strand
ggacaucgaaggccucuac

SEQ ID NO: 1031069 - RNA, 19 nt, Homo sapiens
  misc_RNA (1)...(19): siRNA sense strand
agaauggugagcugauuua

SEQ ID NO: 1031070 - RNA, 19 nt, Homo sapiens
  misc_RNA (1)...(19): siRNA sense strand
agaaugcacuuugccuuga

SEQ ID NO: 1031071 - RNA, 19 nt, Homo sapiens
  misc_RNA (1)...(19): siRNA sense strand
ggaaacaaacagagaaugc

SEQ ID NO: 1031072 - RNA, 19 nt, Homo sapiens
  misc_RNA (1)...(19): siRNA sense strand
gcagaucagcaaauacugu

SEQ ID NO: 1031073 - RNA, 19 nt, Homo sapiens
  misc_RNA (1)...(19): siRNA sense strand
ucaaggaaagcgaagauug

SEQ ID NO: 1031074 - RNA, 19 nt, Homo sapiens
  misc_RNA (1)...(19): siRNA sense strand
caaagacaacgccgugaug

SEQ ID NO: 1031075 - RNA, 19 nt, Homo sapiens
  misc_RNA (1)...(19): siRNA sense strand
aauguggguuuauuccuuu

SEQ ID NO: 1031076 - RNA, 19 nt, Homo sapiens
  misc_RNA (1)...(19): siRNA sense strand
gccuuaugaugaagcauuu

SEQ ID NO: 1031077 - RNA, 19 nt, Homo sapiens
  misc_RNA (1)...(19): siRNA sense strand
cauaguggacuuugggaaa

SEQ ID NO: 1031078 - RNA, 19 nt, Homo sapiens
  misc_RNA (1)...(19): siRNA sense strand
gaaacaaacagagaaugca

SEQ ID NO: 1031079 - RNA, 19 nt, Homo sapiens
  misc_RNA (1)...(19): siRNA sense strand
cacauuaguucuccacaag

SEQ ID NO: 1031080 - RNA, 19 nt, Homo sapiens
  misc_RNA (1)...(19): siRNA sense strand
aaggacugcuccaucauga

SEQ ID NO: 1031081 - RNA, 19 nt, Homo sapiens
  misc_RNA (1)...(19): siRNA sense strand
agaugggccuuaugaugaa

SEQ ID NO: 1031082 - RNA, 19 nt, Homo sapiens
  misc_RNA (1)...(19): siRNA sense strand
gaccagagucucgcuguga

SEQ ID NO: 1031083 - RNA, 19 nt, Homo sapiens
  misc_RNA (1)...(19): siRNA sense strand
ugaaguuuccuccaaauag

SEQ ID NO: 1031084 - RNA, 19 nt, Homo sapiens
  misc_RNA (1)...(19): siRNA sense strand
gugcugcgguuucugaagu

SEQ ID NO: 1031085 - RNA, 19 nt, Homo sapiens
  misc_RNA (1)...(19): siRNA sense strand
gaugaagcauaaggucugu

SEQ ID NO: 1031086 - RNA, 19 nt, Homo sapiens
  misc_RNA (1)...(19): siRNA sense strand
ugucugugcuggaccuuga

SEQ ID NO: 1031087 - RNA, 19 nt, Homo sapiens
  misc_RNA (1)...(19): siRNA sense strand
ucaucgagguccagguuug

SEQ ID NO: 1031088 - RNA, 19 nt, Homo sapiens
  misc_RNA (1)...(19): siRNA sense strand
gaucucuacucaggaaaca

SEQ ID NO: 1031089 - RNA, 19 nt, Homo sapiens
  misc_RNA (1)...(19): siRNA sense strand
gcacuuugccuugaagagu

SEQ ID NO: 1031090 - RNA, 19 nt, Homo sapiens
  misc_RNA (1)...(19): siRNA sense strand
acggcaagaucgucaacua

SEQ ID NO: 1031091 - RNA, 19 nt, Homo sapiens
  misc_RNA (1)...(19): siRNA sense strand
caucaugauugcacugucu

SEQ ID NO: 1031092 - RNA, 19 nt, Homo sapiens
  misc_RNA (1)...(19): siRNA sense strand
gcagaacauaguggacuuu

SEQ ID NO: 1031093 - RNA, 19 nt, Homo sapiens
  misc_RNA (1)...(19): siRNA sense strand
agcgauaccuggaagaguu

SEQ ID NO: 1031094 - RNA, 19 nt, Homo sapiens
  misc_RNA (1)...(19): siRNA sense strand
acagaacaacuugaagaua

SEQ ID NO: 1031095 - RNA, 19 nt, Homo sapiens
  misc_RNA (1)...(19): siRNA sense strand
uaauuuaaccagacuccaa

SEQ ID NO: 1031096 - RNA, 19 nt, Homo sapiens
  misc_RNA (1)...(19): siRNA sense strand
caaggacugcuccaucaug

SEQ ID NO: 1031097 - RNA, 19 nt, Homo sapiens
  misc_RNA (1)...(19): siRNA sense strand
acaguggccuucgcgcuaa

SEQ ID NO: 1031098 - RNA, 19 nt, Homo sapiens
  misc_RNA (1)...(19): siRNA sense strand
agcauaaggucugucgaua

SEQ ID NO: 1031099 - RNA, 19 nt, Homo sapiens
  misc_RNA (1)...(19): siRNA sense strand
cgacucgguucaaggaaag

SEQ ID NO: 1031100 - RNA, 19 nt, Homo sapiens
  misc_RNA (1)...(19): siRNA sense strand
gcauaaggucugucgauac

SEQ ID NO: 1031101 - RNA, 19 nt, Homo sapiens
  misc_RNA (1)...(19): siRNA sense strand
gauuuacggcugcaaagau

SEQ ID NO: 1031102 - RNA, 19 nt, Homo sapiens
  misc_RNA (1)...(19): siRNA sense strand
cacuuugccuugaagaguu

SEQ ID NO: 1031103 - RNA, 19 nt, Homo sapiens
  misc_RNA (1)...(19): siRNA sense strand
cuugaucucuacucaggaa

SEQ ID NO: 1031104 - RNA, 19 nt, Homo sapiens
  misc_RNA (1)...(19): siRNA sense strand
ccacggagagggcaauaag

SEQ ID NO: 1031105 - RNA, 19 nt, Homo sapiens
  misc_RNA (1)...(19): siRNA sense strand
ucgacucgguucaaggaaa

SEQ ID NO: 1031106 - RNA, 19 nt, Homo sapiens
  misc_RNA (1)...(19): siRNA sense strand
ggucguucagcuaccuuua

SEQ ID NO: 1031107 - RNA, 19 nt, Homo sapiens
  misc_RNA (1)...(19): siRNA sense strand
ucaggaaacaaacagagaa

SEQ ID NO: 1031108 - RNA, 19 nt, Homo sapiens
  misc_RNA (1)...(19): siRNA sense strand
ggaggcacagaacaacuug

SEQ ID NO: 1031109 - RNA, 19 nt, Homo sapiens
  misc_RNA (1)...(19): siRNA sense strand
caacaccugcagaacauag

SEQ ID NO: 1031110 - RNA, 19 nt, Homo sapiens
  misc_RNA (1)...(19): siRNA sense strand
caaggaaagcgaagauugc

SEQ ID NO: 1031111 - RNA, 19 nt, Homo sapiens
  misc_RNA (1)...(19): siRNA sense strand
uaaacuggacggcaagauc

SEQ ID NO: 1031112 - RNA, 19 nt, Homo sapiens
  misc_RNA (1)...(19): siRNA sense strand
gaccucggaagagauauuu

SEQ ID NO: 1031113 - RNA, 19 nt, Homo sapiens
  misc_RNA (1)...(19): siRNA sense strand
caaauagaugggccuuaug

SEQ ID NO: 1031114 - RNA, 19 nt, Homo sapiens
  misc_RNA (1)...(19): siRNA sense strand
gcgauaccuggaagaguuu

SEQ ID NO: 1031115 - RNA, 19 nt, Homo sapiens
  misc_RNA (1)...(19): siRNA sense strand
uuucugaaguuuccuccaa

SEQ ID NO: 1031116 - RNA, 19 nt, Homo sapiens
  misc_RNA (1)...(19): siRNA sense strand
ucucagugguuacgcuaug

SEQ ID NO: 1031117 - RNA, 19 nt, Homo sapiens
  misc_RNA (1)...(19): siRNA sense strand
gccaaaauguggguuuauu

SEQ ID NO: 1031118 - RNA, 19 nt, Homo sapiens
  misc_RNA (1)...(19): siRNA sense strand
cauuaguucuccacaaggu

SEQ ID NO: 1031119 - RNA, 19 nt, Homo sapiens
  misc_RNA (1)...(19): siRNA sense strand
ggccuuaugaugaagcauu

SEQ ID NO: 1031120 - RNA, 19 nt, Homo sapiens
  misc_RNA (1)...(19): siRNA sense strand
ugccagcucugaucaaagg

SEQ ID NO: 1031121 - RNA, 19 nt, Homo sapiens
  misc_RNA (1)...(19): siRNA sense strand
cgaagauugcacauuaguu

SEQ ID NO: 1031122 - RNA, 19 nt, Homo sapiens
  misc_RNA (1)...(19): siRNA sense strand
gcgaagauugcacauuagu

SEQ ID NO: 1031123 - RNA, 19 nt, Homo sapiens
  misc_RNA (1)...(19): siRNA sense strand
gaugucgacucgguucaag

SEQ ID NO: 1031124 - RNA, 19 nt, Homo sapiens
  misc_RNA (1)...(19): siRNA sense strand
ucaauacccugcagaccaa

SEQ ID NO: 1031125 - RNA, 19 nt, Homo sapiens
  misc_RNA (1)...(19): siRNA sense strand
guccugagcucuucaccaa

SEQ ID NO: 1031126 - RNA, 19 nt, Homo sapiens
  misc_RNA (1)...(19): siRNA sense strand
gaauguauccuccgaagcu

SEQ ID NO: 1031127 - RNA, 19 nt, Homo sapiens
  misc_RNA (1)...(19): siRNA sense strand
uggaagccauggaacugua

SEQ ID NO: 1031128 - RNA, 19 nt, Homo sapiens
  misc_RNA (1)...(19): siRNA sense strand
gaacaucauccacgucacu

SEQ ID NO: 1031129 - RNA, 19 nt, Homo sapiens
  misc_RNA (1)...(19): siRNA sense strand
gccgugcgcaugcucaaua

SEQ ID NO: 1031130 - RNA, 19 nt, Homo sapiens
  misc_RNA (1)...(19): siRNA sense strand
gagcauggaguaccaggau

SEQ ID NO: 1031131 - RNA, 19 nt, Homo sapiens
  misc_RNA (1)...(19): siRNA sense strand
agacgggauucuuuagguu

SEQ ID NO: 1031132 - RNA, 19 nt, Homo sapiens
  misc_RNA (1)...(19): siRNA sense strand
ccugagcucuucaccaagu

SEQ ID NO: 1031133 - RNA, 19 nt, Homo sapiens
  misc_RNA (1)...(19): siRNA sense strand
ccgaagcuauggccugaag

SEQ ID NO: 1031134 - RNA, 19 nt, Homo sapiens
  misc_RNA (1)...(19): siRNA sense strand
gaagcuauggccugaagac

SEQ ID NO: 1031135 - RNA, 19 nt, Homo sapiens
  misc_RNA (1)...(19): siRNA sense strand
ggacuuggaccggcugaac

SEQ ID NO: 1031136 - RNA, 19 nt, Homo sapiens
  misc_RNA (1)...(19): siRNA sense strand
gcucuucaccaaguacuuc

SEQ ID NO: 1031137 - RNA, 19 nt, Homo sapiens
  misc_RNA (1)...(19): siRNA sense strand
gaaccuucuuugcccacuu

SEQ ID NO: 1031138 - RNA, 19 nt, Homo sapiens
  misc_RNA (1)...(19): siRNA sense strand
ccucugacuucuggaacua

SEQ ID NO: 1031139 - RNA, 19 nt, Homo sapiens
  misc_RNA (1)...(19): siRNA sense strand
gcuuccacguucccuauca

SEQ ID NO: 1031140 - RNA, 19 nt, Homo sapiens
  misc_RNA (1)...(19): siRNA sense strand
gggcuuccacguucccuau

SEQ ID NO: 1031141 - RNA, 19 nt, Homo sapiens
  misc_RNA (1)...(19): siRNA sense strand
ggaaagagauccacaagga

SEQ ID NO: 1031142 - RNA, 19 nt, Homo sapiens
  misc_RNA (1)...(19): siRNA sense strand
gaacuccgguugguggaaa

SEQ ID NO: 1031143 - RNA, 19 nt, Homo sapiens
  misc_RNA (1)...(19): siRNA sense strand
gaaagagauccacaaggaa

SEQ ID NO: 1031144 - RNA, 19 nt, Homo sapiens
  misc_RNA (1)...(19): siRNA sense strand
ugucagggcugcuggaaga

SEQ ID NO: 1031145 - RNA, 19 nt, Homo sapiens
  misc_RNA (1)...(19): siRNA sense strand
ggaagcagccucccagaag

SEQ ID NO: 1031146 - RNA, 19 nt, Homo sapiens
  misc_RNA (1)...(19): siRNA sense strand
aggagaaccugaagagcua

SEQ ID NO: 1031147 - RNA, 19 nt, Homo sapiens
  misc_RNA (1)...(19): siRNA sense strand
gagaagcaaagaccgaaga

SEQ ID NO: 1031148 - RNA, 19 nt, Homo sapiens
  misc_RNA (1)...(19): siRNA sense strand
ccacugaggaggaggaaga

SEQ ID NO: 1031149 - RNA, 19 nt, Homo sapiens
  misc_RNA (1)...(19): siRNA sense strand
ggcucauccucaauucuua

SEQ ID NO: 1031150 - RNA, 19 nt, Homo sapiens
  misc_RNA (1)...(19): siRNA sense strand
ucgcugauguccuggaaga

SEQ ID NO: 1031151 - RNA, 19 nt, Homo sapiens
  misc_RNA (1)...(19): siRNA sense strand
agcagaagcugaaguccuu

SEQ ID NO: 1031152 - RNA, 19 nt, Homo sapiens
  misc_RNA (1)...(19): siRNA sense strand
gggcucauccucaauucuu

SEQ ID NO: 1031153 - RNA, 19 nt, Homo sapiens
  misc_RNA (1)...(19): siRNA sense strand
cauggacccucugcugcua

SEQ ID NO: 1031154 - RNA, 19 nt, Homo sapiens
  misc_RNA (1)...(19): siRNA sense strand
cggcgaaacugggaaccaa

SEQ ID NO: 1031155 - RNA, 19 nt, Homo sapiens
  misc_RNA (1)...(19): siRNA sense strand
gcgaaacugggaaccaaga

SEQ ID NO: 1031156 - RNA, 19 nt, Homo sapiens
  misc_RNA (1)...(19): siRNA sense strand
ccagaagacccacgagaag

SEQ ID NO: 1031157 - RNA, 19 nt, Homo sapiens
  misc_RNA (1)...(19): siRNA sense strand
ccugggugguggcacagua

SEQ ID NO: 1031158 - RNA, 19 nt, Homo sapiens
  misc_RNA (1)...(19): siRNA sense strand
gcagaggcaguccgucauc

SEQ ID NO: 1031159 - RNA, 19 nt, Homo sapiens
  misc_RNA (1)...(19): siRNA sense strand
ggagaucccggcaccuucu

SEQ ID NO: 1031160 - RNA, 19 nt, Homo sapiens
  misc_RNA (1)...(19): siRNA sense strand
ucugagacacccuggcuuu

SEQ ID NO: 1031161 - RNA, 19 nt, Homo sapiens
  misc_RNA (1)...(19): siRNA sense strand
acaccgagcagaagcugaa

SEQ ID NO: 1031162 - RNA, 19 nt, Homo sapiens
  misc_RNA (1)...(19): siRNA sense strand
agaagacccacgagaagga

SEQ ID NO: 1031163 - RNA, 19 nt, Homo sapiens
  misc_RNA (1)...(19): siRNA sense strand
gcgggcucauccucaauuc

SEQ ID NO: 1031164 - RNA, 19 nt, Homo sapiens
  misc_RNA (1)...(19): siRNA sense strand
cagaggagggucagagaag

SEQ ID NO: 1031165 - RNA, 19 nt, Homo sapiens
  misc_RNA (1)...(19): siRNA sense strand
gcuggacacugaggaacuc

SEQ ID NO: 1031166 - RNA, 19 nt, Homo sapiens
  misc_RNA (1)...(19): siRNA sense strand
cugcugaccuggaguucuc

SEQ ID NO: 1031167 - RNA, 19 nt, Homo sapiens
  misc_RNA (1)...(19): siRNA sense strand
ucuuagcgauggaguguac

SEQ ID NO: 1031168 - RNA, 19 nt, Homo sapiens
  misc_RNA (1)...(19): siRNA sense strand
ccucgcugauguccuggaa

SEQ ID NO: 1031169 - RNA, 19 nt, Homo sapiens
  misc_RNA (1)...(19): siRNA sense strand
gaagagcccugcacaaugc

SEQ ID NO: 1031170 - RNA, 19 nt, Homo sapiens
  misc_RNA (1)...(19): siRNA sense strand
ggugaugagugccacauuu

SEQ ID NO: 1031171 - RNA, 19 nt, Homo sapiens
  misc_RNA (1)...(19): siRNA sense strand
gaagaaggagccugaagga

SEQ ID NO: 1031172 - RNA, 19 nt, Homo sapiens
  misc_RNA (1)...(19): siRNA sense strand
gaagucaccauucaggauu

SEQ ID NO: 1031173 - RNA, 19 nt, Homo sapiens
  misc_RNA (1)...(19): siRNA sense strand
ggaagagcccugcacaaug

SEQ ID NO: 1031174 - RNA, 19 nt, Homo sapiens
  misc_RNA (1)...(19): siRNA sense strand
gagacgacaccaccagaua

SEQ ID NO: 1031175 - RNA, 19 nt, Homo sapiens
  misc_RNA (1)...(19): siRNA sense strand
gcacaaggcccacggugau

SEQ ID NO: 1031176 - RNA, 19 nt, Homo sapiens
  misc_RNA (1)...(19): siRNA sense strand
ccagauagaagucaccauu

SEQ ID NO: 1031177 - RNA, 19 nt, Homo sapiens
  misc_RNA (1)...(19): siRNA sense strand
uggagacccugaagaagaa

SEQ ID NO: 1031178 - RNA, 19 nt, Homo sapiens
  misc_RNA (1)...(19): siRNA sense strand
agauagaagucaccauuca

SEQ ID NO: 1031179 - RNA, 19 nt, Homo sapiens
  misc_RNA (1)...(19): siRNA sense strand
gggaacaugggcuggauga

SEQ ID NO: 1031180 - RNA, 19 nt, Homo sapiens
  misc_RNA (1)...(19): siRNA sense strand
gaagaagaaggagccugaa

SEQ ID NO: 1031181 - RNA, 19 nt, Homo sapiens
  misc_RNA (1)...(19): siRNA sense strand
ggagauccaccagcuguuc

SEQ ID NO: 1031182 - RNA, 19 nt, Homo sapiens
  misc_RNA (1)...(19): siRNA sense strand
cauucaggauuuggacuuu

SEQ ID NO: 1031183 - RNA, 19 nt, Homo sapiens
  misc_RNA (1)...(19): siRNA sense strand
gacgacaccaccagauaga

SEQ ID NO: 1031184 - RNA, 19 nt, Homo sapiens
  misc_RNA (1)...(19): siRNA sense strand
gugaugagugccacauuug

SEQ ID NO: 1031185 - RNA, 19 nt, Homo sapiens
  misc_RNA (1)...(19): siRNA sense strand
uggaagagcccugcacaau

SEQ ID NO: 1031186 - RNA, 19 nt, Homo sapiens
  misc_RNA (1)...(19): siRNA sense strand
ggagacgacaccaccagau

SEQ ID NO: 1031187 - RNA, 19 nt, Homo sapiens
  misc_RNA (1)...(19): siRNA sense strand
cuggagacccugaagaaga

SEQ ID NO: 1031188 - RNA, 19 nt, Homo sapiens
  misc_RNA (1)...(19): siRNA sense strand
gccuggagacccugaagaa

SEQ ID NO: 1031189 - RNA, 19 nt, Homo sapiens
  misc_RNA (1)...(19): siRNA sense strand
aagucaccauucaggauuu

SEQ ID NO: 1031190 - RNA, 19 nt, Homo sapiens
  misc_RNA (1)...(19): siRNA sense strand
cgacaccaccagauagaag

SEQ ID NO: 1031191 - RNA, 19 nt, Homo sapiens
  misc_RNA (1)...(19): siRNA sense strand
gaugagugccacauuugag

SEQ ID NO: 1031192 - RNA, 19 nt, Homo sapiens
  misc_RNA (1)...(19): siRNA sense strand
cagauagaagucaccauuc

SEQ ID NO: 1031193 - RNA, 19 nt, Homo sapiens
  misc_RNA (1)...(19): siRNA sense strand
ugaugagugccacauuuga

SEQ ID NO: 1031194 - RNA, 19 nt, Homo sapiens
  misc_RNA (1)...(19): siRNA sense strand
gagauccaccagcuguuca

SEQ ID NO: 1031195 - RNA, 19 nt, Homo sapiens
  misc_RNA (1)...(19): siRNA sense strand
gauagaagucaccauucag

SEQ ID NO: 1031196 - RNA, 19 nt, Homo sapiens
  misc_RNA (1)...(19): siRNA sense strand
gucaccacaucacuucuca

SEQ ID NO: 1031197 - RNA, 19 nt, Homo sapiens
  misc_RNA (1)...(19): siRNA sense strand
ggaagaguguuaucuauuu

SEQ ID NO: 1031198 - RNA, 19 nt, Homo sapiens
  misc_RNA (1)...(19): siRNA sense strand
gcaacucacucgaauguua

SEQ ID NO: 1031199 - RNA, 19 nt, Homo sapiens
  misc_RNA (1)...(19): siRNA sense strand
gaagaaaggucuguuuaug

SEQ ID NO: 1031200 - RNA, 19 nt, Homo sapiens
  misc_RNA (1)...(19): siRNA sense strand
gaaagcaacucacucgaau

SEQ ID NO: 1031201 - RNA, 19 nt, Homo sapiens
  misc_RNA (1)...(19): siRNA sense strand
gaaagagcauaaauuggaa

SEQ ID NO: 1031202 - RNA, 19 nt, Homo sapiens
  misc_RNA (1)...(19): siRNA sense strand
ccaagaaguaucucuauua

SEQ ID NO: 1031203 - RNA, 19 nt, Homo sapiens
  misc_RNA (1)...(19): siRNA sense strand
guauguugcuggcagauua

SEQ ID NO: 1031204 - RNA, 19 nt, Homo sapiens
  misc_RNA (1)...(19): siRNA sense strand
agaagaagcugucggaguu

SEQ ID NO: 1031205 - RNA, 19 nt, Homo sapiens
  misc_RNA (1)...(19): siRNA sense strand
gaagaguguuaucuauuug

SEQ ID NO: 1031206 - RNA, 19 nt, Homo sapiens
  misc_RNA (1)...(19): siRNA sense strand
agaaaggucuguuuaugaa

SEQ ID NO: 1031207 - RNA, 19 nt, Homo sapiens
  misc_RNA (1)...(19): siRNA sense strand
caagaaguaucucuauuag

SEQ ID NO: 1031208 - RNA, 19 nt, Homo sapiens
  misc_RNA (1)...(19): siRNA sense strand
gaagcgaacuuaugaacag

SEQ ID NO: 1031209 - RNA, 19 nt, Homo sapiens
  misc_RNA (1)...(19): siRNA sense strand
gaggauagcuucuuuaccu

SEQ ID NO: 1031210 - RNA, 19 nt, Homo sapiens
  misc_RNA (1)...(19): siRNA sense strand
gggaagaaaggucuguuua

SEQ ID NO: 1031211 - RNA, 19 nt, Homo sapiens
  misc_RNA (1)...(19): siRNA sense strand
ggaagaaaggucuguuuau

SEQ ID NO: 1031212 - RNA, 19 nt, Homo sapiens
  misc_RNA (1)...(19): siRNA sense strand
ggagacaucuacagugaag

SEQ ID NO: 1031213 - RNA, 19 nt, Homo sapiens
  misc_RNA (1)...(19): siRNA sense strand
cagauuggcggcagaaaua

SEQ ID NO: 1031214 - RNA, 19 nt, Homo sapiens
  misc_RNA (1)...(19): siRNA sense strand
gcgaacuuaugaacagaua

SEQ ID NO: 1031215 - RNA, 19 nt, Homo sapiens
  misc_RNA (1)...(19): siRNA sense strand
gagcauaaauuggaagagu

SEQ ID NO: 1031216 - RNA, 19 nt, Homo sapiens
  misc_RNA (1)...(19): siRNA sense strand
aaaccaaacaggaagcuua

SEQ ID NO: 1031217 - RNA, 19 nt, Homo sapiens
  misc_RNA (1)...(19): siRNA sense strand
agagaaagagcauaaauug

SEQ ID NO: 1031218 - RNA, 19 nt, Homo sapiens
  misc_RNA (1)...(19): siRNA sense strand
ggaagcccuugcagagaaa

SEQ ID NO: 1031219 - RNA, 19 nt, Homo sapiens
  misc_RNA (1)...(19): siRNA sense strand
agaaagagcauaaauugga

SEQ ID NO: 1031220 - RNA, 19 nt, Homo sapiens
  misc_RNA (1)...(19): siRNA sense strand
uuaagcauguuucaaguga

SEQ ID NO: 1031221 - RNA, 19 nt, Homo sapiens
  misc_RNA (1)...(19): siRNA sense strand
caaacaggaagcuuacuuu

SEQ ID NO: 1031222 - RNA, 19 nt, Homo sapiens
  misc_RNA (1)...(19): siRNA sense strand
cgggagacaucuacaguga

SEQ ID NO: 1031223 - RNA, 19 nt, Homo sapiens
  misc_RNA (1)...(19): siRNA sense strand
uaaacaagcucuguauggu

SEQ ID NO: 1031224 - RNA, 19 nt, Homo sapiens
  misc_RNA (1)...(19): siRNA sense strand
gcagagaaagagcauaaau

SEQ ID NO: 1031225 - RNA, 19 nt, Homo sapiens
  misc_RNA (1)...(19): siRNA sense strand
gauagcuucuuuaccuguu

SEQ ID NO: 1031226 - RNA, 19 nt, Homo sapiens
  misc_RNA (1)...(19): siRNA sense strand
cagagaaagagcauaaauu

SEQ ID NO: 1031227 - RNA, 19 nt, Homo sapiens
  misc_RNA (1)...(19): siRNA sense strand
gaaaggucuguuuaugaaa

SEQ ID NO: 1031228 - RNA, 19 nt, Homo sapiens
  misc_RNA (1)...(19): siRNA sense strand
gaugauagaaagcaacuca

SEQ ID NO: 1031229 - RNA, 19 nt, Homo sapiens
  misc_RNA (1)...(19): siRNA sense strand
cuaggaagcgaacuuauga

SEQ ID NO: 1031230 - RNA, 19 nt, Homo sapiens
  misc_RNA (1)...(19): siRNA sense strand
cggcagaaauagaugauag

SEQ ID NO: 1031231 - RNA, 19 nt, Homo sapiens
  misc_RNA (1)...(19): siRNA sense strand
gcagaaauagaugauagaa

SEQ ID NO: 1031232 - RNA, 19 nt, Homo sapiens
  misc_RNA (1)...(19): siRNA sense strand
aagaaaggucuguuuauga

SEQ ID NO: 1031233 - RNA, 19 nt, Homo sapiens
  misc_RNA (1)...(19): siRNA sense strand
gcaccuuggaagaguguua

SEQ ID NO: 1031234 - RNA, 19 nt, Homo sapiens
  misc_RNA (1)...(19): siRNA sense strand
caagugaaacugaugaaag

SEQ ID NO: 1031235 - RNA, 19 nt, Homo sapiens
  misc_RNA (1)...(19): siRNA sense strand
uaagaagcaccuuggaaga

SEQ ID NO: 1031236 - RNA, 19 nt, Homo sapiens
  misc_RNA (1)...(19): siRNA sense strand
aggaagcccuugcagagaa

SEQ ID NO: 1031237 - RNA, 19 nt, Homo sapiens
  misc_RNA (1)...(19): siRNA sense strand
gcagauuggcggcagaaau

SEQ ID NO: 1031238 - RNA, 19 nt, Homo sapiens
  misc_RNA (1)...(19): siRNA sense strand
caagcucuguauggugaua

SEQ ID NO: 1031239 - RNA, 19 nt, Homo sapiens
  misc_RNA (1)...(19): siRNA sense strand
ggccagaguuuacaaaaga

SEQ ID NO: 1031240 - RNA, 19 nt, Homo sapiens
  misc_RNA (1)...(19): siRNA sense strand
guuagagcauuacaagauc

SEQ ID NO: 1031241 - RNA, 19 nt, Homo sapiens
  misc_RNA (1)...(19): siRNA sense strand
aagugaaacugaugaaagu

SEQ ID NO: 1031242 - RNA, 19 nt, Homo sapiens
  misc_RNA (1)...(19): siRNA sense strand
ugaugaaaguuguaagaag

SEQ ID NO: 1031243 - RNA, 19 nt, Homo sapiens
  misc_RNA (1)...(19): siRNA sense strand
ggaugaaaaugaaaacugu

SEQ ID NO: 1031244 - RNA, 19 nt, Homo sapiens
  misc_RNA (1)...(19): siRNA sense strand
agauaaagguggaugaaaa

SEQ ID NO: 1031245 - RNA, 19 nt, Homo sapiens
  misc_RNA (1)...(19): siRNA sense strand
ccagagccugccagacuua

SEQ ID NO: 1031246 - RNA, 19 nt, Homo sapiens
  misc_RNA (1)...(19): siRNA sense strand
gguagaggaugcguguaug

SEQ ID NO: 1031247 - RNA, 19 nt, Homo sapiens
  misc_RNA (1)...(19): siRNA sense strand
ucugggaucuccaagugaa

SEQ ID NO: 1031248 - RNA, 19 nt, Homo sapiens
  misc_RNA (1)...(19): siRNA sense strand
ccaaacaggaagcuuacuu

SEQ ID NO: 1031249 - RNA, 19 nt, Homo sapiens
  misc_RNA (1)...(19): siRNA sense strand
uccaagaaguaucucuauu

SEQ ID NO: 1031250 - RNA, 19 nt, Homo sapiens
  misc_RNA (1)...(19): siRNA sense strand
ucucugggaucuccaagug

SEQ ID NO: 1031251 - RNA, 19 nt, Homo sapiens
  misc_RNA (1)...(19): siRNA sense strand
ggaagcgaacuuaugaaca

SEQ ID NO: 1031252 - RNA, 19 nt, Homo sapiens
  misc_RNA (1)...(19): siRNA sense strand
gugauaagaagccuaggaa

SEQ ID NO: 1031253 - RNA, 19 nt, Homo sapiens
  misc_RNA (1)...(19): siRNA sense strand
agaaagcaacucacucgaa

SEQ ID NO: 1031254 - RNA, 19 nt, Homo sapiens
  misc_RNA (1)...(19): siRNA sense strand
agcauaaauuggaagagua

SEQ ID NO: 1031255 - RNA, 19 nt, Homo sapiens
  misc_RNA (1)...(19): siRNA sense strand
gagaaagagcauaaauugg

SEQ ID NO: 1031256 - RNA, 19 nt, Homo sapiens
  misc_RNA (1)...(19): siRNA sense strand
ccaagugaaccaccacaga

SEQ ID NO: 1031257 - RNA, 19 nt, Homo sapiens
  misc_RNA (1)...(19): siRNA sense strand
ucagaggauagcuucuuua

SEQ ID NO: 1031258 - RNA, 19 nt, Homo sapiens
  misc_RNA (1)...(19): siRNA sense strand
agaucucguuagagcauua

SEQ ID NO: 1031259 - RNA, 19 nt, Homo sapiens
  misc_RNA (1)...(19): siRNA sense strand
caacuuaaacaagcucugu

SEQ ID NO: 1031260 - RNA, 19 nt, Homo sapiens
  misc_RNA (1)...(19): siRNA sense strand
gcggaaagccaaaccaaac

SEQ ID NO: 1031261 - RNA, 19 nt, Homo sapiens
  misc_RNA (1)...(19): siRNA sense strand
gaaccaccacagacucuag

SEQ ID NO: 1031262 - RNA, 19 nt, Homo sapiens
  misc_RNA (1)...(19): siRNA sense strand
gaagaagcugucggaguug

SEQ ID NO: 1031263 - RNA, 19 nt, Homo sapiens
  misc_RNA (1)...(19): siRNA sense strand
acucgaauguuagcagauu

SEQ ID NO: 1031264 - RNA, 19 nt, Homo sapiens
  misc_RNA (1)...(19): siRNA sense strand
uuggaagaguguuaucuau

SEQ ID NO: 1031265 - RNA, 19 nt, Homo sapiens
  misc_RNA (1)...(19): siRNA sense strand
ccacaugcaccugcccuuu

SEQ ID NO: 1031266 - RNA, 19 nt, Homo sapiens
  misc_RNA (1)...(19): siRNA sense strand
cguuagagcauuacaagau

SEQ ID NO: 1031267 - RNA, 19 nt, Homo sapiens
  misc_RNA (1)...(19): siRNA sense strand
aaagguggaugaaaaugaa

SEQ ID NO: 1031268 - RNA, 19 nt, Homo sapiens
  misc_RNA (1)...(19): siRNA sense strand
gcauaaauuggaagaguac

SEQ ID NO: 1031269 - RNA, 19 nt, Homo sapiens
  misc_RNA (1)...(19): siRNA sense strand
agaagcaccuuggaagagu

SEQ ID NO: 1031270 - RNA, 19 nt, Homo sapiens
  misc_RNA (1)...(19): siRNA sense strand
aagcaacucacucgaaugu

SEQ ID NO: 1031271 - RNA, 19 nt, Homo sapiens
  misc_RNA (1)...(19): siRNA sense strand
gcucauucaccaccguaaa

SEQ ID NO: 1031272 - RNA, 19 nt, Homo sapiens
  misc_RNA (1)...(19): siRNA sense strand
uuaaacaagcucuguaugg

SEQ ID NO: 1031273 - RNA, 19 nt, Homo sapiens
  misc_RNA (1)...(19): siRNA sense strand
uggaagaguguuaucuauu

SEQ ID NO: 1031274 - RNA, 19 nt, Homo sapiens
  misc_RNA (1)...(19): siRNA sense strand
caacucacucgaauguuag

SEQ ID NO: 1031275 - RNA, 19 nt, Homo sapiens
  misc_RNA (1)...(19): siRNA sense strand
uugcagagaaagagcauaa

SEQ ID NO: 1031276 - RNA, 19 nt, Homo sapiens
  misc_RNA (1)...(19): siRNA sense strand
ccuaggaagcgaacuuaug

SEQ ID NO: 1031277 - RNA, 19 nt, Homo sapiens
  misc_RNA (1)...(19): siRNA sense strand
aagaagcugucggaguuga

SEQ ID NO: 1031278 - RNA, 19 nt, Homo sapiens
  misc_RNA (1)...(19): siRNA sense strand
acaggaagcuuacuuuucu

SEQ ID NO: 1031279 - RNA, 19 nt, Homo sapiens
  misc_RNA (1)...(19): siRNA sense strand
cagauaaagguggaugaaa

SEQ ID NO: 1031280 - RNA, 19 nt, Homo sapiens
  misc_RNA (1)...(19): siRNA sense strand
uagcuucuuuaccuguuga

SEQ ID NO: 1031281 - RNA, 19 nt, Homo sapiens
  misc_RNA (1)...(19): siRNA sense strand
guagaggaugcguguaugu

SEQ ID NO: 1031282 - RNA, 19 nt, Homo sapiens
  misc_RNA (1)...(19): siRNA sense strand
uguugaaguccaagaagua

SEQ ID NO: 1031283 - RNA, 19 nt, Homo sapiens
  misc_RNA (1)...(19): siRNA sense strand
ggugauaagaagccuagga

SEQ ID NO: 1031284 - RNA, 19 nt, Homo sapiens
  misc_RNA (1)...(19): siRNA sense strand
caguuauaguggaggcuuu

SEQ ID NO: 1031285 - RNA, 19 nt, Homo sapiens
  misc_RNA (1)...(19): siRNA sense strand
cagauuacaauggcagauu

SEQ ID NO: 1031286 - RNA, 19 nt, Homo sapiens
  misc_RNA (1)...(19): siRNA sense strand
gaagcuuacuuuucucuac

SEQ ID NO: 1031287 - RNA, 19 nt, Homo sapiens
  misc_RNA (1)...(19): siRNA sense strand
caucagaggauagcuucuu

SEQ ID NO: 1031288 - RNA, 19 nt, Homo sapiens
  misc_RNA (1)...(19): siRNA sense strand
gaaauagaugauagaaagc

SEQ ID NO: 1031289 - RNA, 19 nt, Homo sapiens
  misc_RNA (1)...(19): siRNA sense strand
gagccugccagacuuaucu

SEQ ID NO: 1031290 - RNA, 19 nt, Homo sapiens
  misc_RNA (1)...(19): siRNA sense strand
uguaagaagcaccuuggaa

SEQ ID NO: 1031291 - RNA, 19 nt, Homo sapiens
  misc_RNA (1)...(19): siRNA sense strand
ggaaagccaaaccaaacag

SEQ ID NO: 1031292 - RNA, 19 nt, Homo sapiens
  misc_RNA (1)...(19): siRNA sense strand
uacaagaucuggaaaaugc

SEQ ID NO: 1031293 - RNA, 19 nt, Homo sapiens
  misc_RNA (1)...(19): siRNA sense strand
agaggaugcguguauguug

SEQ ID NO: 1031294 - RNA, 19 nt, Homo sapiens
  misc_RNA (1)...(19): siRNA sense strand
ugccagacuuaucucgauu

SEQ ID NO: 1031295 - RNA, 19 nt, Homo sapiens
  misc_RNA (1)...(19): siRNA sense strand
uaaauuggaagaguacaag

SEQ ID NO: 1031296 - RNA, 19 nt, Homo sapiens
  misc_RNA (1)...(19): siRNA sense strand
gauuggcggcagaaauaga

SEQ ID NO: 1031297 - RNA, 19 nt, Homo sapiens
  misc_RNA (1)...(19): siRNA sense strand
cagagaaugccuaugagua

SEQ ID NO: 1031298 - RNA, 19 nt, Homo sapiens
  misc_RNA (1)...(19): siRNA sense strand
uaugaguacuucaccaaga

SEQ ID NO: 1031299 - RNA, 19 nt, Homo sapiens
  misc_RNA (1)...(19): siRNA sense strand
gcagguagcccaggacaca

SEQ ID NO: 1031300 - RNA, 19 nt, Homo sapiens
  misc_RNA (1)...(19): siRNA sense strand
caaccgacgcuaugacuca

SEQ ID NO: 1031301 - RNA, 19 nt, Homo sapiens
  misc_RNA (1)...(19): siRNA sense strand
gaaugccuaugaguacuuc

SEQ ID NO: 1031302 - RNA, 19 nt, Homo sapiens
  misc_RNA (1)...(19): siRNA sense strand
cgacaucaaccgacgcuau

SEQ ID NO: 1031303 - RNA, 19 nt, Homo sapiens
  misc_RNA (1)...(19): siRNA sense strand
gacggcagcucgccaucau

SEQ ID NO: 1031304 - RNA, 19 nt, Homo sapiens
  misc_RNA (1)...(19): siRNA sense strand
gcagagaaugccuaugagu

SEQ ID NO: 1031305 - RNA, 19 nt, Homo sapiens
  misc_RNA (1)...(19): siRNA sense strand
gacaucaaccgacgcuaug

SEQ ID NO: 1031306 - RNA, 19 nt, Homo sapiens
  misc_RNA (1)...(19): siRNA sense strand
gagaaugccuaugaguacu

SEQ ID NO: 1031307 - RNA, 19 nt, Homo sapiens
  misc_RNA (1)...(19): siRNA sense strand
acccagagauggucaccuu

SEQ ID NO: 1031308 - RNA, 19 nt, Homo sapiens
  misc_RNA (1)...(19): siRNA sense strand
uggccugacuggcuuccua

SEQ ID NO: 1031309 - RNA, 19 nt, Homo sapiens
  misc_RNA (1)...(19): siRNA sense strand
gguggcagcccugaacuug

SEQ ID NO: 1031310 - RNA, 19 nt, Homo sapiens
  misc_RNA (1)...(19): siRNA sense strand
gccaccagccuguuugaga

SEQ ID NO: 1031311 - RNA, 19 nt, Homo sapiens
  misc_RNA (1)...(19): siRNA sense strand
agagaaugccuaugaguac

SEQ ID NO: 1031312 - RNA, 19 nt, Homo sapiens
  misc_RNA (1)...(19): siRNA sense strand
gauugccaccagccuguuu

SEQ ID NO: 1031313 - RNA, 19 nt, Homo sapiens
  misc_RNA (1)...(19): siRNA sense strand
gaguacuucaccaagauug

SEQ ID NO: 1031314 - RNA, 19 nt, Homo sapiens
  misc_RNA (1)...(19): siRNA sense strand
gcaggaacaggaggcugaa

SEQ ID NO: 1031315 - RNA, 19 nt, Homo sapiens
  misc_RNA (1)...(19): siRNA sense strand
gcuaccgucuggcccuaca

SEQ ID NO: 1031316 - RNA, 19 nt, Homo sapiens
  misc_RNA (1)...(19): siRNA sense strand
gaagugaacugucuuauaa

SEQ ID NO: 1031317 - RNA, 19 nt, Homo sapiens
  misc_RNA (1)...(19): siRNA sense strand
ggaguggauucauggauua

SEQ ID NO: 1031318 - RNA, 19 nt, Homo sapiens
  misc_RNA (1)...(19): siRNA sense strand
ggaagacccugaugaagga

SEQ ID NO: 1031319 - RNA, 19 nt, Homo sapiens
  misc_RNA (1)...(19): siRNA sense strand
gcaagaaacugcagaagcu

SEQ ID NO: 1031320 - RNA, 19 nt, Homo sapiens
  misc_RNA (1)...(19): siRNA sense strand
gcuuugaaguguuugauuu

SEQ ID NO: 1031321 - RNA, 19 nt, Homo sapiens
  misc_RNA (1)...(19): siRNA sense strand
gaacagccuucucaaacag

SEQ ID NO: 1031322 - RNA, 19 nt, Homo sapiens
  misc_RNA (1)...(19): siRNA sense strand
gaagcugacggacaccuua

SEQ ID NO: 1031323 - RNA, 19 nt, Homo sapiens
  misc_RNA (1)...(19): siRNA sense strand
gcucaaguauucaaagauc

SEQ ID NO: 1031324 - RNA, 19 nt, Homo sapiens
  misc_RNA (1)...(19): siRNA sense strand
aaugacagaugacaugauu

SEQ ID NO: 1031325 - RNA, 19 nt, Homo sapiens
  misc_RNA (1)...(19): siRNA sense strand
gaaauauugcuuugaagug

SEQ ID NO: 1031326 - RNA, 19 nt, Homo sapiens
  misc_RNA (1)...(19): siRNA sense strand
cagaugacaugauuaugga

SEQ ID NO: 1031327 - RNA, 19 nt, Homo sapiens
  misc_RNA (1)...(19): siRNA sense strand
caaagagccagauggaauu

SEQ ID NO: 1031328 - RNA, 19 nt, Homo sapiens
  misc_RNA (1)...(19): siRNA sense strand
ugaagugaacugucuuaua

SEQ ID NO: 1031329 - RNA, 19 nt, Homo sapiens
  misc_RNA (1)...(19): siRNA sense strand
ccaaagagccagauggaau

SEQ ID NO: 1031330 - RNA, 19 nt, Homo sapiens
  misc_RNA (1)...(19): siRNA sense strand
gauaaugauggcuguguaa

SEQ ID NO: 1031331 - RNA, 19 nt, Homo sapiens
  misc_RNA (1)...(19): siRNA sense strand
gacagaguauuccgagguu

SEQ ID NO: 1031332 - RNA, 19 nt, Homo sapiens
  misc_RNA (1)...(19): siRNA sense strand
aaugauggcuguguaaaug

SEQ ID NO: 1031333 - RNA, 19 nt, Homo sapiens
  misc_RNA (1)...(19): siRNA sense strand
gaacugucuuauaaagcuu

SEQ ID NO: 1031334 - RNA, 19 nt, Homo sapiens
  misc_RNA (1)...(19): siRNA sense strand
ugacagaugacaugauuau

SEQ ID NO: 1031335 - RNA, 19 nt, Homo sapiens
  misc_RNA (1)...(19): siRNA sense strand
cguaaugcauuucgaaaca

SEQ ID NO: 1031336 - RNA, 19 nt, Homo sapiens
  misc_RNA (1)...(19): siRNA sense strand
ggugacggauucauuucaa

SEQ ID NO: 1031337 - RNA, 19 nt, Homo sapiens
  misc_RNA (1)...(19): siRNA sense strand
ugauggcuguguaaaugua

SEQ ID NO: 1031338 - RNA, 19 nt, Homo sapiens
  misc_RNA (1)...(19): siRNA sense strand
ugaagaaaauggaucauga

SEQ ID NO: 1031339 - RNA, 19 nt, Homo sapiens
  misc_RNA (1)...(19): siRNA sense strand
ugaacuggcugugagagaa

SEQ ID NO: 1031340 - RNA, 19 nt, Homo sapiens
  misc_RNA (1)...(19): siRNA sense strand
guauuggaguggauucaug

SEQ ID NO: 1031341 - RNA, 19 nt, Homo sapiens
  misc_RNA (1)...(19): siRNA sense strand
gaggcaaggucugguuguu

SEQ ID NO: 1031342 - RNA, 19 nt, Homo sapiens
  misc_RNA (1)...(19): siRNA sense strand
agagccagauggaauuuga

SEQ ID NO: 1031343 - RNA, 19 nt, Homo sapiens
  misc_RNA (1)...(19): siRNA sense strand
gauuauggacagaguauuc

SEQ ID NO: 1031344 - RNA, 19 nt, Homo sapiens
  misc_RNA (1)...(19): siRNA sense strand
uggaguggauucauggauu

SEQ ID NO: 1031345 - RNA, 19 nt, Homo sapiens
  misc_RNA (1)...(19): siRNA sense strand
gaucguaaugcauuucgaa

SEQ ID NO: 1031346 - RNA, 19 nt, Homo sapiens
  misc_RNA (1)...(19): siRNA sense strand
ggaaugacagaugacauga

SEQ ID NO: 1031347 - RNA, 19 nt, Homo sapiens
  misc_RNA (1)...(19): siRNA sense strand
ugaggaagacccugaugaa

SEQ ID NO: 1031348 - RNA, 19 nt, Homo sapiens
  misc_RNA (1)...(19): siRNA sense strand
guggauucauggauuauca

SEQ ID NO: 1031349 - RNA, 19 nt, Homo sapiens
  misc_RNA (1)...(19): siRNA sense strand
agauaaugauggcugugua

SEQ ID NO: 1031350 - RNA, 19 nt, Homo sapiens
  misc_RNA (1)...(19): siRNA sense strand
caaagauccaaaugaauuc

SEQ ID NO: 1031351 - RNA, 19 nt, Homo sapiens
  misc_RNA (1)...(19): siRNA sense strand
ugaacugucuuauaaagcu

SEQ ID NO: 1031352 - RNA, 19 nt, Homo sapiens
  misc_RNA (1)...(19): siRNA sense strand
aagcucaaguauucaaaga

SEQ ID NO: 1031353 - RNA, 19 nt, Homo sapiens
  misc_RNA (1)...(19): siRNA sense strand
caaacagccaucugaggaa

SEQ ID NO: 1031354 - RNA, 19 nt, Homo sapiens
  misc_RNA (1)...(19): siRNA sense strand
auucauggauuaucacugu

SEQ ID NO: 1031355 - RNA, 19 nt, Homo sapiens
  misc_RNA (1)...(19): siRNA sense strand
gugacggauucauuucaaa

SEQ ID NO: 1031356 - RNA, 19 nt, Homo sapiens
  misc_RNA (1)...(19): siRNA sense strand
gacggacaccuuaaccaaa

SEQ ID NO: 1031357 - RNA, 19 nt, Homo sapiens
  misc_RNA (1)...(19): siRNA sense strand
guaaugcauuucgaaacau

SEQ ID NO: 1031358 - RNA, 19 nt, Homo sapiens
  misc_RNA (1)...(19): siRNA sense strand
uaaauguauuggaguggau

SEQ ID NO: 1031359 - RNA, 19 nt, Homo sapiens
  misc_RNA (1)...(19): siRNA sense strand
ugacggacaccuuaaccaa

SEQ ID NO: 1031360 - RNA, 19 nt, Homo sapiens
  misc_RNA (1)...(19): siRNA sense strand
guugaaauaacacugaaga

SEQ ID NO: 1031361 - RNA, 19 nt, Homo sapiens
  misc_RNA (1)...(19): siRNA sense strand
uaaugcauuucgaaacauc

SEQ ID NO: 1031362 - RNA, 19 nt, Homo sapiens
  misc_RNA (1)...(19): siRNA sense strand
ugacaugauuauggacaga

SEQ ID NO: 1031363 - RNA, 19 nt, Homo sapiens
  misc_RNA (1)...(19): siRNA sense strand
agugaacugucuuauaaag

SEQ ID NO: 1031364 - RNA, 19 nt, Homo sapiens
  misc_RNA (1)...(19): siRNA sense strand
gaagcucaaguauucaaag

SEQ ID NO: 1031365 - RNA, 19 nt, Homo sapiens
  misc_RNA (1)...(19): siRNA sense strand
gaacuggcugugagagaag

SEQ ID NO: 1031366 - RNA, 19 nt, Homo sapiens
  misc_RNA (1)...(19): siRNA sense strand
ugacuuggugggaggagua

SEQ ID NO: 1031367 - RNA, 19 nt, Homo sapiens
  misc_RNA (1)...(19): siRNA sense strand
gacuggaucguaaugcauu

SEQ ID NO: 1031368 - RNA, 19 nt, Homo sapiens
  misc_RNA (1)...(19): siRNA sense strand
acagaugacaugauuaugg

SEQ ID NO: 1031369 - RNA, 19 nt, Homo sapiens
  misc_RNA (1)...(19): siRNA sense strand
agacccugaugaaggaauu

SEQ ID NO: 1031370 - RNA, 19 nt, Homo sapiens
  misc_RNA (1)...(19): siRNA sense strand
gaaugacagaugacaugau

SEQ ID NO: 1031371 - RNA, 19 nt, Homo sapiens
  misc_RNA (1)...(19): siRNA sense strand
ggauuaucacuguuucuuc

SEQ ID NO: 1031372 - RNA, 19 nt, Homo sapiens
  misc_RNA (1)...(19): siRNA sense strand
uaaugauggcuguguaaau

SEQ ID NO: 1031373 - RNA, 19 nt, Homo sapiens
  misc_RNA (1)...(19): siRNA sense strand
ggacuggaucguaaugcau

SEQ ID NO: 1031374 - RNA, 19 nt, Homo sapiens
  misc_RNA (1)...(19): siRNA sense strand
gaggaagacccugaugaag

SEQ ID NO: 1031375 - RNA, 19 nt, Homo sapiens
  misc_RNA (1)...(19): siRNA sense strand
ucauggauuaucacuguuu

SEQ ID NO: 1031376 - RNA, 19 nt, Homo sapiens
  misc_RNA (1)...(19): siRNA sense strand
uggaaugacagaugacaug

SEQ ID NO: 1031377 - RNA, 19 nt, Homo sapiens
  misc_RNA (1)...(19): siRNA sense strand
aaagagccagauggaauuu

SEQ ID NO: 1031378 - RNA, 19 nt, Homo sapiens
  misc_RNA (1)...(19): siRNA sense strand
cauggauuaucacuguuuc

SEQ ID NO: 1031379 - RNA, 19 nt, Homo sapiens
  misc_RNA (1)...(19): siRNA sense strand
uuguuggacuggaucguaa

SEQ ID NO: 1031380 - RNA, 19 nt, Homo sapiens
  misc_RNA (1)...(19): siRNA sense strand
gauccaaaugaauucaaug

SEQ ID NO: 1031381 - RNA, 19 nt, Homo sapiens
  misc_RNA (1)...(19): siRNA sense strand
gaaguguuugauuugaaug

SEQ ID NO: 1031382 - RNA, 19 nt, Homo sapiens
  misc_RNA (1)...(19): siRNA sense strand
aauuugaagugaacugucu

SEQ ID NO: 1031383 - RNA, 19 nt, Homo sapiens
  misc_RNA (1)...(19): siRNA sense strand
uucaaaggaggaaauguuu

SEQ ID NO: 1031384 - RNA, 19 nt, Homo sapiens
  misc_RNA (1)...(19): siRNA sense strand
guuguuggacuggaucgua

SEQ ID NO: 1031385 - RNA, 19 nt, Homo sapiens
  misc_RNA (1)...(19): siRNA sense strand
ccagauggaauuugaagcu

SEQ ID NO: 1031386 - RNA, 19 nt, Homo sapiens
  misc_RNA (1)...(19): siRNA sense strand
ggaucguaaugcauuucga

SEQ ID NO: 1031387 - RNA, 19 nt, Homo sapiens
  misc_RNA (1)...(19): siRNA sense strand
acggauucauuucaaagga

SEQ ID NO: 1031388 - RNA, 19 nt, Homo sapiens
  misc_RNA (1)...(19): siRNA sense strand
guauucaaagauccaaaug

SEQ ID NO: 1031389 - RNA, 19 nt, Homo sapiens
  misc_RNA (1)...(19): siRNA sense strand
gaugggaagcugucuuuug

SEQ ID NO: 1031390 - RNA, 19 nt, Homo sapiens
  misc_RNA (1)...(19): siRNA sense strand
ugacagaaauguugcauaa

SEQ ID NO: 1031391 - RNA, 19 nt, Homo sapiens
  misc_RNA (1)...(19): siRNA sense strand
gacaaggccuagauauuua

SEQ ID NO: 1031392 - RNA, 19 nt, Homo sapiens
  misc_RNA (1)...(19): siRNA sense strand
ggacaaggccuagauauuu

SEQ ID NO: 1031393 - RNA, 19 nt, Homo sapiens
  misc_RNA (1)...(19): siRNA sense strand
ggagaagacucaagaaaca

SEQ ID NO: 1031394 - RNA, 19 nt, Homo sapiens
  misc_RNA (1)...(19): siRNA sense strand
gauauuuacuggagggaua

SEQ ID NO: 1031395 - RNA, 19 nt, Homo sapiens
  misc_RNA (1)...(19): siRNA sense strand
ucacaggcauuuaaucauu

SEQ ID NO: 1031396 - RNA, 19 nt, Homo sapiens
  misc_RNA (1)...(19): siRNA sense strand
gaggacaagcuacagauua

SEQ ID NO: 1031397 - RNA, 19 nt, Homo sapiens
  misc_RNA (1)...(19): siRNA sense strand
gcuaaagccuauaaacaga

SEQ ID NO: 1031398 - RNA, 19 nt, Homo sapiens
  misc_RNA (1)...(19): siRNA sense strand
gacaagcuacagauuauua

SEQ ID NO: 1031399 - RNA, 19 nt, Homo sapiens
  misc_RNA (1)...(19): siRNA sense strand
acagaaauguugcauaaug

SEQ ID NO: 1031400 - RNA, 19 nt, Homo sapiens
  misc_RNA (1)...(19): siRNA sense strand
gaaacaguccaaagaauuc

SEQ ID NO: 1031401 - RNA, 19 nt, Homo sapiens
  misc_RNA (1)...(19): siRNA sense strand
caagaaacaguccaaagaa

SEQ ID NO: 1031402 - RNA, 19 nt, Homo sapiens
  misc_RNA (1)...(19): siRNA sense strand
guaagauguucaaagaaga

SEQ ID NO: 1031403 - RNA, 19 nt, Homo sapiens
  misc_RNA (1)...(19): siRNA sense strand
ccacugaagaagaauauaa

SEQ ID NO: 1031404 - RNA, 19 nt, Homo sapiens
  misc_RNA (1)...(19): siRNA sense strand
ucaagaaacaguccaaaga

SEQ ID NO: 1031405 - RNA, 19 nt, Homo sapiens
  misc_RNA (1)...(19): siRNA sense strand
ggagggauaauuacacuug

SEQ ID NO: 1031406 - RNA, 19 nt, Homo sapiens
  misc_RNA (1)...(19): siRNA sense strand
guaaacaagugagaaccaa

SEQ ID NO: 1031407 - RNA, 19 nt, Homo sapiens
  misc_RNA (1)...(19): siRNA sense strand
cagguggacuguuuggauu

SEQ ID NO: 1031408 - RNA, 19 nt, Homo sapiens
  misc_RNA (1)...(19): siRNA sense strand
aaucuacacuccaaagaau

SEQ ID NO: 1031409 - RNA, 19 nt, Homo sapiens
  misc_RNA (1)...(19): siRNA sense strand
gggacaaggccuagauauu

SEQ ID NO: 1031410 - RNA, 19 nt, Homo sapiens
  misc_RNA (1)...(19): siRNA sense strand
ggauguagguucuuuugaa

SEQ ID NO: 1031411 - RNA, 19 nt, Homo sapiens
  misc_RNA (1)...(19): siRNA sense strand
agaaacaguccaaagaauu

SEQ ID NO: 1031412 - RNA, 19 nt, Homo sapiens
  misc_RNA (1)...(19): siRNA sense strand
caguaggucucaugcaguu

SEQ ID NO: 1031413 - RNA, 19 nt, Homo sapiens
  misc_RNA (1)...(19): siRNA sense strand
aagaaacaguccaaagaau

SEQ ID NO: 1031414 - RNA, 19 nt, Homo sapiens
  misc_RNA (1)...(19): siRNA sense strand
ggaaucccaucugucauca

SEQ ID NO: 1031415 - RNA, 19 nt, Homo sapiens
  misc_RNA (1)...(19): siRNA sense strand
ugaagugacagaaauguug

SEQ ID NO: 1031416 - RNA, 19 nt, Homo sapiens
  misc_RNA (1)...(19): siRNA sense strand
ucgaugauauugaagacaa

SEQ ID NO: 1031417 - RNA, 19 nt, Homo sapiens
  misc_RNA (1)...(19): siRNA sense strand
aggacaagcuacagauuau

SEQ ID NO: 1031418 - RNA, 19 nt, Homo sapiens
  misc_RNA (1)...(19): siRNA sense strand
uaauacacuugggcucuuu

SEQ ID NO: 1031419 - RNA, 19 nt, Homo sapiens
  misc_RNA (1)...(19): siRNA sense strand
cauaaugccaguuuacuca

SEQ ID NO: 1031420 - RNA, 19 nt, Homo sapiens
  misc_RNA (1)...(19): siRNA sense strand
aguaagauguucaaagaag

SEQ ID NO: 1031421 - RNA, 19 nt, Homo sapiens
  misc_RNA (1)...(19): siRNA sense strand
ugggaacccugagcuagua

SEQ ID NO: 1031422 - RNA, 19 nt, Homo sapiens
  misc_RNA (1)...(19): siRNA sense strand
ccagagaacagaaaacaua

SEQ ID NO: 1031423 - RNA, 19 nt, Homo sapiens
  misc_RNA (1)...(19): siRNA sense strand
ucaugcaguuguucucuga

SEQ ID NO: 1031424 - RNA, 19 nt, Homo sapiens
  misc_RNA (1)...(19): siRNA sense strand
gcccacagcaucuauggaa

SEQ ID NO: 1031425 - RNA, 19 nt, Homo sapiens
  misc_RNA (1)...(19): siRNA sense strand
guucucauuuccuacuauu

SEQ ID NO: 1031426 - RNA, 19 nt, Homo sapiens
  misc_RNA (1)...(19): siRNA sense strand
cacaggcauuuaaucauug

SEQ ID NO: 1031427 - RNA, 19 nt, Homo sapiens
  misc_RNA (1)...(19): siRNA sense strand
caaauuagggaugauuaug

SEQ ID NO: 1031428 - RNA, 19 nt, Homo sapiens
  misc_RNA (1)...(19): siRNA sense strand
uaaaaccgcuacuuaauac

SEQ ID NO: 1031429 - RNA, 19 nt, Homo sapiens
  misc_RNA (1)...(19): siRNA sense strand
ggacaagcuacagauuauu

SEQ ID NO: 1031430 - RNA, 19 nt, Homo sapiens
  misc_RNA (1)...(19): siRNA sense strand
gaagcuaaagccuauaaac

SEQ ID NO: 1031431 - RNA, 19 nt, Homo sapiens
  misc_RNA (1)...(19): siRNA sense strand
ugcaguuguucucugauua

SEQ ID NO: 1031432 - RNA, 19 nt, Homo sapiens
  misc_RNA (1)...(19): siRNA sense strand
ccaauuacguguauuuccu

SEQ ID NO: 1031433 - RNA, 19 nt, Homo sapiens
  misc_RNA (1)...(19): siRNA sense strand
ucccaucugucaucaauuc

SEQ ID NO: 1031434 - RNA, 19 nt, Homo sapiens
  misc_RNA (1)...(19): siRNA sense strand
ucuagaacccuauaaauac

SEQ ID NO: 1031435 - RNA, 19 nt, Homo sapiens
  misc_RNA (1)...(19): siRNA sense strand
ggaacuccaucagggacaa

SEQ ID NO: 1031436 - RNA, 19 nt, Homo sapiens
  misc_RNA (1)...(19): siRNA sense strand
gagggauaauuacacuugu

SEQ ID NO: 1031437 - RNA, 19 nt, Homo sapiens
  misc_RNA (1)...(19): siRNA sense strand
agagggaaaguucucauuu

SEQ ID NO: 1031438 - RNA, 19 nt, Homo sapiens
  misc_RNA (1)...(19): siRNA sense strand
gauuuaaaaccgcuacuua

SEQ ID NO: 1031439 - RNA, 19 nt, Homo sapiens
  misc_RNA (1)...(19): siRNA sense strand
aaucccaucugucaucaau

SEQ ID NO: 1031440 - RNA, 19 nt, Homo sapiens
  misc_RNA (1)...(19): siRNA sense strand
uaaucuacacuccaaagaa

SEQ ID NO: 1031441 - RNA, 19 nt, Homo sapiens
  misc_RNA (1)...(19): siRNA sense strand
ccaaauuagggaugauuau

SEQ ID NO: 1031442 - RNA, 19 nt, Homo sapiens
  misc_RNA (1)...(19): siRNA sense strand
acacuugucccacugaaga

SEQ ID NO: 1031443 - RNA, 19 nt, Homo sapiens
  misc_RNA (1)...(19): siRNA sense strand
ccagaugcagugaagcuuu

SEQ ID NO: 1031444 - RNA, 19 nt, Homo sapiens
  misc_RNA (1)...(19): siRNA sense strand
ugucaucaauucugccaau

SEQ ID NO: 1031445 - RNA, 19 nt, Homo sapiens
  misc_RNA (1)...(19): siRNA sense strand
cuagaacccuauaaauacu

SEQ ID NO: 1031446 - RNA, 19 nt, Homo sapiens
  misc_RNA (1)...(19): siRNA sense strand
gaauaucuugcgccagaga

SEQ ID NO: 1031447 - RNA, 19 nt, Homo sapiens
  misc_RNA (1)...(19): siRNA sense strand
ugaauacacucguaauacc

SEQ ID NO: 1031448 - RNA, 19 nt, Homo sapiens
  misc_RNA (1)...(19): siRNA sense strand
uuuacuggagggauaauua

SEQ ID NO: 1031449 - RNA, 19 nt, Homo sapiens
  misc_RNA (1)...(19): siRNA sense strand
aagcuaaagccuauaaaca

SEQ ID NO: 1031450 - RNA, 19 nt, Homo sapiens
  misc_RNA (1)...(19): siRNA sense strand
cuacuauucaugcuauuug

SEQ ID NO: 1031451 - RNA, 19 nt, Homo sapiens
  misc_RNA (1)...(19): siRNA sense strand
aagcuauggugcugcagaa

SEQ ID NO: 1031452 - RNA, 19 nt, Homo sapiens
  misc_RNA (1)...(19): siRNA sense strand
uggcuuggagaaagucuua

SEQ ID NO: 1031453 - RNA, 19 nt, Homo sapiens
  misc_RNA (1)...(19): siRNA sense strand
caaacuuucacaggcauuu

SEQ ID NO: 1031454 - RNA, 19 nt, Homo sapiens
  misc_RNA (1)...(19): siRNA sense strand
uaaacaagugagaaccaaa

SEQ ID NO: 1031455 - RNA, 19 nt, Homo sapiens
  misc_RNA (1)...(19): siRNA sense strand
ccacagcaucuauggaauc

SEQ ID NO: 1031456 - RNA, 19 nt, Homo sapiens
  misc_RNA (1)...(19): siRNA sense strand
uaaugccaguuuacucauc

SEQ ID NO: 1031457 - RNA, 19 nt, Homo sapiens
  misc_RNA (1)...(19): siRNA sense strand
gauguagguucuuuugaau

SEQ ID NO: 1031458 - RNA, 19 nt, Homo sapiens
  misc_RNA (1)...(19): siRNA sense strand
aaacuuucacaggcauuua

SEQ ID NO: 1031459 - RNA, 19 nt, Homo sapiens
  misc_RNA (1)...(19): siRNA sense strand
cccuauaaauacuuacuuc

SEQ ID NO: 1031460 - RNA, 19 nt, Homo sapiens
  misc_RNA (1)...(19): siRNA sense strand
cagagggaaaguucucauu

SEQ ID NO: 1031461 - RNA, 19 nt, Homo sapiens
  misc_RNA (1)...(19): siRNA sense strand
uuaauacacuugggcucuu

SEQ ID NO: 1031462 - RNA, 19 nt, Homo sapiens
  misc_RNA (1)...(19): siRNA sense strand
gcaguuguucucugauuac

SEQ ID NO: 1031463 - RNA, 19 nt, Homo sapiens
  misc_RNA (1)...(19): siRNA sense strand
gguggacuguuuggauuag

SEQ ID NO: 1031464 - RNA, 19 nt, Homo sapiens
  misc_RNA (1)...(19): siRNA sense strand
ccagaggacaagcuacaga

SEQ ID NO: 1031465 - RNA, 19 nt, Homo sapiens
  misc_RNA (1)...(19): siRNA sense strand
gaaagucuuaacccuugau

SEQ ID NO: 1031466 - RNA, 19 nt, Homo sapiens
  misc_RNA (1)...(19): siRNA sense strand
agaaagucuuaacccuuga

SEQ ID NO: 1031467 - RNA, 19 nt, Homo sapiens
  misc_RNA (1)...(19): siRNA sense strand
gaaaguuccagaggacaag

SEQ ID NO: 1031468 - RNA, 19 nt, Homo sapiens
  misc_RNA (1)...(19): siRNA sense strand
ucucauuuccuacuauuca

SEQ ID NO: 1031469 - RNA, 19 nt, Homo sapiens
  misc_RNA (1)...(19): siRNA sense strand
cagaugcagugaagcuuuu

SEQ ID NO: 1031470 - RNA, 19 nt, Homo sapiens
  misc_RNA (1)...(19): siRNA sense strand
uugaggauguagguucuuu

SEQ ID NO: 1031471 - RNA, 19 nt, Homo sapiens
  misc_RNA (1)...(19): siRNA sense strand
gcuaaucuacacuccaaag

SEQ ID NO: 1031472 - RNA, 19 nt, Homo sapiens
  misc_RNA (1)...(19): siRNA sense strand
augcuaaucuacacuccaa

SEQ ID NO: 1031473 - RNA, 19 nt, Homo sapiens
  misc_RNA (1)...(19): siRNA sense strand
guaggucucaugcaguugu

SEQ ID NO: 1031474 - RNA, 19 nt, Homo sapiens
  misc_RNA (1)...(19): siRNA sense strand
cagggacaaggccuagaua

SEQ ID NO: 1031475 - RNA, 19 nt, Homo sapiens
  misc_RNA (1)...(19): siRNA sense strand
aaucauuggcugaaaguuc

SEQ ID NO: 1031476 - RNA, 19 nt, Homo sapiens
  misc_RNA (1)...(19): siRNA sense strand
ugaaaguuccagaggacaa

SEQ ID NO: 1031477 - RNA, 19 nt, Homo sapiens
  misc_RNA (1)...(19): siRNA sense strand
uccaaauuagggaugauua

SEQ ID NO: 1031478 - RNA, 19 nt, Homo sapiens
  misc_RNA (1)...(19): siRNA sense strand
gguaaacaagugagaacca

SEQ ID NO: 1031479 - RNA, 19 nt, Homo sapiens
  misc_RNA (1)...(19): siRNA sense strand
augcaguuguucucugauu

SEQ ID NO: 1031480 - RNA, 19 nt, Homo sapiens
  misc_RNA (1)...(19): siRNA sense strand
uuucacaggcauuuaauca

SEQ ID NO: 1031481 - RNA, 19 nt, Homo sapiens
  misc_RNA (1)...(19): siRNA sense strand
caucgaugauauugaagac

SEQ ID NO: 1031482 - RNA, 19 nt, Homo sapiens
  misc_RNA (1)...(19): siRNA sense strand
caauuacguguauuuccuu

SEQ ID NO: 1031483 - RNA, 19 nt, Homo sapiens
  misc_RNA (1)...(19): siRNA sense strand
ucuacacuccaaagaauau

SEQ ID NO: 1031484 - RNA, 19 nt, Homo sapiens
  misc_RNA (1)...(19): siRNA sense strand
agugagaaccaaacuuuca

SEQ ID NO: 1031485 - RNA, 19 nt, Homo sapiens
  misc_RNA (1)...(19): siRNA sense strand
uuacacuugucccacugaa

SEQ ID NO: 1031486 - RNA, 19 nt, Homo sapiens
  misc_RNA (1)...(19): siRNA sense strand
gugacagaaauguugcaua

SEQ ID NO: 1031487 - RNA, 19 nt, Homo sapiens
  misc_RNA (1)...(19): siRNA sense strand
uaauacccuuaaagagcuu

SEQ ID NO: 1031488 - RNA, 19 nt, Homo sapiens
  misc_RNA (1)...(19): siRNA sense strand
aaacaagugagaaccaaac

SEQ ID NO: 1031489 - RNA, 19 nt, Homo sapiens
  misc_RNA (1)...(19): siRNA sense strand
gccuauaaacagauugaug

SEQ ID NO: 1031490 - RNA, 19 nt, Homo sapiens
  misc_RNA (1)...(19): siRNA sense strand
gaagcucucuauauacuaa

SEQ ID NO: 1031491 - RNA, 19 nt, Homo sapiens
  misc_RNA (1)...(19): siRNA sense strand
gagaaguccuuauugauug

SEQ ID NO: 1031492 - RNA, 19 nt, Homo sapiens
  misc_RNA (1)...(19): siRNA sense strand
gaagugcacuaauucagaa

SEQ ID NO: 1031493 - RNA, 19 nt, Homo sapiens
  misc_RNA (1)...(19): siRNA sense strand
ggagaaguccuuauugauu

SEQ ID NO: 1031494 - RNA, 19 nt, Homo sapiens
  misc_RNA (1)...(19): siRNA sense strand
acacagagcuuaugaaacu

SEQ ID NO: 1031495 - RNA, 19 nt, Homo sapiens
  misc_RNA (1)...(19): siRNA sense strand
gcaaauucguucaauaaag

SEQ ID NO: 1031496 - RNA, 19 nt, Homo sapiens
  misc_RNA (1)...(19): siRNA sense strand
gaaaucaauucacuucaca

SEQ ID NO: 1031497 - RNA, 19 nt, Homo sapiens
  misc_RNA (1)...(19): siRNA sense strand
gauauguucuuggcuuuaa

SEQ ID NO: 1031498 - RNA, 19 nt, Homo sapiens
  misc_RNA (1)...(19): siRNA sense strand
gaagacaccaaaggaaaua

SEQ ID NO: 1031499 - RNA, 19 nt, Homo sapiens
  misc_RNA (1)...(19): siRNA sense strand
gcagagugguggauauguu

SEQ ID NO: 1031500 - RNA, 19 nt, Homo sapiens
  misc_RNA (1)...(19): siRNA sense strand
ugguuuagcucuugucaua

SEQ ID NO: 1031501 - RNA, 19 nt, Homo sapiens
  misc_RNA (1)...(19): siRNA sense strand
uaaaauagauccuguggaa

SEQ ID NO: 1031502 - RNA, 19 nt, Homo sapiens
  misc_RNA (1)...(19): siRNA sense strand
caaaggaaauaauggagau

SEQ ID NO: 1031503 - RNA, 19 nt, Homo sapiens
  misc_RNA (1)...(19): siRNA sense strand
guacacagagcuuaugaaa

SEQ ID NO: 1031504 - RNA, 19 nt, Homo sapiens
  misc_RNA (1)...(19): siRNA sense strand
ggacugcuaacucuaaauu

SEQ ID NO: 1031505 - RNA, 19 nt, Homo sapiens
  misc_RNA (1)...(19): siRNA sense strand
aaacugaagcucucuauau

SEQ ID NO: 1031506 - RNA, 19 nt, Homo sapiens
  misc_RNA (1)...(19): siRNA sense strand
cacaagaacauguauauga

SEQ ID NO: 1031507 - RNA, 19 nt, Homo sapiens
  misc_RNA (1)...(19): siRNA sense strand
aacugaagcucucuauaua

SEQ ID NO: 1031508 - RNA, 19 nt, Homo sapiens
  misc_RNA (1)...(19): siRNA sense strand
gaaauugaaggauggauuc

SEQ ID NO: 1031509 - RNA, 19 nt, Homo sapiens
  misc_RNA (1)...(19): siRNA sense strand
gagcuuaugaaacuucuaa

SEQ ID NO: 1031510 - RNA, 19 nt, Homo sapiens
  misc_RNA (1)...(19): siRNA sense strand
ucgaacaaauucaagauga

SEQ ID NO: 1031511 - RNA, 19 nt, Homo sapiens
  misc_RNA (1)...(19): siRNA sense strand
gaucagggcaauuuaggaa

SEQ ID NO: 1031512 - RNA, 19 nt, Homo sapiens
  misc_RNA (1)...(19): siRNA sense strand
caaggacugcuaacucuaa

SEQ ID NO: 1031513 - RNA, 19 nt, Homo sapiens
  misc_RNA (1)...(19): siRNA sense strand
gcaacaagaucgugaaccu

SEQ ID NO: 1031514 - RNA, 19 nt, Homo sapiens
  misc_RNA (1)...(19): siRNA sense strand
gaacaaauucaagaugaug

SEQ ID NO: 1031515 - RNA, 19 nt, Homo sapiens
  misc_RNA (1)...(19): siRNA sense strand
ggaaaucaauucacuucac

SEQ ID NO: 1031516 - RNA, 19 nt, Homo sapiens
  misc_RNA (1)...(19): siRNA sense strand
gguagacucuugguaacaa

SEQ ID NO: 1031517 - RNA, 19 nt, Homo sapiens
  misc_RNA (1)...(19): siRNA sense strand
ccuggaagcccuagacuuu

SEQ ID NO: 1031518 - RNA, 19 nt, Homo sapiens
  misc_RNA (1)...(19): siRNA sense strand
uaucaagagucaauguuuc

SEQ ID NO: 1031519 - RNA, 19 nt, Homo sapiens
  misc_RNA (1)...(19): siRNA sense strand
guuuagcucuugucauaga

SEQ ID NO: 1031520 - RNA, 19 nt, Homo sapiens
  misc_RNA (1)...(19): siRNA sense strand
uaauggagauagagguaga

SEQ ID NO: 1031521 - RNA, 19 nt, Homo sapiens
  misc_RNA (1)...(19): siRNA sense strand
caacaaggacugcuaacuc

SEQ ID NO: 1031522 - RNA, 19 nt, Homo sapiens
  misc_RNA (1)...(19): siRNA sense strand
cuggagaaguccuuauuga

SEQ ID NO: 1031523 - RNA, 19 nt, Homo sapiens
  misc_RNA (1)...(19): siRNA sense strand
ccagugaucagggcaauuu

SEQ ID NO: 1031524 - RNA, 19 nt, Homo sapiens
  misc_RNA (1)...(19): siRNA sense strand
acaagaaucaguuaaggaa

SEQ ID NO: 1031525 - RNA, 19 nt, Homo sapiens
  misc_RNA (1)...(19): siRNA sense strand
cugcaaauucguucaauaa

SEQ ID NO: 1031526 - RNA, 19 nt, Homo sapiens
  misc_RNA (1)...(19): siRNA sense strand
aacaagaccuggagaaguc

SEQ ID NO: 1031527 - RNA, 19 nt, Homo sapiens
  misc_RNA (1)...(19): siRNA sense strand
cgaacaaauucaagaugau

SEQ ID NO: 1031528 - RNA, 19 nt, Homo sapiens
  misc_RNA (1)...(19): siRNA sense strand
uaccauaucugcaaauucg

SEQ ID NO: 1031529 - RNA, 19 nt, Homo sapiens
  misc_RNA (1)...(19): siRNA sense strand
guucuuggcuuuaaaauag

SEQ ID NO: 1031530 - RNA, 19 nt, Homo sapiens
  misc_RNA (1)...(19): siRNA sense strand
agaauucucuggcacucuu

SEQ ID NO: 1031531 - RNA, 19 nt, Homo sapiens
  misc_RNA (1)...(19): siRNA sense strand
uaacaguacucguuuugaa

SEQ ID NO: 1031532 - RNA, 19 nt, Homo sapiens
  misc_RNA (1)...(19): siRNA sense strand
caaacugaagcucucuaua

SEQ ID NO: 1031533 - RNA, 19 nt, Homo sapiens
  misc_RNA (1)...(19): siRNA sense strand
guagacucuugguaacaaa

SEQ ID NO: 1031534 - RNA, 19 nt, Homo sapiens
  misc_RNA (1)...(19): siRNA sense strand
ggauauguucuuggcuuua

SEQ ID NO: 1031535 - RNA, 19 nt, Homo sapiens
  misc_RNA (1)...(19): siRNA sense strand
gagguagacucuugguaac

SEQ ID NO: 1031536 - RNA, 19 nt, Homo sapiens
  misc_RNA (1)...(19): siRNA sense strand
agaaauagacucugauggu

SEQ ID NO: 1031537 - RNA, 19 nt, Homo sapiens
  misc_RNA (1)...(19): siRNA sense strand
ucugcaaauucguucaaua

SEQ ID NO: 1031538 - RNA, 19 nt, Homo sapiens
  misc_RNA (1)...(19): siRNA sense strand
agaauuguguggcaugcaa

SEQ ID NO: 1031539 - RNA, 19 nt, Homo sapiens
  misc_RNA (1)...(19): siRNA sense strand
uaagacuguugccacaaga

SEQ ID NO: 1031540 - RNA, 19 nt, Homo sapiens
  misc_RNA (1)...(19): siRNA sense strand
guagaaauagacucugaug

SEQ ID NO: 1031541 - RNA, 19 nt, Homo sapiens
  misc_RNA (1)...(19): siRNA sense strand
ggaucgggauguccguuuc

SEQ ID NO: 1031542 - RNA, 19 nt, Homo sapiens
  misc_RNA (1)...(19): siRNA sense strand
gccacaagaacauguauau

SEQ ID NO: 1031543 - RNA, 19 nt, Homo sapiens
  misc_RNA (1)...(19): siRNA sense strand
gacucuugguaacaaauuu

SEQ ID NO: 1031544 - RNA, 19 nt, Homo sapiens
  misc_RNA (1)...(19): siRNA sense strand
acaagaucgugaaccugua

SEQ ID NO: 1031545 - RNA, 19 nt, Homo sapiens
  misc_RNA (1)...(19): siRNA sense strand
uuaagaagugcacuaauuc

SEQ ID NO: 1031546 - RNA, 19 nt, Homo sapiens
  misc_RNA (1)...(19): siRNA sense strand
aaauguaacaguacucguu

SEQ ID NO: 1031547 - RNA, 19 nt, Homo sapiens
  misc_RNA (1)...(19): siRNA sense strand
gaaccuguauuuucagaag

SEQ ID NO: 1031548 - RNA, 19 nt, Homo sapiens
  misc_RNA (1)...(19): siRNA sense strand
caagaaucaguuaaggaaa

SEQ ID NO: 1031549 - RNA, 19 nt, Homo sapiens
  misc_RNA (1)...(19): siRNA sense strand
cuacaagaaucaguuaagg

SEQ ID NO: 1031550 - RNA, 19 nt, Homo sapiens
  misc_RNA (1)...(19): siRNA sense strand
aaauuugguuuagcucuug

SEQ ID NO: 1031551 - RNA, 19 nt, Homo sapiens
  misc_RNA (1)...(19): siRNA sense strand
ggcaugcaaauaugaauga

SEQ ID NO: 1031552 - RNA, 19 nt, Homo sapiens
  misc_RNA (1)...(19): siRNA sense strand
gaauuuauccagugaucag

SEQ ID NO: 1031553 - RNA, 19 nt, Homo sapiens
  misc_RNA (1)...(19): siRNA sense strand
ggaaauaauggagauagag

SEQ ID NO: 1031554 - RNA, 19 nt, Homo sapiens
  misc_RNA (1)...(19): siRNA sense strand
cuaagacuguugccacaag

SEQ ID NO: 1031555 - RNA, 19 nt, Homo sapiens
  misc_RNA (1)...(19): siRNA sense strand
ucagaacaagcaacuaaga

SEQ ID NO: 1031556 - RNA, 19 nt, Homo sapiens
  misc_RNA (1)...(19): siRNA sense strand
uaagaagugcacuaauuca

SEQ ID NO: 1031557 - RNA, 19 nt, Homo sapiens
  misc_RNA (1)...(19): siRNA sense strand
gugcacuaauucagaacaa

SEQ ID NO: 1031558 - RNA, 19 nt, Homo sapiens
  misc_RNA (1)...(19): siRNA sense strand
uggaguugauuaugagaug

SEQ ID NO: 1031559 - RNA, 19 nt, Homo sapiens
  misc_RNA (1)...(19): siRNA sense strand
ucagcagagugguggauau

SEQ ID NO: 1031560 - RNA, 19 nt, Homo sapiens
  misc_RNA (1)...(19): siRNA sense strand
ucaauguuucugucgguua

SEQ ID NO: 1031561 - RNA, 19 nt, Homo sapiens
  misc_RNA (1)...(19): siRNA sense strand
ggcuugcaauagagaaauu

SEQ ID NO: 1031562 - RNA, 19 nt, Homo sapiens
  misc_RNA (1)...(19): siRNA sense strand
caagaucgugaaccuguau

SEQ ID NO: 1031563 - RNA, 19 nt, Homo sapiens
  misc_RNA (1)...(19): siRNA sense strand
gaaaacaagaccuggagaa

SEQ ID NO: 1031564 - RNA, 19 nt, Homo sapiens
  misc_RNA (1)...(19): siRNA sense strand
aauaauggagauagaggua

SEQ ID NO: 1031565 - RNA, 19 nt, Homo sapiens
  misc_RNA (1)...(19): siRNA sense strand
ugaagacaccaaaggaaau

SEQ ID NO: 1031566 - RNA, 19 nt, Homo sapiens
  misc_RNA (1)...(19): siRNA sense strand
aacaaggacugcuaacucu

SEQ ID NO: 1031567 - RNA, 19 nt, Homo sapiens
  misc_RNA (1)...(19): siRNA sense strand
uuacaacaaggacugcuaa

SEQ ID NO: 1031568 - RNA, 19 nt, Homo sapiens
  misc_RNA (1)...(19): siRNA sense strand
uaaauuacgaggccaaacu

SEQ ID NO: 1031569 - RNA, 19 nt, Homo sapiens
  misc_RNA (1)...(19): siRNA sense strand
uggauauguucuuggcuuu

SEQ ID NO: 1031570 - RNA, 19 nt, Homo sapiens
  misc_RNA (1)...(19): siRNA sense strand
cugaagcucucuauauacu

SEQ ID NO: 1031571 - RNA, 19 nt, Homo sapiens
  misc_RNA (1)...(19): siRNA sense strand
caauguuucugucgguuac

SEQ ID NO: 1031572 - RNA, 19 nt, Homo sapiens
  misc_RNA (1)...(19): siRNA sense strand
gacagucgaacaaauucaa

SEQ ID NO: 1031573 - RNA, 19 nt, Homo sapiens
  misc_RNA (1)...(19): siRNA sense strand
agaagugcacuaauucaga

SEQ ID NO: 1031574 - RNA, 19 nt, Homo sapiens
  misc_RNA (1)...(19): siRNA sense strand
gcaguacacagagcuuaug

SEQ ID NO: 1031575 - RNA, 19 nt, Homo sapiens
  misc_RNA (1)...(19): siRNA sense strand
gacugcuaacucuaaauua

SEQ ID NO: 1031576 - RNA, 19 nt, Homo sapiens
  misc_RNA (1)...(19): siRNA sense strand
aaacaagaccuggagaagu

SEQ ID NO: 1031577 - RNA, 19 nt, Homo sapiens
  misc_RNA (1)...(19): siRNA sense strand
ucugacagucgaacaaauu

SEQ ID NO: 1031578 - RNA, 19 nt, Homo sapiens
  misc_RNA (1)...(19): siRNA sense strand
ccauauuuggaguugauua

SEQ ID NO: 1031579 - RNA, 19 nt, Homo sapiens
  misc_RNA (1)...(19): siRNA sense strand
aggaaauaauggagauaga

SEQ ID NO: 1031580 - RNA, 19 nt, Homo sapiens
  misc_RNA (1)...(19): siRNA sense strand
cuggcacucuuuggcauua

SEQ ID NO: 1031581 - RNA, 19 nt, Homo sapiens
  misc_RNA (1)...(19): siRNA sense strand
ccaaacugaagcucucuau

SEQ ID NO: 1031582 - RNA, 19 nt, Homo sapiens
  misc_RNA (1)...(19): siRNA sense strand
agaaauugaaggauggauu

SEQ ID NO: 1031583 - RNA, 19 nt, Homo sapiens
  misc_RNA (1)...(19): siRNA sense strand
agaaguccuuauugauugu

SEQ ID NO: 1031584 - RNA, 19 nt, Homo sapiens
  misc_RNA (1)...(19): siRNA sense strand
gcucugacagucgaacaaa

SEQ ID NO: 1031585 - RNA, 19 nt, Homo sapiens
  misc_RNA (1)...(19): siRNA sense strand
aaauagauccuguggaaaa

SEQ ID NO: 1031586 - RNA, 19 nt, Homo sapiens
  misc_RNA (1)...(19): siRNA sense strand
caguauaccauaucugcaa

SEQ ID NO: 1031587 - RNA, 19 nt, Homo sapiens
  misc_RNA (1)...(19): siRNA sense strand
acaagcaacuaagacuguu

SEQ ID NO: 1031588 - RNA, 19 nt, Homo sapiens
  misc_RNA (1)...(19): siRNA sense strand
ggcauuaucaagagucaau

SEQ ID NO: 1031589 - RNA, 19 nt, Homo sapiens
  misc_RNA (1)...(19): siRNA sense strand
ggcaauaagcaacaagauc

SEQ ID NO: 1031590 - RNA, 19 nt, Homo sapiens
  misc_RNA (1)...(19): siRNA sense strand
gaaaguacauuguggauug

SEQ ID NO: 1031591 - RNA, 19 nt, Homo sapiens
  misc_RNA (1)...(19): siRNA sense strand
gaacagauugccucaaaua

SEQ ID NO: 1031592 - RNA, 19 nt, Homo sapiens
  misc_RNA (1)...(19): siRNA sense strand
caacuagaaucccuuauga

SEQ ID NO: 1031593 - RNA, 19 nt, Homo sapiens
  misc_RNA (1)...(19): siRNA sense strand
gcacgacacuggaaugcua

SEQ ID NO: 1031594 - RNA, 19 nt, Homo sapiens
  misc_RNA (1)...(19): siRNA sense strand
gagcacaguuccucaguuu

SEQ ID NO: 1031595 - RNA, 19 nt, Homo sapiens
  misc_RNA (1)...(19): siRNA sense strand
gaagauacuccuuuccuuu

SEQ ID NO: 1031596 - RNA, 19 nt, Homo sapiens
  misc_RNA (1)...(19): siRNA sense strand
uagaaucccuuaugaagaa

SEQ ID NO: 1031597 - RNA, 19 nt, Homo sapiens
  misc_RNA (1)...(19): siRNA sense strand
cagauugccucaaauacua

SEQ ID NO: 1031598 - RNA, 19 nt, Homo sapiens
  misc_RNA (1)...(19): siRNA sense strand
gaaagaggaggcauauuug

SEQ ID NO: 1031599 - RNA, 19 nt, Homo sapiens
  misc_RNA (1)...(19): siRNA sense strand
ccucaaacauucauuucua

SEQ ID NO: 1031600 - RNA, 19 nt, Homo sapiens
  misc_RNA (1)...(19): siRNA sense strand
agaaagaggaggcauauuu

SEQ ID NO: 1031601 - RNA, 19 nt, Homo sapiens
  misc_RNA (1)...(19): siRNA sense strand
gccaagagacaacaaauaa

SEQ ID NO: 1031602 - RNA, 19 nt, Homo sapiens
  misc_RNA (1)...(19): siRNA sense strand
gcacaguuccucaguuuga

SEQ ID NO: 1031603 - RNA, 19 nt, Homo sapiens
  misc_RNA (1)...(19): siRNA sense strand
ugaagaaucuaguguguuc

SEQ ID NO: 1031604 - RNA, 19 nt, Homo sapiens
  misc_RNA (1)...(19): siRNA sense strand
ggaggaaggugaacauguc

SEQ ID NO: 1031605 - RNA, 19 nt, Homo sapiens
  misc_RNA (1)...(19): siRNA sense strand
gugaacaugucaaaccuuu

SEQ ID NO: 1031606 - RNA, 19 nt, Homo sapiens
  misc_RNA (1)...(19): siRNA sense strand
gaacaugucaaaccuuuua

SEQ ID NO: 1031607 - RNA, 19 nt, Homo sapiens
  misc_RNA (1)...(19): siRNA sense strand
aguauaaacucauggauug

SEQ ID NO: 1031608 - RNA, 19 nt, Homo sapiens
  misc_RNA (1)...(19): siRNA sense strand
gaaacuacauguaauuacg

SEQ ID NO: 1031609 - RNA, 19 nt, Homo sapiens
  misc_RNA (1)...(19): siRNA sense strand
gcacagagguccgaagaac

SEQ ID NO: 1031610 - RNA, 19 nt, Homo sapiens
  misc_RNA (1)...(19): siRNA sense strand
caagagacaacaaauaaug

SEQ ID NO: 1031611 - RNA, 19 nt, Homo sapiens
  misc_RNA (1)...(19): siRNA sense strand
ggacaaggauggagaacac

SEQ ID NO: 1031612 - RNA, 19 nt, Homo sapiens
  misc_RNA (1)...(19): siRNA sense strand
gauacaaggaagaaguuua

SEQ ID NO: 1031613 - RNA, 19 nt, Homo sapiens
  misc_RNA (1)...(19): siRNA sense strand
acaacaaccugcaaucuuc

SEQ ID NO: 1031614 - RNA, 19 nt, Homo sapiens
  misc_RNA (1)...(19): siRNA sense strand
caucugagguaguagaaau

SEQ ID NO: 1031615 - RNA, 19 nt, Homo sapiens
  misc_RNA (1)...(19): siRNA sense strand
caucuggacuccuaugguu

SEQ ID NO: 1031616 - RNA, 19 nt, Homo sapiens
  misc_RNA (1)...(19): siRNA sense strand
aaucuaguguguucaguaa

SEQ ID NO: 1031617 - RNA, 19 nt, Homo sapiens
  misc_RNA (1)...(19): siRNA sense strand
gaacaucugagguaguaga

SEQ ID NO: 1031618 - RNA, 19 nt, Homo sapiens
  misc_RNA (1)...(19): siRNA sense strand
gaaauggacaggaaaguac

SEQ ID NO: 1031619 - RNA, 19 nt, Homo sapiens
  misc_RNA (1)...(19): siRNA sense strand
caacaaauaaugagcaaca

SEQ ID NO: 1031620 - RNA, 19 nt, Homo sapiens
  misc_RNA (1)...(19): siRNA sense strand
ccacugagguugaggaaac

SEQ ID NO: 1031621 - RNA, 19 nt, Homo sapiens
  misc_RNA (1)...(19): siRNA sense strand
gcucaaagacaugcgguua

SEQ ID NO: 1031622 - RNA, 19 nt, Homo sapiens
  misc_RNA (1)...(19): siRNA sense strand
cuacuuaaaugcagcuguu

SEQ ID NO: 1031623 - RNA, 19 nt, Homo sapiens
  misc_RNA (1)...(19): siRNA sense strand
uggaagaaauggacaggaa

SEQ ID NO: 1031624 - RNA, 19 nt, Homo sapiens
  misc_RNA (1)...(19): siRNA sense strand
gaacuugaccacaggaaca

SEQ ID NO: 1031625 - RNA, 19 nt, Homo sapiens
  misc_RNA (1)...(19): siRNA sense strand
gcagagaauccacaaaaua

SEQ ID NO: 1031626 - RNA, 19 nt, Homo sapiens
  misc_RNA (1)...(19): siRNA sense strand
aggaacagauugccucaaa

SEQ ID NO: 1031627 - RNA, 19 nt, Homo sapiens
  misc_RNA (1)...(19): siRNA sense strand
gacaacaaauaaugagcaa

SEQ ID NO: 1031628 - RNA, 19 nt, Homo sapiens
  misc_RNA (1)...(19): siRNA sense strand
gacacuggaaugcuaaaua

SEQ ID NO: 1031629 - RNA, 19 nt, Homo sapiens
  misc_RNA (1)...(19): siRNA sense strand
ggaacagauugccucaaau

SEQ ID NO: 1031630 - RNA, 19 nt, Homo sapiens
  misc_RNA (1)...(19): siRNA sense strand
ggacagguucucuuuguuc

SEQ ID NO: 1031631 - RNA, 19 nt, Homo sapiens
  misc_RNA (1)...(19): siRNA sense strand
caggacagguucucuuugu

SEQ ID NO: 1031632 - RNA, 19 nt, Homo sapiens
  misc_RNA (1)...(19): siRNA sense strand
ccggaaagcucaaagacau

SEQ ID NO: 1031633 - RNA, 19 nt, Homo sapiens
  misc_RNA (1)...(19): siRNA sense strand
gaaucuaguguguucagua

SEQ ID NO: 1031634 - RNA, 19 nt, Homo sapiens
  misc_RNA (1)...(19): siRNA sense strand
aagauacuccuuuccuuua

SEQ ID NO: 1031635 - RNA, 19 nt, Homo sapiens
  misc_RNA (1)...(19): siRNA sense strand
uaguauuucuggaccauuu

SEQ ID NO: 1031636 - RNA, 19 nt, Homo sapiens
  misc_RNA (1)...(19): siRNA sense strand
ggaaggugaacaugucaaa

SEQ ID NO: 1031637 - RNA, 19 nt, Homo sapiens
  misc_RNA (1)...(19): siRNA sense strand
ggacaggaaaguacauugu

SEQ ID NO: 1031638 - RNA, 19 nt, Homo sapiens
  misc_RNA (1)...(19): siRNA sense strand
ggaagaaauggacaggaaa

SEQ ID NO: 1031639 - RNA, 19 nt, Homo sapiens
  misc_RNA (1)...(19): siRNA sense strand
ggaggcauauuuggaagug

SEQ ID NO: 1031640 - RNA, 19 nt, Homo sapiens
  misc_RNA (1)...(19): siRNA sense strand
gaggugggccaaacaggua

SEQ ID NO: 1031641 - RNA, 19 nt, Homo sapiens
  misc_RNA (1)...(19): siRNA sense strand
guagaaauccaagcacuga

SEQ ID NO: 1031642 - RNA, 19 nt, Homo sapiens
  misc_RNA (1)...(19): siRNA sense strand
gaugugaaauggucugacu

SEQ ID NO: 1031643 - RNA, 19 nt, Homo sapiens
  misc_RNA (1)...(19): siRNA sense strand
ucaaagacaugcgguuaca

SEQ ID NO: 1031644 - RNA, 19 nt, Homo sapiens
  misc_RNA (1)...(19): siRNA sense strand
ugaagauacuccuuuccuu

SEQ ID NO: 1031645 - RNA, 19 nt, Homo sapiens
  misc_RNA (1)...(19): siRNA sense strand
ugugaccagucuaguauuu

SEQ ID NO: 1031646 - RNA, 19 nt, Homo sapiens
  misc_RNA (1)...(19): siRNA sense strand
cuacgacuccucaaacauu

SEQ ID NO: 1031647 - RNA, 19 nt, Homo sapiens
  misc_RNA (1)...(19): siRNA sense strand
ggagaacacuuuggaaaau

SEQ ID NO: 1031648 - RNA, 19 nt, Homo sapiens
  misc_RNA (1)...(19): siRNA sense strand
ggaggcagcaagucccuuu

SEQ ID NO: 1031649 - RNA, 19 nt, Homo sapiens
  misc_RNA (1)...(19): siRNA sense strand
gaaauccaagcacugagaa

SEQ ID NO: 1031650 - RNA, 19 nt, Homo sapiens
  misc_RNA (1)...(19): siRNA sense strand
uaacuugguauuccaggua

SEQ ID NO: 1031651 - RNA, 19 nt, Homo sapiens
  misc_RNA (1)...(19): siRNA sense strand
acacuggaaugcuaaauac

SEQ ID NO: 1031652 - RNA, 19 nt, Homo sapiens
  misc_RNA (1)...(19): siRNA sense strand
uaugaagaaucuagugugu

SEQ ID NO: 1031653 - RNA, 19 nt, Homo sapiens
  misc_RNA (1)...(19): siRNA sense strand
gaagaaauggacaggaaag

SEQ ID NO: 1031654 - RNA, 19 nt, Homo sapiens
  misc_RNA (1)...(19): siRNA sense strand
aaccugcaaucuucuguaa

SEQ ID NO: 1031655 - RNA, 19 nt, Homo sapiens
  misc_RNA (1)...(19): siRNA sense strand
ccaaacagguagccagaac

SEQ ID NO: 1031656 - RNA, 19 nt, Homo sapiens
  misc_RNA (1)...(19): siRNA sense strand
gaacagauggagagcacau

SEQ ID NO: 1031657 - RNA, 19 nt, Homo sapiens
  misc_RNA (1)...(19): siRNA sense strand
gagauuaugaccauuccaa

SEQ ID NO: 1031658 - RNA, 19 nt, Homo sapiens
  misc_RNA (1)...(19): siRNA sense strand
ggaaaguacauuguggauu

SEQ ID NO: 1031659 - RNA, 19 nt, Homo sapiens
  misc_RNA (1)...(19): siRNA sense strand
ccugcaaucuucuguaaca

SEQ ID NO: 1031660 - RNA, 19 nt, Homo sapiens
  misc_RNA (1)...(19): siRNA sense strand
guacaaggaaggaaacgau

SEQ ID NO: 1031661 - RNA, 19 nt, Homo sapiens
  misc_RNA (1)...(19): siRNA sense strand
ccugucaucuggacuccua

SEQ ID NO: 1031662 - RNA, 19 nt, Homo sapiens
  misc_RNA (1)...(19): siRNA sense strand
agaaccgccuucagaaaga

SEQ ID NO: 1031663 - RNA, 19 nt, Homo sapiens
  misc_RNA (1)...(19): siRNA sense strand
caaggauggagaacacuuu

SEQ ID NO: 1031664 - RNA, 19 nt, Homo sapiens
  misc_RNA (1)...(19): siRNA sense strand
agaaauggacaggaaagua

SEQ ID NO: 1031665 - RNA, 19 nt, Homo sapiens
  misc_RNA (1)...(19): siRNA sense strand
auaaugagcaacagugaaa

SEQ ID NO: 1031666 - RNA, 19 nt, Homo sapiens
  misc_RNA (1)...(19): siRNA sense strand
aagcagauacgauucagaa

SEQ ID NO: 1031667 - RNA, 19 nt, Homo sapiens
  misc_RNA (1)...(19): siRNA sense strand
gcuugugugugcccugaaa

SEQ ID NO: 1031668 - RNA, 19 nt, Homo sapiens
  misc_RNA (1)...(19): siRNA sense strand
ccaacuagaaucccuuaug

SEQ ID NO: 1031669 - RNA, 19 nt, Homo sapiens
  misc_RNA (1)...(19): siRNA sense strand
ggauggagaacacuuugga

SEQ ID NO: 1031670 - RNA, 19 nt, Homo sapiens
  misc_RNA (1)...(19): siRNA sense strand
acaaggaagaaguuuauga

SEQ ID NO: 1031671 - RNA, 19 nt, Homo sapiens
  misc_RNA (1)...(19): siRNA sense strand
ggacuccuaugguuguaac

SEQ ID NO: 1031672 - RNA, 19 nt, Homo sapiens
  misc_RNA (1)...(19): siRNA sense strand
gagaacacuuuggaaaauu

SEQ ID NO: 1031673 - RNA, 19 nt, Homo sapiens
  misc_RNA (1)...(19): siRNA sense strand
gaccacaggaacagacaaa

SEQ ID NO: 1031674 - RNA, 19 nt, Homo sapiens
  misc_RNA (1)...(19): siRNA sense strand
acagguagccagaacuuga

SEQ ID NO: 1031675 - RNA, 19 nt, Homo sapiens
  misc_RNA (1)...(19): siRNA sense strand
ccauugauccugucacugu

SEQ ID NO: 1031676 - RNA, 19 nt, Homo sapiens
  misc_RNA (1)...(19): siRNA sense strand
aagaguuucugaccuggaa

SEQ ID NO: 1031677 - RNA, 19 nt, Homo sapiens
  misc_RNA (1)...(19): siRNA sense strand
gcacaacuuuugauacaag

SEQ ID NO: 1031678 - RNA, 19 nt, Homo sapiens
  misc_RNA (1)...(19): siRNA sense strand
caguauaaacucauggauu

SEQ ID NO: 1031679 - RNA, 19 nt, Homo sapiens
  misc_RNA (1)...(19): siRNA sense strand
ccacacacccugucaucug

SEQ ID NO: 1031680 - RNA, 19 nt, Homo sapiens
  misc_RNA (1)...(19): siRNA sense strand
ucuggaccauuuagagauu

SEQ ID NO: 1031681 - RNA, 19 nt, Homo sapiens
  misc_RNA (1)...(19): siRNA sense strand
gaggcgaccacuccuguga

SEQ ID NO: 1031682 - RNA, 19 nt, Homo sapiens
  misc_RNA (1)...(19): siRNA sense strand
aaacagguagccagaacuu

SEQ ID NO: 1031683 - RNA, 19 nt, Homo sapiens
  misc_RNA (1)...(19): siRNA sense strand
caaccugcaaucuucugua

SEQ ID NO: 1031684 - RNA, 19 nt, Homo sapiens
  misc_RNA (1)...(19): siRNA sense strand
ccacaaguaaccaggauag

SEQ ID NO: 1031685 - RNA, 19 nt, Homo sapiens
  misc_RNA (1)...(19): siRNA sense strand
ccaagagacaacaaauaau

SEQ ID NO: 1031686 - RNA, 19 nt, Homo sapiens
  misc_RNA (1)...(19): siRNA sense strand
ucagaaagaggaggcauau

SEQ ID NO: 1031687 - RNA, 19 nt, Homo sapiens
  misc_RNA (1)...(19): siRNA sense strand
gaaccgccuucagaaagag

SEQ ID NO: 1031688 - RNA, 19 nt, Homo sapiens
  misc_RNA (1)...(19): siRNA sense strand
ggcaaucacccguaugcuu

SEQ ID NO: 1031689 - RNA, 19 nt, Homo sapiens
  misc_RNA (1)...(19): siRNA sense strand
agauacuccuuuccuuuau

SEQ ID NO: 1031690 - RNA, 19 nt, Homo sapiens
  misc_RNA (1)...(19): siRNA sense strand
aaaccaagcuuugaacuuu

SEQ ID NO: 1031691 - RNA, 19 nt, Homo sapiens
  misc_RNA (1)...(19): siRNA sense strand
gaaccgagcccgaggaguu

SEQ ID NO: 1031692 - RNA, 19 nt, Homo sapiens
  misc_RNA (1)...(19): siRNA sense strand
guacauacaucgacagagu

SEQ ID NO: 1031693 - RNA, 19 nt, Homo sapiens
  misc_RNA (1)...(19): siRNA sense strand
ggaaagaugacgaggauga

SEQ ID NO: 1031694 - RNA, 19 nt, Homo sapiens
  misc_RNA (1)...(19): siRNA sense strand
gaaauagacaggaaagaug

SEQ ID NO: 1031695 - RNA, 19 nt, Homo sapiens
  misc_RNA (1)...(19): siRNA sense strand
aauaucggcuuguggaaua

SEQ ID NO: 1031696 - RNA, 19 nt, Homo sapiens
  misc_RNA (1)...(19): siRNA sense strand
gcaauggaaccuucuuaaa

SEQ ID NO: 1031697 - RNA, 19 nt, Homo sapiens
  misc_RNA (1)...(19): siRNA sense strand
guauugagccacagagaua

SEQ ID NO: 1031698 - RNA, 19 nt, Homo sapiens
  misc_RNA (1)...(19): siRNA sense strand
gucggacacuucugaaaua

SEQ ID NO: 1031699 - RNA, 19 nt, Homo sapiens
  misc_RNA (1)...(19): siRNA sense strand
gcaagucuccucgcaguaa

SEQ ID NO: 1031700 - RNA, 19 nt, Homo sapiens
  misc_RNA (1)...(19): siRNA sense strand
ggaagaagagcgggaguuu

SEQ ID NO: 1031701 - RNA, 19 nt, Homo sapiens
  misc_RNA (1)...(19): siRNA sense strand
ccacagagauacuaugaac

SEQ ID NO: 1031702 - RNA, 19 nt, Homo sapiens
  misc_RNA (1)...(19): siRNA sense strand
gcacagggaaccaucagaa

SEQ ID NO: 1031703 - RNA, 19 nt, Homo sapiens
  misc_RNA (1)...(19): siRNA sense strand
gugaagcccuacaucauug

SEQ ID NO: 1031704 - RNA, 19 nt, Homo sapiens
  misc_RNA (1)...(19): siRNA sense strand
gaauauacccgugcugaug

SEQ ID NO: 1031705 - RNA, 19 nt, Homo sapiens
  misc_RNA (1)...(19): siRNA sense strand
uggcgucucuacccauuua

SEQ ID NO: 1031706 - RNA, 19 nt, Homo sapiens
  misc_RNA (1)...(19): siRNA sense strand
caggaaagaugacgaggau

SEQ ID NO: 1031707 - RNA, 19 nt, Homo sapiens
  misc_RNA (1)...(19): siRNA sense strand
gagcaucgccagaggaaug

SEQ ID NO: 1031708 - RNA, 19 nt, Homo sapiens
  misc_RNA (1)...(19): siRNA sense strand
ggacacuucugaaauagac

SEQ ID NO: 1031709 - RNA, 19 nt, Homo sapiens
  misc_RNA (1)...(19): siRNA sense strand
aauggaaccuucuuaaaca

SEQ ID NO: 1031710 - RNA, 19 nt, Homo sapiens
  misc_RNA (1)...(19): siRNA sense strand
guacucaaauuuggauuca

SEQ ID NO: 1031711 - RNA, 19 nt, Homo sapiens
  misc_RNA (1)...(19): siRNA sense strand
acagagauacuaugaacua

SEQ ID NO: 1031712 - RNA, 19 nt, Homo sapiens
  misc_RNA (1)...(19): siRNA sense strand
gaacacaggagagcuagga

SEQ ID NO: 1031713 - RNA, 19 nt, Homo sapiens
  misc_RNA (1)...(19): siRNA sense strand
gaucacccgucuuguucaa

SEQ ID NO: 1031714 - RNA, 19 nt, Homo sapiens
  misc_RNA (1)...(19): siRNA sense strand
uugcagacauuccaauuga

SEQ ID NO: 1031715 - RNA, 19 nt, Homo sapiens
  misc_RNA (1)...(19): siRNA sense strand
gaccuuggcucaggcaaug

SEQ ID NO: 1031716 - RNA, 19 nt, Homo sapiens
  misc_RNA (1)...(19): siRNA sense strand
ggagagcuaggaacaguga

SEQ ID NO: 1031717 - RNA, 19 nt, Homo sapiens
  misc_RNA (1)...(19): siRNA sense strand
ggaaccuucuuaaacaaca

SEQ ID NO: 1031718 - RNA, 19 nt, Homo sapiens
  misc_RNA (1)...(19): siRNA sense strand
uagcagagaauacgucuug

SEQ ID NO: 1031719 - RNA, 19 nt, Homo sapiens
  misc_RNA (1)...(19): siRNA sense strand
gaaccuucuuaaacaacaa

SEQ ID NO: 1031720 - RNA, 19 nt, Homo sapiens
  misc_RNA (1)...(19): siRNA sense strand
gaacagugaccgggacaga

SEQ ID NO: 1031721 - RNA, 19 nt, Homo sapiens
  misc_RNA (1)...(19): siRNA sense strand
agaaaaggauguacucaaa

SEQ ID NO: 1031722 - RNA, 19 nt, Homo sapiens
  misc_RNA (1)...(19): siRNA sense strand
caauugaucacccgucuug

SEQ ID NO: 1031723 - RNA, 19 nt, Homo sapiens
  misc_RNA (1)...(19): siRNA sense strand
ggaaccaucagaacaggaa

SEQ ID NO: 1031724 - RNA, 19 nt, Homo sapiens
  misc_RNA (1)...(19): siRNA sense strand
agcaugcggucuuucaaua

SEQ ID NO: 1031725 - RNA, 19 nt, Homo sapiens
  misc_RNA (1)...(19): siRNA sense strand
cagagauacuaugaacuaa

SEQ ID NO: 1031726 - RNA, 19 nt, Homo sapiens
  misc_RNA (1)...(19): siRNA sense strand
caauggaaccuucuuaaac

SEQ ID NO: 1031727 - RNA, 19 nt, Homo sapiens
  misc_RNA (1)...(19): siRNA sense strand
aaauuuggauucaguagca

SEQ ID NO: 1031728 - RNA, 19 nt, Homo sapiens
  misc_RNA (1)...(19): siRNA sense strand
ccucaccacucaacaguca

SEQ ID NO: 1031729 - RNA, 19 nt, Homo sapiens
  misc_RNA (1)...(19): siRNA sense strand
ggcaauggaaccuucuuaa

SEQ ID NO: 1031730 - RNA, 19 nt, Homo sapiens
  misc_RNA (1)...(19): siRNA sense strand
gaggugcccgcuaaagaaa

SEQ ID NO: 1031731 - RNA, 19 nt, Homo sapiens
  misc_RNA (1)...(19): siRNA sense strand
aaauagacaggaaagauga

SEQ ID NO: 1031732 - RNA, 19 nt, Homo sapiens
  misc_RNA (1)...(19): siRNA sense strand
acaguuggccgaagaguga

SEQ ID NO: 1031733 - RNA, 19 nt, Homo sapiens
  misc_RNA (1)...(19): siRNA sense strand
aagaagagcgggaguuuua

SEQ ID NO: 1031734 - RNA, 19 nt, Homo sapiens
  misc_RNA (1)...(19): siRNA sense strand
gguggcgucucuacccauu

SEQ ID NO: 1031735 - RNA, 19 nt, Homo sapiens
  misc_RNA (1)...(19): siRNA sense strand
gagcgggaguuuuauaaug

SEQ ID NO: 1031736 - RNA, 19 nt, Homo sapiens
  misc_RNA (1)...(19): siRNA sense strand
gaagagcgggaguuuuaua

SEQ ID NO: 1031737 - RNA, 19 nt, Homo sapiens
  misc_RNA (1)...(19): siRNA sense strand
caggagagcuaggaacagu

SEQ ID NO: 1031738 - RNA, 19 nt, Homo sapiens
  misc_RNA (1)...(19): siRNA sense strand
ggaggaggaggaagaagug

SEQ ID NO: 1031739 - RNA, 19 nt, Homo sapiens
  misc_RNA (1)...(19): siRNA sense strand
caaagcagcaugcggucuu

SEQ ID NO: 1031740 - RNA, 19 nt, Homo sapiens
  misc_RNA (1)...(19): siRNA sense strand
gcagacauuccaauugauc

SEQ ID NO: 1031741 - RNA, 19 nt, Homo sapiens
  misc_RNA (1)...(19): siRNA sense strand
gaugaggugcuuccaguca

SEQ ID NO: 1031742 - RNA, 19 nt, Homo sapiens
  misc_RNA (1)...(19): siRNA sense strand
ugaaauagacaggaaagau

SEQ ID NO: 1031743 - RNA, 19 nt, Homo sapiens
  misc_RNA (1)...(19): siRNA sense strand
ccgaaguccucaccacuca

SEQ ID NO: 1031744 - RNA, 19 nt, Homo sapiens
  misc_RNA (1)...(19): siRNA sense strand
gaagagugaagcccuacau

SEQ ID NO: 1031745 - RNA, 19 nt, Homo sapiens
  misc_RNA (1)...(19): siRNA sense strand
caaaggagaacgucuaacg

SEQ ID NO: 1031746 - RNA, 19 nt, Homo sapiens
  misc_RNA (1)...(19): siRNA sense strand
gagugaagcccuacaucau

SEQ ID NO: 1031747 - RNA, 19 nt, Homo sapiens
  misc_RNA (1)...(19): siRNA sense strand
gcaugcggucuuucaauau

SEQ ID NO: 1031748 - RNA, 19 nt, Homo sapiens
  misc_RNA (1)...(19): siRNA sense strand
ccagaggaaugacguuggu

SEQ ID NO: 1031749 - RNA, 19 nt, Homo sapiens
  misc_RNA (1)...(19): siRNA sense strand
ggguguagucauuaaauau

SEQ ID NO: 1031750 - RNA, 19 nt, Homo sapiens
  misc_RNA (1)...(19): siRNA sense strand
cuucugaaauagacaggaa

SEQ ID NO: 1031751 - RNA, 19 nt, Homo sapiens
  misc_RNA (1)...(19): siRNA sense strand
uggcacaguuggccgaaga

SEQ ID NO: 1031752 - RNA, 19 nt, Homo sapiens
  misc_RNA (1)...(19): siRNA sense strand
ggaauauacccgugcugau

SEQ ID NO: 1031753 - RNA, 19 nt, Homo sapiens
  misc_RNA (1)...(19): siRNA sense strand
caugcggucuuucaauauc

SEQ ID NO: 1031754 - RNA, 19 nt, Homo sapiens
  misc_RNA (1)...(19): siRNA sense strand
acucaacagucaaagugaa

SEQ ID NO: 1031755 - RNA, 19 nt, Homo sapiens
  misc_RNA (1)...(19): siRNA sense strand
acucaaauuuggauucagu

SEQ ID NO: 1031756 - RNA, 19 nt, Homo sapiens
  misc_RNA (1)...(19): siRNA sense strand
caccaaaggagaacgucua

SEQ ID NO: 1031757 - RNA, 19 nt, Homo sapiens
  misc_RNA (1)...(19): siRNA sense strand
gggguguagucauuaaaua

SEQ ID NO: 1031758 - RNA, 19 nt, Homo sapiens
  misc_RNA (1)...(19): siRNA sense strand
agaggugcccgcuaaagaa

SEQ ID NO: 1031759 - RNA, 19 nt, Homo sapiens
  misc_RNA (1)...(19): siRNA sense strand
ucacccgucuuguucaaag

SEQ ID NO: 1031760 - RNA, 19 nt, Homo sapiens
  misc_RNA (1)...(19): siRNA sense strand
caggaacacaggagagcua

SEQ ID NO: 1031761 - RNA, 19 nt, Homo sapiens
  misc_RNA (1)...(19): siRNA sense strand
gggagcaucgccagaggaa

SEQ ID NO: 1031762 - RNA, 19 nt, Homo sapiens
  misc_RNA (1)...(19): siRNA sense strand
ggaggaggaagaagugucu

SEQ ID NO: 1031763 - RNA, 19 nt, Homo sapiens
  misc_RNA (1)...(19): siRNA sense strand
aaggauguacucaaauuug

SEQ ID NO: 1031764 - RNA, 19 nt, Homo sapiens
  misc_RNA (1)...(19): siRNA sense strand
ugaggugcuuccagucaug

SEQ ID NO: 1031765 - RNA, 19 nt, Homo sapiens
  misc_RNA (1)...(19): siRNA sense strand
gguggcaacaacaaagaaa

SEQ ID NO: 1031766 - RNA, 19 nt, Homo sapiens
  misc_RNA (1)...(19): siRNA sense strand
gaagcaggagcgugaggau

SEQ ID NO: 1031767 - RNA, 19 nt, Homo sapiens
  misc_RNA (1)...(19): siRNA sense strand
uugaggacaccaacacuuu

SEQ ID NO: 1031768 - RNA, 19 nt, Homo sapiens
  misc_RNA (1)...(19): siRNA sense strand
aagaggugcccgcuaaaga

SEQ ID NO: 1031769 - RNA, 19 nt, Homo sapiens
  misc_RNA (1)...(19): siRNA sense strand
gaaagaugacgaggaugag

SEQ ID NO: 1031770 - RNA, 19 nt, Homo sapiens
  misc_RNA (1)...(19): siRNA sense strand
gaaaaggauguacucaaau

SEQ ID NO: 1031771 - RNA, 19 nt, Homo sapiens
  misc_RNA (1)...(19): siRNA sense strand
aacaaggccucagggagaa

SEQ ID NO: 1031772 - RNA, 19 nt, Homo sapiens
  misc_RNA (1)...(19): siRNA sense strand
agugaagcccuacaucauu

SEQ ID NO: 1031773 - RNA, 19 nt, Homo sapiens
  misc_RNA (1)...(19): siRNA sense strand
gcaggagcgugaggaucau

SEQ ID NO: 1031774 - RNA, 19 nt, Homo sapiens
  misc_RNA (1)...(19): siRNA sense strand
cgucggacacuucugaaau

SEQ ID NO: 1031775 - RNA, 19 nt, Homo sapiens
  misc_RNA (1)...(19): siRNA sense strand
uggauucaguagcagagaa

SEQ ID NO: 1031776 - RNA, 19 nt, Homo sapiens
  misc_RNA (1)...(19): siRNA sense strand
gauguacucaaauuuggau

SEQ ID NO: 1031777 - RNA, 19 nt, Homo sapiens
  misc_RNA (1)...(19): siRNA sense strand
ggauguacucaaauuugga

SEQ ID NO: 1031778 - RNA, 19 nt, Homo sapiens
  misc_RNA (1)...(19): siRNA sense strand
agagugaagcccuacauca

SEQ ID NO: 1031779 - RNA, 19 nt, Homo sapiens
  misc_RNA (1)...(19): siRNA sense strand
gagcgucucagcccagaag

SEQ ID NO: 1031780 - RNA, 19 nt, Homo sapiens
  misc_RNA (1)...(19): siRNA sense strand
caagucuccucgcaguaag

SEQ ID NO: 1031781 - RNA, 19 nt, Homo sapiens
  misc_RNA (1)...(19): siRNA sense strand
gggacgggaucgagacacu

SEQ ID NO: 1031782 - RNA, 19 nt, Homo sapiens
  misc_RNA (1)...(19): siRNA sense strand
gcagcaugcggucuuucaa

SEQ ID NO: 1031783 - RNA, 19 nt, Homo sapiens
  misc_RNA (1)...(19): siRNA sense strand
gaaguccucaccacucaac

SEQ ID NO: 1031784 - RNA, 19 nt, Homo sapiens
  misc_RNA (1)...(19): siRNA sense strand
cagcaugcggucuuucaau

SEQ ID NO: 1031785 - RNA, 19 nt, Homo sapiens
  misc_RNA (1)...(19): siRNA sense strand
aaacaacaaacguauugag

SEQ ID NO: 1031786 - RNA, 19 nt, Homo sapiens
  misc_RNA (1)...(19): siRNA sense strand
caauaucggcuuguggaau

SEQ ID NO: 1031787 - RNA, 19 nt, Homo sapiens
  misc_RNA (1)...(19): siRNA sense strand
gaagaagagcgggaguuuu

SEQ ID NO: 1031788 - RNA, 19 nt, Homo sapiens
  misc_RNA (1)...(19): siRNA sense strand
ucagggagaagaagcaagu

SEQ ID NO: 1031789 - RNA, 19 nt, Homo sapiens
  misc_RNA (1)...(19): siRNA sense strand
ucaccacucaacagucaaa

SEQ ID NO: 1031790 - RNA, 19 nt, Homo sapiens
  misc_RNA (1)...(19): siRNA sense strand
gcacaaauuucacucauua

SEQ ID NO: 1031791 - RNA, 19 nt, Homo sapiens
  misc_RNA (1)...(19): siRNA sense strand
gaaguucucucuugugaau

SEQ ID NO: 1031792 - RNA, 19 nt, Homo sapiens
  misc_RNA (1)...(19): siRNA sense strand
gaaauccgccugugcuaua

SEQ ID NO: 1031793 - RNA, 19 nt, Homo sapiens
  misc_RNA (1)...(19): siRNA sense strand
caaccaagcuuucguguac

SEQ ID NO: 1031794 - RNA, 19 nt, Homo sapiens
  misc_RNA (1)...(19): siRNA sense strand
gacaugcccuuauauauuc

SEQ ID NO: 1031795 - RNA, 19 nt, Homo sapiens
  misc_RNA (1)...(19): siRNA sense strand
gacuagagcugaagaugaa

SEQ ID NO: 1031796 - RNA, 19 nt, Homo sapiens
  misc_RNA (1)...(19): siRNA sense strand
aaacagccauuaaggauug

SEQ ID NO: 1031797 - RNA, 19 nt, Homo sapiens
  misc_RNA (1)...(19): siRNA sense strand
gagauuuccuuaugcauau

SEQ ID NO: 1031798 - RNA, 19 nt, Homo sapiens
  misc_RNA (1)...(19): siRNA sense strand
gagaugaucccuuugauau

SEQ ID NO: 1031799 - RNA, 19 nt, Homo sapiens
  misc_RNA (1)...(19): siRNA sense strand
caacuuaggagucauugua

SEQ ID NO: 1031800 - RNA, 19 nt, Homo sapiens
  misc_RNA (1)...(19): siRNA sense strand
ggcaaagacuggaagcuaa

SEQ ID NO: 1031801 - RNA, 19 nt, Homo sapiens
  misc_RNA (1)...(19): siRNA sense strand
caaauacgccaugcaguua

SEQ ID NO: 1031802 - RNA, 19 nt, Homo sapiens
  misc_RNA (1)...(19): siRNA sense strand
gaagaaaaguguuguggaa

SEQ ID NO: 1031803 - RNA, 19 nt, Homo sapiens
  misc_RNA (1)...(19): siRNA sense strand
gcaaaguucuguaucuucu

SEQ ID NO: 1031804 - RNA, 19 nt, Homo sapiens
  misc_RNA (1)...(19): siRNA sense strand
gaaggagacuuagacacaa

SEQ ID NO: 1031805 - RNA, 19 nt, Homo sapiens
  misc_RNA (1)...(19): siRNA sense strand
cgacaggcauccacaguug

SEQ ID NO: 1031806 - RNA, 19 nt, Homo sapiens
  misc_RNA (1)...(19): siRNA sense strand
gaguuuagcuuugaguuug

SEQ ID NO: 1031807 - RNA, 19 nt, Homo sapiens
  misc_RNA (1)...(19): siRNA sense strand
caauggagcccucaaggua

SEQ ID NO: 1031808 - RNA, 19 nt, Homo sapiens
  misc_RNA (1)...(19): siRNA sense strand
ugaaggacccggaaucuuu

SEQ ID NO: 1031809 - RNA, 19 nt, Homo sapiens
  misc_RNA (1)...(19): siRNA sense strand
cuggagagcuaacaucuaa

SEQ ID NO: 1031810 - RNA, 19 nt, Homo sapiens
  misc_RNA (1)...(19): siRNA sense strand
gagcaucaacugccucuuu

SEQ ID NO: 1031811 - RNA, 19 nt, Homo sapiens
  misc_RNA (1)...(19): siRNA sense strand
ugacaugcccuuauauauu

SEQ ID NO: 1031812 - RNA, 19 nt, Homo sapiens
  misc_RNA (1)...(19): siRNA sense strand
gaaacaagcaccucgagau

SEQ ID NO: 1031813 - RNA, 19 nt, Homo sapiens
  misc_RNA (1)...(19): siRNA sense strand
cgacaggucuuuccucucu

SEQ ID NO: 1031814 - RNA, 19 nt, Homo sapiens
  misc_RNA (1)...(19): siRNA sense strand
aaagagaagugcgguugua

SEQ ID NO: 1031815 - RNA, 19 nt, Homo sapiens
  misc_RNA (1)...(19): siRNA sense strand
ggacuagagcugaagauga

SEQ ID NO: 1031816 - RNA, 19 nt, Homo sapiens
  misc_RNA (1)...(19): siRNA sense strand
uaucaaagcagccaauuau

SEQ ID NO: 1031817 - RNA, 19 nt, Homo sapiens
  misc_RNA (1)...(19): siRNA sense strand
ggaaagcaaaguucuguau

SEQ ID NO: 1031818 - RNA, 19 nt, Homo sapiens
  misc_RNA (1)...(19): siRNA sense strand
caaugacuguccauaagaa

SEQ ID NO: 1031819 - RNA, 19 nt, Homo sapiens
  misc_RNA (1)...(19): siRNA sense strand
ucauaucaauuucccagua

SEQ ID NO: 1031820 - RNA, 19 nt, Homo sapiens
  misc_RNA (1)...(19): siRNA sense strand
ucaaagcagccaauuauga

SEQ ID NO: 1031821 - RNA, 19 nt, Homo sapiens
  misc_RNA (1)...(19): siRNA sense strand
agucaaauuugccucauaa

SEQ ID NO: 1031822 - RNA, 19 nt, Homo sapiens
  misc_RNA (1)...(19): siRNA sense strand
gcaaagacuggaagcuaaa

SEQ ID NO: 1031823 - RNA, 19 nt, Homo sapiens
  misc_RNA (1)...(19): siRNA sense strand
auagugacaugcccuuaua

SEQ ID NO: 1031824 - RNA, 19 nt, Homo sapiens
  misc_RNA (1)...(19): siRNA sense strand
gagaagugcgguuguaaug

SEQ ID NO: 1031825 - RNA, 19 nt, Homo sapiens
  misc_RNA (1)...(19): siRNA sense strand
caugaggacugcuacaaau

SEQ ID NO: 1031826 - RNA, 19 nt, Homo sapiens
  misc_RNA (1)...(19): siRNA sense strand
agaaguucauggucaagua

SEQ ID NO: 1031827 - RNA, 19 nt, Homo sapiens
  misc_RNA (1)...(19): siRNA sense strand
uuaaggcaguaacacaaua

SEQ ID NO: 1031828 - RNA, 19 nt, Homo sapiens
  misc_RNA (1)...(19): siRNA sense strand
ccuuugauaucacuuauga

SEQ ID NO: 1031829 - RNA, 19 nt, Homo sapiens
  misc_RNA (1)...(19): siRNA sense strand
uaaaagcccuaaauaguga

SEQ ID NO: 1031830 - RNA, 19 nt, Homo sapiens
  misc_RNA (1)...(19): siRNA sense strand
ccaggaacaaauuaucuua

SEQ ID NO: 1031831 - RNA, 19 nt, Homo sapiens
  misc_RNA (1)...(19): siRNA sense strand
ggagagcuaacaucuaaga

SEQ ID NO: 1031832 - RNA, 19 nt, Homo sapiens
  misc_RNA (1)...(19): siRNA sense strand
gaaggacccggaaucuuug

SEQ ID NO: 1031833 - RNA, 19 nt, Homo sapiens
  misc_RNA (1)...(19): siRNA sense strand
gaagugggccaaaggaauc

SEQ ID NO: 1031834 - RNA, 19 nt, Homo sapiens
  misc_RNA (1)...(19): siRNA sense strand
cagcuggucuuugguuaaa

SEQ ID NO: 1031835 - RNA, 19 nt, Homo sapiens
  misc_RNA (1)...(19): siRNA sense strand
ccaauuaugacuucuauca

SEQ ID NO: 1031836 - RNA, 19 nt, Homo sapiens
  misc_RNA (1)...(19): siRNA sense strand
cauuaaggauuguccaguu

SEQ ID NO: 1031837 - RNA, 19 nt, Homo sapiens
  misc_RNA (1)...(19): siRNA sense strand
gaaaaugugcaguuaauga

SEQ ID NO: 1031838 - RNA, 19 nt, Homo sapiens
  misc_RNA (1)...(19): siRNA sense strand
gaugcuccuuugcagauaa

SEQ ID NO: 1031839 - RNA, 19 nt, Homo sapiens
  misc_RNA (1)...(19): siRNA sense strand
gcugaaaccucauuaugcu

SEQ ID NO: 1031840 - RNA, 19 nt, Homo sapiens
  misc_RNA (1)...(19): siRNA sense strand
ggaacaaauuaucuuaugc

SEQ ID NO: 1031841 - RNA, 19 nt, Homo sapiens
  misc_RNA (1)...(19): siRNA sense strand
gagauaauccagaaguuca

SEQ ID NO: 1031842 - RNA, 19 nt, Homo sapiens
  misc_RNA (1)...(19): siRNA sense strand
gagccugaguuuagcuuug

SEQ ID NO: 1031843 - RNA, 19 nt, Homo sapiens
  misc_RNA (1)...(19): siRNA sense strand
ucaacugccucuuuacugu

SEQ ID NO: 1031844 - RNA, 19 nt, Homo sapiens
  misc_RNA (1)...(19): siRNA sense strand
ccaauccacagauagcuua

SEQ ID NO: 1031845 - RNA, 19 nt, Homo sapiens
  misc_RNA (1)...(19): siRNA sense strand
gaacuuccuacuuaucaga

SEQ ID NO: 1031846 - RNA, 19 nt, Homo sapiens
  misc_RNA (1)...(19): siRNA sense strand
ugagauuuccuuaugcaua

SEQ ID NO: 1031847 - RNA, 19 nt, Homo sapiens
  misc_RNA (1)...(19): siRNA sense strand
ggaccaacagggcuuuauu

SEQ ID NO: 1031848 - RNA, 19 nt, Homo sapiens
  misc_RNA (1)...(19): siRNA sense strand
cauaucaauuucccaguau

SEQ ID NO: 1031849 - RNA, 19 nt, Homo sapiens
  misc_RNA (1)...(19): siRNA sense strand
acacaaugacuguccauaa

SEQ ID NO: 1031850 - RNA, 19 nt, Homo sapiens
  misc_RNA (1)...(19): siRNA sense strand
caggccagcuaguggauuu

SEQ ID NO: 1031851 - RNA, 19 nt, Homo sapiens
  misc_RNA (1)...(19): siRNA sense strand
uaaggaaaaugugcaguua

SEQ ID NO: 1031852 - RNA, 19 nt, Homo sapiens
  misc_RNA (1)...(19): siRNA sense strand
gcccuuauauauucuguca

SEQ ID NO: 1031853 - RNA, 19 nt, Homo sapiens
  misc_RNA (1)...(19): siRNA sense strand
ggaagugggccaaaggaau

SEQ ID NO: 1031854 - RNA, 19 nt, Homo sapiens
  misc_RNA (1)...(19): siRNA sense strand
ugaagaugaaggagacuua

SEQ ID NO: 1031855 - RNA, 19 nt, Homo sapiens
  misc_RNA (1)...(19): siRNA sense strand
cgagaugaucccuuugaua

SEQ ID NO: 1031856 - RNA, 19 nt, Homo sapiens
  misc_RNA (1)...(19): siRNA sense strand
aagcuaaacugccgaccuu

SEQ ID NO: 1031857 - RNA, 19 nt, Homo sapiens
  misc_RNA (1)...(19): siRNA sense strand
ucauuaugcucaacuuaug

SEQ ID NO: 1031858 - RNA, 19 nt, Homo sapiens
  misc_RNA (1)...(19): siRNA sense strand
ugaggacugcuacaaauuu

SEQ ID NO: 1031859 - RNA, 19 nt, Homo sapiens
  misc_RNA (1)...(19): siRNA sense strand
cacaaugacuguccauaag

SEQ ID NO: 1031860 - RNA, 19 nt, Homo sapiens
  misc_RNA (1)...(19): siRNA sense strand
gugccuaccagucaaauuu

SEQ ID NO: 1031861 - RNA, 19 nt, Homo sapiens
  misc_RNA (1)...(19): siRNA sense strand
aaagcaaaguucuguaucu

SEQ ID NO: 1031862 - RNA, 19 nt, Homo sapiens
  misc_RNA (1)...(19): siRNA sense strand
ccacagugccuaccaguca

SEQ ID NO: 1031863 - RNA, 19 nt, Homo sapiens
  misc_RNA (1)...(19): siRNA sense strand
agcaucaacugccucuuua

SEQ ID NO: 1031864 - RNA, 19 nt, Homo sapiens
  misc_RNA (1)...(19): siRNA sense strand
cagacaagcccaagaaaca

SEQ ID NO: 1031865 - RNA, 19 nt, Homo sapiens
  misc_RNA (1)...(19): siRNA sense strand
ggaugcugauaaacuuaaa

SEQ ID NO: 1031866 - RNA, 19 nt, Homo sapiens
  misc_RNA (1)...(19): siRNA sense strand
acaaauacgccaugcaguu

SEQ ID NO: 1031867 - RNA, 19 nt, Homo sapiens
  misc_RNA (1)...(19): siRNA sense strand
gaaagcaaaguucuguauc

SEQ ID NO: 1031868 - RNA, 19 nt, Homo sapiens
  misc_RNA (1)...(19): siRNA sense strand
gcucugggccugacaaagu

SEQ ID NO: 1031869 - RNA, 19 nt, Homo sapiens
  misc_RNA (1)...(19): siRNA sense strand
ugaaggagacuuagacaca

SEQ ID NO: 1031870 - RNA, 19 nt, Homo sapiens
  misc_RNA (1)...(19): siRNA sense strand
uaacuuucauacagguuug

SEQ ID NO: 1031871 - RNA, 19 nt, Homo sapiens
  misc_RNA (1)...(19): siRNA sense strand
cagauucggaugcugauaa

SEQ ID NO: 1031872 - RNA, 19 nt, Homo sapiens
  misc_RNA (1)...(19): siRNA sense strand
gaaccaaguacuccagauc

SEQ ID NO: 1031873 - RNA, 19 nt, Homo sapiens
  misc_RNA (1)...(19): siRNA sense strand
gaggaggacccaguaggua

SEQ ID NO: 1031874 - RNA, 19 nt, Homo sapiens
  misc_RNA (1)...(19): siRNA sense strand
uaaagucuuggaaggauuu

SEQ ID NO: 1031875 - RNA, 19 nt, Homo sapiens
  misc_RNA (1)...(19): siRNA sense strand
ccugauggccuuuggguuu

SEQ ID NO: 1031876 - RNA, 19 nt, Homo sapiens
  misc_RNA (1)...(19): siRNA sense strand
gggcugaaaccucauuaug

SEQ ID NO: 1031877 - RNA, 19 nt, Homo sapiens
  misc_RNA (1)...(19): siRNA sense strand
acaagcaccucgagaugau

SEQ ID NO: 1031878 - RNA, 19 nt, Homo sapiens
  misc_RNA (1)...(19): siRNA sense strand
gaaccaagacccagcucau

SEQ ID NO: 1031879 - RNA, 19 nt, Homo sapiens
  misc_RNA (1)...(19): siRNA sense strand
gaaagagaagugcgguugu

SEQ ID NO: 1031880 - RNA, 19 nt, Homo sapiens
  misc_RNA (1)...(19): siRNA sense strand
acaggucuuuccucucuuu

SEQ ID NO: 1031881 - RNA, 19 nt, Homo sapiens
  misc_RNA (1)...(19): siRNA sense strand
ggagauaauccagaaguuc

SEQ ID NO: 1031882 - RNA, 19 nt, Homo sapiens
  misc_RNA (1)...(19): siRNA sense strand
gaaaaguguuguggaaaau

SEQ ID NO: 1031883 - RNA, 19 nt, Homo sapiens
  misc_RNA (1)...(19): siRNA sense strand
cagucaaauuugccucaua

SEQ ID NO: 1031884 - RNA, 19 nt, Homo sapiens
  misc_RNA (1)...(19): siRNA sense strand
gacaagcccaagaaacauu

SEQ ID NO: 1031885 - RNA, 19 nt, Homo sapiens
  misc_RNA (1)...(19): siRNA sense strand
aaccagaggcugauagaaa

SEQ ID NO: 1031886 - RNA, 19 nt, Homo sapiens
  misc_RNA (1)...(19): siRNA sense strand
gagcacgagccugaguuua

SEQ ID NO: 1031887 - RNA, 19 nt, Homo sapiens
  misc_RNA (1)...(19): siRNA sense strand
uaaggcaguaacacaauaa

SEQ ID NO: 1031888 - RNA, 19 nt, Homo sapiens
  misc_RNA (1)...(19): siRNA sense strand
gaaaccucauuaugcucaa

SEQ ID NO: 1031889 - RNA, 19 nt, Homo sapiens
  misc_RNA (1)...(19): siRNA sense strand
ccuuauauauucugucauc

SEQ ID NO: 1031890 - RNA, 19 nt, Homo sapiens
  misc_RNA (1)...(19): siRNA sense strand
gcacgauccuuucaucuau

SEQ ID NO: 1031891 - RNA, 19 nt, Homo sapiens
  misc_RNA (1)...(19): siRNA sense strand
gauuaauucucugcacuug

SEQ ID NO: 1031892 - RNA, 19 nt, Homo sapiens
  misc_RNA (1)...(19): siRNA sense strand
uuaauucucugcacuugug

SEQ ID NO: 1031893 - RNA, 19 nt, Homo sapiens
  misc_RNA (1)...(19): siRNA sense strand
gcagccugaugccgaguuu

SEQ ID NO: 1031894 - RNA, 19 nt, Homo sapiens
  misc_RNA (1)...(19): siRNA sense strand
ccagagcucccaccuucua

SEQ ID NO: 1031895 - RNA, 19 nt, Homo sapiens
  misc_RNA (1)...(19): siRNA sense strand
ggcacgauccuuucaucua

SEQ ID NO: 1031896 - RNA, 19 nt, Homo sapiens
  misc_RNA (1)...(19): siRNA sense strand
gcuuugcuuucuucgguuu

SEQ ID NO: 1031897 - RNA, 19 nt, Homo sapiens
  misc_RNA (1)...(19): siRNA sense strand
ccuucuaccuccuguuuau

SEQ ID NO: 1031898 - RNA, 19 nt, Homo sapiens
  misc_RNA (1)...(19): siRNA sense strand
acgauccuuucaucuauuu

SEQ ID NO: 1031899 - RNA, 19 nt, Homo sapiens
  misc_RNA (1)...(19): siRNA sense strand
acgauuaaccuccuagcua

SEQ ID NO: 1031900 - RNA, 19 nt, Homo sapiens
  misc_RNA (1)...(19): siRNA sense strand
cacgauccuuucaucuauu

SEQ ID NO: 1031901 - RNA, 19 nt, Homo sapiens
  misc_RNA (1)...(19): siRNA sense strand
caccuucuaccuccuguuu

SEQ ID NO: 1031902 - RNA, 19 nt, Homo sapiens
  misc_RNA (1)...(19): siRNA sense strand
guucagaggcaccaaaauu

SEQ ID NO: 1031903 - RNA, 19 nt, Homo sapiens
  misc_RNA (1)...(19): siRNA sense strand
ggcuuucccugagcgcuuu

SEQ ID NO: 1031904 - RNA, 19 nt, Homo sapiens
  misc_RNA (1)...(19): siRNA sense strand
ggacgugccccuucaguag

SEQ ID NO: 1031905 - RNA, 19 nt, Homo sapiens
  misc_RNA (1)...(19): siRNA sense strand
ugagugggcacacacaagu

SEQ ID NO: 1031906 - RNA, 19 nt, Homo sapiens
  misc_RNA (1)...(19): siRNA sense strand
gcacagcccuugaggacua

SEQ ID NO: 1031907 - RNA, 19 nt, Homo sapiens
  misc_RNA (1)...(19): siRNA sense strand
ggauucagaugucaccuua

SEQ ID NO: 1031908 - RNA, 19 nt, Homo sapiens
  misc_RNA (1)...(19): siRNA sense strand
caaacagcguggucaagua

SEQ ID NO: 1031909 - RNA, 19 nt, Homo sapiens
  misc_RNA (1)...(19): siRNA sense strand
gaaaucgcgucguacagaa

SEQ ID NO: 1031910 - RNA, 19 nt, Homo sapiens
  misc_RNA (1)...(19): siRNA sense strand
gggcaaggcugcagcucua

SEQ ID NO: 1031911 - RNA, 19 nt, Homo sapiens
  misc_RNA (1)...(19): siRNA sense strand
ggacggugauugagauguu

SEQ ID NO: 1031912 - RNA, 19 nt, Homo sapiens
  misc_RNA (1)...(19): siRNA sense strand
gaugaaggcucagcagaga

SEQ ID NO: 1031913 - RNA, 19 nt, Homo sapiens
  misc_RNA (1)...(19): siRNA sense strand
gaacaucgacagaaauauc

SEQ ID NO: 1031914 - RNA, 19 nt, Homo sapiens
  misc_RNA (1)...(19): siRNA sense strand
caagaaaggccacuacgaa

SEQ ID NO: 1031915 - RNA, 19 nt, Homo sapiens
  misc_RNA (1)...(19): siRNA sense strand
ggaauucugucuucacaag

SEQ ID NO: 1031916 - RNA, 19 nt, Homo sapiens
  misc_RNA (1)...(19): siRNA sense strand
ucaaaggaauucugucuuc

SEQ ID NO: 1031917 - RNA, 19 nt, Homo sapiens
  misc_RNA (1)...(19): siRNA sense strand
ucuuugaucucgacaauaa

SEQ ID NO: 1031918 - RNA, 19 nt, Homo sapiens
  misc_RNA (1)...(19): siRNA sense strand
caaagcagcuguacuucuc

SEQ ID NO: 1031919 - RNA, 19 nt, Homo sapiens
  misc_RNA (1)...(19): siRNA sense strand
cagcaacggauacaucuua

SEQ ID NO: 1031920 - RNA, 19 nt, Homo sapiens
  misc_RNA (1)...(19): siRNA sense strand
gaugucaccuuaaagaaca

SEQ ID NO: 1031921 - RNA, 19 nt, Homo sapiens
  misc_RNA (1)...(19): siRNA sense strand
gcagugaaguaccucauca

SEQ ID NO: 1031922 - RNA, 19 nt, Homo sapiens
  misc_RNA (1)...(19): siRNA sense strand
aaacauuucugacuuugga

SEQ ID NO: 1031923 - RNA, 19 nt, Homo sapiens
  misc_RNA (1)...(19): siRNA sense strand
aaauggagcaccagaauaa

SEQ ID NO: 1031924 - RNA, 19 nt, Homo sapiens
  misc_RNA (1)...(19): siRNA sense strand
gagcguggaccaugaauug

SEQ ID NO: 1031925 - RNA, 19 nt, Homo sapiens
  misc_RNA (1)...(19): siRNA sense strand
caguaaagaucccagagaa

SEQ ID NO: 1031926 - RNA, 19 nt, Homo sapiens
  misc_RNA (1)...(19): siRNA sense strand
ggaaggcggugacgagucu

SEQ ID NO: 1031927 - RNA, 19 nt, Homo sapiens
  misc_RNA (1)...(19): siRNA sense strand
gcaagaccaugccgaaguc

SEQ ID NO: 1031928 - RNA, 19 nt, Homo sapiens
  misc_RNA (1)...(19): siRNA sense strand
ccaugaacaucgacagaaa

SEQ ID NO: 1031929 - RNA, 19 nt, Homo sapiens
  misc_RNA (1)...(19): siRNA sense strand
ccuauagccugguuccuaa

SEQ ID NO: 1031930 - RNA, 19 nt, Homo sapiens
  misc_RNA (1)...(19): siRNA sense strand
acaaguacgucucucagaa

SEQ ID NO: 1031931 - RNA, 19 nt, Homo sapiens
  misc_RNA (1)...(19): siRNA sense strand
caacggauacaucuuaaau

SEQ ID NO: 1031932 - RNA, 19 nt, Homo sapiens
  misc_RNA (1)...(19): siRNA sense strand
ccaaagaggugacgauagc

SEQ ID NO: 1031933 - RNA, 19 nt, Homo sapiens
  misc_RNA (1)...(19): siRNA sense strand
cagcaucucucaccguuuc

SEQ ID NO: 1031934 - RNA, 19 nt, Homo sapiens
  misc_RNA (1)...(19): siRNA sense strand
ucacucaucugcaguacug

SEQ ID NO: 1031935 - RNA, 19 nt, Homo sapiens
  misc_RNA (1)...(19): siRNA sense strand
gagaagcuagagaucauaa

SEQ ID NO: 1031936 - RNA, 19 nt, Homo sapiens
  misc_RNA (1)...(19): siRNA sense strand
uccaguaccugcuuucaaa

SEQ ID NO: 1031937 - RNA, 19 nt, Homo sapiens
  misc_RNA (1)...(19): siRNA sense strand
cagaugugcuggagacaga

SEQ ID NO: 1031938 - RNA, 19 nt, Homo sapiens
  misc_RNA (1)...(19): siRNA sense strand
cgaagaaugggaaccuaua

SEQ ID NO: 1031939 - RNA, 19 nt, Homo sapiens
  misc_RNA (1)...(19): siRNA sense strand
gaauccagcauuaagaaga

SEQ ID NO: 1031940 - RNA, 19 nt, Homo sapiens
  misc_RNA (1)...(19): siRNA sense strand
acagaaauaucacucaucu

SEQ ID NO: 1031941 - RNA, 19 nt, Homo sapiens
  misc_RNA (1)...(19): siRNA sense strand
gaucaagccagccaggaaa

SEQ ID NO: 1031942 - RNA, 19 nt, Homo sapiens
  misc_RNA (1)...(19): siRNA sense strand
guaaagaucccagagaagu

SEQ ID NO: 1031943 - RNA, 19 nt, Homo sapiens
  misc_RNA (1)...(19): siRNA sense strand
caaaggaauucugucuuca

SEQ ID NO: 1031944 - RNA, 19 nt, Homo sapiens
  misc_RNA (1)...(19): siRNA sense strand
gggagagccuggagaugga

SEQ ID NO: 1031945 - RNA, 19 nt, Homo sapiens
  misc_RNA (1)...(19): siRNA sense strand
ugauugagauguuuaagag

SEQ ID NO: 1031946 - RNA, 19 nt, Homo sapiens
  misc_RNA (1)...(19): siRNA sense strand
cagagagcguggaccauga

SEQ ID NO: 1031947 - RNA, 19 nt, Homo sapiens
  misc_RNA (1)...(19): siRNA sense strand
uggaggaacugccgaaauc

SEQ ID NO: 1031948 - RNA, 19 nt, Homo sapiens
  misc_RNA (1)...(19): siRNA sense strand
ugacgagucugaccugagu

SEQ ID NO: 1031949 - RNA, 19 nt, Homo sapiens
  misc_RNA (1)...(19): siRNA sense strand
auucagaugucaccuuaaa

SEQ ID NO: 1031950 - RNA, 19 nt, Homo sapiens
  misc_RNA (1)...(19): siRNA sense strand
caagggcucugacaucaac

SEQ ID NO: 1031951 - RNA, 19 nt, Homo sapiens
  misc_RNA (1)...(19): siRNA sense strand
ggucaaguaugagcugaug

SEQ ID NO: 1031952 - RNA, 19 nt, Homo sapiens
  misc_RNA (1)...(19): siRNA sense strand
ucaccacacuggccaacaa

SEQ ID NO: 1031953 - RNA, 19 nt, Homo sapiens
  misc_RNA (1)...(19): siRNA sense strand
gcacaaacagcguggucaa

SEQ ID NO: 1031954 - RNA, 19 nt, Homo sapiens
  misc_RNA (1)...(19): siRNA sense strand
cgacagaaauaucacucau

SEQ ID NO: 1031955 - RNA, 19 nt, Homo sapiens
  misc_RNA (1)...(19): siRNA sense strand
gugcgagccucaacucuca

SEQ ID NO: 1031956 - RNA, 19 nt, Homo sapiens
  misc_RNA (1)...(19): siRNA sense strand
gaagaaugggaaccuauag

SEQ ID NO: 1031957 - RNA, 19 nt, Homo sapiens
  misc_RNA (1)...(19): siRNA sense strand
ucagaugucaccuuaaaga

SEQ ID NO: 1031958 - RNA, 19 nt, Homo sapiens
  misc_RNA (1)...(19): siRNA sense strand
gcauaacucauuccacugu

SEQ ID NO: 1031959 - RNA, 19 nt, Homo sapiens
  misc_RNA (1)...(19): siRNA sense strand
ggccaacgguccagaugug

SEQ ID NO: 1031960 - RNA, 19 nt, Homo sapiens
  misc_RNA (1)...(19): siRNA sense strand
aaacagaggacggugauug

SEQ ID NO: 1031961 - RNA, 19 nt, Homo sapiens
  misc_RNA (1)...(19): siRNA sense strand
gcaccuuugucugcgagua

SEQ ID NO: 1031962 - RNA, 19 nt, Homo sapiens
  misc_RNA (1)...(19): siRNA sense strand
ggagaaccgcuacgacugu

SEQ ID NO: 1031963 - RNA, 19 nt, Homo sapiens
  misc_RNA (1)...(19): siRNA sense strand
gcggagaaguagaaagaag

SEQ ID NO: 1031964 - RNA, 19 nt, Homo sapiens
  misc_RNA (1)...(19): siRNA sense strand
gaaaggaaagaccgacagu

SEQ ID NO: 1031965 - RNA, 19 nt, Homo sapiens
  misc_RNA (1)...(19): siRNA sense strand
accaaugggucuugugaaa

SEQ ID NO: 1031966 - RNA, 19 nt, Homo sapiens
  misc_RNA (1)...(19): siRNA sense strand
caggguacauggaaguuuc

SEQ ID NO: 1031967 - RNA, 19 nt, Homo sapiens
  misc_RNA (1)...(19): siRNA sense strand
cgaaaucgcgucguacaga

SEQ ID NO: 1031968 - RNA, 19 nt, Homo sapiens
  misc_RNA (1)...(19): siRNA sense strand
gcaugcagccaguaaagau

SEQ ID NO: 1031969 - RNA, 19 nt, Homo sapiens
  misc_RNA (1)...(19): siRNA sense strand
gauggcaccaacacacuaa

SEQ ID NO: 1031970 - RNA, 19 nt, Homo sapiens
  misc_RNA (1)...(19): siRNA sense strand
aaacaaccaucuggaagca

SEQ ID NO: 1031971 - RNA, 19 nt, Homo sapiens
  misc_RNA (1)...(19): siRNA sense strand
gagaucauaaggaaccaaa

SEQ ID NO: 1031972 - RNA, 19 nt, Homo sapiens
  misc_RNA (1)...(19): siRNA sense strand
uaaagaucccagagaaguu

SEQ ID NO: 1031973 - RNA, 19 nt, Homo sapiens
  misc_RNA (1)...(19): siRNA sense strand
guggagcgcucugcagaug

SEQ ID NO: 1031974 - RNA, 19 nt, Homo sapiens
  misc_RNA (1)...(19): siRNA sense strand
ggacgucaacugucaggau

SEQ ID NO: 1031975 - RNA, 19 nt, Homo sapiens
  misc_RNA (1)...(19): siRNA sense strand
ugaaggcucagcagagaaa

SEQ ID NO: 1031976 - RNA, 19 nt, Homo sapiens
  misc_RNA (1)...(19): siRNA sense strand
ggaucaagccagccaggaa

SEQ ID NO: 1031977 - RNA, 19 nt, Homo sapiens
  misc_RNA (1)...(19): siRNA sense strand
aauccagcauuaagaagaa

SEQ ID NO: 1031978 - RNA, 19 nt, Homo sapiens
  misc_RNA (1)...(19): siRNA sense strand
caacacacuaacucggaua

SEQ ID NO: 1031979 - RNA, 19 nt, Homo sapiens
  misc_RNA (1)...(19): siRNA sense strand
uagccugguuccuaagaaa

SEQ ID NO: 1031980 - RNA, 19 nt, Homo sapiens
  misc_RNA (1)...(19): siRNA sense strand
caaaagaggagaucaacaa

SEQ ID NO: 1031981 - RNA, 19 nt, Homo sapiens
  misc_RNA (1)...(19): siRNA sense strand
ugcaguaucucggaagaaa

SEQ ID NO: 1031982 - RNA, 19 nt, Homo sapiens
  misc_RNA (1)...(19): siRNA sense strand
ggagcgcucugcagaugag

SEQ ID NO: 1031983 - RNA, 19 nt, Homo sapiens
  misc_RNA (1)...(19): siRNA sense strand
ugaagcugcugcuguccaa

SEQ ID NO: 1031984 - RNA, 19 nt, Homo sapiens
  misc_RNA (1)...(19): siRNA sense strand
gcuuucaaauggacagaug

SEQ ID NO: 1031985 - RNA, 19 nt, Homo sapiens
  misc_RNA (1)...(19): siRNA sense strand
guaccugcuuucaaaugga

SEQ ID NO: 1031986 - RNA, 19 nt, Homo sapiens
  misc_RNA (1)...(19): siRNA sense strand
aaacagcguggucaaguau

SEQ ID NO: 1031987 - RNA, 19 nt, Homo sapiens
  misc_RNA (1)...(19): siRNA sense strand
gcacaggguacauggaagu

SEQ ID NO: 1031988 - RNA, 19 nt, Homo sapiens
  misc_RNA (1)...(19): siRNA sense strand
aaaaggaggcggagaagua

SEQ ID NO: 1031989 - RNA, 19 nt, Homo sapiens
  misc_RNA (1)...(19): siRNA sense strand
cagagaaguucgagaagcu

SEQ ID NO: 1031990 - RNA, 19 nt, Homo sapiens
  misc_RNA (1)...(19): siRNA sense strand
ggccaaagaggugacgaua

SEQ ID NO: 1031991 - RNA, 19 nt, Homo sapiens
  misc_RNA (1)...(19): siRNA sense strand
uuaagagcauaacucauuc

SEQ ID NO: 1031992 - RNA, 19 nt, Homo sapiens
  misc_RNA (1)...(19): siRNA sense strand
uuuagcagcugcaguaucu

SEQ ID NO: 1031993 - RNA, 19 nt, Homo sapiens
  misc_RNA (1)...(19): siRNA sense strand
ucgagaagcuagagaucau

SEQ ID NO: 1031994 - RNA, 19 nt, Homo sapiens
  misc_RNA (1)...(19): siRNA sense strand
acuacgaagugguccagua

SEQ ID NO: 1031995 - RNA, 19 nt, Homo sapiens
  misc_RNA (1)...(19): siRNA sense strand
gcacagcggguaauuuuau

SEQ ID NO: 1031996 - RNA, 19 nt, Homo sapiens
  misc_RNA (1)...(19): siRNA sense strand
acagcguggucaaguauga

SEQ ID NO: 1031997 - RNA, 19 nt, Homo sapiens
  misc_RNA (1)...(19): siRNA sense strand
ugagauguuuaagagcaua

SEQ ID NO: 1031998 - RNA, 19 nt, Homo sapiens
  misc_RNA (1)...(19): siRNA sense strand
gacggugauugagauguuu

SEQ ID NO: 1031999 - RNA, 19 nt, Homo sapiens
  misc_RNA (1)...(19): siRNA sense strand
gcaacggauacaucuuaaa

SEQ ID NO: 1032000 - RNA, 19 nt, Homo sapiens
  misc_RNA (1)...(19): siRNA sense strand
gaagcuagagaucauaagg

SEQ ID NO: 1032001 - RNA, 19 nt, Homo sapiens
  misc_RNA (1)...(19): siRNA sense strand
ggauggcaccaacacacua

SEQ ID NO: 1032002 - RNA, 19 nt, Homo sapiens
  misc_RNA (1)...(19): siRNA sense strand
gcagcucggguuugacuau

SEQ ID NO: 1032003 - RNA, 19 nt, Homo sapiens
  misc_RNA (1)...(19): siRNA sense strand
gcucggguuugacuaugga

SEQ ID NO: 1032004 - RNA, 19 nt, Homo sapiens
  misc_RNA (1)...(19): siRNA sense strand
agauggacgucaacuguca

SEQ ID NO: 1032005 - RNA, 19 nt, Homo sapiens
  misc_RNA (1)...(19): siRNA sense strand
ccucuuugaucucgacaau

SEQ ID NO: 1032006 - RNA, 19 nt, Homo sapiens
  misc_RNA (1)...(19): siRNA sense strand
acucacagcuuccuaguuu

SEQ ID NO: 1032007 - RNA, 19 nt, Homo sapiens
  misc_RNA (1)...(19): siRNA sense strand
ggugaaaguugaagcuauu

SEQ ID NO: 1032008 - RNA, 19 nt, Homo sapiens
  misc_RNA (1)...(19): siRNA sense strand
ugagagagcuuucccaucu

SEQ ID NO: 1032009 - RNA, 19 nt, Homo sapiens
  misc_RNA (1)...(19): siRNA sense strand
ccuaguagcuccacugaga

SEQ ID NO: 1032010 - RNA, 19 nt, Homo sapiens
  misc_RNA (1)...(19): siRNA sense strand
ugaagagacugauguguca

SEQ ID NO: 1032011 - RNA, 19 nt, Homo sapiens
  misc_RNA (1)...(19): siRNA sense strand
agagggaucugguguguau

SEQ ID NO: 1032012 - RNA, 19 nt, Homo sapiens
  misc_RNA (1)...(19): siRNA sense strand
caagagggaucuggugugu

SEQ ID NO: 1032013 - RNA, 19 nt, Homo sapiens
  misc_RNA (1)...(19): siRNA sense strand
cacuuuaccugucuucuga

SEQ ID NO: 1032014 - RNA, 19 nt, Homo sapiens
  misc_RNA (1)...(19): siRNA sense strand
caucucagcaguuucauug

SEQ ID NO: 1032015 - RNA, 19 nt, Homo sapiens
  misc_RNA (1)...(19): siRNA sense strand
gagggccaccuaaagauuu

SEQ ID NO: 1032016 - RNA, 19 nt, Homo sapiens
  misc_RNA (1)...(19): siRNA sense strand
gaaaguugaagcuauugug

SEQ ID NO: 1032017 - RNA, 19 nt, Homo sapiens
  misc_RNA (1)...(19): siRNA sense strand
ggagggccaccuaaagauu

SEQ ID NO: 1032018 - RNA, 19 nt, Homo sapiens
  misc_RNA (1)...(19): siRNA sense strand
gagcgggaauuggacaaga

SEQ ID NO: 1032019 - RNA, 19 nt, Homo sapiens
  misc_RNA (1)...(19): siRNA sense strand
ggaaaccaacucacagcuu

SEQ ID NO: 1032020 - RNA, 19 nt, Homo sapiens
  misc_RNA (1)...(19): siRNA sense strand
gaccauuccuacaaacuac

SEQ ID NO: 1032021 - RNA, 19 nt, Homo sapiens
  misc_RNA (1)...(19): siRNA sense strand
gccaacagacccucaucua

SEQ ID NO: 1032022 - RNA, 19 nt, Homo sapiens
  misc_RNA (1)...(19): siRNA sense strand
gcuacuugcacaugaauga

SEQ ID NO: 1032023 - RNA, 19 nt, Homo sapiens
  misc_RNA (1)...(19): siRNA sense strand
uuagggaguucucgaagug

SEQ ID NO: 1032024 - RNA, 19 nt, Homo sapiens
  misc_RNA (1)...(19): siRNA sense strand
ccagcuacuugcacaugaa

SEQ ID NO: 1032025 - RNA, 19 nt, Homo sapiens
  misc_RNA (1)...(19): siRNA sense strand
gaugagccaccaaugucua

SEQ ID NO: 1032026 - RNA, 19 nt, Homo sapiens
  misc_RNA (1)...(19): siRNA sense strand
cuauugugaucucugauga

SEQ ID NO: 1032027 - RNA, 19 nt, Homo sapiens
  misc_RNA (1)...(19): siRNA sense strand
ccaggaagcuuugggguuu

SEQ ID NO: 1032028 - RNA, 19 nt, Homo sapiens
  misc_RNA (1)...(19): siRNA sense strand
acaaggagcgggaauugga

SEQ ID NO: 1032029 - RNA, 19 nt, Homo sapiens
  misc_RNA (1)...(19): siRNA sense strand
cugagaccauuccuacaaa

SEQ ID NO: 1032030 - RNA, 19 nt, Homo sapiens
  misc_RNA (1)...(19): siRNA sense strand
ccagaugagccaccaaugu

SEQ ID NO: 1032031 - RNA, 19 nt, Homo sapiens
  misc_RNA (1)...(19): siRNA sense strand
gccagcuacuugcacauga

SEQ ID NO: 1032032 - RNA, 19 nt, Homo sapiens
  misc_RNA (1)...(19): siRNA sense strand
cuucuggacuuuauguaug

SEQ ID NO: 1032033 - RNA, 19 nt, Homo sapiens
  misc_RNA (1)...(19): siRNA sense strand
ucucagcaguuucauugga

SEQ ID NO: 1032034 - RNA, 19 nt, Homo sapiens
  misc_RNA (1)...(19): siRNA sense strand
aagcuauugugaucucuga

SEQ ID NO: 1032035 - RNA, 19 nt, Homo sapiens
  misc_RNA (1)...(19): siRNA sense strand
gcuacugccugcggagcua

SEQ ID NO: 1032036 - RNA, 19 nt, Homo sapiens
  misc_RNA (1)...(19): siRNA sense strand
cucaugcucuuacacacua

SEQ ID NO: 1032037 - RNA, 19 nt, Homo sapiens
  misc_RNA (1)...(19): siRNA sense strand
gagagagcuuucccaucug

SEQ ID NO: 1032038 - RNA, 19 nt, Homo sapiens
  misc_RNA (1)...(19): siRNA sense strand
guuggcaucugcugagaca

SEQ ID NO: 1032039 - RNA, 19 nt, Homo sapiens
  misc_RNA (1)...(19): siRNA sense strand
gauguucccaccugcaaga

SEQ ID NO: 1032040 - RNA, 19 nt, Homo sapiens
  misc_RNA (1)...(19): siRNA sense strand
ucuggcaucucagcaguuu

SEQ ID NO: 1032041 - RNA, 19 nt, Homo sapiens
  misc_RNA (1)...(19): siRNA sense strand
aaaguugaagcuauuguga

SEQ ID NO: 1032042 - RNA, 19 nt, Homo sapiens
  misc_RNA (1)...(19): siRNA sense strand
gagccacugccaucucuug

SEQ ID NO: 1032043 - RNA, 19 nt, Homo sapiens
  misc_RNA (1)...(19): siRNA sense strand
cuacaaacuacuucucuuc

SEQ ID NO: 1032044 - RNA, 19 nt, Homo sapiens
  misc_RNA (1)...(19): siRNA sense strand
uuaccugucuucugaguac

SEQ ID NO: 1032045 - RNA, 19 nt, Homo sapiens
  misc_RNA (1)...(19): siRNA sense strand
acaaacuacuucucuucug

SEQ ID NO: 1032046 - RNA, 19 nt, Homo sapiens
  misc_RNA (1)...(19): siRNA sense strand
cuacaaggagcgggaauug

SEQ ID NO: 1032047 - RNA, 19 nt, Homo sapiens
  misc_RNA (1)...(19): siRNA sense strand
ccuacaaacuacuucucuu

SEQ ID NO: 1032048 - RNA, 19 nt, Homo sapiens
  misc_RNA (1)...(19): siRNA sense strand
ggaggaggaaaccaacuca

SEQ ID NO: 1032049 - RNA, 19 nt, Homo sapiens
  misc_RNA (1)...(19): siRNA sense strand
cagaugagccaccaauguc

SEQ ID NO: 1032050 - RNA, 19 nt, Homo sapiens
  misc_RNA (1)...(19): siRNA sense strand
gcugcucccucaccuacug

SEQ ID NO: 1032051 - RNA, 19 nt, Homo sapiens
  misc_RNA (1)...(19): siRNA sense strand
agaccauuccuacaaacua

SEQ ID NO: 1032052 - RNA, 19 nt, Homo sapiens
  misc_RNA (1)...(19): siRNA sense strand
cacgugagcgacccuauga

SEQ ID NO: 1032053 - RNA, 19 nt, Homo sapiens
  misc_RNA (1)...(19): siRNA sense strand
agaaggaggaggaaaccaa

SEQ ID NO: 1032054 - RNA, 19 nt, Homo sapiens
  misc_RNA (1)...(19): siRNA sense strand
gcuauugugaucucugaug

SEQ ID NO: 1032055 - RNA, 19 nt, Homo sapiens
  misc_RNA (1)...(19): siRNA sense strand
ucucuugccagcccuagua

SEQ ID NO: 1032056 - RNA, 19 nt, Homo sapiens
  misc_RNA (1)...(19): siRNA sense strand
cuacacagccuggcaugga

SEQ ID NO: 1032057 - RNA, 19 nt, Homo sapiens
  misc_RNA (1)...(19): siRNA sense strand
ccaagaaggaggaggaaac

SEQ ID NO: 1032058 - RNA, 19 nt, Homo sapiens
  misc_RNA (1)...(19): siRNA sense strand
gcaaggccugggagcgaaa

SEQ ID NO: 1032059 - RNA, 19 nt, Homo sapiens
  misc_RNA (1)...(19): siRNA sense strand
ugauguggguccugagagu

SEQ ID NO: 1032060 - RNA, 19 nt, Homo sapiens
  misc_RNA (1)...(19): siRNA sense strand
uagcuccacugagaccauu

SEQ ID NO: 1032061 - RNA, 19 nt, Homo sapiens
  misc_RNA (1)...(19): siRNA sense strand
ggaccucuaccgccacauc

SEQ ID NO: 1032062 - RNA, 19 nt, Homo sapiens
  misc_RNA (1)...(19): siRNA sense strand
ugcaagacaugugggaaga

SEQ ID NO: 1032063 - RNA, 19 nt, Homo sapiens
  misc_RNA (1)...(19): siRNA sense strand
aguugaagcuauugugauc

SEQ ID NO: 1032064 - RNA, 19 nt, Homo sapiens
  misc_RNA (1)...(19): siRNA sense strand
ugucucagcuccaguucca

SEQ ID NO: 1032065 - RNA, 19 nt, Homo sapiens
  misc_RNA (1)...(19): siRNA sense strand
gggcugcuucuggacuuua

SEQ ID NO: 1032066 - RNA, 19 nt, Homo sapiens
  misc_RNA (1)...(19): siRNA sense strand
ccaacagacccucaucuac

SEQ ID NO: 1032067 - RNA, 19 nt, Homo sapiens
  misc_RNA (1)...(19): siRNA sense strand
gcuucuggacuuuauguau

SEQ ID NO: 1032068 - RNA, 19 nt, Homo sapiens
  misc_RNA (1)...(19): siRNA sense strand
gucccaggguuuccuuugu

SEQ ID NO: 1032069 - RNA, 19 nt, Homo sapiens
  misc_RNA (1)...(19): siRNA sense strand
gagguugacgcaccacauc

SEQ ID NO: 1032070 - RNA, 19 nt, Homo sapiens
  misc_RNA (1)...(19): siRNA sense strand
gggaucugguguguauuca

SEQ ID NO: 1032071 - RNA, 19 nt, Homo sapiens
  misc_RNA (1)...(19): siRNA sense strand
cccaggguuuccuuuguga

SEQ ID NO: 1032072 - RNA, 19 nt, Homo sapiens
  misc_RNA (1)...(19): siRNA sense strand
gaggcagacaguaccaaga

SEQ ID NO: 1032073 - RNA, 19 nt, Homo sapiens
  misc_RNA (1)...(19): siRNA sense strand
aggcagacaguaccaagaa

SEQ ID NO: 1032074 - RNA, 19 nt, Homo sapiens
  misc_RNA (1)...(19): siRNA sense strand
guucccaccugcaagacau

SEQ ID NO: 1032075 - RNA, 19 nt, Homo sapiens
  misc_RNA (1)...(19): siRNA sense strand
gcaucucagcaguuucauu

SEQ ID NO: 1032076 - RNA, 19 nt, Homo sapiens
  misc_RNA (1)...(19): siRNA sense strand
ggcaucugcugagacauca

SEQ ID NO: 1032077 - RNA, 19 nt, Homo sapiens
  misc_RNA (1)...(19): siRNA sense strand
ccacuuuaccugucuucug

SEQ ID NO: 1032078 - RNA, 19 nt, Homo sapiens
  misc_RNA (1)...(19): siRNA sense strand
gggcaaaggggaauggaaa

SEQ ID NO: 1032079 - RNA, 19 nt, Homo sapiens
  misc_RNA (1)...(19): siRNA sense strand
acugagaccauuccuacaa

SEQ ID NO: 1032080 - RNA, 19 nt, Homo sapiens
  misc_RNA (1)...(19): siRNA sense strand
ggcagacaguaccaagaag

SEQ ID NO: 1032081 - RNA, 19 nt, Homo sapiens
  misc_RNA (1)...(19): siRNA sense strand
caaugaggaccuggccaaa

SEQ ID NO: 1032082 - RNA, 19 nt, Homo sapiens
  misc_RNA (1)...(19): siRNA sense strand
aggugaaaguugaagcuau

SEQ ID NO: 1032083 - RNA, 19 nt, Homo sapiens
  misc_RNA (1)...(19): siRNA sense strand
uggcaucucagcaguuuca

SEQ ID NO: 1032084 - RNA, 19 nt, Homo sapiens
  misc_RNA (1)...(19): siRNA sense strand
accaguggcugaugucucu

SEQ ID NO: 1032085 - RNA, 19 nt, Homo sapiens
  misc_RNA (1)...(19): siRNA sense strand
gagccaccaaugucuagug

SEQ ID NO: 1032086 - RNA, 19 nt, Homo sapiens
  misc_RNA (1)...(19): siRNA sense strand
caacucacagcuuccuagu

SEQ ID NO: 1032087 - RNA, 19 nt, Homo sapiens
  misc_RNA (1)...(19): siRNA sense strand
ggaaacagcugcucauuca

SEQ ID NO: 1032088 - RNA, 19 nt, Homo sapiens
  misc_RNA (1)...(19): siRNA sense strand
uaaaucagcuguuguauuc

SEQ ID NO: 1032089 - RNA, 19 nt, Homo sapiens
  misc_RNA (1)...(19): siRNA sense strand
aaggaaagcugacugauaa

SEQ ID NO: 1032090 - RNA, 19 nt, Homo sapiens
  misc_RNA (1)...(19): siRNA sense strand
gaaagaugcucuggagaaa

SEQ ID NO: 1032091 - RNA, 19 nt, Homo sapiens
  misc_RNA (1)...(19): siRNA sense strand
gggagaaauugcacacuua

SEQ ID NO: 1032092 - RNA, 19 nt, Homo sapiens
  misc_RNA (1)...(19): siRNA sense strand
gaagaaugcuuaucaacuc

SEQ ID NO: 1032093 - RNA, 19 nt, Homo sapiens
  misc_RNA (1)...(19): siRNA sense strand
gcagaaauguuacaacgau

SEQ ID NO: 1032094 - RNA, 19 nt, Homo sapiens
  misc_RNA (1)...(19): siRNA sense strand
ggagaagaaugcuuaucaa

SEQ ID NO: 1032095 - RNA, 19 nt, Homo sapiens
  misc_RNA (1)...(19): siRNA sense strand
aagagaagcagaaauguua

SEQ ID NO: 1032096 - RNA, 19 nt, Homo sapiens
  misc_RNA (1)...(19): siRNA sense strand
gaaauugcacacuuaaaga

SEQ ID NO: 1032097 - RNA, 19 nt, Homo sapiens
  misc_RNA (1)...(19): siRNA sense strand
gaaauacagcugaaagaug

SEQ ID NO: 1032098 - RNA, 19 nt, Homo sapiens
  misc_RNA (1)...(19): siRNA sense strand
gcugcaaccucacgaauug

SEQ ID NO: 1032099 - RNA, 19 nt, Homo sapiens
  misc_RNA (1)...(19): siRNA sense strand
caacugaaggccagauaua

SEQ ID NO: 1032100 - RNA, 19 nt, Homo sapiens
  misc_RNA (1)...(19): siRNA sense strand
gaagagaagcagaaauguu

SEQ ID NO: 1032101 - RNA, 19 nt, Homo sapiens
  misc_RNA (1)...(19): siRNA sense strand
uaacacaguuggaauccuu

SEQ ID NO: 1032102 - RNA, 19 nt, Homo sapiens
  misc_RNA (1)...(19): siRNA sense strand
ggcauguacuuuagacuuu

SEQ ID NO: 1032103 - RNA, 19 nt, Homo sapiens
  misc_RNA (1)...(19): siRNA sense strand
gaaagcugacugauaaaga

SEQ ID NO: 1032104 - RNA, 19 nt, Homo sapiens
  misc_RNA (1)...(19): siRNA sense strand
ggaaaggaaagcugacuga

SEQ ID NO: 1032105 - RNA, 19 nt, Homo sapiens
  misc_RNA (1)...(19): siRNA sense strand
gaacugagugaauuucgaa

SEQ ID NO: 1032106 - RNA, 19 nt, Homo sapiens
  misc_RNA (1)...(19): siRNA sense strand
agagaaagacguauugaaa

SEQ ID NO: 1032107 - RNA, 19 nt, Homo sapiens
  misc_RNA (1)...(19): siRNA sense strand
ggagggagcagguguugaa

SEQ ID NO: 1032108 - RNA, 19 nt, Homo sapiens
  misc_RNA (1)...(19): siRNA sense strand
caaauccgaaacuacauua

SEQ ID NO: 1032109 - RNA, 19 nt, Homo sapiens
  misc_RNA (1)...(19): siRNA sense strand
caauuuaaaucagcuguug

SEQ ID NO: 1032110 - RNA, 19 nt, Homo sapiens
  misc_RNA (1)...(19): siRNA sense strand
agaaagacguauugaaaca

SEQ ID NO: 1032111 - RNA, 19 nt, Homo sapiens
  misc_RNA (1)...(19): siRNA sense strand
ucacagagaaggacaaaga

SEQ ID NO: 1032112 - RNA, 19 nt, Homo sapiens
  misc_RNA (1)...(19): siRNA sense strand
agaaggagaagaaugcuua

SEQ ID NO: 1032113 - RNA, 19 nt, Homo sapiens
  misc_RNA (1)...(19): siRNA sense strand
ggagaaauugcacacuuaa

SEQ ID NO: 1032114 - RNA, 19 nt, Homo sapiens
  misc_RNA (1)...(19): siRNA sense strand
aaaggaaagcugacugaua

SEQ ID NO: 1032115 - RNA, 19 nt, Homo sapiens
  misc_RNA (1)...(19): siRNA sense strand
cagaaguaccaaagauuua

SEQ ID NO: 1032116 - RNA, 19 nt, Homo sapiens
  misc_RNA (1)...(19): siRNA sense strand
gaagagaaugauauugcua

SEQ ID NO: 1032117 - RNA, 19 nt, Homo sapiens
  misc_RNA (1)...(19): siRNA sense strand
ggaagaugauaggcauaaa

SEQ ID NO: 1032118 - RNA, 19 nt, Homo sapiens
  misc_RNA (1)...(19): siRNA sense strand
ccagaaguaccaaagauuu

SEQ ID NO: 1032119 - RNA, 19 nt, Homo sapiens
  misc_RNA (1)...(19): siRNA sense strand
agagaaggacaaagaaaua

SEQ ID NO: 1032120 - RNA, 19 nt, Homo sapiens
  misc_RNA (1)...(19): siRNA sense strand
gaaugucccaagugcaaua

SEQ ID NO: 1032121 - RNA, 19 nt, Homo sapiens
  misc_RNA (1)...(19): siRNA sense strand
guugaaagccuuaucugaa

SEQ ID NO: 1032122 - RNA, 19 nt, Homo sapiens
  misc_RNA (1)...(19): siRNA sense strand
ugaaagaugcucuggagaa

SEQ ID NO: 1032123 - RNA, 19 nt, Homo sapiens
  misc_RNA (1)...(19): siRNA sense strand
gaagagacaacgagagaag

SEQ ID NO: 1032124 - RNA, 19 nt, Homo sapiens
  misc_RNA (1)...(19): siRNA sense strand
ggaagagaaugauauugcu

SEQ ID NO: 1032125 - RNA, 19 nt, Homo sapiens
  misc_RNA (1)...(19): siRNA sense strand
gaagagaaagacguauuga

SEQ ID NO: 1032126 - RNA, 19 nt, Homo sapiens
  misc_RNA (1)...(19): siRNA sense strand
ggaaauacagcugaaagau

SEQ ID NO: 1032127 - RNA, 19 nt, Homo sapiens
  misc_RNA (1)...(19): siRNA sense strand
agccuuaucugaagagaaa

SEQ ID NO: 1032128 - RNA, 19 nt, Homo sapiens
  misc_RNA (1)...(19): siRNA sense strand
gauauaguacuaccgcauu

SEQ ID NO: 1032129 - RNA, 19 nt, Homo sapiens
  misc_RNA (1)...(19): siRNA sense strand
ggggaaaacuugaagaaga

SEQ ID NO: 1032130 - RNA, 19 nt, Homo sapiens
  misc_RNA (1)...(19): siRNA sense strand
ggaagucuauguaaaagga

SEQ ID NO: 1032131 - RNA, 19 nt, Homo sapiens
  misc_RNA (1)...(19): siRNA sense strand
ccaauacacuccguuuauc

SEQ ID NO: 1032132 - RNA, 19 nt, Homo sapiens
  misc_RNA (1)...(19): siRNA sense strand
acgaauugcugaacuugaa

SEQ ID NO: 1032133 - RNA, 19 nt, Homo sapiens
  misc_RNA (1)...(19): siRNA sense strand
aaagaaauacagcgacuga

SEQ ID NO: 1032134 - RNA, 19 nt, Homo sapiens
  misc_RNA (1)...(19): siRNA sense strand
ucaaauaacacaguuggaa

SEQ ID NO: 1032135 - RNA, 19 nt, Homo sapiens
  misc_RNA (1)...(19): siRNA sense strand
gcauguacuuuagacuuug

SEQ ID NO: 1032136 - RNA, 19 nt, Homo sapiens
  misc_RNA (1)...(19): siRNA sense strand
agcaguggcucguguauga

SEQ ID NO: 1032137 - RNA, 19 nt, Homo sapiens
  misc_RNA (1)...(19): siRNA sense strand
gaaagacguauugaaacaa

SEQ ID NO: 1032138 - RNA, 19 nt, Homo sapiens
  misc_RNA (1)...(19): siRNA sense strand
cuuaucaacucacagagaa

SEQ ID NO: 1032139 - RNA, 19 nt, Homo sapiens
  misc_RNA (1)...(19): siRNA sense strand
gcgaucugcuuguccaugu

SEQ ID NO: 1032140 - RNA, 19 nt, Homo sapiens
  misc_RNA (1)...(19): siRNA sense strand
ccaagugcaauauacagua

SEQ ID NO: 1032141 - RNA, 19 nt, Homo sapiens
  misc_RNA (1)...(19): siRNA sense strand
gcagcaagaagaacaaaca

SEQ ID NO: 1032142 - RNA, 19 nt, Homo sapiens
  misc_RNA (1)...(19): siRNA sense strand
uuacacaucucugcuaaag

SEQ ID NO: 1032143 - RNA, 19 nt, Homo sapiens
  misc_RNA (1)...(19): siRNA sense strand
gcuccaaacugcuucaacu

SEQ ID NO: 1032144 - RNA, 19 nt, Homo sapiens
  misc_RNA (1)...(19): siRNA sense strand
ugaaagccuuaucugaaga

SEQ ID NO: 1032145 - RNA, 19 nt, Homo sapiens
  misc_RNA (1)...(19): siRNA sense strand
gaucgaagccuaguaacuc

SEQ ID NO: 1032146 - RNA, 19 nt, Homo sapiens
  misc_RNA (1)...(19): siRNA sense strand
caaauaacacaguuggaau

SEQ ID NO: 1032147 - RNA, 19 nt, Homo sapiens
  misc_RNA (1)...(19): siRNA sense strand
gcuaaagcagcaagaagaa

SEQ ID NO: 1032148 - RNA, 19 nt, Homo sapiens
  misc_RNA (1)...(19): siRNA sense strand
aagaagagaagcagaaaug

SEQ ID NO: 1032149 - RNA, 19 nt, Homo sapiens
  misc_RNA (1)...(19): siRNA sense strand
cgacugagagaccaacuga

SEQ ID NO: 1032150 - RNA, 19 nt, Homo sapiens
  misc_RNA (1)...(19): siRNA sense strand
guggaauacuguucaaagu

SEQ ID NO: 1032151 - RNA, 19 nt, Homo sapiens
  misc_RNA (1)...(19): siRNA sense strand
gagaaauugcacacuuaaa

SEQ ID NO: 1032152 - RNA, 19 nt, Homo sapiens
  misc_RNA (1)...(19): siRNA sense strand
ugcuucaacucaucaauaa

SEQ ID NO: 1032153 - RNA, 19 nt, Homo sapiens
  misc_RNA (1)...(19): siRNA sense strand
gagaaagacguauugaaac

SEQ ID NO: 1032154 - RNA, 19 nt, Homo sapiens
  misc_RNA (1)...(19): siRNA sense strand
caacaugugcagcaucaau

SEQ ID NO: 1032155 - RNA, 19 nt, Homo sapiens
  misc_RNA (1)...(19): siRNA sense strand
aaggguagcucuguuggaa

SEQ ID NO: 1032156 - RNA, 19 nt, Homo sapiens
  misc_RNA (1)...(19): siRNA sense strand
guugaacgacaaaccauaa

SEQ ID NO: 1032157 - RNA, 19 nt, Homo sapiens
  misc_RNA (1)...(19): siRNA sense strand
ccaaacugcuucaacucau

SEQ ID NO: 1032158 - RNA, 19 nt, Homo sapiens
  misc_RNA (1)...(19): siRNA sense strand
gaagaagagauccgaagag

SEQ ID NO: 1032159 - RNA, 19 nt, Homo sapiens
  misc_RNA (1)...(19): siRNA sense strand
gcagcgggaagucuaugua

SEQ ID NO: 1032160 - RNA, 19 nt, Homo sapiens
  misc_RNA (1)...(19): siRNA sense strand
caaacugcuucaacucauc

SEQ ID NO: 1032161 - RNA, 19 nt, Homo sapiens
  misc_RNA (1)...(19): siRNA sense strand
ugaagagaaagacguauug

SEQ ID NO: 1032162 - RNA, 19 nt, Homo sapiens
  misc_RNA (1)...(19): siRNA sense strand
cugagugaauuucgaagaa

SEQ ID NO: 1032163 - RNA, 19 nt, Homo sapiens
  misc_RNA (1)...(19): siRNA sense strand
gaacgacaaaccauaacuc

SEQ ID NO: 1032164 - RNA, 19 nt, Homo sapiens
  misc_RNA (1)...(19): siRNA sense strand
aaagcugacugauaaagag

SEQ ID NO: 1032165 - RNA, 19 nt, Homo sapiens
  misc_RNA (1)...(19): siRNA sense strand
cagagaaggacaaagaaau

SEQ ID NO: 1032166 - RNA, 19 nt, Homo sapiens
  misc_RNA (1)...(19): siRNA sense strand
gucaacaugugcagcauca

SEQ ID NO: 1032167 - RNA, 19 nt, Homo sapiens
  misc_RNA (1)...(19): siRNA sense strand
gggagcagguguugaaagc

SEQ ID NO: 1032168 - RNA, 19 nt, Homo sapiens
  misc_RNA (1)...(19): siRNA sense strand
ccaaauccgaaacuacauu

SEQ ID NO: 1032169 - RNA, 19 nt, Homo sapiens
  misc_RNA (1)...(19): siRNA sense strand
ccacugcugcacucaauga

SEQ ID NO: 1032170 - RNA, 19 nt, Homo sapiens
  misc_RNA (1)...(19): siRNA sense strand
uaucucagguccaguuucu

SEQ ID NO: 1032171 - RNA, 19 nt, Homo sapiens
  misc_RNA (1)...(19): siRNA sense strand
gggaagagaaugauauugc

SEQ ID NO: 1032172 - RNA, 19 nt, Homo sapiens
  misc_RNA (1)...(19): siRNA sense strand
ggagaaaauucgaguccuu

SEQ ID NO: 1032173 - RNA, 19 nt, Homo sapiens
  misc_RNA (1)...(19): siRNA sense strand
cugaaggccagauauagua

SEQ ID NO: 1032174 - RNA, 19 nt, Homo sapiens
  misc_RNA (1)...(19): siRNA sense strand
agaaauacagcgacugaga

SEQ ID NO: 1032175 - RNA, 19 nt, Homo sapiens
  misc_RNA (1)...(19): siRNA sense strand
gaaugcuuaucaacucaca

SEQ ID NO: 1032176 - RNA, 19 nt, Homo sapiens
  misc_RNA (1)...(19): siRNA sense strand
ugaaaucacaagugggaaa

SEQ ID NO: 1032177 - RNA, 19 nt, Homo sapiens
  misc_RNA (1)...(19): siRNA sense strand
uaaagcagcaagaagaaca

SEQ ID NO: 1032178 - RNA, 19 nt, Homo sapiens
  misc_RNA (1)...(19): siRNA sense strand
ucucagguccaguuucuuu

SEQ ID NO: 1032179 - RNA, 19 nt, Homo sapiens
  misc_RNA (1)...(19): siRNA sense strand
gaagaagagaagaagagau

SEQ ID NO: 1032180 - RNA, 19 nt, Homo sapiens
  misc_RNA (1)...(19): siRNA sense strand
acacuccguuuaucacaga

SEQ ID NO: 1032181 - RNA, 19 nt, Homo sapiens
  misc_RNA (1)...(19): siRNA sense strand
caauacacuccguuuauca

SEQ ID NO: 1032182 - RNA, 19 nt, Homo sapiens
  misc_RNA (1)...(19): siRNA sense strand
agaaauugcacacuuaaag

SEQ ID NO: 1032183 - RNA, 19 nt, Homo sapiens
  misc_RNA (1)...(19): siRNA sense strand
gcaggcauguacuuuagac

SEQ ID NO: 1032184 - RNA, 19 nt, Homo sapiens
  misc_RNA (1)...(19): siRNA sense strand
ggaaagcugacugauaaag

SEQ ID NO: 1032185 - RNA, 19 nt, Homo sapiens
  misc_RNA (1)...(19): siRNA sense strand
gcauaaaacagagaagaua

SEQ ID NO: 1032186 - RNA, 19 nt, Homo sapiens
  misc_RNA (1)...(19): siRNA sense strand
aaauggaaauacagcugaa

SEQ ID NO: 1032187 - RNA, 19 nt, Homo sapiens
  misc_RNA (1)...(19): siRNA sense strand
gauaacgucuagugaauua

SEQ ID NO: 1032188 - RNA, 19 nt, Homo sapiens
  misc_RNA (1)...(19): siRNA sense strand
ugaaagauguuaccagaua

SEQ ID NO: 1032189 - RNA, 19 nt, Homo sapiens
  misc_RNA (1)...(19): siRNA sense strand
gaaagucuaugcugaaaug

SEQ ID NO: 1032190 - RNA, 19 nt, Homo sapiens
  misc_RNA (1)...(19): siRNA sense strand
gaaacgagaugcacagguu

SEQ ID NO: 1032191 - RNA, 19 nt, Homo sapiens
  misc_RNA (1)...(19): siRNA sense strand
ggagaagacgcaccuauua

SEQ ID NO: 1032192 - RNA, 19 nt, Homo sapiens
  misc_RNA (1)...(19): siRNA sense strand
gaaagauguuaccagauaa

SEQ ID NO: 1032193 - RNA, 19 nt, Homo sapiens
  misc_RNA (1)...(19): siRNA sense strand
gaaggaccaucuuguaaau

SEQ ID NO: 1032194 - RNA, 19 nt, Homo sapiens
  misc_RNA (1)...(19): siRNA sense strand
gagaagaagcagcugauua

SEQ ID NO: 1032195 - RNA, 19 nt, Homo sapiens
  misc_RNA (1)...(19): siRNA sense strand
aggaagaacugacuacaua

SEQ ID NO: 1032196 - RNA, 19 nt, Homo sapiens
  misc_RNA (1)...(19): siRNA sense strand
aaagagagcuuccauccuu

SEQ ID NO: 1032197 - RNA, 19 nt, Homo sapiens
  misc_RNA (1)...(19): siRNA sense strand
guaacacacugcauaaaga

SEQ ID NO: 1032198 - RNA, 19 nt, Homo sapiens
  misc_RNA (1)...(19): siRNA sense strand
ggagaaaagucaucuaaaa

SEQ ID NO: 1032199 - RNA, 19 nt, Homo sapiens
  misc_RNA (1)...(19): siRNA sense strand
caaaugugcgucugaauaa

SEQ ID NO: 1032200 - RNA, 19 nt, Homo sapiens
  misc_RNA (1)...(19): siRNA sense strand
gaacuucagacaaccauuu

SEQ ID NO: 1032201 - RNA, 19 nt, Homo sapiens
  misc_RNA (1)...(19): siRNA sense strand
gagaaagucuaugcugaaa

SEQ ID NO: 1032202 - RNA, 19 nt, Homo sapiens
  misc_RNA (1)...(19): siRNA sense strand
aagcagaacuugaaagaug

SEQ ID NO: 1032203 - RNA, 19 nt, Homo sapiens
  misc_RNA (1)...(19): siRNA sense strand
gaacagauaacuuacauac

SEQ ID NO: 1032204 - RNA, 19 nt, Homo sapiens
  misc_RNA (1)...(19): siRNA sense strand
caaagaaagcaacaacuaa

SEQ ID NO: 1032205 - RNA, 19 nt, Homo sapiens
  misc_RNA (1)...(19): siRNA sense strand
gagaaggaccaucuuguaa

SEQ ID NO: 1032206 - RNA, 19 nt, Homo sapiens
  misc_RNA (1)...(19): siRNA sense strand
caaaccacaugaucaaaga

SEQ ID NO: 1032207 - RNA, 19 nt, Homo sapiens
  misc_RNA (1)...(19): siRNA sense strand
acagauaacuuacauacga

SEQ ID NO: 1032208 - RNA, 19 nt, Homo sapiens
  misc_RNA (1)...(19): siRNA sense strand
agaagcagcugauuagaga

SEQ ID NO: 1032209 - RNA, 19 nt, Homo sapiens
  misc_RNA (1)...(19): siRNA sense strand
uaaggcaucuaguaugauu

SEQ ID NO: 1032210 - RNA, 19 nt, Homo sapiens
  misc_RNA (1)...(19): siRNA sense strand
ggaaucagaacuucaaaga

SEQ ID NO: 1032211 - RNA, 19 nt, Homo sapiens
  misc_RNA (1)...(19): siRNA sense strand
ggaauacacucagaagcuu

SEQ ID NO: 1032212 - RNA, 19 nt, Homo sapiens
  misc_RNA (1)...(19): siRNA sense strand
gagaaggaauacacucaga

SEQ ID NO: 1032213 - RNA, 19 nt, Homo sapiens
  misc_RNA (1)...(19): siRNA sense strand
ugaagcagauugagaagga

SEQ ID NO: 1032214 - RNA, 19 nt, Homo sapiens
  misc_RNA (1)...(19): siRNA sense strand
ugaggaagcuuugaaggaa

SEQ ID NO: 1032215 - RNA, 19 nt, Homo sapiens
  misc_RNA (1)...(19): siRNA sense strand
gaacuugaagacaccauuu

SEQ ID NO: 1032216 - RNA, 19 nt, Homo sapiens
  misc_RNA (1)...(19): siRNA sense strand
gaacucagagaaagucuau

SEQ ID NO: 1032217 - RNA, 19 nt, Homo sapiens
  misc_RNA (1)...(19): siRNA sense strand
ucuaaggcaucuaguauga

SEQ ID NO: 1032218 - RNA, 19 nt, Homo sapiens
  misc_RNA (1)...(19): siRNA sense strand
cacaggaacagauaacuua

SEQ ID NO: 1032219 - RNA, 19 nt, Homo sapiens
  misc_RNA (1)...(19): siRNA sense strand
caacuaagggaucaagaaa

SEQ ID NO: 1032220 - RNA, 19 nt, Homo sapiens
  misc_RNA (1)...(19): siRNA sense strand
ucaaagaaagcaacaacua

SEQ ID NO: 1032221 - RNA, 19 nt, Homo sapiens
  misc_RNA (1)...(19): siRNA sense strand
gagaagcagagaacaguaa

SEQ ID NO: 1032222 - RNA, 19 nt, Homo sapiens
  misc_RNA (1)...(19): siRNA sense strand
cagauaacgucuagugaau

SEQ ID NO: 1032223 - RNA, 19 nt, Homo sapiens
  misc_RNA (1)...(19): siRNA sense strand
uuacagaggcagaaauuaa

SEQ ID NO: 1032224 - RNA, 19 nt, Homo sapiens
  misc_RNA (1)...(19): siRNA sense strand
caucuaguaugauugaaga

SEQ ID NO: 1032225 - RNA, 19 nt, Homo sapiens
  misc_RNA (1)...(19): siRNA sense strand
gaggaagcuuugaaggaaa

SEQ ID NO: 1032226 - RNA, 19 nt, Homo sapiens
  misc_RNA (1)...(19): siRNA sense strand
gaacaugcucuuucagcuu

SEQ ID NO: 1032227 - RNA, 19 nt, Homo sapiens
  misc_RNA (1)...(19): siRNA sense strand
acaaaugugcgucugaaua

SEQ ID NO: 1032228 - RNA, 19 nt, Homo sapiens
  misc_RNA (1)...(19): siRNA sense strand
aaacagcaguuacaggaau

SEQ ID NO: 1032229 - RNA, 19 nt, Homo sapiens
  misc_RNA (1)...(19): siRNA sense strand
gcaacacacugaaaacauu

SEQ ID NO: 1032230 - RNA, 19 nt, Homo sapiens
  misc_RNA (1)...(19): siRNA sense strand
uagcagaacuucagacaac

SEQ ID NO: 1032231 - RNA, 19 nt, Homo sapiens
  misc_RNA (1)...(19): siRNA sense strand
ccacaaaccacaugaucaa

SEQ ID NO: 1032232 - RNA, 19 nt, Homo sapiens
  misc_RNA (1)...(19): siRNA sense strand
uaacuuacauacgacaaga

SEQ ID NO: 1032233 - RNA, 19 nt, Homo sapiens
  misc_RNA (1)...(19): siRNA sense strand
ggagucacaggaacagaua

SEQ ID NO: 1032234 - RNA, 19 nt, Homo sapiens
  misc_RNA (1)...(19): siRNA sense strand
gcagagugaacuugauaaa

SEQ ID NO: 1032235 - RNA, 19 nt, Homo sapiens
  misc_RNA (1)...(19): siRNA sense strand
gcagcuaacucgugugacu

SEQ ID NO: 1032236 - RNA, 19 nt, Homo sapiens
  misc_RNA (1)...(19): siRNA sense strand
agagugaacuugauaaagg

SEQ ID NO: 1032237 - RNA, 19 nt, Homo sapiens
  misc_RNA (1)...(19): siRNA sense strand
gagugaacuugauaaagga

SEQ ID NO: 1032238 - RNA, 19 nt, Homo sapiens
  misc_RNA (1)...(19): siRNA sense strand
gcagcugacuggagaagca

SEQ ID NO: 1032239 - RNA, 19 nt, Homo sapiens
  misc_RNA (1)...(19): siRNA sense strand
acaaagaauuggagucaca

SEQ ID NO: 1032240 - RNA, 19 nt, Homo sapiens
  misc_RNA (1)...(19): siRNA sense strand
gaucauagcagaacuucag

SEQ ID NO: 1032241 - RNA, 19 nt, Homo sapiens
  misc_RNA (1)...(19): siRNA sense strand
gcaguuacaggaaucagaa

SEQ ID NO: 1032242 - RNA, 19 nt, Homo sapiens
  misc_RNA (1)...(19): siRNA sense strand
agucuaugcugaaaugaaa

SEQ ID NO: 1032243 - RNA, 19 nt, Homo sapiens
  misc_RNA (1)...(19): siRNA sense strand
gaagaacugacuacauauc

SEQ ID NO: 1032244 - RNA, 19 nt, Homo sapiens
  misc_RNA (1)...(19): siRNA sense strand
cgacaagaauaugaaacaa

SEQ ID NO: 1032245 - RNA, 19 nt, Homo sapiens
  misc_RNA (1)...(19): siRNA sense strand
ggugcgaugugcagagaaa

SEQ ID NO: 1032246 - RNA, 19 nt, Homo sapiens
  misc_RNA (1)...(19): siRNA sense strand
gcugauauaaaccuucuaa

SEQ ID NO: 1032247 - RNA, 19 nt, Homo sapiens
  misc_RNA (1)...(19): siRNA sense strand
gaacugacuacauaucaag

SEQ ID NO: 1032248 - RNA, 19 nt, Homo sapiens
  misc_RNA (1)...(19): siRNA sense strand
gauaaugaccaagcaauca

SEQ ID NO: 1032249 - RNA, 19 nt, Homo sapiens
  misc_RNA (1)...(19): siRNA sense strand
caagggaacaugagauugu

SEQ ID NO: 1032250 - RNA, 19 nt, Homo sapiens
  misc_RNA (1)...(19): siRNA sense strand
gaaucagaacuucaaagaa

SEQ ID NO: 1032251 - RNA, 19 nt, Homo sapiens
  misc_RNA (1)...(19): siRNA sense strand
ccagauaacgucuagugaa

SEQ ID NO: 1032252 - RNA, 19 nt, Homo sapiens
  misc_RNA (1)...(19): siRNA sense strand
caaguugagagaagaauug

SEQ ID NO: 1032253 - RNA, 19 nt, Homo sapiens
  misc_RNA (1)...(19): siRNA sense strand
aagcagagaacaguaauuu

SEQ ID NO: 1032254 - RNA, 19 nt, Homo sapiens
  misc_RNA (1)...(19): siRNA sense strand
gcuccaggauguuagacaa

SEQ ID NO: 1032255 - RNA, 19 nt, Homo sapiens
  misc_RNA (1)...(19): siRNA sense strand
cucagaagcuugccaaauc

SEQ ID NO: 1032256 - RNA, 19 nt, Homo sapiens
  misc_RNA (1)...(19): siRNA sense strand
gagcagcuaacucguguga

SEQ ID NO: 1032257 - RNA, 19 nt, Homo sapiens
  misc_RNA (1)...(19): siRNA sense strand
ugaauaaaauggagaguga

SEQ ID NO: 1032258 - RNA, 19 nt, Homo sapiens
  misc_RNA (1)...(19): siRNA sense strand
aggaccaucuuguaaauga

SEQ ID NO: 1032259 - RNA, 19 nt, Homo sapiens
  misc_RNA (1)...(19): siRNA sense strand
agagaaggaccaucuugua

SEQ ID NO: 1032260 - RNA, 19 nt, Homo sapiens
  misc_RNA (1)...(19): siRNA sense strand
ggagaagcagagaacagua

SEQ ID NO: 1032261 - RNA, 19 nt, Homo sapiens
  misc_RNA (1)...(19): siRNA sense strand
gaaggaauacacucagaag

SEQ ID NO: 1032262 - RNA, 19 nt, Homo sapiens
  misc_RNA (1)...(19): siRNA sense strand
aagaauugcuugaggauac

SEQ ID NO: 1032263 - RNA, 19 nt, Homo sapiens
  misc_RNA (1)...(19): siRNA sense strand
ggcagaaauuaauucaaga

SEQ ID NO: 1032264 - RNA, 19 nt, Homo sapiens
  misc_RNA (1)...(19): siRNA sense strand
ggaagaacugacuacauau

SEQ ID NO: 1032265 - RNA, 19 nt, Homo sapiens
  misc_RNA (1)...(19): siRNA sense strand
agaagaagcagcugauuag

SEQ ID NO: 1032266 - RNA, 19 nt, Homo sapiens
  misc_RNA (1)...(19): siRNA sense strand
aaaggcggcuccaggaugu

SEQ ID NO: 1032267 - RNA, 19 nt, Homo sapiens
  misc_RNA (1)...(19): siRNA sense strand
guucacaaguugagagaag

SEQ ID NO: 1032268 - RNA, 19 nt, Homo sapiens
  misc_RNA (1)...(19): siRNA sense strand
gugaauacauggcgcaaac

SEQ ID NO: 1032269 - RNA, 19 nt, Homo sapiens
  misc_RNA (1)...(19): siRNA sense strand
aggcagaaauuaauucaag

SEQ ID NO: 1032270 - RNA, 19 nt, Homo sapiens
  misc_RNA (1)...(19): siRNA sense strand
cagcaucccuaagacaaga

SEQ ID NO: 1032271 - RNA, 19 nt, Homo sapiens
  misc_RNA (1)...(19): siRNA sense strand
agacaaccauuuccucucu

SEQ ID NO: 1032272 - RNA, 19 nt, Homo sapiens
  misc_RNA (1)...(19): siRNA sense strand
gaagcagauugagaaggaa

SEQ ID NO: 1032273 - RNA, 19 nt, Homo sapiens
  misc_RNA (1)...(19): siRNA sense strand
gaaacuguuacaaaccaaa

SEQ ID NO: 1032274 - RNA, 19 nt, Homo sapiens
  misc_RNA (1)...(19): siRNA sense strand
agaaggaccaucuuguaaa

SEQ ID NO: 1032275 - RNA, 19 nt, Homo sapiens
  misc_RNA (1)...(19): siRNA sense strand
gaagcagagaacaguaauu

SEQ ID NO: 1032276 - RNA, 19 nt, Homo sapiens
  misc_RNA (1)...(19): siRNA sense strand
gaccaagcaaucaagguuu

SEQ ID NO: 1032277 - RNA, 19 nt, Homo sapiens
  misc_RNA (1)...(19): siRNA sense strand
gaagaagcagcugauuaga

SEQ ID NO: 1032278 - RNA, 19 nt, Homo sapiens
  misc_RNA (1)...(19): siRNA sense strand
gcaacuggaggacaucaga

SEQ ID NO: 1032279 - RNA, 19 nt, Homo sapiens
  misc_RNA (1)...(19): siRNA sense strand
uaacucgugugacugaagu

SEQ ID NO: 1032280 - RNA, 19 nt, Homo sapiens
  misc_RNA (1)...(19): siRNA sense strand
gacaccauuuccucccuaa

SEQ ID NO: 1032281 - RNA, 19 nt, Homo sapiens
  misc_RNA (1)...(19): siRNA sense strand
ggaacagauaacuuacaua

SEQ ID NO: 1032282 - RNA, 19 nt, Homo sapiens
  misc_RNA (1)...(19): siRNA sense strand
gagaagacgcaccuauuac

SEQ ID NO: 1032283 - RNA, 19 nt, Homo sapiens
  misc_RNA (1)...(19): siRNA sense strand
gagauaaugaccaagcaau

SEQ ID NO: 1032284 - RNA, 19 nt, Homo sapiens
  misc_RNA (1)...(19): siRNA sense strand
gaccaugaacgggaaauug

SEQ ID NO: 1032285 - RNA, 19 nt, Homo sapiens
  misc_RNA (1)...(19): siRNA sense strand
uuacaggaaucagaacuuc

SEQ ID NO: 1032286 - RNA, 19 nt, Homo sapiens
  misc_RNA (1)...(19): siRNA sense strand
gcuucgcgcugccaauaug

SEQ ID NO: 1032287 - RNA, 19 nt, Homo sapiens
  misc_RNA (1)...(19): siRNA sense strand
caacaaggcuggagacuau

SEQ ID NO: 1032288 - RNA, 19 nt, Homo sapiens
  misc_RNA (1)...(19): siRNA sense strand
gggaucaucuugugucaua

SEQ ID NO: 1032289 - RNA, 19 nt, Homo sapiens
  misc_RNA (1)...(19): siRNA sense strand
gaacugggcuaucucuuca

SEQ ID NO: 1032290 - RNA, 19 nt, Homo sapiens
  misc_RNA (1)...(19): siRNA sense strand
caucuugugucauaucuua

SEQ ID NO: 1032291 - RNA, 19 nt, Homo sapiens
  misc_RNA (1)...(19): siRNA sense strand
caacgaagccuuaaaguuc

SEQ ID NO: 1032292 - RNA, 19 nt, Homo sapiens
  misc_RNA (1)...(19): siRNA sense strand
gcaaugacccuguguugaa

SEQ ID NO: 1032293 - RNA, 19 nt, Homo sapiens
  misc_RNA (1)...(19): siRNA sense strand
gauguuaagugccugcuuu

SEQ ID NO: 1032294 - RNA, 19 nt, Homo sapiens
  misc_RNA (1)...(19): siRNA sense strand
gaagaaagccauugaguac

SEQ ID NO: 1032295 - RNA, 19 nt, Homo sapiens
  misc_RNA (1)...(19): siRNA sense strand
ggacacagaauccuagaaa

SEQ ID NO: 1032296 - RNA, 19 nt, Homo sapiens
  misc_RNA (1)...(19): siRNA sense strand
ggacugcacuguacuaugc

SEQ ID NO: 1032297 - RNA, 19 nt, Homo sapiens
  misc_RNA (1)...(19): siRNA sense strand
gagagaagauggccaacau

SEQ ID NO: 1032298 - RNA, 19 nt, Homo sapiens
  misc_RNA (1)...(19): siRNA sense strand
ggaaacaugaccacaguaa

SEQ ID NO: 1032299 - RNA, 19 nt, Homo sapiens
  misc_RNA (1)...(19): siRNA sense strand
gaaggucaauaaagcagaa

SEQ ID NO: 1032300 - RNA, 19 nt, Homo sapiens
  misc_RNA (1)...(19): siRNA sense strand
uaaagaaggucaauaaagc

SEQ ID NO: 1032301 - RNA, 19 nt, Homo sapiens
  misc_RNA (1)...(19): siRNA sense strand
gaaaggcaauguacuucau

SEQ ID NO: 1032302 - RNA, 19 nt, Homo sapiens
  misc_RNA (1)...(19): siRNA sense strand
ggagaaagcgccagacaau

SEQ ID NO: 1032303 - RNA, 19 nt, Homo sapiens
  misc_RNA (1)...(19): siRNA sense strand
gauagaaacuuugaacaag

SEQ ID NO: 1032304 - RNA, 19 nt, Homo sapiens
  misc_RNA (1)...(19): siRNA sense strand
acaaggcgguacagucuua

SEQ ID NO: 1032305 - RNA, 19 nt, Homo sapiens
  misc_RNA (1)...(19): siRNA sense strand
agacauuccugccuucuuu

SEQ ID NO: 1032306 - RNA, 19 nt, Homo sapiens
  misc_RNA (1)...(19): siRNA sense strand
gaucgugucuccacuucuu

SEQ ID NO: 1032307 - RNA, 19 nt, Homo sapiens
  misc_RNA (1)...(19): siRNA sense strand
agaaagcgccagacaauuu

SEQ ID NO: 1032308 - RNA, 19 nt, Homo sapiens
  misc_RNA (1)...(19): siRNA sense strand
caagacaucccauccauga

SEQ ID NO: 1032309 - RNA, 19 nt, Homo sapiens
  misc_RNA (1)...(19): siRNA sense strand
gaaauacgcaagacaguca

SEQ ID NO: 1032310 - RNA, 19 nt, Homo sapiens
  misc_RNA (1)...(19): siRNA sense strand
gagagcaacuacacagaga

SEQ ID NO: 1032311 - RNA, 19 nt, Homo sapiens
  misc_RNA (1)...(19): siRNA sense strand
ugagaccgcuucuguguug

SEQ ID NO: 1032312 - RNA, 19 nt, Homo sapiens
  misc_RNA (1)...(19): siRNA sense strand
cugaggcaauugaguauua

SEQ ID NO: 1032313 - RNA, 19 nt, Homo sapiens
  misc_RNA (1)...(19): siRNA sense strand
gaugaggccuauagacaga

SEQ ID NO: 1032314 - RNA, 19 nt, Homo sapiens
  misc_RNA (1)...(19): siRNA sense strand
ccacagaacugggcuaucu

SEQ ID NO: 1032315 - RNA, 19 nt, Homo sapiens
  misc_RNA (1)...(19): siRNA sense strand
cgaagaaagccauugagua

SEQ ID NO: 1032316 - RNA, 19 nt, Homo sapiens
  misc_RNA (1)...(19): siRNA sense strand
caaguucgaccucgccuua

SEQ ID NO: 1032317 - RNA, 19 nt, Homo sapiens
  misc_RNA (1)...(19): siRNA sense strand
ggaagaaggcagaaaguuc

SEQ ID NO: 1032318 - RNA, 19 nt, Homo sapiens
  misc_RNA (1)...(19): siRNA sense strand
aauccaagccuccaucuua

SEQ ID NO: 1032319 - RNA, 19 nt, Homo sapiens
  misc_RNA (1)...(19): siRNA sense strand
ccaugaaacuggacaagga

SEQ ID NO: 1032320 - RNA, 19 nt, Homo sapiens
  misc_RNA (1)...(19): siRNA sense strand
gaugagagcaauauugaug

SEQ ID NO: 1032321 - RNA, 19 nt, Homo sapiens
  misc_RNA (1)...(19): siRNA sense strand
guugauggcugaccugaug

SEQ ID NO: 1032322 - RNA, 19 nt, Homo sapiens
  misc_RNA (1)...(19): siRNA sense strand
ugacagggaucaucuugug

SEQ ID NO: 1032323 - RNA, 19 nt, Homo sapiens
  misc_RNA (1)...(19): siRNA sense strand
gaaguucuuuaaagccuau

SEQ ID NO: 1032324 - RNA, 19 nt, Homo sapiens
  misc_RNA (1)...(19): siRNA sense strand
caaacuugcuuucaacuac

SEQ ID NO: 1032325 - RNA, 19 nt, Homo sapiens
  misc_RNA (1)...(19): siRNA sense strand
ugaaggaggugcagaaguc

SEQ ID NO: 1032326 - RNA, 19 nt, Homo sapiens
  misc_RNA (1)...(19): siRNA sense strand
gaucuugaauccuguaguc

SEQ ID NO: 1032327 - RNA, 19 nt, Homo sapiens
  misc_RNA (1)...(19): siRNA sense strand
ucaacuaccugaaggacaa

SEQ ID NO: 1032328 - RNA, 19 nt, Homo sapiens
  misc_RNA (1)...(19): siRNA sense strand
gaagcggccaucaaucuuu

SEQ ID NO: 1032329 - RNA, 19 nt, Homo sapiens
  misc_RNA (1)...(19): siRNA sense strand
uggcucaggucagguauua

SEQ ID NO: 1032330 - RNA, 19 nt, Homo sapiens
  misc_RNA (1)...(19): siRNA sense strand
gaauugggcacgcuuaugu

SEQ ID NO: 1032331 - RNA, 19 nt, Homo sapiens
  misc_RNA (1)...(19): siRNA sense strand
ugaaaucauugaccgagaa

SEQ ID NO: 1032332 - RNA, 19 nt, Homo sapiens
  misc_RNA (1)...(19): siRNA sense strand
ggagcaaccagaaaugauu

SEQ ID NO: 1032333 - RNA, 19 nt, Homo sapiens
  misc_RNA (1)...(19): siRNA sense strand
gagaaccgcaucaccauug

SEQ ID NO: 1032334 - RNA, 19 nt, Homo sapiens
  misc_RNA (1)...(19): siRNA sense strand
gcaagagaaggaaacauga

SEQ ID NO: 1032335 - RNA, 19 nt, Homo sapiens
  misc_RNA (1)...(19): siRNA sense strand
gcugggaucauuuacuaua

SEQ ID NO: 1032336 - RNA, 19 nt, Homo sapiens
  misc_RNA (1)...(19): siRNA sense strand
gcuacaaggccuaugagua

SEQ ID NO: 1032337 - RNA, 19 nt, Homo sapiens
  misc_RNA (1)...(19): siRNA sense strand
caacaaguccugcuacaag

SEQ ID NO: 1032338 - RNA, 19 nt, Homo sapiens
  misc_RNA (1)...(19): siRNA sense strand
gaguacagccugaaggaaa

SEQ ID NO: 1032339 - RNA, 19 nt, Homo sapiens
  misc_RNA (1)...(19): siRNA sense strand
aagcggccaucaaucuuua

SEQ ID NO: 1032340 - RNA, 19 nt, Homo sapiens
  misc_RNA (1)...(19): siRNA sense strand
agacugagcagaaccauga

SEQ ID NO: 1032341 - RNA, 19 nt, Homo sapiens
  misc_RNA (1)...(19): siRNA sense strand
aaaagaagcugugauagaa

SEQ ID NO: 1032342 - RNA, 19 nt, Homo sapiens
  misc_RNA (1)...(19): siRNA sense strand
uggcugggaucauuuacua

SEQ ID NO: 1032343 - RNA, 19 nt, Homo sapiens
  misc_RNA (1)...(19): siRNA sense strand
gaauucaggacaccaaaga

SEQ ID NO: 1032344 - RNA, 19 nt, Homo sapiens
  misc_RNA (1)...(19): siRNA sense strand
gcaacuacacagagaagaa

SEQ ID NO: 1032345 - RNA, 19 nt, Homo sapiens
  misc_RNA (1)...(19): siRNA sense strand
gaaggaagaaggcagaaag

SEQ ID NO: 1032346 - RNA, 19 nt, Homo sapiens
  misc_RNA (1)...(19): siRNA sense strand
agcaaugacuccucccuua

SEQ ID NO: 1032347 - RNA, 19 nt, Homo sapiens
  misc_RNA (1)...(19): siRNA sense strand
gggcuaguguguaguuuca

SEQ ID NO: 1032348 - RNA, 19 nt, Homo sapiens
  misc_RNA (1)...(19): siRNA sense strand
uggcaaagguuuacaagag

SEQ ID NO: 1032349 - RNA, 19 nt, Homo sapiens
  misc_RNA (1)...(19): siRNA sense strand
gaaaauggucaucaaauug

SEQ ID NO: 1032350 - RNA, 19 nt, Homo sapiens
  misc_RNA (1)...(19): siRNA sense strand
gguacagucuuauaaggau

SEQ ID NO: 1032351 - RNA, 19 nt, Homo sapiens
  misc_RNA (1)...(19): siRNA sense strand
gcaaugacuccucccuuau

SEQ ID NO: 1032352 - RNA, 19 nt, Homo sapiens
  misc_RNA (1)...(19): siRNA sense strand
uggcauggcugguuugaca

SEQ ID NO: 1032353 - RNA, 19 nt, Homo sapiens
  misc_RNA (1)...(19): siRNA sense strand
uggcugaccugauguuuag

SEQ ID NO: 1032354 - RNA, 19 nt, Homo sapiens
  misc_RNA (1)...(19): siRNA sense strand
ccagcgggcauccaucuua

SEQ ID NO: 1032355 - RNA, 19 nt, Homo sapiens
  misc_RNA (1)...(19): siRNA sense strand
caccauggcccucauuuau

SEQ ID NO: 1032356 - RNA, 19 nt, Homo sapiens
  misc_RNA (1)...(19): siRNA sense strand
aaacuggccuggaaguaca

SEQ ID NO: 1032357 - RNA, 19 nt, Homo sapiens
  misc_RNA (1)...(19): siRNA sense strand
gcagaauugggcacgcuua

SEQ ID NO: 1032358 - RNA, 19 nt, Homo sapiens
  misc_RNA (1)...(19): siRNA sense strand
guagaaaugggacacagaa

SEQ ID NO: 1032359 - RNA, 19 nt, Homo sapiens
  misc_RNA (1)...(19): siRNA sense strand
ccucauuuaugcucacaaa

SEQ ID NO: 1032360 - RNA, 19 nt, Homo sapiens
  misc_RNA (1)...(19): siRNA sense strand
ggaaaggcaauguacuuca

SEQ ID NO: 1032361 - RNA, 19 nt, Homo sapiens
  misc_RNA (1)...(19): siRNA sense strand
ccaacgaagccuuaaaguu

SEQ ID NO: 1032362 - RNA, 19 nt, Homo sapiens
  misc_RNA (1)...(19): siRNA sense strand
uaaucgaucugcuaagaag

SEQ ID NO: 1032363 - RNA, 19 nt, Homo sapiens
  misc_RNA (1)...(19): siRNA sense strand
gaggcugcccagaagauua

SEQ ID NO: 1032364 - RNA, 19 nt, Homo sapiens
  misc_RNA (1)...(19): siRNA sense strand
gaccgcaugcugaagauuu

SEQ ID NO: 1032365 - RNA, 19 nt, Homo sapiens
  misc_RNA (1)...(19): siRNA sense strand
acacagagaagaaggaguu

SEQ ID NO: 1032366 - RNA, 19 nt, Homo sapiens
  misc_RNA (1)...(19): siRNA sense strand
ccuauggaguccucaaaga

SEQ ID NO: 1032367 - RNA, 19 nt, Homo sapiens
  misc_RNA (1)...(19): siRNA sense strand
agaaggcccuggaggucua

SEQ ID NO: 1032368 - RNA, 19 nt, Homo sapiens
  misc_RNA (1)...(19): siRNA sense strand
gcuacugggcgaugccuua

SEQ ID NO: 1032369 - RNA, 19 nt, Homo sapiens
  misc_RNA (1)...(19): siRNA sense strand
gacaggcgccucuacauca

SEQ ID NO: 1032370 - RNA, 19 nt, Homo sapiens
  misc_RNA (1)...(19): siRNA sense strand
ucagugaccuggaaagcau

SEQ ID NO: 1032371 - RNA, 19 nt, Homo sapiens
  misc_RNA (1)...(19): siRNA sense strand
ugaagaaccaagugaaaga

SEQ ID NO: 1032372 - RNA, 19 nt, Homo sapiens
  misc_RNA (1)...(19): siRNA sense strand
gcaugagcuugcaagagaa

SEQ ID NO: 1032373 - RNA, 19 nt, Homo sapiens
  misc_RNA (1)...(19): siRNA sense strand
aaagaugagagcaauauug

SEQ ID NO: 1032374 - RNA, 19 nt, Homo sapiens
  misc_RNA (1)...(19): siRNA sense strand
gcgcugaacaugcuaagga

SEQ ID NO: 1032375 - RNA, 19 nt, Homo sapiens
  misc_RNA (1)...(19): siRNA sense strand
cuacaaggccuaugaguac

SEQ ID NO: 1032376 - RNA, 19 nt, Homo sapiens
  misc_RNA (1)...(19): siRNA sense strand
gggagaaggcuaacaugga

SEQ ID NO: 1032377 - RNA, 19 nt, Homo sapiens
  misc_RNA (1)...(19): siRNA sense strand
caugaugaaugauguuaag

SEQ ID NO: 1032378 - RNA, 19 nt, Homo sapiens
  misc_RNA (1)...(19): siRNA sense strand
ccaccauggcccucauuua

SEQ ID NO: 1032379 - RNA, 19 nt, Homo sapiens
  misc_RNA (1)...(19): siRNA sense strand
aaacaugaccacaguaagu

SEQ ID NO: 1032380 - RNA, 19 nt, Homo sapiens
  misc_RNA (1)...(19): siRNA sense strand
ccaaggcgcguaugcaguu

SEQ ID NO: 1032381 - RNA, 19 nt, Homo sapiens
  misc_RNA (1)...(19): siRNA sense strand
acucagagcuagagaaugc

SEQ ID NO: 1032382 - RNA, 19 nt, Homo sapiens
  misc_RNA (1)...(19): siRNA sense strand
ggagcagacaguagaaaug

SEQ ID NO: 1032383 - RNA, 19 nt, Homo sapiens
  misc_RNA (1)...(19): siRNA sense strand
gagaaagcgccagacaauu

SEQ ID NO: 1032384 - RNA, 19 nt, Homo sapiens
  misc_RNA (1)...(19): siRNA sense strand
aagcugugauagaaacuuu

SEQ ID NO: 1032385 - RNA, 19 nt, Homo sapiens
  misc_RNA (1)...(19): siRNA sense strand
ccaaucacguuagaaaucu

SEQ ID NO: 1032386 - RNA, 19 nt, Homo sapiens
  misc_RNA (1)...(19): siRNA sense strand
cacaguaaguucuuugaag

SEQ ID NO: 1032387 - RNA, 19 nt, Homo sapiens
  misc_RNA (1)...(19): siRNA sense strand
gcaauguguuucugcaucu

SEQ ID NO: 1032388 - RNA, 19 nt, Homo sapiens
  misc_RNA (1)...(19): siRNA sense strand
ccaacaccaucgauaacuu

SEQ ID NO: 1032389 - RNA, 19 nt, Homo sapiens
  misc_RNA (1)...(19): siRNA sense strand
ggaccaugcugcgcucaga

SEQ ID NO: 1032390 - RNA, 19 nt, Homo sapiens
  misc_RNA (1)...(19): siRNA sense strand
gaagaucgggcuccugaca

SEQ ID NO: 1032391 - RNA, 19 nt, Homo sapiens
  misc_RNA (1)...(19): siRNA sense strand
caacaccaucgauaacuuc

SEQ ID NO: 1032392 - RNA, 19 nt, Homo sapiens
  misc_RNA (1)...(19): siRNA sense strand
cuucaccucuggcggcuuu

SEQ ID NO: 1032393 - RNA, 19 nt, Homo sapiens
  misc_RNA (1)...(19): siRNA sense strand
guccggagcaucaaaguca

SEQ ID NO: 1032394 - RNA, 19 nt, Homo sapiens
  misc_RNA (1)...(19): siRNA sense strand
gcccaaggcuccucuuccu

SEQ ID NO: 1032395 - RNA, 19 nt, Homo sapiens
  misc_RNA (1)...(19): siRNA sense strand
cgugcucccugaccucuug

SEQ ID NO: 1032396 - RNA, 19 nt, Homo sapiens
  misc_RNA (1)...(19): siRNA sense strand
ccuccuggguucccucaug

SEQ ID NO: 1032397 - RNA, 19 nt, Homo sapiens
  misc_RNA (1)...(19): siRNA sense strand
ccagcuuccuugugagcaa

SEQ ID NO: 1032398 - RNA, 19 nt, Homo sapiens
  misc_RNA (1)...(19): siRNA sense strand
ugaccuuccuggcguugga

SEQ ID NO: 1032399 - RNA, 19 nt, Homo sapiens
  misc_RNA (1)...(19): siRNA sense strand
uggccaacaccaucgauaa

SEQ ID NO: 1032400 - RNA, 19 nt, Homo sapiens
  misc_RNA (1)...(19): siRNA sense strand
gugcgggcaucgugguaau

SEQ ID NO: 1032401 - RNA, 19 nt, Homo sapiens
  misc_RNA (1)...(19): siRNA sense strand
ucucgcucuucguggauua

SEQ ID NO: 1032402 - RNA, 19 nt, Homo sapiens
  misc_RNA (1)...(19): siRNA sense strand
uggccauccuccugcauga

SEQ ID NO: 1032403 - RNA, 19 nt, Homo sapiens
  misc_RNA (1)...(19): siRNA sense strand
acucuugggcaauguguuu

SEQ ID NO: 1032404 - RNA, 19 nt, Homo sapiens
  misc_RNA (1)...(19): siRNA sense strand
ugacaaccauggccauccu

SEQ ID NO: 1032405 - RNA, 19 nt, Homo sapiens
  misc_RNA (1)...(19): siRNA sense strand
gccauccuccugcaugaga

SEQ ID NO: 1032406 - RNA, 19 nt, Homo sapiens
  misc_RNA (1)...(19): siRNA sense strand
cuacaucgccuuggugaac

SEQ ID NO: 1032407 - RNA, 19 nt, Homo sapiens
  misc_RNA (1)...(19): siRNA sense strand
ggacagcgaugaugaaauu

SEQ ID NO: 1032408 - RNA, 19 nt, Homo sapiens
  misc_RNA (1)...(19): siRNA sense strand
ggaaaggacuagacauuga

SEQ ID NO: 1032409 - RNA, 19 nt, Homo sapiens
  misc_RNA (1)...(19): siRNA sense strand
ccaaagaccuccuucaguu

SEQ ID NO: 1032410 - RNA, 19 nt, Homo sapiens
  misc_RNA (1)...(19): siRNA sense strand
gcaggaaggugccaaaguu

SEQ ID NO: 1032411 - RNA, 19 nt, Homo sapiens
  misc_RNA (1)...(19): siRNA sense strand
gaacgaaugcgaagacuga

SEQ ID NO: 1032412 - RNA, 19 nt, Homo sapiens
  misc_RNA (1)...(19): siRNA sense strand
ggaauuaucagaaaugaga

SEQ ID NO: 1032413 - RNA, 19 nt, Homo sapiens
  misc_RNA (1)...(19): siRNA sense strand
uuaaugagcugaaagauag

SEQ ID NO: 1032414 - RNA, 19 nt, Homo sapiens
  misc_RNA (1)...(19): siRNA sense strand
gaaaacagcuucguaguga

SEQ ID NO: 1032415 - RNA, 19 nt, Homo sapiens
  misc_RNA (1)...(19): siRNA sense strand
gaacaaacggaaaggacua

SEQ ID NO: 1032416 - RNA, 19 nt, Homo sapiens
  misc_RNA (1)...(19): siRNA sense strand
gaagagaggcgucuacaag

SEQ ID NO: 1032417 - RNA, 19 nt, Homo sapiens
  misc_RNA (1)...(19): siRNA sense strand
caagagcgauugcuacaca

SEQ ID NO: 1032418 - RNA, 19 nt, Homo sapiens
  misc_RNA (1)...(19): siRNA sense strand
agacauauccugccauuga

SEQ ID NO: 1032419 - RNA, 19 nt, Homo sapiens
  misc_RNA (1)...(19): siRNA sense strand
agaagaggcugaacagaau

SEQ ID NO: 1032420 - RNA, 19 nt, Homo sapiens
  misc_RNA (1)...(19): siRNA sense strand
gagcuuagagugagaaaug

SEQ ID NO: 1032421 - RNA, 19 nt, Homo sapiens
  misc_RNA (1)...(19): siRNA sense strand
cagauggucucucucuaaa

SEQ ID NO: 1032422 - RNA, 19 nt, Homo sapiens
  misc_RNA (1)...(19): siRNA sense strand
agauagagauucagaaaca

SEQ ID NO: 1032423 - RNA, 19 nt, Homo sapiens
  misc_RNA (1)...(19): siRNA sense strand
gcaagcuccugucagaaga

SEQ ID NO: 1032424 - RNA, 19 nt, Homo sapiens
  misc_RNA (1)...(19): siRNA sense strand
gagaugacacuagugauuu

SEQ ID NO: 1032425 - RNA, 19 nt, Homo sapiens
  misc_RNA (1)...(19): siRNA sense strand
gaucaucacaccuuagaga

SEQ ID NO: 1032426 - RNA, 19 nt, Homo sapiens
  misc_RNA (1)...(19): siRNA sense strand
caucccaagugcuaaagua

SEQ ID NO: 1032427 - RNA, 19 nt, Homo sapiens
  misc_RNA (1)...(19): siRNA sense strand
cagaagaggcugaacagaa

SEQ ID NO: 1032428 - RNA, 19 nt, Homo sapiens
  misc_RNA (1)...(19): siRNA sense strand
caaacucuguagcaacuga

SEQ ID NO: 1032429 - RNA, 19 nt, Homo sapiens
  misc_RNA (1)...(19): siRNA sense strand
uaauacagaugaugagagu

SEQ ID NO: 1032430 - RNA, 19 nt, Homo sapiens
  misc_RNA (1)...(19): siRNA sense strand
caaagaaugcccagagaug

SEQ ID NO: 1032431 - RNA, 19 nt, Homo sapiens
  misc_RNA (1)...(19): siRNA sense strand
caucacaccuuagagauuc

SEQ ID NO: 1032432 - RNA, 19 nt, Homo sapiens
  misc_RNA (1)...(19): siRNA sense strand
caagagaucaucacaccuu

SEQ ID NO: 1032433 - RNA, 19 nt, Homo sapiens
  misc_RNA (1)...(19): siRNA sense strand
gacauauccugccauugaa

SEQ ID NO: 1032434 - RNA, 19 nt, Homo sapiens
  misc_RNA (1)...(19): siRNA sense strand
gaagaggcugaacagaaua

SEQ ID NO: 1032435 - RNA, 19 nt, Homo sapiens
  misc_RNA (1)...(19): siRNA sense strand
guugcaagcuccugucaga

SEQ ID NO: 1032436 - RNA, 19 nt, Homo sapiens
  misc_RNA (1)...(19): siRNA sense strand
ugagacauauccugccauu

SEQ ID NO: 1032437 - RNA, 19 nt, Homo sapiens
  misc_RNA (1)...(19): siRNA sense strand
cgaguugaucugaaauuua

SEQ ID NO: 1032438 - RNA, 19 nt, Homo sapiens
  misc_RNA (1)...(19): siRNA sense strand
ccagauggucucucucuaa

SEQ ID NO: 1032439 - RNA, 19 nt, Homo sapiens
  misc_RNA (1)...(19): siRNA sense strand
gcccagagaugacacuagu

SEQ ID NO: 1032440 - RNA, 19 nt, Homo sapiens
  misc_RNA (1)...(19): siRNA sense strand
gcgaagacugaaugaauuu

SEQ ID NO: 1032441 - RNA, 19 nt, Homo sapiens
  misc_RNA (1)...(19): siRNA sense strand
gggcuuacggugagacaua

SEQ ID NO: 1032442 - RNA, 19 nt, Homo sapiens
  misc_RNA (1)...(19): siRNA sense strand
gaaagauagagauucagaa

SEQ ID NO: 1032443 - RNA, 19 nt, Homo sapiens
  misc_RNA (1)...(19): siRNA sense strand
uaagagagcagcagaagag

SEQ ID NO: 1032444 - RNA, 19 nt, Homo sapiens
  misc_RNA (1)...(19): siRNA sense strand
aaacacgaguugaucugaa

SEQ ID NO: 1032445 - RNA, 19 nt, Homo sapiens
  misc_RNA (1)...(19): siRNA sense strand
gaaacacgaguugaucuga

SEQ ID NO: 1032446 - RNA, 19 nt, Homo sapiens
  misc_RNA (1)...(19): siRNA sense strand
uagcagucguccuaaugua

SEQ ID NO: 1032447 - RNA, 19 nt, Homo sapiens
  misc_RNA (1)...(19): siRNA sense strand
gauagcagucguccuaaug

SEQ ID NO: 1032448 - RNA, 19 nt, Homo sapiens
  misc_RNA (1)...(19): siRNA sense strand
ugacacuagugauuucuug

SEQ ID NO: 1032449 - RNA, 19 nt, Homo sapiens
  misc_RNA (1)...(19): siRNA sense strand
gagaucaucacaccuuaga

SEQ ID NO: 1032450 - RNA, 19 nt, Homo sapiens
  misc_RNA (1)...(19): siRNA sense strand
ggaucaaacucuguagcaa

SEQ ID NO: 1032451 - RNA, 19 nt, Homo sapiens
  misc_RNA (1)...(19): siRNA sense strand
gaaaggacuagacauugau

SEQ ID NO: 1032452 - RNA, 19 nt, Homo sapiens
  misc_RNA (1)...(19): siRNA sense strand
gagcugaaagauagagauu

SEQ ID NO: 1032453 - RNA, 19 nt, Homo sapiens
  misc_RNA (1)...(19): siRNA sense strand
guugacagcaucauacauu

SEQ ID NO: 1032454 - RNA, 19 nt, Homo sapiens
  misc_RNA (1)...(19): siRNA sense strand
ccagagaugacacuaguga

SEQ ID NO: 1032455 - RNA, 19 nt, Homo sapiens
  misc_RNA (1)...(19): siRNA sense strand
agacagccuucuccuauag

SEQ ID NO: 1032456 - RNA, 19 nt, Homo sapiens
  misc_RNA (1)...(19): siRNA sense strand
aagagaucaucacaccuua

SEQ ID NO: 1032457 - RNA, 19 nt, Homo sapiens
  misc_RNA (1)...(19): siRNA sense strand
gcuuagacgcugccacuuu

SEQ ID NO: 1032458 - RNA, 19 nt, Homo sapiens
  misc_RNA (1)...(19): siRNA sense strand
ugcgaagacugaaugaauu

SEQ ID NO: 1032459 - RNA, 19 nt, Homo sapiens
  misc_RNA (1)...(19): siRNA sense strand
gcaaagaaugcccagagau

SEQ ID NO: 1032460 - RNA, 19 nt, Homo sapiens
  misc_RNA (1)...(19): siRNA sense strand
caaagaccuccuucaguug

SEQ ID NO: 1032461 - RNA, 19 nt, Homo sapiens
  misc_RNA (1)...(19): siRNA sense strand
gauggucucucucuaaaau

SEQ ID NO: 1032462 - RNA, 19 nt, Homo sapiens
  misc_RNA (1)...(19): siRNA sense strand
gagaaaugaggaacgaaug

SEQ ID NO: 1032463 - RNA, 19 nt, Homo sapiens
  misc_RNA (1)...(19): siRNA sense strand
ugacggaucaaacucugua

SEQ ID NO: 1032464 - RNA, 19 nt, Homo sapiens
  misc_RNA (1)...(19): siRNA sense strand
uaaaguacgagagcaaaga

SEQ ID NO: 1032465 - RNA, 19 nt, Homo sapiens
  misc_RNA (1)...(19): siRNA sense strand
agagaugacacuagugauu

SEQ ID NO: 1032466 - RNA, 19 nt, Homo sapiens
  misc_RNA (1)...(19): siRNA sense strand
aaagaccuccuucaguuga

SEQ ID NO: 1032467 - RNA, 19 nt, Homo sapiens
  misc_RNA (1)...(19): siRNA sense strand
ugacaucaugaaacacaua

SEQ ID NO: 1032468 - RNA, 19 nt, Homo sapiens
  misc_RNA (1)...(19): siRNA sense strand
cgaaugcgaagacugaaug

SEQ ID NO: 1032469 - RNA, 19 nt, Homo sapiens
  misc_RNA (1)...(19): siRNA sense strand
aaagaaugcccagagauga

SEQ ID NO: 1032470 - RNA, 19 nt, Homo sapiens
  misc_RNA (1)...(19): siRNA sense strand
aacacgaguugaucugaaa

SEQ ID NO: 1032471 - RNA, 19 nt, Homo sapiens
  misc_RNA (1)...(19): siRNA sense strand
acgaguugaucugaaauuu

SEQ ID NO: 1032472 - RNA, 19 nt, Homo sapiens
  misc_RNA (1)...(19): siRNA sense strand
gcaagcaaacuccaaagac

SEQ ID NO: 1032473 - RNA, 19 nt, Homo sapiens
  misc_RNA (1)...(19): siRNA sense strand
guaaauguugaugagcuua

SEQ ID NO: 1032474 - RNA, 19 nt, Homo sapiens
  misc_RNA (1)...(19): siRNA sense strand
ggacuagacauugauagca

SEQ ID NO: 1032475 - RNA, 19 nt, Homo sapiens
  misc_RNA (1)...(19): siRNA sense strand
guugaugagcuuagaguga

SEQ ID NO: 1032476 - RNA, 19 nt, Homo sapiens
  misc_RNA (1)...(19): siRNA sense strand
ugaugagaguucacugguu

SEQ ID NO: 1032477 - RNA, 19 nt, Homo sapiens
  misc_RNA (1)...(19): siRNA sense strand
uauuugauauggcuagaca

SEQ ID NO: 1032478 - RNA, 19 nt, Homo sapiens
  misc_RNA (1)...(19): siRNA sense strand
aaaggacuagacauugaua

SEQ ID NO: 1032479 - RNA, 19 nt, Homo sapiens
  misc_RNA (1)...(19): siRNA sense strand
gcuaaaguacgagagcaaa

SEQ ID NO: 1032480 - RNA, 19 nt, Homo sapiens
  misc_RNA (1)...(19): siRNA sense strand
agaugacacuagugauuuc

SEQ ID NO: 1032481 - RNA, 19 nt, Homo sapiens
  misc_RNA (1)...(19): siRNA sense strand
gaaugcgaagacugaauga

SEQ ID NO: 1032482 - RNA, 19 nt, Homo sapiens
  misc_RNA (1)...(19): siRNA sense strand
ugauagcagucguccuaau

SEQ ID NO: 1032483 - RNA, 19 nt, Homo sapiens
  misc_RNA (1)...(19): siRNA sense strand
agagaggcgucuacaagag

SEQ ID NO: 1032484 - RNA, 19 nt, Homo sapiens
  misc_RNA (1)...(19): siRNA sense strand
ggaaucugauagugcuuuu

SEQ ID NO: 1032485 - RNA, 19 nt, Homo sapiens
  misc_RNA (1)...(19): siRNA sense strand
cagcaucauacauuccuuu

SEQ ID NO: 1032486 - RNA, 19 nt, Homo sapiens
  misc_RNA (1)...(19): siRNA sense strand
gaaauuuauguaccuggau

SEQ ID NO: 1032487 - RNA, 19 nt, Homo sapiens
  misc_RNA (1)...(19): siRNA sense strand
acucauuauuggaaucuga

SEQ ID NO: 1032488 - RNA, 19 nt, Homo sapiens
  misc_RNA (1)...(19): siRNA sense strand
aaaccaggcacuuucacuu

SEQ ID NO: 1032489 - RNA, 19 nt, Homo sapiens
  misc_RNA (1)...(19): siRNA sense strand
uguaaauguugaugagcuu

SEQ ID NO: 1032490 - RNA, 19 nt, Homo sapiens
  misc_RNA (1)...(19): siRNA sense strand
uauccaguguaaauguuga

SEQ ID NO: 1032491 - RNA, 19 nt, Homo sapiens
  misc_RNA (1)...(19): siRNA sense strand
cggaaaggacuagacauug

SEQ ID NO: 1032492 - RNA, 19 nt, Homo sapiens
  misc_RNA (1)...(19): siRNA sense strand
aaacggaaaggacuagaca

SEQ ID NO: 1032493 - RNA, 19 nt, Homo sapiens
  misc_RNA (1)...(19): siRNA sense strand
cguccucccuccaccauca

SEQ ID NO: 1032494 - RNA, 19 nt, Homo sapiens
  misc_RNA (1)...(19): siRNA sense strand
gcgaugaugaaauuccuau

SEQ ID NO: 1032495 - RNA, 19 nt, Homo sapiens
  misc_RNA (1)...(19): siRNA sense strand
auacagaugaugagaguuc

SEQ ID NO: 1032496 - RNA, 19 nt, Homo sapiens
  misc_RNA (1)...(19): siRNA sense strand
aaaguacgagagcaaagaa

SEQ ID NO: 1032497 - RNA, 19 nt, Homo sapiens
  misc_RNA (1)...(19): siRNA sense strand
cccaagugcuaaaguacga

SEQ ID NO: 1032498 - RNA, 19 nt, Homo sapiens
  misc_RNA (1)...(19): siRNA sense strand
gcagaagaggcugaacaga

SEQ ID NO: 1032499 - RNA, 19 nt, Homo sapiens
  misc_RNA (1)...(19): siRNA sense strand
aagagaggcgucuacaaga

SEQ ID NO: 1032500 - RNA, 19 nt, Homo sapiens
  misc_RNA (1)...(19): siRNA sense strand
ugagaaaugaggaacgaau

SEQ ID NO: 1032501 - RNA, 19 nt, Homo sapiens
  misc_RNA (1)...(19): siRNA sense strand
caguguaaauguugaugag

SEQ ID NO: 1032502 - RNA, 19 nt, Homo sapiens
  misc_RNA (1)...(19): siRNA sense strand
ucccauggauauauuugau

SEQ ID NO: 1032503 - RNA, 19 nt, Homo sapiens
  misc_RNA (1)...(19): siRNA sense strand
gcuaagagagcagcagaag

SEQ ID NO: 1032504 - RNA, 19 nt, Homo sapiens
  misc_RNA (1)...(19): siRNA sense strand
gcaucauacauuccuuuau

SEQ ID NO: 1032505 - RNA, 19 nt, Homo sapiens
  misc_RNA (1)...(19): siRNA sense strand
aaauguugaugagcuuaga

SEQ ID NO: 1032506 - RNA, 19 nt, Homo sapiens
  misc_RNA (1)...(19): siRNA sense strand
acggaaaggacuagacauu

SEQ ID NO: 1032507 - RNA, 19 nt, Homo sapiens
  misc_RNA (1)...(19): siRNA sense strand
gaagauggcaugcggcuuu

SEQ ID NO: 1032508 - RNA, 19 nt, Homo sapiens
  misc_RNA (1)...(19): siRNA sense strand
gcucggcucuuguguuuga

SEQ ID NO: 1032509 - RNA, 19 nt, Homo sapiens
  misc_RNA (1)...(19): siRNA sense strand
gaagaaaagucgauauugu

SEQ ID NO: 1032510 - RNA, 19 nt, Homo sapiens
  misc_RNA (1)...(19): siRNA sense strand
caaaggagaggaagaggaa

SEQ ID NO: 1032511 - RNA, 19 nt, Homo sapiens
  misc_RNA (1)...(19): siRNA sense strand
ucagauugauugcguucua

SEQ ID NO: 1032512 - RNA, 19 nt, Homo sapiens
  misc_RNA (1)...(19): siRNA sense strand
gugcucgaauacaccauua

SEQ ID NO: 1032513 - RNA, 19 nt, Homo sapiens
  misc_RNA (1)...(19): siRNA sense strand
ggugcucuguguccacuuu

SEQ ID NO: 1032514 - RNA, 19 nt, Homo sapiens
  misc_RNA (1)...(19): siRNA sense strand
aggcucggcucuuguguuu

SEQ ID NO: 1032515 - RNA, 19 nt, Homo sapiens
  misc_RNA (1)...(19): siRNA sense strand
cgaauacaccauuaaggaa

SEQ ID NO: 1032516 - RNA, 19 nt, Homo sapiens
  misc_RNA (1)...(19): siRNA sense strand
ggugguggcugggauguuc

SEQ ID NO: 1032517 - RNA, 19 nt, Homo sapiens
  misc_RNA (1)...(19): siRNA sense strand
gcaucagcauccuggagaa

SEQ ID NO: 1032518 - RNA, 19 nt, Homo sapiens
  misc_RNA (1)...(19): siRNA sense strand
ggaaggcucggcucuugug

SEQ ID NO: 1032519 - RNA, 19 nt, Homo sapiens
  misc_RNA (1)...(19): siRNA sense strand
ccacuuuccuucucugaac

SEQ ID NO: 1032520 - RNA, 19 nt, Homo sapiens
  misc_RNA (1)...(19): siRNA sense strand
ucgaauacaccauuaagga

SEQ ID NO: 1032521 - RNA, 19 nt, Homo sapiens
  misc_RNA (1)...(19): siRNA sense strand
ggaagaggaagaggaagau

SEQ ID NO: 1032522 - RNA, 19 nt, Homo sapiens
  misc_RNA (1)...(19): siRNA sense strand
aggcagagguggccaggau

SEQ ID NO: 1032523 - RNA, 19 nt, Homo sapiens
  misc_RNA (1)...(19): siRNA sense strand
aauacaccauuaaggaaga

SEQ ID NO: 1032524 - RNA, 19 nt, Homo sapiens
  misc_RNA (1)...(19): siRNA sense strand
cuggaaggcucggcucuug

SEQ ID NO: 1032525 - RNA, 19 nt, Homo sapiens
  misc_RNA (1)...(19): siRNA sense strand
ugauugcguucuacugugu

SEQ ID NO: 1032526 - RNA, 19 nt, Homo sapiens
  misc_RNA (1)...(19): siRNA sense strand
ggaagaaaagucgauauug

SEQ ID NO: 1032527 - RNA, 19 nt, Homo sapiens
  misc_RNA (1)...(19): siRNA sense strand
agaggaagaggaagaggaa

SEQ ID NO: 1032528 - RNA, 19 nt, Homo sapiens
  misc_RNA (1)...(19): siRNA sense strand
gaagaggaagaggaagaug

SEQ ID NO: 1032529 - RNA, 19 nt, Homo sapiens
  misc_RNA (1)...(19): siRNA sense strand
gguuccaguuguuggcaaa

SEQ ID NO: 1032530 - RNA, 19 nt, Homo sapiens
  misc_RNA (1)...(19): siRNA sense strand
cugugucaguagagacuua

SEQ ID NO: 1032531 - RNA, 19 nt, Homo sapiens
  misc_RNA (1)...(19): siRNA sense strand
gcucgaauacaccauuaag

SEQ ID NO: 1032532 - RNA, 19 nt, Homo sapiens
  misc_RNA (1)...(19): siRNA sense strand
uggagaagcucaucaaaac

SEQ ID NO: 1032533 - RNA, 19 nt, Homo sapiens
  misc_RNA (1)...(19): siRNA sense strand
gaagauggcaugcggcuuu

SEQ ID NO: 1032534 - RNA, 19 nt, Homo sapiens
  misc_RNA (1)...(19): siRNA sense strand
gcucggcucuuguguuuga

SEQ ID NO: 1032535 - RNA, 19 nt, Homo sapiens
  misc_RNA (1)...(19): siRNA sense strand
gaagaaaagucgauauugu

SEQ ID NO: 1032536 - RNA, 19 nt, Homo sapiens
  misc_RNA (1)...(19): siRNA sense strand
caaaggagaggaagaggaa

SEQ ID NO: 1032537 - RNA, 19 nt, Homo sapiens
  misc_RNA (1)...(19): siRNA sense strand
ucagauugauugcguucua

SEQ ID NO: 1032538 - RNA, 19 nt, Homo sapiens
  misc_RNA (1)...(19): siRNA sense strand
gugcucgaauacaccauua

SEQ ID NO: 1032539 - RNA, 19 nt, Homo sapiens
  misc_RNA (1)...(19): siRNA sense strand
ggugcucuguguccacuuu

SEQ ID NO: 1032540 - RNA, 19 nt, Homo sapiens
  misc_RNA (1)...(19): siRNA sense strand
aggcucggcucuuguguuu

SEQ ID NO: 1032541 - RNA, 19 nt, Homo sapiens
  misc_RNA (1)...(19): siRNA sense strand
cgaauacaccauuaaggaa

SEQ ID NO: 1032542 - RNA, 19 nt, Homo sapiens
  misc_RNA (1)...(19): siRNA sense strand
ggugguggcugggauguuc

SEQ ID NO: 1032543 - RNA, 19 nt, Homo sapiens
  misc_RNA (1)...(19): siRNA sense strand
gcaucagcauccuggagaa

SEQ ID NO: 1032544 - RNA, 19 nt, Homo sapiens
  misc_RNA (1)...(19): siRNA sense strand
ggaaggcucggcucuugug

SEQ ID NO: 1032545 - RNA, 19 nt, Homo sapiens
  misc_RNA (1)...(19): siRNA sense strand
ccacuuuccuucucugaac

SEQ ID NO: 1032546 - RNA, 19 nt, Homo sapiens
  misc_RNA (1)...(19): siRNA sense strand
ucgaauacaccauuaagga

SEQ ID NO: 1032547 - RNA, 19 nt, Homo sapiens
  misc_RNA (1)...(19): siRNA sense strand
ggaagaggaagaggaagau

SEQ ID NO: 1032548 - RNA, 19 nt, Homo sapiens
  misc_RNA (1)...(19): siRNA sense strand
aggcagagguggccaggau

SEQ ID NO: 1032549 - RNA, 19 nt, Homo sapiens
  misc_RNA (1)...(19): siRNA sense strand
aauacaccauuaaggaaga

SEQ ID NO: 1032550 - RNA, 19 nt, Homo sapiens
  misc_RNA (1)...(19): siRNA sense strand
cuggaaggcucggcucuug

SEQ ID NO: 1032551 - RNA, 19 nt, Homo sapiens
  misc_RNA (1)...(19): siRNA sense strand
ugauugcguucuacugugu

SEQ ID NO: 1032552 - RNA, 19 nt, Homo sapiens
  misc_RNA (1)...(19): siRNA sense strand
ggaagaaaagucgauauug

SEQ ID NO: 1032553 - RNA, 19 nt, Homo sapiens
  misc_RNA (1)...(19): siRNA sense strand
agaggaagaggaagaggaa

SEQ ID NO: 1032554 - RNA, 19 nt, Homo sapiens
  misc_RNA (1)...(19): siRNA sense strand
gaagaggaagaggaagaug

SEQ ID NO: 1032555 - RNA, 19 nt, Homo sapiens
  misc_RNA (1)...(19): siRNA sense strand
gguuccaguuguuggcaaa

SEQ ID NO: 1032556 - RNA, 19 nt, Homo sapiens
  misc_RNA (1)...(19): siRNA sense strand
cugugucaguagagacuua

SEQ ID NO: 1032557 - RNA, 19 nt, Homo sapiens
  misc_RNA (1)...(19): siRNA sense strand
gcucgaauacaccauuaag

SEQ ID NO: 1032558 - RNA, 19 nt, Homo sapiens
  misc_RNA (1)...(19): siRNA sense strand
uggagaagcucaucaaaac

SEQ ID NO: 1032559 - RNA, 19 nt, Homo sapiens
  misc_RNA (1)...(19): siRNA sense strand
gugcauggauuacaaauuu

SEQ ID NO: 1032560 - RNA, 19 nt, Homo sapiens
  misc_RNA (1)...(19): siRNA sense strand
uaucucaccuguucucuua

SEQ ID NO: 1032561 - RNA, 19 nt, Homo sapiens
  misc_RNA (1)...(19): siRNA sense strand
uaacagaggagaacacuaa

SEQ ID NO: 1032562 - RNA, 19 nt, Homo sapiens
  misc_RNA (1)...(19): siRNA sense strand
gggaagagaacaauuagua

SEQ ID NO: 1032563 - RNA, 19 nt, Homo sapiens
  misc_RNA (1)...(19): siRNA sense strand
gaaguuaggaugugauuug

SEQ ID NO: 1032564 - RNA, 19 nt, Homo sapiens
  misc_RNA (1)...(19): siRNA sense strand
gaacacagaaacauuagaa

SEQ ID NO: 1032565 - RNA, 19 nt, Homo sapiens
  misc_RNA (1)...(19): siRNA sense strand
gaauuaaaccuucacagaa

SEQ ID NO: 1032566 - RNA, 19 nt, Homo sapiens
  misc_RNA (1)...(19): siRNA sense strand
ccaaagaccuuaggagaga

SEQ ID NO: 1032567 - RNA, 19 nt, Homo sapiens
  misc_RNA (1)...(19): siRNA sense strand
ugaaacuucucucaacaua

SEQ ID NO: 1032568 - RNA, 19 nt, Homo sapiens
  misc_RNA (1)...(19): siRNA sense strand
gcacauucacuaacaagua

SEQ ID NO: 1032569 - RNA, 19 nt, Homo sapiens
  misc_RNA (1)...(19): siRNA sense strand
gaagauccugucuguguua

SEQ ID NO: 1032570 - RNA, 19 nt, Homo sapiens
  misc_RNA (1)...(19): siRNA sense strand
aaacaaaccugauucuucu

SEQ ID NO: 1032571 - RNA, 19 nt, Homo sapiens
  misc_RNA (1)...(19): siRNA sense strand
cacaagaucucaggaaauu

SEQ ID NO: 1032572 - RNA, 19 nt, Homo sapiens
  misc_RNA (1)...(19): siRNA sense strand
ggcaacaacugcacauuug

SEQ ID NO: 1032573 - RNA, 19 nt, Homo sapiens
  misc_RNA (1)...(19): siRNA sense strand
guucgugacuugaguagaa

SEQ ID NO: 1032574 - RNA, 19 nt, Homo sapiens
  misc_RNA (1)...(19): siRNA sense strand
ucacguuucuucaaucuga

SEQ ID NO: 1032575 - RNA, 19 nt, Homo sapiens
  misc_RNA (1)...(19): siRNA sense strand
gaccuuccauaucaaguaa

SEQ ID NO: 1032576 - RNA, 19 nt, Homo sapiens
  misc_RNA (1)...(19): siRNA sense strand
gaaagaauugcaacucaga

SEQ ID NO: 1032577 - RNA, 19 nt, Homo sapiens
  misc_RNA (1)...(19): siRNA sense strand
aaacuucucucaacauaag

SEQ ID NO: 1032578 - RNA, 19 nt, Homo sapiens
  misc_RNA (1)...(19): siRNA sense strand
ccgaacuccuuuauauaua

SEQ ID NO: 1032579 - RNA, 19 nt, Homo sapiens
  misc_RNA (1)...(19): siRNA sense strand
cagaaagaauugcaacuca

SEQ ID NO: 1032580 - RNA, 19 nt, Homo sapiens
  misc_RNA (1)...(19): siRNA sense strand
acagaacacagaaacauua

SEQ ID NO: 1032581 - RNA, 19 nt, Homo sapiens
  misc_RNA (1)...(19): siRNA sense strand
acaaauuucucccuuacaa

SEQ ID NO: 1032582 - RNA, 19 nt, Homo sapiens
  misc_RNA (1)...(19): siRNA sense strand
ugaaagcuuuggucucuau

SEQ ID NO: 1032583 - RNA, 19 nt, Homo sapiens
  misc_RNA (1)...(19): siRNA sense strand
gaaaaucagugaaaacaag

SEQ ID NO: 1032584 - RNA, 19 nt, Homo sapiens
  misc_RNA (1)...(19): siRNA sense strand
gcuccucagucaacacuuu

SEQ ID NO: 1032585 - RNA, 19 nt, Homo sapiens
  misc_RNA (1)...(19): siRNA sense strand
acacuaagcuccgauaucu

SEQ ID NO: 1032586 - RNA, 19 nt, Homo sapiens
  misc_RNA (1)...(19): siRNA sense strand
cgagaaagugccuugauuu

SEQ ID NO: 1032587 - RNA, 19 nt, Homo sapiens
  misc_RNA (1)...(19): siRNA sense strand
gaaagugccuugauuuuac

SEQ ID NO: 1032588 - RNA, 19 nt, Homo sapiens
  misc_RNA (1)...(19): siRNA sense strand
gcugaacacucucuugaag

SEQ ID NO: 1032589 - RNA, 19 nt, Homo sapiens
  misc_RNA (1)...(19): siRNA sense strand
ccgagaaagugccuugauu

SEQ ID NO: 1032590 - RNA, 19 nt, Homo sapiens
  misc_RNA (1)...(19): siRNA sense strand
ugaacacucucuugaagga

SEQ ID NO: 1032591 - RNA, 19 nt, Homo sapiens
  misc_RNA (1)...(19): siRNA sense strand
ccucagcgcucacaagauc

SEQ ID NO: 1032592 - RNA, 19 nt, Homo sapiens
  misc_RNA (1)...(19): siRNA sense strand
ggauuucagugugauuuga

SEQ ID NO: 1032593 - RNA, 19 nt, Homo sapiens
  misc_RNA (1)...(19): siRNA sense strand
aaagguaacagaacagaaa

SEQ ID NO: 1032594 - RNA, 19 nt, Homo sapiens
  misc_RNA (1)...(19): siRNA sense strand
gaaacuucucucaacauaa

SEQ ID NO: 1032595 - RNA, 19 nt, Homo sapiens
  misc_RNA (1)...(19): siRNA sense strand
gcugguaucccuauugcua

SEQ ID NO: 1032596 - RNA, 19 nt, Homo sapiens
  misc_RNA (1)...(19): siRNA sense strand
gaucacguuucuucaaucu

SEQ ID NO: 1032597 - RNA, 19 nt, Homo sapiens
  misc_RNA (1)...(19): siRNA sense strand
caggaacuguggccaaaga

SEQ ID NO: 1032598 - RNA, 19 nt, Homo sapiens
  misc_RNA (1)...(19): siRNA sense strand
gagacaggcuuugaagaca

SEQ ID NO: 1032599 - RNA, 19 nt, Homo sapiens
  misc_RNA (1)...(19): siRNA sense strand
gcacauuuguucgugacuu

SEQ ID NO: 1032600 - RNA, 19 nt, Homo sapiens
  misc_RNA (1)...(19): siRNA sense strand
cagaaaguauagacgauca

SEQ ID NO: 1032601 - RNA, 19 nt, Homo sapiens
  misc_RNA (1)...(19): siRNA sense strand
uaugaaagcuuuggucucu

SEQ ID NO: 1032602 - RNA, 19 nt, Homo sapiens
  misc_RNA (1)...(19): siRNA sense strand
cagaucacguuucuucaau

SEQ ID NO: 1032603 - RNA, 19 nt, Homo sapiens
  misc_RNA (1)...(19): siRNA sense strand
gaucgaccuuccauaucaa

SEQ ID NO: 1032604 - RNA, 19 nt, Homo sapiens
  misc_RNA (1)...(19): siRNA sense strand
gaagauacagaucgaccuu

SEQ ID NO: 1032605 - RNA, 19 nt, Homo sapiens
  misc_RNA (1)...(19): siRNA sense strand
cagaauccauuugaaacuu

SEQ ID NO: 1032606 - RNA, 19 nt, Homo sapiens
  misc_RNA (1)...(19): siRNA sense strand
uagcagaugcagaagauaa

SEQ ID NO: 1032607 - RNA, 19 nt, Homo sapiens
  misc_RNA (1)...(19): siRNA sense strand
aaauguuccuucagaaaga

SEQ ID NO: 1032608 - RNA, 19 nt, Homo sapiens
  misc_RNA (1)...(19): siRNA sense strand
gcagaagauaaauguguaa

SEQ ID NO: 1032609 - RNA, 19 nt, Homo sapiens
  misc_RNA (1)...(19): siRNA sense strand
gguguccgcucgugagguu

SEQ ID NO: 1032610 - RNA, 19 nt, Homo sapiens
  misc_RNA (1)...(19): siRNA sense strand
uagaauuacuacugaagga

SEQ ID NO: 1032611 - RNA, 19 nt, Homo sapiens
  misc_RNA (1)...(19): siRNA sense strand
gaagagaacaauuaguacu

SEQ ID NO: 1032612 - RNA, 19 nt, Homo sapiens
  misc_RNA (1)...(19): siRNA sense strand
gaacacuaagcuccgauau

SEQ ID NO: 1032613 - RNA, 19 nt, Homo sapiens
  misc_RNA (1)...(19): siRNA sense strand
agaucgaccuuccauauca

SEQ ID NO: 1032614 - RNA, 19 nt, Homo sapiens
  misc_RNA (1)...(19): siRNA sense strand
agaauuaaaccuucacaga

SEQ ID NO: 1032615 - RNA, 19 nt, Homo sapiens
  misc_RNA (1)...(19): siRNA sense strand
gaauugcaacucagaagau

SEQ ID NO: 1032616 - RNA, 19 nt, Homo sapiens
  misc_RNA (1)...(19): siRNA sense strand
gcaauuccauucagaucac

SEQ ID NO: 1032617 - RNA, 19 nt, Homo sapiens
  misc_RNA (1)...(19): siRNA sense strand
gaguagaauuaaaccuuca

SEQ ID NO: 1032618 - RNA, 19 nt, Homo sapiens
  misc_RNA (1)...(19): siRNA sense strand
ugcagaagauaaaugugua

SEQ ID NO: 1032619 - RNA, 19 nt, Homo sapiens
  misc_RNA (1)...(19): siRNA sense strand
ccuagcagaugcagaagau

SEQ ID NO: 1032620 - RNA, 19 nt, Homo sapiens
  misc_RNA (1)...(19): siRNA sense strand
uccgauaucucaccuguuc

SEQ ID NO: 1032621 - RNA, 19 nt, Homo sapiens
  misc_RNA (1)...(19): siRNA sense strand
gagccuugguguucagugu

SEQ ID NO: 1032622 - RNA, 19 nt, Homo sapiens
  misc_RNA (1)...(19): siRNA sense strand
gauuugacuacgaacaaua

SEQ ID NO: 1032623 - RNA, 19 nt, Homo sapiens
  misc_RNA (1)...(19): siRNA sense strand
caccuguucucuuauugaa

SEQ ID NO: 1032624 - RNA, 19 nt, Homo sapiens
  misc_RNA (1)...(19): siRNA sense strand
ggagacaggcuuugaagac

SEQ ID NO: 1032625 - RNA, 19 nt, Homo sapiens
  misc_RNA (1)...(19): siRNA sense strand
gaauuacuacugaaggaau

SEQ ID NO: 1032626 - RNA, 19 nt, Homo sapiens
  misc_RNA (1)...(19): siRNA sense strand
acaccaggccuccggauuu

SEQ ID NO: 1032627 - RNA, 19 nt, Homo sapiens
  misc_RNA (1)...(19): siRNA sense strand
cugauggaauuucaaguga

SEQ ID NO: 1032628 - RNA, 19 nt, Homo sapiens
  misc_RNA (1)...(19): siRNA sense strand
cagcugaacacucucuuga

SEQ ID NO: 1032629 - RNA, 19 nt, Homo sapiens
  misc_RNA (1)...(19): siRNA sense strand
cacauucacuaacaaguag

SEQ ID NO: 1032630 - RNA, 19 nt, Homo sapiens
  misc_RNA (1)...(19): siRNA sense strand
ucucaccuguucucuuauu

SEQ ID NO: 1032631 - RNA, 19 nt, Homo sapiens
  misc_RNA (1)...(19): siRNA sense strand
uagguucacugcagaaugg

SEQ ID NO: 1032632 - RNA, 19 nt, Homo sapiens
  misc_RNA (1)...(19): siRNA sense strand
acagaucgaccuuccauau

SEQ ID NO: 1032633 - RNA, 19 nt, Homo sapiens
  misc_RNA (1)...(19): siRNA sense strand
agacaggcuuugaagacaa

SEQ ID NO: 1032634 - RNA, 19 nt, Homo sapiens
  misc_RNA (1)...(19): siRNA sense strand
uuacaaauuucucccuuac

SEQ ID NO: 1032635 - RNA, 19 nt, Homo sapiens
  misc_RNA (1)...(19): siRNA sense strand
uugaaggaguuccagcuaa

SEQ ID NO: 1032636 - RNA, 19 nt, Homo sapiens
  misc_RNA (1)...(19): siRNA sense strand
caagaucucaggaaauuuu

SEQ ID NO: 1032637 - RNA, 19 nt, Homo sapiens
  misc_RNA (1)...(19): siRNA sense strand
ggaagagaacaauuaguac

SEQ ID NO: 1032638 - RNA, 19 nt, Homo sapiens
  misc_RNA (1)...(19): siRNA sense strand
gagaaagugccuugauuuu

SEQ ID NO: 1032639 - RNA, 19 nt, Homo sapiens
  misc_RNA (1)...(19): siRNA sense strand
gcucgagcacauucacuaa

SEQ ID NO: 1032640 - RNA, 19 nt, Homo sapiens
  misc_RNA (1)...(19): siRNA sense strand
agaagauccugucuguguu

SEQ ID NO: 1032641 - RNA, 19 nt, Homo sapiens
  misc_RNA (1)...(19): siRNA sense strand
ccauucagaucacguuucu

SEQ ID NO: 1032642 - RNA, 19 nt, Homo sapiens
  misc_RNA (1)...(19): siRNA sense strand
agagaacaauuaguacuca

SEQ ID NO: 1032643 - RNA, 19 nt, Homo sapiens
  misc_RNA (1)...(19): siRNA sense strand
cgaccuuccauaucaagua

SEQ ID NO: 1032644 - RNA, 19 nt, Homo sapiens
  misc_RNA (1)...(19): siRNA sense strand
caacacuagauuccuuaaa

SEQ ID NO: 1032645 - RNA, 19 nt, Homo sapiens
  misc_RNA (1)...(19): siRNA sense strand
aguaaucaguugccacguu

SEQ ID NO: 1032646 - RNA, 19 nt, Homo sapiens
  misc_RNA (1)...(19): siRNA sense strand
aauuaaaccuucacagaac

SEQ ID NO: 1032647 - RNA, 19 nt, Homo sapiens
  misc_RNA (1)...(19): siRNA sense strand
uuaauacauugcccagaga

SEQ ID NO: 1032648 - RNA, 19 nt, Homo sapiens
  misc_RNA (1)...(19): siRNA sense strand
ugaaggaguuccagcuaac

SEQ ID NO: 1032649 - RNA, 19 nt, Homo sapiens
  misc_RNA (1)...(19): siRNA sense strand
agugggaagagaacaauua

SEQ ID NO: 1032650 - RNA, 19 nt, Homo sapiens
  misc_RNA (1)...(19): siRNA sense strand
agucaaagccagcugcaaa

SEQ ID NO: 1032651 - RNA, 19 nt, Homo sapiens
  misc_RNA (1)...(19): siRNA sense strand
gcucacaagaucucaggaa

SEQ ID NO: 1032652 - RNA, 19 nt, Homo sapiens
  misc_RNA (1)...(19): siRNA sense strand
gaagacaagauucccaaaa

SEQ ID NO: 1032653 - RNA, 19 nt, Homo sapiens
  misc_RNA (1)...(19): siRNA sense strand
gcuaccaucugcuccaaac

SEQ ID NO: 1032654 - RNA, 19 nt, Homo sapiens
  misc_RNA (1)...(19): siRNA sense strand
gagcguggagacaggcuuu

SEQ ID NO: 1032655 - RNA, 19 nt, Homo sapiens
  misc_RNA (1)...(19): siRNA sense strand
acaggaagauacagaucga

SEQ ID NO: 1032656 - RNA, 19 nt, Homo sapiens
  misc_RNA (1)...(19): siRNA sense strand
gagcaaaacaaaccugauu

SEQ ID NO: 1032657 - RNA, 19 nt, Homo sapiens
  misc_RNA (1)...(19): siRNA sense strand
cacauuuguucgugacuug

SEQ ID NO: 1032658 - RNA, 19 nt, Homo sapiens
  misc_RNA (1)...(19): siRNA sense strand
aaauuucucccuuacaaug

SEQ ID NO: 1032659 - RNA, 19 nt, Homo sapiens
  misc_RNA (1)...(19): siRNA sense strand
agaaagcccuucccacuuc

SEQ ID NO: 1032660 - RNA, 19 nt, Homo sapiens
  misc_RNA (1)...(19): siRNA sense strand
ugccagaacucaagggaaa

SEQ ID NO: 1032661 - RNA, 19 nt, Homo sapiens
  misc_RNA (1)...(19): siRNA sense strand
gaacugcaggcgugagcua

SEQ ID NO: 1032662 - RNA, 19 nt, Homo sapiens
  misc_RNA (1)...(19): siRNA sense strand
gaaagcccuucccacuuca

SEQ ID NO: 1032663 - RNA, 19 nt, Homo sapiens
  misc_RNA (1)...(19): siRNA sense strand
ugguggagaucuacaauga

SEQ ID NO: 1032664 - RNA, 19 nt, Homo sapiens
  misc_RNA (1)...(19): siRNA sense strand
aggaggaggucuucagaga

SEQ ID NO: 1032665 - RNA, 19 nt, Homo sapiens
  misc_RNA (1)...(19): siRNA sense strand
ccagaacucaagggaaaua

SEQ ID NO: 1032666 - RNA, 19 nt, Homo sapiens
  misc_RNA (1)...(19): siRNA sense strand
ggcgugagcuacagcagau

SEQ ID NO: 1032667 - RNA, 19 nt, Homo sapiens
  misc_RNA (1)...(19): siRNA sense strand
gaacucaagggaaauaucc

SEQ ID NO: 1032668 - RNA, 19 nt, Homo sapiens
  misc_RNA (1)...(19): siRNA sense strand
gggaggcccagaccauaaa

SEQ ID NO: 1032669 - RNA, 19 nt, Homo sapiens
  misc_RNA (1)...(19): siRNA sense strand
gguuuggucagcaccuuua

SEQ ID NO: 1032670 - RNA, 19 nt, Homo sapiens
  misc_RNA (1)...(19): siRNA sense strand
ugcccaaccuggagacauu

SEQ ID NO: 1032671 - RNA, 19 nt, Homo sapiens
  misc_RNA (1)...(19): siRNA sense strand
cuucuagccuugugagugu

SEQ ID NO: 1032672 - RNA, 19 nt, Homo sapiens
  misc_RNA (1)...(19): siRNA sense strand
ggagaacgaggcccugaag

SEQ ID NO: 1032673 - RNA, 19 nt, Homo sapiens
  misc_RNA (1)...(19): siRNA sense strand
ggagacauugcaccagaug

SEQ ID NO: 1032674 - RNA, 19 nt, Homo sapiens
  misc_RNA (1)...(19): siRNA sense strand
cuacagcgucugcaucuuc

SEQ ID NO: 1032675 - RNA, 19 nt, Homo sapiens
  misc_RNA (1)...(19): siRNA sense strand
ucagcaugguggagaucua

SEQ ID NO: 1032676 - RNA, 19 nt, Homo sapiens
  misc_RNA (1)...(19): siRNA sense strand
ggaggcggaggcauugcua

SEQ ID NO: 1032677 - RNA, 19 nt, Homo sapiens
  misc_RNA (1)...(19): siRNA sense strand
gaaaaggguucagcaucug

SEQ ID NO: 1032678 - RNA, 19 nt, Homo sapiens
  misc_RNA (1)...(19): siRNA sense strand
ccacaucccaagaagaaag

SEQ ID NO: 1032679 - RNA, 19 nt, Homo sapiens
  misc_RNA (1)...(19): siRNA sense strand
ggacaucuucuagccuugu

SEQ ID NO: 1032680 - RNA, 19 nt, Homo sapiens
  misc_RNA (1)...(19): siRNA sense strand
aaauauccgugugcugugu

SEQ ID NO: 1032681 - RNA, 19 nt, Homo sapiens
  misc_RNA (1)...(19): siRNA sense strand
aagaaagcccuucccacuu

SEQ ID NO: 1032682 - RNA, 19 nt, Homo sapiens
  misc_RNA (1)...(19): siRNA sense strand
gcgucugcaucuucaccua

SEQ ID NO: 1032683 - RNA, 19 nt, Homo sapiens
  misc_RNA (1)...(19): siRNA sense strand
gggcgacggacucagagaa

SEQ ID NO: 1032684 - RNA, 19 nt, Homo sapiens
  misc_RNA (1)...(19): siRNA sense strand
acucguugcucaucuacau

SEQ ID NO: 1032685 - RNA, 19 nt, Homo sapiens
  misc_RNA (1)...(19): siRNA sense strand
cgggaggcccagaccauaa

SEQ ID NO: 1032686 - RNA, 19 nt, Homo sapiens
  misc_RNA (1)...(19): siRNA sense strand
gcucaucuacaucuucuac

SEQ ID NO: 1032687 - RNA, 19 nt, Homo sapiens
  misc_RNA (1)...(19): siRNA sense strand
ccaggaggaggucuucaga

SEQ ID NO: 1032688 - RNA, 19 nt, Homo sapiens
  misc_RNA (1)...(19): siRNA sense strand
cuucuggcauggcuucgaa

SEQ ID NO: 1032689 - RNA, 19 nt, Homo sapiens
  misc_RNA (1)...(19): siRNA sense strand
gcaccgucaccaccugcua

SEQ ID NO: 1032690 - RNA, 19 nt, Homo sapiens
  misc_RNA (1)...(19): siRNA sense strand
ggcgacggacucagagaaa

SEQ ID NO: 1032691 - RNA, 19 nt, Homo sapiens
  misc_RNA (1)...(19): siRNA sense strand
gauccacaucccaagaaga

SEQ ID NO: 1032692 - RNA, 19 nt, Homo sapiens
  misc_RNA (1)...(19): siRNA sense strand
gacaucuucuagccuugug

SEQ ID NO: 1032693 - RNA, 19 nt, Homo sapiens
  misc_RNA (1)...(19): siRNA sense strand
ggccagggacaucuucuag

SEQ ID NO: 1032694 - RNA, 19 nt, Homo sapiens
  misc_RNA (1)...(19): siRNA sense strand
gcaugguggagaucuacaa

SEQ ID NO: 1032695 - RNA, 19 nt, Homo sapiens
  misc_RNA (1)...(19): siRNA sense strand
uacagcgucugcaucuuca

SEQ ID NO: 1032696 - RNA, 19 nt, Homo sapiens
  misc_RNA (1)...(19): siRNA sense strand
agaaaaggguucagcaucu

SEQ ID NO: 1032697 - RNA, 19 nt, Homo sapiens
  misc_RNA (1)...(19): siRNA sense strand
gcaucugacucuggagaac

SEQ ID NO: 1032698 - RNA, 19 nt, Homo sapiens
  misc_RNA (1)...(19): siRNA sense strand
acagucugcucccucaagu

SEQ ID NO: 1032699 - RNA, 19 nt, Homo sapiens
  misc_RNA (1)...(19): siRNA sense strand
ucaucuacaucuucuacag

SEQ ID NO: 1032700 - RNA, 19 nt, Homo sapiens
  misc_RNA (1)...(19): siRNA sense strand
gcaagaaccugagccuuua

SEQ ID NO: 1032701 - RNA, 19 nt, Homo sapiens
  misc_RNA (1)...(19): siRNA sense strand
ggacacagguacauccaua

SEQ ID NO: 1032702 - RNA, 19 nt, Homo sapiens
  misc_RNA (1)...(19): siRNA sense strand
gauagacaaucgacauuaa

SEQ ID NO: 1032703 - RNA, 19 nt, Homo sapiens
  misc_RNA (1)...(19): siRNA sense strand
guagaaaccuguguauuug

SEQ ID NO: 1032704 - RNA, 19 nt, Homo sapiens
  misc_RNA (1)...(19): siRNA sense strand
ccaaaccacuguacccaua

SEQ ID NO: 1032705 - RNA, 19 nt, Homo sapiens
  misc_RNA (1)...(19): siRNA sense strand
gaccagcucuccuaccuuu

SEQ ID NO: 1032706 - RNA, 19 nt, Homo sapiens
  misc_RNA (1)...(19): siRNA sense strand
ggauguccaugguagaaua

SEQ ID NO: 1032707 - RNA, 19 nt, Homo sapiens
  misc_RNA (1)...(19): siRNA sense strand
caaguuuguucaacguuua

SEQ ID NO: 1032708 - RNA, 19 nt, Homo sapiens
  misc_RNA (1)...(19): siRNA sense strand
gcagcaagauuuguuaaug

SEQ ID NO: 1032709 - RNA, 19 nt, Homo sapiens
  misc_RNA (1)...(19): siRNA sense strand
gaaacaagggugacuguga

SEQ ID NO: 1032710 - RNA, 19 nt, Homo sapiens
  misc_RNA (1)...(19): siRNA sense strand
gaucauguuugcuuguaaa

SEQ ID NO: 1032711 - RNA, 19 nt, Homo sapiens
  misc_RNA (1)...(19): siRNA sense strand
gugaagaaauaaucuguug

SEQ ID NO: 1032712 - RNA, 19 nt, Homo sapiens
  misc_RNA (1)...(19): siRNA sense strand
acacacagcuugcuuugga

SEQ ID NO: 1032713 - RNA, 19 nt, Homo sapiens
  misc_RNA (1)...(19): siRNA sense strand
aaacaagggugacugugaa

SEQ ID NO: 1032714 - RNA, 19 nt, Homo sapiens
  misc_RNA (1)...(19): siRNA sense strand
caacacggagguaucuuua

SEQ ID NO: 1032715 - RNA, 19 nt, Homo sapiens
  misc_RNA (1)...(19): siRNA sense strand
agagaaagagcgauuauuu

SEQ ID NO: 1032716 - RNA, 19 nt, Homo sapiens
  misc_RNA (1)...(19): siRNA sense strand
gaaauugucaacccucuga

SEQ ID NO: 1032717 - RNA, 19 nt, Homo sapiens
  misc_RNA (1)...(19): siRNA sense strand
aacguuaucucaagaagua

SEQ ID NO: 1032718 - RNA, 19 nt, Homo sapiens
  misc_RNA (1)...(19): siRNA sense strand
guacccauaucgaacaauu

SEQ ID NO: 1032719 - RNA, 19 nt, Homo sapiens
  misc_RNA (1)...(19): siRNA sense strand
gagcgauuauuucuuguau

SEQ ID NO: 1032720 - RNA, 19 nt, Homo sapiens
  misc_RNA (1)...(19): siRNA sense strand
gaacacacagcuugcuuug

SEQ ID NO: 1032721 - RNA, 19 nt, Homo sapiens
  misc_RNA (1)...(19): siRNA sense strand
agagaaagcuugggugaug

SEQ ID NO: 1032722 - RNA, 19 nt, Homo sapiens
  misc_RNA (1)...(19): siRNA sense strand
caccagcuuuggcuucuua

SEQ ID NO: 1032723 - RNA, 19 nt, Homo sapiens
  misc_RNA (1)...(19): siRNA sense strand
guucaacguuuacuuuaug

SEQ ID NO: 1032724 - RNA, 19 nt, Homo sapiens
  misc_RNA (1)...(19): siRNA sense strand
gagcguacaacaaguauau

SEQ ID NO: 1032725 - RNA, 19 nt, Homo sapiens
  misc_RNA (1)...(19): siRNA sense strand
cgacuuuaguagcaucaua

SEQ ID NO: 1032726 - RNA, 19 nt, Homo sapiens
  misc_RNA (1)...(19): siRNA sense strand
cagcaagauuuguuaaugu

SEQ ID NO: 1032727 - RNA, 19 nt, Homo sapiens
  misc_RNA (1)...(19): siRNA sense strand
caacagaagauuugaucaa

SEQ ID NO: 1032728 - RNA, 19 nt, Homo sapiens
  misc_RNA (1)...(19): siRNA sense strand
gcaagcagcaagauuuguu

SEQ ID NO: 1032729 - RNA, 19 nt, Homo sapiens
  misc_RNA (1)...(19): siRNA sense strand
aguagaaaccuguguauuu

SEQ ID NO: 1032730 - RNA, 19 nt, Homo sapiens
  misc_RNA (1)...(19): siRNA sense strand
ucagaaaacugcagagaaa

SEQ ID NO: 1032731 - RNA, 19 nt, Homo sapiens
  misc_RNA (1)...(19): siRNA sense strand
gaaucugcaugugcuguuu

SEQ ID NO: 1032732 - RNA, 19 nt, Homo sapiens
  misc_RNA (1)...(19): siRNA sense strand
gcagccuucuucuuggaua

SEQ ID NO: 1032733 - RNA, 19 nt, Homo sapiens
  misc_RNA (1)...(19): siRNA sense strand
ccagucuguuccuauguua

SEQ ID NO: 1032734 - RNA, 19 nt, Homo sapiens
  misc_RNA (1)...(19): siRNA sense strand
caacagcauuuaucaacag

SEQ ID NO: 1032735 - RNA, 19 nt, Homo sapiens
  misc_RNA (1)...(19): siRNA sense strand
gggaagaccagcucuccua

SEQ ID NO: 1032736 - RNA, 19 nt, Homo sapiens
  misc_RNA (1)...(19): siRNA sense strand
gaucuuggccucacuacug

SEQ ID NO: 1032737 - RNA, 19 nt, Homo sapiens
  misc_RNA (1)...(19): siRNA sense strand
gccuuuaccuggacaaguu

SEQ ID NO: 1032738 - RNA, 19 nt, Homo sapiens
  misc_RNA (1)...(19): siRNA sense strand
gaacucccuuccucuccaa

SEQ ID NO: 1032739 - RNA, 19 nt, Homo sapiens
  misc_RNA (1)...(19): siRNA sense strand
ggaucauguuugcuuguaa

SEQ ID NO: 1032740 - RNA, 19 nt, Homo sapiens
  misc_RNA (1)...(19): siRNA sense strand
gaacacaggaaggaucuug

SEQ ID NO: 1032741 - RNA, 19 nt, Homo sapiens
  misc_RNA (1)...(19): siRNA sense strand
ucaacccucugaugcagua

SEQ ID NO: 1032742 - RNA, 19 nt, Homo sapiens
  misc_RNA (1)...(19): siRNA sense strand
aaucaaacguuaucucaag

SEQ ID NO: 1032743 - RNA, 19 nt, Homo sapiens
  misc_RNA (1)...(19): siRNA sense strand
gcacucugcuggccuuucu

SEQ ID NO: 1032744 - RNA, 19 nt, Homo sapiens
  misc_RNA (1)...(19): siRNA sense strand
gaggaaucauugacgaugu

SEQ ID NO: 1032745 - RNA, 19 nt, Homo sapiens
  misc_RNA (1)...(19): siRNA sense strand
gcuggacggcuucuugaua

SEQ ID NO: 1032746 - RNA, 19 nt, Homo sapiens
  misc_RNA (1)...(19): siRNA sense strand
gcagagaaagagcgauuau

SEQ ID NO: 1032747 - RNA, 19 nt, Homo sapiens
  misc_RNA (1)...(19): siRNA sense strand
caagcagcaagauuuguua

SEQ ID NO: 1032748 - RNA, 19 nt, Homo sapiens
  misc_RNA (1)...(19): siRNA sense strand
gaauuugagcguacaacaa

SEQ ID NO: 1032749 - RNA, 19 nt, Homo sapiens
  misc_RNA (1)...(19): siRNA sense strand
gaacgaugaauccaaaugg

SEQ ID NO: 1032750 - RNA, 19 nt, Homo sapiens
  misc_RNA (1)...(19): siRNA sense strand
gauuagaagccuuuguuug

SEQ ID NO: 1032751 - RNA, 19 nt, Homo sapiens
  misc_RNA (1)...(19): siRNA sense strand
ggaacuagaauggcugauu

SEQ ID NO: 1032752 - RNA, 19 nt, Homo sapiens
  misc_RNA (1)...(19): siRNA sense strand
caaauucgacccucacaca

SEQ ID NO: 1032753 - RNA, 19 nt, Homo sapiens
  misc_RNA (1)...(19): siRNA sense strand
guucguguccgaguauuua

SEQ ID NO: 1032754 - RNA, 19 nt, Homo sapiens
  misc_RNA (1)...(19): siRNA sense strand
uuaauguccuugguuauga

SEQ ID NO: 1032755 - RNA, 19 nt, Homo sapiens
  misc_RNA (1)...(19): siRNA sense strand
ugagacgacuuuaguagca

SEQ ID NO: 1032756 - RNA, 19 nt, Homo sapiens
  misc_RNA (1)...(19): siRNA sense strand
ggauuagaagccuuuguuu

SEQ ID NO: 1032757 - RNA, 19 nt, Homo sapiens
  misc_RNA (1)...(19): siRNA sense strand
caugguagaauaagagaaa

SEQ ID NO: 1032758 - RNA, 19 nt, Homo sapiens
  misc_RNA (1)...(19): siRNA sense strand
gaugugaugaaagaacuua

SEQ ID NO: 1032759 - RNA, 19 nt, Homo sapiens
  misc_RNA (1)...(19): siRNA sense strand
aagaagggcuguaccugau

SEQ ID NO: 1032760 - RNA, 19 nt, Homo sapiens
  misc_RNA (1)...(19): siRNA sense strand
caauucauauggugcuaau

SEQ ID NO: 1032761 - RNA, 19 nt, Homo sapiens
  misc_RNA (1)...(19): siRNA sense strand
uuaaaggguucccaauaca

SEQ ID NO: 1032762 - RNA, 19 nt, Homo sapiens
  misc_RNA (1)...(19): siRNA sense strand
gaucaacagcauuuaucaa

SEQ ID NO: 1032763 - RNA, 19 nt, Homo sapiens
  misc_RNA (1)...(19): siRNA sense strand
ugacaguguugagcaagaa

SEQ ID NO: 1032764 - RNA, 19 nt, Homo sapiens
  misc_RNA (1)...(19): siRNA sense strand
cagcuuuggcuucuuauga

SEQ ID NO: 1032765 - RNA, 19 nt, Homo sapiens
  misc_RNA (1)...(19): siRNA sense strand
ugagugaggaagcaauuaa

SEQ ID NO: 1032766 - RNA, 19 nt, Homo sapiens
  misc_RNA (1)...(19): siRNA sense strand
gcaguagaaaccuguguau

SEQ ID NO: 1032767 - RNA, 19 nt, Homo sapiens
  misc_RNA (1)...(19): siRNA sense strand
augcauggguuaugacuug

SEQ ID NO: 1032768 - RNA, 19 nt, Homo sapiens
  misc_RNA (1)...(19): siRNA sense strand
uagaagccuuuguuugugu

SEQ ID NO: 1032769 - RNA, 19 nt, Homo sapiens
  misc_RNA (1)...(19): siRNA sense strand
gcauuuaucaacagaagau

SEQ ID NO: 1032770 - RNA, 19 nt, Homo sapiens
  misc_RNA (1)...(19): siRNA sense strand
ucacgacugguuaagauuu

SEQ ID NO: 1032771 - RNA, 19 nt, Homo sapiens
  misc_RNA (1)...(19): siRNA sense strand
gaaauguauccaccacuca

SEQ ID NO: 1032772 - RNA, 19 nt, Homo sapiens
  misc_RNA (1)...(19): siRNA sense strand
ugauagacaaucgacauua

SEQ ID NO: 1032773 - RNA, 19 nt, Homo sapiens
  misc_RNA (1)...(19): siRNA sense strand
agcaggcaaugaagaauuu

SEQ ID NO: 1032774 - RNA, 19 nt, Homo sapiens
  misc_RNA (1)...(19): siRNA sense strand
ucaacagcauuuaucaaca

SEQ ID NO: 1032775 - RNA, 19 nt, Homo sapiens
  misc_RNA (1)...(19): siRNA sense strand
gagcuggacggcuucuuga

SEQ ID NO: 1032776 - RNA, 19 nt, Homo sapiens
  misc_RNA (1)...(19): siRNA sense strand
gacuauacgggaagaauug

SEQ ID NO: 1032777 - RNA, 19 nt, Homo sapiens
  misc_RNA (1)...(19): siRNA sense strand
ccaacacggagguaucuuu

SEQ ID NO: 1032778 - RNA, 19 nt, Homo sapiens
  misc_RNA (1)...(19): siRNA sense strand
uuguuaauguccuugguua

SEQ ID NO: 1032779 - RNA, 19 nt, Homo sapiens
  misc_RNA (1)...(19): siRNA sense strand
uuuaaaggguucccaauac

SEQ ID NO: 1032780 - RNA, 19 nt, Homo sapiens
  misc_RNA (1)...(19): siRNA sense strand
ucacuacuguuugggaaga

SEQ ID NO: 1032781 - RNA, 19 nt, Homo sapiens
  misc_RNA (1)...(19): siRNA sense strand
aggaagcaauuaaaucugu

SEQ ID NO: 1032782 - RNA, 19 nt, Homo sapiens
  misc_RNA (1)...(19): siRNA sense strand
agaaaccuguguauuugau

SEQ ID NO: 1032783 - RNA, 19 nt, Homo sapiens
  misc_RNA (1)...(19): siRNA sense strand
ucuuggauauggauuagaa

SEQ ID NO: 1032784 - RNA, 19 nt, Homo sapiens
  misc_RNA (1)...(19): siRNA sense strand
cugcuggccuuucucugua

SEQ ID NO: 1032785 - RNA, 19 nt, Homo sapiens
  misc_RNA (1)...(19): siRNA sense strand
uaauguccuugguuaugaa

SEQ ID NO: 1032786 - RNA, 19 nt, Homo sapiens
  misc_RNA (1)...(19): siRNA sense strand
ugcaagaaccugagccuuu

SEQ ID NO: 1032787 - RNA, 19 nt, Homo sapiens
  misc_RNA (1)...(19): siRNA sense strand
gauggucacacauuuaaag

SEQ ID NO: 1032788 - RNA, 19 nt, Homo sapiens
  misc_RNA (1)...(19): siRNA sense strand
gcccuuagacgucgaggaa

SEQ ID NO: 1032789 - RNA, 19 nt, Homo sapiens
  misc_RNA (1)...(19): siRNA sense strand
gguuaugacuuguggaacu

SEQ ID NO: 1032790 - RNA, 19 nt, Homo sapiens
  misc_RNA (1)...(19): siRNA sense strand
cagcauuuaucaacagaag

SEQ ID NO: 1032791 - RNA, 19 nt, Homo sapiens
  misc_RNA (1)...(19): siRNA sense strand
caaacguuaucucaagaag

SEQ ID NO: 1032792 - RNA, 19 nt, Homo sapiens
  misc_RNA (1)...(19): siRNA sense strand
ucaaucaaacguuaucuca

SEQ ID NO: 1032793 - RNA, 19 nt, Homo sapiens
  misc_RNA (1)...(19): siRNA sense strand
ucaauaagugauccaauuc

SEQ ID NO: 1032794 - RNA, 19 nt, Homo sapiens
  misc_RNA (1)...(19): siRNA sense strand
uauaucagcaggcaaugaa

SEQ ID NO: 1032795 - RNA, 19 nt, Homo sapiens
  misc_RNA (1)...(19): siRNA sense strand
ccacuguacccauaucgaa

SEQ ID NO: 1032796 - RNA, 19 nt, Homo sapiens
  misc_RNA (1)...(19): siRNA sense strand
gaacgagccccuguuauug

SEQ ID NO: 1032797 - RNA, 19 nt, Homo sapiens
  misc_RNA (1)...(19): siRNA sense strand
gcauuugccacaugucuuc

SEQ ID NO: 1032798 - RNA, 19 nt, Homo sapiens
  misc_RNA (1)...(19): siRNA sense strand
gcaguucguguccgaguau

SEQ ID NO: 1032799 - RNA, 19 nt, Homo sapiens
  misc_RNA (1)...(19): siRNA sense strand
ggcaguucguguccgagua

SEQ ID NO: 1032800 - RNA, 19 nt, Homo sapiens
  misc_RNA (1)...(19): siRNA sense strand
ggacuuaccugcaucuaca

SEQ ID NO: 1032801 - RNA, 19 nt, Homo sapiens
  misc_RNA (1)...(19): siRNA sense strand
ucaagaagcuggcggcauu

SEQ ID NO: 1032802 - RNA, 19 nt, Homo sapiens
  misc_RNA (1)...(19): siRNA sense strand
uaaagcagcucaaucucaa

SEQ ID NO: 1032803 - RNA, 19 nt, Homo sapiens
  misc_RNA (1)...(19): siRNA sense strand
gcucaaaggcaaccgcuua

SEQ ID NO: 1032804 - RNA, 19 nt, Homo sapiens
  misc_RNA (1)...(19): siRNA sense strand
ggacauuccugacgucaag

SEQ ID NO: 1032805 - RNA, 19 nt, Homo sapiens
  misc_RNA (1)...(19): siRNA sense strand
gaucaucugucuacccaau

SEQ ID NO: 1032806 - RNA, 19 nt, Homo sapiens
  misc_RNA (1)...(19): siRNA sense strand
ugaagcagcucaagguguu

SEQ ID NO: 1032807 - RNA, 19 nt, Homo sapiens
  misc_RNA (1)...(19): siRNA sense strand
gcacugguaugccaaguac

SEQ ID NO: 1032808 - RNA, 19 nt, Homo sapiens
  misc_RNA (1)...(19): siRNA sense strand
gcuccaagauugaacacuu

SEQ ID NO: 1032809 - RNA, 19 nt, Homo sapiens
  misc_RNA (1)...(19): siRNA sense strand
agacggcccugcacuggua

SEQ ID NO: 1032810 - RNA, 19 nt, Homo sapiens
  misc_RNA (1)...(19): siRNA sense strand
ggcaccagcuccaagauug

SEQ ID NO: 1032811 - RNA, 19 nt, Homo sapiens
  misc_RNA (1)...(19): siRNA sense strand
cagaagaacuuggcaacug

SEQ ID NO: 1032812 - RNA, 19 nt, Homo sapiens
  misc_RNA (1)...(19): siRNA sense strand
uagaggcgcugccagaaga

SEQ ID NO: 1032813 - RNA, 19 nt, Homo sapiens
  misc_RNA (1)...(19): siRNA sense strand
gacagacggugcugaaagu

SEQ ID NO: 1032814 - RNA, 19 nt, Homo sapiens
  misc_RNA (1)...(19): siRNA sense strand
ccgagaagcuucgacagaa

SEQ ID NO: 1032815 - RNA, 19 nt, Homo sapiens
  misc_RNA (1)...(19): siRNA sense strand
uugagaaggugaagaaguu

SEQ ID NO: 1032816 - RNA, 19 nt, Homo sapiens
  misc_RNA (1)...(19): siRNA sense strand
ugucacagcuggugcacuu

SEQ ID NO: 1032817 - RNA, 19 nt, Homo sapiens
  misc_RNA (1)...(19): siRNA sense strand
ucuacaaccuggucuaugu

SEQ ID NO: 1032818 - RNA, 19 nt, Homo sapiens
  misc_RNA (1)...(19): siRNA sense strand
gggcaaguguuucgacucu

SEQ ID NO: 1032819 - RNA, 19 nt, Homo sapiens
  misc_RNA (1)...(19): siRNA sense strand
caagauggaggaggaauga

SEQ ID NO: 1032820 - RNA, 19 nt, Homo sapiens
  misc_RNA (1)...(19): siRNA sense strand
cugcagcaauacagcuuua

SEQ ID NO: 1032821 - RNA, 19 nt, Homo sapiens
  misc_RNA (1)...(19): siRNA sense strand
ccaagcuggccuucuguua

SEQ ID NO: 1032822 - RNA, 19 nt, Homo sapiens
  misc_RNA (1)...(19): siRNA sense strand
agaagaacuuggcaacugu

SEQ ID NO: 1032823 - RNA, 19 nt, Homo sapiens
  misc_RNA (1)...(19): siRNA sense strand
gcaagccaaagcccuguuu

SEQ ID NO: 1032824 - RNA, 19 nt, Homo sapiens
  misc_RNA (1)...(19): siRNA sense strand
gaggccaucugcgauauca

SEQ ID NO: 1032825 - RNA, 19 nt, Homo sapiens
  misc_RNA (1)...(19): siRNA sense strand
gaccgagccuccaguuguc

SEQ ID NO: 1032826 - RNA, 19 nt, Homo sapiens
  misc_RNA (1)...(19): siRNA sense strand
gaaggugaugcgcgucaaa

SEQ ID NO: 1032827 - RNA, 19 nt, Homo sapiens
  misc_RNA (1)...(19): siRNA sense strand
gcugaaaguguguaaguuc

SEQ ID NO: 1032828 - RNA, 19 nt, Homo sapiens
  misc_RNA (1)...(19): siRNA sense strand
ggaaggugccagccagugu

SEQ ID NO: 1032829 - RNA, 19 nt, Homo sapiens
  misc_RNA (1)...(19): siRNA sense strand
auuuggaccugcagcaaua

SEQ ID NO: 1032830 - RNA, 19 nt, Homo sapiens
  misc_RNA (1)...(19): siRNA sense strand
uuccugacgucaagaauga

SEQ ID NO: 1032831 - RNA, 19 nt, Homo sapiens
  misc_RNA (1)...(19): siRNA sense strand
caagaaggagggugagcaa

SEQ ID NO: 1032832 - RNA, 19 nt, Homo sapiens
  misc_RNA (1)...(19): siRNA sense strand
gcaccagcuccaagauuga

SEQ ID NO: 1032833 - RNA, 19 nt, Homo sapiens
  misc_RNA (1)...(19): siRNA sense strand
caccaaggcccaccucuuc

SEQ ID NO: 1032834 - RNA, 19 nt, Homo sapiens
  misc_RNA (1)...(19): siRNA sense strand
cuaaagcagcucaaucuca

SEQ ID NO: 1032835 - RNA, 19 nt, Homo sapiens
  misc_RNA (1)...(19): siRNA sense strand
aaccagcuguguuaugaga

SEQ ID NO: 1032836 - RNA, 19 nt, Homo sapiens
  misc_RNA (1)...(19): siRNA sense strand
gugugcaucuacggacuua

SEQ ID NO: 1032837 - RNA, 19 nt, Homo sapiens
  misc_RNA (1)...(19): siRNA sense strand
uguuacaucuccuuugugu

SEQ ID NO: 1032838 - RNA, 19 nt, Homo sapiens
  misc_RNA (1)...(19): siRNA sense strand
ucuguuacaucuccuuugu

SEQ ID NO: 1032839 - RNA, 19 nt, Homo sapiens
  misc_RNA (1)...(19): siRNA sense strand
aagcuggccuucuguuaca

SEQ ID NO: 1032840 - RNA, 19 nt, Homo sapiens
  misc_RNA (1)...(19): siRNA sense strand
ugaccgagccuccaguugu

SEQ ID NO: 1032841 - RNA, 19 nt, Homo sapiens
  misc_RNA (1)...(19): siRNA sense strand
gcgaaagccgucuaaagca

SEQ ID NO: 1032842 - RNA, 19 nt, Homo sapiens
  misc_RNA (1)...(19): siRNA sense strand
aagaaugacuucgccuuca

SEQ ID NO: 1032843 - RNA, 19 nt, Homo sapiens
  misc_RNA (1)...(19): siRNA sense strand
gcagaagugcgggacaaga

SEQ ID NO: 1032844 - RNA, 19 nt, Homo sapiens
  misc_RNA (1)...(19): siRNA sense strand
caaaggcaaccgcuuagag

SEQ ID NO: 1032845 - RNA, 19 nt, Homo sapiens
  misc_RNA (1)...(19): siRNA sense strand
ccaaguacuucccuuaccu

SEQ ID NO: 1032846 - RNA, 19 nt, Homo sapiens
  misc_RNA (1)...(19): siRNA sense strand
ugaacagccucaagaagcu

SEQ ID NO: 1032847 - RNA, 19 nt, Homo sapiens
  misc_RNA (1)...(19): siRNA sense strand
gcccugaacagccucaaga

SEQ ID NO: 1032848 - RNA, 19 nt, Homo sapiens
  misc_RNA (1)...(19): siRNA sense strand
ucuccaagcuggccuucug

SEQ ID NO: 1032849 - RNA, 19 nt, Homo sapiens
  misc_RNA (1)...(19): siRNA sense strand
cgacagacggugcugaaag

SEQ ID NO: 1032850 - RNA, 19 nt, Homo sapiens
  misc_RNA (1)...(19): siRNA sense strand
ucaucugucuacccaauca

SEQ ID NO: 1032851 - RNA, 19 nt, Homo sapiens
  misc_RNA (1)...(19): siRNA sense strand
cagcgaaagccgucuaaag

SEQ ID NO: 1032852 - RNA, 19 nt, Homo sapiens
  misc_RNA (1)...(19): siRNA sense strand
ugaagaaguuccgcaugca

SEQ ID NO: 1032853 - RNA, 19 nt, Homo sapiens
  misc_RNA (1)...(19): siRNA sense strand
uaaaggccuuaagaacaau

SEQ ID NO: 1032854 - RNA, 19 nt, Homo sapiens
  misc_RNA (1)...(19): siRNA sense strand
ggagggugagcaagccaaa

SEQ ID NO: 1032855 - RNA, 19 nt, Homo sapiens
  misc_RNA (1)...(19): siRNA sense strand
cagaagugcgggacaagau

SEQ ID NO: 1032856 - RNA, 19 nt, Homo sapiens
  misc_RNA (1)...(19): siRNA sense strand
uggccgaguucaagcaguu

SEQ ID NO: 1032857 - RNA, 19 nt, Homo sapiens
  misc_RNA (1)...(19): siRNA sense strand
caagcuggccuucuguuac

SEQ ID NO: 1032858 - RNA, 19 nt, Homo sapiens
  misc_RNA (1)...(19): siRNA sense strand
ggacaagauggaggaggaa

SEQ ID NO: 1032859 - RNA, 19 nt, Homo sapiens
  misc_RNA (1)...(19): siRNA sense strand
cggcagaagugcgggacaa

SEQ ID NO: 1032860 - RNA, 19 nt, Homo sapiens
  misc_RNA (1)...(19): siRNA sense strand
ucacccuguuggacaagaa

SEQ ID NO: 1032861 - RNA, 19 nt, Homo sapiens
  misc_RNA (1)...(19): siRNA sense strand
gcaucuacacgcucuacug

SEQ ID NO: 1032862 - RNA, 19 nt, Homo sapiens
  misc_RNA (1)...(19): siRNA sense strand
gugcugaaaguguguaagu

SEQ ID NO: 1032863 - RNA, 19 nt, Homo sapiens
  misc_RNA (1)...(19): siRNA sense strand
ugacacaggacaagaucau

SEQ ID NO: 1032864 - RNA, 19 nt, Homo sapiens
  misc_RNA (1)...(19): siRNA sense strand
ggucagcgaaagccgucua

SEQ ID NO: 1032865 - RNA, 19 nt, Homo sapiens
  misc_RNA (1)...(19): siRNA sense strand
ggucuacaaccuggucuau

SEQ ID NO: 1032866 - RNA, 19 nt, Homo sapiens
  misc_RNA (1)...(19): siRNA sense strand
guaaguuccuggccauccu

SEQ ID NO: 1032867 - RNA, 19 nt, Homo sapiens
  misc_RNA (1)...(19): siRNA sense strand
ucacacacucaucuucaug

SEQ ID NO: 1032868 - RNA, 19 nt, Homo sapiens
  misc_RNA (1)...(19): siRNA sense strand
acaaccagaucgccuacgu

SEQ ID NO: 1032869 - RNA, 19 nt, Homo sapiens
  misc_RNA (1)...(19): siRNA sense strand
gcgacauccuguacaccau

SEQ ID NO: 1032870 - RNA, 19 nt, Homo sapiens
  misc_RNA (1)...(19): siRNA sense strand
gcucaugauuggggucuuu

SEQ ID NO: 1032871 - RNA, 19 nt, Homo sapiens
  misc_RNA (1)...(19): siRNA sense strand
gucuaaagcagcucaaucu

SEQ ID NO: 1032872 - RNA, 19 nt, Homo sapiens
  misc_RNA (1)...(19): siRNA sense strand
gggagggugagaaggagaa

SEQ ID NO: 1032873 - RNA, 19 nt, Homo sapiens
  misc_RNA (1)...(19): siRNA sense strand
gcaccucaucgaucaguac

SEQ ID NO: 1032874 - RNA, 19 nt, Homo sapiens
  misc_RNA (1)...(19): siRNA sense strand
ggggaucccugagcagauu

SEQ ID NO: 1032875 - RNA, 19 nt, Homo sapiens
  misc_RNA (1)...(19): siRNA sense strand
gaaagacacugccaccuau

SEQ ID NO: 1032876 - RNA, 19 nt, Homo sapiens
  misc_RNA (1)...(19): siRNA sense strand
gaacauugauggaauaggu

SEQ ID NO: 1032877 - RNA, 19 nt, Homo sapiens
  misc_RNA (1)...(19): siRNA sense strand
caaagaggauguuccagaa

SEQ ID NO: 1032878 - RNA, 19 nt, Homo sapiens
  misc_RNA (1)...(19): siRNA sense strand
agacugaacuuaaagacua

SEQ ID NO: 1032879 - RNA, 19 nt, Homo sapiens
  misc_RNA (1)...(19): siRNA sense strand
uggaugggaugcaguauua

SEQ ID NO: 1032880 - RNA, 19 nt, Homo sapiens
  misc_RNA (1)...(19): siRNA sense strand
caagagauuugcugaugaa

SEQ ID NO: 1032881 - RNA, 19 nt, Homo sapiens
  misc_RNA (1)...(19): siRNA sense strand
gagaggacauucagcaguu

SEQ ID NO: 1032882 - RNA, 19 nt, Homo sapiens
  misc_RNA (1)...(19): siRNA sense strand
gaaguuaucaaaccugaaa

SEQ ID NO: 1032883 - RNA, 19 nt, Homo sapiens
  misc_RNA (1)...(19): siRNA sense strand
gaaaauguauggagaucua

SEQ ID NO: 1032884 - RNA, 19 nt, Homo sapiens
  misc_RNA (1)...(19): siRNA sense strand
gcagaacagugaaccaugu

SEQ ID NO: 1032885 - RNA, 19 nt, Homo sapiens
  misc_RNA (1)...(19): siRNA sense strand
acacaguucuggcuuauga

SEQ ID NO: 1032886 - RNA, 19 nt, Homo sapiens
  misc_RNA (1)...(19): siRNA sense strand
gcggaacauugauggaaua

SEQ ID NO: 1032887 - RNA, 19 nt, Homo sapiens
  misc_RNA (1)...(19): siRNA sense strand
gaugaaggcacgguuguua

SEQ ID NO: 1032888 - RNA, 19 nt, Homo sapiens
  misc_RNA (1)...(19): siRNA sense strand
uggaauaggugaucaggaa

SEQ ID NO: 1032889 - RNA, 19 nt, Homo sapiens
  misc_RNA (1)...(19): siRNA sense strand
agacaguguuuaagaauga

SEQ ID NO: 1032890 - RNA, 19 nt, Homo sapiens
  misc_RNA (1)...(19): siRNA sense strand
acaaugauuugaagacuga

SEQ ID NO: 1032891 - RNA, 19 nt, Homo sapiens
  misc_RNA (1)...(19): siRNA sense strand
gaacuuaaagacuaucuca

SEQ ID NO: 1032892 - RNA, 19 nt, Homo sapiens
  misc_RNA (1)...(19): siRNA sense strand
gcacgguuguuaagagaga

SEQ ID NO: 1032893 - RNA, 19 nt, Homo sapiens
  misc_RNA (1)...(19): siRNA sense strand
gaacucauuugugaauaca

SEQ ID NO: 1032894 - RNA, 19 nt, Homo sapiens
  misc_RNA (1)...(19): siRNA sense strand
gaugauguccgggagguua

SEQ ID NO: 1032895 - RNA, 19 nt, Homo sapiens
  misc_RNA (1)...(19): siRNA sense strand
ucaagagauuugcugauga

SEQ ID NO: 1032896 - RNA, 19 nt, Homo sapiens
  misc_RNA (1)...(19): siRNA sense strand
ggaacucauuugugaauac

SEQ ID NO: 1032897 - RNA, 19 nt, Homo sapiens
  misc_RNA (1)...(19): siRNA sense strand
gcaugaaacguuguucuuu

SEQ ID NO: 1032898 - RNA, 19 nt, Homo sapiens
  misc_RNA (1)...(19): siRNA sense strand
gcaaguggaacucauuugu

SEQ ID NO: 1032899 - RNA, 19 nt, Homo sapiens
  misc_RNA (1)...(19): siRNA sense strand
gggcuuaugcugcacaauu

SEQ ID NO: 1032900 - RNA, 19 nt, Homo sapiens
  misc_RNA (1)...(19): siRNA sense strand
aaguggaacucauuuguga

SEQ ID NO: 1032901 - RNA, 19 nt, Homo sapiens
  misc_RNA (1)...(19): siRNA sense strand
guauggagaucuagauguc

SEQ ID NO: 1032902 - RNA, 19 nt, Homo sapiens
  misc_RNA (1)...(19): siRNA sense strand
gcaaacuucaggagcuuaa

SEQ ID NO: 1032903 - RNA, 19 nt, Homo sapiens
  misc_RNA (1)...(19): siRNA sense strand
agaucuagaugucuuauuc

SEQ ID NO: 1032904 - RNA, 19 nt, Homo sapiens
  misc_RNA (1)...(19): siRNA sense strand
ccacugaggaugauggauu

SEQ ID NO: 1032905 - RNA, 19 nt, Homo sapiens
  misc_RNA (1)...(19): siRNA sense strand
aaaucuggcugcaaacuuc

SEQ ID NO: 1032906 - RNA, 19 nt, Homo sapiens
  misc_RNA (1)...(19): siRNA sense strand
cuuaaagacuaucucaaga

SEQ ID NO: 1032907 - RNA, 19 nt, Homo sapiens
  misc_RNA (1)...(19): siRNA sense strand
gaauagaguccagcaagug

SEQ ID NO: 1032908 - RNA, 19 nt, Homo sapiens
  misc_RNA (1)...(19): siRNA sense strand
cgacacaguucuggcuuau

SEQ ID NO: 1032909 - RNA, 19 nt, Homo sapiens
  misc_RNA (1)...(19): siRNA sense strand
agaaagacacugccaccua

SEQ ID NO: 1032910 - RNA, 19 nt, Homo sapiens
  misc_RNA (1)...(19): siRNA sense strand
ggcuuaugcugcacaauug

SEQ ID NO: 1032911 - RNA, 19 nt, Homo sapiens
  misc_RNA (1)...(19): siRNA sense strand
gaacagggaaaggaugaug

SEQ ID NO: 1032912 - RNA, 19 nt, Homo sapiens
  misc_RNA (1)...(19): siRNA sense strand
gauuugaagacugaacuua

SEQ ID NO: 1032913 - RNA, 19 nt, Homo sapiens
  misc_RNA (1)...(19): siRNA sense strand
cagacaguguuuaagaaug

SEQ ID NO: 1032914 - RNA, 19 nt, Homo sapiens
  misc_RNA (1)...(19): siRNA sense strand
ggacauucagcaguucuuu

SEQ ID NO: 1032915 - RNA, 19 nt, Homo sapiens
  misc_RNA (1)...(19): siRNA sense strand
ugaauagaguccagcaagu

SEQ ID NO: 1032916 - RNA, 19 nt, Homo sapiens
  misc_RNA (1)...(19): siRNA sense strand
uaucaaaccugaaaaugga

SEQ ID NO: 1032917 - RNA, 19 nt, Homo sapiens
  misc_RNA (1)...(19): siRNA sense strand
caugaaacguuguucuuuu

SEQ ID NO: 1032918 - RNA, 19 nt, Homo sapiens
  misc_RNA (1)...(19): siRNA sense strand
ucaagauaguacccucaaa

SEQ ID NO: 1032919 - RNA, 19 nt, Homo sapiens
  misc_RNA (1)...(19): siRNA sense strand
ggagagcaucaagauagua

SEQ ID NO: 1032920 - RNA, 19 nt, Homo sapiens
  misc_RNA (1)...(19): siRNA sense strand
caagauaguacccucaaag

SEQ ID NO: 1032921 - RNA, 19 nt, Homo sapiens
  misc_RNA (1)...(19): siRNA sense strand
ggauuggugcggaacauug

SEQ ID NO: 1032922 - RNA, 19 nt, Homo sapiens
  misc_RNA (1)...(19): siRNA sense strand
acccuuagcagcaugaaua

SEQ ID NO: 1032923 - RNA, 19 nt, Homo sapiens
  misc_RNA (1)...(19): siRNA sense strand
gaaggcacgguuguuaaga

SEQ ID NO: 1032924 - RNA, 19 nt, Homo sapiens
  misc_RNA (1)...(19): siRNA sense strand
aaguagagcagaacaguga

SEQ ID NO: 1032925 - RNA, 19 nt, Homo sapiens
  misc_RNA (1)...(19): siRNA sense strand
gacugaacuuaaagacuau

SEQ ID NO: 1032926 - RNA, 19 nt, Homo sapiens
  misc_RNA (1)...(19): siRNA sense strand
gcucuaguucugaaucuga

SEQ ID NO: 1032927 - RNA, 19 nt, Homo sapiens
  misc_RNA (1)...(19): siRNA sense strand
cagaacagggaaaggauga

SEQ ID NO: 1032928 - RNA, 19 nt, Homo sapiens
  misc_RNA (1)...(19): siRNA sense strand
gaguggaugggaugcagua

SEQ ID NO: 1032929 - RNA, 19 nt, Homo sapiens
  misc_RNA (1)...(19): siRNA sense strand
cacugaggaugauggauug

SEQ ID NO: 1032930 - RNA, 19 nt, Homo sapiens
  misc_RNA (1)...(19): siRNA sense strand
ucuuauuccugacagauga

SEQ ID NO: 1032931 - RNA, 19 nt, Homo sapiens
  misc_RNA (1)...(19): siRNA sense strand
uaaccaaaauauccacuga

SEQ ID NO: 1032932 - RNA, 19 nt, Homo sapiens
  misc_RNA (1)...(19): siRNA sense strand
uccagacaguguuuaagaa

SEQ ID NO: 1032933 - RNA, 19 nt, Homo sapiens
  misc_RNA (1)...(19): siRNA sense strand
gaauaggugaucaggaagu

SEQ ID NO: 1032934 - RNA, 19 nt, Homo sapiens
  misc_RNA (1)...(19): siRNA sense strand
acgacacaguucuggcuua

SEQ ID NO: 1032935 - RNA, 19 nt, Homo sapiens
  misc_RNA (1)...(19): siRNA sense strand
cucaagagauuugcugaug

SEQ ID NO: 1032936 - RNA, 19 nt, Homo sapiens
  misc_RNA (1)...(19): siRNA sense strand
caaguggaacucauuugug

SEQ ID NO: 1032937 - RNA, 19 nt, Homo sapiens
  misc_RNA (1)...(19): siRNA sense strand
cagcaaguggaacucauuu

SEQ ID NO: 1032938 - RNA, 19 nt, Homo sapiens
  misc_RNA (1)...(19): siRNA sense strand
gauuggugcggaacauuga

SEQ ID NO: 1032939 - RNA, 19 nt, Homo sapiens
  misc_RNA (1)...(19): siRNA sense strand
gaucaggaaguuaucaaac

SEQ ID NO: 1032940 - RNA, 19 nt, Homo sapiens
  misc_RNA (1)...(19): siRNA sense strand
ccagacaguguuuaagaau

SEQ ID NO: 1032941 - RNA, 19 nt, Homo sapiens
  misc_RNA (1)...(19): siRNA sense strand
gagcagaacagugaaccau

SEQ ID NO: 1032942 - RNA, 19 nt, Homo sapiens
  misc_RNA (1)...(19): siRNA sense strand
uaaaguagagcagaacagu

SEQ ID NO: 1032943 - RNA, 19 nt, Homo sapiens
  misc_RNA (1)...(19): siRNA sense strand
acauucagcaguucuuuga

SEQ ID NO: 1032944 - RNA, 19 nt, Homo sapiens
  misc_RNA (1)...(19): siRNA sense strand
gaucuccagacaguguuua

SEQ ID NO: 1032945 - RNA, 19 nt, Homo sapiens
  misc_RNA (1)...(19): siRNA sense strand
uggaacucauuugugaaua

SEQ ID NO: 1032946 - RNA, 19 nt, Homo sapiens
  misc_RNA (1)...(19): siRNA sense strand
aauaggugaucaggaaguu

SEQ ID NO: 1032947 - RNA, 19 nt, Homo sapiens
  misc_RNA (1)...(19): siRNA sense strand
uaagagagaggacauucag

SEQ ID NO: 1032948 - RNA, 19 nt, Homo sapiens
  misc_RNA (1)...(19): siRNA sense strand
aagauaguacccucaaaga

SEQ ID NO: 1032949 - RNA, 19 nt, Homo sapiens
  misc_RNA (1)...(19): siRNA sense strand
gaagacugaacuuaaagac

SEQ ID NO: 1032950 - RNA, 19 nt, Homo sapiens
  misc_RNA (1)...(19): siRNA sense strand
ugaagacugaacuuaaaga

SEQ ID NO: 1032951 - RNA, 19 nt, Homo sapiens
  misc_RNA (1)...(19): siRNA sense strand
aaauggagagcaucaagau

SEQ ID NO: 1032952 - RNA, 19 nt, Homo sapiens
  misc_RNA (1)...(19): siRNA sense strand
guggaacucauuugugaau

SEQ ID NO: 1032953 - RNA, 19 nt, Homo sapiens
  misc_RNA (1)...(19): siRNA sense strand
ccagcaaguggaacucauu

SEQ ID NO: 1032954 - RNA, 19 nt, Homo sapiens
  misc_RNA (1)...(19): siRNA sense strand
cugccaagacuguaugaaa

SEQ ID NO: 1032955 - RNA, 19 nt, Homo sapiens
  misc_RNA (1)...(19): siRNA sense strand
uggcguagcaaguugugua

SEQ ID NO: 1032956 - RNA, 19 nt, Homo sapiens
  misc_RNA (1)...(19): siRNA sense strand
gagagcaucaagauaguac

SEQ ID NO: 1032957 - RNA, 19 nt, Homo sapiens
  misc_RNA (1)...(19): siRNA sense strand
gacaguguuuaagaaugaa

SEQ ID NO: 1032958 - RNA, 19 nt, Homo sapiens
  misc_RNA (1)...(19): siRNA sense strand
uccgggagguuaaaguaga

SEQ ID NO: 1032959 - RNA, 19 nt, Homo sapiens
  misc_RNA (1)...(19): siRNA sense strand
uaggugaucaggaaguuau

SEQ ID NO: 1032960 - RNA, 19 nt, Homo sapiens
  misc_RNA (1)...(19): siRNA sense strand
gaugaauacgacacaguuc

SEQ ID NO: 1032961 - RNA, 19 nt, Homo sapiens
  misc_RNA (1)...(19): siRNA sense strand
guaccugccaagacuguau

SEQ ID NO: 1032962 - RNA, 19 nt, Homo sapiens
  misc_RNA (1)...(19): siRNA sense strand
gauccagugcguagucugu

SEQ ID NO: 1032963 - RNA, 19 nt, Homo sapiens
  misc_RNA (1)...(19): siRNA sense strand
gagaucuagaugucuuauu

SEQ ID NO: 1032964 - RNA, 19 nt, Homo sapiens
  misc_RNA (1)...(19): siRNA sense strand
gacauucagcaguucuuug

SEQ ID NO: 1032965 - RNA, 19 nt, Homo sapiens
  misc_RNA (1)...(19): siRNA sense strand
caggagcgauccccuaaug

SEQ ID NO: 1032966 - RNA, 19 nt, Homo sapiens
  misc_RNA (1)...(19): siRNA sense strand
gaaagccucaacgcagaau

SEQ ID NO: 1032967 - RNA, 19 nt, Homo sapiens
  misc_RNA (1)...(19): siRNA sense strand
aggcacgguuguuaagaga

SEQ ID NO: 1032968 - RNA, 19 nt, Homo sapiens
  misc_RNA (1)...(19): siRNA sense strand
ugccaagacuguaugaaaa

SEQ ID NO: 1032969 - RNA, 19 nt, Homo sapiens
  misc_RNA (1)...(19): siRNA sense strand
uggagagcaucaagauagu

SEQ ID NO: 1032970 - RNA, 19 nt, Homo sapiens
  misc_RNA (1)...(19): siRNA sense strand
ggagaucuagaugucuuau

SEQ ID NO: 1032971 - RNA, 19 nt, Homo sapiens
  misc_RNA (1)...(19): siRNA sense strand
guggaugggaugcaguauu

SEQ ID NO: 1032972 - RNA, 19 nt, Homo sapiens
  misc_RNA (1)...(19): siRNA sense strand
gugcggaacauugauggaa

SEQ ID NO: 1032973 - RNA, 19 nt, Homo sapiens
  misc_RNA (1)...(19): siRNA sense strand
ugaaggcacgguuguuaag

SEQ ID NO: 1032974 - RNA, 19 nt, Homo sapiens
  misc_RNA (1)...(19): siRNA sense strand
agaugaauacgacacaguu

SEQ ID NO: 1032975 - RNA, 19 nt, Homo sapiens
  misc_RNA (1)...(19): siRNA sense strand
gaaagacacugccaccuau

SEQ ID NO: 1032976 - RNA, 19 nt, Homo sapiens
  misc_RNA (1)...(19): siRNA sense strand
caaauuacuuccugacaaa

SEQ ID NO: 1032977 - RNA, 19 nt, Homo sapiens
  misc_RNA (1)...(19): siRNA sense strand
gaacauugauggaauaggu

SEQ ID NO: 1032978 - RNA, 19 nt, Homo sapiens
  misc_RNA (1)...(19): siRNA sense strand
gcaaauuacuuccugacaa

SEQ ID NO: 1032979 - RNA, 19 nt, Homo sapiens
  misc_RNA (1)...(19): siRNA sense strand
caaagaggauguuccagaa

SEQ ID NO: 1032980 - RNA, 19 nt, Homo sapiens
  misc_RNA (1)...(19): siRNA sense strand
agacugaacuuaaagacua

SEQ ID NO: 1032981 - RNA, 19 nt, Homo sapiens
  misc_RNA (1)...(19): siRNA sense strand
uggaugggaugcaguauua

SEQ ID NO: 1032982 - RNA, 19 nt, Homo sapiens
  misc_RNA (1)...(19): siRNA sense strand
caagagaccuuauccugau

SEQ ID NO: 1032983 - RNA, 19 nt, Homo sapiens
  misc_RNA (1)...(19): siRNA sense strand
gagaggacauucagcaguu

SEQ ID NO: 1032984 - RNA, 19 nt, Homo sapiens
  misc_RNA (1)...(19): siRNA sense strand
caagagauuugcugaugaa

SEQ ID NO: 1032985 - RNA, 19 nt, Homo sapiens
  misc_RNA (1)...(19): siRNA sense strand
gaaguuaucaaaccugaaa

SEQ ID NO: 1032986 - RNA, 19 nt, Homo sapiens
  misc_RNA (1)...(19): siRNA sense strand
gaaaauguauggagaucua

SEQ ID NO: 1032987 - RNA, 19 nt, Homo sapiens
  misc_RNA (1)...(19): siRNA sense strand
gcagaacagugaaccaugu

SEQ ID NO: 1032988 - RNA, 19 nt, Homo sapiens
  misc_RNA (1)...(19): siRNA sense strand
acacaguucuggcuuauga

SEQ ID NO: 1032989 - RNA, 19 nt, Homo sapiens
  misc_RNA (1)...(19): siRNA sense strand
acgaggagcuggagaauga

SEQ ID NO: 1032990 - RNA, 19 nt, Homo sapiens
  misc_RNA (1)...(19): siRNA sense strand
gcggaacauugauggaaua

SEQ ID NO: 1032991 - RNA, 19 nt, Homo sapiens
  misc_RNA (1)...(19): siRNA sense strand
gcaggaauuuguuuagcuu

SEQ ID NO: 1032992 - RNA, 19 nt, Homo sapiens
  misc_RNA (1)...(19): siRNA sense strand
gaugaaggcacgguuguua

SEQ ID NO: 1032993 - RNA, 19 nt, Homo sapiens
  misc_RNA (1)...(19): siRNA sense strand
uggaauaggugaucaggaa

SEQ ID NO: 1032994 - RNA, 19 nt, Homo sapiens
  misc_RNA (1)...(19): siRNA sense strand
agacaguguuuaagaauga

SEQ ID NO: 1032995 - RNA, 19 nt, Homo sapiens
  misc_RNA (1)...(19): siRNA sense strand
acaaugauuugaagacuga

SEQ ID NO: 1032996 - RNA, 19 nt, Homo sapiens
  misc_RNA (1)...(19): siRNA sense strand
gaagaaccagcaggaauuu

SEQ ID NO: 1032997 - RNA, 19 nt, Homo sapiens
  misc_RNA (1)...(19): siRNA sense strand
gcacgguuguuaagagaga

SEQ ID NO: 1032998 - RNA, 19 nt, Homo sapiens
  misc_RNA (1)...(19): siRNA sense strand
gaacuuaaagacuaucuca

SEQ ID NO: 1032999 - RNA, 19 nt, Homo sapiens
  misc_RNA (1)...(19): siRNA sense strand
ucauggaagucacaaacua

SEQ ID NO: 1033000 - RNA, 19 nt, Homo sapiens
  misc_RNA (1)...(19): siRNA sense strand
gcaauaaguacaaugacaa

SEQ ID NO: 1033001 - RNA, 19 nt, Homo sapiens
  misc_RNA (1)...(19): siRNA sense strand
gaacucauuugugaauaca

SEQ ID NO: 1033002 - RNA, 19 nt, Homo sapiens
  misc_RNA (1)...(19): siRNA sense strand
gguaaauucuggcaauaag

SEQ ID NO: 1033003 - RNA, 19 nt, Homo sapiens
  misc_RNA (1)...(19): siRNA sense strand
gaugauguccgggagguua

SEQ ID NO: 1033004 - RNA, 19 nt, Homo sapiens
  misc_RNA (1)...(19): siRNA sense strand
ucaagagauuugcugauga

SEQ ID NO: 1033005 - RNA, 19 nt, Homo sapiens
  misc_RNA (1)...(19): siRNA sense strand
ggaacucauuugugaauac

SEQ ID NO: 1033006 - RNA, 19 nt, Homo sapiens
  misc_RNA (1)...(19): siRNA sense strand
aagacgagauuccagauga

SEQ ID NO: 1033007 - RNA, 19 nt, Homo sapiens
  misc_RNA (1)...(19): siRNA sense strand
guaaagagacaagcacuau

SEQ ID NO: 1033008 - RNA, 19 nt, Homo sapiens
  misc_RNA (1)...(19): siRNA sense strand
aaagguaaauucuggcaau

SEQ ID NO: 1033009 - RNA, 19 nt, Homo sapiens
  misc_RNA (1)...(19): siRNA sense strand
ucucagggcucaguaaaga

SEQ ID NO: 1033010 - RNA, 19 nt, Homo sapiens
  misc_RNA (1)...(19): siRNA sense strand
gcaugaaacguuguucuuu

SEQ ID NO: 1033011 - RNA, 19 nt, Homo sapiens
  misc_RNA (1)...(19): siRNA sense strand
gagaagaaccagcaggaau

SEQ ID NO: 1033012 - RNA, 19 nt, Homo sapiens
  misc_RNA (1)...(19): siRNA sense strand
aaagagacaagcacuauau

SEQ ID NO: 1033013 - RNA, 19 nt, Homo sapiens
  misc_RNA (1)...(19): siRNA sense strand
gcaaguggaacucauuugu

SEQ ID NO: 1033014 - RNA, 19 nt, Homo sapiens
  misc_RNA (1)...(19): siRNA sense strand
gggcuuaugcugcacaauu

SEQ ID NO: 1033015 - RNA, 19 nt, Homo sapiens
  misc_RNA (1)...(19): siRNA sense strand
aaguggaacucauuuguga

SEQ ID NO: 1033016 - RNA, 19 nt, Homo sapiens
  misc_RNA (1)...(19): siRNA sense strand
guauggagaucuagauguc

SEQ ID NO: 1033017 - RNA, 19 nt, Homo sapiens
  misc_RNA (1)...(19): siRNA sense strand
gcaaacuucaggagcuuaa

SEQ ID NO: 1033018 - RNA, 19 nt, Homo sapiens
  misc_RNA (1)...(19): siRNA sense strand
ggcaauaaguacaaugaca

SEQ ID NO: 1033019 - RNA, 19 nt, Homo sapiens
  misc_RNA (1)...(19): siRNA sense strand
agaucuagaugucuuauuc

SEQ ID NO: 1033020 - RNA, 19 nt, Homo sapiens
  misc_RNA (1)...(19): siRNA sense strand
uaaagagacaagcacuaua

SEQ ID NO: 1033021 - RNA, 19 nt, Homo sapiens
  misc_RNA (1)...(19): siRNA sense strand
ccacugaggaugauggauu

SEQ ID NO: 1033022 - RNA, 19 nt, Homo sapiens
  misc_RNA (1)...(19): siRNA sense strand
ugacaaagcaaagguaaau

SEQ ID NO: 1033023 - RNA, 19 nt, Homo sapiens
  misc_RNA (1)...(19): siRNA sense strand
cuuaaagacuaucucaaga

SEQ ID NO: 1033024 - RNA, 19 nt, Homo sapiens
  misc_RNA (1)...(19): siRNA sense strand
gaauagaguccagcaagug

SEQ ID NO: 1033025 - RNA, 19 nt, Homo sapiens
  misc_RNA (1)...(19): siRNA sense strand
cgacacaguucuggcuuau

SEQ ID NO: 1033026 - RNA, 19 nt, Homo sapiens
  misc_RNA (1)...(19): siRNA sense strand
agaaagacacugccaccua

SEQ ID NO: 1033027 - RNA, 19 nt, Homo sapiens
  misc_RNA (1)...(19): siRNA sense strand
aaaucuggcugcaaacuuc

SEQ ID NO: 1033028 - RNA, 19 nt, Homo sapiens
  misc_RNA (1)...(19): siRNA sense strand
ggcuuaugcugcacaauug

SEQ ID NO: 1033029 - RNA, 19 nt, Homo sapiens
  misc_RNA (1)...(19): siRNA sense strand
agaagaaccagcaggaauu

SEQ ID NO: 1033030 - RNA, 19 nt, Homo sapiens
  misc_RNA (1)...(19): siRNA sense strand
gaacagggaaaggaugaug

SEQ ID NO: 1033031 - RNA, 19 nt, Homo sapiens
  misc_RNA (1)...(19): siRNA sense strand
gauuugaagacugaacuua

SEQ ID NO: 1033032 - RNA, 19 nt, Homo sapiens
  misc_RNA (1)...(19): siRNA sense strand
gaaccagcaggaauuuguu

SEQ ID NO: 1033033 - RNA, 19 nt, Homo sapiens
  misc_RNA (1)...(19): siRNA sense strand
cagacaguguuuaagaaug

SEQ ID NO: 1033034 - RNA, 19 nt, Homo sapiens
  misc_RNA (1)...(19): siRNA sense strand
ggacauucagcaguucuuu

SEQ ID NO: 1033035 - RNA, 19 nt, Homo sapiens
  misc_RNA (1)...(19): siRNA sense strand
ugaauagaguccagcaagu

SEQ ID NO: 1033036 - RNA, 19 nt, Homo sapiens
  misc_RNA (1)...(19): siRNA sense strand
gaagacgagauuccagaug

SEQ ID NO: 1033037 - RNA, 19 nt, Homo sapiens
  misc_RNA (1)...(19): siRNA sense strand
uaucaaaccugaaaaugga

SEQ ID NO: 1033038 - RNA, 19 nt, Homo sapiens
  misc_RNA (1)...(19): siRNA sense strand
caugaaacguuguucuuuu

SEQ ID NO: 1033039 - RNA, 19 nt, Homo sapiens
  misc_RNA (1)...(19): siRNA sense strand
ucaagauaguacccucaaa

SEQ ID NO: 1033040 - RNA, 19 nt, Homo sapiens
  misc_RNA (1)...(19): siRNA sense strand
ggagagcaucaagauagua

SEQ ID NO: 1033041 - RNA, 19 nt, Homo sapiens
  misc_RNA (1)...(19): siRNA sense strand
caagauaguacccucaaag

SEQ ID NO: 1033042 - RNA, 19 nt, Homo sapiens
  misc_RNA (1)...(19): siRNA sense strand
acaaagcaaagguaaauuc

SEQ ID NO: 1033043 - RNA, 19 nt, Homo sapiens
  misc_RNA (1)...(19): siRNA sense strand
ggauuggugcggaacauug

SEQ ID NO: 1033044 - RNA, 19 nt, Homo sapiens
  misc_RNA (1)...(19): siRNA sense strand
aagguaaauucuggcaaua

SEQ ID NO: 1033045 - RNA, 19 nt, Homo sapiens
  misc_RNA (1)...(19): siRNA sense strand
acccuuagcagcaugaaua

SEQ ID NO: 1033046 - RNA, 19 nt, Homo sapiens
  misc_RNA (1)...(19): siRNA sense strand
gaaggcacgguuguuaaga

SEQ ID NO: 1033047 - RNA, 19 nt, Homo sapiens
  misc_RNA (1)...(19): siRNA sense strand
uuguuuagcuugcaguuau

SEQ ID NO: 1033048 - RNA, 19 nt, Homo sapiens
  misc_RNA (1)...(19): siRNA sense strand
aaguagagcagaacaguga

SEQ ID NO: 1033049 - RNA, 19 nt, Homo sapiens
  misc_RNA (1)...(19): siRNA sense strand
gacugaacuuaaagacuau

SEQ ID NO: 1033050 - RNA, 19 nt, Homo sapiens
  misc_RNA (1)...(19): siRNA sense strand
ggaauuuguuuagcuugca

SEQ ID NO: 1033051 - RNA, 19 nt, Homo sapiens
  misc_RNA (1)...(19): siRNA sense strand
ggagaagaaccagcaggaa

SEQ ID NO: 1033052 - RNA, 19 nt, Homo sapiens
  misc_RNA (1)...(19): siRNA sense strand
gcucuaguucugaaucuga

SEQ ID NO: 1033053 - RNA, 19 nt, Homo sapiens
  misc_RNA (1)...(19): siRNA sense strand
uaaccaaaauauccacuga

SEQ ID NO: 1033054 - RNA, 19 nt, Homo sapiens
  misc_RNA (1)...(19): siRNA sense strand
gaguggaugggaugcagua

SEQ ID NO: 1033055 - RNA, 19 nt, Homo sapiens
  misc_RNA (1)...(19): siRNA sense strand
ucuuauuccugacagauga

SEQ ID NO: 1033056 - RNA, 19 nt, Homo sapiens
  misc_RNA (1)...(19): siRNA sense strand
uccagacaguguuuaagaa

SEQ ID NO: 1033057 - RNA, 19 nt, Homo sapiens
  misc_RNA (1)...(19): siRNA sense strand
cagaacagggaaaggauga

SEQ ID NO: 1033058 - RNA, 19 nt, Homo sapiens
  misc_RNA (1)...(19): siRNA sense strand
gaauaggugaucaggaagu

SEQ ID NO: 1033059 - RNA, 19 nt, Homo sapiens
  misc_RNA (1)...(19): siRNA sense strand
cacugaggaugauggauug

SEQ ID NO: 1033060 - RNA, 19 nt, Homo sapiens
  misc_RNA (1)...(19): siRNA sense strand
caaagcaaagguaaauucu

SEQ ID NO: 1033061 - RNA, 19 nt, Homo sapiens
  misc_RNA (1)...(19): siRNA sense strand
cucaagagauuugcugaug

SEQ ID NO: 1033062 - RNA, 19 nt, Homo sapiens
  misc_RNA (1)...(19): siRNA sense strand
caaguggaacucauuugug

SEQ ID NO: 1033063 - RNA, 19 nt, Homo sapiens
  misc_RNA (1)...(19): siRNA sense strand
cagcaaguggaacucauuu

SEQ ID NO: 1033064 - RNA, 19 nt, Homo sapiens
  misc_RNA (1)...(19): siRNA sense strand
acgacacaguucuggcuua

SEQ ID NO: 1033065 - RNA, 19 nt, Homo sapiens
  misc_RNA (1)...(19): siRNA sense strand
gcauuugcaagagaccuua

SEQ ID NO: 1033066 - RNA, 19 nt, Homo sapiens
  misc_RNA (1)...(19): siRNA sense strand
gauuggugcggaacauuga

SEQ ID NO: 1033067 - RNA, 19 nt, Homo sapiens
  misc_RNA (1)...(19): siRNA sense strand
ccagacaguguuuaagaau

SEQ ID NO: 1033068 - RNA, 19 nt, Homo sapiens
  misc_RNA (1)...(19): siRNA sense strand
gagcagaacagugaaccau

SEQ ID NO: 1033069 - RNA, 19 nt, Homo sapiens
  misc_RNA (1)...(19): siRNA sense strand
uaaaguagagcagaacagu

SEQ ID NO: 1033070 - RNA, 19 nt, Homo sapiens
  misc_RNA (1)...(19): siRNA sense strand
gaucaggaaguuaucaaac

SEQ ID NO: 1033071 - RNA, 19 nt, Homo sapiens
  misc_RNA (1)...(19): siRNA sense strand
acauucagcaguucuuuga

SEQ ID NO: 1033072 - RNA, 19 nt, Homo sapiens
  misc_RNA (1)...(19): siRNA sense strand
caagcacuauaugccugua

SEQ ID NO: 1033073 - RNA, 19 nt, Homo sapiens
  misc_RNA (1)...(19): siRNA sense strand
uggaacucauuugugaaua

SEQ ID NO: 1033074 - RNA, 19 nt, Homo sapiens
  misc_RNA (1)...(19): siRNA sense strand
gaucuccagacaguguuua

SEQ ID NO: 1033075 - RNA, 19 nt, Homo sapiens
  misc_RNA (1)...(19): siRNA sense strand
uagaagagaccucaugaca

SEQ ID NO: 1033076 - RNA, 19 nt, Homo sapiens
  misc_RNA (1)...(19): siRNA sense strand
caugacagcuggaguucuc

SEQ ID NO: 1033077 - RNA, 19 nt, Homo sapiens
  misc_RNA (1)...(19): siRNA sense strand
ccugauggcuauagaagag

SEQ ID NO: 1033078 - RNA, 19 nt, Homo sapiens
  misc_RNA (1)...(19): siRNA sense strand
uauagaagagaccucauga

SEQ ID NO: 1033079 - RNA, 19 nt, Homo sapiens
  misc_RNA (1)...(19): siRNA sense strand
ggaccugauggcuauagaa

SEQ ID NO: 1033080 - RNA, 19 nt, Homo sapiens
  misc_RNA (1)...(19): siRNA sense strand
ccucaugacagcuggaguu

SEQ ID NO: 1033081 - RNA, 19 nt, Homo sapiens
  misc_RNA (1)...(19): siRNA sense strand
cccaaucuuguaccaauuu

SEQ ID NO: 1033082 - RNA, 19 nt, Homo sapiens
  misc_RNA (1)...(19): siRNA sense strand
gaccugauggcuauagaag

SEQ ID NO: 1033083 - RNA, 19 nt, Homo sapiens
  misc_RNA (1)...(19): siRNA sense strand
gggaccugcuggagcuuca

SEQ ID NO: 1033084 - RNA, 19 nt, Homo sapiens
  misc_RNA (1)...(19): siRNA sense strand
uguuugguguccuugguuu

SEQ ID NO: 1033085 - RNA, 19 nt, Homo sapiens
  misc_RNA (1)...(19): siRNA sense strand
ucacugguguugcuuugcu

SEQ ID NO: 1033086 - RNA, 19 nt, Homo sapiens
  misc_RNA (1)...(19): siRNA sense strand
ggaguucucuggggacugu

SEQ ID NO: 1033087 - RNA, 19 nt, Homo sapiens
  misc_RNA (1)...(19): siRNA sense strand
cuauagaagagaccucaug

SEQ ID NO: 1033088 - RNA, 19 nt, Homo sapiens
  misc_RNA (1)...(19): siRNA sense strand
gaugucacccuugggaaca

SEQ ID NO: 1033089 - RNA, 19 nt, Homo sapiens
  misc_RNA (1)...(19): siRNA sense strand
uagaagagaccucaugaca

SEQ ID NO: 1033090 - RNA, 19 nt, Homo sapiens
  misc_RNA (1)...(19): siRNA sense strand
caugacagcuggaguucuc

SEQ ID NO: 1033091 - RNA, 19 nt, Homo sapiens
  misc_RNA (1)...(19): siRNA sense strand
ccugauggcuauagaagag

SEQ ID NO: 1033092 - RNA, 19 nt, Homo sapiens
  misc_RNA (1)...(19): siRNA sense strand
uauagaagagaccucauga

SEQ ID NO: 1033093 - RNA, 19 nt, Homo sapiens
  misc_RNA (1)...(19): siRNA sense strand
ggaccugauggcuauagaa

SEQ ID NO: 1033094 - RNA, 19 nt, Homo sapiens
  misc_RNA (1)...(19): siRNA sense strand
ccucaugacagcuggaguu

SEQ ID NO: 1033095 - RNA, 19 nt, Homo sapiens
  misc_RNA (1)...(19): siRNA sense strand
cccaaucuuguaccaauuu

SEQ ID NO: 1033096 - RNA, 19 nt, Homo sapiens
  misc_RNA (1)...(19): siRNA sense strand
gaccugauggcuauagaag

SEQ ID NO: 1033097 - RNA, 19 nt, Homo sapiens
  misc_RNA (1)...(19): siRNA sense strand
gggaccugcuggagcuuca

SEQ ID NO: 1033098 - RNA, 19 nt, Homo sapiens
  misc_RNA (1)...(19): siRNA sense strand
uguuugguguccuugguuu

SEQ ID NO: 1033099 - RNA, 19 nt, Homo sapiens
  misc_RNA (1)...(19): siRNA sense strand
ucacugguguugcuuugcu

SEQ ID NO: 1033100 - RNA, 19 nt, Homo sapiens
  misc_RNA (1)...(19): siRNA sense strand
ggaguucucuggggacugu

SEQ ID NO: 1033101 - RNA, 19 nt, Homo sapiens
  misc_RNA (1)...(19): siRNA sense strand
cuauagaagagaccucaug

SEQ ID NO: 1033102 - RNA, 19 nt, Homo sapiens
  misc_RNA (1)...(19): siRNA sense strand
gaugucacccuugggaaca

SEQ ID NO: 1033103 - RNA, 19 nt, Homo sapiens
  misc_RNA (1)...(19): siRNA sense strand
cccaaucuuguaccaauuu

SEQ ID NO: 1033104 - RNA, 19 nt, Homo sapiens
  misc_RNA (1)...(19): siRNA sense strand
gggaccugcuggagcuuca

SEQ ID NO: 1033105 - RNA, 19 nt, Homo sapiens
  misc_RNA (1)...(19): siRNA sense strand
gaugucacccuugggaaca

SEQ ID NO: 1033106 - RNA, 19 nt, Homo sapiens
  misc_RNA (1)...(19): siRNA sense strand
uaugaagucucgacccuaa

SEQ ID NO: 1033107 - RNA, 19 nt, Homo sapiens
  misc_RNA (1)...(19): siRNA sense strand
acaggaauccagagaguuu

SEQ ID NO: 1033108 - RNA, 19 nt, Homo sapiens
  misc_RNA (1)...(19): siRNA sense strand
uuacaggaauccagagagu

SEQ ID NO: 1033109 - RNA, 19 nt, Homo sapiens
  misc_RNA (1)...(19): siRNA sense strand
gaacccggugguacccaua

SEQ ID NO: 1033110 - RNA, 19 nt, Homo sapiens
  misc_RNA (1)...(19): siRNA sense strand
gaaaaguucguucgcaaga

SEQ ID NO: 1033111 - RNA, 19 nt, Homo sapiens
  misc_RNA (1)...(19): siRNA sense strand
cgaagccuccagucauuga

SEQ ID NO: 1033112 - RNA, 19 nt, Homo sapiens
  misc_RNA (1)...(19): siRNA sense strand
caucgaagccuccagucau

SEQ ID NO: 1033113 - RNA, 19 nt, Homo sapiens
  misc_RNA (1)...(19): siRNA sense strand
ccuacggccucuacuccuu

SEQ ID NO: 1033114 - RNA, 19 nt, Homo sapiens
  misc_RNA (1)...(19): siRNA sense strand
ccagcgcucucagcucaug

SEQ ID NO: 1033115 - RNA, 19 nt, Homo sapiens
  misc_RNA (1)...(19): siRNA sense strand
uccagagaguuucaaggaa

SEQ ID NO: 1033116 - RNA, 19 nt, Homo sapiens
  misc_RNA (1)...(19): siRNA sense strand
ggcugucacugcuaugaag

SEQ ID NO: 1033117 - RNA, 19 nt, Homo sapiens
  misc_RNA (1)...(19): siRNA sense strand
aucgaagccuccagucauu

SEQ ID NO: 1033118 - RNA, 19 nt, Homo sapiens
  misc_RNA (1)...(19): siRNA sense strand
gcaacagccagcgcucuca

SEQ ID NO: 1033119 - RNA, 19 nt, Homo sapiens
  misc_RNA (1)...(19): siRNA sense strand
caacaucccugcugacauc

SEQ ID NO: 1033120 - RNA, 19 nt, Homo sapiens
  misc_RNA (1)...(19): siRNA sense strand
caagacagauccuuaagca

SEQ ID NO: 1033121 - RNA, 19 nt, Homo sapiens
  misc_RNA (1)...(19): siRNA sense strand
ggaagauggccuugaagua

SEQ ID NO: 1033122 - RNA, 19 nt, Homo sapiens
  misc_RNA (1)...(19): siRNA sense strand
ccuaugaugugcuaaguga

SEQ ID NO: 1033123 - RNA, 19 nt, Homo sapiens
  misc_RNA (1)...(19): siRNA sense strand
gacaagauccugcacauag

SEQ ID NO: 1033124 - RNA, 19 nt, Homo sapiens
  misc_RNA (1)...(19): siRNA sense strand
gaagauggccuugaaguac

SEQ ID NO: 1033125 - RNA, 19 nt, Homo sapiens
  misc_RNA (1)...(19): siRNA sense strand
aaaguucgcuucccagaca

SEQ ID NO: 1033126 - RNA, 19 nt, Homo sapiens
  misc_RNA (1)...(19): siRNA sense strand
ggacaagauccugcacaua

SEQ ID NO: 1033127 - RNA, 19 nt, Homo sapiens
  misc_RNA (1)...(19): siRNA sense strand
gaaggaaggcaccaagauc

SEQ ID NO: 1033128 - RNA, 19 nt, Homo sapiens
  misc_RNA (1)...(19): siRNA sense strand
ggagaaguuuaaggagauu

SEQ ID NO: 1033129 - RNA, 19 nt, Homo sapiens
  misc_RNA (1)...(19): siRNA sense strand
gggaaaagauuauuacaag

SEQ ID NO: 1033130 - RNA, 19 nt, Homo sapiens
  misc_RNA (1)...(19): siRNA sense strand
caacgaggaugagaucaag

SEQ ID NO: 1033131 - RNA, 19 nt, Homo sapiens
  misc_RNA (1)...(19): siRNA sense strand
gaagaugaggacccauuug

SEQ ID NO: 1033132 - RNA, 19 nt, Homo sapiens
  misc_RNA (1)...(19): siRNA sense strand
ccaccaagcgcauugaaga

SEQ ID NO: 1033133 - RNA, 19 nt, Homo sapiens
  misc_RNA (1)...(19): siRNA sense strand
agacaagacagauccuuaa

SEQ ID NO: 1033134 - RNA, 19 nt, Homo sapiens
  misc_RNA (1)...(19): siRNA sense strand
cagacaagacagauccuua

SEQ ID NO: 1033135 - RNA, 19 nt, Homo sapiens
  misc_RNA (1)...(19): siRNA sense strand
ggaaggaaggcaccaagau

SEQ ID NO: 1033136 - RNA, 19 nt, Homo sapiens
  misc_RNA (1)...(19): siRNA sense strand
ggauguggaugaagaugag

SEQ ID NO: 1033137 - RNA, 19 nt, Homo sapiens
  misc_RNA (1)...(19): siRNA sense strand
ccaagcgcauugaagauca

SEQ ID NO: 1033138 - RNA, 19 nt, Homo sapiens
  misc_RNA (1)...(19): siRNA sense strand
gggccuguaugaccaguau

SEQ ID NO: 1033139 - RNA, 19 nt, Homo sapiens
  misc_RNA (1)...(19): siRNA sense strand
aagaaagccuaccggaaga

SEQ ID NO: 1033140 - RNA, 19 nt, Homo sapiens
  misc_RNA (1)...(19): siRNA sense strand
gcacacuuccgccgagaug

SEQ ID NO: 1033141 - RNA, 19 nt, Homo sapiens
  misc_RNA (1)...(19): siRNA sense strand
gcucuacagugcccugauc

SEQ ID NO: 1033142 - RNA, 19 nt, Homo sapiens
  misc_RNA (1)...(19): siRNA sense strand
gaaguaccacccagacaag

SEQ ID NO: 1033143 - RNA, 19 nt, Homo sapiens
  misc_RNA (1)...(19): siRNA sense strand
ggacccauuuggcgcuuuc

SEQ ID NO: 1033144 - RNA, 19 nt, Homo sapiens
  misc_RNA (1)...(19): siRNA sense strand
caccuuugccuccuucuuu

SEQ ID NO: 1033145 - RNA, 19 nt, Homo sapiens
  misc_RNA (1)...(19): siRNA sense strand
ucgcuucccagacagauua

SEQ ID NO: 1033146 - RNA, 19 nt, Homo sapiens
  misc_RNA (1)...(19): siRNA sense strand
ugacccagaugacauggau

SEQ ID NO: 1033147 - RNA, 19 nt, Homo sapiens
  misc_RNA (1)...(19): siRNA sense strand
ugaaguaccacccagacaa

SEQ ID NO: 1033148 - RNA, 19 nt, Homo sapiens
  misc_RNA (1)...(19): siRNA sense strand
ugaagaugaggacccauuu

SEQ ID NO: 1033149 - RNA, 19 nt, Homo sapiens
  misc_RNA (1)...(19): siRNA sense strand
acaagauccugcacauagu

SEQ ID NO: 1033150 - RNA, 19 nt, Homo sapiens
  misc_RNA (1)...(19): siRNA sense strand
cagauuaacaccacagaca

SEQ ID NO: 1033151 - RNA, 19 nt, Homo sapiens
  misc_RNA (1)...(19): siRNA sense strand
uggcugcacugugaacauu

SEQ ID NO: 1033152 - RNA, 19 nt, Homo sapiens
  misc_RNA (1)...(19): siRNA sense strand
acgcacaccuugacaacau

SEQ ID NO: 1033153 - RNA, 19 nt, Homo sapiens
  misc_RNA (1)...(19): siRNA sense strand
gaaagccuaccggaagaug

SEQ ID NO: 1033154 - RNA, 19 nt, Homo sapiens
  misc_RNA (1)...(19): siRNA sense strand
uaacaccacagacaagaca

SEQ ID NO: 1033155 - RNA, 19 nt, Homo sapiens
  misc_RNA (1)...(19): siRNA sense strand
cugcugacaucgucuuugu

SEQ ID NO: 1033156 - RNA, 19 nt, Homo sapiens
  misc_RNA (1)...(19): siRNA sense strand
acgcugaggagaaguuuaa

SEQ ID NO: 1033157 - RNA, 19 nt, Homo sapiens
  misc_RNA (1)...(19): siRNA sense strand
aggagaaguuuaaggagau

SEQ ID NO: 1033158 - RNA, 19 nt, Homo sapiens
  misc_RNA (1)...(19): siRNA sense strand
cuguguggcugcacuguga

SEQ ID NO: 1033159 - RNA, 19 nt, Homo sapiens
  misc_RNA (1)...(19): siRNA sense strand
ggagauugcagaggccuau

SEQ ID NO: 1033160 - RNA, 19 nt, Homo sapiens
  misc_RNA (1)...(19): siRNA sense strand
ccaacgaggaugagaucaa

SEQ ID NO: 1033161 - RNA, 19 nt, Homo sapiens
  misc_RNA (1)...(19): siRNA sense strand
aggaugagaucaagaaagc

SEQ ID NO: 1033162 - RNA, 19 nt, Homo sapiens
  misc_RNA (1)...(19): siRNA sense strand
agaggccuaugaugugcua

SEQ ID NO: 1033163 - RNA, 19 nt, Homo sapiens
  misc_RNA (1)...(19): siRNA sense strand
guaccacccagacaagaau

SEQ ID NO: 1033164 - RNA, 19 nt, Homo sapiens
  misc_RNA (1)...(19): siRNA sense strand
gggugucccuggaggagau

SEQ ID NO: 1033165 - RNA, 19 nt, Homo sapiens
  misc_RNA (1)...(19): siRNA sense strand
caagaucaccuuccccaaa

SEQ ID NO: 1033166 - RNA, 19 nt, Homo sapiens
  misc_RNA (1)...(19): siRNA sense strand
gacaacaucccugcugaca

SEQ ID NO: 1033167 - RNA, 19 nt, Homo sapiens
  misc_RNA (1)...(19): siRNA sense strand
gauuaacaccacagacaag

SEQ ID NO: 1033168 - RNA, 19 nt, Homo sapiens
  misc_RNA (1)...(19): siRNA sense strand
gaggaugagaucaagaaag

SEQ ID NO: 1033169 - RNA, 19 nt, Homo sapiens
  misc_RNA (1)...(19): siRNA sense strand
uugcagaggccuaugaugu

SEQ ID NO: 1033170 - RNA, 19 nt, Homo sapiens
  misc_RNA (1)...(19): siRNA sense strand
cugugaacauucccacuau

SEQ ID NO: 1033171 - RNA, 19 nt, Homo sapiens
  misc_RNA (1)...(19): siRNA sense strand
aaggaaggcaccaagauca

SEQ ID NO: 1033172 - RNA, 19 nt, Homo sapiens
  misc_RNA (1)...(19): siRNA sense strand
gacaagacagauccuuaag

SEQ ID NO: 1033173 - RNA, 19 nt, Homo sapiens
  misc_RNA (1)...(19): siRNA sense strand
accggaagauggccuugaa

SEQ ID NO: 1033174 - RNA, 19 nt, Homo sapiens
  misc_RNA (1)...(19): siRNA sense strand
aagcagcaccuacccuguu

SEQ ID NO: 1033175 - RNA, 19 nt, Homo sapiens
  misc_RNA (1)...(19): siRNA sense strand
caacgcugaggagaaguuu

SEQ ID NO: 1033176 - RNA, 19 nt, Homo sapiens
  misc_RNA (1)...(19): siRNA sense strand
ggccuaugaugugcuaagu

SEQ ID NO: 1033177 - RNA, 19 nt, Homo sapiens
  misc_RNA (1)...(19): siRNA sense strand
uggcuccaguggcuccuuu

SEQ ID NO: 1033178 - RNA, 19 nt, Homo sapiens
  misc_RNA (1)...(19): siRNA sense strand
cugaggagaaguuuaagga

SEQ ID NO: 1033179 - RNA, 19 nt, Homo sapiens
  misc_RNA (1)...(19): siRNA sense strand
caagauccugcacauaguc

SEQ ID NO: 1033180 - RNA, 19 nt, Homo sapiens
  misc_RNA (1)...(19): siRNA sense strand
ccacccagacaagaauaaa

SEQ ID NO: 1033181 - RNA, 19 nt, Homo sapiens
  misc_RNA (1)...(19): siRNA sense strand
ccaacgcugaggagaaguu

SEQ ID NO: 1033182 - RNA, 19 nt, Homo sapiens
  misc_RNA (1)...(19): siRNA sense strand
gcgcauugaagaucacaag

SEQ ID NO: 1033183 - RNA, 19 nt, Homo sapiens
  misc_RNA (1)...(19): siRNA sense strand
ggccaacgaggaugagauc

SEQ ID NO: 1033184 - RNA, 19 nt, Homo sapiens
  misc_RNA (1)...(19): siRNA sense strand
gaaagagaaucacuaguaa

SEQ ID NO: 1033185 - RNA, 19 nt, Homo sapiens
  misc_RNA (1)...(19): siRNA sense strand
gcacaaggaucaaauaaca

SEQ ID NO: 1033186 - RNA, 19 nt, Homo sapiens
  misc_RNA (1)...(19): siRNA sense strand
ggaaggagaugcaagaaga

SEQ ID NO: 1033187 - RNA, 19 nt, Homo sapiens
  misc_RNA (1)...(19): siRNA sense strand
ucaaauggcucgucuuaaa

SEQ ID NO: 1033188 - RNA, 19 nt, Homo sapiens
  misc_RNA (1)...(19): siRNA sense strand
gaaaugaauugaacagguu

SEQ ID NO: 1033189 - RNA, 19 nt, Homo sapiens
  misc_RNA (1)...(19): siRNA sense strand
gaacggguguguauaauca

SEQ ID NO: 1033190 - RNA, 19 nt, Homo sapiens
  misc_RNA (1)...(19): siRNA sense strand
ucacgaggaucgaauaaua

SEQ ID NO: 1033191 - RNA, 19 nt, Homo sapiens
  misc_RNA (1)...(19): siRNA sense strand
gagaaucacuaguaaagaa

SEQ ID NO: 1033192 - RNA, 19 nt, Homo sapiens
  misc_RNA (1)...(19): siRNA sense strand
agaaagaacuggcucauau

SEQ ID NO: 1033193 - RNA, 19 nt, Homo sapiens
  misc_RNA (1)...(19): siRNA sense strand
aaucagagcuucaaagaga

SEQ ID NO: 1033194 - RNA, 19 nt, Homo sapiens
  misc_RNA (1)...(19): siRNA sense strand
gaaagaacuugccagacuu

SEQ ID NO: 1033195 - RNA, 19 nt, Homo sapiens
  misc_RNA (1)...(19): siRNA sense strand
ggacuguauucaccaagua

SEQ ID NO: 1033196 - RNA, 19 nt, Homo sapiens
  misc_RNA (1)...(19): siRNA sense strand
agaaagagaaucacuagua

SEQ ID NO: 1033197 - RNA, 19 nt, Homo sapiens
  misc_RNA (1)...(19): siRNA sense strand
gaaagaaaguuggaaucug

SEQ ID NO: 1033198 - RNA, 19 nt, Homo sapiens
  misc_RNA (1)...(19): siRNA sense strand
gaauccagcuuucuaacau

SEQ ID NO: 1033199 - RNA, 19 nt, Homo sapiens
  misc_RNA (1)...(19): siRNA sense strand
ggagaugcaagaagauaua

SEQ ID NO: 1033200 - RNA, 19 nt, Homo sapiens
  misc_RNA (1)...(19): siRNA sense strand
ggauagcagaucuuucuua

SEQ ID NO: 1033201 - RNA, 19 nt, Homo sapiens
  misc_RNA (1)...(19): siRNA sense strand
ggaaucagagcuucaaaga

SEQ ID NO: 1033202 - RNA, 19 nt, Homo sapiens
  misc_RNA (1)...(19): siRNA sense strand
ucuagaagauuauggacua

SEQ ID NO: 1033203 - RNA, 19 nt, Homo sapiens
  misc_RNA (1)...(19): siRNA sense strand
ugaaagaacuugccagacu

SEQ ID NO: 1033204 - RNA, 19 nt, Homo sapiens
  misc_RNA (1)...(19): siRNA sense strand
gaacuauggcacaaggaua

SEQ ID NO: 1033205 - RNA, 19 nt, Homo sapiens
  misc_RNA (1)...(19): siRNA sense strand
caaagcagcacuugagcua

SEQ ID NO: 1033206 - RNA, 19 nt, Homo sapiens
  misc_RNA (1)...(19): siRNA sense strand
gauagcagaucuuucuuac

SEQ ID NO: 1033207 - RNA, 19 nt, Homo sapiens
  misc_RNA (1)...(19): siRNA sense strand
cgacagaucagagagauuu

SEQ ID NO: 1033208 - RNA, 19 nt, Homo sapiens
  misc_RNA (1)...(19): siRNA sense strand
cagugacucuagaagauua

SEQ ID NO: 1033209 - RNA, 19 nt, Homo sapiens
  misc_RNA (1)...(19): siRNA sense strand
gaugagaacggguguguau

SEQ ID NO: 1033210 - RNA, 19 nt, Homo sapiens
  misc_RNA (1)...(19): siRNA sense strand
agaagauuauggacuagua

SEQ ID NO: 1033211 - RNA, 19 nt, Homo sapiens
  misc_RNA (1)...(19): siRNA sense strand
gaacucgaccgacagauca

SEQ ID NO: 1033212 - RNA, 19 nt, Homo sapiens
  misc_RNA (1)...(19): siRNA sense strand
cuucagagauccagacaga

SEQ ID NO: 1033213 - RNA, 19 nt, Homo sapiens
  misc_RNA (1)...(19): siRNA sense strand
agucuaaacugcauuacaa

SEQ ID NO: 1033214 - RNA, 19 nt, Homo sapiens
  misc_RNA (1)...(19): siRNA sense strand
ggaaaagguugaacuugaa

SEQ ID NO: 1033215 - RNA, 19 nt, Homo sapiens
  misc_RNA (1)...(19): siRNA sense strand
gaaagaacuggcucauaug

SEQ ID NO: 1033216 - RNA, 19 nt, Homo sapiens
  misc_RNA (1)...(19): siRNA sense strand
gaagauuauggacuaguaa

SEQ ID NO: 1033217 - RNA, 19 nt, Homo sapiens
  misc_RNA (1)...(19): siRNA sense strand
ugagaacggguguguauaa

SEQ ID NO: 1033218 - RNA, 19 nt, Homo sapiens
  misc_RNA (1)...(19): siRNA sense strand
uuauuugacucgccugaua

SEQ ID NO: 1033219 - RNA, 19 nt, Homo sapiens
  misc_RNA (1)...(19): siRNA sense strand
gaacuugccagacuuaaac

SEQ ID NO: 1033220 - RNA, 19 nt, Homo sapiens
  misc_RNA (1)...(19): siRNA sense strand
gaaaagggaccgagaaaga

SEQ ID NO: 1033221 - RNA, 19 nt, Homo sapiens
  misc_RNA (1)...(19): siRNA sense strand
gaaagugugccuguuauag

SEQ ID NO: 1033222 - RNA, 19 nt, Homo sapiens
  misc_RNA (1)...(19): siRNA sense strand
gagaacggguguguauaau

SEQ ID NO: 1033223 - RNA, 19 nt, Homo sapiens
  misc_RNA (1)...(19): siRNA sense strand
gcagcacaaggaucaaaua

SEQ ID NO: 1033224 - RNA, 19 nt, Homo sapiens
  misc_RNA (1)...(19): siRNA sense strand
gcagaggaauggaagaaaa

SEQ ID NO: 1033225 - RNA, 19 nt, Homo sapiens
  misc_RNA (1)...(19): siRNA sense strand
ugacucgccugauagaaga

SEQ ID NO: 1033226 - RNA, 19 nt, Homo sapiens
  misc_RNA (1)...(19): siRNA sense strand
aaacagagggagcaagaaa

SEQ ID NO: 1033227 - RNA, 19 nt, Homo sapiens
  misc_RNA (1)...(19): siRNA sense strand
cgucaaacuuacagugaaa

SEQ ID NO: 1033228 - RNA, 19 nt, Homo sapiens
  misc_RNA (1)...(19): siRNA sense strand
cgucuacagucugaaauaa

SEQ ID NO: 1033229 - RNA, 19 nt, Homo sapiens
  misc_RNA (1)...(19): siRNA sense strand
gacuaauccuccuguagaa

SEQ ID NO: 1033230 - RNA, 19 nt, Homo sapiens
  misc_RNA (1)...(19): siRNA sense strand
uagcagaucuuucuuacac

SEQ ID NO: 1033231 - RNA, 19 nt, Homo sapiens
  misc_RNA (1)...(19): siRNA sense strand
gugaaagugugccuguuau

SEQ ID NO: 1033232 - RNA, 19 nt, Homo sapiens
  misc_RNA (1)...(19): siRNA sense strand
aaagcaaugccaguaauua

SEQ ID NO: 1033233 - RNA, 19 nt, Homo sapiens
  misc_RNA (1)...(19): siRNA sense strand
aaaaggaacugcaaucaga

SEQ ID NO: 1033234 - RNA, 19 nt, Homo sapiens
  misc_RNA (1)...(19): siRNA sense strand
gcagcuugcuaguguggaa

SEQ ID NO: 1033235 - RNA, 19 nt, Homo sapiens
  misc_RNA (1)...(19): siRNA sense strand
aaagguggcugaauauacu

SEQ ID NO: 1033236 - RNA, 19 nt, Homo sapiens
  misc_RNA (1)...(19): siRNA sense strand
gugaaacguuagaauacaa

SEQ ID NO: 1033237 - RNA, 19 nt, Homo sapiens
  misc_RNA (1)...(19): siRNA sense strand
aaaaucagcugaagcagaa

SEQ ID NO: 1033238 - RNA, 19 nt, Homo sapiens
  misc_RNA (1)...(19): siRNA sense strand
gaggaucgaauaauaagug

SEQ ID NO: 1033239 - RNA, 19 nt, Homo sapiens
  misc_RNA (1)...(19): siRNA sense strand
ccagaaauccgucuacagu

SEQ ID NO: 1033240 - RNA, 19 nt, Homo sapiens
  misc_RNA (1)...(19): siRNA sense strand
ggaccgagaaagagaauca

SEQ ID NO: 1033241 - RNA, 19 nt, Homo sapiens
  misc_RNA (1)...(19): siRNA sense strand
cacagugacucuagaagau

SEQ ID NO: 1033242 - RNA, 19 nt, Homo sapiens
  misc_RNA (1)...(19): siRNA sense strand
uaaaucuucucaccuugga

SEQ ID NO: 1033243 - RNA, 19 nt, Homo sapiens
  misc_RNA (1)...(19): siRNA sense strand
aagcagcacuugagcuaga

SEQ ID NO: 1033244 - RNA, 19 nt, Homo sapiens
  misc_RNA (1)...(19): siRNA sense strand
aaagaacuugccagacuua

SEQ ID NO: 1033245 - RNA, 19 nt, Homo sapiens
  misc_RNA (1)...(19): siRNA sense strand
gcacaaggauaaaaugagu

SEQ ID NO: 1033246 - RNA, 19 nt, Homo sapiens
  misc_RNA (1)...(19): siRNA sense strand
agguugaacuugaaagaaa

SEQ ID NO: 1033247 - RNA, 19 nt, Homo sapiens
  misc_RNA (1)...(19): siRNA sense strand
gcacuugagcuagaaaugu

SEQ ID NO: 1033248 - RNA, 19 nt, Homo sapiens
  misc_RNA (1)...(19): siRNA sense strand
gaucuuucuuacacaguga

SEQ ID NO: 1033249 - RNA, 19 nt, Homo sapiens
  misc_RNA (1)...(19): siRNA sense strand
gcgucaaacuuacagugaa

SEQ ID NO: 1033250 - RNA, 19 nt, Homo sapiens
  misc_RNA (1)...(19): siRNA sense strand
aaaccgagcgacaagaauu

SEQ ID NO: 1033251 - RNA, 19 nt, Homo sapiens
  misc_RNA (1)...(19): siRNA sense strand
agucaaauggcucgucuua

SEQ ID NO: 1033252 - RNA, 19 nt, Homo sapiens
  misc_RNA (1)...(19): siRNA sense strand
ggagcaagaaagucaaaug

SEQ ID NO: 1033253 - RNA, 19 nt, Homo sapiens
  misc_RNA (1)...(19): siRNA sense strand
aaguagaacuagaaagguu

SEQ ID NO: 1033254 - RNA, 19 nt, Homo sapiens
  misc_RNA (1)...(19): siRNA sense strand
cagcacaaggaucaaauaa

SEQ ID NO: 1033255 - RNA, 19 nt, Homo sapiens
  misc_RNA (1)...(19): siRNA sense strand
caaaagccgucuucucuuc

SEQ ID NO: 1033256 - RNA, 19 nt, Homo sapiens
  misc_RNA (1)...(19): siRNA sense strand
aagcaaugccaguaauuaa

SEQ ID NO: 1033257 - RNA, 19 nt, Homo sapiens
  misc_RNA (1)...(19): siRNA sense strand
agaaauccgucuacagucu

SEQ ID NO: 1033258 - RNA, 19 nt, Homo sapiens
  misc_RNA (1)...(19): siRNA sense strand
ccaaagaggacuguauuca

SEQ ID NO: 1033259 - RNA, 19 nt, Homo sapiens
  misc_RNA (1)...(19): siRNA sense strand
ggccaaagaggacuguauu

SEQ ID NO: 1033260 - RNA, 19 nt, Homo sapiens
  misc_RNA (1)...(19): siRNA sense strand
cagaaagaacuggcucaua

SEQ ID NO: 1033261 - RNA, 19 nt, Homo sapiens
  misc_RNA (1)...(19): siRNA sense strand
gagcaagaaagucaaaugg

SEQ ID NO: 1033262 - RNA, 19 nt, Homo sapiens
  misc_RNA (1)...(19): siRNA sense strand
ugaaagugugccuguuaua

SEQ ID NO: 1033263 - RNA, 19 nt, Homo sapiens
  misc_RNA (1)...(19): siRNA sense strand
cuaagucuaaacugcauua

SEQ ID NO: 1033264 - RNA, 19 nt, Homo sapiens
  misc_RNA (1)...(19): siRNA sense strand
ccaaguagaacuagaaagg

SEQ ID NO: 1033265 - RNA, 19 nt, Homo sapiens
  misc_RNA (1)...(19): siRNA sense strand
uaacaucuugucuucagaa

SEQ ID NO: 1033266 - RNA, 19 nt, Homo sapiens
  misc_RNA (1)...(19): siRNA sense strand
ccauggcaguguauuggaa

SEQ ID NO: 1033267 - RNA, 19 nt, Homo sapiens
  misc_RNA (1)...(19): siRNA sense strand
aaacaacaaaccagaaauc

SEQ ID NO: 1033268 - RNA, 19 nt, Homo sapiens
  misc_RNA (1)...(19): siRNA sense strand
guagaacuagaaagguuaa

SEQ ID NO: 1033269 - RNA, 19 nt, Homo sapiens
  misc_RNA (1)...(19): siRNA sense strand
uuucuaacaucuugucuuc

SEQ ID NO: 1033270 - RNA, 19 nt, Homo sapiens
  misc_RNA (1)...(19): siRNA sense strand
caggauagcagaucuuucu

SEQ ID NO: 1033271 - RNA, 19 nt, Homo sapiens
  misc_RNA (1)...(19): siRNA sense strand
cagcaacagcuuaaugaug

SEQ ID NO: 1033272 - RNA, 19 nt, Homo sapiens
  misc_RNA (1)...(19): siRNA sense strand
cgagaaagagaaucacuag

SEQ ID NO: 1033273 - RNA, 19 nt, Homo sapiens
  misc_RNA (1)...(19): siRNA sense strand
gaauacaaagcagcacuug

SEQ ID NO: 1033274 - RNA, 19 nt, Homo sapiens
  misc_RNA (1)...(19): siRNA sense strand
gacagagccucgugaaacg

SEQ ID NO: 1033275 - RNA, 19 nt, Homo sapiens
  misc_RNA (1)...(19): siRNA sense strand
aaucugcaacuaagucuaa

SEQ ID NO: 1033276 - RNA, 19 nt, Homo sapiens
  misc_RNA (1)...(19): siRNA sense strand
aguguuggcgucaaacuua

SEQ ID NO: 1033277 - RNA, 19 nt, Homo sapiens
  misc_RNA (1)...(19): siRNA sense strand
ccagcuuucuaacaucuug

SEQ ID NO: 1033278 - RNA, 19 nt, Homo sapiens
  misc_RNA (1)...(19): siRNA sense strand
aggaucaaauaacaggaua

SEQ ID NO: 1033279 - RNA, 19 nt, Homo sapiens
  misc_RNA (1)...(19): siRNA sense strand
gaucgaauaauaagugaac

SEQ ID NO: 1033280 - RNA, 19 nt, Homo sapiens
  misc_RNA (1)...(19): siRNA sense strand
uggaaaagguugaacuuga

SEQ ID NO: 1033281 - RNA, 19 nt, Homo sapiens
  misc_RNA (1)...(19): siRNA sense strand
agugaaagugugccuguua

SEQ ID NO: 1033282 - RNA, 19 nt, Homo sapiens
  misc_RNA (1)...(19): siRNA sense strand
ugauucaucucagggugua

SEQ ID NO: 1033283 - RNA, 19 nt, Homo sapiens
  misc_RNA (1)...(19): siRNA sense strand
cacgaggaucgaauaauaa

SEQ ID NO: 1033284 - RNA, 19 nt, Homo sapiens
  misc_RNA (1)...(19): siRNA sense strand
uaagaacacuugugaagaa

SEQ ID NO: 1033285 - RNA, 19 nt, Homo sapiens
  misc_RNA (1)...(19): siRNA sense strand
gcuaguaacuccuucaucu

SEQ ID NO: 1033286 - RNA, 19 nt, Homo sapiens
  misc_RNA (1)...(19): siRNA sense strand
gaaaugaaaccauauaagc

SEQ ID NO: 1033287 - RNA, 19 nt, Homo sapiens
  misc_RNA (1)...(19): siRNA sense strand
uaccagagcuccagacauc

SEQ ID NO: 1033288 - RNA, 19 nt, Homo sapiens
  misc_RNA (1)...(19): siRNA sense strand
caugcacgcucacuuuaaa

SEQ ID NO: 1033289 - RNA, 19 nt, Homo sapiens
  misc_RNA (1)...(19): siRNA sense strand
gggcaugcacgcucacuuu

SEQ ID NO: 1033290 - RNA, 19 nt, Homo sapiens
  misc_RNA (1)...(19): siRNA sense strand
gccaagcacucacgcaauc

SEQ ID NO: 1033291 - RNA, 19 nt, Homo sapiens
  misc_RNA (1)...(19): siRNA sense strand
gcaugcacgcucacuuuaa

SEQ ID NO: 1033292 - RNA, 19 nt, Homo sapiens
  misc_RNA (1)...(19): siRNA sense strand
gaacacuugugaagaaaau

SEQ ID NO: 1033293 - RNA, 19 nt, Homo sapiens
  misc_RNA (1)...(19): siRNA sense strand
cuaagaagaaccaccuaaa

SEQ ID NO: 1033294 - RNA, 19 nt, Homo sapiens
  misc_RNA (1)...(19): siRNA sense strand
gaagaaccaccuaaaauuc

SEQ ID NO: 1033295 - RNA, 19 nt, Homo sapiens
  misc_RNA (1)...(19): siRNA sense strand
ggcaugcacgcucacuuua

SEQ ID NO: 1033296 - RNA, 19 nt, Homo sapiens
  misc_RNA (1)...(19): siRNA sense strand
gcacgcucacuuuaaagaa

SEQ ID NO: 1033297 - RNA, 19 nt, Homo sapiens
  misc_RNA (1)...(19): siRNA sense strand
gcacucacgcaaucuuugu

SEQ ID NO: 1033298 - RNA, 19 nt, Homo sapiens
  misc_RNA (1)...(19): siRNA sense strand
gacuuaagaacacuuguga

SEQ ID NO: 1033299 - RNA, 19 nt, Homo sapiens
  misc_RNA (1)...(19): siRNA sense strand
ccaguugacuuaagaacac

SEQ ID NO: 1033300 - RNA, 19 nt, Homo sapiens
  misc_RNA (1)...(19): siRNA sense strand
guaacuccuucaucucauc

SEQ ID NO: 1033301 - RNA, 19 nt, Homo sapiens
  misc_RNA (1)...(19): siRNA sense strand
gacaucacguguacaucug

SEQ ID NO: 1033302 - RNA, 19 nt, Homo sapiens
  misc_RNA (1)...(19): siRNA sense strand
caggucuucuuucccaauu

SEQ ID NO: 1033303 - RNA, 19 nt, Homo sapiens
  misc_RNA (1)...(19): siRNA sense strand
cauauaagccaagcacuca

SEQ ID NO: 1033304 - RNA, 19 nt, Homo sapiens
  misc_RNA (1)...(19): siRNA sense strand
ccucccaguugacuuaaga

SEQ ID NO: 1033305 - RNA, 19 nt, Homo sapiens
  misc_RNA (1)...(19): siRNA sense strand
ggucuucuuucccaauucu

SEQ ID NO: 1033306 - RNA, 19 nt, Homo sapiens
  misc_RNA (1)...(19): siRNA sense strand
aagaacacuugugaagaaa

SEQ ID NO: 1033307 - RNA, 19 nt, Homo sapiens
  misc_RNA (1)...(19): siRNA sense strand
caucucaucauccaacaug

SEQ ID NO: 1033308 - RNA, 19 nt, Homo sapiens
  misc_RNA (1)...(19): siRNA sense strand
uaagaagaaccaccuaaaa

SEQ ID NO: 1033309 - RNA, 19 nt, Homo sapiens
  misc_RNA (1)...(19): siRNA sense strand
gaaaauguggcgucuuuag

SEQ ID NO: 1033310 - RNA, 19 nt, Homo sapiens
  misc_RNA (1)...(19): siRNA sense strand
ccagacaucacguguacau

SEQ ID NO: 1033311 - RNA, 19 nt, Homo sapiens
  misc_RNA (1)...(19): siRNA sense strand
uguccucccaguugacuua

SEQ ID NO: 1033312 - RNA, 19 nt, Homo sapiens
  misc_RNA (1)...(19): siRNA sense strand
cuacaaugacaacuggaaa

SEQ ID NO: 1033313 - RNA, 19 nt, Homo sapiens
  misc_RNA (1)...(19): siRNA sense strand
gcuccagacaucacgugua

SEQ ID NO: 1033314 - RNA, 19 nt, Homo sapiens
  misc_RNA (1)...(19): siRNA sense strand
agaagaaccaccuaaaauu

SEQ ID NO: 1033315 - RNA, 19 nt, Homo sapiens
  misc_RNA (1)...(19): siRNA sense strand
agacaucacguguacaucu

SEQ ID NO: 1033316 - RNA, 19 nt, Homo sapiens
  misc_RNA (1)...(19): siRNA sense strand
uaguaacuccuucaucuca

SEQ ID NO: 1033317 - RNA, 19 nt, Homo sapiens
  misc_RNA (1)...(19): siRNA sense strand
ccuggaaaaugcagucuuu

SEQ ID NO: 1033318 - RNA, 19 nt, Homo sapiens
  misc_RNA (1)...(19): siRNA sense strand
ucuaagaagaaccaccuaa

SEQ ID NO: 1033319 - RNA, 19 nt, Homo sapiens
  misc_RNA (1)...(19): siRNA sense strand
uuaagaacacuugugaaga

SEQ ID NO: 1033320 - RNA, 19 nt, Homo sapiens
  misc_RNA (1)...(19): siRNA sense strand
ggaaaaugcagucuuuaag

SEQ ID NO: 1033321 - RNA, 19 nt, Homo sapiens
  misc_RNA (1)...(19): siRNA sense strand
cuuaagaacacuugugaag

SEQ ID NO: 1033322 - RNA, 19 nt, Homo sapiens
  misc_RNA (1)...(19): siRNA sense strand
agauugaucaugccuacaa

SEQ ID NO: 1033323 - RNA, 19 nt, Homo sapiens
  misc_RNA (1)...(19): siRNA sense strand
ucacguguacaucugaguu

SEQ ID NO: 1033324 - RNA, 19 nt, Homo sapiens
  misc_RNA (1)...(19): siRNA sense strand
acgcucacuuuaaagaaga

SEQ ID NO: 1033325 - RNA, 19 nt, Homo sapiens
  misc_RNA (1)...(19): siRNA sense strand
cacgcucacuuuaaagaag

SEQ ID NO: 1033326 - RNA, 19 nt, Homo sapiens
  misc_RNA (1)...(19): siRNA sense strand
cuccagacaucacguguac

SEQ ID NO: 1033327 - RNA, 19 nt, Homo sapiens
  misc_RNA (1)...(19): siRNA sense strand
caagcacucacgcaaucuu

SEQ ID NO: 1033328 - RNA, 19 nt, Homo sapiens
  misc_RNA (1)...(19): siRNA sense strand
ugacuuaagaacacuugug

SEQ ID NO: 1033329 - RNA, 19 nt, Homo sapiens
  misc_RNA (1)...(19): siRNA sense strand
ggacuuacaccagugauuu

SEQ ID NO: 1033330 - RNA, 19 nt, Homo sapiens
  misc_RNA (1)...(19): siRNA sense strand
gcuugcagauggccuauug

SEQ ID NO: 1033331 - RNA, 19 nt, Homo sapiens
  misc_RNA (1)...(19): siRNA sense strand
gcugucggcuucccuacuu

SEQ ID NO: 1033332 - RNA, 19 nt, Homo sapiens
  misc_RNA (1)...(19): siRNA sense strand
cuauguuccugccuuuaua

SEQ ID NO: 1033333 - RNA, 19 nt, Homo sapiens
  misc_RNA (1)...(19): siRNA sense strand
gacgcugccugcccucaaa

SEQ ID NO: 1033334 - RNA, 19 nt, Homo sapiens
  misc_RNA (1)...(19): siRNA sense strand
ggacugcgggcacaccuau

SEQ ID NO: 1033335 - RNA, 19 nt, Homo sapiens
  misc_RNA (1)...(19): siRNA sense strand
gaucaucucgcccgugcuu

SEQ ID NO: 1033336 - RNA, 19 nt, Homo sapiens
  misc_RNA (1)...(19): siRNA sense strand
ucucaggccuucagcaaca

SEQ ID NO: 1033337 - RNA, 19 nt, Homo sapiens
  misc_RNA (1)...(19): siRNA sense strand
gcucucaggccuucagcaa

SEQ ID NO: 1033338 - RNA, 19 nt, Homo sapiens
  misc_RNA (1)...(19): siRNA sense strand
caccuauguuccugccuuu

SEQ ID NO: 1033339 - RNA, 19 nt, Homo sapiens
  misc_RNA (1)...(19): siRNA sense strand
aaacaucagacugcaaguu

SEQ ID NO: 1033340 - RNA, 19 nt, Homo sapiens
  misc_RNA (1)...(19): siRNA sense strand
ugccugcccucaaacauca

SEQ ID NO: 1033341 - RNA, 19 nt, Homo sapiens
  misc_RNA (1)...(19): siRNA sense strand
cuuccuggcucuucagcuu

SEQ ID NO: 1033342 - RNA, 19 nt, Homo sapiens
  misc_RNA (1)...(19): siRNA sense strand
gagcuggcugccuggagua

SEQ ID NO: 1033343 - RNA, 19 nt, Homo sapiens
  misc_RNA (1)...(19): siRNA sense strand
gaccagugcaagccuacaa

SEQ ID NO: 1033344 - RNA, 19 nt, Homo sapiens
  misc_RNA (1)...(19): siRNA sense strand
gacuuacaccagugauuug

SEQ ID NO: 1033345 - RNA, 19 nt, Homo sapiens
  misc_RNA (1)...(19): siRNA sense strand
uauguuccugccuuuauaa

SEQ ID NO: 1033346 - RNA, 19 nt, Homo sapiens
  misc_RNA (1)...(19): siRNA sense strand
caucagacugcaaguucuu

SEQ ID NO: 1033347 - RNA, 19 nt, Homo sapiens
  misc_RNA (1)...(19): siRNA sense strand
ccuauguuccugccuuuau

SEQ ID NO: 1033348 - RNA, 19 nt, Homo sapiens
  misc_RNA (1)...(19): siRNA sense strand
guaccaaaguuccaaauga

SEQ ID NO: 1033349 - RNA, 19 nt, Homo sapiens
  misc_RNA (1)...(19): siRNA sense strand
ucagugggcucuuuauuug

SEQ ID NO: 1033350 - RNA, 19 nt, Homo sapiens
  misc_RNA (1)...(19): siRNA sense strand
gacaauggauguggucuuu

SEQ ID NO: 1033351 - RNA, 19 nt, Homo sapiens
  misc_RNA (1)...(19): siRNA sense strand
ccaugaugcuuauauacua

SEQ ID NO: 1033352 - RNA, 19 nt, Homo sapiens
  misc_RNA (1)...(19): siRNA sense strand
uguuaucccuugcuuaaua

SEQ ID NO: 1033353 - RNA, 19 nt, Homo sapiens
  misc_RNA (1)...(19): siRNA sense strand
gaaaaucuguggacuacuu

SEQ ID NO: 1033354 - RNA, 19 nt, Homo sapiens
  misc_RNA (1)...(19): siRNA sense strand
caaaagcacuucaaauaga

SEQ ID NO: 1033355 - RNA, 19 nt, Homo sapiens
  misc_RNA (1)...(19): siRNA sense strand
ggacaggcuauuucucaua

SEQ ID NO: 1033356 - RNA, 19 nt, Homo sapiens
  misc_RNA (1)...(19): siRNA sense strand
caucauccucucuguauua

SEQ ID NO: 1033357 - RNA, 19 nt, Homo sapiens
  misc_RNA (1)...(19): siRNA sense strand
ucauugggcucuuugguuu

SEQ ID NO: 1033358 - RNA, 19 nt, Homo sapiens
  misc_RNA (1)...(19): siRNA sense strand
gacaggcuauuucucauau

SEQ ID NO: 1033359 - RNA, 19 nt, Homo sapiens
  misc_RNA (1)...(19): siRNA sense strand
gagaguggagucugccuua

SEQ ID NO: 1033360 - RNA, 19 nt, Homo sapiens
  misc_RNA (1)...(19): siRNA sense strand
ggacuuggcuuguuuuaca

SEQ ID NO: 1033361 - RNA, 19 nt, Homo sapiens
  misc_RNA (1)...(19): siRNA sense strand
ggauaugucucaaggaaaa

SEQ ID NO: 1033362 - RNA, 19 nt, Homo sapiens
  misc_RNA (1)...(19): siRNA sense strand
guacuuggccucguugaaa

SEQ ID NO: 1033363 - RNA, 19 nt, Homo sapiens
  misc_RNA (1)...(19): siRNA sense strand
gcaagacguccaugcugua

SEQ ID NO: 1033364 - RNA, 19 nt, Homo sapiens
  misc_RNA (1)...(19): siRNA sense strand
ggucuuugcuuuuaucuuu

SEQ ID NO: 1033365 - RNA, 19 nt, Homo sapiens
  misc_RNA (1)...(19): siRNA sense strand
ccacaguuaucacguuuag

SEQ ID NO: 1033366 - RNA, 19 nt, Homo sapiens
  misc_RNA (1)...(19): siRNA sense strand
ggacuacuuucugagcauu

SEQ ID NO: 1033367 - RNA, 19 nt, Homo sapiens
  misc_RNA (1)...(19): siRNA sense strand
aauuggaagugccguauuu

SEQ ID NO: 1033368 - RNA, 19 nt, Homo sapiens
  misc_RNA (1)...(19): siRNA sense strand
guuguuaucccuugcuuaa

SEQ ID NO: 1033369 - RNA, 19 nt, Homo sapiens
  misc_RNA (1)...(19): siRNA sense strand
gauguggucuuugcuuuua

SEQ ID NO: 1033370 - RNA, 19 nt, Homo sapiens
  misc_RNA (1)...(19): siRNA sense strand
gagcauuugguauuaugua

SEQ ID NO: 1033371 - RNA, 19 nt, Homo sapiens
  misc_RNA (1)...(19): siRNA sense strand
guuuagcaguccaguguuu

SEQ ID NO: 1033372 - RNA, 19 nt, Homo sapiens
  misc_RNA (1)...(19): siRNA sense strand
cacaaaagcacuucaaaua

SEQ ID NO: 1033373 - RNA, 19 nt, Homo sapiens
  misc_RNA (1)...(19): siRNA sense strand
guguuuacguccauauuug

SEQ ID NO: 1033374 - RNA, 19 nt, Homo sapiens
  misc_RNA (1)...(19): siRNA sense strand
guaaaugguaccaaaguuc

SEQ ID NO: 1033375 - RNA, 19 nt, Homo sapiens
  misc_RNA (1)...(19): siRNA sense strand
gcaauaaugaagacaaugg

SEQ ID NO: 1033376 - RNA, 19 nt, Homo sapiens
  misc_RNA (1)...(19): siRNA sense strand
guaguagccaguaauguug

SEQ ID NO: 1033377 - RNA, 19 nt, Homo sapiens
  misc_RNA (1)...(19): siRNA sense strand
cguaaaugguaccaaaguu

SEQ ID NO: 1033378 - RNA, 19 nt, Homo sapiens
  misc_RNA (1)...(19): siRNA sense strand
ccgccaugaugcuuauaua

SEQ ID NO: 1033379 - RNA, 19 nt, Homo sapiens
  misc_RNA (1)...(19): siRNA sense strand
cguccaugcuguagagauu

SEQ ID NO: 1033380 - RNA, 19 nt, Homo sapiens
  misc_RNA (1)...(19): siRNA sense strand
cauauucauugggcucuuu

SEQ ID NO: 1033381 - RNA, 19 nt, Homo sapiens
  misc_RNA (1)...(19): siRNA sense strand
guuaucccuugcuuaauau

SEQ ID NO: 1033382 - RNA, 19 nt, Homo sapiens
  misc_RNA (1)...(19): siRNA sense strand
cguaguagccaguaauguu

SEQ ID NO: 1033383 - RNA, 19 nt, Homo sapiens
  misc_RNA (1)...(19): siRNA sense strand
caggcuauuucucauauuc

SEQ ID NO: 1033384 - RNA, 19 nt, Homo sapiens
  misc_RNA (1)...(19): siRNA sense strand
gggaacauucgcagcaauu

SEQ ID NO: 1033385 - RNA, 19 nt, Homo sapiens
  misc_RNA (1)...(19): siRNA sense strand
caauggauguggucuuugc

SEQ ID NO: 1033386 - RNA, 19 nt, Homo sapiens
  misc_RNA (1)...(19): siRNA sense strand
gcagggccaguagcaauaa

SEQ ID NO: 1033387 - RNA, 19 nt, Homo sapiens
  misc_RNA (1)...(19): siRNA sense strand
auacuaugcuuaccagaca

SEQ ID NO: 1033388 - RNA, 19 nt, Homo sapiens
  misc_RNA (1)...(19): siRNA sense strand
uggauguggucuuugcuuu

SEQ ID NO: 1033389 - RNA, 19 nt, Homo sapiens
  misc_RNA (1)...(19): siRNA sense strand
gauggaagaaagcuauuca

SEQ ID NO: 1033390 - RNA, 19 nt, Homo sapiens
  misc_RNA (1)...(19): siRNA sense strand
gagauuagugcguuucgau

SEQ ID NO: 1033391 - RNA, 19 nt, Homo sapiens
  misc_RNA (1)...(19): siRNA sense strand
uuggauaugucucaaggaa

SEQ ID NO: 1033392 - RNA, 19 nt, Homo sapiens
  misc_RNA (1)...(19): siRNA sense strand
gaacauucgcagcaauugg

SEQ ID NO: 1033393 - RNA, 19 nt, Homo sapiens
  misc_RNA (1)...(19): siRNA sense strand
gacucuaguuauccuaaga

SEQ ID NO: 1033394 - RNA, 19 nt, Homo sapiens
  misc_RNA (1)...(19): siRNA sense strand
gcaauuggaagugccguau

SEQ ID NO: 1033395 - RNA, 19 nt, Homo sapiens
  misc_RNA (1)...(19): siRNA sense strand
ggagcggccauucguaaau

SEQ ID NO: 1033396 - RNA, 19 nt, Homo sapiens
  misc_RNA (1)...(19): siRNA sense strand
uaaugaagacaauggaugu

SEQ ID NO: 1033397 - RNA, 19 nt, Homo sapiens
  misc_RNA (1)...(19): siRNA sense strand
ucuguggacuacuuucuga

SEQ ID NO: 1033398 - RNA, 19 nt, Homo sapiens
  misc_RNA (1)...(19): siRNA sense strand
cccaaaaggucaacgaauu

SEQ ID NO: 1033399 - RNA, 19 nt, Homo sapiens
  misc_RNA (1)...(19): siRNA sense strand
auucguaaaugguaccaaa

SEQ ID NO: 1033400 - RNA, 19 nt, Homo sapiens
  misc_RNA (1)...(19): siRNA sense strand
gcuauucaggccaccuuaa

SEQ ID NO: 1033401 - RNA, 19 nt, Homo sapiens
  misc_RNA (1)...(19): siRNA sense strand
agugggcucuuuauuuguu

SEQ ID NO: 1033402 - RNA, 19 nt, Homo sapiens
  misc_RNA (1)...(19): siRNA sense strand
gugggcucuuuauuuguua

SEQ ID NO: 1033403 - RNA, 19 nt, Homo sapiens
  misc_RNA (1)...(19): siRNA sense strand
gauuagugcguuucgaugu

SEQ ID NO: 1033404 - RNA, 19 nt, Homo sapiens
  misc_RNA (1)...(19): siRNA sense strand
uguaguacuuggccucguu

SEQ ID NO: 1033405 - RNA, 19 nt, Homo sapiens
  misc_RNA (1)...(19): siRNA sense strand
ggaacauucgcagcaauug

SEQ ID NO: 1033406 - RNA, 19 nt, Homo sapiens
  misc_RNA (1)...(19): siRNA sense strand
uccaaaugcuaguuguuau

SEQ ID NO: 1033407 - RNA, 19 nt, Homo sapiens
  misc_RNA (1)...(19): siRNA sense strand
cuaccgccaugaugcuuau

SEQ ID NO: 1033408 - RNA, 19 nt, Homo sapiens
  misc_RNA (1)...(19): siRNA sense strand
ccaaaaggucaacgaauuu

SEQ ID NO: 1033409 - RNA, 19 nt, Homo sapiens
  misc_RNA (1)...(19): siRNA sense strand
gggccaguagcaauaauga

SEQ ID NO: 1033410 - RNA, 19 nt, Homo sapiens
  misc_RNA (1)...(19): siRNA sense strand
gucaucauccucucuguau

SEQ ID NO: 1033411 - RNA, 19 nt, Homo sapiens
  misc_RNA (1)...(19): siRNA sense strand
uuucugagcauuugguauu

SEQ ID NO: 1033412 - RNA, 19 nt, Homo sapiens
  misc_RNA (1)...(19): siRNA sense strand
agacguccaugcuguagag

SEQ ID NO: 1033413 - RNA, 19 nt, Homo sapiens
  misc_RNA (1)...(19): siRNA sense strand
ugccacaguuaucacguuu

SEQ ID NO: 1033414 - RNA, 19 nt, Homo sapiens
  misc_RNA (1)...(19): siRNA sense strand
cucagugggcucuuuauuu

SEQ ID NO: 1033415 - RNA, 19 nt, Homo sapiens
  misc_RNA (1)...(19): siRNA sense strand
cgauguguguuccaaaugc

SEQ ID NO: 1033416 - RNA, 19 nt, Homo sapiens
  misc_RNA (1)...(19): siRNA sense strand
gccaguagcaauaaugaag

SEQ ID NO: 1033417 - RNA, 19 nt, Homo sapiens
  misc_RNA (1)...(19): siRNA sense strand
gggaaaaucuguggacuac

SEQ ID NO: 1033418 - RNA, 19 nt, Homo sapiens
  misc_RNA (1)...(19): siRNA sense strand
uuccaaaugcuaguuguua

SEQ ID NO: 1033419 - RNA, 19 nt, Homo sapiens
  misc_RNA (1)...(19): siRNA sense strand
uaucgugagaccaccauuu

SEQ ID NO: 1033420 - RNA, 19 nt, Homo sapiens
  misc_RNA (1)...(19): siRNA sense strand
guagcaauaaugaagacaa

SEQ ID NO: 1033421 - RNA, 19 nt, Homo sapiens
  misc_RNA (1)...(19): siRNA sense strand
ccaguagcaauaaugaaga

SEQ ID NO: 1033422 - RNA, 19 nt, Homo sapiens
  misc_RNA (1)...(19): siRNA sense strand
gcuuauauacuaugcuuac

SEQ ID NO: 1033423 - RNA, 19 nt, Homo sapiens
  misc_RNA (1)...(19): siRNA sense strand
caauaaugaagacaaugga

SEQ ID NO: 1033424 - RNA, 19 nt, Homo sapiens
  misc_RNA (1)...(19): siRNA sense strand
cguugaaagugucaucauc

SEQ ID NO: 1033425 - RNA, 19 nt, Homo sapiens
  misc_RNA (1)...(19): siRNA sense strand
acaguuaucacguuuagca

SEQ ID NO: 1033426 - RNA, 19 nt, Homo sapiens
  misc_RNA (1)...(19): siRNA sense strand
ucaacgaauuuuccucauu

SEQ ID NO: 1033427 - RNA, 19 nt, Homo sapiens
  misc_RNA (1)...(19): siRNA sense strand
gguaccaaaguuccaaaug

SEQ ID NO: 1033428 - RNA, 19 nt, Homo sapiens
  misc_RNA (1)...(19): siRNA sense strand
ucaucauccucucuguauu

SEQ ID NO: 1033429 - RNA, 19 nt, Homo sapiens
  misc_RNA (1)...(19): siRNA sense strand
ccaaaugcuaguuguuauc

SEQ ID NO: 1033430 - RNA, 19 nt, Homo sapiens
  misc_RNA (1)...(19): siRNA sense strand
uguagagauuagugcguuu

SEQ ID NO: 1033431 - RNA, 19 nt, Homo sapiens
  misc_RNA (1)...(19): siRNA sense strand
uggcuuguuuuacacauua

SEQ ID NO: 1033432 - RNA, 19 nt, Homo sapiens
  misc_RNA (1)...(19): siRNA sense strand
ggugcuggcucugccuuuc

SEQ ID NO: 1033433 - RNA, 19 nt, Homo sapiens
  misc_RNA (1)...(19): siRNA sense strand
cugcaucgacucuaguuau

SEQ ID NO: 1033434 - RNA, 19 nt, Homo sapiens
  misc_RNA (1)...(19): siRNA sense strand
auuauugucugccuuccuu

SEQ ID NO: 1033435 - RNA, 19 nt, Homo sapiens
  misc_RNA (1)...(19): siRNA sense strand
cugagcauuugguauuaug

SEQ ID NO: 1033436 - RNA, 19 nt, Homo sapiens
  misc_RNA (1)...(19): siRNA sense strand
ggugcucucugcguaguag

SEQ ID NO: 1033437 - RNA, 19 nt, Homo sapiens
  misc_RNA (1)...(19): siRNA sense strand
ggcuauuucucauauucau

SEQ ID NO: 1033438 - RNA, 19 nt, Homo sapiens
  misc_RNA (1)...(19): siRNA sense strand
caauuggaagugccguauu

SEQ ID NO: 1033439 - RNA, 19 nt, Homo sapiens
  misc_RNA (1)...(19): siRNA sense strand
gccaugaugcuuauauacu

SEQ ID NO: 1033440 - RNA, 19 nt, Homo sapiens
  misc_RNA (1)...(19): siRNA sense strand
cgacucuaguuauccuaag

SEQ ID NO: 1033441 - RNA, 19 nt, Homo sapiens
  misc_RNA (1)...(19): siRNA sense strand
ggauggaagaaagcuauuc

SEQ ID NO: 1033442 - RNA, 19 nt, Homo sapiens
  misc_RNA (1)...(19): siRNA sense strand
gaggucaacucuuagauua

SEQ ID NO: 1033443 - RNA, 19 nt, Homo sapiens
  misc_RNA (1)...(19): siRNA sense strand
gagcacauauggagaagaa

SEQ ID NO: 1033444 - RNA, 19 nt, Homo sapiens
  misc_RNA (1)...(19): siRNA sense strand
gaagucaaaccuuaucaua

SEQ ID NO: 1033445 - RNA, 19 nt, Homo sapiens
  misc_RNA (1)...(19): siRNA sense strand
gagaauacauacuggagaa

SEQ ID NO: 1033446 - RNA, 19 nt, Homo sapiens
  misc_RNA (1)...(19): siRNA sense strand
acacagacuuuguuucuuu

SEQ ID NO: 1033447 - RNA, 19 nt, Homo sapiens
  misc_RNA (1)...(19): siRNA sense strand
gaacucacagcucaucaua

SEQ ID NO: 1033448 - RNA, 19 nt, Homo sapiens
  misc_RNA (1)...(19): siRNA sense strand
gagaaacccuaugaaugua

SEQ ID NO: 1033449 - RNA, 19 nt, Homo sapiens
  misc_RNA (1)...(19): siRNA sense strand
gaaaagcacuuaaucugaa

SEQ ID NO: 1033450 - RNA, 19 nt, Homo sapiens
  misc_RNA (1)...(19): siRNA sense strand
gaaaagcccucagccauaa

SEQ ID NO: 1033451 - RNA, 19 nt, Homo sapiens
  misc_RNA (1)...(19): siRNA sense strand
cagacuugcuuaauaguaa

SEQ ID NO: 1033452 - RNA, 19 nt, Homo sapiens
  misc_RNA (1)...(19): siRNA sense strand
gagagaaacccuaugaaug

SEQ ID NO: 1033453 - RNA, 19 nt, Homo sapiens
  misc_RNA (1)...(19): siRNA sense strand
gaggcgaucucuuuggaaa

SEQ ID NO: 1033454 - RNA, 19 nt, Homo sapiens
  misc_RNA (1)...(19): siRNA sense strand
caucaaacaucagagaauu

SEQ ID NO: 1033455 - RNA, 19 nt, Homo sapiens
  misc_RNA (1)...(19): siRNA sense strand
ggagagaaacccuaugaau

SEQ ID NO: 1033456 - RNA, 19 nt, Homo sapiens
  misc_RNA (1)...(19): siRNA sense strand
guucaaccuuucauuugua

SEQ ID NO: 1033457 - RNA, 19 nt, Homo sapiens
  misc_RNA (1)...(19): siRNA sense strand
ccauaugaaugcaauguau

SEQ ID NO: 1033458 - RNA, 19 nt, Homo sapiens
  misc_RNA (1)...(19): siRNA sense strand
gaaaauccuuuauccagaa

SEQ ID NO: 1033459 - RNA, 19 nt, Homo sapiens
  misc_RNA (1)...(19): siRNA sense strand
caggaaagcagacugauga

SEQ ID NO: 1033460 - RNA, 19 nt, Homo sapiens
  misc_RNA (1)...(19): siRNA sense strand
ggucaacucuuagauuaca

SEQ ID NO: 1033461 - RNA, 19 nt, Homo sapiens
  misc_RNA (1)...(19): siRNA sense strand
ggagagaaaccauaugagu

SEQ ID NO: 1033462 - RNA, 19 nt, Homo sapiens
  misc_RNA (1)...(19): siRNA sense strand
agucaaaccuuaucauaca

SEQ ID NO: 1033463 - RNA, 19 nt, Homo sapiens
  misc_RNA (1)...(19): siRNA sense strand
agagaaacccuaugaaugu

SEQ ID NO: 1033464 - RNA, 19 nt, Homo sapiens
  misc_RNA (1)...(19): siRNA sense strand
cacagacuuuguuucuuua

SEQ ID NO: 1033465 - RNA, 19 nt, Homo sapiens
  misc_RNA (1)...(19): siRNA sense strand
uuaagucacuccucauuag

SEQ ID NO: 1033466 - RNA, 19 nt, Homo sapiens
  misc_RNA (1)...(19): siRNA sense strand
ggagagagaccacagaaac

SEQ ID NO: 1033467 - RNA, 19 nt, Homo sapiens
  misc_RNA (1)...(19): siRNA sense strand
gagaagaagcccuaugagu

SEQ ID NO: 1033468 - RNA, 19 nt, Homo sapiens
  misc_RNA (1)...(19): siRNA sense strand
ggaaaagcccucagccaua

SEQ ID NO: 1033469 - RNA, 19 nt, Homo sapiens
  misc_RNA (1)...(19): siRNA sense strand
gagcgacccuaugagugua

SEQ ID NO: 1033470 - RNA, 19 nt, Homo sapiens
  misc_RNA (1)...(19): siRNA sense strand
cauaagagaauacauacug

SEQ ID NO: 1033471 - RNA, 19 nt, Homo sapiens
  misc_RNA (1)...(19): siRNA sense strand
acucacagcucaucauaca

SEQ ID NO: 1033472 - RNA, 19 nt, Homo sapiens
  misc_RNA (1)...(19): siRNA sense strand
caggagagcgacccuauga

SEQ ID NO: 1033473 - RNA, 19 nt, Homo sapiens
  misc_RNA (1)...(19): siRNA sense strand
gagaaaagccauaugaaug

SEQ ID NO: 1033474 - RNA, 19 nt, Homo sapiens
  misc_RNA (1)...(19): siRNA sense strand
ggaaggccuuuagcaggaa

SEQ ID NO: 1033475 - RNA, 19 nt, Homo sapiens
  misc_RNA (1)...(19): siRNA sense strand
gaaaagcacuucucuaccu

SEQ ID NO: 1033476 - RNA, 19 nt, Homo sapiens
  misc_RNA (1)...(19): siRNA sense strand
ggagagcgacccuaugagu

SEQ ID NO: 1033477 - RNA, 19 nt, Homo sapiens
  misc_RNA (1)...(19): siRNA sense strand
agucaaaccucauuguaca

SEQ ID NO: 1033478 - RNA, 19 nt, Homo sapiens
  misc_RNA (1)...(19): siRNA sense strand
ucacuccucauuagucaua

SEQ ID NO: 1033479 - RNA, 19 nt, Homo sapiens
  misc_RNA (1)...(19): siRNA sense strand
aaagcagacugaugagugu

SEQ ID NO: 1033480 - RNA, 19 nt, Homo sapiens
  misc_RNA (1)...(19): siRNA sense strand
gagaaaccauaugaguguu

SEQ ID NO: 1033481 - RNA, 19 nt, Homo sapiens
  misc_RNA (1)...(19): siRNA sense strand
caggagagaaaccauauga

SEQ ID NO: 1033482 - RNA, 19 nt, Homo sapiens
  misc_RNA (1)...(19): siRNA sense strand
ggaaaagcacuuaaucuga

SEQ ID NO: 1033483 - RNA, 19 nt, Homo sapiens
  misc_RNA (1)...(19): siRNA sense strand
ccagucaaaccucauugua

SEQ ID NO: 1033484 - RNA, 19 nt, Homo sapiens
  misc_RNA (1)...(19): siRNA sense strand
ccucauuagucauaagaga

SEQ ID NO: 1033485 - RNA, 19 nt, Homo sapiens
  misc_RNA (1)...(19): siRNA sense strand
caggagagaaacccuauga

SEQ ID NO: 1033486 - RNA, 19 nt, Homo sapiens
  misc_RNA (1)...(19): siRNA sense strand
gcaggaaagcagacugaug

SEQ ID NO: 1033487 - RNA, 19 nt, Homo sapiens
  misc_RNA (1)...(19): siRNA sense strand
gaaugcaauguauguaaga

SEQ ID NO: 1033488 - RNA, 19 nt, Homo sapiens
  misc_RNA (1)...(19): siRNA sense strand
ugaaugcaauguauguaag

SEQ ID NO: 1033489 - RNA, 19 nt, Homo sapiens
  misc_RNA (1)...(19): siRNA sense strand
uagaagcuaugcaggaaag

SEQ ID NO: 1033490 - RNA, 19 nt, Homo sapiens
  misc_RNA (1)...(19): siRNA sense strand
gaacucauacaggagagaa

SEQ ID NO: 1033491 - RNA, 19 nt, Homo sapiens
  misc_RNA (1)...(19): siRNA sense strand
caaaccuuaucauacauca

SEQ ID NO: 1033492 - RNA, 19 nt, Homo sapiens
  misc_RNA (1)...(19): siRNA sense strand
gaaacccuaugaauguacu

SEQ ID NO: 1033493 - RNA, 19 nt, Homo sapiens
  misc_RNA (1)...(19): siRNA sense strand
ccauaugaguguuccgaau

SEQ ID NO: 1033494 - RNA, 19 nt, Homo sapiens
  misc_RNA (1)...(19): siRNA sense strand
agagaaaccauaugagugu

SEQ ID NO: 1033495 - RNA, 19 nt, Homo sapiens
  misc_RNA (1)...(19): siRNA sense strand
acaguggaguagaauauuc

SEQ ID NO: 1033496 - RNA, 19 nt, Homo sapiens
  misc_RNA (1)...(19): siRNA sense strand
acacaggagagaaaccaua

SEQ ID NO: 1033497 - RNA, 19 nt, Homo sapiens
  misc_RNA (1)...(19): siRNA sense strand
gcagacugaugaguguaau

SEQ ID NO: 1033498 - RNA, 19 nt, Homo sapiens
  misc_RNA (1)...(19): siRNA sense strand
acacaccagagaauucaua

SEQ ID NO: 1033499 - RNA, 19 nt, Homo sapiens
  misc_RNA (1)...(19): siRNA sense strand
uggagaagaagcccuauga

SEQ ID NO: 1033500 - RNA, 19 nt, Homo sapiens
  misc_RNA (1)...(19): siRNA sense strand
auucagacuugcuuaauag

SEQ ID NO: 1033501 - RNA, 19 nt, Homo sapiens
  misc_RNA (1)...(19): siRNA sense strand
gaaugugggaaggccuuua

SEQ ID NO: 1033502 - RNA, 19 nt, Homo sapiens
  misc_RNA (1)...(19): siRNA sense strand
ucacagcucaucauacaca

SEQ ID NO: 1033503 - RNA, 19 nt, Homo sapiens
  misc_RNA (1)...(19): siRNA sense strand
ggagaaaagccauaugaau

SEQ ID NO: 1033504 - RNA, 19 nt, Homo sapiens
  misc_RNA (1)...(19): siRNA sense strand
ucagacuugcuuaauagua

SEQ ID NO: 1033505 - RNA, 19 nt, Homo sapiens
  misc_RNA (1)...(19): siRNA sense strand
aggccaaccucaucaaaca

SEQ ID NO: 1033506 - RNA, 19 nt, Homo sapiens
  misc_RNA (1)...(19): siRNA sense strand
caaccuuucauuuguacuu

SEQ ID NO: 1033507 - RNA, 19 nt, Homo sapiens
  misc_RNA (1)...(19): siRNA sense strand
cagugaauguggaaagaca

SEQ ID NO: 1033508 - RNA, 19 nt, Homo sapiens
  misc_RNA (1)...(19): siRNA sense strand
guacaccagagagcacaua

SEQ ID NO: 1033509 - RNA, 19 nt, Homo sapiens
  misc_RNA (1)...(19): siRNA sense strand
ucaaacaucagagaauuca

SEQ ID NO: 1033510 - RNA, 19 nt, Homo sapiens
  misc_RNA (1)...(19): siRNA sense strand
ugaguguaaugaauuugga

SEQ ID NO: 1033511 - RNA, 19 nt, Homo sapiens
  misc_RNA (1)...(19): siRNA sense strand
cauaugaguguuccgaaug

SEQ ID NO: 1033512 - RNA, 19 nt, Homo sapiens
  misc_RNA (1)...(19): siRNA sense strand
aaacaucagagaauucaca

SEQ ID NO: 1033513 - RNA, 19 nt, Homo sapiens
  misc_RNA (1)...(19): siRNA sense strand
aaagccauaugaaugcaau

SEQ ID NO: 1033514 - RNA, 19 nt, Homo sapiens
  misc_RNA (1)...(19): siRNA sense strand
ccacacaccagagaauuca

SEQ ID NO: 1033515 - RNA, 19 nt, Homo sapiens
  misc_RNA (1)...(19): siRNA sense strand
agacugaugaguguaauga

SEQ ID NO: 1033516 - RNA, 19 nt, Homo sapiens
  misc_RNA (1)...(19): siRNA sense strand
uuuaagucacuccucauua

SEQ ID NO: 1033517 - RNA, 19 nt, Homo sapiens
  misc_RNA (1)...(19): siRNA sense strand
acugaugaguguaaugaau

SEQ ID NO: 1033518 - RNA, 19 nt, Homo sapiens
  misc_RNA (1)...(19): siRNA sense strand
agagagcacauauggagaa

SEQ ID NO: 1033519 - RNA, 19 nt, Homo sapiens
  misc_RNA (1)...(19): siRNA sense strand
caccagagagcacauaugg

SEQ ID NO: 1033520 - RNA, 19 nt, Homo sapiens
  misc_RNA (1)...(19): siRNA sense strand
uaaggccaaccucaucaaa

SEQ ID NO: 1033521 - RNA, 19 nt, Homo sapiens
  misc_RNA (1)...(19): siRNA sense strand
ucauuuguacuuacuguga

SEQ ID NO: 1033522 - RNA, 19 nt, Homo sapiens
  misc_RNA (1)...(19): siRNA sense strand
ucauacaucagaagauuca

SEQ ID NO: 1033523 - RNA, 19 nt, Homo sapiens
  misc_RNA (1)...(19): siRNA sense strand
gccauaugaaugcaaugua

SEQ ID NO: 1033524 - RNA, 19 nt, Homo sapiens
  misc_RNA (1)...(19): siRNA sense strand
gaauguggaaaauccuuua

SEQ ID NO: 1033525 - RNA, 19 nt, Homo sapiens
  misc_RNA (1)...(19): siRNA sense strand
ggaaagcagacugaugagu

SEQ ID NO: 1033526 - RNA, 19 nt, Homo sapiens
  misc_RNA (1)...(19): siRNA sense strand
cgacucaguguccaucaga

SEQ ID NO: 1033527 - RNA, 19 nt, Homo sapiens
  misc_RNA (1)...(19): siRNA sense strand
aagcacuucucuaccugaa

SEQ ID NO: 1033528 - RNA, 19 nt, Homo sapiens
  misc_RNA (1)...(19): siRNA sense strand
gagagcacauauggagaag

SEQ ID NO: 1033529 - RNA, 19 nt, Homo sapiens
  misc_RNA (1)...(19): siRNA sense strand
ccauaaggccaaccucauc

SEQ ID NO: 1033530 - RNA, 19 nt, Homo sapiens
  misc_RNA (1)...(19): siRNA sense strand
cauaaggccaaccucauca

SEQ ID NO: 1033531 - RNA, 19 nt, Homo sapiens
  misc_RNA (1)...(19): siRNA sense strand
aaccuuaucauacaucaga

SEQ ID NO: 1033532 - RNA, 19 nt, Homo sapiens
  misc_RNA (1)...(19): siRNA sense strand
cuaugaguguaacgaaugu

SEQ ID NO: 1033533 - RNA, 19 nt, Homo sapiens
  misc_RNA (1)...(19): siRNA sense strand
ccaaccucaucaaacauca

SEQ ID NO: 1033534 - RNA, 19 nt, Homo sapiens
  misc_RNA (1)...(19): siRNA sense strand
cugaugaguguaaugaauu

SEQ ID NO: 1033535 - RNA, 19 nt, Homo sapiens
  misc_RNA (1)...(19): siRNA sense strand
ccaccagucaaaccucauu

SEQ ID NO: 1033536 - RNA, 19 nt, Homo sapiens
  misc_RNA (1)...(19): siRNA sense strand
gaaaagccauaugaaugca

SEQ ID NO: 1033537 - RNA, 19 nt, Homo sapiens
  misc_RNA (1)...(19): siRNA sense strand
cacaggagagaaaccauau

SEQ ID NO: 1033538 - RNA, 19 nt, Homo sapiens
  misc_RNA (1)...(19): siRNA sense strand
gaaccaaaccccaauugag

SEQ ID NO: 1033539 - RNA, 19 nt, Homo sapiens
  misc_RNA (1)...(19): siRNA sense strand
gaguguaacgaaugugcaa

SEQ ID NO: 1033540 - RNA, 19 nt, Homo sapiens
  misc_RNA (1)...(19): siRNA sense strand
ccuaugaguguaacgaaug

SEQ ID NO: 1033541 - RNA, 19 nt, Homo sapiens
  misc_RNA (1)...(19): siRNA sense strand
ggagaagaagcccuaugag

SEQ ID NO: 1033542 - RNA, 19 nt, Homo sapiens
  misc_RNA (1)...(19): siRNA sense strand
ugaaagcacuggacaauua

SEQ ID NO: 1033543 - RNA, 19 nt, Homo sapiens
  misc_RNA (1)...(19): siRNA sense strand
cagcacagcuacagaauuu

SEQ ID NO: 1033544 - RNA, 19 nt, Homo sapiens
  misc_RNA (1)...(19): siRNA sense strand
ucacgaagcugucuuguau

SEQ ID NO: 1033545 - RNA, 19 nt, Homo sapiens
  misc_RNA (1)...(19): siRNA sense strand
ggagaugcuuuauucauuu

SEQ ID NO: 1033546 - RNA, 19 nt, Homo sapiens
  misc_RNA (1)...(19): siRNA sense strand
gaaagacuaugacgacaga

SEQ ID NO: 1033547 - RNA, 19 nt, Homo sapiens
  misc_RNA (1)...(19): siRNA sense strand
ggagaaaucaucauggaua

SEQ ID NO: 1033548 - RNA, 19 nt, Homo sapiens
  misc_RNA (1)...(19): siRNA sense strand
gcaaagccaaugugauuua

SEQ ID NO: 1033549 - RNA, 19 nt, Homo sapiens
  misc_RNA (1)...(19): siRNA sense strand
gccaacagcuuuagacauu

SEQ ID NO: 1033550 - RNA, 19 nt, Homo sapiens
  misc_RNA (1)...(19): siRNA sense strand
gagaaaucaucauggauaa

SEQ ID NO: 1033551 - RNA, 19 nt, Homo sapiens
  misc_RNA (1)...(19): siRNA sense strand
gcaaugaagccauguuuga

SEQ ID NO: 1033552 - RNA, 19 nt, Homo sapiens
  misc_RNA (1)...(19): siRNA sense strand
gaagaucaaguaccaauug

SEQ ID NO: 1033553 - RNA, 19 nt, Homo sapiens
  misc_RNA (1)...(19): siRNA sense strand
ccaggaggcuacucuuuaa

SEQ ID NO: 1033554 - RNA, 19 nt, Homo sapiens
  misc_RNA (1)...(19): siRNA sense strand
gcaaauggaugcagaucuc

SEQ ID NO: 1033555 - RNA, 19 nt, Homo sapiens
  misc_RNA (1)...(19): siRNA sense strand
gagauucgcuugcuuugca

SEQ ID NO: 1033556 - RNA, 19 nt, Homo sapiens
  misc_RNA (1)...(19): siRNA sense strand
ggaaacauacucauaguca

SEQ ID NO: 1033557 - RNA, 19 nt, Homo sapiens
  misc_RNA (1)...(19): siRNA sense strand
gaaugggaauggauccaaa

SEQ ID NO: 1033558 - RNA, 19 nt, Homo sapiens
  misc_RNA (1)...(19): siRNA sense strand
gcaugugccucuccuucua

SEQ ID NO: 1033559 - RNA, 19 nt, Homo sapiens
  misc_RNA (1)...(19): siRNA sense strand
gcagaucaauauaccucua

SEQ ID NO: 1033560 - RNA, 19 nt, Homo sapiens
  misc_RNA (1)...(19): siRNA sense strand
gaaagcaaagccaauguga

SEQ ID NO: 1033561 - RNA, 19 nt, Homo sapiens
  misc_RNA (1)...(19): siRNA sense strand
gaucaaguaccaauuguug

SEQ ID NO: 1033562 - RNA, 19 nt, Homo sapiens
  misc_RNA (1)...(19): siRNA sense strand
ggaagaccucggugaauuu

SEQ ID NO: 1033563 - RNA, 19 nt, Homo sapiens
  misc_RNA (1)...(19): siRNA sense strand
caaugucugucucauggua

SEQ ID NO: 1033564 - RNA, 19 nt, Homo sapiens
  misc_RNA (1)...(19): siRNA sense strand
gaguauguccgaagacuuu

SEQ ID NO: 1033565 - RNA, 19 nt, Homo sapiens
  misc_RNA (1)...(19): siRNA sense strand
gaacugaucggcugagucu

SEQ ID NO: 1033566 - RNA, 19 nt, Homo sapiens
  misc_RNA (1)...(19): siRNA sense strand
uaaccucccucuucagaug

SEQ ID NO: 1033567 - RNA, 19 nt, Homo sapiens
  misc_RNA (1)...(19): siRNA sense strand
ucucacaccaguucuauua

SEQ ID NO: 1033568 - RNA, 19 nt, Homo sapiens
  misc_RNA (1)...(19): siRNA sense strand
caacacagagaaagagaaa

SEQ ID NO: 1033569 - RNA, 19 nt, Homo sapiens
  misc_RNA (1)...(19): siRNA sense strand
gggaagaguuuacuaugag

SEQ ID NO: 1033570 - RNA, 19 nt, Homo sapiens
  misc_RNA (1)...(19): siRNA sense strand
gaaaucaucauggauaauc

SEQ ID NO: 1033571 - RNA, 19 nt, Homo sapiens
  misc_RNA (1)...(19): siRNA sense strand
caacagcacagcuacagaa

SEQ ID NO: 1033572 - RNA, 19 nt, Homo sapiens
  misc_RNA (1)...(19): siRNA sense strand
caaugaagaucaaguacca

SEQ ID NO: 1033573 - RNA, 19 nt, Homo sapiens
  misc_RNA (1)...(19): siRNA sense strand
gaaggagauucgcuugcuu

SEQ ID NO: 1033574 - RNA, 19 nt, Homo sapiens
  misc_RNA (1)...(19): siRNA sense strand
cauuaaagaucgacaugga

SEQ ID NO: 1033575 - RNA, 19 nt, Homo sapiens
  misc_RNA (1)...(19): siRNA sense strand
ccaguucuauuacacaaga

SEQ ID NO: 1033576 - RNA, 19 nt, Homo sapiens
  misc_RNA (1)...(19): siRNA sense strand
aagcaaagccaaugugauu

SEQ ID NO: 1033577 - RNA, 19 nt, Homo sapiens
  misc_RNA (1)...(19): siRNA sense strand
gaucaaaucaaaguucuug

SEQ ID NO: 1033578 - RNA, 19 nt, Homo sapiens
  misc_RNA (1)...(19): siRNA sense strand
uggagaugcuuuauucauu

SEQ ID NO: 1033579 - RNA, 19 nt, Homo sapiens
  misc_RNA (1)...(19): siRNA sense strand
ggacaauuaccaacaacuu

SEQ ID NO: 1033580 - RNA, 19 nt, Homo sapiens
  misc_RNA (1)...(19): siRNA sense strand
guacacaccagaagaacuu

SEQ ID NO: 1033581 - RNA, 19 nt, Homo sapiens
  misc_RNA (1)...(19): siRNA sense strand
gaaaaugacgcaacaaaug

SEQ ID NO: 1033582 - RNA, 19 nt, Homo sapiens
  misc_RNA (1)...(19): siRNA sense strand
aaaguggaauggaguaugu

SEQ ID NO: 1033583 - RNA, 19 nt, Homo sapiens
  misc_RNA (1)...(19): siRNA sense strand
acucugagaugcacaauca

SEQ ID NO: 1033584 - RNA, 19 nt, Homo sapiens
  misc_RNA (1)...(19): siRNA sense strand
caaagccaaugugauuuau

SEQ ID NO: 1033585 - RNA, 19 nt, Homo sapiens
  misc_RNA (1)...(19): siRNA sense strand
guuugaacuugguauagua

SEQ ID NO: 1033586 - RNA, 19 nt, Homo sapiens
  misc_RNA (1)...(19): siRNA sense strand
cacaggagguguuggaaau

SEQ ID NO: 1033587 - RNA, 19 nt, Homo sapiens
  misc_RNA (1)...(19): siRNA sense strand
gaagauccgugaaaacaau

SEQ ID NO: 1033588 - RNA, 19 nt, Homo sapiens
  misc_RNA (1)...(19): siRNA sense strand
ugggaagaguuuacuauga

SEQ ID NO: 1033589 - RNA, 19 nt, Homo sapiens
  misc_RNA (1)...(19): siRNA sense strand
uuacaucucugucagucaa

SEQ ID NO: 1033590 - RNA, 19 nt, Homo sapiens
  misc_RNA (1)...(19): siRNA sense strand
aggcaaagcauaccaauau

SEQ ID NO: 1033591 - RNA, 19 nt, Homo sapiens
  misc_RNA (1)...(19): siRNA sense strand
gaaagagaaacagcugaaa

SEQ ID NO: 1033592 - RNA, 19 nt, Homo sapiens
  misc_RNA (1)...(19): siRNA sense strand
gagccacucuuccuucgau

SEQ ID NO: 1033593 - RNA, 19 nt, Homo sapiens
  misc_RNA (1)...(19): siRNA sense strand
gaacuuccgccucuacaca

SEQ ID NO: 1033594 - RNA, 19 nt, Homo sapiens
  misc_RNA (1)...(19): siRNA sense strand
acuaugagcccauuaaaga

SEQ ID NO: 1033595 - RNA, 19 nt, Homo sapiens
  misc_RNA (1)...(19): siRNA sense strand
ggagaaagcaaagccaaug

SEQ ID NO: 1033596 - RNA, 19 nt, Homo sapiens
  misc_RNA (1)...(19): siRNA sense strand
agaucgacauggaaacaua

SEQ ID NO: 1033597 - RNA, 19 nt, Homo sapiens
  misc_RNA (1)...(19): siRNA sense strand
ucucuuuccuggauuauau

SEQ ID NO: 1033598 - RNA, 19 nt, Homo sapiens
  misc_RNA (1)...(19): siRNA sense strand
guaguaaccagguauaaag

SEQ ID NO: 1033599 - RNA, 19 nt, Homo sapiens
  misc_RNA (1)...(19): siRNA sense strand
ggaaggagauucgcuugcu

SEQ ID NO: 1033600 - RNA, 19 nt, Homo sapiens
  misc_RNA (1)...(19): siRNA sense strand
aggaagaccucggugaauu

SEQ ID NO: 1033601 - RNA, 19 nt, Homo sapiens
  misc_RNA (1)...(19): siRNA sense strand
caacagcuuuagacauucu

SEQ ID NO: 1033602 - RNA, 19 nt, Homo sapiens
  misc_RNA (1)...(19): siRNA sense strand
ggacucuacauagccauua

SEQ ID NO: 1033603 - RNA, 19 nt, Homo sapiens
  misc_RNA (1)...(19): siRNA sense strand
ucacaccaguucuauuaca

SEQ ID NO: 1033604 - RNA, 19 nt, Homo sapiens
  misc_RNA (1)...(19): siRNA sense strand
cagcgucucuuuccuggau

SEQ ID NO: 1033605 - RNA, 19 nt, Homo sapiens
  misc_RNA (1)...(19): siRNA sense strand
gaggcaaagcauaccaaua

SEQ ID NO: 1033606 - RNA, 19 nt, Homo sapiens
  misc_RNA (1)...(19): siRNA sense strand
gggcaaugaagccauguuu

SEQ ID NO: 1033607 - RNA, 19 nt, Homo sapiens
  misc_RNA (1)...(19): siRNA sense strand
ggaugcagaucucaaagcu

SEQ ID NO: 1033608 - RNA, 19 nt, Homo sapiens
  misc_RNA (1)...(19): siRNA sense strand
uggauaaucugcagacucu

SEQ ID NO: 1033609 - RNA, 19 nt, Homo sapiens
  misc_RNA (1)...(19): siRNA sense strand
cgucaaugcagcuguagua

SEQ ID NO: 1033610 - RNA, 19 nt, Homo sapiens
  misc_RNA (1)...(19): siRNA sense strand
uagcgucaaugcagcugua

SEQ ID NO: 1033611 - RNA, 19 nt, Homo sapiens
  misc_RNA (1)...(19): siRNA sense strand
uaagguggcugaggcaaag

SEQ ID NO: 1033612 - RNA, 19 nt, Homo sapiens
  misc_RNA (1)...(19): siRNA sense strand
gacaauuaccaacaacuug

SEQ ID NO: 1033613 - RNA, 19 nt, Homo sapiens
  misc_RNA (1)...(19): siRNA sense strand
gcacagcuacagaauuuac

SEQ ID NO: 1033614 - RNA, 19 nt, Homo sapiens
  misc_RNA (1)...(19): siRNA sense strand
caaugggccaacaguauuu

SEQ ID NO: 1033615 - RNA, 19 nt, Homo sapiens
  misc_RNA (1)...(19): siRNA sense strand
gauguuugaacuugguaua

SEQ ID NO: 1033616 - RNA, 19 nt, Homo sapiens
  misc_RNA (1)...(19): siRNA sense strand
guagcucuguggaucaaau

SEQ ID NO: 1033617 - RNA, 19 nt, Homo sapiens
  misc_RNA (1)...(19): siRNA sense strand
gccgagcaaugcaccuaaa

SEQ ID NO: 1033618 - RNA, 19 nt, Homo sapiens
  misc_RNA (1)...(19): siRNA sense strand
gcgucucuuuccuggauua

SEQ ID NO: 1033619 - RNA, 19 nt, Homo sapiens
  misc_RNA (1)...(19): siRNA sense strand
uuaaagaucgacauggaaa

SEQ ID NO: 1033620 - RNA, 19 nt, Homo sapiens
  misc_RNA (1)...(19): siRNA sense strand
cgaacagcauaaacuggaa

SEQ ID NO: 1033621 - RNA, 19 nt, Homo sapiens
  misc_RNA (1)...(19): siRNA sense strand
caaugcagcuguaguaacc

SEQ ID NO: 1033622 - RNA, 19 nt, Homo sapiens
  misc_RNA (1)...(19): siRNA sense strand
gaaugaaagcacuggacaa

SEQ ID NO: 1033623 - RNA, 19 nt, Homo sapiens
  misc_RNA (1)...(19): siRNA sense strand
ccacacucaggguuucuua

SEQ ID NO: 1033624 - RNA, 19 nt, Homo sapiens
  misc_RNA (1)...(19): siRNA sense strand
ggacagaauaauccuuaca

SEQ ID NO: 1033625 - RNA, 19 nt, Homo sapiens
  misc_RNA (1)...(19): siRNA sense strand
acgaagcugucuuguaugu

SEQ ID NO: 1033626 - RNA, 19 nt, Homo sapiens
  misc_RNA (1)...(19): siRNA sense strand
gaagaccucggugaauuuc

SEQ ID NO: 1033627 - RNA, 19 nt, Homo sapiens
  misc_RNA (1)...(19): siRNA sense strand
ccaugcaauuguucuucua

SEQ ID NO: 1033628 - RNA, 19 nt, Homo sapiens
  misc_RNA (1)...(19): siRNA sense strand
cugaaucuauggaaagugu

SEQ ID NO: 1033629 - RNA, 19 nt, Homo sapiens
  misc_RNA (1)...(19): siRNA sense strand
gauuauaucuggguuaccu

SEQ ID NO: 1033630 - RNA, 19 nt, Homo sapiens
  misc_RNA (1)...(19): siRNA sense strand
acacacaacuugggaagag

SEQ ID NO: 1033631 - RNA, 19 nt, Homo sapiens
  misc_RNA (1)...(19): siRNA sense strand
guucaagucucggcuuaca

SEQ ID NO: 1033632 - RNA, 19 nt, Homo sapiens
  misc_RNA (1)...(19): siRNA sense strand
ggacaacacagagaaagag

SEQ ID NO: 1033633 - RNA, 19 nt, Homo sapiens
  misc_RNA (1)...(19): siRNA sense strand
gagggugagugaacugucu

SEQ ID NO: 1033634 - RNA, 19 nt, Homo sapiens
  misc_RNA (1)...(19): siRNA sense strand
gaauuuccagggcaaugaa

SEQ ID NO: 1033635 - RNA, 19 nt, Homo sapiens
  misc_RNA (1)...(19): siRNA sense strand
cgacauggaaacauacuca

SEQ ID NO: 1033636 - RNA, 19 nt, Homo sapiens
  misc_RNA (1)...(19): siRNA sense strand
gcauaccaauauccucauc

SEQ ID NO: 1033637 - RNA, 19 nt, Homo sapiens
  misc_RNA (1)...(19): siRNA sense strand
gagaaagcaaagccaaugu

SEQ ID NO: 1033638 - RNA, 19 nt, Homo sapiens
  misc_RNA (1)...(19): siRNA sense strand
cauuacaguugccgggaaa

SEQ ID NO: 1033639 - RNA, 19 nt, Homo sapiens
  misc_RNA (1)...(19): siRNA sense strand
agucucggcuuacaauaug

SEQ ID NO: 1033640 - RNA, 19 nt, Homo sapiens
  misc_RNA (1)...(19): siRNA sense strand
gaauggauccaaaagcuuu

SEQ ID NO: 1033641 - RNA, 19 nt, Homo sapiens
  misc_RNA (1)...(19): siRNA sense strand
gaacuugguauaguagcuu

SEQ ID NO: 1033642 - RNA, 19 nt, Homo sapiens
  misc_RNA (1)...(19): siRNA sense strand
uagaagagaccucaugaca

SEQ ID NO: 1033643 - RNA, 19 nt, Homo sapiens
  misc_RNA (1)...(19): siRNA sense strand
caugacagcuggaguucuc

SEQ ID NO: 1033644 - RNA, 19 nt, Homo sapiens
  misc_RNA (1)...(19): siRNA sense strand
ccugauggcuauagaagag

SEQ ID NO: 1033645 - RNA, 19 nt, Homo sapiens
  misc_RNA (1)...(19): siRNA sense strand
uauagaagagaccucauga

SEQ ID NO: 1033646 - RNA, 19 nt, Homo sapiens
  misc_RNA (1)...(19): siRNA sense strand
ggaccugauggcuauagaa

SEQ ID NO: 1033647 - RNA, 19 nt, Homo sapiens
  misc_RNA (1)...(19): siRNA sense strand
ccucaugacagcuggaguu

SEQ ID NO: 1033648 - RNA, 19 nt, Homo sapiens
  misc_RNA (1)...(19): siRNA sense strand
cccaaucuuguaccaauuu

SEQ ID NO: 1033649 - RNA, 19 nt, Homo sapiens
  misc_RNA (1)...(19): siRNA sense strand
gaccugauggcuauagaag

SEQ ID NO: 1033650 - RNA, 19 nt, Homo sapiens
  misc_RNA (1)...(19): siRNA sense strand
gggaccugcuggagcuuca

SEQ ID NO: 1033651 - RNA, 19 nt, Homo sapiens
  misc_RNA (1)...(19): siRNA sense strand
uguuugguguccuugguuu

SEQ ID NO: 1033652 - RNA, 19 nt, Homo sapiens
  misc_RNA (1)...(19): siRNA sense strand
ucacugguguugcuuugcu

SEQ ID NO: 1033653 - RNA, 19 nt, Homo sapiens
  misc_RNA (1)...(19): siRNA sense strand
ggaguucucuggggacugu

SEQ ID NO: 1033654 - RNA, 19 nt, Homo sapiens
  misc_RNA (1)...(19): siRNA sense strand
cuauagaagagaccucaug

SEQ ID NO: 1033655 - RNA, 19 nt, Homo sapiens
  misc_RNA (1)...(19): siRNA sense strand
gaugucacccuugggaaca

SEQ ID NO: 1033656 - RNA, 19 nt, Homo sapiens
  misc_RNA (1)...(19): siRNA sense strand
uagaagagaccucaugaca

SEQ ID NO: 1033657 - RNA, 19 nt, Homo sapiens
  misc_RNA (1)...(19): siRNA sense strand
caugacagcuggaguucuc

SEQ ID NO: 1033658 - RNA, 19 nt, Homo sapiens
  misc_RNA (1)...(19): siRNA sense strand
ccugauggcuauagaagag

SEQ ID NO: 1033659 - RNA, 19 nt, Homo sapiens
  misc_RNA (1)...(19): siRNA sense strand
uauagaagagaccucauga

SEQ ID NO: 1033660 - RNA, 19 nt, Homo sapiens
  misc_RNA (1)...(19): siRNA sense strand
ggaccugauggcuauagaa

SEQ ID NO: 1033661 - RNA, 19 nt, Homo sapiens
  misc_RNA (1)...(19): siRNA sense strand
ccucaugacagcuggaguu

SEQ ID NO: 1033662 - RNA, 19 nt, Homo sapiens
  misc_RNA (1)...(19): siRNA sense strand
cccaaucuuguaccaauuu

SEQ ID NO: 1033663 - RNA, 19 nt, Homo sapiens
  misc_RNA (1)...(19): siRNA sense strand
gaccugauggcuauagaag

SEQ ID NO: 1033664 - RNA, 19 nt, Homo sapiens
  misc_RNA (1)...(19): siRNA sense strand
gggaccugcuggagcuuca

SEQ ID NO: 1033665 - RNA, 19 nt, Homo sapiens
  misc_RNA (1)...(19): siRNA sense strand
uguuugguguccuugguuu

SEQ ID NO: 1033666 - RNA, 19 nt, Homo sapiens
  misc_RNA (1)...(19): siRNA sense strand
ucacugguguugcuuugcu

SEQ ID NO: 1033667 - RNA, 19 nt, Homo sapiens
  misc_RNA (1)...(19): siRNA sense strand
ggaguucucuggggacugu

SEQ ID NO: 1033668 - RNA, 19 nt, Homo sapiens
  misc_RNA (1)...(19): siRNA sense strand
cuauagaagagaccucaug

SEQ ID NO: 1033669 - RNA, 19 nt, Homo sapiens
  misc_RNA (1)...(19): siRNA sense strand
gaugucacccuugggaaca

SEQ ID NO: 1033670 - RNA, 19 nt, Homo sapiens
  misc_RNA (1)...(19): siRNA sense strand
cccaaucuuguaccaauuu

SEQ ID NO: 1033671 - RNA, 19 nt, Homo sapiens
  misc_RNA (1)...(19): siRNA sense strand
gggaccugcuggagcuuca

SEQ ID NO: 1033672 - RNA, 19 nt, Homo sapiens
  misc_RNA (1)...(19): siRNA sense strand
gaugucacccuugggaaca

SEQ ID NO: 1033673 - RNA, 19 nt, Homo sapiens
  misc_RNA (1)...(19): siRNA sense strand
gaacagaauuggagcagaa

SEQ ID NO: 1033674 - RNA, 19 nt, Homo sapiens
  misc_RNA (1)...(19): siRNA sense strand
gaacacuuccgcugucuua

SEQ ID NO: 1033675 - RNA, 19 nt, Homo sapiens
  misc_RNA (1)...(19): siRNA sense strand
ggaagaccauccucucaga

SEQ ID NO: 1033676 - RNA, 19 nt, Homo sapiens
  misc_RNA (1)...(19): siRNA sense strand
gaaacaaaucuucuucuug

SEQ ID NO: 1033677 - RNA, 19 nt, Homo sapiens
  misc_RNA (1)...(19): siRNA sense strand
ccaccuacuuggaaacaua

SEQ ID NO: 1033678 - RNA, 19 nt, Homo sapiens
  misc_RNA (1)...(19): siRNA sense strand
gaccagacuuuguccaaug

SEQ ID NO: 1033679 - RNA, 19 nt, Homo sapiens
  misc_RNA (1)...(19): siRNA sense strand
gcacucaccuuccaaaucc

SEQ ID NO: 1033680 - RNA, 19 nt, Homo sapiens
  misc_RNA (1)...(19): siRNA sense strand
gcucagauccaccuacuug

SEQ ID NO: 1033681 - RNA, 19 nt, Homo sapiens
  misc_RNA (1)...(19): siRNA sense strand
caagaaugcucucaucacu

SEQ ID NO: 1033682 - RNA, 19 nt, Homo sapiens
  misc_RNA (1)...(19): siRNA sense strand
ccugcuacauugacuauaa

SEQ ID NO: 1033683 - RNA, 19 nt, Homo sapiens
  misc_RNA (1)...(19): siRNA sense strand
agaaugcucucaucacuca

SEQ ID NO: 1033684 - RNA, 19 nt, Homo sapiens
  misc_RNA (1)...(19): siRNA sense strand
ggucccagcuccagaggaa

SEQ ID NO: 1033685 - RNA, 19 nt, Homo sapiens
  misc_RNA (1)...(19): siRNA sense strand
gcugcucuguugaugcuua

SEQ ID NO: 1033686 - RNA, 19 nt, Homo sapiens
  misc_RNA (1)...(19): siRNA sense strand
caauguaggugcugauguc

SEQ ID NO: 1033687 - RNA, 19 nt, Homo sapiens
  misc_RNA (1)...(19): siRNA sense strand
aauaacugguggauuguaa

SEQ ID NO: 1033688 - RNA, 19 nt, Homo sapiens
  misc_RNA (1)...(19): siRNA sense strand
ccacuugauucuagucuuc

SEQ ID NO: 1033689 - RNA, 19 nt, Homo sapiens
  misc_RNA (1)...(19): siRNA sense strand
gcaggaaccucagcuucau

SEQ ID NO: 1033690 - RNA, 19 nt, Homo sapiens
  misc_RNA (1)...(19): siRNA sense strand
gcccuucgcuggaaagaca

SEQ ID NO: 1033691 - RNA, 19 nt, Homo sapiens
  misc_RNA (1)...(19): siRNA sense strand
gauguccagugcugcauga

SEQ ID NO: 1033692 - RNA, 19 nt, Homo sapiens
  misc_RNA (1)...(19): siRNA sense strand
ggccuugggagguuauuua

SEQ ID NO: 1033693 - RNA, 19 nt, Homo sapiens
  misc_RNA (1)...(19): siRNA sense strand
gcgaagaaauguccaugac

SEQ ID NO: 1033694 - RNA, 19 nt, Homo sapiens
  misc_RNA (1)...(19): siRNA sense strand
uaucaagaaugcucucauc

SEQ ID NO: 1033695 - RNA, 19 nt, Homo sapiens
  misc_RNA (1)...(19): siRNA sense strand
gaggucuccugcuacauug

SEQ ID NO: 1033696 - RNA, 19 nt, Homo sapiens
  misc_RNA (1)...(19): siRNA sense strand
gaagugaugacucggaaca

SEQ ID NO: 1033697 - RNA, 19 nt, Homo sapiens
  misc_RNA (1)...(19): siRNA sense strand
aaagacagcugggacaucu

SEQ ID NO: 1033698 - RNA, 19 nt, Homo sapiens
  misc_RNA (1)...(19): siRNA sense strand
gaggaacgucuuugggaaa

SEQ ID NO: 1033699 - RNA, 19 nt, Homo sapiens
  misc_RNA (1)...(19): siRNA sense strand
cuugggagguuauuuagga

SEQ ID NO: 1033700 - RNA, 19 nt, Homo sapiens
  misc_RNA (1)...(19): siRNA sense strand
gagcuccacuuuucucauu

SEQ ID NO: 1033701 - RNA, 19 nt, Homo sapiens
  misc_RNA (1)...(19): siRNA sense strand
ucaaguacauggguguguu

SEQ ID NO: 1033702 - RNA, 19 nt, Homo sapiens
  misc_RNA (1)...(19): siRNA sense strand
ggugacggcugacaucaac

SEQ ID NO: 1033703 - RNA, 19 nt, Homo sapiens
  misc_RNA (1)...(19): siRNA sense strand
ucucugagcuggugguucu

SEQ ID NO: 1033704 - RNA, 19 nt, Homo sapiens
  misc_RNA (1)...(19): siRNA sense strand
acaccaauauugccuacug

SEQ ID NO: 1033705 - RNA, 19 nt, Homo sapiens
  misc_RNA (1)...(19): siRNA sense strand
cagcuuagagggaggacua

SEQ ID NO: 1033706 - RNA, 19 nt, Homo sapiens
  misc_RNA (1)...(19): siRNA sense strand
uguccuaccugaaguucuu

SEQ ID NO: 1033707 - RNA, 19 nt, Homo sapiens
  misc_RNA (1)...(19): siRNA sense strand
ucucagagguccgcuuugu

SEQ ID NO: 1033708 - RNA, 19 nt, Homo sapiens
  misc_RNA (1)...(19): siRNA sense strand
gaaauugugaacagaggau

SEQ ID NO: 1033709 - RNA, 19 nt, Homo sapiens
  misc_RNA (1)...(19): siRNA sense strand
gcagugggcaucaaguaca

SEQ ID NO: 1033710 - RNA, 19 nt, Homo sapiens
  misc_RNA (1)...(19): siRNA sense strand
gagguuauuuaggaggauu

SEQ ID NO: 1033711 - RNA, 19 nt, Homo sapiens
  misc_RNA (1)...(19): siRNA sense strand
gaaagacagcugggacauc

SEQ ID NO: 1033712 - RNA, 19 nt, Homo sapiens
  misc_RNA (1)...(19): siRNA sense strand
acauggguguguucacgua

SEQ ID NO: 1033713 - RNA, 19 nt, Homo sapiens
  misc_RNA (1)...(19): siRNA sense strand
ggagcagaauacaguagca

SEQ ID NO: 1033714 - RNA, 19 nt, Homo sapiens
  misc_RNA (1)...(19): siRNA sense strand
gagaccagacuuuguccaa

SEQ ID NO: 1033715 - RNA, 19 nt, Homo sapiens
  misc_RNA (1)...(19): siRNA sense strand
gugcagugggcaucaagua

SEQ ID NO: 1033716 - RNA, 19 nt, Homo sapiens
  misc_RNA (1)...(19): siRNA sense strand
ggacaccuaccccaugaua

SEQ ID NO: 1033717 - RNA, 19 nt, Homo sapiens
  misc_RNA (1)...(19): siRNA sense strand
cuacauugacuauaacauc

SEQ ID NO: 1033718 - RNA, 19 nt, Homo sapiens
  misc_RNA (1)...(19): siRNA sense strand
acacuuccgcugucuuaaa

SEQ ID NO: 1033719 - RNA, 19 nt, Homo sapiens
  misc_RNA (1)...(19): siRNA sense strand
ucuggagacuggaaauugu

SEQ ID NO: 1033720 - RNA, 19 nt, Homo sapiens
  misc_RNA (1)...(19): siRNA sense strand
uguacuuacuguucuucua

SEQ ID NO: 1033721 - RNA, 19 nt, Homo sapiens
  misc_RNA (1)...(19): siRNA sense strand
ugacaggggucgcuuguuc

SEQ ID NO: 1033722 - RNA, 19 nt, Homo sapiens
  misc_RNA (1)...(19): siRNA sense strand
cuacuuggaaacauaguga

SEQ ID NO: 1033723 - RNA, 19 nt, Homo sapiens
  misc_RNA (1)...(19): siRNA sense strand
gcgcucagauccaccuacu

SEQ ID NO: 1033724 - RNA, 19 nt, Homo sapiens
  misc_RNA (1)...(19): siRNA sense strand
gaaccucuggagacuggaa

SEQ ID NO: 1033725 - RNA, 19 nt, Homo sapiens
  misc_RNA (1)...(19): siRNA sense strand
acugguggauuguaaagga

SEQ ID NO: 1033726 - RNA, 19 nt, Homo sapiens
  misc_RNA (1)...(19): siRNA sense strand
gugcccugcuggcuucauu

SEQ ID NO: 1033727 - RNA, 19 nt, Homo sapiens
  misc_RNA (1)...(19): siRNA sense strand
gaacgucuuugggaaaccu

SEQ ID NO: 1033728 - RNA, 19 nt, Homo sapiens
  misc_RNA (1)...(19): siRNA sense strand
guucuucuacguccacuug

SEQ ID NO: 1033729 - RNA, 19 nt, Homo sapiens
  misc_RNA (1)...(19): siRNA sense strand
guacuuacuguucuucuac

SEQ ID NO: 1033730 - RNA, 19 nt, Homo sapiens
  misc_RNA (1)...(19): siRNA sense strand
gugcuggccuugggagguu

SEQ ID NO: 1033731 - RNA, 19 nt, Homo sapiens
  misc_RNA (1)...(19): siRNA sense strand
gaggauucgauggcaauuu

SEQ ID NO: 1033732 - RNA, 19 nt, Homo sapiens
  misc_RNA (1)...(19): siRNA sense strand
gacuggaaauugugaacag

SEQ ID NO: 1033733 - RNA, 19 nt, Homo sapiens
  misc_RNA (1)...(19): siRNA sense strand
ggaggacuagcucggauca

SEQ ID NO: 1033734 - RNA, 19 nt, Homo sapiens
  misc_RNA (1)...(19): siRNA sense strand
cagucaaggcuaaugcuuu

SEQ ID NO: 1033735 - RNA, 19 nt, Homo sapiens
  misc_RNA (1)...(19): siRNA sense strand
agacagcugggacaucuug

SEQ ID NO: 1033736 - RNA, 19 nt, Homo sapiens
  misc_RNA (1)...(19): siRNA sense strand
ggaaagacagcugggacau

SEQ ID NO: 1033737 - RNA, 19 nt, Homo sapiens
  misc_RNA (1)...(19): siRNA sense strand
caugaaacaaaucuucuuc

SEQ ID NO: 1033738 - RNA, 19 nt, Homo sapiens
  misc_RNA (1)...(19): siRNA sense strand
gagcagaauacaguagcaa

SEQ ID NO: 1033739 - RNA, 19 nt, Homo sapiens
  misc_RNA (1)...(19): siRNA sense strand
ucagcuucauggcgagauu

SEQ ID NO: 1033740 - RNA, 19 nt, Homo sapiens
  misc_RNA (1)...(19): siRNA sense strand
uauuggccguguuguccua

SEQ ID NO: 1033741 - RNA, 19 nt, Homo sapiens
  misc_RNA (1)...(19): siRNA sense strand
agucaaggcuaaugcuuuu

SEQ ID NO: 1033742 - RNA, 19 nt, Homo sapiens
  misc_RNA (1)...(19): siRNA sense strand
cagacuuuguccaauguag

SEQ ID NO: 1033743 - RNA, 19 nt, Homo sapiens
  misc_RNA (1)...(19): siRNA sense strand
cacuuccgcugucuuaaag

SEQ ID NO: 1033744 - RNA, 19 nt, Homo sapiens
  misc_RNA (1)...(19): siRNA sense strand
acaccuaccccaugauaua

SEQ ID NO: 1033745 - RNA, 19 nt, Homo sapiens
  misc_RNA (1)...(19): siRNA sense strand
gcucucaucacucagucaa

SEQ ID NO: 1033746 - RNA, 19 nt, Homo sapiens
  misc_RNA (1)...(19): siRNA sense strand
gggacaucuugauccgaaa

SEQ ID NO: 1033747 - RNA, 19 nt, Homo sapiens
  misc_RNA (1)...(19): siRNA sense strand
ggcgaagaaauguccauga

SEQ ID NO: 1033748 - RNA, 19 nt, Homo sapiens
  misc_RNA (1)...(19): siRNA sense strand
agaccagacuuuguccaau

SEQ ID NO: 1033749 - RNA, 19 nt, Homo sapiens
  misc_RNA (1)...(19): siRNA sense strand
aggauucgauggcaauuuu

SEQ ID NO: 1033750 - RNA, 19 nt, Homo sapiens
  misc_RNA (1)...(19): siRNA sense strand
cagaauuggagcagaauac

SEQ ID NO: 1033751 - RNA, 19 nt, Homo sapiens
  misc_RNA (1)...(19): siRNA sense strand
ggagcacgguguggaacgu

SEQ ID NO: 1033752 - RNA, 19 nt, Homo sapiens
  misc_RNA (1)...(19): siRNA sense strand
acaaaucuucuucuuggau

SEQ ID NO: 1033753 - RNA, 19 nt, Homo sapiens
  misc_RNA (1)...(19): siRNA sense strand
uaacugguggauuguaaag

SEQ ID NO: 1033754 - RNA, 19 nt, Homo sapiens
  misc_RNA (1)...(19): siRNA sense strand
uacguccacuugauucuag

SEQ ID NO: 1033755 - RNA, 19 nt, Homo sapiens
  misc_RNA (1)...(19): siRNA sense strand
gggucuguguguucuguca

SEQ ID NO: 1033756 - RNA, 19 nt, Homo sapiens
  misc_RNA (1)...(19): siRNA sense strand
ccuaccagauaguguugga

SEQ ID NO: 1033757 - RNA, 19 nt, Homo sapiens
  misc_RNA (1)...(19): siRNA sense strand
ggagguuauuuaggaggau

SEQ ID NO: 1033758 - RNA, 19 nt, Homo sapiens
  misc_RNA (1)...(19): siRNA sense strand
uauauuaugggcaguacau

SEQ ID NO: 1033759 - RNA, 19 nt, Homo sapiens
  misc_RNA (1)...(19): siRNA sense strand
gccucgcucuggccaucua

SEQ ID NO: 1033760 - RNA, 19 nt, Homo sapiens
  misc_RNA (1)...(19): siRNA sense strand
cccauggccuaccagauag

SEQ ID NO: 1033761 - RNA, 19 nt, Homo sapiens
  misc_RNA (1)...(19): siRNA sense strand
caaguacauggguguguuc

SEQ ID NO: 1033762 - RNA, 19 nt, Homo sapiens
  misc_RNA (1)...(19): siRNA sense strand
ugacggcugacaucaacuu

SEQ ID NO: 1033763 - RNA, 19 nt, Homo sapiens
  misc_RNA (1)...(19): siRNA sense strand
caaagacacucacaaugga

SEQ ID NO: 1033764 - RNA, 19 nt, Homo sapiens
  misc_RNA (1)...(19): siRNA sense strand
ucacaaacaucgagguuau

SEQ ID NO: 1033765 - RNA, 19 nt, Homo sapiens
  misc_RNA (1)...(19): siRNA sense strand
gcaaagacacucacaaugg

SEQ ID NO: 1033766 - RNA, 19 nt, Homo sapiens
  misc_RNA (1)...(19): siRNA sense strand
caagagagaccaggaguuu

SEQ ID NO: 1033767 - RNA, 19 nt, Homo sapiens
  misc_RNA (1)...(19): siRNA sense strand
gcucacaccuccacagaag

SEQ ID NO: 1033768 - RNA, 19 nt, Homo sapiens
  misc_RNA (1)...(19): siRNA sense strand
acaucgagguuauuaauug

SEQ ID NO: 1033769 - RNA, 19 nt, Homo sapiens
  misc_RNA (1)...(19): siRNA sense strand
acacagaagugcccgcuau

SEQ ID NO: 1033770 - RNA, 19 nt, Homo sapiens
  misc_RNA (1)...(19): siRNA sense strand
ccucagcccucucuguuga

SEQ ID NO: 1033771 - RNA, 19 nt, Homo sapiens
  misc_RNA (1)...(19): siRNA sense strand
ggaaugaccacaguucaga

SEQ ID NO: 1033772 - RNA, 19 nt, Homo sapiens
  misc_RNA (1)...(19): siRNA sense strand
gacaccaaguuacgucaaa

SEQ ID NO: 1033773 - RNA, 19 nt, Homo sapiens
  misc_RNA (1)...(19): siRNA sense strand
guuauuaauugcagcauca

SEQ ID NO: 1033774 - RNA, 19 nt, Homo sapiens
  misc_RNA (1)...(19): siRNA sense strand
cuaagggccuguccucaga

SEQ ID NO: 1033775 - RNA, 19 nt, Homo sapiens
  misc_RNA (1)...(19): siRNA sense strand
acaaacaucgagguuauua

SEQ ID NO: 1033776 - RNA, 19 nt, Homo sapiens
  misc_RNA (1)...(19): siRNA sense strand
cagcaucacagaaauagaa

SEQ ID NO: 1033777 - RNA, 19 nt, Homo sapiens
  misc_RNA (1)...(19): siRNA sense strand
ucacagaaauagaaacaac

SEQ ID NO: 1033778 - RNA, 19 nt, Homo sapiens
  misc_RNA (1)...(19): siRNA sense strand
gagcuggaaugaccacagu

SEQ ID NO: 1033779 - RNA, 19 nt, Homo sapiens
  misc_RNA (1)...(19): siRNA sense strand
gcgcugagaccucuucuag

SEQ ID NO: 1033780 - RNA, 19 nt, Homo sapiens
  misc_RNA (1)...(19): siRNA sense strand
cagcgaagaccacgaugaa

SEQ ID NO: 1033781 - RNA, 19 nt, Homo sapiens
  misc_RNA (1)...(19): siRNA sense strand
gcaagagagaccaggaguu

SEQ ID NO: 1033782 - RNA, 19 nt, Homo sapiens
  misc_RNA (1)...(19): siRNA sense strand
ucacuuccaggucuccuua

SEQ ID NO: 1033783 - RNA, 19 nt, Homo sapiens
  misc_RNA (1)...(19): siRNA sense strand
acacaucacugaggucaca

SEQ ID NO: 1033784 - RNA, 19 nt, Homo sapiens
  misc_RNA (1)...(19): siRNA sense strand
gaagaggcaaagacacuca

SEQ ID NO: 1033785 - RNA, 19 nt, Homo sapiens
  misc_RNA (1)...(19): siRNA sense strand
gaccaggaguuucacaaaa

SEQ ID NO: 1033786 - RNA, 19 nt, Homo sapiens
  misc_RNA (1)...(19): siRNA sense strand
ccauggacaucgcaaccaa

SEQ ID NO: 1033787 - RNA, 19 nt, Homo sapiens
  misc_RNA (1)...(19): siRNA sense strand
cagcuccggucuccauaga

SEQ ID NO: 1033788 - RNA, 19 nt, Homo sapiens
  misc_RNA (1)...(19): siRNA sense strand
aaacaucucccaacuucau

SEQ ID NO: 1033789 - RNA, 19 nt, Homo sapiens
  misc_RNA (1)...(19): siRNA sense strand
cugaagcccuggugacugu

SEQ ID NO: 1033790 - RNA, 19 nt, Homo sapiens
  misc_RNA (1)...(19): siRNA sense strand
gacaacggacgacacagaa

SEQ ID NO: 1033791 - RNA, 19 nt, Homo sapiens
  misc_RNA (1)...(19): siRNA sense strand
caaacaucgagguuauuaa

SEQ ID NO: 1033792 - RNA, 19 nt, Homo sapiens
  misc_RNA (1)...(19): siRNA sense strand
ugacaacggacgacacaga

SEQ ID NO: 1033793 - RNA, 19 nt, Homo sapiens
  misc_RNA (1)...(19): siRNA sense strand
gaugacaacggacgacaca

SEQ ID NO: 1033794 - RNA, 19 nt, Homo sapiens
  misc_RNA (1)...(19): siRNA sense strand
agacgugagugcaggugaa

SEQ ID NO: 1033795 - RNA, 19 nt, Homo sapiens
  misc_RNA (1)...(19): siRNA sense strand
ggcaaagacacucacaaug

SEQ ID NO: 1033796 - RNA, 19 nt, Homo sapiens
  misc_RNA (1)...(19): siRNA sense strand
agagagaccaggaguuuca

SEQ ID NO: 1033797 - RNA, 19 nt, Homo sapiens
  misc_RNA (1)...(19): siRNA sense strand
caacggacgacacagaagu

SEQ ID NO: 1033798 - RNA, 19 nt, Homo sapiens
  misc_RNA (1)...(19): siRNA sense strand
caucacagaaauagaaaca

SEQ ID NO: 1033799 - RNA, 19 nt, Homo sapiens
  misc_RNA (1)...(19): siRNA sense strand
gcaccgaugacagcucuga

SEQ ID NO: 1033800 - RNA, 19 nt, Homo sapiens
  misc_RNA (1)...(19): siRNA sense strand
ugacuccacugaagcaaaa

SEQ ID NO: 1033801 - RNA, 19 nt, Homo sapiens
  misc_RNA (1)...(19): siRNA sense strand
ccacgccgcucuggaaacu

SEQ ID NO: 1033802 - RNA, 19 nt, Homo sapiens
  misc_RNA (1)...(19): siRNA sense strand
gagaccaggaguuucacaa

SEQ ID NO: 1033803 - RNA, 19 nt, Homo sapiens
  misc_RNA (1)...(19): siRNA sense strand
cagagacaccgaccaugga

SEQ ID NO: 1033804 - RNA, 19 nt, Homo sapiens
  misc_RNA (1)...(19): siRNA sense strand
cuguugagacaccaaguua

SEQ ID NO: 1033805 - RNA, 19 nt, Homo sapiens
  misc_RNA (1)...(19): siRNA sense strand
caaaaccacacaucacuga

SEQ ID NO: 1033806 - RNA, 19 nt, Homo sapiens
  misc_RNA (1)...(19): siRNA sense strand
agaccaggaguuucacaaa

SEQ ID NO: 1033807 - RNA, 19 nt, Homo sapiens
  misc_RNA (1)...(19): siRNA sense strand
caucgagguuauuaauugc

SEQ ID NO: 1033808 - RNA, 19 nt, Homo sapiens
  misc_RNA (1)...(19): siRNA sense strand
gaauuuccccugcaagaga

SEQ ID NO: 1033809 - RNA, 19 nt, Homo sapiens
  misc_RNA (1)...(19): siRNA sense strand
ggacgaacagcaccuuagc

SEQ ID NO: 1033810 - RNA, 19 nt, Homo sapiens
  misc_RNA (1)...(19): siRNA sense strand
gggcaaaacaacuuccuuu

SEQ ID NO: 1033811 - RNA, 19 nt, Homo sapiens
  misc_RNA (1)...(19): siRNA sense strand
gaagcaaaaccacacauca

SEQ ID NO: 1033812 - RNA, 19 nt, Homo sapiens
  misc_RNA (1)...(19): siRNA sense strand
gcuggaaugaccacaguuc

SEQ ID NO: 1033813 - RNA, 19 nt, Homo sapiens
  misc_RNA (1)...(19): siRNA sense strand
ugaccacaguucagaccau

SEQ ID NO: 1033814 - RNA, 19 nt, Homo sapiens
  misc_RNA (1)...(19): siRNA sense strand
gucacaaacaucgagguua

SEQ ID NO: 1033815 - RNA, 19 nt, Homo sapiens
  misc_RNA (1)...(19): siRNA sense strand
aggcaaagacacucacaau

SEQ ID NO: 1033816 - RNA, 19 nt, Homo sapiens
  misc_RNA (1)...(19): siRNA sense strand
acagaagugcccgcuauga

SEQ ID NO: 1033817 - RNA, 19 nt, Homo sapiens
  misc_RNA (1)...(19): siRNA sense strand
aacagcaccuuagccaaga

SEQ ID NO: 1033818 - RNA, 19 nt, Homo sapiens
  misc_RNA (1)...(19): siRNA sense strand
gacacucacaauggacaua

SEQ ID NO: 1033819 - RNA, 19 nt, Homo sapiens
  misc_RNA (1)...(19): siRNA sense strand
gggacgaacagcaccuuag

SEQ ID NO: 1033820 - RNA, 19 nt, Homo sapiens
  misc_RNA (1)...(19): siRNA sense strand
gagaauuuccccugcaaga

SEQ ID NO: 1033821 - RNA, 19 nt, Homo sapiens
  misc_RNA (1)...(19): siRNA sense strand
guccucagcccucucuguu

SEQ ID NO: 1033822 - RNA, 19 nt, Homo sapiens
  misc_RNA (1)...(19): siRNA sense strand
aauugcagcaucacagaaa

SEQ ID NO: 1033823 - RNA, 19 nt, Homo sapiens
  misc_RNA (1)...(19): siRNA sense strand
ugacucaacuccagaaaug

SEQ ID NO: 1033824 - RNA, 19 nt, Homo sapiens
  misc_RNA (1)...(19): siRNA sense strand
ggacccugcucucuuguuu

SEQ ID NO: 1033825 - RNA, 19 nt, Homo sapiens
  misc_RNA (1)...(19): siRNA sense strand
uaaaucaccucggcagaaa

SEQ ID NO: 1033826 - RNA, 19 nt, Homo sapiens
  misc_RNA (1)...(19): siRNA sense strand
ccacagcuccuccuccuuu

SEQ ID NO: 1033827 - RNA, 19 nt, Homo sapiens
  misc_RNA (1)...(19): siRNA sense strand
gaggcgagcuugguaagga

SEQ ID NO: 1033828 - RNA, 19 nt, Homo sapiens
  misc_RNA (1)...(19): siRNA sense strand
gaaauggggucucacuaug

SEQ ID NO: 1033829 - RNA, 19 nt, Homo sapiens
  misc_RNA (1)...(19): siRNA sense strand
ccaaagugcugagaugaca

SEQ ID NO: 1033830 - RNA, 19 nt, Homo sapiens
  misc_RNA (1)...(19): siRNA sense strand
guggagcccuucacccaaa

SEQ ID NO: 1033831 - RNA, 19 nt, Homo sapiens
  misc_RNA (1)...(19): siRNA sense strand
guaaaucaccucggcagaa

SEQ ID NO: 1033832 - RNA, 19 nt, Homo sapiens
  misc_RNA (1)...(19): siRNA sense strand
gaucgcagcccaccuuugg

SEQ ID NO: 1033833 - RNA, 19 nt, Homo sapiens
  misc_RNA (1)...(19): siRNA sense strand
gcagugggaucaggacagu

SEQ ID NO: 1033834 - RNA, 19 nt, Homo sapiens
  misc_RNA (1)...(19): siRNA sense strand
ggacaagcugugacugaga

SEQ ID NO: 1033835 - RNA, 19 nt, Homo sapiens
  misc_RNA (1)...(19): siRNA sense strand
gcccuucacccaaacauga

SEQ ID NO: 1033836 - RNA, 19 nt, Homo sapiens
  misc_RNA (1)...(19): siRNA sense strand
ccaagagugccgaggauga

SEQ ID NO: 1033837 - RNA, 19 nt, Homo sapiens
  misc_RNA (1)...(19): siRNA sense strand
gcucucuuguuucucacua

SEQ ID NO: 1033838 - RNA, 19 nt, Homo sapiens
  misc_RNA (1)...(19): siRNA sense strand
gaagacagguccccaaagc

SEQ ID NO: 1033839 - RNA, 19 nt, Homo sapiens
  misc_RNA (1)...(19): siRNA sense strand
ccaggaggcgagcuuggua

SEQ ID NO: 1033840 - RNA, 19 nt, Homo sapiens
  misc_RNA (1)...(19): siRNA sense strand
caggacaagcugugacuga

SEQ ID NO: 1033841 - RNA, 19 nt, Homo sapiens
  misc_RNA (1)...(19): siRNA sense strand
uccacacggugaccuguaa

SEQ ID NO: 1033842 - RNA, 19 nt, Homo sapiens
  misc_RNA (1)...(19): siRNA sense strand
ccugcucucuuguuucuca

SEQ ID NO: 1033843 - RNA, 19 nt, Homo sapiens
  misc_RNA (1)...(19): siRNA sense strand
ggacauguggagguugcua

SEQ ID NO: 1033844 - RNA, 19 nt, Homo sapiens
  misc_RNA (1)...(19): siRNA sense strand
caggugggcagcagacuug

SEQ ID NO: 1033845 - RNA, 19 nt, Homo sapiens
  misc_RNA (1)...(19): siRNA sense strand
gaacuccugggcucaagca

SEQ ID NO: 1033846 - RNA, 19 nt, Homo sapiens
  misc_RNA (1)...(19): siRNA sense strand
cacggugaccuguaaauca

SEQ ID NO: 1033847 - RNA, 19 nt, Homo sapiens
  misc_RNA (1)...(19): siRNA sense strand
ccagacacuugggaaagca

SEQ ID NO: 1033848 - RNA, 19 nt, Homo sapiens
  misc_RNA (1)...(19): siRNA sense strand
ggagcauggucgccaaucc

SEQ ID NO: 1033849 - RNA, 19 nt, Homo sapiens
  misc_RNA (1)...(19): siRNA sense strand
aaucaccucggcagaaaga

SEQ ID NO: 1033850 - RNA, 19 nt, Homo sapiens
  misc_RNA (1)...(19): siRNA sense strand
caggaggcgagcuugguaa

SEQ ID NO: 1033851 - RNA, 19 nt, Homo sapiens
  misc_RNA (1)...(19): siRNA sense strand
ggagagggaugaggaugua

SEQ ID NO: 1033852 - RNA, 19 nt, Homo sapiens
  misc_RNA (1)...(19): siRNA sense strand
ccaccacagugaccauauu

SEQ ID NO: 1033853 - RNA, 19 nt, Homo sapiens
  misc_RNA (1)...(19): siRNA sense strand
cagcuaggguggccaacuu

SEQ ID NO: 1033854 - RNA, 19 nt, Homo sapiens
  misc_RNA (1)...(19): siRNA sense strand
guucgcaggugcugucaga

SEQ ID NO: 1033855 - RNA, 19 nt, Homo sapiens
  misc_RNA (1)...(19): siRNA sense strand
ggcccgagauguucugguu

SEQ ID NO: 1033856 - RNA, 19 nt, Homo sapiens
  misc_RNA (1)...(19): siRNA sense strand
ccgcagcuucccuagauua

SEQ ID NO: 1033857 - RNA, 19 nt, Homo sapiens
  misc_RNA (1)...(19): siRNA sense strand
ucccgcagcuucccuagau

SEQ ID NO: 1033858 - RNA, 19 nt, Homo sapiens
  misc_RNA (1)...(19): siRNA sense strand
gaagaggcgaagcgagagu

SEQ ID NO: 1033859 - RNA, 19 nt, Homo sapiens
  misc_RNA (1)...(19): siRNA sense strand
gagcccacagugcgaguug

SEQ ID NO: 1033860 - RNA, 19 nt, Homo sapiens
  misc_RNA (1)...(19): siRNA sense strand
gagggaugaggauguagga

SEQ ID NO: 1033861 - RNA, 19 nt, Homo sapiens
  misc_RNA (1)...(19): siRNA sense strand
ccgguuggcccgagauguu

SEQ ID NO: 1033862 - RNA, 19 nt, Homo sapiens
  misc_RNA (1)...(19): siRNA sense strand
caccacagugaccauauug

SEQ ID NO: 1033863 - RNA, 19 nt, Homo sapiens
  misc_RNA (1)...(19): siRNA sense strand
uaaagaagcugguuauugg

SEQ ID NO: 1033864 - RNA, 19 nt, Homo sapiens
  misc_RNA (1)...(19): siRNA sense strand
gaccauaucuaccaugauu

SEQ ID NO: 1033865 - RNA, 19 nt, Homo sapiens
  misc_RNA (1)...(19): siRNA sense strand
gaacaccuaccucuuauug

SEQ ID NO: 1033866 - RNA, 19 nt, Homo sapiens
  misc_RNA (1)...(19): siRNA sense strand
acacaggccuuccaguuaa

SEQ ID NO: 1033867 - RNA, 19 nt, Homo sapiens
  misc_RNA (1)...(19): siRNA sense strand
ucagagagaccgaagaaua

SEQ ID NO: 1033868 - RNA, 19 nt, Homo sapiens
  misc_RNA (1)...(19): siRNA sense strand
gagaacaccuaccucuuau

SEQ ID NO: 1033869 - RNA, 19 nt, Homo sapiens
  misc_RNA (1)...(19): siRNA sense strand
ucaaaccugucaacccuua

SEQ ID NO: 1033870 - RNA, 19 nt, Homo sapiens
  misc_RNA (1)...(19): siRNA sense strand
gcauguugaucuuuccaua

SEQ ID NO: 1033871 - RNA, 19 nt, Homo sapiens
  misc_RNA (1)...(19): siRNA sense strand
auaaagaguuguuccauga

SEQ ID NO: 1033872 - RNA, 19 nt, Homo sapiens
  misc_RNA (1)...(19): siRNA sense strand
gaagauauuuuccuacuug

SEQ ID NO: 1033873 - RNA, 19 nt, Homo sapiens
  misc_RNA (1)...(19): siRNA sense strand
gguuugggacugaauauua

SEQ ID NO: 1033874 - RNA, 19 nt, Homo sapiens
  misc_RNA (1)...(19): siRNA sense strand
caugugaagcucauuguua

SEQ ID NO: 1033875 - RNA, 19 nt, Homo sapiens
  misc_RNA (1)...(19): siRNA sense strand
gaucagagagaccgaagaa

SEQ ID NO: 1033876 - RNA, 19 nt, Homo sapiens
  misc_RNA (1)...(19): siRNA sense strand
gcugugagccuucugugua

SEQ ID NO: 1033877 - RNA, 19 nt, Homo sapiens
  misc_RNA (1)...(19): siRNA sense strand
ggaaucuacucaacugcuu

SEQ ID NO: 1033878 - RNA, 19 nt, Homo sapiens
  misc_RNA (1)...(19): siRNA sense strand
uuugauggcuguauaaaga

SEQ ID NO: 1033879 - RNA, 19 nt, Homo sapiens
  misc_RNA (1)...(19): siRNA sense strand
ccgauggcauucuuuaauu

SEQ ID NO: 1033880 - RNA, 19 nt, Homo sapiens
  misc_RNA (1)...(19): siRNA sense strand
gagaagauagcuaugucua

SEQ ID NO: 1033881 - RNA, 19 nt, Homo sapiens
  misc_RNA (1)...(19): siRNA sense strand
ggacguaacucuuuuggau

SEQ ID NO: 1033882 - RNA, 19 nt, Homo sapiens
  misc_RNA (1)...(19): siRNA sense strand
gaagcugguuauuggaaga

SEQ ID NO: 1033883 - RNA, 19 nt, Homo sapiens
  misc_RNA (1)...(19): siRNA sense strand
cagaauauuugguuuaggu

SEQ ID NO: 1033884 - RNA, 19 nt, Homo sapiens
  misc_RNA (1)...(19): siRNA sense strand
caagagaggaaauauugaa

SEQ ID NO: 1033885 - RNA, 19 nt, Homo sapiens
  misc_RNA (1)...(19): siRNA sense strand
gaagaaggaggaagaacug

SEQ ID NO: 1033886 - RNA, 19 nt, Homo sapiens
  misc_RNA (1)...(19): siRNA sense strand
gguuuagguugggcaauua

SEQ ID NO: 1033887 - RNA, 19 nt, Homo sapiens
  misc_RNA (1)...(19): siRNA sense strand
gggcaauuauacugaaaga

SEQ ID NO: 1033888 - RNA, 19 nt, Homo sapiens
  misc_RNA (1)...(19): siRNA sense strand
gaagaacuggcuuuuguua

SEQ ID NO: 1033889 - RNA, 19 nt, Homo sapiens
  misc_RNA (1)...(19): siRNA sense strand
caaaguacaaucugaguca

SEQ ID NO: 1033890 - RNA, 19 nt, Homo sapiens
  misc_RNA (1)...(19): siRNA sense strand
acaccuaccucuuauugga

SEQ ID NO: 1033891 - RNA, 19 nt, Homo sapiens
  misc_RNA (1)...(19): siRNA sense strand
gaagcucauuguuauacau

SEQ ID NO: 1033892 - RNA, 19 nt, Homo sapiens
  misc_RNA (1)...(19): siRNA sense strand
guugaucuuuccauaaaug

SEQ ID NO: 1033893 - RNA, 19 nt, Homo sapiens
  misc_RNA (1)...(19): siRNA sense strand
ggacaugugaagcucauug

SEQ ID NO: 1033894 - RNA, 19 nt, Homo sapiens
  misc_RNA (1)...(19): siRNA sense strand
cgauggcauucuuuaauug

SEQ ID NO: 1033895 - RNA, 19 nt, Homo sapiens
  misc_RNA (1)...(19): siRNA sense strand
guauaaaacucccaccaaa

SEQ ID NO: 1033896 - RNA, 19 nt, Homo sapiens
  misc_RNA (1)...(19): siRNA sense strand
gaggaaauauugaaaaugg

SEQ ID NO: 1033897 - RNA, 19 nt, Homo sapiens
  misc_RNA (1)...(19): siRNA sense strand
ccucagaauauuugguuua

SEQ ID NO: 1033898 - RNA, 19 nt, Homo sapiens
  misc_RNA (1)...(19): siRNA sense strand
aaccugguccuuuaucuua

SEQ ID NO: 1033899 - RNA, 19 nt, Homo sapiens
  misc_RNA (1)...(19): siRNA sense strand
aaagaguuguuccaugaug

SEQ ID NO: 1033900 - RNA, 19 nt, Homo sapiens
  misc_RNA (1)...(19): siRNA sense strand
uacacaggccuuccaguua

SEQ ID NO: 1033901 - RNA, 19 nt, Homo sapiens
  misc_RNA (1)...(19): siRNA sense strand
aguacaaucugagucauuu

SEQ ID NO: 1033902 - RNA, 19 nt, Homo sapiens
  misc_RNA (1)...(19): siRNA sense strand
ggaagaaggaggaagaacu

SEQ ID NO: 1033903 - RNA, 19 nt, Homo sapiens
  misc_RNA (1)...(19): siRNA sense strand
acauuaggcucggcuacua

SEQ ID NO: 1033904 - RNA, 19 nt, Homo sapiens
  misc_RNA (1)...(19): siRNA sense strand
uagagaagauagcuauguc

SEQ ID NO: 1033905 - RNA, 19 nt, Homo sapiens
  misc_RNA (1)...(19): siRNA sense strand
agacauacaacguggacua

SEQ ID NO: 1033906 - RNA, 19 nt, Homo sapiens
  misc_RNA (1)...(19): siRNA sense strand
caaaacaaauagcaucugu

SEQ ID NO: 1033907 - RNA, 19 nt, Homo sapiens
  misc_RNA (1)...(19): siRNA sense strand
cauagacuccgauggcauu

SEQ ID NO: 1033908 - RNA, 19 nt, Homo sapiens
  misc_RNA (1)...(19): siRNA sense strand
guagagaagauagcuaugu

SEQ ID NO: 1033909 - RNA, 19 nt, Homo sapiens
  misc_RNA (1)...(19): siRNA sense strand
guuugggacugaauauuag

SEQ ID NO: 1033910 - RNA, 19 nt, Homo sapiens
  misc_RNA (1)...(19): siRNA sense strand
gaacaugggaaacccuuuu

SEQ ID NO: 1033911 - RNA, 19 nt, Homo sapiens
  misc_RNA (1)...(19): siRNA sense strand
uagcaucauugucaaccuu

SEQ ID NO: 1033912 - RNA, 19 nt, Homo sapiens
  misc_RNA (1)...(19): siRNA sense strand
gaaucuacucaacugcuuu

SEQ ID NO: 1033913 - RNA, 19 nt, Homo sapiens
  misc_RNA (1)...(19): siRNA sense strand
uuccauaaaugacacauca

SEQ ID NO: 1033914 - RNA, 19 nt, Homo sapiens
  misc_RNA (1)...(19): siRNA sense strand
uuacacaggccuuccaguu

SEQ ID NO: 1033915 - RNA, 19 nt, Homo sapiens
  misc_RNA (1)...(19): siRNA sense strand
ccugcaagaucaaauugga

SEQ ID NO: 1033916 - RNA, 19 nt, Homo sapiens
  misc_RNA (1)...(19): siRNA sense strand
gggaaacccuuuugguguu

SEQ ID NO: 1033917 - RNA, 19 nt, Homo sapiens
  misc_RNA (1)...(19): siRNA sense strand
guugggcaauuauacugaa

SEQ ID NO: 1033918 - RNA, 19 nt, Homo sapiens
  misc_RNA (1)...(19): siRNA sense strand
cagagagaccgaagaauac

SEQ ID NO: 1033919 - RNA, 19 nt, Homo sapiens
  misc_RNA (1)...(19): siRNA sense strand
accaagagaggaaauauug

SEQ ID NO: 1033920 - RNA, 19 nt, Homo sapiens
  misc_RNA (1)...(19): siRNA sense strand
gcacagcggugggguuuuc

SEQ ID NO: 1033921 - RNA, 19 nt, Homo sapiens
  misc_RNA (1)...(19): siRNA sense strand
ggcauucuuuaauugcaaa

SEQ ID NO: 1033922 - RNA, 19 nt, Homo sapiens
  misc_RNA (1)...(19): siRNA sense strand
agacuccgauggcauucuu

SEQ ID NO: 1033923 - RNA, 19 nt, Homo sapiens
  misc_RNA (1)...(19): siRNA sense strand
cauguugaucuuuccauaa

SEQ ID NO: 1033924 - RNA, 19 nt, Homo sapiens
  misc_RNA (1)...(19): siRNA sense strand
uugucaaccugguccuuua

SEQ ID NO: 1033925 - RNA, 19 nt, Homo sapiens
  misc_RNA (1)...(19): siRNA sense strand
uaacagagaacaccuaccu

SEQ ID NO: 1033926 - RNA, 19 nt, Homo sapiens
  misc_RNA (1)...(19): siRNA sense strand
agauuuauguggcaugaca

SEQ ID NO: 1033927 - RNA, 19 nt, Homo sapiens
  misc_RNA (1)...(19): siRNA sense strand
gaucuuuccauaaaugaca

SEQ ID NO: 1033928 - RNA, 19 nt, Homo sapiens
  misc_RNA (1)...(19): siRNA sense strand
guacauuucgcaaucucuu

SEQ ID NO: 1033929 - RNA, 19 nt, Homo sapiens
  misc_RNA (1)...(19): siRNA sense strand
ccaagagaggaaauauuga

SEQ ID NO: 1033930 - RNA, 19 nt, Homo sapiens
  misc_RNA (1)...(19): siRNA sense strand
cauaaaugacacaucaguu

SEQ ID NO: 1033931 - RNA, 19 nt, Homo sapiens
  misc_RNA (1)...(19): siRNA sense strand
augugaagcucauuguuau

SEQ ID NO: 1033932 - RNA, 19 nt, Homo sapiens
  misc_RNA (1)...(19): siRNA sense strand
cauugucaaccuuagauuu

SEQ ID NO: 1033933 - RNA, 19 nt, Homo sapiens
  misc_RNA (1)...(19): siRNA sense strand
uaaaugacacaucaguuac

SEQ ID NO: 1033934 - RNA, 19 nt, Homo sapiens
  misc_RNA (1)...(19): siRNA sense strand
caaccugguccuuuaucuu

SEQ ID NO: 1033935 - RNA, 19 nt, Homo sapiens
  misc_RNA (1)...(19): siRNA sense strand
caguagagaagauagcuau

SEQ ID NO: 1033936 - RNA, 19 nt, Homo sapiens
  misc_RNA (1)...(19): siRNA sense strand
uuagauuuauguggcauga

SEQ ID NO: 1033937 - RNA, 19 nt, Homo sapiens
  misc_RNA (1)...(19): siRNA sense strand
ugugguacauuucgcaauc

SEQ ID NO: 1033938 - RNA, 19 nt, Homo sapiens
  misc_RNA (1)...(19): siRNA sense strand
ucaccugcaagaucaaauu

SEQ ID NO: 1033939 - RNA, 19 nt, Homo sapiens
  misc_RNA (1)...(19): siRNA sense strand
gcacggcuaccaacuccau

SEQ ID NO: 1033940 - RNA, 19 nt, Homo sapiens
  misc_RNA (1)...(19): siRNA sense strand
ugucaaccuuagauuuaug

SEQ ID NO: 1033941 - RNA, 19 nt, Homo sapiens
  misc_RNA (1)...(19): siRNA sense strand
agaacuggcuuuuguuaug

SEQ ID NO: 1033942 - RNA, 19 nt, Homo sapiens
  misc_RNA (1)...(19): siRNA sense strand
gcccucagaauauuugguu

SEQ ID NO: 1033943 - RNA, 19 nt, Homo sapiens
  misc_RNA (1)...(19): siRNA sense strand
uuauuuggaucggaaucua

SEQ ID NO: 1033944 - RNA, 19 nt, Homo sapiens
  misc_RNA (1)...(19): siRNA sense strand
ugaagcucauuguuauaca

SEQ ID NO: 1033945 - RNA, 19 nt, Homo sapiens
  misc_RNA (1)...(19): siRNA sense strand
caccaagagaggaaauauu

SEQ ID NO: 1033946 - RNA, 19 nt, Homo sapiens
  misc_RNA (1)...(19): siRNA sense strand
gaucggaaucuacucaacu

SEQ ID NO: 1033947 - RNA, 19 nt, Homo sapiens
  misc_RNA (1)...(19): siRNA sense strand
uggagcauguugaucuuuc

SEQ ID NO: 1033948 - RNA, 19 nt, Homo sapiens
  misc_RNA (1)...(19): siRNA sense strand
ugguuuagguugggcaauu

SEQ ID NO: 1033949 - RNA, 19 nt, Homo sapiens
  misc_RNA (1)...(19): siRNA sense strand
uagcugacauucucaaacc

SEQ ID NO: 1033950 - RNA, 19 nt, Homo sapiens
  misc_RNA (1)...(19): siRNA sense strand
cuacguugaugcggaagga

SEQ ID NO: 1033951 - RNA, 19 nt, Homo sapiens
  misc_RNA (1)...(19): siRNA sense strand
aaauaacagagaacaccua

SEQ ID NO: 1033952 - RNA, 19 nt, Homo sapiens
  misc_RNA (1)...(19): siRNA sense strand
guggagaggagcacauuag

SEQ ID NO: 1033953 - RNA, 19 nt, Homo sapiens
  misc_RNA (1)...(19): siRNA sense strand
gaacuggcuuuuguuaugg

SEQ ID NO: 1033954 - RNA, 19 nt, Homo sapiens
  misc_RNA (1)...(19): siRNA sense strand
cuaccaugauuggcuguga

SEQ ID NO: 1033955 - RNA, 19 nt, Homo sapiens
  misc_RNA (1)...(19): siRNA sense strand
gcaagaucaaauuggaaau

SEQ ID NO: 1033956 - RNA, 19 nt, Homo sapiens
  misc_RNA (1)...(19): siRNA sense strand
ggaucggaaucuacucaac

SEQ ID NO: 1033957 - RNA, 19 nt, Homo sapiens
  misc_RNA (1)...(19): siRNA sense strand
caaauagcaucuguaaaag

SEQ ID NO: 1033958 - RNA, 19 nt, Homo sapiens
  misc_RNA (1)...(19): siRNA sense strand
gagaccgaagaauaccuua

SEQ ID NO: 1033959 - RNA, 19 nt, Homo sapiens
  misc_RNA (1)...(19): siRNA sense strand
caugauggacguaacucuu

SEQ ID NO: 1033960 - RNA, 19 nt, Homo sapiens
  misc_RNA (1)...(19): siRNA sense strand
ugagcuuucugucaguuca

SEQ ID NO: 1033961 - RNA, 19 nt, Homo sapiens
  misc_RNA (1)...(19): siRNA sense strand
uacaaucugagucauuuga

SEQ ID NO: 1033962 - RNA, 19 nt, Homo sapiens
  misc_RNA (1)...(19): siRNA sense strand
aaguuggccucucguggaa

SEQ ID NO: 1033963 - RNA, 19 nt, Homo sapiens
  misc_RNA (1)...(19): siRNA sense strand
caagauggcuggaacaguu

SEQ ID NO: 1033964 - RNA, 19 nt, Homo sapiens
  misc_RNA (1)...(19): siRNA sense strand
caagauacuuccuuagaaa

SEQ ID NO: 1033965 - RNA, 19 nt, Homo sapiens
  misc_RNA (1)...(19): siRNA sense strand
uagaagaccugacugauga

SEQ ID NO: 1033966 - RNA, 19 nt, Homo sapiens
  misc_RNA (1)...(19): siRNA sense strand
cagcaaggaugaaauuauu

SEQ ID NO: 1033967 - RNA, 19 nt, Homo sapiens
  misc_RNA (1)...(19): siRNA sense strand
gauaugcccuuaagagaug

SEQ ID NO: 1033968 - RNA, 19 nt, Homo sapiens
  misc_RNA (1)...(19): siRNA sense strand
ucaaauaguuucccuaauc

SEQ ID NO: 1033969 - RNA, 19 nt, Homo sapiens
  misc_RNA (1)...(19): siRNA sense strand
guaucucugucacuuauua

SEQ ID NO: 1033970 - RNA, 19 nt, Homo sapiens
  misc_RNA (1)...(19): siRNA sense strand
caaauaguuucccuaauca

SEQ ID NO: 1033971 - RNA, 19 nt, Homo sapiens
  misc_RNA (1)...(19): siRNA sense strand
ugacaaagccagugugaaa

SEQ ID NO: 1033972 - RNA, 19 nt, Homo sapiens
  misc_RNA (1)...(19): siRNA sense strand
ccaagauacuuccuuagaa

SEQ ID NO: 1033973 - RNA, 19 nt, Homo sapiens
  misc_RNA (1)...(19): siRNA sense strand
uaagagaugucauuguuca

SEQ ID NO: 1033974 - RNA, 19 nt, Homo sapiens
  misc_RNA (1)...(19): siRNA sense strand
gcacagcaaggaugaaauu

SEQ ID NO: 1033975 - RNA, 19 nt, Homo sapiens
  misc_RNA (1)...(19): siRNA sense strand
ggacaaggauaugaagaug

SEQ ID NO: 1033976 - RNA, 19 nt, Homo sapiens
  misc_RNA (1)...(19): siRNA sense strand
ucaaggcaaucaaauaguu

SEQ ID NO: 1033977 - RNA, 19 nt, Homo sapiens
  misc_RNA (1)...(19): siRNA sense strand
cuuaagagaugucauuguu

SEQ ID NO: 1033978 - RNA, 19 nt, Homo sapiens
  misc_RNA (1)...(19): siRNA sense strand
gaaccauauuucaguguga

SEQ ID NO: 1033979 - RNA, 19 nt, Homo sapiens
  misc_RNA (1)...(19): siRNA sense strand
acaaggauaugaagaugaa

SEQ ID NO: 1033980 - RNA, 19 nt, Homo sapiens
  misc_RNA (1)...(19): siRNA sense strand
caggaaggguccauaaaug

SEQ ID NO: 1033981 - RNA, 19 nt, Homo sapiens
  misc_RNA (1)...(19): siRNA sense strand
cuuauuagcucaccagaga

SEQ ID NO: 1033982 - RNA, 19 nt, Homo sapiens
  misc_RNA (1)...(19): siRNA sense strand
gaucuaagaaccauauuuc

SEQ ID NO: 1033983 - RNA, 19 nt, Homo sapiens
  misc_RNA (1)...(19): siRNA sense strand
agaauaaucuuggaucaga

SEQ ID NO: 1033984 - RNA, 19 nt, Homo sapiens
  misc_RNA (1)...(19): siRNA sense strand
gaauaaucuuggaucagaa

SEQ ID NO: 1033985 - RNA, 19 nt, Homo sapiens
  misc_RNA (1)...(19): siRNA sense strand
gagaaaagccuuauacaug

SEQ ID NO: 1033986 - RNA, 19 nt, Homo sapiens
  misc_RNA (1)...(19): siRNA sense strand
gauaugaagaugaacaaga

SEQ ID NO: 1033987 - RNA, 19 nt, Homo sapiens
  misc_RNA (1)...(19): siRNA sense strand
gaaagagaaauggaaauca

SEQ ID NO: 1033988 - RNA, 19 nt, Homo sapiens
  misc_RNA (1)...(19): siRNA sense strand
gaccugcuguucagagaga

SEQ ID NO: 1033989 - RNA, 19 nt, Homo sapiens
  misc_RNA (1)...(19): siRNA sense strand
auacaaaugugaagaaugc

SEQ ID NO: 1033990 - RNA, 19 nt, Homo sapiens
  misc_RNA (1)...(19): siRNA sense strand
cgagaauaaucuuggauca

SEQ ID NO: 1033991 - RNA, 19 nt, Homo sapiens
  misc_RNA (1)...(19): siRNA sense strand
aaacuuggagagauucaua

SEQ ID NO: 1033992 - RNA, 19 nt, Homo sapiens
  misc_RNA (1)...(19): siRNA sense strand
ccaaggaccugcuguucag

SEQ ID NO: 1033993 - RNA, 19 nt, Homo sapiens
  misc_RNA (1)...(19): siRNA sense strand
ucccagacuucccaagaua

SEQ ID NO: 1033994 - RNA, 19 nt, Homo sapiens
  misc_RNA (1)...(19): siRNA sense strand
cauaaauccaccugccuua

SEQ ID NO: 1033995 - RNA, 19 nt, Homo sapiens
  misc_RNA (1)...(19): siRNA sense strand
ggagguguuucuucugaca

SEQ ID NO: 1033996 - RNA, 19 nt, Homo sapiens
  misc_RNA (1)...(19): siRNA sense strand
ggauaugcccuuaagagau

SEQ ID NO: 1033997 - RNA, 19 nt, Homo sapiens
  misc_RNA (1)...(19): siRNA sense strand
uauaggaucuuucacucau

SEQ ID NO: 1033998 - RNA, 19 nt, Homo sapiens
  misc_RNA (1)...(19): siRNA sense strand
ucaagaauggugcucaauu

SEQ ID NO: 1033999 - RNA, 19 nt, Homo sapiens
  misc_RNA (1)...(19): siRNA sense strand
aaauuacccugccaagugu

SEQ ID NO: 1034000 - RNA, 19 nt, Homo sapiens
  misc_RNA (1)...(19): siRNA sense strand
aaaccaaccugcggucuca

SEQ ID NO: 1034001 - RNA, 19 nt, Homo sapiens
  misc_RNA (1)...(19): siRNA sense strand
ucagagagaagaagggauu

SEQ ID NO: 1034002 - RNA, 19 nt, Homo sapiens
  misc_RNA (1)...(19): siRNA sense strand
ccacauaccaccgccauau

SEQ ID NO: 1034003 - RNA, 19 nt, Homo sapiens
  misc_RNA (1)...(19): siRNA sense strand
gaacaagauggcuggaaca

SEQ ID NO: 1034004 - RNA, 19 nt, Homo sapiens
  misc_RNA (1)...(19): siRNA sense strand
gaagggauuucugaguucu

SEQ ID NO: 1034005 - RNA, 19 nt, Homo sapiens
  misc_RNA (1)...(19): siRNA sense strand
ugacaacccauacaacuca

SEQ ID NO: 1034006 - RNA, 19 nt, Homo sapiens
  misc_RNA (1)...(19): siRNA sense strand
gaacgguccuaggccugaa

SEQ ID NO: 1034007 - RNA, 19 nt, Homo sapiens
  misc_RNA (1)...(19): siRNA sense strand
gaggauaugcccuuaagag

SEQ ID NO: 1034008 - RNA, 19 nt, Homo sapiens
  misc_RNA (1)...(19): siRNA sense strand
agaaacaggacaaggauau

SEQ ID NO: 1034009 - RNA, 19 nt, Homo sapiens
  misc_RNA (1)...(19): siRNA sense strand
gagaauccacacaggagaa

SEQ ID NO: 1034010 - RNA, 19 nt, Homo sapiens
  misc_RNA (1)...(19): siRNA sense strand
aaaggcuucuuccagauau

SEQ ID NO: 1034011 - RNA, 19 nt, Homo sapiens
  misc_RNA (1)...(19): siRNA sense strand
ugagguacaucagaaagga

SEQ ID NO: 1034012 - RNA, 19 nt, Homo sapiens
  misc_RNA (1)...(19): siRNA sense strand
gcaaugacaaagccagugu

SEQ ID NO: 1034013 - RNA, 19 nt, Homo sapiens
  misc_RNA (1)...(19): siRNA sense strand
caaggcaaucaaauaguuu

SEQ ID NO: 1034014 - RNA, 19 nt, Homo sapiens
  misc_RNA (1)...(19): siRNA sense strand
gccccaaggucuuuaagua

SEQ ID NO: 1034015 - RNA, 19 nt, Homo sapiens
  misc_RNA (1)...(19): siRNA sense strand
cacaagagaagcaaacaug

SEQ ID NO: 1034016 - RNA, 19 nt, Homo sapiens
  misc_RNA (1)...(19): siRNA sense strand
agaaaagccuuauacaugu

SEQ ID NO: 1034017 - RNA, 19 nt, Homo sapiens
  misc_RNA (1)...(19): siRNA sense strand
ccagagcaaugagggaaau

SEQ ID NO: 1034018 - RNA, 19 nt, Homo sapiens
  misc_RNA (1)...(19): siRNA sense strand
gagcaggguguaucucuca

SEQ ID NO: 1034019 - RNA, 19 nt, Homo sapiens
  misc_RNA (1)...(19): siRNA sense strand
ucaggaaggguccauaaau

SEQ ID NO: 1034020 - RNA, 19 nt, Homo sapiens
  misc_RNA (1)...(19): siRNA sense strand
aaacaggacaaggauauga

SEQ ID NO: 1034021 - RNA, 19 nt, Homo sapiens
  misc_RNA (1)...(19): siRNA sense strand
caagacagcaauaauucau

SEQ ID NO: 1034022 - RNA, 19 nt, Homo sapiens
  misc_RNA (1)...(19): siRNA sense strand
ugugaaccauccgagaaua

SEQ ID NO: 1034023 - RNA, 19 nt, Homo sapiens
  misc_RNA (1)...(19): siRNA sense strand
gaaacaggacaaggauaug

SEQ ID NO: 1034024 - RNA, 19 nt, Homo sapiens
  misc_RNA (1)...(19): siRNA sense strand
cuaagaaccauauuucagu

SEQ ID NO: 1034025 - RNA, 19 nt, Homo sapiens
  misc_RNA (1)...(19): siRNA sense strand
cuggagcaguuuaugauug

SEQ ID NO: 1034026 - RNA, 19 nt, Homo sapiens
  misc_RNA (1)...(19): siRNA sense strand
cagcaauaauucauaugca

SEQ ID NO: 1034027 - RNA, 19 nt, Homo sapiens
  misc_RNA (1)...(19): siRNA sense strand
cagagaagacacaggaaug

SEQ ID NO: 1034028 - RNA, 19 nt, Homo sapiens
  misc_RNA (1)...(19): siRNA sense strand
cccaaggucuuuaaguauc

SEQ ID NO: 1034029 - RNA, 19 nt, Homo sapiens
  misc_RNA (1)...(19): siRNA sense strand
gacaaggauaugaagauga

SEQ ID NO: 1034030 - RNA, 19 nt, Homo sapiens
  misc_RNA (1)...(19): siRNA sense strand
ccugacugaugacagcaua

SEQ ID NO: 1034031 - RNA, 19 nt, Homo sapiens
  misc_RNA (1)...(19): siRNA sense strand
uuggagagauucauagaag

SEQ ID NO: 1034032 - RNA, 19 nt, Homo sapiens
  misc_RNA (1)...(19): siRNA sense strand
ccaaggucuuuaaguaucu

SEQ ID NO: 1034033 - RNA, 19 nt, Homo sapiens
  misc_RNA (1)...(19): siRNA sense strand
aaauucagcguuucaacaa

SEQ ID NO: 1034034 - RNA, 19 nt, Homo sapiens
  misc_RNA (1)...(19): siRNA sense strand
agagggagguguuucuucu

SEQ ID NO: 1034035 - RNA, 19 nt, Homo sapiens
  misc_RNA (1)...(19): siRNA sense strand
aaucaaggcaaucaaauag

SEQ ID NO: 1034036 - RNA, 19 nt, Homo sapiens
  misc_RNA (1)...(19): siRNA sense strand
gugaaccauccgagaauaa

SEQ ID NO: 1034037 - RNA, 19 nt, Homo sapiens
  misc_RNA (1)...(19): siRNA sense strand
acaaagccagugugaaaga

SEQ ID NO: 1034038 - RNA, 19 nt, Homo sapiens
  misc_RNA (1)...(19): siRNA sense strand
ggugcucaauucauuucaa

SEQ ID NO: 1034039 - RNA, 19 nt, Homo sapiens
  misc_RNA (1)...(19): siRNA sense strand
ucagaaaggaucccaugga

SEQ ID NO: 1034040 - RNA, 19 nt, Homo sapiens
  misc_RNA (1)...(19): siRNA sense strand
gcccuuaagagaugucauu

SEQ ID NO: 1034041 - RNA, 19 nt, Homo sapiens
  misc_RNA (1)...(19): siRNA sense strand
gggacaggaagcucucuuu

SEQ ID NO: 1034042 - RNA, 19 nt, Homo sapiens
  misc_RNA (1)...(19): siRNA sense strand
gagaaauggaaaucaagug

SEQ ID NO: 1034043 - RNA, 19 nt, Homo sapiens
  misc_RNA (1)...(19): siRNA sense strand
gaaccauccgagaauaauc

SEQ ID NO: 1034044 - RNA, 19 nt, Homo sapiens
  misc_RNA (1)...(19): siRNA sense strand
gacaagcuaccgccaguca

SEQ ID NO: 1034045 - RNA, 19 nt, Homo sapiens
  misc_RNA (1)...(19): siRNA sense strand
gagaggccauuuguuuguc

SEQ ID NO: 1034046 - RNA, 19 nt, Homo sapiens
  misc_RNA (1)...(19): siRNA sense strand
gcaggaauugcaaagacuu

SEQ ID NO: 1034047 - RNA, 19 nt, Homo sapiens
  misc_RNA (1)...(19): siRNA sense strand
agggagguguuucuucuga

SEQ ID NO: 1034048 - RNA, 19 nt, Homo sapiens
  misc_RNA (1)...(19): siRNA sense strand
uucccaagauacuuccuua

SEQ ID NO: 1034049 - RNA, 19 nt, Homo sapiens
  misc_RNA (1)...(19): siRNA sense strand
gguggccacugcaaugaca

SEQ ID NO: 1034050 - RNA, 19 nt, Homo sapiens
  misc_RNA (1)...(19): siRNA sense strand
ggacacccucccagacuuc

SEQ ID NO: 1034051 - RNA, 19 nt, Homo sapiens
  misc_RNA (1)...(19): siRNA sense strand
ccacaugcagggacaggaa

SEQ ID NO: 1034052 - RNA, 19 nt, Homo sapiens
  misc_RNA (1)...(19): siRNA sense strand
ucauagaagaccugacuga

SEQ ID NO: 1034053 - RNA, 19 nt, Homo sapiens
  misc_RNA (1)...(19): siRNA sense strand
ugaaagagaaauggaaauc

SEQ ID NO: 1034054 - RNA, 19 nt, Homo sapiens
  misc_RNA (1)...(19): siRNA sense strand
uauuaguccuggagcaguu

SEQ ID NO: 1034055 - RNA, 19 nt, Homo sapiens
  misc_RNA (1)...(19): siRNA sense strand
ugagaggccauuuguuugu

SEQ ID NO: 1034056 - RNA, 19 nt, Homo sapiens
  misc_RNA (1)...(19): siRNA sense strand
gcccaaaccacaagagaag

SEQ ID NO: 1034057 - RNA, 19 nt, Homo sapiens
  misc_RNA (1)...(19): siRNA sense strand
uaaauccaccugccuuagu

SEQ ID NO: 1034058 - RNA, 19 nt, Homo sapiens
  misc_RNA (1)...(19): siRNA sense strand
caaagccagugugaaagag

SEQ ID NO: 1034059 - RNA, 19 nt, Homo sapiens
  misc_RNA (1)...(19): siRNA sense strand
gaaaagccuuauacauguc

SEQ ID NO: 1034060 - RNA, 19 nt, Homo sapiens
  misc_RNA (1)...(19): siRNA sense strand
cuacgggugcaucagauaa

SEQ ID NO: 1034061 - RNA, 19 nt, Homo sapiens
  misc_RNA (1)...(19): siRNA sense strand
agaagacacaggaaugaga

SEQ ID NO: 1034062 - RNA, 19 nt, Homo sapiens
  misc_RNA (1)...(19): siRNA sense strand
cccaagauacuuccuuaga

SEQ ID NO: 1034063 - RNA, 19 nt, Homo sapiens
  misc_RNA (1)...(19): siRNA sense strand
cagcuaaccucuagaauaa

SEQ ID NO: 1034064 - RNA, 19 nt, Homo sapiens
  misc_RNA (1)...(19): siRNA sense strand
gaaugaaccuuauuuggaa

SEQ ID NO: 1034065 - RNA, 19 nt, Homo sapiens
  misc_RNA (1)...(19): siRNA sense strand
ugacaaagauuuaccaguu

SEQ ID NO: 1034066 - RNA, 19 nt, Homo sapiens
  misc_RNA (1)...(19): siRNA sense strand
gaagaguccaccucaauua

SEQ ID NO: 1034067 - RNA, 19 nt, Homo sapiens
  misc_RNA (1)...(19): siRNA sense strand
gacaaagauuuaccaguuu

SEQ ID NO: 1034068 - RNA, 19 nt, Homo sapiens
  misc_RNA (1)...(19): siRNA sense strand
cgagagcacuuaccuguga

SEQ ID NO: 1034069 - RNA, 19 nt, Homo sapiens
  misc_RNA (1)...(19): siRNA sense strand
uaaagaaggauccugcuua

SEQ ID NO: 1034070 - RNA, 19 nt, Homo sapiens
  misc_RNA (1)...(19): siRNA sense strand
ggacacaaauauaucuguu

SEQ ID NO: 1034071 - RNA, 19 nt, Homo sapiens
  misc_RNA (1)...(19): siRNA sense strand
agaaggauccugcuuauuu

SEQ ID NO: 1034072 - RNA, 19 nt, Homo sapiens
  misc_RNA (1)...(19): siRNA sense strand
acacaaaguuucaucauuc

SEQ ID NO: 1034073 - RNA, 19 nt, Homo sapiens
  misc_RNA (1)...(19): siRNA sense strand
gcgauuggauuggacuuua

SEQ ID NO: 1034074 - RNA, 19 nt, Homo sapiens
  misc_RNA (1)...(19): siRNA sense strand
acacauagaugccauuauc

SEQ ID NO: 1034075 - RNA, 19 nt, Homo sapiens
  misc_RNA (1)...(19): siRNA sense strand
gacacaaaguuucaucauu

SEQ ID NO: 1034076 - RNA, 19 nt, Homo sapiens
  misc_RNA (1)...(19): siRNA sense strand
gaaacacacagaaguagaa

SEQ ID NO: 1034077 - RNA, 19 nt, Homo sapiens
  misc_RNA (1)...(19): siRNA sense strand
ccucagcauuccaaacuua

SEQ ID NO: 1034078 - RNA, 19 nt, Homo sapiens
  misc_RNA (1)...(19): siRNA sense strand
aaagaaggauccugcuuau

SEQ ID NO: 1034079 - RNA, 19 nt, Homo sapiens
  misc_RNA (1)...(19): siRNA sense strand
aaauagagaugaagagauc

SEQ ID NO: 1034080 - RNA, 19 nt, Homo sapiens
  misc_RNA (1)...(19): siRNA sense strand
gcagguggacacaaauaua

SEQ ID NO: 1034081 - RNA, 19 nt, Homo sapiens
  misc_RNA (1)...(19): siRNA sense strand
ggaaggaaaugacccaaaa

SEQ ID NO: 1034082 - RNA, 19 nt, Homo sapiens
  misc_RNA (1)...(19): siRNA sense strand
ucuagaagcucuuugugaa

SEQ ID NO: 1034083 - RNA, 19 nt, Homo sapiens
  misc_RNA (1)...(19): siRNA sense strand
caaacuuacugacagagaa

SEQ ID NO: 1034084 - RNA, 19 nt, Homo sapiens
  misc_RNA (1)...(19): siRNA sense strand
aaagauauguggcaagcuu

SEQ ID NO: 1034085 - RNA, 19 nt, Homo sapiens
  misc_RNA (1)...(19): siRNA sense strand
ucagcaaacuaccuuauau

SEQ ID NO: 1034086 - RNA, 19 nt, Homo sapiens
  misc_RNA (1)...(19): siRNA sense strand
gaccuuauuucacuauuca

SEQ ID NO: 1034087 - RNA, 19 nt, Homo sapiens
  misc_RNA (1)...(19): siRNA sense strand
ggaagaguccaccucaauu

SEQ ID NO: 1034088 - RNA, 19 nt, Homo sapiens
  misc_RNA (1)...(19): siRNA sense strand
gcacuggccacacauuauu

SEQ ID NO: 1034089 - RNA, 19 nt, Homo sapiens
  misc_RNA (1)...(19): siRNA sense strand
gaaggauccugcuuauuuu

SEQ ID NO: 1034090 - RNA, 19 nt, Homo sapiens
  misc_RNA (1)...(19): siRNA sense strand
ugaagaaucuaaagacucu

SEQ ID NO: 1034091 - RNA, 19 nt, Homo sapiens
  misc_RNA (1)...(19): siRNA sense strand
ccagaaacacacagaagua

SEQ ID NO: 1034092 - RNA, 19 nt, Homo sapiens
  misc_RNA (1)...(19): siRNA sense strand
gcaaacuaccuuauauuca

SEQ ID NO: 1034093 - RNA, 19 nt, Homo sapiens
  misc_RNA (1)...(19): siRNA sense strand
ucagcuaaccucuagaaua

SEQ ID NO: 1034094 - RNA, 19 nt, Homo sapiens
  misc_RNA (1)...(19): siRNA sense strand
gaaauuccuaagcagguua

SEQ ID NO: 1034095 - RNA, 19 nt, Homo sapiens
  misc_RNA (1)...(19): siRNA sense strand
gaccucagcuaaccucuag

SEQ ID NO: 1034096 - RNA, 19 nt, Homo sapiens
  misc_RNA (1)...(19): siRNA sense strand
cuaagcagguuaaagugaa

SEQ ID NO: 1034097 - RNA, 19 nt, Homo sapiens
  misc_RNA (1)...(19): siRNA sense strand
gaguccaccucaauuaaga

SEQ ID NO: 1034098 - RNA, 19 nt, Homo sapiens
  misc_RNA (1)...(19): siRNA sense strand
uuugauggcugguuuaaga

SEQ ID NO: 1034099 - RNA, 19 nt, Homo sapiens
  misc_RNA (1)...(19): siRNA sense strand
gcacuuguuaacuguauuu

SEQ ID NO: 1034100 - RNA, 19 nt, Homo sapiens
  misc_RNA (1)...(19): siRNA sense strand
gcacuuaccugugaaaccu

SEQ ID NO: 1034101 - RNA, 19 nt, Homo sapiens
  misc_RNA (1)...(19): siRNA sense strand
uuucagaaguccuugguuu

SEQ ID NO: 1034102 - RNA, 19 nt, Homo sapiens
  misc_RNA (1)...(19): siRNA sense strand
acagauagcaccagaguau

SEQ ID NO: 1034103 - RNA, 19 nt, Homo sapiens
  misc_RNA (1)...(19): siRNA sense strand
gcucaaaguguuauucuuc

SEQ ID NO: 1034104 - RNA, 19 nt, Homo sapiens
  misc_RNA (1)...(19): siRNA sense strand
uaauuuauccucagcauuc

SEQ ID NO: 1034105 - RNA, 19 nt, Homo sapiens
  misc_RNA (1)...(19): siRNA sense strand
ucagugauuuccgaccuua

SEQ ID NO: 1034106 - RNA, 19 nt, Homo sapiens
  misc_RNA (1)...(19): siRNA sense strand
agaaugaaccuuauuugga

SEQ ID NO: 1034107 - RNA, 19 nt, Homo sapiens
  misc_RNA (1)...(19): siRNA sense strand
ugugaaaccugacacuaug

SEQ ID NO: 1034108 - RNA, 19 nt, Homo sapiens
  misc_RNA (1)...(19): siRNA sense strand
ccuaaagucuccaaauuuu

SEQ ID NO: 1034109 - RNA, 19 nt, Homo sapiens
  misc_RNA (1)...(19): siRNA sense strand
ccgacaaguucgagauaaa

SEQ ID NO: 1034110 - RNA, 19 nt, Homo sapiens
  misc_RNA (1)...(19): siRNA sense strand
acacagaaguagaaacagu

SEQ ID NO: 1034111 - RNA, 19 nt, Homo sapiens
  misc_RNA (1)...(19): siRNA sense strand
ggaaucaucagagacugua

SEQ ID NO: 1034112 - RNA, 19 nt, Homo sapiens
  misc_RNA (1)...(19): siRNA sense strand
guaaugaagguacggauuc

SEQ ID NO: 1034113 - RNA, 19 nt, Homo sapiens
  misc_RNA (1)...(19): siRNA sense strand
gcuccgcccucaguuauau

SEQ ID NO: 1034114 - RNA, 19 nt, Homo sapiens
  misc_RNA (1)...(19): siRNA sense strand
ugggacaacucaaauagug

SEQ ID NO: 1034115 - RNA, 19 nt, Homo sapiens
  misc_RNA (1)...(19): siRNA sense strand
uaagcagguuaaagugaaa

SEQ ID NO: 1034116 - RNA, 19 nt, Homo sapiens
  misc_RNA (1)...(19): siRNA sense strand
caagcuccgcccucaguua

SEQ ID NO: 1034117 - RNA, 19 nt, Homo sapiens
  misc_RNA (1)...(19): siRNA sense strand
gagacuguauuggcacuug

SEQ ID NO: 1034118 - RNA, 19 nt, Homo sapiens
  misc_RNA (1)...(19): siRNA sense strand
gcuaaccucuagaauaaaa

SEQ ID NO: 1034119 - RNA, 19 nt, Homo sapiens
  misc_RNA (1)...(19): siRNA sense strand
ggccacacauuauucgaau

SEQ ID NO: 1034120 - RNA, 19 nt, Homo sapiens
  misc_RNA (1)...(19): siRNA sense strand
gauacccaguuuuguuuua

SEQ ID NO: 1034121 - RNA, 19 nt, Homo sapiens
  misc_RNA (1)...(19): siRNA sense strand
caggugaaauuccuaagca

SEQ ID NO: 1034122 - RNA, 19 nt, Homo sapiens
  misc_RNA (1)...(19): siRNA sense strand
cagcacuggccacacauua

SEQ ID NO: 1034123 - RNA, 19 nt, Homo sapiens
  misc_RNA (1)...(19): siRNA sense strand
gaucagcaaacuaccuuau

SEQ ID NO: 1034124 - RNA, 19 nt, Homo sapiens
  misc_RNA (1)...(19): siRNA sense strand
aaauucagguugucuugga

SEQ ID NO: 1034125 - RNA, 19 nt, Homo sapiens
  misc_RNA (1)...(19): siRNA sense strand
gaaaacaggaccucagcua

SEQ ID NO: 1034126 - RNA, 19 nt, Homo sapiens
  misc_RNA (1)...(19): siRNA sense strand
ucgaauaggagaccuuaaa

SEQ ID NO: 1034127 - RNA, 19 nt, Homo sapiens
  misc_RNA (1)...(19): siRNA sense strand
cagcaaacuaccuuauauu

SEQ ID NO: 1034128 - RNA, 19 nt, Homo sapiens
  misc_RNA (1)...(19): siRNA sense strand
uuccuaaagucuccaaauu

SEQ ID NO: 1034129 - RNA, 19 nt, Homo sapiens
  misc_RNA (1)...(19): siRNA sense strand
gaaaacacuugagaaaaca

SEQ ID NO: 1034130 - RNA, 19 nt, Homo sapiens
  misc_RNA (1)...(19): siRNA sense strand
caucauuccauuagaaaga

SEQ ID NO: 1034131 - RNA, 19 nt, Homo sapiens
  misc_RNA (1)...(19): siRNA sense strand
gaaggguguacaacagaaa

SEQ ID NO: 1034132 - RNA, 19 nt, Homo sapiens
  misc_RNA (1)...(19): siRNA sense strand
agauagcaccagaguauuu

SEQ ID NO: 1034133 - RNA, 19 nt, Homo sapiens
  misc_RNA (1)...(19): siRNA sense strand
ucugggagcuggugcuguu

SEQ ID NO: 1034134 - RNA, 19 nt, Homo sapiens
  misc_RNA (1)...(19): siRNA sense strand
cagcagguggacacaaaua

SEQ ID NO: 1034135 - RNA, 19 nt, Homo sapiens
  misc_RNA (1)...(19): siRNA sense strand
ccaccucaauuaagacagu

SEQ ID NO: 1034136 - RNA, 19 nt, Homo sapiens
  misc_RNA (1)...(19): siRNA sense strand
aaaguuacggacacacaua

SEQ ID NO: 1034137 - RNA, 19 nt, Homo sapiens
  misc_RNA (1)...(19): siRNA sense strand
ugaaauuccuaagcagguu

SEQ ID NO: 1034138 - RNA, 19 nt, Homo sapiens
  misc_RNA (1)...(19): siRNA sense strand
gguaauuuauccucagcau

SEQ ID NO: 1034139 - RNA, 19 nt, Homo sapiens
  misc_RNA (1)...(19): siRNA sense strand
ucuuggagauacccaguuu

SEQ ID NO: 1034140 - RNA, 19 nt, Homo sapiens
  misc_RNA (1)...(19): siRNA sense strand
gggugucgcugcauugucu

SEQ ID NO: 1034141 - RNA, 19 nt, Homo sapiens
  misc_RNA (1)...(19): siRNA sense strand
agaaggguguacaacagaa

SEQ ID NO: 1034142 - RNA, 19 nt, Homo sapiens
  misc_RNA (1)...(19): siRNA sense strand
gcccucaguuauauuagga

SEQ ID NO: 1034143 - RNA, 19 nt, Homo sapiens
  misc_RNA (1)...(19): siRNA sense strand
cgaccuuauuucacuauuc

SEQ ID NO: 1034144 - RNA, 19 nt, Homo sapiens
  misc_RNA (1)...(19): siRNA sense strand
gguaaugaagguacggauu

SEQ ID NO: 1034145 - RNA, 19 nt, Homo sapiens
  misc_RNA (1)...(19): siRNA sense strand
cagguggacacaaauauau

SEQ ID NO: 1034146 - RNA, 19 nt, Homo sapiens
  misc_RNA (1)...(19): siRNA sense strand
gccauuaucuuagcauugc

SEQ ID NO: 1034147 - RNA, 19 nt, Homo sapiens
  misc_RNA (1)...(19): siRNA sense strand
gagagcacuuaccugugaa

SEQ ID NO: 1034148 - RNA, 19 nt, Homo sapiens
  misc_RNA (1)...(19): siRNA sense strand
acacacagaaguagaaaca

SEQ ID NO: 1034149 - RNA, 19 nt, Homo sapiens
  misc_RNA (1)...(19): siRNA sense strand
ggaccucagcuaaccucua

SEQ ID NO: 1034150 - RNA, 19 nt, Homo sapiens
  misc_RNA (1)...(19): siRNA sense strand
ugaaaacacuugagaaaac

SEQ ID NO: 1034151 - RNA, 19 nt, Homo sapiens
  misc_RNA (1)...(19): siRNA sense strand
aaacagauagcaccagagu

SEQ ID NO: 1034152 - RNA, 19 nt, Homo sapiens
  misc_RNA (1)...(19): siRNA sense strand
cacagaaguagaaacagua

SEQ ID NO: 1034153 - RNA, 19 nt, Homo sapiens
  misc_RNA (1)...(19): siRNA sense strand
ggagauacccaguuuuguu

SEQ ID NO: 1034154 - RNA, 19 nt, Homo sapiens
  misc_RNA (1)...(19): siRNA sense strand
acagaaggguguacaacag

SEQ ID NO: 1034155 - RNA, 19 nt, Homo sapiens
  misc_RNA (1)...(19): siRNA sense strand
cauuaaaguacuucaguga

SEQ ID NO: 1034156 - RNA, 19 nt, Homo sapiens
  misc_RNA (1)...(19): siRNA sense strand
gcaccagaguauuuugaaa

SEQ ID NO: 1034157 - RNA, 19 nt, Homo sapiens
  misc_RNA (1)...(19): siRNA sense strand
cuugaugccuuugcagaaa

SEQ ID NO: 1034158 - RNA, 19 nt, Homo sapiens
  misc_RNA (1)...(19): siRNA sense strand
guucaugagguggauauuu

SEQ ID NO: 1034159 - RNA, 19 nt, Homo sapiens
  misc_RNA (1)...(19): siRNA sense strand
gagauacccaguuuuguuu

SEQ ID NO: 1034160 - RNA, 19 nt, Homo sapiens
  misc_RNA (1)...(19): siRNA sense strand
ggacuugcaaggcauacug

SEQ ID NO: 1034161 - RNA, 19 nt, Homo sapiens
  misc_RNA (1)...(19): siRNA sense strand
uagaaacaguagaccuugu

SEQ ID NO: 1034162 - RNA, 19 nt, Homo sapiens
  misc_RNA (1)...(19): siRNA sense strand
aagaguccaccucaauuaa

SEQ ID NO: 1034163 - RNA, 19 nt, Homo sapiens
  misc_RNA (1)...(19): siRNA sense strand
ggcaaucucuccaaucuua

SEQ ID NO: 1034164 - RNA, 19 nt, Homo sapiens
  misc_RNA (1)...(19): siRNA sense strand
gaagugaaauguugcacaa

SEQ ID NO: 1034165 - RNA, 19 nt, Homo sapiens
  misc_RNA (1)...(19): siRNA sense strand
ggaaacagguagucagaau

SEQ ID NO: 1034166 - RNA, 19 nt, Homo sapiens
  misc_RNA (1)...(19): siRNA sense strand
gaagaugaagauacagaua

SEQ ID NO: 1034167 - RNA, 19 nt, Homo sapiens
  misc_RNA (1)...(19): siRNA sense strand
guauggaagugaaauguug

SEQ ID NO: 1034168 - RNA, 19 nt, Homo sapiens
  misc_RNA (1)...(19): siRNA sense strand
gcagcacucucauaccuau

SEQ ID NO: 1034169 - RNA, 19 nt, Homo sapiens
  misc_RNA (1)...(19): siRNA sense strand
caagcgagauccucuagau

SEQ ID NO: 1034170 - RNA, 19 nt, Homo sapiens
  misc_RNA (1)...(19): siRNA sense strand
gagauccucuagaugaaga

SEQ ID NO: 1034171 - RNA, 19 nt, Homo sapiens
  misc_RNA (1)...(19): siRNA sense strand
gcuacucucuuccaucuuc

SEQ ID NO: 1034172 - RNA, 19 nt, Homo sapiens
  misc_RNA (1)...(19): siRNA sense strand
ggaaaccgcucagacuucu

SEQ ID NO: 1034173 - RNA, 19 nt, Homo sapiens
  misc_RNA (1)...(19): siRNA sense strand
gacaugaaccucagcauca

SEQ ID NO: 1034174 - RNA, 19 nt, Homo sapiens
  misc_RNA (1)...(19): siRNA sense strand
gcgagauccucuagaugaa

SEQ ID NO: 1034175 - RNA, 19 nt, Homo sapiens
  misc_RNA (1)...(19): siRNA sense strand
ccggguggcugacuacauu

SEQ ID NO: 1034176 - RNA, 19 nt, Homo sapiens
  misc_RNA (1)...(19): siRNA sense strand
gcaagaggacuguaugucu

SEQ ID NO: 1034177 - RNA, 19 nt, Homo sapiens
  misc_RNA (1)...(19): siRNA sense strand
gcggcaaucucuccaaucu

SEQ ID NO: 1034178 - RNA, 19 nt, Homo sapiens
  misc_RNA (1)...(19): siRNA sense strand
ccaccgcaauucauaggaa

SEQ ID NO: 1034179 - RNA, 19 nt, Homo sapiens
  misc_RNA (1)...(19): siRNA sense strand
gcacaagcgagauccucua

SEQ ID NO: 1034180 - RNA, 19 nt, Homo sapiens
  misc_RNA (1)...(19): siRNA sense strand
gaaacagguagucagaaug

SEQ ID NO: 1034181 - RNA, 19 nt, Homo sapiens
  misc_RNA (1)...(19): siRNA sense strand
agaugaagaugaagauaca

SEQ ID NO: 1034182 - RNA, 19 nt, Homo sapiens
  misc_RNA (1)...(19): siRNA sense strand
aggcuacgcuucagguuau

SEQ ID NO: 1034183 - RNA, 19 nt, Homo sapiens
  misc_RNA (1)...(19): siRNA sense strand
aaacagguagucagaaugu

SEQ ID NO: 1034184 - RNA, 19 nt, Homo sapiens
  misc_RNA (1)...(19): siRNA sense strand
uagcuacucucuuccaucu

SEQ ID NO: 1034185 - RNA, 19 nt, Homo sapiens
  misc_RNA (1)...(19): siRNA sense strand
gaaccucagcaucaucaug

SEQ ID NO: 1034186 - RNA, 19 nt, Homo sapiens
  misc_RNA (1)...(19): siRNA sense strand
gcagcucuguacagccauu

SEQ ID NO: 1034187 - RNA, 19 nt, Homo sapiens
  misc_RNA (1)...(19): siRNA sense strand
cgucuucauucgcuacaaa

SEQ ID NO: 1034188 - RNA, 19 nt, Homo sapiens
  misc_RNA (1)...(19): siRNA sense strand
cgcuucagguuaugguuua

SEQ ID NO: 1034189 - RNA, 19 nt, Homo sapiens
  misc_RNA (1)...(19): siRNA sense strand
gaccggcacuauguuagga

SEQ ID NO: 1034190 - RNA, 19 nt, Homo sapiens
  misc_RNA (1)...(19): siRNA sense strand
caacgugacccugcucuuc

SEQ ID NO: 1034191 - RNA, 19 nt, Homo sapiens
  misc_RNA (1)...(19): siRNA sense strand
ugguuuagcuacucucuuc

SEQ ID NO: 1034192 - RNA, 19 nt, Homo sapiens
  misc_RNA (1)...(19): siRNA sense strand
cugaacugcuggcaaguau

SEQ ID NO: 1034193 - RNA, 19 nt, Homo sapiens
  misc_RNA (1)...(19): siRNA sense strand
caggcuacgcuucagguua

SEQ ID NO: 1034194 - RNA, 19 nt, Homo sapiens
  misc_RNA (1)...(19): siRNA sense strand
guggcugacuacauuguga

SEQ ID NO: 1034195 - RNA, 19 nt, Homo sapiens
  misc_RNA (1)...(19): siRNA sense strand
gauggaaaccgcucagacu

SEQ ID NO: 1034196 - RNA, 19 nt, Homo sapiens
  misc_RNA (1)...(19): siRNA sense strand
ugacuacauugugaagguu

SEQ ID NO: 1034197 - RNA, 19 nt, Homo sapiens
  misc_RNA (1)...(19): siRNA sense strand
cauguuuccuuugcuguau

SEQ ID NO: 1034198 - RNA, 19 nt, Homo sapiens
  misc_RNA (1)...(19): siRNA sense strand
auaaugaccggcacuaugu

SEQ ID NO: 1034199 - RNA, 19 nt, Homo sapiens
  misc_RNA (1)...(19): siRNA sense strand
uuaugucccugcugguuga

SEQ ID NO: 1034200 - RNA, 19 nt, Homo sapiens
  misc_RNA (1)...(19): siRNA sense strand
guacagccauucuaaaacu

SEQ ID NO: 1034201 - RNA, 19 nt, Homo sapiens
  misc_RNA (1)...(19): siRNA sense strand
aaugaccggcacuauguua

SEQ ID NO: 1034202 - RNA, 19 nt, Homo sapiens
  misc_RNA (1)...(19): siRNA sense strand
gacuguaugucuggaaaca

SEQ ID NO: 1034203 - RNA, 19 nt, Homo sapiens
  misc_RNA (1)...(19): siRNA sense strand
gaacugcuggcaaguaucc

SEQ ID NO: 1034204 - RNA, 19 nt, Homo sapiens
  misc_RNA (1)...(19): siRNA sense strand
cagcugggcuuggaucaac

SEQ ID NO: 1034205 - RNA, 19 nt, Homo sapiens
  misc_RNA (1)...(19): siRNA sense strand
gaagaggaaauggcagaca

SEQ ID NO: 1034206 - RNA, 19 nt, Homo sapiens
  misc_RNA (1)...(19): siRNA sense strand
aaguaucccugcagcuguu

SEQ ID NO: 1034207 - RNA, 19 nt, Homo sapiens
  misc_RNA (1)...(19): siRNA sense strand
gcucuguacagccauucua

SEQ ID NO: 1034208 - RNA, 19 nt, Homo sapiens
  misc_RNA (1)...(19): siRNA sense strand
ggucucugcuagugacucu

SEQ ID NO: 1034209 - RNA, 19 nt, Homo sapiens
  misc_RNA (1)...(19): siRNA sense strand
agcgagauccucuagauga

SEQ ID NO: 1034210 - RNA, 19 nt, Homo sapiens
  misc_RNA (1)...(19): siRNA sense strand
cgcucagacuucucucuaa

SEQ ID NO: 1034211 - RNA, 19 nt, Homo sapiens
  misc_RNA (1)...(19): siRNA sense strand
gcuucuggcccucgucuug

SEQ ID NO: 1034212 - RNA, 19 nt, Homo sapiens
  misc_RNA (1)...(19): siRNA sense strand
uggcagacacuuccuaugg

SEQ ID NO: 1034213 - RNA, 19 nt, Homo sapiens
  misc_RNA (1)...(19): siRNA sense strand
gcaaucucuccaaucuuau

SEQ ID NO: 1034214 - RNA, 19 nt, Homo sapiens
  misc_RNA (1)...(19): siRNA sense strand
gaggaaauggcagacacuu

SEQ ID NO: 1034215 - RNA, 19 nt, Homo sapiens
  misc_RNA (1)...(19): siRNA sense strand
caaucucuccaaucuuaug

SEQ ID NO: 1034216 - RNA, 19 nt, Homo sapiens
  misc_RNA (1)...(19): siRNA sense strand
ggguugggcgucuucauuc

SEQ ID NO: 1034217 - RNA, 19 nt, Homo sapiens
  misc_RNA (1)...(19): siRNA sense strand
ccgcucagacuucucucua

SEQ ID NO: 1034218 - RNA, 19 nt, Homo sapiens
  misc_RNA (1)...(19): siRNA sense strand
caauucauaggaagcaugu

SEQ ID NO: 1034219 - RNA, 19 nt, Homo sapiens
  misc_RNA (1)...(19): siRNA sense strand
ugcagcuguuuaugugaua

SEQ ID NO: 1034220 - RNA, 19 nt, Homo sapiens
  misc_RNA (1)...(19): siRNA sense strand
ccuguggucucugcuagug

SEQ ID NO: 1034221 - RNA, 19 nt, Homo sapiens
  misc_RNA (1)...(19): siRNA sense strand
cugcagcuguuuaugugau

SEQ ID NO: 1034222 - RNA, 19 nt, Homo sapiens
  misc_RNA (1)...(19): siRNA sense strand
cggguugggcgucuucauu

SEQ ID NO: 1034223 - RNA, 19 nt, Homo sapiens
  misc_RNA (1)...(19): siRNA sense strand
uagaugaagaugaagauac

SEQ ID NO: 1034224 - RNA, 19 nt, Homo sapiens
  misc_RNA (1)...(19): siRNA sense strand
cuagaugaagaugaagaua

SEQ ID NO: 1034225 - RNA, 19 nt, Homo sapiens
  misc_RNA (1)...(19): siRNA sense strand
gcagcuguuuaugugauag

SEQ ID NO: 1034226 - RNA, 19 nt, Homo sapiens
  misc_RNA (1)...(19): siRNA sense strand
cccugcagcuguuuaugug

SEQ ID NO: 1034227 - RNA, 19 nt, Homo sapiens
  misc_RNA (1)...(19): siRNA sense strand
cugacuacauugugaaggu

SEQ ID NO: 1034228 - RNA, 19 nt, Homo sapiens
  misc_RNA (1)...(19): siRNA sense strand
uucauucgcuacaaauaca

SEQ ID NO: 1034229 - RNA, 19 nt, Homo sapiens
  misc_RNA (1)...(19): siRNA sense strand
gagcacaggucauugagaa

SEQ ID NO: 1034230 - RNA, 19 nt, Homo sapiens
  misc_RNA (1)...(19): siRNA sense strand
ggacaaaguacccauguuu

SEQ ID NO: 1034231 - RNA, 19 nt, Homo sapiens
  misc_RNA (1)...(19): siRNA sense strand
ggagagacccgcugcauga

SEQ ID NO: 1034232 - RNA, 19 nt, Homo sapiens
  misc_RNA (1)...(19): siRNA sense strand
gaacuacuccgucgucuuc

SEQ ID NO: 1034233 - RNA, 19 nt, Homo sapiens
  misc_RNA (1)...(19): siRNA sense strand
ggacaugcauggcuaugac

SEQ ID NO: 1034234 - RNA, 19 nt, Homo sapiens
  misc_RNA (1)...(19): siRNA sense strand
agaagagugugccauauca

SEQ ID NO: 1034235 - RNA, 19 nt, Homo sapiens
  misc_RNA (1)...(19): siRNA sense strand
gaggagcacaggucauuga

SEQ ID NO: 1034236 - RNA, 19 nt, Homo sapiens
  misc_RNA (1)...(19): siRNA sense strand
cagcuccgguccucgagua

SEQ ID NO: 1034237 - RNA, 19 nt, Homo sapiens
  misc_RNA (1)...(19): siRNA sense strand
gagaagacaggaaucaagu

SEQ ID NO: 1034238 - RNA, 19 nt, Homo sapiens
  misc_RNA (1)...(19): siRNA sense strand
ggagcgaccgggaugguuu

SEQ ID NO: 1034239 - RNA, 19 nt, Homo sapiens
  misc_RNA (1)...(19): siRNA sense strand
cgagaagagugugccauau

SEQ ID NO: 1034240 - RNA, 19 nt, Homo sapiens
  misc_RNA (1)...(19): siRNA sense strand
caaggcguaugguguggaa

SEQ ID NO: 1034241 - RNA, 19 nt, Homo sapiens
  misc_RNA (1)...(19): siRNA sense strand
ggagaagacaggaaucaag

SEQ ID NO: 1034242 - RNA, 19 nt, Homo sapiens
  misc_RNA (1)...(19): siRNA sense strand
gagaagagugugccauauc

SEQ ID NO: 1034243 - RNA, 19 nt, Homo sapiens
  misc_RNA (1)...(19): siRNA sense strand
caccauggaggacaaagua

SEQ ID NO: 1034244 - RNA, 19 nt, Homo sapiens
  misc_RNA (1)...(19): siRNA sense strand
acaagagggugaagggaau

SEQ ID NO: 1034245 - RNA, 19 nt, Homo sapiens
  misc_RNA (1)...(19): siRNA sense strand
ggacuaugcccuggagaga

SEQ ID NO: 1034246 - RNA, 19 nt, Homo sapiens
  misc_RNA (1)...(19): siRNA sense strand
gcaggagugugggcaagug

SEQ ID NO: 1034247 - RNA, 19 nt, Homo sapiens
  misc_RNA (1)...(19): siRNA sense strand
gcugggagcugcacauucc

SEQ ID NO: 1034248 - RNA, 19 nt, Homo sapiens
  misc_RNA (1)...(19): siRNA sense strand
ccggauggcuggagucaag

SEQ ID NO: 1034249 - RNA, 19 nt, Homo sapiens
  misc_RNA (1)...(19): siRNA sense strand
gcacaacuggucccacauc

SEQ ID NO: 1034250 - RNA, 19 nt, Homo sapiens
  misc_RNA (1)...(19): siRNA sense strand
gaauguggacgaccucuac

SEQ ID NO: 1034251 - RNA, 19 nt, Homo sapiens
  misc_RNA (1)...(19): siRNA sense strand
ccaugcggcuguccuuugu

SEQ ID NO: 1034252 - RNA, 19 nt, Homo sapiens
  misc_RNA (1)...(19): siRNA sense strand
ccgagaagagugugccaua

SEQ ID NO: 1034253 - RNA, 19 nt, Homo sapiens
  misc_RNA (1)...(19): siRNA sense strand
caauguccgugaucaugau

SEQ ID NO: 1034254 - RNA, 19 nt, Homo sapiens
  misc_RNA (1)...(19): siRNA sense strand
gaccaucgccuacgguuac

SEQ ID NO: 1034255 - RNA, 19 nt, Homo sapiens
  misc_RNA (1)...(19): siRNA sense strand
ccaauguccgugaucauga

SEQ ID NO: 1034256 - RNA, 19 nt, Homo sapiens
  misc_RNA (1)...(19): siRNA sense strand
uguacccgcugaugaaugu

SEQ ID NO: 1034257 - RNA, 19 nt, Homo sapiens
  misc_RNA (1)...(19): siRNA sense strand
gaccuggguaugaucagua

SEQ ID NO: 1034258 - RNA, 19 nt, Homo sapiens
  misc_RNA (1)...(19): siRNA sense strand
gagcuggcccacuggauca

SEQ ID NO: 1034259 - RNA, 19 nt, Homo sapiens
  misc_RNA (1)...(19): siRNA sense strand
ggaccuggguaugaucagu

SEQ ID NO: 1034260 - RNA, 19 nt, Homo sapiens
  misc_RNA (1)...(19): siRNA sense strand
gaaggacaugcauggcuau

SEQ ID NO: 1034261 - RNA, 19 nt, Homo sapiens
  misc_RNA (1)...(19): siRNA sense strand
ggugaagggaaucuacuga

SEQ ID NO: 1034262 - RNA, 19 nt, Homo sapiens
  misc_RNA (1)...(19): siRNA sense strand
acuaugcccuggagagaau

SEQ ID NO: 1034263 - RNA, 19 nt, Homo sapiens
  misc_RNA (1)...(19): siRNA sense strand
gagcugcacauuccaaagg

SEQ ID NO: 1034264 - RNA, 19 nt, Homo sapiens
  misc_RNA (1)...(19): siRNA sense strand
gaggacaaaguacccaugu

SEQ ID NO: 1034265 - RNA, 19 nt, Homo sapiens
  misc_RNA (1)...(19): siRNA sense strand
gaggagacgggacuacaca

SEQ ID NO: 1034266 - RNA, 19 nt, Homo sapiens
  misc_RNA (1)...(19): siRNA sense strand
gcacaggucauugagaacu

SEQ ID NO: 1034267 - RNA, 19 nt, Homo sapiens
  misc_RNA (1)...(19): siRNA sense strand
ucgcuggacuuugugaaga

SEQ ID NO: 1034268 - RNA, 19 nt, Homo sapiens
  misc_RNA (1)...(19): siRNA sense strand
ccagccagccgagccauuu

SEQ ID NO: 1034269 - RNA, 19 nt, Homo sapiens
  misc_RNA (1)...(19): siRNA sense strand
uguuugacauguccuacuu

SEQ ID NO: 1034270 - RNA, 19 nt, Homo sapiens
  misc_RNA (1)...(19): siRNA sense strand
acgcagaccugagcaacga

SEQ ID NO: 1034271 - RNA, 19 nt, Homo sapiens
  misc_RNA (1)...(19): siRNA sense strand
ccgaggaccuggguaugau

SEQ ID NO: 1034272 - RNA, 19 nt, Homo sapiens
  misc_RNA (1)...(19): siRNA sense strand
guguguggacggaugauuu

SEQ ID NO: 1034273 - RNA, 19 nt, Homo sapiens
  misc_RNA (1)...(19): siRNA sense strand
cacaacuggucccacauca

SEQ ID NO: 1034274 - RNA, 19 nt, Homo sapiens
  misc_RNA (1)...(19): siRNA sense strand
ccacagccgagaagagugu

SEQ ID NO: 1034275 - RNA, 19 nt, Homo sapiens
  misc_RNA (1)...(19): siRNA sense strand
ccgaggagcacaggucauu

SEQ ID NO: 1034276 - RNA, 19 nt, Homo sapiens
  misc_RNA (1)...(19): siRNA sense strand
acgacacgaucaagaagga

SEQ ID NO: 1034277 - RNA, 19 nt, Homo sapiens
  misc_RNA (1)...(19): siRNA sense strand
gccaagcacggccucauca

SEQ ID NO: 1034278 - RNA, 19 nt, Homo sapiens
  misc_RNA (1)...(19): siRNA sense strand
guucuccacccacaagcua

SEQ ID NO: 1034279 - RNA, 19 nt, Homo sapiens
  misc_RNA (1)...(19): siRNA sense strand
acacgugcaugcucaacca

SEQ ID NO: 1034280 - RNA, 19 nt, Homo sapiens
  misc_RNA (1)...(19): siRNA sense strand
gcucuucuccgcagauguc

SEQ ID NO: 1034281 - RNA, 19 nt, Homo sapiens
  misc_RNA (1)...(19): siRNA sense strand
ggagcacaggucauugaga

SEQ ID NO: 1034282 - RNA, 19 nt, Homo sapiens
  misc_RNA (1)...(19): siRNA sense strand
gccaugcggcuguccuuug

SEQ ID NO: 1034283 - RNA, 19 nt, Homo sapiens
  misc_RNA (1)...(19): siRNA sense strand
cguccugcgugccugugua

SEQ ID NO: 1034284 - RNA, 19 nt, Homo sapiens
  misc_RNA (1)...(19): siRNA sense strand
gcuccgaggaccuggguau

SEQ ID NO: 1034285 - RNA, 19 nt, Homo sapiens
  misc_RNA (1)...(19): siRNA sense strand
gccaaguggugggccaugu

SEQ ID NO: 1034286 - RNA, 19 nt, Homo sapiens
  misc_RNA (1)...(19): siRNA sense strand
ucgacucccugagcauuga

SEQ ID NO: 1034287 - RNA, 19 nt, Homo sapiens
  misc_RNA (1)...(19): siRNA sense strand
ucgcggguguggagacuca

SEQ ID NO: 1034288 - RNA, 19 nt, Homo sapiens
  misc_RNA (1)...(19): siRNA sense strand
caucgacucccugagcauu

SEQ ID NO: 1034289 - RNA, 19 nt, Homo sapiens
  misc_RNA (1)...(19): siRNA sense strand
gggagcugcacauuccaaa

SEQ ID NO: 1034290 - RNA, 19 nt, Homo sapiens
  misc_RNA (1)...(19): siRNA sense strand
gaggagagacccgcugcau

SEQ ID NO: 1034291 - RNA, 19 nt, Homo sapiens
  misc_RNA (1)...(19): siRNA sense strand
cgagagcgaagccaugagu

SEQ ID NO: 1034292 - RNA, 19 nt, Homo sapiens
  misc_RNA (1)...(19): siRNA sense strand
gaucaugaugccucugucu

SEQ ID NO: 1034293 - RNA, 19 nt, Homo sapiens
  misc_RNA (1)...(19): siRNA sense strand
augcauggcuaugacauca

SEQ ID NO: 1034294 - RNA, 19 nt, Homo sapiens
  misc_RNA (1)...(19): siRNA sense strand
cggucucgcuggacuuugu

SEQ ID NO: 1034295 - RNA, 19 nt, Homo sapiens
  misc_RNA (1)...(19): siRNA sense strand
gaguacaagaggcucaugu

SEQ ID NO: 1034296 - RNA, 19 nt, Homo sapiens
  misc_RNA (1)...(19): siRNA sense strand
gaggaccuggguaugauca

SEQ ID NO: 1034297 - RNA, 19 nt, Homo sapiens
  misc_RNA (1)...(19): siRNA sense strand
gauauaggguuacagauua

SEQ ID NO: 1034298 - RNA, 19 nt, Homo sapiens
  misc_RNA (1)...(19): siRNA sense strand
gggcaaagauggauuuaua

SEQ ID NO: 1034299 - RNA, 19 nt, Homo sapiens
  misc_RNA (1)...(19): siRNA sense strand
gauguuagaugaaggagua

SEQ ID NO: 1034300 - RNA, 19 nt, Homo sapiens
  misc_RNA (1)...(19): siRNA sense strand
gaugggagcauuugauuua

SEQ ID NO: 1034301 - RNA, 19 nt, Homo sapiens
  misc_RNA (1)...(19): siRNA sense strand
ccaggaagauguuagauga

SEQ ID NO: 1034302 - RNA, 19 nt, Homo sapiens
  misc_RNA (1)...(19): siRNA sense strand
gaaauacacguggacaaua

SEQ ID NO: 1034303 - RNA, 19 nt, Homo sapiens
  misc_RNA (1)...(19): siRNA sense strand
gaaggaacuuggcagaaau

SEQ ID NO: 1034304 - RNA, 19 nt, Homo sapiens
  misc_RNA (1)...(19): siRNA sense strand
gaugaaggcugcugagcuu

SEQ ID NO: 1034305 - RNA, 19 nt, Homo sapiens
  misc_RNA (1)...(19): siRNA sense strand
cggaggccaucaugaauua

SEQ ID NO: 1034306 - RNA, 19 nt, Homo sapiens
  misc_RNA (1)...(19): siRNA sense strand
ugaaggaacuuggcagaaa

SEQ ID NO: 1034307 - RNA, 19 nt, Homo sapiens
  misc_RNA (1)...(19): siRNA sense strand
aaacagggagaucucauua

SEQ ID NO: 1034308 - RNA, 19 nt, Homo sapiens
  misc_RNA (1)...(19): siRNA sense strand
aaauacacguggacaauau

SEQ ID NO: 1034309 - RNA, 19 nt, Homo sapiens
  misc_RNA (1)...(19): siRNA sense strand
ggagaucucauuaucauca

SEQ ID NO: 1034310 - RNA, 19 nt, Homo sapiens
  misc_RNA (1)...(19): siRNA sense strand
ggaggagggauccacuuua

SEQ ID NO: 1034311 - RNA, 19 nt, Homo sapiens
  misc_RNA (1)...(19): siRNA sense strand
ccaccuacauggaaauuca

SEQ ID NO: 1034312 - RNA, 19 nt, Homo sapiens
  misc_RNA (1)...(19): siRNA sense strand
gaggagggauccacuuuac

SEQ ID NO: 1034313 - RNA, 19 nt, Homo sapiens
  misc_RNA (1)...(19): siRNA sense strand
gaugaaggaguaauaguug

SEQ ID NO: 1034314 - RNA, 19 nt, Homo sapiens
  misc_RNA (1)...(19): siRNA sense strand
ggaaauacacguggacaau

SEQ ID NO: 1034315 - RNA, 19 nt, Homo sapiens
  misc_RNA (1)...(19): siRNA sense strand
gcacacacacauccaguau

SEQ ID NO: 1034316 - RNA, 19 nt, Homo sapiens
  misc_RNA (1)...(19): siRNA sense strand
aguaugggcuggugaaaga

SEQ ID NO: 1034317 - RNA, 19 nt, Homo sapiens
  misc_RNA (1)...(19): siRNA sense strand
ggagccaccuacauggaaa

SEQ ID NO: 1034318 - RNA, 19 nt, Homo sapiens
  misc_RNA (1)...(19): siRNA sense strand
gcauuugauuuaccaguuc

SEQ ID NO: 1034319 - RNA, 19 nt, Homo sapiens
  misc_RNA (1)...(19): siRNA sense strand
ugacugcucugggaaaugu

SEQ ID NO: 1034320 - RNA, 19 nt, Homo sapiens
  misc_RNA (1)...(19): siRNA sense strand
acagggagaucucauuauc

SEQ ID NO: 1034321 - RNA, 19 nt, Homo sapiens
  misc_RNA (1)...(19): siRNA sense strand
gaagauguuagaugaagga

SEQ ID NO: 1034322 - RNA, 19 nt, Homo sapiens
  misc_RNA (1)...(19): siRNA sense strand
acacacacauccaguaugg

SEQ ID NO: 1034323 - RNA, 19 nt, Homo sapiens
  misc_RNA (1)...(19): siRNA sense strand
gaugaacuccacccgauga

SEQ ID NO: 1034324 - RNA, 19 nt, Homo sapiens
  misc_RNA (1)...(19): siRNA sense strand
caacggcuccagugcauga

SEQ ID NO: 1034325 - RNA, 19 nt, Homo sapiens
  misc_RNA (1)...(19): siRNA sense strand
ggaagaagugagugaugaa

SEQ ID NO: 1034326 - RNA, 19 nt, Homo sapiens
  misc_RNA (1)...(19): siRNA sense strand
guucacgaauuugcaauga

SEQ ID NO: 1034327 - RNA, 19 nt, Homo sapiens
  misc_RNA (1)...(19): siRNA sense strand
uggaagaagugagugauga

SEQ ID NO: 1034328 - RNA, 19 nt, Homo sapiens
  misc_RNA (1)...(19): siRNA sense strand
ucaauaaccaccucccaaa

SEQ ID NO: 1034329 - RNA, 19 nt, Homo sapiens
  misc_RNA (1)...(19): siRNA sense strand
ucacgaauuugcaaugaag

SEQ ID NO: 1034330 - RNA, 19 nt, Homo sapiens
  misc_RNA (1)...(19): siRNA sense strand
uggaaaagauauaggguua

SEQ ID NO: 1034331 - RNA, 19 nt, Homo sapiens
  misc_RNA (1)...(19): siRNA sense strand
ggagaaacuuuugaagaaa

SEQ ID NO: 1034332 - RNA, 19 nt, Homo sapiens
  misc_RNA (1)...(19): siRNA sense strand
caaacagggagaucucauu

SEQ ID NO: 1034333 - RNA, 19 nt, Homo sapiens
  misc_RNA (1)...(19): siRNA sense strand
aaagauauaggguuacaga

SEQ ID NO: 1034334 - RNA, 19 nt, Homo sapiens
  misc_RNA (1)...(19): siRNA sense strand
ggcaaagauggauuuauaa

SEQ ID NO: 1034335 - RNA, 19 nt, Homo sapiens
  misc_RNA (1)...(19): siRNA sense strand
cuacugaagcugcugauga

SEQ ID NO: 1034336 - RNA, 19 nt, Homo sapiens
  misc_RNA (1)...(19): siRNA sense strand
gaucucgauuccaccagaa

SEQ ID NO: 1034337 - RNA, 19 nt, Homo sapiens
  misc_RNA (1)...(19): siRNA sense strand
caccaucaaugcagcuuau

SEQ ID NO: 1034338 - RNA, 19 nt, Homo sapiens
  misc_RNA (1)...(19): siRNA sense strand
guuagaugaaggaguaaua

SEQ ID NO: 1034339 - RNA, 19 nt, Homo sapiens
  misc_RNA (1)...(19): siRNA sense strand
gaaaagauauaggguuaca

SEQ ID NO: 1034340 - RNA, 19 nt, Homo sapiens
  misc_RNA (1)...(19): siRNA sense strand
aaauguauccuaccagguu

SEQ ID NO: 1034341 - RNA, 19 nt, Homo sapiens
  misc_RNA (1)...(19): siRNA sense strand
gagaucucauuaucaucaa

SEQ ID NO: 1034342 - RNA, 19 nt, Homo sapiens
  misc_RNA (1)...(19): siRNA sense strand
caucuggccuguguaaaca

SEQ ID NO: 1034343 - RNA, 19 nt, Homo sapiens
  misc_RNA (1)...(19): siRNA sense strand
ggagaacgcgcagcaagug

SEQ ID NO: 1034344 - RNA, 19 nt, Homo sapiens
  misc_RNA (1)...(19): siRNA sense strand
ucccaaagcugaaggaacu

SEQ ID NO: 1034345 - RNA, 19 nt, Homo sapiens
  misc_RNA (1)...(19): siRNA sense strand
agauauaggguuacagauu

SEQ ID NO: 1034346 - RNA, 19 nt, Homo sapiens
  misc_RNA (1)...(19): siRNA sense strand
gaaagaguucacgaauuug

SEQ ID NO: 1034347 - RNA, 19 nt, Homo sapiens
  misc_RNA (1)...(19): siRNA sense strand
guucggaggccaucaugaa

SEQ ID NO: 1034348 - RNA, 19 nt, Homo sapiens
  misc_RNA (1)...(19): siRNA sense strand
uggagaaacuuuugaagaa

SEQ ID NO: 1034349 - RNA, 19 nt, Homo sapiens
  misc_RNA (1)...(19): siRNA sense strand
ggagaccgagcucaagaug

SEQ ID NO: 1034350 - RNA, 19 nt, Homo sapiens
  misc_RNA (1)...(19): siRNA sense strand
caggugcucugccauccuu

SEQ ID NO: 1034351 - RNA, 19 nt, Homo sapiens
  misc_RNA (1)...(19): siRNA sense strand
ucaugcaucuggccugugu

SEQ ID NO: 1034352 - RNA, 19 nt, Homo sapiens
  misc_RNA (1)...(19): siRNA sense strand
ggcaggagccaccuacaug

SEQ ID NO: 1034353 - RNA, 19 nt, Homo sapiens
  misc_RNA (1)...(19): siRNA sense strand
agaccgagcucaagaugcu

SEQ ID NO: 1034354 - RNA, 19 nt, Homo sapiens
  misc_RNA (1)...(19): siRNA sense strand
agggagaucucauuaucau

SEQ ID NO: 1034355 - RNA, 19 nt, Homo sapiens
  misc_RNA (1)...(19): siRNA sense strand
cguggacaauauagacgua

SEQ ID NO: 1034356 - RNA, 19 nt, Homo sapiens
  misc_RNA (1)...(19): siRNA sense strand
cugcugauguuauucaaag

SEQ ID NO: 1034357 - RNA, 19 nt, Homo sapiens
  misc_RNA (1)...(19): siRNA sense strand
gagccaggaagauguuaga

SEQ ID NO: 1034358 - RNA, 19 nt, Homo sapiens
  misc_RNA (1)...(19): siRNA sense strand
gggagcauuugauuuacca

SEQ ID NO: 1034359 - RNA, 19 nt, Homo sapiens
  misc_RNA (1)...(19): siRNA sense strand
caagaugcugcgcgugauu

SEQ ID NO: 1034360 - RNA, 19 nt, Homo sapiens
  misc_RNA (1)...(19): siRNA sense strand
gcacugggaaagucucaca

SEQ ID NO: 1034361 - RNA, 19 nt, Homo sapiens
  misc_RNA (1)...(19): siRNA sense strand
agaugaaggaguaauaguu

SEQ ID NO: 1034362 - RNA, 19 nt, Homo sapiens
  misc_RNA (1)...(19): siRNA sense strand
caaccucgagccaggaaga

SEQ ID NO: 1034363 - RNA, 19 nt, Homo sapiens
  misc_RNA (1)...(19): siRNA sense strand
uggcagaaauggggaaaua

SEQ ID NO: 1034364 - RNA, 19 nt, Homo sapiens
  misc_RNA (1)...(19): siRNA sense strand
ggugggcaaagauggauuu

SEQ ID NO: 1034365 - RNA, 19 nt, Homo sapiens
  misc_RNA (1)...(19): siRNA sense strand
gcaucuggccuguguaaac

SEQ ID NO: 1034366 - RNA, 19 nt, Homo sapiens
  misc_RNA (1)...(19): siRNA sense strand
gaagaagugagugaugaag

SEQ ID NO: 1034367 - RNA, 19 nt, Homo sapiens
  misc_RNA (1)...(19): siRNA sense strand
agacguauuuugugagaaa

SEQ ID NO: 1034368 - RNA, 19 nt, Homo sapiens
  misc_RNA (1)...(19): siRNA sense strand
cggcuccagugcaugauga

SEQ ID NO: 1034369 - RNA, 19 nt, Homo sapiens
  misc_RNA (1)...(19): siRNA sense strand
ggagugcaagaguggauau

SEQ ID NO: 1034370 - RNA, 19 nt, Homo sapiens
  misc_RNA (1)...(19): siRNA sense strand
acacggaucguuggaaguu

SEQ ID NO: 1034371 - RNA, 19 nt, Homo sapiens
  misc_RNA (1)...(19): siRNA sense strand
ucagccaccuggaagaagu

SEQ ID NO: 1034372 - RNA, 19 nt, Homo sapiens
  misc_RNA (1)...(19): siRNA sense strand
cagcuuaugcacugggaaa

SEQ ID NO: 1034373 - RNA, 19 nt, Homo sapiens
  misc_RNA (1)...(19): siRNA sense strand
cggaggagggauccacuuu

SEQ ID NO: 1034374 - RNA, 19 nt, Homo sapiens
  misc_RNA (1)...(19): siRNA sense strand
gaggccaucaugaauuaau

SEQ ID NO: 1034375 - RNA, 19 nt, Homo sapiens
  misc_RNA (1)...(19): siRNA sense strand
gcaaacagggagaucucau

SEQ ID NO: 1034376 - RNA, 19 nt, Homo sapiens
  misc_RNA (1)...(19): siRNA sense strand
guuggaaguuggcaaacag

SEQ ID NO: 1034377 - RNA, 19 nt, Homo sapiens
  misc_RNA (1)...(19): siRNA sense strand
ggcaaucagccaccuggaa

SEQ ID NO: 1034378 - RNA, 19 nt, Homo sapiens
  misc_RNA (1)...(19): siRNA sense strand
aauguauccuaccagguuu

SEQ ID NO: 1034379 - RNA, 19 nt, Homo sapiens
  misc_RNA (1)...(19): siRNA sense strand
gggaaauacacguggacaa

SEQ ID NO: 1034380 - RNA, 19 nt, Homo sapiens
  misc_RNA (1)...(19): siRNA sense strand
ccgaugggagcauuugauu

SEQ ID NO: 1034381 - RNA, 19 nt, Homo sapiens
  misc_RNA (1)...(19): siRNA sense strand
uaguugcucugggaaguga

SEQ ID NO: 1034382 - RNA, 19 nt, Homo sapiens
  misc_RNA (1)...(19): siRNA sense strand
caauaaccaccucccaaag

SEQ ID NO: 1034383 - RNA, 19 nt, Homo sapiens
  misc_RNA (1)...(19): siRNA sense strand
cgaugggagcauuugauuu

SEQ ID NO: 1034384 - RNA, 19 nt, Homo sapiens
  misc_RNA (1)...(19): siRNA sense strand
cgaauuugcaaugaaguug

SEQ ID NO: 1034385 - RNA, 19 nt, Homo sapiens
  misc_RNA (1)...(19): siRNA sense strand
aggaagauguuagaugaag

SEQ ID NO: 1034386 - RNA, 19 nt, Homo sapiens
  misc_RNA (1)...(19): siRNA sense strand
gccaggaagauguuagaug

SEQ ID NO: 1034387 - RNA, 19 nt, Homo sapiens
  misc_RNA (1)...(19): siRNA sense strand
gauguuauucaaagacagu

SEQ ID NO: 1034388 - RNA, 19 nt, Homo sapiens
  misc_RNA (1)...(19): siRNA sense strand
ggccaucaugaauuaauug

SEQ ID NO: 1034389 - RNA, 19 nt, Homo sapiens
  misc_RNA (1)...(19): siRNA sense strand
aggccaucaugaauuaauu

SEQ ID NO: 1034390 - RNA, 19 nt, Homo sapiens
  misc_RNA (1)...(19): siRNA sense strand
ccaccaucaaugcagcuua

SEQ ID NO: 1034391 - RNA, 19 nt, Homo sapiens
  misc_RNA (1)...(19): siRNA sense strand
ucaagaugcugcgcgugau

SEQ ID NO: 1034392 - RNA, 19 nt, Homo sapiens
  misc_RNA (1)...(19): siRNA sense strand
uauugguccugcugauguu

SEQ ID NO: 1034393 - RNA, 19 nt, Homo sapiens
  misc_RNA (1)...(19): siRNA sense strand
aauacacguggacaauaua

SEQ ID NO: 1034394 - RNA, 19 nt, Homo sapiens
  misc_RNA (1)...(19): siRNA sense strand
gccaucaugaauuaauuga

SEQ ID NO: 1034395 - RNA, 19 nt, Homo sapiens
  misc_RNA (1)...(19): siRNA sense strand
agcauuugauuuaccaguu

SEQ ID NO: 1034396 - RNA, 19 nt, Homo sapiens
  misc_RNA (1)...(19): siRNA sense strand
caaugccaauggucaugca

SEQ ID NO: 1034397 - RNA, 19 nt, Homo sapiens
  misc_RNA (1)...(19): siRNA sense strand
gaggagagcucugagauaa

SEQ ID NO: 1034398 - RNA, 19 nt, Homo sapiens
  misc_RNA (1)...(19): siRNA sense strand
ccucauagcucuguucaua

SEQ ID NO: 1034399 - RNA, 19 nt, Homo sapiens
  misc_RNA (1)...(19): siRNA sense strand
ggccaucgcugcaggauuu

SEQ ID NO: 1034400 - RNA, 19 nt, Homo sapiens
  misc_RNA (1)...(19): siRNA sense strand
gggcaucaaucauaacaaa

SEQ ID NO: 1034401 - RNA, 19 nt, Homo sapiens
  misc_RNA (1)...(19): siRNA sense strand
gagagggacuuaaagacaa

SEQ ID NO: 1034402 - RNA, 19 nt, Homo sapiens
  misc_RNA (1)...(19): siRNA sense strand
cagaagggcaucaaucaua

SEQ ID NO: 1034403 - RNA, 19 nt, Homo sapiens
  misc_RNA (1)...(19): siRNA sense strand
agacaaaggugacuacuac

SEQ ID NO: 1034404 - RNA, 19 nt, Homo sapiens
  misc_RNA (1)...(19): siRNA sense strand
agaagggcaucaaucauaa

SEQ ID NO: 1034405 - RNA, 19 nt, Homo sapiens
  misc_RNA (1)...(19): siRNA sense strand
gcaaagcccucagcuacau

SEQ ID NO: 1034406 - RNA, 19 nt, Homo sapiens
  misc_RNA (1)...(19): siRNA sense strand
acacugcccuucaauauca

SEQ ID NO: 1034407 - RNA, 19 nt, Homo sapiens
  misc_RNA (1)...(19): siRNA sense strand
aaacaaacauuuccaagac

SEQ ID NO: 1034408 - RNA, 19 nt, Homo sapiens
  misc_RNA (1)...(19): siRNA sense strand
gcagccaucuccaacauca

SEQ ID NO: 1034409 - RNA, 19 nt, Homo sapiens
  misc_RNA (1)...(19): siRNA sense strand
ggaaaugccugaagaaaag

SEQ ID NO: 1034410 - RNA, 19 nt, Homo sapiens
  misc_RNA (1)...(19): siRNA sense strand
ggaggagagcucugagaua

SEQ ID NO: 1034411 - RNA, 19 nt, Homo sapiens
  misc_RNA (1)...(19): siRNA sense strand
gaucuccggucuuccaaug

SEQ ID NO: 1034412 - RNA, 19 nt, Homo sapiens
  misc_RNA (1)...(19): siRNA sense strand
ggccuacgaugucuccuaa

SEQ ID NO: 1034413 - RNA, 19 nt, Homo sapiens
  misc_RNA (1)...(19): siRNA sense strand
ggaucuggcugaaagacaa

SEQ ID NO: 1034414 - RNA, 19 nt, Homo sapiens
  misc_RNA (1)...(19): siRNA sense strand
cagaaucccugguggacaa

SEQ ID NO: 1034415 - RNA, 19 nt, Homo sapiens
  misc_RNA (1)...(19): siRNA sense strand
gaaaagcggugaagaagag

SEQ ID NO: 1034416 - RNA, 19 nt, Homo sapiens
  misc_RNA (1)...(19): siRNA sense strand
ggagagcucugagauaaaa

SEQ ID NO: 1034417 - RNA, 19 nt, Homo sapiens
  misc_RNA (1)...(19): siRNA sense strand
gcacuuggcccuucugucu

SEQ ID NO: 1034418 - RNA, 19 nt, Homo sapiens
  misc_RNA (1)...(19): siRNA sense strand
ggagagggacuuaaagaca

SEQ ID NO: 1034419 - RNA, 19 nt, Homo sapiens
  misc_RNA (1)...(19): siRNA sense strand
cgaggcacaucucaaguga

SEQ ID NO: 1034420 - RNA, 19 nt, Homo sapiens
  misc_RNA (1)...(19): siRNA sense strand
cggagaaguuagacuacua

SEQ ID NO: 1034421 - RNA, 19 nt, Homo sapiens
  misc_RNA (1)...(19): siRNA sense strand
caaaguaucaggccuacga

SEQ ID NO: 1034422 - RNA, 19 nt, Homo sapiens
  misc_RNA (1)...(19): siRNA sense strand
gaacaccaggaaagacaaa

SEQ ID NO: 1034423 - RNA, 19 nt, Homo sapiens
  misc_RNA (1)...(19): siRNA sense strand
aauaucaccuggacagaga

SEQ ID NO: 1034424 - RNA, 19 nt, Homo sapiens
  misc_RNA (1)...(19): siRNA sense strand
ucauagcucuguucauauc

SEQ ID NO: 1034425 - RNA, 19 nt, Homo sapiens
  misc_RNA (1)...(19): siRNA sense strand
ucacacugcccuucaauau

SEQ ID NO: 1034426 - RNA, 19 nt, Homo sapiens
  misc_RNA (1)...(19): siRNA sense strand
gcacaggaguguauuucac

SEQ ID NO: 1034427 - RNA, 19 nt, Homo sapiens
  misc_RNA (1)...(19): siRNA sense strand
ggaaaugccccugcuguua

SEQ ID NO: 1034428 - RNA, 19 nt, Homo sapiens
  misc_RNA (1)...(19): siRNA sense strand
caaagacccauuucccuau

SEQ ID NO: 1034429 - RNA, 19 nt, Homo sapiens
  misc_RNA (1)...(19): siRNA sense strand
acacaggccucuggagcua

SEQ ID NO: 1034430 - RNA, 19 nt, Homo sapiens
  misc_RNA (1)...(19): siRNA sense strand
gaggaggagcaaaguguuu

SEQ ID NO: 1034431 - RNA, 19 nt, Homo sapiens
  misc_RNA (1)...(19): siRNA sense strand
cauguuaucuguguuugga

SEQ ID NO: 1034432 - RNA, 19 nt, Homo sapiens
  misc_RNA (1)...(19): siRNA sense strand
caaguguacggcugugaua

SEQ ID NO: 1034433 - RNA, 19 nt, Homo sapiens
  misc_RNA (1)...(19): siRNA sense strand
ggacucagcaggccaaagg

SEQ ID NO: 1034434 - RNA, 19 nt, Homo sapiens
  misc_RNA (1)...(19): siRNA sense strand
gcuagcagcacucacuauu

SEQ ID NO: 1034435 - RNA, 19 nt, Homo sapiens
  misc_RNA (1)...(19): siRNA sense strand
gguaccaucuucagcaagu

SEQ ID NO: 1034436 - RNA, 19 nt, Homo sapiens
  misc_RNA (1)...(19): siRNA sense strand
gcagauacaaacuuuacga

SEQ ID NO: 1034437 - RNA, 19 nt, Homo sapiens
  misc_RNA (1)...(19): siRNA sense strand
caacccagccaucuucaga

SEQ ID NO: 1034438 - RNA, 19 nt, Homo sapiens
  misc_RNA (1)...(19): siRNA sense strand
ugucuucagugcccaauau

SEQ ID NO: 1034439 - RNA, 19 nt, Homo sapiens
  misc_RNA (1)...(19): siRNA sense strand
acucugcccuucaacauug

SEQ ID NO: 1034440 - RNA, 19 nt, Homo sapiens
  misc_RNA (1)...(19): siRNA sense strand
aaacaacccagccaucuuc

SEQ ID NO: 1034441 - RNA, 19 nt, Homo sapiens
  misc_RNA (1)...(19): siRNA sense strand
gcaccuugcccuccaguuc

SEQ ID NO: 1034442 - RNA, 19 nt, Homo sapiens
  misc_RNA (1)...(19): siRNA sense strand
gcaucaaucauaacaaagu

SEQ ID NO: 1034443 - RNA, 19 nt, Homo sapiens
  misc_RNA (1)...(19): siRNA sense strand
gaaacagaagggcaucaau

SEQ ID NO: 1034444 - RNA, 19 nt, Homo sapiens
  misc_RNA (1)...(19): siRNA sense strand
uagcagcacucacuauugc

SEQ ID NO: 1034445 - RNA, 19 nt, Homo sapiens
  misc_RNA (1)...(19): siRNA sense strand
uacaggaucuggcugaaag

SEQ ID NO: 1034446 - RNA, 19 nt, Homo sapiens
  misc_RNA (1)...(19): siRNA sense strand
ccucaccucucauuugcuu

SEQ ID NO: 1034447 - RNA, 19 nt, Homo sapiens
  misc_RNA (1)...(19): siRNA sense strand
ccucaucugugcccuguuc

SEQ ID NO: 1034448 - RNA, 19 nt, Homo sapiens
  misc_RNA (1)...(19): siRNA sense strand
uggcuucuguuuccuguga

SEQ ID NO: 1034449 - RNA, 19 nt, Homo sapiens
  misc_RNA (1)...(19): siRNA sense strand
uccagcagauacaaacuuu

SEQ ID NO: 1034450 - RNA, 19 nt, Homo sapiens
  misc_RNA (1)...(19): siRNA sense strand
ucuacuaccugacagugaa

SEQ ID NO: 1034451 - RNA, 19 nt, Homo sapiens
  misc_RNA (1)...(19): siRNA sense strand
gguagagccugugucuuca

SEQ ID NO: 1034452 - RNA, 19 nt, Homo sapiens
  misc_RNA (1)...(19): siRNA sense strand
acauugcagucaccuugua

SEQ ID NO: 1034453 - RNA, 19 nt, Homo sapiens
  misc_RNA (1)...(19): siRNA sense strand
aaacagaagggcaucaauc

SEQ ID NO: 1034454 - RNA, 19 nt, Homo sapiens
  misc_RNA (1)...(19): siRNA sense strand
caaacaacccagccaucuu

SEQ ID NO: 1034455 - RNA, 19 nt, Homo sapiens
  misc_RNA (1)...(19): siRNA sense strand
ggaccgcucaggugauguu

SEQ ID NO: 1034456 - RNA, 19 nt, Homo sapiens
  misc_RNA (1)...(19): siRNA sense strand
ggauuucacggcuacaaug

SEQ ID NO: 1034457 - RNA, 19 nt, Homo sapiens
  misc_RNA (1)...(19): siRNA sense strand
ccacuacaaccucuucuuc

SEQ ID NO: 1034458 - RNA, 19 nt, Homo sapiens
  misc_RNA (1)...(19): siRNA sense strand
uuacaagccaucccuguug

SEQ ID NO: 1034459 - RNA, 19 nt, Homo sapiens
  misc_RNA (1)...(19): siRNA sense strand
gugcugcccuggcuaacau

SEQ ID NO: 1034460 - RNA, 19 nt, Homo sapiens
  misc_RNA (1)...(19): siRNA sense strand
cgggcgacaugaaggagua

SEQ ID NO: 1034461 - RNA, 19 nt, Homo sapiens
  misc_RNA (1)...(19): siRNA sense strand
ggaggaggagcaaaguguu

SEQ ID NO: 1034462 - RNA, 19 nt, Homo sapiens
  misc_RNA (1)...(19): siRNA sense strand
ucgaaaagcucaaugaaag

SEQ ID NO: 1034463 - RNA, 19 nt, Homo sapiens
  misc_RNA (1)...(19): siRNA sense strand
ucauagggcugcugaucca

SEQ ID NO: 1034464 - RNA, 19 nt, Homo sapiens
  misc_RNA (1)...(19): siRNA sense strand
acaaacauuuccaagacau

SEQ ID NO: 1034465 - RNA, 19 nt, Homo sapiens
  misc_RNA (1)...(19): siRNA sense strand
guacaggaucuggcugaaa

SEQ ID NO: 1034466 - RNA, 19 nt, Homo sapiens
  misc_RNA (1)...(19): siRNA sense strand
gcugauggccguguucuca

SEQ ID NO: 1034467 - RNA, 19 nt, Homo sapiens
  misc_RNA (1)...(19): siRNA sense strand
cagucgagcugcuugaucu

SEQ ID NO: 1034468 - RNA, 19 nt, Homo sapiens
  misc_RNA (1)...(19): siRNA sense strand
gcgaacaccaggaaagaca

SEQ ID NO: 1034469 - RNA, 19 nt, Homo sapiens
  misc_RNA (1)...(19): siRNA sense strand
gaagcagccaucuccaaca

SEQ ID NO: 1034470 - RNA, 19 nt, Homo sapiens
  misc_RNA (1)...(19): siRNA sense strand
gccauguccugcccaguuc

SEQ ID NO: 1034471 - RNA, 19 nt, Homo sapiens
  misc_RNA (1)...(19): siRNA sense strand
ucuccggucuuccaaugaa

SEQ ID NO: 1034472 - RNA, 19 nt, Homo sapiens
  misc_RNA (1)...(19): siRNA sense strand
cagacaaaggugacuacua

SEQ ID NO: 1034473 - RNA, 19 nt, Homo sapiens
  misc_RNA (1)...(19): siRNA sense strand
ggaguguauuucacaucga

SEQ ID NO: 1034474 - RNA, 19 nt, Homo sapiens
  misc_RNA (1)...(19): siRNA sense strand
gcaucugccucuccaaagc

SEQ ID NO: 1034475 - RNA, 19 nt, Homo sapiens
  misc_RNA (1)...(19): siRNA sense strand
guaccaucauguccaccuu

SEQ ID NO: 1034476 - RNA, 19 nt, Homo sapiens
  misc_RNA (1)...(19): siRNA sense strand
guggagagggacuuaaaga

SEQ ID NO: 1034477 - RNA, 19 nt, Homo sapiens
  misc_RNA (1)...(19): siRNA sense strand
caagcacaggaguguauuu

SEQ ID NO: 1034478 - RNA, 19 nt, Homo sapiens
  misc_RNA (1)...(19): siRNA sense strand
guguauggcugugacaauc

SEQ ID NO: 1034479 - RNA, 19 nt, Homo sapiens
  misc_RNA (1)...(19): siRNA sense strand
cuacugguggcuucuguuu

SEQ ID NO: 1034480 - RNA, 19 nt, Homo sapiens
  misc_RNA (1)...(19): siRNA sense strand
ucagcggccucaucaucuu

SEQ ID NO: 1034481 - RNA, 19 nt, Homo sapiens
  misc_RNA (1)...(19): siRNA sense strand
cagcagauacaaacuuuac

SEQ ID NO: 1034482 - RNA, 19 nt, Homo sapiens
  misc_RNA (1)...(19): siRNA sense strand
uguuaucuguguuuggauu

SEQ ID NO: 1034483 - RNA, 19 nt, Homo sapiens
  misc_RNA (1)...(19): siRNA sense strand
uauccucaccucucauuug

SEQ ID NO: 1034484 - RNA, 19 nt, Homo sapiens
  misc_RNA (1)...(19): siRNA sense strand
ggaccucccagucuucaca

SEQ ID NO: 1034485 - RNA, 19 nt, Homo sapiens
  misc_RNA (1)...(19): siRNA sense strand
ucacaggagagaugaagga

SEQ ID NO: 1034486 - RNA, 19 nt, Homo sapiens
  misc_RNA (1)...(19): siRNA sense strand
aaagacccauuucccuauc

SEQ ID NO: 1034487 - RNA, 19 nt, Homo sapiens
  misc_RNA (1)...(19): siRNA sense strand
aagcagccaucuccaacau

SEQ ID NO: 1034488 - RNA, 19 nt, Homo sapiens
  misc_RNA (1)...(19): siRNA sense strand
ccuguucugugcauacaug

SEQ ID NO: 1034489 - RNA, 19 nt, Homo sapiens
  misc_RNA (1)...(19): siRNA sense strand
ugguagagccugugucuuc

SEQ ID NO: 1034490 - RNA, 19 nt, Homo sapiens
  misc_RNA (1)...(19): siRNA sense strand
gagccacuuuccagcagau

SEQ ID NO: 1034491 - RNA, 19 nt, Homo sapiens
  misc_RNA (1)...(19): siRNA sense strand
gugcaucugccucuccaaa

SEQ ID NO: 1034492 - RNA, 19 nt, Homo sapiens
  misc_RNA (1)...(19): siRNA sense strand
ugauggccguguucucaga

SEQ ID NO: 1034493 - RNA, 19 nt, Homo sapiens
  misc_RNA (1)...(19): siRNA sense strand
aaaaggaucuccggucuuc

SEQ ID NO: 1034494 - RNA, 19 nt, Homo sapiens
  misc_RNA (1)...(19): siRNA sense strand
cauauccucaccucucauu

SEQ ID NO: 1034495 - RNA, 19 nt, Homo sapiens
  misc_RNA (1)...(19): siRNA sense strand
ugaaaggaguaaaaggaaa

SEQ ID NO: 1034496 - RNA, 19 nt, Homo sapiens
  misc_RNA (1)...(19): siRNA sense strand
gauaggaggcauguucuac

SEQ ID NO: 1034497 - RNA, 19 nt, Homo sapiens
  misc_RNA (1)...(19): siRNA sense strand
ggaagcagcucuugccaaa

SEQ ID NO: 1034498 - RNA, 19 nt, Homo sapiens
  misc_RNA (1)...(19): siRNA sense strand
gaggagacuugaaagaaua

SEQ ID NO: 1034499 - RNA, 19 nt, Homo sapiens
  misc_RNA (1)...(19): siRNA sense strand
gaaacagucucaacuucaa

SEQ ID NO: 1034500 - RNA, 19 nt, Homo sapiens
  misc_RNA (1)...(19): siRNA sense strand
gaacuuauucuacagcaaa

SEQ ID NO: 1034501 - RNA, 19 nt, Homo sapiens
  misc_RNA (1)...(19): siRNA sense strand
gcgagaaggugcagaggaa

SEQ ID NO: 1034502 - RNA, 19 nt, Homo sapiens
  misc_RNA (1)...(19): siRNA sense strand
gaacuuagagguggaaaga

SEQ ID NO: 1034503 - RNA, 19 nt, Homo sapiens
  misc_RNA (1)...(19): siRNA sense strand
ucaggaaugucagaacuua

SEQ ID NO: 1034504 - RNA, 19 nt, Homo sapiens
  misc_RNA (1)...(19): siRNA sense strand
gcaagggccuacggcauuu

SEQ ID NO: 1034505 - RNA, 19 nt, Homo sapiens
  misc_RNA (1)...(19): siRNA sense strand
caucuccaaugacaaauuu

SEQ ID NO: 1034506 - RNA, 19 nt, Homo sapiens
  misc_RNA (1)...(19): siRNA sense strand
ugaaauccacgaugacaua

SEQ ID NO: 1034507 - RNA, 19 nt, Homo sapiens
  misc_RNA (1)...(19): siRNA sense strand
caacucggcucaggaaugu

SEQ ID NO: 1034508 - RNA, 19 nt, Homo sapiens
  misc_RNA (1)...(19): siRNA sense strand
gcacucacuuugccucuca

SEQ ID NO: 1034509 - RNA, 19 nt, Homo sapiens
  misc_RNA (1)...(19): siRNA sense strand
gaaagacagaggagacuug

SEQ ID NO: 1034510 - RNA, 19 nt, Homo sapiens
  misc_RNA (1)...(19): siRNA sense strand
cagaaacagucucaacuuc

SEQ ID NO: 1034511 - RNA, 19 nt, Homo sapiens
  misc_RNA (1)...(19): siRNA sense strand
gaaccuuagucccgggaaa

SEQ ID NO: 1034512 - RNA, 19 nt, Homo sapiens
  misc_RNA (1)...(19): siRNA sense strand
gcaagaagacggucaucga

SEQ ID NO: 1034513 - RNA, 19 nt, Homo sapiens
  misc_RNA (1)...(19): siRNA sense strand
agaaggagaucaaguggau

SEQ ID NO: 1034514 - RNA, 19 nt, Homo sapiens
  misc_RNA (1)...(19): siRNA sense strand
gaacucaaggucuucauag

SEQ ID NO: 1034515 - RNA, 19 nt, Homo sapiens
  misc_RNA (1)...(19): siRNA sense strand
ggaggacgaugacuucaac

SEQ ID NO: 1034516 - RNA, 19 nt, Homo sapiens
  misc_RNA (1)...(19): siRNA sense strand
agacagaggagacuugaaa

SEQ ID NO: 1034517 - RNA, 19 nt, Homo sapiens
  misc_RNA (1)...(19): siRNA sense strand
caaacgagucagcuuauga

SEQ ID NO: 1034518 - RNA, 19 nt, Homo sapiens
  misc_RNA (1)...(19): siRNA sense strand
aaagaugccggucuaauug

SEQ ID NO: 1034519 - RNA, 19 nt, Homo sapiens
  misc_RNA (1)...(19): siRNA sense strand
ggaaaggagagaagaaugg

SEQ ID NO: 1034520 - RNA, 19 nt, Homo sapiens
  misc_RNA (1)...(19): siRNA sense strand
gaaugacgaggacgacuga

SEQ ID NO: 1034521 - RNA, 19 nt, Homo sapiens
  misc_RNA (1)...(19): siRNA sense strand
ccaaugacaaauuugagua

SEQ ID NO: 1034522 - RNA, 19 nt, Homo sapiens
  misc_RNA (1)...(19): siRNA sense strand
agaggagacuugaaagaau

SEQ ID NO: 1034523 - RNA, 19 nt, Homo sapiens
  misc_RNA (1)...(19): siRNA sense strand
gcgcgucuacgaugccuua

SEQ ID NO: 1034524 - RNA, 19 nt, Homo sapiens
  misc_RNA (1)...(19): siRNA sense strand
cagcaucuccaaugacaaa

SEQ ID NO: 1034525 - RNA, 19 nt, Homo sapiens
  misc_RNA (1)...(19): siRNA sense strand
aauccacgaugacauagaa

SEQ ID NO: 1034526 - RNA, 19 nt, Homo sapiens
  misc_RNA (1)...(19): siRNA sense strand
cuacggcauuucuccauga

SEQ ID NO: 1034527 - RNA, 19 nt, Homo sapiens
  misc_RNA (1)...(19): siRNA sense strand
ggcaagggccuacggcauu

SEQ ID NO: 1034528 - RNA, 19 nt, Homo sapiens
  misc_RNA (1)...(19): siRNA sense strand
gcucaggaaugucagaacu

SEQ ID NO: 1034529 - RNA, 19 nt, Homo sapiens
  misc_RNA (1)...(19): siRNA sense strand
caacuucaagaacuuauuc

SEQ ID NO: 1034530 - RNA, 19 nt, Homo sapiens
  misc_RNA (1)...(19): siRNA sense strand
cagaggagacuugaaagaa

SEQ ID NO: 1034531 - RNA, 19 nt, Homo sapiens
  misc_RNA (1)...(19): siRNA sense strand
cagcaagugguaauuggua

SEQ ID NO: 1034532 - RNA, 19 nt, Homo sapiens
  misc_RNA (1)...(19): siRNA sense strand
ccaugaaggucugcgagaa

SEQ ID NO: 1034533 - RNA, 19 nt, Homo sapiens
  misc_RNA (1)...(19): siRNA sense strand
acaaccacaucuuaccaaa

SEQ ID NO: 1034534 - RNA, 19 nt, Homo sapiens
  misc_RNA (1)...(19): siRNA sense strand
uaccaaacgagucagcuua

SEQ ID NO: 1034535 - RNA, 19 nt, Homo sapiens
  misc_RNA (1)...(19): siRNA sense strand
ccaaacgagucagcuuaug

SEQ ID NO: 1034536 - RNA, 19 nt, Homo sapiens
  misc_RNA (1)...(19): siRNA sense strand
ugacaaauuugaguaucug

SEQ ID NO: 1034537 - RNA, 19 nt, Homo sapiens
  misc_RNA (1)...(19): siRNA sense strand
agaaauggcucagggaacu

SEQ ID NO: 1034538 - RNA, 19 nt, Homo sapiens
  misc_RNA (1)...(19): siRNA sense strand
ccaaggagaagaaggagau

SEQ ID NO: 1034539 - RNA, 19 nt, Homo sapiens
  misc_RNA (1)...(19): siRNA sense strand
agaagaaggagaucaagug

SEQ ID NO: 1034540 - RNA, 19 nt, Homo sapiens
  misc_RNA (1)...(19): siRNA sense strand
cgucuacgaugccuuaaac

SEQ ID NO: 1034541 - RNA, 19 nt, Homo sapiens
  misc_RNA (1)...(19): siRNA sense strand
guucagugcugccgacaac

SEQ ID NO: 1034542 - RNA, 19 nt, Homo sapiens
  misc_RNA (1)...(19): siRNA sense strand
gagaagaaggagaucaagu

SEQ ID NO: 1034543 - RNA, 19 nt, Homo sapiens
  misc_RNA (1)...(19): siRNA sense strand
caacaggaaaggagagaag

SEQ ID NO: 1034544 - RNA, 19 nt, Homo sapiens
  misc_RNA (1)...(19): siRNA sense strand
gcuccaaugggucucagua

SEQ ID NO: 1034545 - RNA, 19 nt, Homo sapiens
  misc_RNA (1)...(19): siRNA sense strand
guaauugguacgccucaga

SEQ ID NO: 1034546 - RNA, 19 nt, Homo sapiens
  misc_RNA (1)...(19): siRNA sense strand
gcaucuccaaugacaaauu

SEQ ID NO: 1034547 - RNA, 19 nt, Homo sapiens
  misc_RNA (1)...(19): siRNA sense strand
acggagaacucaaggucuu

SEQ ID NO: 1034548 - RNA, 19 nt, Homo sapiens
  misc_RNA (1)...(19): siRNA sense strand
cgaggaggacgaugacuuc

SEQ ID NO: 1034549 - RNA, 19 nt, Homo sapiens
  misc_RNA (1)...(19): siRNA sense strand
agccauacgugacagaaau

SEQ ID NO: 1034550 - RNA, 19 nt, Homo sapiens
  misc_RNA (1)...(19): siRNA sense strand
caucuuaccaaacgaguca

SEQ ID NO: 1034551 - RNA, 19 nt, Homo sapiens
  misc_RNA (1)...(19): siRNA sense strand
acagaaacagucucaacuu

SEQ ID NO: 1034552 - RNA, 19 nt, Homo sapiens
  misc_RNA (1)...(19): siRNA sense strand
ggaaagacagaggagacuu

SEQ ID NO: 1034553 - RNA, 19 nt, Homo sapiens
  misc_RNA (1)...(19): siRNA sense strand
ugaacaucaucuccaagga

SEQ ID NO: 1034554 - RNA, 19 nt, Homo sapiens
  misc_RNA (1)...(19): siRNA sense strand
gcuaauggccaugaacauc

SEQ ID NO: 1034555 - RNA, 19 nt, Homo sapiens
  misc_RNA (1)...(19): siRNA sense strand
gaccacuuccuacaacgaa

SEQ ID NO: 1034556 - RNA, 19 nt, Homo sapiens
  misc_RNA (1)...(19): siRNA sense strand
acgaugacuucaacgagaa

SEQ ID NO: 1034557 - RNA, 19 nt, Homo sapiens
  misc_RNA (1)...(19): siRNA sense strand
gagccauacgugacagaaa

SEQ ID NO: 1034558 - RNA, 19 nt, Homo sapiens
  misc_RNA (1)...(19): siRNA sense strand
agaaacagucucaacuuca

SEQ ID NO: 1034559 - RNA, 19 nt, Homo sapiens
  misc_RNA (1)...(19): siRNA sense strand
ccaacucggcucaggaaug

SEQ ID NO: 1034560 - RNA, 19 nt, Homo sapiens
  misc_RNA (1)...(19): siRNA sense strand
cuaauggccaugaacauca

SEQ ID NO: 1034561 - RNA, 19 nt, Homo sapiens
  misc_RNA (1)...(19): siRNA sense strand
gacaaccacaucuuaccaa

SEQ ID NO: 1034562 - RNA, 19 nt, Homo sapiens
  misc_RNA (1)...(19): siRNA sense strand
gaaauccacgaugacauag

SEQ ID NO: 1034563 - RNA, 19 nt, Homo sapiens
  misc_RNA (1)...(19): siRNA sense strand
aaacagaaacagucucaac

SEQ ID NO: 1034564 - RNA, 19 nt, Homo sapiens
  misc_RNA (1)...(19): siRNA sense strand
acuuagagguggaaagaca

SEQ ID NO: 1034565 - RNA, 19 nt, Homo sapiens
  misc_RNA (1)...(19): siRNA sense strand
agaacucaaggucuucaua

SEQ ID NO: 1034566 - RNA, 19 nt, Homo sapiens
  misc_RNA (1)...(19): siRNA sense strand
aaaagaugccggucuaauu

SEQ ID NO: 1034567 - RNA, 19 nt, Homo sapiens
  misc_RNA (1)...(19): siRNA sense strand
gagaaggugcagaggaaag

SEQ ID NO: 1034568 - RNA, 19 nt, Homo sapiens
  misc_RNA (1)...(19): siRNA sense strand
gggaagcgcaacaggaaag

SEQ ID NO: 1034569 - RNA, 19 nt, Homo sapiens
  misc_RNA (1)...(19): siRNA sense strand
ugacauagaagugcugaag

SEQ ID NO: 1034570 - RNA, 19 nt, Homo sapiens
  misc_RNA (1)...(19): siRNA sense strand
agaaccuggugcagagaaa

SEQ ID NO: 1034571 - RNA, 19 nt, Homo sapiens
  misc_RNA (1)...(19): siRNA sense strand
gaagccaacggagaacuca

SEQ ID NO: 1034572 - RNA, 19 nt, Homo sapiens
  misc_RNA (1)...(19): siRNA sense strand
agaugccggucuaauugaa

SEQ ID NO: 1034573 - RNA, 19 nt, Homo sapiens
  misc_RNA (1)...(19): siRNA sense strand
ugccgacaaccacaucuua

SEQ ID NO: 1034574 - RNA, 19 nt, Homo sapiens
  misc_RNA (1)...(19): siRNA sense strand
cggcagguuccacgucuaa

SEQ ID NO: 1034575 - RNA, 19 nt, Homo sapiens
  misc_RNA (1)...(19): siRNA sense strand
aaggagaucaaguggauug

SEQ ID NO: 1034576 - RNA, 19 nt, Homo sapiens
  misc_RNA (1)...(19): siRNA sense strand
aaccacaucuuaccaaacg

SEQ ID NO: 1034577 - RNA, 19 nt, Homo sapiens
  misc_RNA (1)...(19): siRNA sense strand
ccgggaagcgcaacaggaa

SEQ ID NO: 1034578 - RNA, 19 nt, Homo sapiens
  misc_RNA (1)...(19): siRNA sense strand
ccaccugcccuucaucauc

SEQ ID NO: 1034579 - RNA, 19 nt, Homo sapiens
  misc_RNA (1)...(19): siRNA sense strand
ucauagaccagaaccuuag

SEQ ID NO: 1034580 - RNA, 19 nt, Homo sapiens
  misc_RNA (1)...(19): siRNA sense strand
acagaggagacuugaaaga

SEQ ID NO: 1034581 - RNA, 19 nt, Homo sapiens
  misc_RNA (1)...(19): siRNA sense strand
ggaccacuuccuacaacga

SEQ ID NO: 1034582 - RNA, 19 nt, Homo sapiens
  misc_RNA (1)...(19): siRNA sense strand
ccacgaugacauagaagug

SEQ ID NO: 1034583 - RNA, 19 nt, Homo sapiens
  misc_RNA (1)...(19): siRNA sense strand
ugcagcaucuccaaugaca

SEQ ID NO: 1034584 - RNA, 19 nt, Homo sapiens
  misc_RNA (1)...(19): siRNA sense strand
gucaacaccagcaagaaga

SEQ ID NO: 1034585 - RNA, 19 nt, Homo sapiens
  misc_RNA (1)...(19): siRNA sense strand
caccaacucggcucaggaa

SEQ ID NO: 1034586 - RNA, 19 nt, Homo sapiens
  misc_RNA (1)...(19): siRNA sense strand
uccaaugggucucaguaca

SEQ ID NO: 1034587 - RNA, 19 nt, Homo sapiens
  misc_RNA (1)...(19): siRNA sense strand
guuggaggcguguucauca

SEQ ID NO: 1034588 - RNA, 19 nt, Homo sapiens
  misc_RNA (1)...(19): siRNA sense strand
agucucaacuucaagaacu

SEQ ID NO: 1034589 - RNA, 19 nt, Homo sapiens
  misc_RNA (1)...(19): siRNA sense strand
aaagacagaggagacuuga

SEQ ID NO: 1034590 - RNA, 19 nt, Homo sapiens
  misc_RNA (1)...(19): siRNA sense strand
caggaaaggagagaagaau

SEQ ID NO: 1034591 - RNA, 19 nt, Homo sapiens
  misc_RNA (1)...(19): siRNA sense strand
ggagaacucaaggucuuca

SEQ ID NO: 1034592 - RNA, 19 nt, Homo sapiens
  misc_RNA (1)...(19): siRNA sense strand
gacugcagcaucuccaaug

SEQ ID NO: 1034593 - RNA, 19 nt, Homo sapiens
  misc_RNA (1)...(19): siRNA sense strand
aggaaugucagaacuuaga

SEQ ID NO: 1034594 - RNA, 19 nt, Homo sapiens
  misc_RNA (1)...(19): siRNA sense strand
gaaggagaucaaguggauu

SEQ ID NO: 1034595 - RNA, 19 nt, Homo sapiens
  misc_RNA (1)...(19): siRNA sense strand
aaagggaccacuuccuaca

SEQ ID NO: 1034596 - RNA, 19 nt, Homo sapiens
  misc_RNA (1)...(19): siRNA sense strand
caagguucucugccaguga

SEQ ID NO: 1034597 - RNA, 19 nt, Homo sapiens
  misc_RNA (1)...(19): siRNA sense strand
gaacaaggcugaggaaugu

SEQ ID NO: 1034598 - RNA, 19 nt, Homo sapiens
  misc_RNA (1)...(19): siRNA sense strand
ugaagucccucuacaguua

SEQ ID NO: 1034599 - RNA, 19 nt, Homo sapiens
  misc_RNA (1)...(19): siRNA sense strand
aaacauugcuuaaccauca

SEQ ID NO: 1034600 - RNA, 19 nt, Homo sapiens
  misc_RNA (1)...(19): siRNA sense strand
gaacucaagucacguccuu

SEQ ID NO: 1034601 - RNA, 19 nt, Homo sapiens
  misc_RNA (1)...(19): siRNA sense strand
uaacuucacugaucagcaa

SEQ ID NO: 1034602 - RNA, 19 nt, Homo sapiens
  misc_RNA (1)...(19): siRNA sense strand
caacauagacaaucucaau

SEQ ID NO: 1034603 - RNA, 19 nt, Homo sapiens
  misc_RNA (1)...(19): siRNA sense strand
aagcauggauuauaucuga

SEQ ID NO: 1034604 - RNA, 19 nt, Homo sapiens
  misc_RNA (1)...(19): siRNA sense strand
agaaaccaaugacugauaa

SEQ ID NO: 1034605 - RNA, 19 nt, Homo sapiens
  misc_RNA (1)...(19): siRNA sense strand
cugcaaagauccucugaaa

SEQ ID NO: 1034606 - RNA, 19 nt, Homo sapiens
  misc_RNA (1)...(19): siRNA sense strand
cagaugaugugaaagagaa

SEQ ID NO: 1034607 - RNA, 19 nt, Homo sapiens
  misc_RNA (1)...(19): siRNA sense strand
cuccugaaauggugaauua

SEQ ID NO: 1034608 - RNA, 19 nt, Homo sapiens
  misc_RNA (1)...(19): siRNA sense strand
uagaaaagcuucagaaaga

SEQ ID NO: 1034609 - RNA, 19 nt, Homo sapiens
  misc_RNA (1)...(19): siRNA sense strand
gcacuaaggacaaccaaug

SEQ ID NO: 1034610 - RNA, 19 nt, Homo sapiens
  misc_RNA (1)...(19): siRNA sense strand
caacuacaaucucauuuac

SEQ ID NO: 1034611 - RNA, 19 nt, Homo sapiens
  misc_RNA (1)...(19): siRNA sense strand
gcaaaccacugauaaucca

SEQ ID NO: 1034612 - RNA, 19 nt, Homo sapiens
  misc_RNA (1)...(19): siRNA sense strand
gaacaaccagaaaucagaa

SEQ ID NO: 1034613 - RNA, 19 nt, Homo sapiens
  misc_RNA (1)...(19): siRNA sense strand
gcacugcgguacuuaaagg

SEQ ID NO: 1034614 - RNA, 19 nt, Homo sapiens
  misc_RNA (1)...(19): siRNA sense strand
caacaaaugaagacgcuuu

SEQ ID NO: 1034615 - RNA, 19 nt, Homo sapiens
  misc_RNA (1)...(19): siRNA sense strand
agaaagcucuccugcugaa

SEQ ID NO: 1034616 - RNA, 19 nt, Homo sapiens
  misc_RNA (1)...(19): siRNA sense strand
aaacagaaacccaaacaau

SEQ ID NO: 1034617 - RNA, 19 nt, Homo sapiens
  misc_RNA (1)...(19): siRNA sense strand
gcaaagauccucugaaacc

SEQ ID NO: 1034618 - RNA, 19 nt, Homo sapiens
  misc_RNA (1)...(19): siRNA sense strand
gcuuaaccaucaagauuug

SEQ ID NO: 1034619 - RNA, 19 nt, Homo sapiens
  misc_RNA (1)...(19): siRNA sense strand
cugaaauggugaauuauga

SEQ ID NO: 1034620 - RNA, 19 nt, Homo sapiens
  misc_RNA (1)...(19): siRNA sense strand
uaauccagaugaugugaaa

SEQ ID NO: 1034621 - RNA, 19 nt, Homo sapiens
  misc_RNA (1)...(19): siRNA sense strand
ucugaaaccuuuaaagauc

SEQ ID NO: 1034622 - RNA, 19 nt, Homo sapiens
  misc_RNA (1)...(19): siRNA sense strand
ugaccaaccugaggauauu

SEQ ID NO: 1034623 - RNA, 19 nt, Homo sapiens
  misc_RNA (1)...(19): siRNA sense strand
caagugggacaacaaauga

SEQ ID NO: 1034624 - RNA, 19 nt, Homo sapiens
  misc_RNA (1)...(19): siRNA sense strand
gaagaacaaggcugaggaa

SEQ ID NO: 1034625 - RNA, 19 nt, Homo sapiens
  misc_RNA (1)...(19): siRNA sense strand
gauaaugcaaggcagauga

SEQ ID NO: 1034626 - RNA, 19 nt, Homo sapiens
  misc_RNA (1)...(19): siRNA sense strand
cuacaguuaccaacaguua

SEQ ID NO: 1034627 - RNA, 19 nt, Homo sapiens
  misc_RNA (1)...(19): siRNA sense strand
gacccaaucucuucaggau

SEQ ID NO: 1034628 - RNA, 19 nt, Homo sapiens
  misc_RNA (1)...(19): siRNA sense strand
gaccaguccuuauccuaug

SEQ ID NO: 1034629 - RNA, 19 nt, Homo sapiens
  misc_RNA (1)...(19): siRNA sense strand
gaccaggccuugcgcagau

SEQ ID NO: 1034630 - RNA, 19 nt, Homo sapiens
  misc_RNA (1)...(19): siRNA sense strand
agaaagagcugaagauccu

SEQ ID NO: 1034631 - RNA, 19 nt, Homo sapiens
  misc_RNA (1)...(19): siRNA sense strand
ggagaaugacagcuugaaa

SEQ ID NO: 1034632 - RNA, 19 nt, Homo sapiens
  misc_RNA (1)...(19): siRNA sense strand
guacuuaaaggagcuauga

SEQ ID NO: 1034633 - RNA, 19 nt, Homo sapiens
  misc_RNA (1)...(19): siRNA sense strand
gagaaaauaugcucuugga

SEQ ID NO: 1034634 - RNA, 19 nt, Homo sapiens
  misc_RNA (1)...(19): siRNA sense strand
ccacugauaauccagauga

SEQ ID NO: 1034635 - RNA, 19 nt, Homo sapiens
  misc_RNA (1)...(19): siRNA sense strand
caaggcagaugagcagaga

SEQ ID NO: 1034636 - RNA, 19 nt, Homo sapiens
  misc_RNA (1)...(19): siRNA sense strand
cagaaaccaaugacugaua

SEQ ID NO: 1034637 - RNA, 19 nt, Homo sapiens
  misc_RNA (1)...(19): siRNA sense strand
ccagacgccucauucacaa

SEQ ID NO: 1034638 - RNA, 19 nt, Homo sapiens
  misc_RNA (1)...(19): siRNA sense strand
cagaagagaacucaaguca

SEQ ID NO: 1034639 - RNA, 19 nt, Homo sapiens
  misc_RNA (1)...(19): siRNA sense strand
aagauccucugaaaccuuu

SEQ ID NO: 1034640 - RNA, 19 nt, Homo sapiens
  misc_RNA (1)...(19): siRNA sense strand
agccaaagaucaaggagaa

SEQ ID NO: 1034641 - RNA, 19 nt, Homo sapiens
  misc_RNA (1)...(19): siRNA sense strand
ugggaagcauggauuauau

SEQ ID NO: 1034642 - RNA, 19 nt, Homo sapiens
  misc_RNA (1)...(19): siRNA sense strand
caagucacguccuuugagu

SEQ ID NO: 1034643 - RNA, 19 nt, Homo sapiens
  misc_RNA (1)...(19): siRNA sense strand
cccauuaacuucacugauc

SEQ ID NO: 1034644 - RNA, 19 nt, Homo sapiens
  misc_RNA (1)...(19): siRNA sense strand
ggauagacagguucaggaa

SEQ ID NO: 1034645 - RNA, 19 nt, Homo sapiens
  misc_RNA (1)...(19): siRNA sense strand
cuucugauuuguuaucuga

SEQ ID NO: 1034646 - RNA, 19 nt, Homo sapiens
  misc_RNA (1)...(19): siRNA sense strand
ccauuaacuucacugauca

SEQ ID NO: 1034647 - RNA, 19 nt, Homo sapiens
  misc_RNA (1)...(19): siRNA sense strand
ugucagagauuuucuaaga

SEQ ID NO: 1034648 - RNA, 19 nt, Homo sapiens
  misc_RNA (1)...(19): siRNA sense strand
caaagaucaaggagaauga

SEQ ID NO: 1034649 - RNA, 19 nt, Homo sapiens
  misc_RNA (1)...(19): siRNA sense strand
ccaagugggacaacaaaug

SEQ ID NO: 1034650 - RNA, 19 nt, Homo sapiens
  misc_RNA (1)...(19): siRNA sense strand
uucaauaccucguggagaa

SEQ ID NO: 1034651 - RNA, 19 nt, Homo sapiens
  misc_RNA (1)...(19): siRNA sense strand
ucacaacuacaaucucauu

SEQ ID NO: 1034652 - RNA, 19 nt, Homo sapiens
  misc_RNA (1)...(19): siRNA sense strand
ccucugaaaccuuuaaaga

SEQ ID NO: 1034653 - RNA, 19 nt, Homo sapiens
  misc_RNA (1)...(19): siRNA sense strand
guaaacacuuucaauaccu

SEQ ID NO: 1034654 - RNA, 19 nt, Homo sapiens
  misc_RNA (1)...(19): siRNA sense strand
agacguggauagacagguu

SEQ ID NO: 1034655 - RNA, 19 nt, Homo sapiens
  misc_RNA (1)...(19): siRNA sense strand
aaacaaccagaaacuacua

SEQ ID NO: 1034656 - RNA, 19 nt, Homo sapiens
  misc_RNA (1)...(19): siRNA sense strand
gugggaagcauggauuaua

SEQ ID NO: 1034657 - RNA, 19 nt, Homo sapiens
  misc_RNA (1)...(19): siRNA sense strand
ggcaaacaguagcagauuc

SEQ ID NO: 1034658 - RNA, 19 nt, Homo sapiens
  misc_RNA (1)...(19): siRNA sense strand
aagcaaaacugaacauaug

SEQ ID NO: 1034659 - RNA, 19 nt, Homo sapiens
  misc_RNA (1)...(19): siRNA sense strand
gaauccagcugugaagaac

SEQ ID NO: 1034660 - RNA, 19 nt, Homo sapiens
  misc_RNA (1)...(19): siRNA sense strand
ccaaacaaugcaccagaaa

SEQ ID NO: 1034661 - RNA, 19 nt, Homo sapiens
  misc_RNA (1)...(19): siRNA sense strand
gagcuucuucugauuuguu

SEQ ID NO: 1034662 - RNA, 19 nt, Homo sapiens
  misc_RNA (1)...(19): siRNA sense strand
cauagacaaucucaaucug

SEQ ID NO: 1034663 - RNA, 19 nt, Homo sapiens
  misc_RNA (1)...(19): siRNA sense strand
caauggcagacucaacaua

SEQ ID NO: 1034664 - RNA, 19 nt, Homo sapiens
  misc_RNA (1)...(19): siRNA sense strand
ugaagauccuggacccaau

SEQ ID NO: 1034665 - RNA, 19 nt, Homo sapiens
  misc_RNA (1)...(19): siRNA sense strand
ccagagaacaaccagaaau

SEQ ID NO: 1034666 - RNA, 19 nt, Homo sapiens
  misc_RNA (1)...(19): siRNA sense strand
cccaaacaaugcaccagaa

SEQ ID NO: 1034667 - RNA, 19 nt, Homo sapiens
  misc_RNA (1)...(19): siRNA sense strand
ccaaagaucaaggagaaug

SEQ ID NO: 1034668 - RNA, 19 nt, Homo sapiens
  misc_RNA (1)...(19): siRNA sense strand
ucaaggagaaugacagcuu

SEQ ID NO: 1034669 - RNA, 19 nt, Homo sapiens
  misc_RNA (1)...(19): siRNA sense strand
uaaaauccuuugucagaga

SEQ ID NO: 1034670 - RNA, 19 nt, Homo sapiens
  misc_RNA (1)...(19): siRNA sense strand
gagaccaguccuuauccua

SEQ ID NO: 1034671 - RNA, 19 nt, Homo sapiens
  misc_RNA (1)...(19): siRNA sense strand
gggcaaacaguagcagauu

SEQ ID NO: 1034672 - RNA, 19 nt, Homo sapiens
  misc_RNA (1)...(19): siRNA sense strand
cagaugcaaugccugagau

SEQ ID NO: 1034673 - RNA, 19 nt, Homo sapiens
  misc_RNA (1)...(19): siRNA sense strand
cagcaaaccacugauaauc

SEQ ID NO: 1034674 - RNA, 19 nt, Homo sapiens
  misc_RNA (1)...(19): siRNA sense strand
gagaaugacagcuugaaaa

SEQ ID NO: 1034675 - RNA, 19 nt, Homo sapiens
  misc_RNA (1)...(19): siRNA sense strand
ugagccugcuggaaacauu

SEQ ID NO: 1034676 - RNA, 19 nt, Homo sapiens
  misc_RNA (1)...(19): siRNA sense strand
gaaaacaaccagaaacuac

SEQ ID NO: 1034677 - RNA, 19 nt, Homo sapiens
  misc_RNA (1)...(19): siRNA sense strand
ugccugagaucauggugaa

SEQ ID NO: 1034678 - RNA, 19 nt, Homo sapiens
  misc_RNA (1)...(19): siRNA sense strand
cugaaaccuuuaaagauca

SEQ ID NO: 1034679 - RNA, 19 nt, Homo sapiens
  misc_RNA (1)...(19): siRNA sense strand
ggaagcauggauuauaucu

SEQ ID NO: 1034680 - RNA, 19 nt, Homo sapiens
  misc_RNA (1)...(19): siRNA sense strand
agaacaaccagaaaucaga

SEQ ID NO: 1034681 - RNA, 19 nt, Homo sapiens
  misc_RNA (1)...(19): siRNA sense strand
ugugagacguggauagaca

SEQ ID NO: 1034682 - RNA, 19 nt, Homo sapiens
  misc_RNA (1)...(19): siRNA sense strand
agaacaaggcugaggaaug

SEQ ID NO: 1034683 - RNA, 19 nt, Homo sapiens
  misc_RNA (1)...(19): siRNA sense strand
gaggagcugcagccagaaa

SEQ ID NO: 1034684 - RNA, 19 nt, Homo sapiens
  misc_RNA (1)...(19): siRNA sense strand
acagugcagcaucagauua

SEQ ID NO: 1034685 - RNA, 19 nt, Homo sapiens
  misc_RNA (1)...(19): siRNA sense strand
uuuaaacagugcagcauca

SEQ ID NO: 1034686 - RNA, 19 nt, Homo sapiens
  misc_RNA (1)...(19): siRNA sense strand
acaguuaccaacaguuaaa

SEQ ID NO: 1034687 - RNA, 19 nt, Homo sapiens
  misc_RNA (1)...(19): siRNA sense strand
gaagauccuggacccaauc

SEQ ID NO: 1034688 - RNA, 19 nt, Homo sapiens
  misc_RNA (1)...(19): siRNA sense strand
ggucagaagagaacucaag

SEQ ID NO: 1034689 - RNA, 19 nt, Homo sapiens
  misc_RNA (1)...(19): siRNA sense strand
gauaauccagaugauguga

SEQ ID NO: 1034690 - RNA, 19 nt, Homo sapiens
  misc_RNA (1)...(19): siRNA sense strand
gauccucugaaaccuuuaa

SEQ ID NO: 1034691 - RNA, 19 nt, Homo sapiens
  misc_RNA (1)...(19): siRNA sense strand
ggaaacauugcuuaaccau

SEQ ID NO: 1034692 - RNA, 19 nt, Homo sapiens
  misc_RNA (1)...(19): siRNA sense strand
aaacagugcagcaucagau

SEQ ID NO: 1034693 - RNA, 19 nt, Homo sapiens
  misc_RNA (1)...(19): siRNA sense strand
guuaaaauccuuugucaga

SEQ ID NO: 1034694 - RNA, 19 nt, Homo sapiens
  misc_RNA (1)...(19): siRNA sense strand
guggagaagccaaagauca

SEQ ID NO: 1034695 - RNA, 19 nt, Homo sapiens
  misc_RNA (1)...(19): siRNA sense strand
gaaaacagaaacccaaaca

SEQ ID NO: 1034696 - RNA, 19 nt, Homo sapiens
  misc_RNA (1)...(19): siRNA sense strand
cagcacugcgguacuuaaa

SEQ ID NO: 1034697 - RNA, 19 nt, Homo sapiens
  misc_RNA (1)...(19): siRNA sense strand
ugacagagcugcacagaaa

SEQ ID NO: 1034698 - RNA, 19 nt, Homo sapiens
  misc_RNA (1)...(19): siRNA sense strand
ggaaaugugugauggagaa

SEQ ID NO: 1034699 - RNA, 19 nt, Homo sapiens
  misc_RNA (1)...(19): siRNA sense strand
gcaguuagcucucccaaag

SEQ ID NO: 1034700 - RNA, 19 nt, Homo sapiens
  misc_RNA (1)...(19): siRNA sense strand
caagaaagcacaaagauga

SEQ ID NO: 1034701 - RNA, 19 nt, Homo sapiens
  misc_RNA (1)...(19): siRNA sense strand
acaaauagaugaaggagaa

SEQ ID NO: 1034702 - RNA, 19 nt, Homo sapiens
  misc_RNA (1)...(19): siRNA sense strand
ugacaagagugauguauug

SEQ ID NO: 1034703 - RNA, 19 nt, Homo sapiens
  misc_RNA (1)...(19): siRNA sense strand
cagaagaaaugcccaaguu

SEQ ID NO: 1034704 - RNA, 19 nt, Homo sapiens
  misc_RNA (1)...(19): siRNA sense strand
gggcauggcuggagcagaa

SEQ ID NO: 1034705 - RNA, 19 nt, Homo sapiens
  misc_RNA (1)...(19): siRNA sense strand
ggucacaucuggaagcauu

SEQ ID NO: 1034706 - RNA, 19 nt, Homo sapiens
  misc_RNA (1)...(19): siRNA sense strand
ccaaguuacugccuuauga

SEQ ID NO: 1034707 - RNA, 19 nt, Homo sapiens
  misc_RNA (1)...(19): siRNA sense strand
gaagauagacccagauuac

SEQ ID NO: 1034708 - RNA, 19 nt, Homo sapiens
  misc_RNA (1)...(19): siRNA sense strand
gaaggagaaucagaagaaa

SEQ ID NO: 1034709 - RNA, 19 nt, Homo sapiens
  misc_RNA (1)...(19): siRNA sense strand
acagagaccuuugaucuaa

SEQ ID NO: 1034710 - RNA, 19 nt, Homo sapiens
  misc_RNA (1)...(19): siRNA sense strand
gauggccuauccugauuua

SEQ ID NO: 1034711 - RNA, 19 nt, Homo sapiens
  misc_RNA (1)...(19): siRNA sense strand
ggaguguccuguaaacuug

SEQ ID NO: 1034712 - RNA, 19 nt, Homo sapiens
  misc_RNA (1)...(19): siRNA sense strand
ugaaauggaugauauagca

SEQ ID NO: 1034713 - RNA, 19 nt, Homo sapiens
  misc_RNA (1)...(19): siRNA sense strand
ggaaacaaaugggaacaau

SEQ ID NO: 1034714 - RNA, 19 nt, Homo sapiens
  misc_RNA (1)...(19): siRNA sense strand
ggaacccgcuucacucaga

SEQ ID NO: 1034715 - RNA, 19 nt, Homo sapiens
  misc_RNA (1)...(19): siRNA sense strand
gaaagucuauugcuguucu

SEQ ID NO: 1034716 - RNA, 19 nt, Homo sapiens
  misc_RNA (1)...(19): siRNA sense strand
ccaagauuccauacuauua

SEQ ID NO: 1034717 - RNA, 19 nt, Homo sapiens
  misc_RNA (1)...(19): siRNA sense strand
caagagugauguauugugu

SEQ ID NO: 1034718 - RNA, 19 nt, Homo sapiens
  misc_RNA (1)...(19): siRNA sense strand
aaacaaaugggaacaauug

SEQ ID NO: 1034719 - RNA, 19 nt, Homo sapiens
  misc_RNA (1)...(19): siRNA sense strand
gaaugaagaaggagaauca

SEQ ID NO: 1034720 - RNA, 19 nt, Homo sapiens
  misc_RNA (1)...(19): siRNA sense strand
gaucaagagcuucaagaaa

SEQ ID NO: 1034721 - RNA, 19 nt, Homo sapiens
  misc_RNA (1)...(19): siRNA sense strand
uacagaagcuuccagaaug

SEQ ID NO: 1034722 - RNA, 19 nt, Homo sapiens
  misc_RNA (1)...(19): siRNA sense strand
ucaaggaaguguuugcuau

SEQ ID NO: 1034723 - RNA, 19 nt, Homo sapiens
  misc_RNA (1)...(19): siRNA sense strand
caaaggaggccaugcaaga

SEQ ID NO: 1034724 - RNA, 19 nt, Homo sapiens
  misc_RNA (1)...(19): siRNA sense strand
ccaagucacuaaugaagga

SEQ ID NO: 1034725 - RNA, 19 nt, Homo sapiens
  misc_RNA (1)...(19): siRNA sense strand
aagaauacguuacaggaaa

SEQ ID NO: 1034726 - RNA, 19 nt, Homo sapiens
  misc_RNA (1)...(19): siRNA sense strand
gagcggagcaaucagcaua

SEQ ID NO: 1034727 - RNA, 19 nt, Homo sapiens
  misc_RNA (1)...(19): siRNA sense strand
ccaagucacuaaugaagga

SEQ ID NO: 1034728 - RNA, 19 nt, Homo sapiens
  misc_RNA (1)...(19): siRNA sense strand
acacucaccucuccaaaug

SEQ ID NO: 1034729 - RNA, 19 nt, Homo sapiens
  misc_RNA (1)...(19): siRNA sense strand
acaauugacuggauuagug

SEQ ID NO: 1034730 - RNA, 19 nt, Homo sapiens
  misc_RNA (1)...(19): siRNA sense strand
gaaagcaacgggaugauag

SEQ ID NO: 1034731 - RNA, 19 nt, Homo sapiens
  misc_RNA (1)...(19): siRNA sense strand
gagcccaugugguuggaua

SEQ ID NO: 1034732 - RNA, 19 nt, Homo sapiens
  misc_RNA (1)...(19): siRNA sense strand
ugagaagaauuucaaggaa

SEQ ID NO: 1034733 - RNA, 19 nt, Homo sapiens
  misc_RNA (1)...(19): siRNA sense strand
agaaaugugugauggagaa

SEQ ID NO: 1034734 - RNA, 19 nt, Homo sapiens
  misc_RNA (1)...(19): siRNA sense strand
gaaacaaaugggaacaauu

SEQ ID NO: 1034735 - RNA, 19 nt, Homo sapiens
  misc_RNA (1)...(19): siRNA sense strand
gaaucuuggugaaguguau

SEQ ID NO: 1034736 - RNA, 19 nt, Homo sapiens
  misc_RNA (1)...(19): siRNA sense strand
ugaaggagcccaugugguu

SEQ ID NO: 1034737 - RNA, 19 nt, Homo sapiens
  misc_RNA (1)...(19): siRNA sense strand
gaggaacaguugaaaugug

SEQ ID NO: 1034738 - RNA, 19 nt, Homo sapiens
  misc_RNA (1)...(19): siRNA sense strand
gaagaaaugcccaaguuac

SEQ ID NO: 1034739 - RNA, 19 nt, Homo sapiens
  misc_RNA (1)...(19): siRNA sense strand
gaauuucaaggaaguguuu

SEQ ID NO: 1034740 - RNA, 19 nt, Homo sapiens
  misc_RNA (1)...(19): siRNA sense strand
gagaaguguuccuguguca

SEQ ID NO: 1034741 - RNA, 19 nt, Homo sapiens
  misc_RNA (1)...(19): siRNA sense strand
gcaauaacaaggccauuuc

SEQ ID NO: 1034742 - RNA, 19 nt, Homo sapiens
  misc_RNA (1)...(19): siRNA sense strand
ggaacaauugacuggauua

SEQ ID NO: 1034743 - RNA, 19 nt, Homo sapiens
  misc_RNA (1)...(19): siRNA sense strand
gggaacaauugacuggauu

SEQ ID NO: 1034744 - RNA, 19 nt, Homo sapiens
  misc_RNA (1)...(19): siRNA sense strand
gaaaaucacccaaugaaug

SEQ ID NO: 1034745 - RNA, 19 nt, Homo sapiens
  misc_RNA (1)...(19): siRNA sense strand
agacagcaaucucaacuuc

SEQ ID NO: 1034746 - RNA, 19 nt, Homo sapiens
  misc_RNA (1)...(19): siRNA sense strand
gaggggagcuguucuguug

SEQ ID NO: 1034747 - RNA, 19 nt, Homo sapiens
  misc_RNA (1)...(19): siRNA sense strand
ugaaggagaaucagaagaa

SEQ ID NO: 1034748 - RNA, 19 nt, Homo sapiens
  misc_RNA (1)...(19): siRNA sense strand
ugaaguguauacagacuga

SEQ ID NO: 1034749 - RNA, 19 nt, Homo sapiens
  misc_RNA (1)...(19): siRNA sense strand
cagguggucuccagugaaa

SEQ ID NO: 1034750 - RNA, 19 nt, Homo sapiens
  misc_RNA (1)...(19): siRNA sense strand
gagaagagggcagugauga

SEQ ID NO: 1034751 - RNA, 19 nt, Homo sapiens
  misc_RNA (1)...(19): siRNA sense strand
gaaaagaguccgaucaaga

SEQ ID NO: 1034752 - RNA, 19 nt, Homo sapiens
  misc_RNA (1)...(19): siRNA sense strand
gagaagagggcagugauga

SEQ ID NO: 1034753 - RNA, 19 nt, Homo sapiens
  misc_RNA (1)...(19): siRNA sense strand
gcauuguucagcaggauua

SEQ ID NO: 1034754 - RNA, 19 nt, Homo sapiens
  misc_RNA (1)...(19): siRNA sense strand
gaacgugaaucugaaagac

SEQ ID NO: 1034755 - RNA, 19 nt, Homo sapiens
  misc_RNA (1)...(19): siRNA sense strand
gaaguguuccugugucaug

SEQ ID NO: 1034756 - RNA, 19 nt, Homo sapiens
  misc_RNA (1)...(19): siRNA sense strand
gaacguagagggucagaac

SEQ ID NO: 1034757 - RNA, 19 nt, Homo sapiens
  misc_RNA (1)...(19): siRNA sense strand
gaacuggagaagacauuug

SEQ ID NO: 1034758 - RNA, 19 nt, Homo sapiens
  misc_RNA (1)...(19): siRNA sense strand
ucaguugacccuuguauga

SEQ ID NO: 1034759 - RNA, 19 nt, Homo sapiens
  misc_RNA (1)...(19): siRNA sense strand
uacgauggcugauggagaa

SEQ ID NO: 1034760 - RNA, 19 nt, Homo sapiens
  misc_RNA (1)...(19): siRNA sense strand
gugggucaguuucuuguuu

SEQ ID NO: 1034761 - RNA, 19 nt, Homo sapiens
  misc_RNA (1)...(19): siRNA sense strand
gcaggaacagucccagaaa

SEQ ID NO: 1034762 - RNA, 19 nt, Homo sapiens
  misc_RNA (1)...(19): siRNA sense strand
agugaugacuguucagaaa

SEQ ID NO: 1034763 - RNA, 19 nt, Homo sapiens
  misc_RNA (1)...(19): siRNA sense strand
ccacagggccucuuacaag

SEQ ID NO: 1034764 - RNA, 19 nt, Homo sapiens
  misc_RNA (1)...(19): siRNA sense strand
ggagcaaucagcauaugaa

SEQ ID NO: 1034765 - RNA, 19 nt, Homo sapiens
  misc_RNA (1)...(19): siRNA sense strand
ccugcuauaugauaaugua

SEQ ID NO: 1034766 - RNA, 19 nt, Homo sapiens
  misc_RNA (1)...(19): siRNA sense strand
cgagaccgcuccuucaucu

SEQ ID NO: 1034767 - RNA, 19 nt, Homo sapiens
  misc_RNA (1)...(19): siRNA sense strand
guuccugugucauguguuu

SEQ ID NO: 1034768 - RNA, 19 nt, Homo sapiens
  misc_RNA (1)...(19): siRNA sense strand
gaacacucaccucuccaaa

SEQ ID NO: 1034769 - RNA, 19 nt, Homo sapiens
  misc_RNA (1)...(19): siRNA sense strand
aggaacaguugaaauguga

SEQ ID NO: 1034770 - RNA, 19 nt, Homo sapiens
  misc_RNA (1)...(19): siRNA sense strand
ugaagaaggagaaucagaa

SEQ ID NO: 1034771 - RNA, 19 nt, Homo sapiens
  misc_RNA (1)...(19): siRNA sense strand
gaagagacaaagagaccuu

SEQ ID NO: 1034772 - RNA, 19 nt, Homo sapiens
  misc_RNA (1)...(19): siRNA sense strand
agaagaaaugcccaaguua

SEQ ID NO: 1034773 - RNA, 19 nt, Homo sapiens
  misc_RNA (1)...(19): siRNA sense strand
uggaggagaugcugaagau

SEQ ID NO: 1034774 - RNA, 19 nt, Homo sapiens
  misc_RNA (1)...(19): siRNA sense strand
aagaugaaacuguggauuu

SEQ ID NO: 1034775 - RNA, 19 nt, Homo sapiens
  misc_RNA (1)...(19): siRNA sense strand
caauggauacuguggauau

SEQ ID NO: 1034776 - RNA, 19 nt, Homo sapiens
  misc_RNA (1)...(19): siRNA sense strand
ccagauuacuaccauaugg

SEQ ID NO: 1034777 - RNA, 19 nt, Homo sapiens
  misc_RNA (1)...(19): siRNA sense strand
aggcugaguuugagaagaa

SEQ ID NO: 1034778 - RNA, 19 nt, Homo sapiens
  misc_RNA (1)...(19): siRNA sense strand
uugccaagauuccauacua

SEQ ID NO: 1034779 - RNA, 19 nt, Homo sapiens
  misc_RNA (1)...(19): siRNA sense strand
gcaagaugugggucaguuu

SEQ ID NO: 1034780 - RNA, 19 nt, Homo sapiens
  misc_RNA (1)...(19): siRNA sense strand
gaaaccaagacaaggagaa

SEQ ID NO: 1034781 - RNA, 19 nt, Homo sapiens
  misc_RNA (1)...(19): siRNA sense strand
caaugccugucaugaaaug

SEQ ID NO: 1034782 - RNA, 19 nt, Homo sapiens
  misc_RNA (1)...(19): siRNA sense strand
ucaccucuccaaaugaaua

SEQ ID NO: 1034783 - RNA, 19 nt, Homo sapiens
  misc_RNA (1)...(19): siRNA sense strand
caaggaaguguuugcuauu

SEQ ID NO: 1034784 - RNA, 19 nt, Homo sapiens
  misc_RNA (1)...(19): siRNA sense strand
gccauuuccuuuccuuaug

SEQ ID NO: 1034785 - RNA, 19 nt, Homo sapiens
  misc_RNA (1)...(19): siRNA sense strand
gcaaucagcauaugaaaau

SEQ ID NO: 1034786 - RNA, 19 nt, Homo sapiens
  misc_RNA (1)...(19): siRNA sense strand
gaagaaggagaaucagaag

SEQ ID NO: 1034787 - RNA, 19 nt, Homo sapiens
  misc_RNA (1)...(19): siRNA sense strand
cuacagagaccuuugaucu

SEQ ID NO: 1034788 - RNA, 19 nt, Homo sapiens
  misc_RNA (1)...(19): siRNA sense strand
gggaguguccuguaaacuu

SEQ ID NO: 1034789 - RNA, 19 nt, Homo sapiens
  misc_RNA (1)...(19): siRNA sense strand
agcaaugccugucaugaaa

SEQ ID NO: 1034790 - RNA, 19 nt, Homo sapiens
  misc_RNA (1)...(19): siRNA sense strand
cagaauguaugcuaugaac

SEQ ID NO: 1034791 - RNA, 19 nt, Homo sapiens
  misc_RNA (1)...(19): siRNA sense strand
agaagaauuucaaggaagu

SEQ ID NO: 1034792 - RNA, 19 nt, Homo sapiens
  misc_RNA (1)...(19): siRNA sense strand
caagaauacguuacaggaa

SEQ ID NO: 1034793 - RNA, 19 nt, Homo sapiens
  misc_RNA (1)...(19): siRNA sense strand
gagcaaucagcauaugaaa

SEQ ID NO: 1034794 - RNA, 19 nt, Homo sapiens
  misc_RNA (1)...(19): siRNA sense strand
cagagaccuuugaucuaaa

SEQ ID NO: 1034795 - RNA, 19 nt, Homo sapiens
  misc_RNA (1)...(19): siRNA sense strand
ugaugacuguucagaaaug

SEQ ID NO: 1034796 - RNA, 19 nt, Homo sapiens
  misc_RNA (1)...(19): siRNA sense strand
cagcaaugccugucaugaa

SEQ ID NO: 1034797 - RNA, 19 nt, Homo sapiens
  misc_RNA (1)...(19): siRNA sense strand
agaaacagcuggaaucuaa

SEQ ID NO: 1034798 - RNA, 19 nt, Homo sapiens
  misc_RNA (1)...(19): siRNA sense strand
gcuggaaucuaaugaaaua

SEQ ID NO: 1034799 - RNA, 19 nt, Homo sapiens
  misc_RNA (1)...(19): siRNA sense strand
gaaacgauguagaaauuga

SEQ ID NO: 1034800 - RNA, 19 nt, Homo sapiens
  misc_RNA (1)...(19): siRNA sense strand
caucaaagcuguggaaaga

SEQ ID NO: 1034801 - RNA, 19 nt, Homo sapiens
  misc_RNA (1)...(19): siRNA sense strand
ggaucaacuucaagaaaua

SEQ ID NO: 1034802 - RNA, 19 nt, Homo sapiens
  misc_RNA (1)...(19): siRNA sense strand
gcacagauccggacuaugg

SEQ ID NO: 1034803 - RNA, 19 nt, Homo sapiens
  misc_RNA (1)...(19): siRNA sense strand
auagagaaauggagagaua

SEQ ID NO: 1034804 - RNA, 19 nt, Homo sapiens
  misc_RNA (1)...(19): siRNA sense strand
ggaaaguggucuugaagca

SEQ ID NO: 1034805 - RNA, 19 nt, Homo sapiens
  misc_RNA (1)...(19): siRNA sense strand
agccuuagcucaagcaaua

SEQ ID NO: 1034806 - RNA, 19 nt, Homo sapiens
  misc_RNA (1)...(19): siRNA sense strand
gaggaagaauucugggaaa

SEQ ID NO: 1034807 - RNA, 19 nt, Homo sapiens
  misc_RNA (1)...(19): siRNA sense strand
cagagaagcuucaauccau

SEQ ID NO: 1034808 - RNA, 19 nt, Homo sapiens
  misc_RNA (1)...(19): siRNA sense strand
cagcuggaaucuaaugaaa

SEQ ID NO: 1034809 - RNA, 19 nt, Homo sapiens
  misc_RNA (1)...(19): siRNA sense strand
aggaagagguuaaaggaaa

SEQ ID NO: 1034810 - RNA, 19 nt, Homo sapiens
  misc_RNA (1)...(19): siRNA sense strand
gguacacccuuauagagaa

SEQ ID NO: 1034811 - RNA, 19 nt, Homo sapiens
  misc_RNA (1)...(19): siRNA sense strand
ggagagauacugaaagaca

SEQ ID NO: 1034812 - RNA, 19 nt, Homo sapiens
  misc_RNA (1)...(19): siRNA sense strand
gcaguugacuaaggaguug

SEQ ID NO: 1034813 - RNA, 19 nt, Homo sapiens
  misc_RNA (1)...(19): siRNA sense strand
gcaguaugcuagugaugug

SEQ ID NO: 1034814 - RNA, 19 nt, Homo sapiens
  misc_RNA (1)...(19): siRNA sense strand
ggaagagguuaaaggaaag

SEQ ID NO: 1034815 - RNA, 19 nt, Homo sapiens
  misc_RNA (1)...(19): siRNA sense strand
gcaauaggucgaacuggaa

SEQ ID NO: 1034816 - RNA, 19 nt, Homo sapiens
  misc_RNA (1)...(19): siRNA sense strand
aagcaggaguguaaagauu

SEQ ID NO: 1034817 - RNA, 19 nt, Homo sapiens
  misc_RNA (1)...(19): siRNA sense strand
ucaaagcuguggaaagauc

SEQ ID NO: 1034818 - RNA, 19 nt, Homo sapiens
  misc_RNA (1)...(19): siRNA sense strand
guacacccuuauagagaaa

SEQ ID NO: 1034819 - RNA, 19 nt, Homo sapiens
  misc_RNA (1)...(19): siRNA sense strand
gcaggaguguaaagauuag

SEQ ID NO: 1034820 - RNA, 19 nt, Homo sapiens
  misc_RNA (1)...(19): siRNA sense strand
gaaauagaggccucacaug

SEQ ID NO: 1034821 - RNA, 19 nt, Homo sapiens
  misc_RNA (1)...(19): siRNA sense strand
gaaauggagagauacugaa

SEQ ID NO: 1034822 - RNA, 19 nt, Homo sapiens
  misc_RNA (1)...(19): siRNA sense strand
ggaguucagaggauuguuu

SEQ ID NO: 1034823 - RNA, 19 nt, Homo sapiens
  misc_RNA (1)...(19): siRNA sense strand
cagcggagcccauugaaau

SEQ ID NO: 1034824 - RNA, 19 nt, Homo sapiens
  misc_RNA (1)...(19): siRNA sense strand
ggauggaguucagaggauu

SEQ ID NO: 1034825 - RNA, 19 nt, Homo sapiens
  misc_RNA (1)...(19): siRNA sense strand
ggacaaagaacaggaacug

SEQ ID NO: 1034826 - RNA, 19 nt, Homo sapiens
  misc_RNA (1)...(19): siRNA sense strand
aaagaucgguaaggucaaa

SEQ ID NO: 1034827 - RNA, 19 nt, Homo sapiens
  misc_RNA (1)...(19): siRNA sense strand
caaaagaaacgauguagaa

SEQ ID NO: 1034828 - RNA, 19 nt, Homo sapiens
  misc_RNA (1)...(19): siRNA sense strand
acacuuagcaccucaugaa

SEQ ID NO: 1034829 - RNA, 19 nt, Homo sapiens
  misc_RNA (1)...(19): siRNA sense strand
uauggaaaguggucuugaa

SEQ ID NO: 1034830 - RNA, 19 nt, Homo sapiens
  misc_RNA (1)...(19): siRNA sense strand
uacaggaggugccaaagga

SEQ ID NO: 1034831 - RNA, 19 nt, Homo sapiens
  misc_RNA (1)...(19): siRNA sense strand
cugauaagcaggaguguaa

SEQ ID NO: 1034832 - RNA, 19 nt, Homo sapiens
  misc_RNA (1)...(19): siRNA sense strand
ggccucacaugcagacauu

SEQ ID NO: 1034833 - RNA, 19 nt, Homo sapiens
  misc_RNA (1)...(19): siRNA sense strand
gaagaauucugggaaaaug

SEQ ID NO: 1034834 - RNA, 19 nt, Homo sapiens
  misc_RNA (1)...(19): siRNA sense strand
cagcagaugaguugaagaa

SEQ ID NO: 1034835 - RNA, 19 nt, Homo sapiens
  misc_RNA (1)...(19): siRNA sense strand
ccuaucauauccuuaaaca

SEQ ID NO: 1034836 - RNA, 19 nt, Homo sapiens
  misc_RNA (1)...(19): siRNA sense strand
ggaucaucauucuuucuga

SEQ ID NO: 1034837 - RNA, 19 nt, Homo sapiens
  misc_RNA (1)...(19): siRNA sense strand
ucaaugaggaagagguuaa

SEQ ID NO: 1034838 - RNA, 19 nt, Homo sapiens
  misc_RNA (1)...(19): siRNA sense strand
gagaaacagcuggaaucua

SEQ ID NO: 1034839 - RNA, 19 nt, Homo sapiens
  misc_RNA (1)...(19): siRNA sense strand
aggaucaacuucaagaaau

SEQ ID NO: 1034840 - RNA, 19 nt, Homo sapiens
  misc_RNA (1)...(19): siRNA sense strand
cagaugaguugaagaagcu

SEQ ID NO: 1034841 - RNA, 19 nt, Homo sapiens
  misc_RNA (1)...(19): siRNA sense strand
ugucauagccuuagcucaa

SEQ ID NO: 1034842 - RNA, 19 nt, Homo sapiens
  misc_RNA (1)...(19): siRNA sense strand
ggagguugucauagccuua

SEQ ID NO: 1034843 - RNA, 19 nt, Homo sapiens
  misc_RNA (1)...(19): siRNA sense strand
agagaagcuucaauccauu

SEQ ID NO: 1034844 - RNA, 19 nt, Homo sapiens
  misc_RNA (1)...(19): siRNA sense strand
agacagagaagcuucaauc

SEQ ID NO: 1034845 - RNA, 19 nt, Homo sapiens
  misc_RNA (1)...(19): siRNA sense strand
gaggaagagguuaaaggaa

SEQ ID NO: 1034846 - RNA, 19 nt, Homo sapiens
  misc_RNA (1)...(19): siRNA sense strand
ggaaauuguccgucuagag

SEQ ID NO: 1034847 - RNA, 19 nt, Homo sapiens
  misc_RNA (1)...(19): siRNA sense strand
agaaauggagagauacuga

SEQ ID NO: 1034848 - RNA, 19 nt, Homo sapiens
  misc_RNA (1)...(19): siRNA sense strand
ugaggaagagguuaaagga

SEQ ID NO: 1034849 - RNA, 19 nt, Homo sapiens
  misc_RNA (1)...(19): siRNA sense strand
gagcaaaagaucaaaagaa

SEQ ID NO: 1034850 - RNA, 19 nt, Homo sapiens
  misc_RNA (1)...(19): siRNA sense strand
auggagagauacugaaaga

SEQ ID NO: 1034851 - RNA, 19 nt, Homo sapiens
  misc_RNA (1)...(19): siRNA sense strand
agaggaaauuguccgucua

SEQ ID NO: 1034852 - RNA, 19 nt, Homo sapiens
  misc_RNA (1)...(19): siRNA sense strand
aaacaacagcagaugaguu

SEQ ID NO: 1034853 - RNA, 19 nt, Homo sapiens
  misc_RNA (1)...(19): siRNA sense strand
gaaaagguaaagaaacuga

SEQ ID NO: 1034854 - RNA, 19 nt, Homo sapiens
  misc_RNA (1)...(19): siRNA sense strand
ggaggugccaaaggauuaa

SEQ ID NO: 1034855 - RNA, 19 nt, Homo sapiens
  misc_RNA (1)...(19): siRNA sense strand
ugaaauagaggccucacau

SEQ ID NO: 1034856 - RNA, 19 nt, Homo sapiens
  misc_RNA (1)...(19): siRNA sense strand
uuaaaggaaagaucgguaa

SEQ ID NO: 1034857 - RNA, 19 nt, Homo sapiens
  misc_RNA (1)...(19): siRNA sense strand
cugaauaacugcaaaacaa

SEQ ID NO: 1034858 - RNA, 19 nt, Homo sapiens
  misc_RNA (1)...(19): siRNA sense strand
ccaaaggauuaauggacau

SEQ ID NO: 1034859 - RNA, 19 nt, Homo sapiens
  misc_RNA (1)...(19): siRNA sense strand
uggagucacugaagucaca

SEQ ID NO: 1034860 - RNA, 19 nt, Homo sapiens
  misc_RNA (1)...(19): siRNA sense strand
gauccggacuauggaaagu

SEQ ID NO: 1034861 - RNA, 19 nt, Homo sapiens
  misc_RNA (1)...(19): siRNA sense strand
uggcacagauccggacuau

SEQ ID NO: 1034862 - RNA, 19 nt, Homo sapiens
  misc_RNA (1)...(19): siRNA sense strand
aaacagcuggaaucuaaug

SEQ ID NO: 1034863 - RNA, 19 nt, Homo sapiens
  misc_RNA (1)...(19): siRNA sense strand
ggagggaaccgaaaaggaa

SEQ ID NO: 1034864 - RNA, 19 nt, Homo sapiens
  misc_RNA (1)...(19): siRNA sense strand
ucacaugcagacauugaaa

SEQ ID NO: 1034865 - RNA, 19 nt, Homo sapiens
  misc_RNA (1)...(19): siRNA sense strand
gaggaaauuguccgucuag

SEQ ID NO: 1034866 - RNA, 19 nt, Homo sapiens
  misc_RNA (1)...(19): siRNA sense strand
gccaggagguugucauagc

SEQ ID NO: 1034867 - RNA, 19 nt, Homo sapiens
  misc_RNA (1)...(19): siRNA sense strand
uggagcaguugacuaagga

SEQ ID NO: 1034868 - RNA, 19 nt, Homo sapiens
  misc_RNA (1)...(19): siRNA sense strand
gcucgaauuccugaaagaa

SEQ ID NO: 1034869 - RNA, 19 nt, Homo sapiens
  misc_RNA (1)...(19): siRNA sense strand
gauaagcaggaguguaaag

SEQ ID NO: 1034870 - RNA, 19 nt, Homo sapiens
  misc_RNA (1)...(19): siRNA sense strand
aaggaaagaucgguaaggu

SEQ ID NO: 1034871 - RNA, 19 nt, Homo sapiens
  misc_RNA (1)...(19): siRNA sense strand
gaagagguuaaaggaaaga

SEQ ID NO: 1034872 - RNA, 19 nt, Homo sapiens
  misc_RNA (1)...(19): siRNA sense strand
ggucaaugaggaagagguu

SEQ ID NO: 1034873 - RNA, 19 nt, Homo sapiens
  misc_RNA (1)...(19): siRNA sense strand
aaauggagagauacugaaa

SEQ ID NO: 1034874 - RNA, 19 nt, Homo sapiens
  misc_RNA (1)...(19): siRNA sense strand
gcaaaacaacagcagauga

SEQ ID NO: 1034875 - RNA, 19 nt, Homo sapiens
  misc_RNA (1)...(19): siRNA sense strand
gagcgacccacuucagaca

SEQ ID NO: 1034876 - RNA, 19 nt, Homo sapiens
  misc_RNA (1)...(19): siRNA sense strand
gaaagaucgguaaggucaa

SEQ ID NO: 1034877 - RNA, 19 nt, Homo sapiens
  misc_RNA (1)...(19): siRNA sense strand
aagaggcacaggucaauga

SEQ ID NO: 1034878 - RNA, 19 nt, Homo sapiens
  misc_RNA (1)...(19): siRNA sense strand
gacagaaaauaacagaaug

SEQ ID NO: 1034879 - RNA, 19 nt, Homo sapiens
  misc_RNA (1)...(19): siRNA sense strand
aaggaucaacuucaagaaa

SEQ ID NO: 1034880 - RNA, 19 nt, Homo sapiens
  misc_RNA (1)...(19): siRNA sense strand
gaaauugaggaggaagaau

SEQ ID NO: 1034881 - RNA, 19 nt, Homo sapiens
  misc_RNA (1)...(19): siRNA sense strand
gaucaaaagaaacgaugua

SEQ ID NO: 1034882 - RNA, 19 nt, Homo sapiens
  misc_RNA (1)...(19): siRNA sense strand
aaaggaaaucacugacauu

SEQ ID NO: 1034883 - RNA, 19 nt, Homo sapiens
  misc_RNA (1)...(19): siRNA sense strand
ggugcugaauaacugcaaa

SEQ ID NO: 1034884 - RNA, 19 nt, Homo sapiens
  misc_RNA (1)...(19): siRNA sense strand
aagucaaucuccagcaguu

SEQ ID NO: 1034885 - RNA, 19 nt, Homo sapiens
  misc_RNA (1)...(19): siRNA sense strand
ccaaacgcuuacaggacaa

SEQ ID NO: 1034886 - RNA, 19 nt, Homo sapiens
  misc_RNA (1)...(19): siRNA sense strand
gcaacgggaaguucaagag

SEQ ID NO: 1034887 - RNA, 19 nt, Homo sapiens
  misc_RNA (1)...(19): siRNA sense strand
guauaauuccaaccuugaa

SEQ ID NO: 1034888 - RNA, 19 nt, Homo sapiens
  misc_RNA (1)...(19): siRNA sense strand
gcgacccacuucagacagu

SEQ ID NO: 1034889 - RNA, 19 nt, Homo sapiens
  misc_RNA (1)...(19): siRNA sense strand
agcaggaguguaaagauua

SEQ ID NO: 1034890 - RNA, 19 nt, Homo sapiens
  misc_RNA (1)...(19): siRNA sense strand
cggagcccauugaaauaga

SEQ ID NO: 1034891 - RNA, 19 nt, Homo sapiens
  misc_RNA (1)...(19): siRNA sense strand
gaguucagaggauuguuug

SEQ ID NO: 1034892 - RNA, 19 nt, Homo sapiens
  misc_RNA (1)...(19): siRNA sense strand
gaaacagcuggaaucuaau

SEQ ID NO: 1034893 - RNA, 19 nt, Homo sapiens
  misc_RNA (1)...(19): siRNA sense strand
aaaaggugcugaauaacug

SEQ ID NO: 1034894 - RNA, 19 nt, Homo sapiens
  misc_RNA (1)...(19): siRNA sense strand
aggaggugccaaaggauua

SEQ ID NO: 1034895 - RNA, 19 nt, Homo sapiens
  misc_RNA (1)...(19): siRNA sense strand
caaccuugaagaggaaauu

SEQ ID NO: 1034896 - RNA, 19 nt, Homo sapiens
  misc_RNA (1)...(19): siRNA sense strand
guuggaaaauggcaucaaa

SEQ ID NO: 1034897 - RNA, 19 nt, Homo sapiens
  misc_RNA (1)...(19): siRNA sense strand
gaagagauaagaagaguaa

SEQ ID NO: 1034898 - RNA, 19 nt, Homo sapiens
  misc_RNA (1)...(19): siRNA sense strand
cgaggaagaucgcccuuug

SEQ ID NO: 1034899 - RNA, 19 nt, Homo sapiens
  misc_RNA (1)...(19): siRNA sense strand
gagauaagaagaguaagaa

SEQ ID NO: 1034900 - RNA, 19 nt, Homo sapiens
  misc_RNA (1)...(19): siRNA sense strand
aaagaggacacacccguua

SEQ ID NO: 1034901 - RNA, 19 nt, Homo sapiens
  misc_RNA (1)...(19): siRNA sense strand
gcauuuggacccugaagaa

SEQ ID NO: 1034902 - RNA, 19 nt, Homo sapiens
  misc_RNA (1)...(19): siRNA sense strand
gaaaugauaagaggaguag

SEQ ID NO: 1034903 - RNA, 19 nt, Homo sapiens
  misc_RNA (1)...(19): siRNA sense strand
gggaagagauaagaagagu

SEQ ID NO: 1034904 - RNA, 19 nt, Homo sapiens
  misc_RNA (1)...(19): siRNA sense strand
gauaagaggaguagaugag

SEQ ID NO: 1034905 - RNA, 19 nt, Homo sapiens
  misc_RNA (1)...(19): siRNA sense strand
gaagaguaagaaacaaguu

SEQ ID NO: 1034906 - RNA, 19 nt, Homo sapiens
  misc_RNA (1)...(19): siRNA sense strand
ccacagaacaugccaaagg

SEQ ID NO: 1034907 - RNA, 19 nt, Homo sapiens
  misc_RNA (1)...(19): siRNA sense strand
gaugaugcauuggaagcaa

SEQ ID NO: 1034908 - RNA, 19 nt, Homo sapiens
  misc_RNA (1)...(19): siRNA sense strand
gauaagaagaguaagaaac

SEQ ID NO: 1034909 - RNA, 19 nt, Homo sapiens
  misc_RNA (1)...(19): siRNA sense strand
ggaagagauaagaagagua

SEQ ID NO: 1034910 - RNA, 19 nt, Homo sapiens
  misc_RNA (1)...(19): siRNA sense strand
acacacccguuaggcauuu

SEQ ID NO: 1034911 - RNA, 19 nt, Homo sapiens
  misc_RNA (1)...(19): siRNA sense strand
ggacccugaagaaaugaua

SEQ ID NO: 1034912 - RNA, 19 nt, Homo sapiens
  misc_RNA (1)...(19): siRNA sense strand
uugaaaggcuuagggaaga

SEQ ID NO: 1034913 - RNA, 19 nt, Homo sapiens
  misc_RNA (1)...(19): siRNA sense strand
gaugagcuugaaaggcuua

SEQ ID NO: 1034914 - RNA, 19 nt, Homo sapiens
  misc_RNA (1)...(19): siRNA sense strand
ucacgcagccguccuuauc

SEQ ID NO: 1034915 - RNA, 19 nt, Homo sapiens
  misc_RNA (1)...(19): siRNA sense strand
aggaguagaugagcuugaa

SEQ ID NO: 1034916 - RNA, 19 nt, Homo sapiens
  misc_RNA (1)...(19): siRNA sense strand
uuuggacccugaagaaaug

SEQ ID NO: 1034917 - RNA, 19 nt, Homo sapiens
  misc_RNA (1)...(19): siRNA sense strand
ugaagaaaaugagggaaaa

SEQ ID NO: 1034918 - RNA, 19 nt, Homo sapiens
  misc_RNA (1)...(19): siRNA sense strand
agagauaagaagaguaaga

SEQ ID NO: 1034919 - RNA, 19 nt, Homo sapiens
  misc_RNA (1)...(19): siRNA sense strand
ccaggaagcagaaggaaac

SEQ ID NO: 1034920 - RNA, 19 nt, Homo sapiens
  misc_RNA (1)...(19): siRNA sense strand
gaaaggcuuagggaagaga

SEQ ID NO: 1034921 - RNA, 19 nt, Homo sapiens
  misc_RNA (1)...(19): siRNA sense strand
gccaaaggccgaggaagau

SEQ ID NO: 1034922 - RNA, 19 nt, Homo sapiens
  misc_RNA (1)...(19): siRNA sense strand
ggaguagaugagcuugaaa

SEQ ID NO: 1034923 - RNA, 19 nt, Homo sapiens
  misc_RNA (1)...(19): siRNA sense strand
guccuuauccugugugcuu

SEQ ID NO: 1034924 - RNA, 19 nt, Homo sapiens
  misc_RNA (1)...(19): siRNA sense strand
gaguagaugagcuugaaag

SEQ ID NO: 1034925 - RNA, 19 nt, Homo sapiens
  misc_RNA (1)...(19): siRNA sense strand
ccagaggagggccgaauca

SEQ ID NO: 1034926 - RNA, 19 nt, Homo sapiens
  misc_RNA (1)...(19): siRNA sense strand
cacaggaggcagaaggaaa

SEQ ID NO: 1034927 - RNA, 19 nt, Homo sapiens
  misc_RNA (1)...(19): siRNA sense strand
ugccaaaggccgaggaaga

SEQ ID NO: 1034928 - RNA, 19 nt, Homo sapiens
  misc_RNA (1)...(19): siRNA sense strand
agaaaugauaagaggagua

SEQ ID NO: 1034929 - RNA, 19 nt, Homo sapiens
  misc_RNA (1)...(19): siRNA sense strand
gacccugaagaaaugauaa

SEQ ID NO: 1034930 - RNA, 19 nt, Homo sapiens
  misc_RNA (1)...(19): siRNA sense strand
acaggaggcagaaggaaau

SEQ ID NO: 1034931 - RNA, 19 nt, Homo sapiens
  misc_RNA (1)...(19): siRNA sense strand
gccaggaagcagaaggaaa

SEQ ID NO: 1034932 - RNA, 19 nt, Homo sapiens
  misc_RNA (1)...(19): siRNA sense strand
gaggaguagaugagcuuga

SEQ ID NO: 1034933 - RNA, 19 nt, Homo sapiens
  misc_RNA (1)...(19): siRNA sense strand
gacacacccguuaggcauu

SEQ ID NO: 1034934 - RNA, 19 nt, Homo sapiens
  misc_RNA (1)...(19): siRNA sense strand
cauuggaagcaaagacauu

SEQ ID NO: 1034935 - RNA, 19 nt, Homo sapiens
  misc_RNA (1)...(19): siRNA sense strand
aaugauaagaggaguagau

SEQ ID NO: 1034936 - RNA, 19 nt, Homo sapiens
  misc_RNA (1)...(19): siRNA sense strand
uagggaagagauaagaaga

SEQ ID NO: 1034937 - RNA, 19 nt, Homo sapiens
  misc_RNA (1)...(19): siRNA sense strand
gcaaaugaauggaaugaaa

SEQ ID NO: 1034938 - RNA, 19 nt, Homo sapiens
  misc_RNA (1)...(19): siRNA sense strand
ggaaauaugugugugauga

SEQ ID NO: 1034939 - RNA, 19 nt, Homo sapiens
  misc_RNA (1)...(19): siRNA sense strand
gaaguuggcaugucuuuaa

SEQ ID NO: 1034940 - RNA, 19 nt, Homo sapiens
  misc_RNA (1)...(19): siRNA sense strand
ggaacaaccuaccaacaaa

SEQ ID NO: 1034941 - RNA, 19 nt, Homo sapiens
  misc_RNA (1)...(19): siRNA sense strand
cagaaugguuugcaaagua

SEQ ID NO: 1034942 - RNA, 19 nt, Homo sapiens
  misc_RNA (1)...(19): siRNA sense strand
ggucuuuacuggcuuauuu

SEQ ID NO: 1034943 - RNA, 19 nt, Homo sapiens
  misc_RNA (1)...(19): siRNA sense strand
gaccugcuauuauuuguaa

SEQ ID NO: 1034944 - RNA, 19 nt, Homo sapiens
  misc_RNA (1)...(19): siRNA sense strand
gcuaaaugcugcuuauuca

SEQ ID NO: 1034945 - RNA, 19 nt, Homo sapiens
  misc_RNA (1)...(19): siRNA sense strand
ugaaauggaucauggagaa

SEQ ID NO: 1034946 - RNA, 19 nt, Homo sapiens
  misc_RNA (1)...(19): siRNA sense strand
caugaaagguguuacagaa

SEQ ID NO: 1034947 - RNA, 19 nt, Homo sapiens
  misc_RNA (1)...(19): siRNA sense strand
gaaagagacauuaauggaa

SEQ ID NO: 1034948 - RNA, 19 nt, Homo sapiens
  misc_RNA (1)...(19): siRNA sense strand
ugacuuaacugccgaagga

SEQ ID NO: 1034949 - RNA, 19 nt, Homo sapiens
  misc_RNA (1)...(19): siRNA sense strand
gauuuaugcucuaugagua

SEQ ID NO: 1034950 - RNA, 19 nt, Homo sapiens
  misc_RNA (1)...(19): siRNA sense strand
ggaaagagacauuaaugga

SEQ ID NO: 1034951 - RNA, 19 nt, Homo sapiens
  misc_RNA (1)...(19): siRNA sense strand
ggagucccaugauugauuu

SEQ ID NO: 1034952 - RNA, 19 nt, Homo sapiens
  misc_RNA (1)...(19): siRNA sense strand
gagacaacauuaugacaga

SEQ ID NO: 1034953 - RNA, 19 nt, Homo sapiens
  misc_RNA (1)...(19): siRNA sense strand
caugaauucuuacgacuuu

SEQ ID NO: 1034954 - RNA, 19 nt, Homo sapiens
  misc_RNA (1)...(19): siRNA sense strand
gaugaucucuaauaaugga

SEQ ID NO: 1034955 - RNA, 19 nt, Homo sapiens
  misc_RNA (1)...(19): siRNA sense strand
ggacugagcacuguucauu

SEQ ID NO: 1034956 - RNA, 19 nt, Homo sapiens
  misc_RNA (1)...(19): siRNA sense strand
ugaaagguguuacagaaga

SEQ ID NO: 1034957 - RNA, 19 nt, Homo sapiens
  misc_RNA (1)...(19): siRNA sense strand
ucagcaguguccuguauua

SEQ ID NO: 1034958 - RNA, 19 nt, Homo sapiens
  misc_RNA (1)...(19): siRNA sense strand
guuccucccucgcuucuua

SEQ ID NO: 1034959 - RNA, 19 nt, Homo sapiens
  misc_RNA (1)...(19): siRNA sense strand
ccgaggaacuucaugugua

SEQ ID NO: 1034960 - RNA, 19 nt, Homo sapiens
  misc_RNA (1)...(19): siRNA sense strand
aagcucauaucccagauua

SEQ ID NO: 1034961 - RNA, 19 nt, Homo sapiens
  misc_RNA (1)...(19): siRNA sense strand
gaauuucagcugcacguua

SEQ ID NO: 1034962 - RNA, 19 nt, Homo sapiens
  misc_RNA (1)...(19): siRNA sense strand
aaacccaccuagcuacaua

SEQ ID NO: 1034963 - RNA, 19 nt, Homo sapiens
  misc_RNA (1)...(19): siRNA sense strand
caacacagauggucagacu

SEQ ID NO: 1034964 - RNA, 19 nt, Homo sapiens
  misc_RNA (1)...(19): siRNA sense strand
cuacauagcuccuuauagc

SEQ ID NO: 1034965 - RNA, 19 nt, Homo sapiens
  misc_RNA (1)...(19): siRNA sense strand
aaacaucuacccucccuua

SEQ ID NO: 1034966 - RNA, 19 nt, Homo sapiens
  misc_RNA (1)...(19): siRNA sense strand
uagcauccuuccuuacaua

SEQ ID NO: 1034967 - RNA, 19 nt, Homo sapiens
  misc_RNA (1)...(19): siRNA sense strand
uuaauggacucaucuucua

SEQ ID NO: 1034968 - RNA, 19 nt, Homo sapiens
  misc_RNA (1)...(19): siRNA sense strand
uggaggaccugcuauuauu

SEQ ID NO: 1034969 - RNA, 19 nt, Homo sapiens
  misc_RNA (1)...(19): siRNA sense strand
gaaagguguuacagaagau

SEQ ID NO: 1034970 - RNA, 19 nt, Homo sapiens
  misc_RNA (1)...(19): siRNA sense strand
gcaguguccuguauuaugg

SEQ ID NO: 1034971 - RNA, 19 nt, Homo sapiens
  misc_RNA (1)...(19): siRNA sense strand
ccagacagauauugcuuug

SEQ ID NO: 1034972 - RNA, 19 nt, Homo sapiens
  misc_RNA (1)...(19): siRNA sense strand
gcaugcagauacuaauaug

SEQ ID NO: 1034973 - RNA, 19 nt, Homo sapiens
  misc_RNA (1)...(19): siRNA sense strand
ugaugcauguggacuauuu

SEQ ID NO: 1034974 - RNA, 19 nt, Homo sapiens
  misc_RNA (1)...(19): siRNA sense strand
ugacagaauucaugagaca

SEQ ID NO: 1034975 - RNA, 19 nt, Homo sapiens
  misc_RNA (1)...(19): siRNA sense strand
gcuagccauuggaauuaua

SEQ ID NO: 1034976 - RNA, 19 nt, Homo sapiens
  misc_RNA (1)...(19): siRNA sense strand
caucuacccucccuuaauc

SEQ ID NO: 1034977 - RNA, 19 nt, Homo sapiens
  misc_RNA (1)...(19): siRNA sense strand
cacaauaaauggaaacauc

SEQ ID NO: 1034978 - RNA, 19 nt, Homo sapiens
  misc_RNA (1)...(19): siRNA sense strand
cuaccucucuuccuacaaa

SEQ ID NO: 1034979 - RNA, 19 nt, Homo sapiens
  misc_RNA (1)...(19): siRNA sense strand
cgaggaacuucauguguau

SEQ ID NO: 1034980 - RNA, 19 nt, Homo sapiens
  misc_RNA (1)...(19): siRNA sense strand
gaccuucucuuucccuuuc

SEQ ID NO: 1034981 - RNA, 19 nt, Homo sapiens
  misc_RNA (1)...(19): siRNA sense strand
guaagcauauggagaacau

SEQ ID NO: 1034982 - RNA, 19 nt, Homo sapiens
  misc_RNA (1)...(19): siRNA sense strand
ggaugugccuuugcucuga

SEQ ID NO: 1034983 - RNA, 19 nt, Homo sapiens
  misc_RNA (1)...(19): siRNA sense strand
ugaaauucuugguguacua

SEQ ID NO: 1034984 - RNA, 19 nt, Homo sapiens
  misc_RNA (1)...(19): siRNA sense strand
cuaccaggauuucagauga

SEQ ID NO: 1034985 - RNA, 19 nt, Homo sapiens
  misc_RNA (1)...(19): siRNA sense strand
guacuaugcuggugaucug

SEQ ID NO: 1034986 - RNA, 19 nt, Homo sapiens
  misc_RNA (1)...(19): siRNA sense strand
gauaaguugcuucuugaaa

SEQ ID NO: 1034987 - RNA, 19 nt, Homo sapiens
  misc_RNA (1)...(19): siRNA sense strand
gcucugugauggaaaugaa

SEQ ID NO: 1034988 - RNA, 19 nt, Homo sapiens
  misc_RNA (1)...(19): siRNA sense strand
guugauuuaugcucuauga

SEQ ID NO: 1034989 - RNA, 19 nt, Homo sapiens
  misc_RNA (1)...(19): siRNA sense strand
gcaguaaguggacgagaaa

SEQ ID NO: 1034990 - RNA, 19 nt, Homo sapiens
  misc_RNA (1)...(19): siRNA sense strand
gagcacuguucauucuauu

SEQ ID NO: 1034991 - RNA, 19 nt, Homo sapiens
  misc_RNA (1)...(19): siRNA sense strand
aaacauugguggaucaaag

SEQ ID NO: 1034992 - RNA, 19 nt, Homo sapiens
  misc_RNA (1)...(19): siRNA sense strand
ugaugaagguuauucuuuc

SEQ ID NO: 1034993 - RNA, 19 nt, Homo sapiens
  misc_RNA (1)...(19): siRNA sense strand
ggauauuacauucauggua

SEQ ID NO: 1034994 - RNA, 19 nt, Homo sapiens
  misc_RNA (1)...(19): siRNA sense strand
gaaucuuccuuggcuguuu

SEQ ID NO: 1034995 - RNA, 19 nt, Homo sapiens
  misc_RNA (1)...(19): siRNA sense strand
ggagcgaccuaaaggaaag

SEQ ID NO: 1034996 - RNA, 19 nt, Homo sapiens
  misc_RNA (1)...(19): siRNA sense strand
ucuggaaaguggcuucuaa

SEQ ID NO: 1034997 - RNA, 19 nt, Homo sapiens
  misc_RNA (1)...(19): siRNA sense strand
uuucuuggcuccuucauug

SEQ ID NO: 1034998 - RNA, 19 nt, Homo sapiens
  misc_RNA (1)...(19): siRNA sense strand
acacagauggucagacuuu

SEQ ID NO: 1034999 - RNA, 19 nt, Homo sapiens
  misc_RNA (1)...(19): siRNA sense strand
gggcaugcagauacuaaua

SEQ ID NO: 1035000 - RNA, 19 nt, Homo sapiens
  misc_RNA (1)...(19): siRNA sense strand
uacagacaguugugaaauu

SEQ ID NO: 1035001 - RNA, 19 nt, Homo sapiens
  misc_RNA (1)...(19): siRNA sense strand
ggaggaccugcuauuauuu

SEQ ID NO: 1035002 - RNA, 19 nt, Homo sapiens
  misc_RNA (1)...(19): siRNA sense strand
guggcaaacuuuagaagga

SEQ ID NO: 1035003 - RNA, 19 nt, Homo sapiens
  misc_RNA (1)...(19): siRNA sense strand
uguggacuauuucaguuua

SEQ ID NO: 1035004 - RNA, 19 nt, Homo sapiens
  misc_RNA (1)...(19): siRNA sense strand
gaaauaugugugugaugaa

SEQ ID NO: 1035005 - RNA, 19 nt, Homo sapiens
  misc_RNA (1)...(19): siRNA sense strand
uggcaugucuuuaacuuca

SEQ ID NO: 1035006 - RNA, 19 nt, Homo sapiens
  misc_RNA (1)...(19): siRNA sense strand
ucugaaggcacuacaauuu

SEQ ID NO: 1035007 - RNA, 19 nt, Homo sapiens
  misc_RNA (1)...(19): siRNA sense strand
gagaaaaccagaauacaaa

SEQ ID NO: 1035008 - RNA, 19 nt, Homo sapiens
  misc_RNA (1)...(19): siRNA sense strand
uuacgacuuugccacauuu

SEQ ID NO: 1035009 - RNA, 19 nt, Homo sapiens
  misc_RNA (1)...(19): siRNA sense strand
gcagcugcauguuggguau

SEQ ID NO: 1035010 - RNA, 19 nt, Homo sapiens
  misc_RNA (1)...(19): siRNA sense strand
ucauugaccauguucauaa

SEQ ID NO: 1035011 - RNA, 19 nt, Homo sapiens
  misc_RNA (1)...(19): siRNA sense strand
ucuuaaagcuguugaaggu

SEQ ID NO: 1035012 - RNA, 19 nt, Homo sapiens
  misc_RNA (1)...(19): siRNA sense strand
uaucccagauuacaauaga

SEQ ID NO: 1035013 - RNA, 19 nt, Homo sapiens
  misc_RNA (1)...(19): siRNA sense strand
cgacaacaaccaguacuuu

SEQ ID NO: 1035014 - RNA, 19 nt, Homo sapiens
  misc_RNA (1)...(19): siRNA sense strand
gauauugcuuuggguguau

SEQ ID NO: 1035015 - RNA, 19 nt, Homo sapiens
  misc_RNA (1)...(19): siRNA sense strand
caagacagcaacucuggaa

SEQ ID NO: 1035016 - RNA, 19 nt, Homo sapiens
  misc_RNA (1)...(19): siRNA sense strand
gaaccaagacagcaacucu

SEQ ID NO: 1035017 - RNA, 19 nt, Homo sapiens
  misc_RNA (1)...(19): siRNA sense strand
gcacuguucauucuauuuc

SEQ ID NO: 1035018 - RNA, 19 nt, Homo sapiens
  misc_RNA (1)...(19): siRNA sense strand
gagaaguuggcaugucuuu

SEQ ID NO: 1035019 - RNA, 19 nt, Homo sapiens
  misc_RNA (1)...(19): siRNA sense strand
ccaacacaauaaauggaaa

SEQ ID NO: 1035020 - RNA, 19 nt, Homo sapiens
  misc_RNA (1)...(19): siRNA sense strand
gaaaaugacuuaggaacuc

SEQ ID NO: 1035021 - RNA, 19 nt, Homo sapiens
  misc_RNA (1)...(19): siRNA sense strand
agaaugguuugcaaaguau

SEQ ID NO: 1035022 - RNA, 19 nt, Homo sapiens
  misc_RNA (1)...(19): siRNA sense strand
cauguggacuauuucaguu

SEQ ID NO: 1035023 - RNA, 19 nt, Homo sapiens
  misc_RNA (1)...(19): siRNA sense strand
guacccaacacaauaaaug

SEQ ID NO: 1035024 - RNA, 19 nt, Homo sapiens
  misc_RNA (1)...(19): siRNA sense strand
gacaacaaccaguacuuug

SEQ ID NO: 1035025 - RNA, 19 nt, Homo sapiens
  misc_RNA (1)...(19): siRNA sense strand
caugagacacuaauaagga

SEQ ID NO: 1035026 - RNA, 19 nt, Homo sapiens
  misc_RNA (1)...(19): siRNA sense strand
gacaguucguugauuuaug

SEQ ID NO: 1035027 - RNA, 19 nt, Homo sapiens
  misc_RNA (1)...(19): siRNA sense strand
gaaauucagacugugagaa

SEQ ID NO: 1035028 - RNA, 19 nt, Homo sapiens
  misc_RNA (1)...(19): siRNA sense strand
caugauugauuuacagaca

SEQ ID NO: 1035029 - RNA, 19 nt, Homo sapiens
  misc_RNA (1)...(19): siRNA sense strand
gacagcaacucuggaaagu

SEQ ID NO: 1035030 - RNA, 19 nt, Homo sapiens
  misc_RNA (1)...(19): siRNA sense strand
gauguguaccuugaauaua

SEQ ID NO: 1035031 - RNA, 19 nt, Homo sapiens
  misc_RNA (1)...(19): siRNA sense strand
caacuugugagcucuguga

SEQ ID NO: 1035032 - RNA, 19 nt, Homo sapiens
  misc_RNA (1)...(19): siRNA sense strand
ggagaccaguuaggauuag

SEQ ID NO: 1035033 - RNA, 19 nt, Homo sapiens
  misc_RNA (1)...(19): siRNA sense strand
gcucauaucccagauuaca

SEQ ID NO: 1035034 - RNA, 19 nt, Homo sapiens
  misc_RNA (1)...(19): siRNA sense strand
ggaaaguggcuucuaacuc

SEQ ID NO: 1035035 - RNA, 19 nt, Homo sapiens
  misc_RNA (1)...(19): siRNA sense strand
gugccuguguuaaaccuaa

SEQ ID NO: 1035036 - RNA, 19 nt, Homo sapiens
  misc_RNA (1)...(19): siRNA sense strand
uuacauucaugguagauca

SEQ ID NO: 1035037 - RNA, 19 nt, Homo sapiens
  misc_RNA (1)...(19): siRNA sense strand
ggaagugacugauuuauug

SEQ ID NO: 1035038 - RNA, 19 nt, Homo sapiens
  misc_RNA (1)...(19): siRNA sense strand
gagaugacauuuaagcaaa

SEQ ID NO: 1035039 - RNA, 19 nt, Homo sapiens
  misc_RNA (1)...(19): siRNA sense strand
gaaauugcuucgacaggaa

SEQ ID NO: 1035040 - RNA, 19 nt, Homo sapiens
  misc_RNA (1)...(19): siRNA sense strand
ggacacagacagaauuauu

SEQ ID NO: 1035041 - RNA, 19 nt, Homo sapiens
  misc_RNA (1)...(19): siRNA sense strand
gcagcuaucuggaggauca

SEQ ID NO: 1035042 - RNA, 19 nt, Homo sapiens
  misc_RNA (1)...(19): siRNA sense strand
gcaaugaacacaucaagug

SEQ ID NO: 1035043 - RNA, 19 nt, Homo sapiens
  misc_RNA (1)...(19): siRNA sense strand
gaacacaacagccucacaa

SEQ ID NO: 1035044 - RNA, 19 nt, Homo sapiens
  misc_RNA (1)...(19): siRNA sense strand
gaacacaucaagugcagaa

SEQ ID NO: 1035045 - RNA, 19 nt, Homo sapiens
  misc_RNA (1)...(19): siRNA sense strand
gcgcaaagguuggcugguu

SEQ ID NO: 1035046 - RNA, 19 nt, Homo sapiens
  misc_RNA (1)...(19): siRNA sense strand
gaucagacacuccgaagga

SEQ ID NO: 1035047 - RNA, 19 nt, Homo sapiens
  misc_RNA (1)...(19): siRNA sense strand
gaagccaugugggaagauu

SEQ ID NO: 1035048 - RNA, 19 nt, Homo sapiens
  misc_RNA (1)...(19): siRNA sense strand
gauauuuucugcagcauuu

SEQ ID NO: 1035049 - RNA, 19 nt, Homo sapiens
  misc_RNA (1)...(19): siRNA sense strand
gacacagacagaauuauuu

SEQ ID NO: 1035050 - RNA, 19 nt, Homo sapiens
  misc_RNA (1)...(19): siRNA sense strand
gaaauauucauugggcuuu

SEQ ID NO: 1035051 - RNA, 19 nt, Homo sapiens
  misc_RNA (1)...(19): siRNA sense strand
cacaacagccucacaauuc

SEQ ID NO: 1035052 - RNA, 19 nt, Homo sapiens
  misc_RNA (1)...(19): siRNA sense strand
ccagcuggcucggaaauau

SEQ ID NO: 1035053 - RNA, 19 nt, Homo sapiens
  misc_RNA (1)...(19): siRNA sense strand
cuugauggcugucauuaau

SEQ ID NO: 1035054 - RNA, 19 nt, Homo sapiens
  misc_RNA (1)...(19): siRNA sense strand
gagcgaaccaugcagcuau

SEQ ID NO: 1035055 - RNA, 19 nt, Homo sapiens
  misc_RNA (1)...(19): siRNA sense strand
gccuggaagugacugauuu

SEQ ID NO: 1035056 - RNA, 19 nt, Homo sapiens
  misc_RNA (1)...(19): siRNA sense strand
uaugagauaugaagucuac

SEQ ID NO: 1035057 - RNA, 19 nt, Homo sapiens
  misc_RNA (1)...(19): siRNA sense strand
gcucggaaauauucauugg

SEQ ID NO: 1035058 - RNA, 19 nt, Homo sapiens
  misc_RNA (1)...(19): siRNA sense strand
cagacagaauuauuuguuc

SEQ ID NO: 1035059 - RNA, 19 nt, Homo sapiens
  misc_RNA (1)...(19): siRNA sense strand
gaggaucauucuaggcaau

SEQ ID NO: 1035060 - RNA, 19 nt, Homo sapiens
  misc_RNA (1)...(19): siRNA sense strand
gaugacauuuaagcaaaga

SEQ ID NO: 1035061 - RNA, 19 nt, Homo sapiens
  misc_RNA (1)...(19): siRNA sense strand
cuugcuaccucuuaacaaa

SEQ ID NO: 1035062 - RNA, 19 nt, Homo sapiens
  misc_RNA (1)...(19): siRNA sense strand
gaagaccgccgagaacauc

SEQ ID NO: 1035063 - RNA, 19 nt, Homo sapiens
  misc_RNA (1)...(19): siRNA sense strand
guaccuggaauacuucuug

SEQ ID NO: 1035064 - RNA, 19 nt, Homo sapiens
  misc_RNA (1)...(19): siRNA sense strand
acacaacagccucacaauu

SEQ ID NO: 1035065 - RNA, 19 nt, Homo sapiens
  misc_RNA (1)...(19): siRNA sense strand
acacagacagaauuauuug

SEQ ID NO: 1035066 - RNA, 19 nt, Homo sapiens
  misc_RNA (1)...(19): siRNA sense strand
aagcaaagauggguaagag

SEQ ID NO: 1035067 - RNA, 19 nt, Homo sapiens
  misc_RNA (1)...(19): siRNA sense strand
aaaggacacagacagaauu

SEQ ID NO: 1035068 - RNA, 19 nt, Homo sapiens
  misc_RNA (1)...(19): siRNA sense strand
gugcagaagcgcaaagguu

SEQ ID NO: 1035069 - RNA, 19 nt, Homo sapiens
  misc_RNA (1)...(19): siRNA sense strand
gguaagagcgaaccaugca

SEQ ID NO: 1035070 - RNA, 19 nt, Homo sapiens
  misc_RNA (1)...(19): siRNA sense strand
gguuuuggaugacaauuuu

SEQ ID NO: 1035071 - RNA, 19 nt, Homo sapiens
  misc_RNA (1)...(19): siRNA sense strand
auuaaugggugucagaugu

SEQ ID NO: 1035072 - RNA, 19 nt, Homo sapiens
  misc_RNA (1)...(19): siRNA sense strand
cgaaggauuguaucucaga

SEQ ID NO: 1035073 - RNA, 19 nt, Homo sapiens
  misc_RNA (1)...(19): siRNA sense strand
gccgagaacaucagaggaa

SEQ ID NO: 1035074 - RNA, 19 nt, Homo sapiens
  misc_RNA (1)...(19): siRNA sense strand
uaaccugcuuaaaggauca

SEQ ID NO: 1035075 - RNA, 19 nt, Homo sapiens
  misc_RNA (1)...(19): siRNA sense strand
cauuugaggcccagucuug

SEQ ID NO: 1035076 - RNA, 19 nt, Homo sapiens
  misc_RNA (1)...(19): siRNA sense strand
uccgaaggauuguaucuca

SEQ ID NO: 1035077 - RNA, 19 nt, Homo sapiens
  misc_RNA (1)...(19): siRNA sense strand
cagacacuccgaaggauug

SEQ ID NO: 1035078 - RNA, 19 nt, Homo sapiens
  misc_RNA (1)...(19): siRNA sense strand
aaggacacagacagaauua

SEQ ID NO: 1035079 - RNA, 19 nt, Homo sapiens
  misc_RNA (1)...(19): siRNA sense strand
ugauggcugucauuaaugg

SEQ ID NO: 1035080 - RNA, 19 nt, Homo sapiens
  misc_RNA (1)...(19): siRNA sense strand
ucauaaaacugaucagaca

SEQ ID NO: 1035081 - RNA, 19 nt, Homo sapiens
  misc_RNA (1)...(19): siRNA sense strand
uggaagugacugauuuauu

SEQ ID NO: 1035082 - RNA, 19 nt, Homo sapiens
  misc_RNA (1)...(19): siRNA sense strand
ccagucuugcuaccucuua

SEQ ID NO: 1035083 - RNA, 19 nt, Homo sapiens
  misc_RNA (1)...(19): siRNA sense strand
ccuggaagugacugauuua

SEQ ID NO: 1035084 - RNA, 19 nt, Homo sapiens
  misc_RNA (1)...(19): siRNA sense strand
agagaugacauuuaagcaa

SEQ ID NO: 1035085 - RNA, 19 nt, Homo sapiens
  misc_RNA (1)...(19): siRNA sense strand
uaaaauaugcugaggacaa

SEQ ID NO: 1035086 - RNA, 19 nt, Homo sapiens
  misc_RNA (1)...(19): siRNA sense strand
caucgguguugucgcguau

SEQ ID NO: 1035087 - RNA, 19 nt, Homo sapiens
  misc_RNA (1)...(19): siRNA sense strand
gaaucgagaagaggccauu

SEQ ID NO: 1035088 - RNA, 19 nt, Homo sapiens
  misc_RNA (1)...(19): siRNA sense strand
gaaggaagcaaaagguaau

SEQ ID NO: 1035089 - RNA, 19 nt, Homo sapiens
  misc_RNA (1)...(19): siRNA sense strand
auuuauugcucacugcuuu

SEQ ID NO: 1035090 - RNA, 19 nt, Homo sapiens
  misc_RNA (1)...(19): siRNA sense strand
gaaaagcccaacccugaga

SEQ ID NO: 1035091 - RNA, 19 nt, Homo sapiens
  misc_RNA (1)...(19): siRNA sense strand
agacaaugaaggaagcaaa

SEQ ID NO: 1035092 - RNA, 19 nt, Homo sapiens
  misc_RNA (1)...(19): siRNA sense strand
ucuaggcaaugaacacauc

SEQ ID NO: 1035093 - RNA, 19 nt, Homo sapiens
  misc_RNA (1)...(19): siRNA sense strand
cagucuugcuaccucuuaa

SEQ ID NO: 1035094 - RNA, 19 nt, Homo sapiens
  misc_RNA (1)...(19): siRNA sense strand
gguguugucgcguaugaug

SEQ ID NO: 1035095 - RNA, 19 nt, Homo sapiens
  misc_RNA (1)...(19): siRNA sense strand
ugacauuuaagcaaagaug

SEQ ID NO: 1035096 - RNA, 19 nt, Homo sapiens
  misc_RNA (1)...(19): siRNA sense strand
uaucucagacaaugaagga

SEQ ID NO: 1035097 - RNA, 19 nt, Homo sapiens
  misc_RNA (1)...(19): siRNA sense strand
uaccuggaauacuucuuga

SEQ ID NO: 1035098 - RNA, 19 nt, Homo sapiens
  misc_RNA (1)...(19): siRNA sense strand
gaacaaaaggacacagaca

SEQ ID NO: 1035099 - RNA, 19 nt, Homo sapiens
  misc_RNA (1)...(19): siRNA sense strand
ccuggaauacuucuugaug

SEQ ID NO: 1035100 - RNA, 19 nt, Homo sapiens
  misc_RNA (1)...(19): siRNA sense strand
gaagugacugauuuauugc

SEQ ID NO: 1035101 - RNA, 19 nt, Homo sapiens
  misc_RNA (1)...(19): siRNA sense strand
cagaguaugagauaugaag

SEQ ID NO: 1035102 - RNA, 19 nt, Homo sapiens
  misc_RNA (1)...(19): siRNA sense strand
cagcuggcucggaaauauu

SEQ ID NO: 1035103 - RNA, 19 nt, Homo sapiens
  misc_RNA (1)...(19): siRNA sense strand
guucaacuaacauucuuca

SEQ ID NO: 1035104 - RNA, 19 nt, Homo sapiens
  misc_RNA (1)...(19): siRNA sense strand
gaggacaauauggaacaaa

SEQ ID NO: 1035105 - RNA, 19 nt, Homo sapiens
  misc_RNA (1)...(19): siRNA sense strand
ugaggacaauauggaacaa

SEQ ID NO: 1035106 - RNA, 19 nt, Homo sapiens
  misc_RNA (1)...(19): siRNA sense strand
gaguaugagauaugaaguc

SEQ ID NO: 1035107 - RNA, 19 nt, Homo sapiens
  misc_RNA (1)...(19): siRNA sense strand
ucgguguugucgcguauga

SEQ ID NO: 1035108 - RNA, 19 nt, Homo sapiens
  misc_RNA (1)...(19): siRNA sense strand
ggaacacaacagccucaca

SEQ ID NO: 1035109 - RNA, 19 nt, Homo sapiens
  misc_RNA (1)...(19): siRNA sense strand
ucagacacuccgaaggauu

SEQ ID NO: 1035110 - RNA, 19 nt, Homo sapiens
  misc_RNA (1)...(19): siRNA sense strand
gcucacugcuuuggaaaau

SEQ ID NO: 1035111 - RNA, 19 nt, Homo sapiens
  misc_RNA (1)...(19): siRNA sense strand
uaagcaaagauggguaaga

SEQ ID NO: 1035112 - RNA, 19 nt, Homo sapiens
  misc_RNA (1)...(19): siRNA sense strand
ucagagaugacauuuaagc

SEQ ID NO: 1035113 - RNA, 19 nt, Homo sapiens
  misc_RNA (1)...(19): siRNA sense strand
acacuccgaaggauuguau

SEQ ID NO: 1035114 - RNA, 19 nt, Homo sapiens
  misc_RNA (1)...(19): siRNA sense strand
aaaauaugcugaggacaau

SEQ ID NO: 1035115 - RNA, 19 nt, Homo sapiens
  misc_RNA (1)...(19): siRNA sense strand
gaacggagcuucaguaaua

SEQ ID NO: 1035116 - RNA, 19 nt, Homo sapiens
  misc_RNA (1)...(19): siRNA sense strand
ggccuaagcuuacuaaaua

SEQ ID NO: 1035117 - RNA, 19 nt, Homo sapiens
  misc_RNA (1)...(19): siRNA sense strand
gaaauuuccuggacuauug

SEQ ID NO: 1035118 - RNA, 19 nt, Homo sapiens
  misc_RNA (1)...(19): siRNA sense strand
cagcagauauuccuaguua

SEQ ID NO: 1035119 - RNA, 19 nt, Homo sapiens
  misc_RNA (1)...(19): siRNA sense strand
ugaagaaacugcaacaauu

SEQ ID NO: 1035120 - RNA, 19 nt, Homo sapiens
  misc_RNA (1)...(19): siRNA sense strand
ggaaagaaaggacagauuu

SEQ ID NO: 1035121 - RNA, 19 nt, Homo sapiens
  misc_RNA (1)...(19): siRNA sense strand
uaacagagauuaccaaagg

SEQ ID NO: 1035122 - RNA, 19 nt, Homo sapiens
  misc_RNA (1)...(19): siRNA sense strand
ugaaggaccuggaaugaaa

SEQ ID NO: 1035123 - RNA, 19 nt, Homo sapiens
  misc_RNA (1)...(19): siRNA sense strand
uaaauaugcuucccucauu

SEQ ID NO: 1035124 - RNA, 19 nt, Homo sapiens
  misc_RNA (1)...(19): siRNA sense strand
ggaccagucucggcaaaua

SEQ ID NO: 1035125 - RNA, 19 nt, Homo sapiens
  misc_RNA (1)...(19): siRNA sense strand
gaaacacagucggcaauaa

SEQ ID NO: 1035126 - RNA, 19 nt, Homo sapiens
  misc_RNA (1)...(19): siRNA sense strand
ccacaggcccuauguauuu

SEQ ID NO: 1035127 - RNA, 19 nt, Homo sapiens
  misc_RNA (1)...(19): siRNA sense strand
gaccuuagcagcaacaaua

SEQ ID NO: 1035128 - RNA, 19 nt, Homo sapiens
  misc_RNA (1)...(19): siRNA sense strand
gcaaagaaauggaguaacg

SEQ ID NO: 1035129 - RNA, 19 nt, Homo sapiens
  misc_RNA (1)...(19): siRNA sense strand
gaagaaacugcaacaauug

SEQ ID NO: 1035130 - RNA, 19 nt, Homo sapiens
  misc_RNA (1)...(19): siRNA sense strand
aaucggauccguucuauua

SEQ ID NO: 1035131 - RNA, 19 nt, Homo sapiens
  misc_RNA (1)...(19): siRNA sense strand
gaauugaaccgaaacaaga

SEQ ID NO: 1035132 - RNA, 19 nt, Homo sapiens
  misc_RNA (1)...(19): siRNA sense strand
guacgugucuucagaaagu

SEQ ID NO: 1035133 - RNA, 19 nt, Homo sapiens
  misc_RNA (1)...(19): siRNA sense strand
gaaaucggauccguucuau

SEQ ID NO: 1035134 - RNA, 19 nt, Homo sapiens
  misc_RNA (1)...(19): siRNA sense strand
gaacagugcaggaaguauu

SEQ ID NO: 1035135 - RNA, 19 nt, Homo sapiens
  misc_RNA (1)...(19): siRNA sense strand
acaaugaacuacugcauga

SEQ ID NO: 1035136 - RNA, 19 nt, Homo sapiens
  misc_RNA (1)...(19): siRNA sense strand
gaaauacacaugugagaug

SEQ ID NO: 1035137 - RNA, 19 nt, Homo sapiens
  misc_RNA (1)...(19): siRNA sense strand
gaacaggaaccgaaucuca

SEQ ID NO: 1035138 - RNA, 19 nt, Homo sapiens
  misc_RNA (1)...(19): siRNA sense strand
gcagauauuccuaguuauu

SEQ ID NO: 1035139 - RNA, 19 nt, Homo sapiens
  misc_RNA (1)...(19): siRNA sense strand
gcaaucaugucuuuacaag

SEQ ID NO: 1035140 - RNA, 19 nt, Homo sapiens
  misc_RNA (1)...(19): siRNA sense strand
gaggaugacguguucuuua

SEQ ID NO: 1035141 - RNA, 19 nt, Homo sapiens
  misc_RNA (1)...(19): siRNA sense strand
aaacugaacuggaccaaag

SEQ ID NO: 1035142 - RNA, 19 nt, Homo sapiens
  misc_RNA (1)...(19): siRNA sense strand
uaaauacacugcacauugg

SEQ ID NO: 1035143 - RNA, 19 nt, Homo sapiens
  misc_RNA (1)...(19): siRNA sense strand
ggaaaucggauccguucua

SEQ ID NO: 1035144 - RNA, 19 nt, Homo sapiens
  misc_RNA (1)...(19): siRNA sense strand
ggacucagaugucagugau

SEQ ID NO: 1035145 - RNA, 19 nt, Homo sapiens
  misc_RNA (1)...(19): siRNA sense strand
gaaauggaguaacgaaacu

SEQ ID NO: 1035146 - RNA, 19 nt, Homo sapiens
  misc_RNA (1)...(19): siRNA sense strand
gaagaacaaugaaauuucc

SEQ ID NO: 1035147 - RNA, 19 nt, Homo sapiens
  misc_RNA (1)...(19): siRNA sense strand
caacagagucagcuacauu

SEQ ID NO: 1035148 - RNA, 19 nt, Homo sapiens
  misc_RNA (1)...(19): siRNA sense strand
caaagaugauagcccauug

SEQ ID NO: 1035149 - RNA, 19 nt, Homo sapiens
  misc_RNA (1)...(19): siRNA sense strand
gaagugaaacugaacaaca

SEQ ID NO: 1035150 - RNA, 19 nt, Homo sapiens
  misc_RNA (1)...(19): siRNA sense strand
caggagaccucaccuagau

SEQ ID NO: 1035151 - RNA, 19 nt, Homo sapiens
  misc_RNA (1)...(19): siRNA sense strand
ggaagcuacuuaacacuag

SEQ ID NO: 1035152 - RNA, 19 nt, Homo sapiens
  misc_RNA (1)...(19): siRNA sense strand
uuucagagcuuuguaaaug

SEQ ID NO: 1035153 - RNA, 19 nt, Homo sapiens
  misc_RNA (1)...(19): siRNA sense strand
ucaccuagaugccuauuca

SEQ ID NO: 1035154 - RNA, 19 nt, Homo sapiens
  misc_RNA (1)...(19): siRNA sense strand
cagugaagcugauguggaa

SEQ ID NO: 1035155 - RNA, 19 nt, Homo sapiens
  misc_RNA (1)...(19): siRNA sense strand
gagagacgcaugcauguga

SEQ ID NO: 1035156 - RNA, 19 nt, Homo sapiens
  misc_RNA (1)...(19): siRNA sense strand
cuaaauacacugcacauug

SEQ ID NO: 1035157 - RNA, 19 nt, Homo sapiens
  misc_RNA (1)...(19): siRNA sense strand
caauggaaccuggguauuu

SEQ ID NO: 1035158 - RNA, 19 nt, Homo sapiens
  misc_RNA (1)...(19): siRNA sense strand
aaacaaguccucuuuagau

SEQ ID NO: 1035159 - RNA, 19 nt, Homo sapiens
  misc_RNA (1)...(19): siRNA sense strand
gaacuucaucucagccaaa

SEQ ID NO: 1035160 - RNA, 19 nt, Homo sapiens
  misc_RNA (1)...(19): siRNA sense strand
caacuugccagcagauauu

SEQ ID NO: 1035161 - RNA, 19 nt, Homo sapiens
  misc_RNA (1)...(19): siRNA sense strand
ggaccuaacuuucaaucac

SEQ ID NO: 1035162 - RNA, 19 nt, Homo sapiens
  misc_RNA (1)...(19): siRNA sense strand
ggacagauuuucaggaaga

SEQ ID NO: 1035163 - RNA, 19 nt, Homo sapiens
  misc_RNA (1)...(19): siRNA sense strand
gaaauacucccugaacauc

SEQ ID NO: 1035164 - RNA, 19 nt, Homo sapiens
  misc_RNA (1)...(19): siRNA sense strand
gaacuggaccaaagaugau

SEQ ID NO: 1035165 - RNA, 19 nt, Homo sapiens
  misc_RNA (1)...(19): siRNA sense strand
caggaaguauuucagcaaa

SEQ ID NO: 1035166 - RNA, 19 nt, Homo sapiens
  misc_RNA (1)...(19): siRNA sense strand
cauaacaaccuaacagaga

SEQ ID NO: 1035167 - RNA, 19 nt, Homo sapiens
  misc_RNA (1)...(19): siRNA sense strand
cugaacaucugaaagaguu

SEQ ID NO: 1035168 - RNA, 19 nt, Homo sapiens
  misc_RNA (1)...(19): siRNA sense strand
cuacaggacuccaaauuuu

SEQ ID NO: 1035169 - RNA, 19 nt, Homo sapiens
  misc_RNA (1)...(19): siRNA sense strand
aaacacagucggcaauaaa

SEQ ID NO: 1035170 - RNA, 19 nt, Homo sapiens
  misc_RNA (1)...(19): siRNA sense strand
aaacaacuuucagagcuuu

SEQ ID NO: 1035171 - RNA, 19 nt, Homo sapiens
  misc_RNA (1)...(19): siRNA sense strand
acaacgcaaucaugucuuu

SEQ ID NO: 1035172 - RNA, 19 nt, Homo sapiens
  misc_RNA (1)...(19): siRNA sense strand
gaaccgaaacaagauuaaa

SEQ ID NO: 1035173 - RNA, 19 nt, Homo sapiens
  misc_RNA (1)...(19): siRNA sense strand
gagcccaguuacauaaaga

SEQ ID NO: 1035174 - RNA, 19 nt, Homo sapiens
  misc_RNA (1)...(19): siRNA sense strand
gagcuggaccuaacuuuca

SEQ ID NO: 1035175 - RNA, 19 nt, Homo sapiens
  misc_RNA (1)...(19): siRNA sense strand
aaauguagauggacugaca

SEQ ID NO: 1035176 - RNA, 19 nt, Homo sapiens
  misc_RNA (1)...(19): siRNA sense strand
agaggaagaugggaaagaa

SEQ ID NO: 1035177 - RNA, 19 nt, Homo sapiens
  misc_RNA (1)...(19): siRNA sense strand
ccaagagccuuuuauuuga

SEQ ID NO: 1035178 - RNA, 19 nt, Homo sapiens
  misc_RNA (1)...(19): siRNA sense strand
ccuagaaacaccaucauuu

SEQ ID NO: 1035179 - RNA, 19 nt, Homo sapiens
  misc_RNA (1)...(19): siRNA sense strand
gcaaauauuacacuucucu

SEQ ID NO: 1035180 - RNA, 19 nt, Homo sapiens
  misc_RNA (1)...(19): siRNA sense strand
gaaacugaacaacaaugaa

SEQ ID NO: 1035181 - RNA, 19 nt, Homo sapiens
  misc_RNA (1)...(19): siRNA sense strand
gauccguucuauuacuaaa

SEQ ID NO: 1035182 - RNA, 19 nt, Homo sapiens
  misc_RNA (1)...(19): siRNA sense strand
gaucugaagaacaaugaaa

SEQ ID NO: 1035183 - RNA, 19 nt, Homo sapiens
  misc_RNA (1)...(19): siRNA sense strand
ggaaccgaaucucagcuau

SEQ ID NO: 1035184 - RNA, 19 nt, Homo sapiens
  misc_RNA (1)...(19): siRNA sense strand
caaguccucuuuagauuuu

SEQ ID NO: 1035185 - RNA, 19 nt, Homo sapiens
  misc_RNA (1)...(19): siRNA sense strand
agugggaccugccauauug

SEQ ID NO: 1035186 - RNA, 19 nt, Homo sapiens
  misc_RNA (1)...(19): siRNA sense strand
guggcgaggugauggagua

SEQ ID NO: 1035187 - RNA, 19 nt, Homo sapiens
  misc_RNA (1)...(19): siRNA sense strand
cgacugauacuccaaggaa

SEQ ID NO: 1035188 - RNA, 19 nt, Homo sapiens
  misc_RNA (1)...(19): siRNA sense strand
gcaaccgagucacaucaau

SEQ ID NO: 1035189 - RNA, 19 nt, Homo sapiens
  misc_RNA (1)...(19): siRNA sense strand
gaagauugcagcauuacca

SEQ ID NO: 1035190 - RNA, 19 nt, Homo sapiens
  misc_RNA (1)...(19): siRNA sense strand
agacaugaauggugcuuuc

SEQ ID NO: 1035191 - RNA, 19 nt, Homo sapiens
  misc_RNA (1)...(19): siRNA sense strand
aaugaaauuuccuggacua

SEQ ID NO: 1035192 - RNA, 19 nt, Homo sapiens
  misc_RNA (1)...(19): siRNA sense strand
ugcaacaucucgaauugaa

SEQ ID NO: 1035193 - RNA, 19 nt, Homo sapiens
  misc_RNA (1)...(19): siRNA sense strand
ucgguugccucgaguaauu

SEQ ID NO: 1035194 - RNA, 19 nt, Homo sapiens
  misc_RNA (1)...(19): siRNA sense strand
caugugaggaagcuacuua

SEQ ID NO: 1035195 - RNA, 19 nt, Homo sapiens
  misc_RNA (1)...(19): siRNA sense strand
cuaguuauuugucaucuca

SEQ ID NO: 1035196 - RNA, 19 nt, Homo sapiens
  misc_RNA (1)...(19): siRNA sense strand
gaucauagccgugguuugc

SEQ ID NO: 1035197 - RNA, 19 nt, Homo sapiens
  misc_RNA (1)...(19): siRNA sense strand
aagugaaacugaacaacaa

SEQ ID NO: 1035198 - RNA, 19 nt, Homo sapiens
  misc_RNA (1)...(19): siRNA sense strand
aacaaguccucuuuagauu

SEQ ID NO: 1035199 - RNA, 19 nt, Homo sapiens
  misc_RNA (1)...(19): siRNA sense strand
gagcuucaguaauauaucg

SEQ ID NO: 1035200 - RNA, 19 nt, Homo sapiens
  misc_RNA (1)...(19): siRNA sense strand
gauagcccauuggugguaa

SEQ ID NO: 1035201 - RNA, 19 nt, Homo sapiens
  misc_RNA (1)...(19): siRNA sense strand
caaaugcaacucugacugu

SEQ ID NO: 1035202 - RNA, 19 nt, Homo sapiens
  misc_RNA (1)...(19): siRNA sense strand
cagauggcuuuguguguga

SEQ ID NO: 1035203 - RNA, 19 nt, Homo sapiens
  misc_RNA (1)...(19): siRNA sense strand
ucagugagcuggaccuaac

SEQ ID NO: 1035204 - RNA, 19 nt, Homo sapiens
  misc_RNA (1)...(19): siRNA sense strand
gcgaacggagcuucaguaa

SEQ ID NO: 1035205 - RNA, 19 nt, Homo sapiens
  misc_RNA (1)...(19): siRNA sense strand
ucagugaugcugggaaaua

SEQ ID NO: 1035206 - RNA, 19 nt, Homo sapiens
  misc_RNA (1)...(19): siRNA sense strand
gggagaaacagccguccua

SEQ ID NO: 1035207 - RNA, 19 nt, Homo sapiens
  misc_RNA (1)...(19): siRNA sense strand
caaacugaggcgacugaua

SEQ ID NO: 1035208 - RNA, 19 nt, Homo sapiens
  misc_RNA (1)...(19): siRNA sense strand
ucacugguuuggaugcauu

SEQ ID NO: 1035209 - RNA, 19 nt, Homo sapiens
  misc_RNA (1)...(19): siRNA sense strand
gaaagaaaggacagauuuu

SEQ ID NO: 1035210 - RNA, 19 nt, Homo sapiens
  misc_RNA (1)...(19): siRNA sense strand
cggcaaauauuacacuucu

SEQ ID NO: 1035211 - RNA, 19 nt, Homo sapiens
  misc_RNA (1)...(19): siRNA sense strand
aggaugacguguucuuuau

SEQ ID NO: 1035212 - RNA, 19 nt, Homo sapiens
  misc_RNA (1)...(19): siRNA sense strand
gcccgaggaugacguguuc

SEQ ID NO: 1035213 - RNA, 19 nt, Homo sapiens
  misc_RNA (1)...(19): siRNA sense strand
gcgaggugauggaguauac

SEQ ID NO: 1035214 - RNA, 19 nt, Homo sapiens
  misc_RNA (1)...(19): siRNA sense strand
gaucacgguucagccagaa

SEQ ID NO: 1035215 - RNA, 19 nt, Homo sapiens
  misc_RNA (1)...(19): siRNA sense strand
cgcgggagcuucagcagua

SEQ ID NO: 1035216 - RNA, 19 nt, Homo sapiens
  misc_RNA (1)...(19): siRNA sense strand
gcacuuagacacacacagu

SEQ ID NO: 1035217 - RNA, 19 nt, Homo sapiens
  misc_RNA (1)...(19): siRNA sense strand
gcacgucaaacugcucuuu

SEQ ID NO: 1035218 - RNA, 19 nt, Homo sapiens
  misc_RNA (1)...(19): siRNA sense strand
agaaaagucucuaaguuug

SEQ ID NO: 1035219 - RNA, 19 nt, Homo sapiens
  misc_RNA (1)...(19): siRNA sense strand
gcuggaagcacgucaaacu

SEQ ID NO: 1035220 - RNA, 19 nt, Homo sapiens
  misc_RNA (1)...(19): siRNA sense strand
gaccugacgggcacuuaga

SEQ ID NO: 1035221 - RNA, 19 nt, Homo sapiens
  misc_RNA (1)...(19): siRNA sense strand
ggaccugacgggcacuuag

SEQ ID NO: 1035222 - RNA, 19 nt, Homo sapiens
  misc_RNA (1)...(19): siRNA sense strand
gaaaagucucuaaguuugu

SEQ ID NO: 1035223 - RNA, 19 nt, Homo sapiens
  misc_RNA (1)...(19): siRNA sense strand
ggcaaggacccagcaggaa

SEQ ID NO: 1035224 - RNA, 19 nt, Homo sapiens
  misc_RNA (1)...(19): siRNA sense strand
acaguggccugagcuccaa

SEQ ID NO: 1035225 - RNA, 19 nt, Homo sapiens
  misc_RNA (1)...(19): siRNA sense strand
cgcgggagcuucagcagua

SEQ ID NO: 1035226 - RNA, 19 nt, Homo sapiens
  misc_RNA (1)...(19): siRNA sense strand
gcacuuagacacacacagu

SEQ ID NO: 1035227 - RNA, 19 nt, Homo sapiens
  misc_RNA (1)...(19): siRNA sense strand
gcacgucaaacugcucuuu

SEQ ID NO: 1035228 - RNA, 19 nt, Homo sapiens
  misc_RNA (1)...(19): siRNA sense strand
agaaaagucucuaaguuug

SEQ ID NO: 1035229 - RNA, 19 nt, Homo sapiens
  misc_RNA (1)...(19): siRNA sense strand
gcuggaagcacgucaaacu

SEQ ID NO: 1035230 - RNA, 19 nt, Homo sapiens
  misc_RNA (1)...(19): siRNA sense strand
gaccugacgggcacuuaga

SEQ ID NO: 1035231 - RNA, 19 nt, Homo sapiens
  misc_RNA (1)...(19): siRNA sense strand
ggaccugacgggcacuuag

SEQ ID NO: 1035232 - RNA, 19 nt, Homo sapiens
  misc_RNA (1)...(19): siRNA sense strand
gaaaagucucuaaguuugu

SEQ ID NO: 1035233 - RNA, 19 nt, Homo sapiens
  misc_RNA (1)...(19): siRNA sense strand
ggcaaggacccagcaggaa

SEQ ID NO: 1035234 - RNA, 19 nt, Homo sapiens
  misc_RNA (1)...(19): siRNA sense strand
acaguggccugagcuccaa

SEQ ID NO: 1035235 - RNA, 19 nt, Homo sapiens
  misc_RNA (1)...(19): siRNA sense strand
gaggaaaugcugauuguug

SEQ ID NO: 1035236 - RNA, 19 nt, Homo sapiens
  misc_RNA (1)...(19): siRNA sense strand
ggaugagaaugauaagguu

SEQ ID NO: 1035237 - RNA, 19 nt, Homo sapiens
  misc_RNA (1)...(19): siRNA sense strand
gagagcaugaaauuuguua

SEQ ID NO: 1035238 - RNA, 19 nt, Homo sapiens
  misc_RNA (1)...(19): siRNA sense strand
gaacccggaucccagugaa

SEQ ID NO: 1035239 - RNA, 19 nt, Homo sapiens
  misc_RNA (1)...(19): siRNA sense strand
gcaugaaauuuguuaccuu

SEQ ID NO: 1035240 - RNA, 19 nt, Homo sapiens
  misc_RNA (1)...(19): siRNA sense strand
cagcagaacuggaagaaaa

SEQ ID NO: 1035241 - RNA, 19 nt, Homo sapiens
  misc_RNA (1)...(19): siRNA sense strand
guaguagccacccauuaua

SEQ ID NO: 1035242 - RNA, 19 nt, Homo sapiens
  misc_RNA (1)...(19): siRNA sense strand
gaugagaaugauaagguua

SEQ ID NO: 1035243 - RNA, 19 nt, Homo sapiens
  misc_RNA (1)...(19): siRNA sense strand
gggagagcaugaaauuugu

SEQ ID NO: 1035244 - RNA, 19 nt, Homo sapiens
  misc_RNA (1)...(19): siRNA sense strand
gacaaucuaucaccacaag

SEQ ID NO: 1035245 - RNA, 19 nt, Homo sapiens
  misc_RNA (1)...(19): siRNA sense strand
gaauugccaucugaacgaa

SEQ ID NO: 1035246 - RNA, 19 nt, Homo sapiens
  misc_RNA (1)...(19): siRNA sense strand
cuucagcguugucuuguuu

SEQ ID NO: 1035247 - RNA, 19 nt, Homo sapiens
  misc_RNA (1)...(19): siRNA sense strand
caagaggaauugccaucug

SEQ ID NO: 1035248 - RNA, 19 nt, Homo sapiens
  misc_RNA (1)...(19): siRNA sense strand
gcagaggucggacacgaaa

SEQ ID NO: 1035249 - RNA, 19 nt, Homo sapiens
  misc_RNA (1)...(19): siRNA sense strand
ggaauugccaucugaacga

SEQ ID NO: 1035250 - RNA, 19 nt, Homo sapiens
  misc_RNA (1)...(19): siRNA sense strand
ggacacgaaagucacguuu

SEQ ID NO: 1035251 - RNA, 19 nt, Homo sapiens
  misc_RNA (1)...(19): siRNA sense strand
gaacgaaaacauugagaaa

SEQ ID NO: 1035252 - RNA, 19 nt, Homo sapiens
  misc_RNA (1)...(19): siRNA sense strand
aagaggaauugccaucuga

SEQ ID NO: 1035253 - RNA, 19 nt, Homo sapiens
  misc_RNA (1)...(19): siRNA sense strand
gcaagcagagcugggaauu

SEQ ID NO: 1035254 - RNA, 19 nt, Homo sapiens
  misc_RNA (1)...(19): siRNA sense strand
cagaggacauuguguucau

SEQ ID NO: 1035255 - RNA, 19 nt, Homo sapiens
  misc_RNA (1)...(19): siRNA sense strand
uggaggaaaugcugauugu

SEQ ID NO: 1035256 - RNA, 19 nt, Homo sapiens
  misc_RNA (1)...(19): siRNA sense strand
ugaaauuuguuaccuucug

SEQ ID NO: 1035257 - RNA, 19 nt, Homo sapiens
  misc_RNA (1)...(19): siRNA sense strand
ucagcguugucuuguuuaa

SEQ ID NO: 1035258 - RNA, 19 nt, Homo sapiens
  misc_RNA (1)...(19): siRNA sense strand
caagaaucgaauccugaua

SEQ ID NO: 1035259 - RNA, 19 nt, Homo sapiens
  misc_RNA (1)...(19): siRNA sense strand
aggaaaugcugauuguugu

SEQ ID NO: 1035260 - RNA, 19 nt, Homo sapiens
  misc_RNA (1)...(19): siRNA sense strand
uguaguagccacccauuau

SEQ ID NO: 1035261 - RNA, 19 nt, Homo sapiens
  misc_RNA (1)...(19): siRNA sense strand
ucacguuuccuggguauuu

SEQ ID NO: 1035262 - RNA, 19 nt, Homo sapiens
  misc_RNA (1)...(19): siRNA sense strand
gaggacauuguguucauga

SEQ ID NO: 1035263 - RNA, 19 nt, Homo sapiens
  misc_RNA (1)...(19): siRNA sense strand
ggacauuguguucaugaca

SEQ ID NO: 1035264 - RNA, 19 nt, Homo sapiens
  misc_RNA (1)...(19): siRNA sense strand
ggaucccagugaaacgaaa

SEQ ID NO: 1035265 - RNA, 19 nt, Homo sapiens
  misc_RNA (1)...(19): siRNA sense strand
uugcagcgcuuggaggaaa

SEQ ID NO: 1035266 - RNA, 19 nt, Homo sapiens
  misc_RNA (1)...(19): siRNA sense strand
uuuaccgacuccuguagua

SEQ ID NO: 1035267 - RNA, 19 nt, Homo sapiens
  misc_RNA (1)...(19): siRNA sense strand
ggggagagcaugaaauuug

SEQ ID NO: 1035268 - RNA, 19 nt, Homo sapiens
  misc_RNA (1)...(19): siRNA sense strand
agaaucgaauccugauaca

SEQ ID NO: 1035269 - RNA, 19 nt, Homo sapiens
  misc_RNA (1)...(19): siRNA sense strand
ggagagcaugaaauuuguu

SEQ ID NO: 1035270 - RNA, 19 nt, Homo sapiens
  misc_RNA (1)...(19): siRNA sense strand
ggaaaugcugauuguugug

SEQ ID NO: 1035271 - RNA, 19 nt, Homo sapiens
  misc_RNA (1)...(19): siRNA sense strand
uuuguuaccuucugcuugu

SEQ ID NO: 1035272 - RNA, 19 nt, Homo sapiens
  misc_RNA (1)...(19): siRNA sense strand
aagcagagcugggaauucc

SEQ ID NO: 1035273 - RNA, 19 nt, Homo sapiens
  misc_RNA (1)...(19): siRNA sense strand
guagccacccauuauacaa

SEQ ID NO: 1035274 - RNA, 19 nt, Homo sapiens
  misc_RNA (1)...(19): siRNA sense strand
ccaagaaucgaauccugau

SEQ ID NO: 1035275 - RNA, 19 nt, Homo sapiens
  misc_RNA (1)...(19): siRNA sense strand
ggcaaaaucagacagaauu

SEQ ID NO: 1035276 - RNA, 19 nt, Homo sapiens
  misc_RNA (1)...(19): siRNA sense strand
ugauuguuguggaugagaa

SEQ ID NO: 1035277 - RNA, 19 nt, Homo sapiens
  misc_RNA (1)...(19): siRNA sense strand
ggaggaaaugcugauuguu

SEQ ID NO: 1035278 - RNA, 19 nt, Homo sapiens
  misc_RNA (1)...(19): siRNA sense strand
aaucuugacuggguugaca

SEQ ID NO: 1035279 - RNA, 19 nt, Homo sapiens
  misc_RNA (1)...(19): siRNA sense strand
ggcgaggggugaagucaaa

SEQ ID NO: 1035280 - RNA, 19 nt, Homo sapiens
  misc_RNA (1)...(19): siRNA sense strand
ggagcuggguuauccaaga

SEQ ID NO: 1035281 - RNA, 19 nt, Homo sapiens
  misc_RNA (1)...(19): siRNA sense strand
agaggaggaugaugaagaa

SEQ ID NO: 1035282 - RNA, 19 nt, Homo sapiens
  misc_RNA (1)...(19): siRNA sense strand
ugaagaagaggaagaagaa

SEQ ID NO: 1035283 - RNA, 19 nt, Homo sapiens
  misc_RNA (1)...(19): siRNA sense strand
ggaagaggaggaugaugaa

SEQ ID NO: 1035284 - RNA, 19 nt, Homo sapiens
  misc_RNA (1)...(19): siRNA sense strand
ggaggaugaugaagaagag

SEQ ID NO: 1035285 - RNA, 19 nt, Homo sapiens
  misc_RNA (1)...(19): siRNA sense strand
ggaagacccagcacuaagu

SEQ ID NO: 1035286 - RNA, 19 nt, Homo sapiens
  misc_RNA (1)...(19): siRNA sense strand
ccucugagccuggcacaua

SEQ ID NO: 1035287 - RNA, 19 nt, Homo sapiens
  misc_RNA (1)...(19): siRNA sense strand
ggcaccaucucaagucgaa

SEQ ID NO: 1035288 - RNA, 19 nt, Homo sapiens
  misc_RNA (1)...(19): siRNA sense strand
ucagcaauuugaaugagaa

SEQ ID NO: 1035289 - RNA, 19 nt, Homo sapiens
  misc_RNA (1)...(19): siRNA sense strand
agaggaagaugaggaggaa

SEQ ID NO: 1035290 - RNA, 19 nt, Homo sapiens
  misc_RNA (1)...(19): siRNA sense strand
agucucaccugcagucuau

SEQ ID NO: 1035291 - RNA, 19 nt, Homo sapiens
  misc_RNA (1)...(19): siRNA sense strand
gagcuggguuauccaagag

SEQ ID NO: 1035292 - RNA, 19 nt, Homo sapiens
  misc_RNA (1)...(19): siRNA sense strand
ugcagucuaucagcaauuu

SEQ ID NO: 1035293 - RNA, 19 nt, Homo sapiens
  misc_RNA (1)...(19): siRNA sense strand
aggaagaggaggaugauga

SEQ ID NO: 1035294 - RNA, 19 nt, Homo sapiens
  misc_RNA (1)...(19): siRNA sense strand
gcaauuugaaugagaacca

SEQ ID NO: 1035295 - RNA, 19 nt, Homo sapiens
  misc_RNA (1)...(19): siRNA sense strand
guggaagacccagcacuaa

SEQ ID NO: 1035296 - RNA, 19 nt, Homo sapiens
  misc_RNA (1)...(19): siRNA sense strand
aagaagaggaagaagaaga

SEQ ID NO: 1035297 - RNA, 19 nt, Homo sapiens
  misc_RNA (1)...(19): siRNA sense strand
aagaggaggaugaugaaga

SEQ ID NO: 1035298 - RNA, 19 nt, Homo sapiens
  misc_RNA (1)...(19): siRNA sense strand
ggaggaagaggaggaugau

SEQ ID NO: 1035299 - RNA, 19 nt, Homo sapiens
  misc_RNA (1)...(19): siRNA sense strand
cacaccaccuucgcugaaa

SEQ ID NO: 1035300 - RNA, 19 nt, Homo sapiens
  misc_RNA (1)...(19): siRNA sense strand
ggaugaugaagaagaggaa

SEQ ID NO: 1035301 - RNA, 19 nt, Homo sapiens
  misc_RNA (1)...(19): siRNA sense strand
uaucagcaauuugaaugag

SEQ ID NO: 1035302 - RNA, 19 nt, Homo sapiens
  misc_RNA (1)...(19): siRNA sense strand
gaccaacgccugccaugcu

SEQ ID NO: 1035303 - RNA, 19 nt, Homo sapiens
  misc_RNA (1)...(19): siRNA sense strand
cagucuaucagcaauuuga

SEQ ID NO: 1035304 - RNA, 19 nt, Homo sapiens
  misc_RNA (1)...(19): siRNA sense strand
acacaccaccuucgcugaa

SEQ ID NO: 1035305 - RNA, 19 nt, Homo sapiens
  misc_RNA (1)...(19): siRNA sense strand
ucuaucagcaauuugaaug

SEQ ID NO: 1035306 - RNA, 19 nt, Homo sapiens
  misc_RNA (1)...(19): siRNA sense strand
aggcugaaguccugaaggu

SEQ ID NO: 1035307 - RNA, 19 nt, Homo sapiens
  misc_RNA (1)...(19): siRNA sense strand
caacgccugccaugcuguu

SEQ ID NO: 1035308 - RNA, 19 nt, Homo sapiens
  misc_RNA (1)...(19): siRNA sense strand
ugaugaagaagaggaagaa

SEQ ID NO: 1035309 - RNA, 19 nt, Homo sapiens
  misc_RNA (1)...(19): siRNA sense strand
gaagaagaggaagaagaag

SEQ ID NO: 1035310 - RNA, 19 nt, Homo sapiens
  misc_RNA (1)...(19): siRNA sense strand
uggaugaguccgagagaga

SEQ ID NO: 1035311 - RNA, 19 nt, Homo sapiens
  misc_RNA (1)...(19): siRNA sense strand
gaugaguccgagagagaug

SEQ ID NO: 1035312 - RNA, 19 nt, Homo sapiens
  misc_RNA (1)...(19): siRNA sense strand
ggagcuggguuauccaaga

SEQ ID NO: 1035313 - RNA, 19 nt, Homo sapiens
  misc_RNA (1)...(19): siRNA sense strand
agaggaggaugaugaagaa

SEQ ID NO: 1035314 - RNA, 19 nt, Homo sapiens
  misc_RNA (1)...(19): siRNA sense strand
ugaagaagaggaagaagaa

SEQ ID NO: 1035315 - RNA, 19 nt, Homo sapiens
  misc_RNA (1)...(19): siRNA sense strand
ggaagaggaggaugaugaa

SEQ ID NO: 1035316 - RNA, 19 nt, Homo sapiens
  misc_RNA (1)...(19): siRNA sense strand
ggaggaugaugaagaagag

SEQ ID NO: 1035317 - RNA, 19 nt, Homo sapiens
  misc_RNA (1)...(19): siRNA sense strand
ggaagacccagcacuaagu

SEQ ID NO: 1035318 - RNA, 19 nt, Homo sapiens
  misc_RNA (1)...(19): siRNA sense strand
ccucugagccuggcacaua

SEQ ID NO: 1035319 - RNA, 19 nt, Homo sapiens
  misc_RNA (1)...(19): siRNA sense strand
ucagcaauuugaaugagaa

SEQ ID NO: 1035320 - RNA, 19 nt, Homo sapiens
  misc_RNA (1)...(19): siRNA sense strand
ggcaccaucucaagucgaa

SEQ ID NO: 1035321 - RNA, 19 nt, Homo sapiens
  misc_RNA (1)...(19): siRNA sense strand
agaggaagaugaggaggaa

SEQ ID NO: 1035322 - RNA, 19 nt, Homo sapiens
  misc_RNA (1)...(19): siRNA sense strand
agucucaccugcagucuau

SEQ ID NO: 1035323 - RNA, 19 nt, Homo sapiens
  misc_RNA (1)...(19): siRNA sense strand
gagcuggguuauccaagag

SEQ ID NO: 1035324 - RNA, 19 nt, Homo sapiens
  misc_RNA (1)...(19): siRNA sense strand
ugcagucuaucagcaauuu

SEQ ID NO: 1035325 - RNA, 19 nt, Homo sapiens
  misc_RNA (1)...(19): siRNA sense strand
aggaagaggaggaugauga

SEQ ID NO: 1035326 - RNA, 19 nt, Homo sapiens
  misc_RNA (1)...(19): siRNA sense strand
gcaauuugaaugagaacca

SEQ ID NO: 1035327 - RNA, 19 nt, Homo sapiens
  misc_RNA (1)...(19): siRNA sense strand
guggaagacccagcacuaa

SEQ ID NO: 1035328 - RNA, 19 nt, Homo sapiens
  misc_RNA (1)...(19): siRNA sense strand
aagaagaggaagaagaaga

SEQ ID NO: 1035329 - RNA, 19 nt, Homo sapiens
  misc_RNA (1)...(19): siRNA sense strand
aagaggaggaugaugaaga

SEQ ID NO: 1035330 - RNA, 19 nt, Homo sapiens
  misc_RNA (1)...(19): siRNA sense strand
cacaccaccuucgcugaaa

SEQ ID NO: 1035331 - RNA, 19 nt, Homo sapiens
  misc_RNA (1)...(19): siRNA sense strand
ggaggaagaggaggaugau

SEQ ID NO: 1035332 - RNA, 19 nt, Homo sapiens
  misc_RNA (1)...(19): siRNA sense strand
ggaugaugaagaagaggaa

SEQ ID NO: 1035333 - RNA, 19 nt, Homo sapiens
  misc_RNA (1)...(19): siRNA sense strand
uaucagcaauuugaaugag

SEQ ID NO: 1035334 - RNA, 19 nt, Homo sapiens
  misc_RNA (1)...(19): siRNA sense strand
cagucuaucagcaauuuga

SEQ ID NO: 1035335 - RNA, 19 nt, Homo sapiens
  misc_RNA (1)...(19): siRNA sense strand
acacaccaccuucgcugaa

SEQ ID NO: 1035336 - RNA, 19 nt, Homo sapiens
  misc_RNA (1)...(19): siRNA sense strand
ucuaucagcaauuugaaug

SEQ ID NO: 1035337 - RNA, 19 nt, Homo sapiens
  misc_RNA (1)...(19): siRNA sense strand
aggcugaaguccugaaggu

SEQ ID NO: 1035338 - RNA, 19 nt, Homo sapiens
  misc_RNA (1)...(19): siRNA sense strand
ugaugaagaagaggaagaa

SEQ ID NO: 1035339 - RNA, 19 nt, Homo sapiens
  misc_RNA (1)...(19): siRNA sense strand
gaagaagaggaagaagaag

SEQ ID NO: 1035340 - RNA, 19 nt, Homo sapiens
  misc_RNA (1)...(19): siRNA sense strand
uggaugaguccgagagaga

SEQ ID NO: 1035341 - RNA, 19 nt, Homo sapiens
  misc_RNA (1)...(19): siRNA sense strand
gaugaguccgagagagaug

SEQ ID NO: 1035342 - RNA, 19 nt, Homo sapiens
  misc_RNA (1)...(19): siRNA sense strand
gcucauagcucaucucuua

SEQ ID NO: 1035343 - RNA, 19 nt, Homo sapiens
  misc_RNA (1)...(19): siRNA sense strand
ggaaaguucuucagacaua

SEQ ID NO: 1035344 - RNA, 19 nt, Homo sapiens
  misc_RNA (1)...(19): siRNA sense strand
gcaaggagcugaagagaga

SEQ ID NO: 1035345 - RNA, 19 nt, Homo sapiens
  misc_RNA (1)...(19): siRNA sense strand
gagaaacccuauaaaugua

SEQ ID NO: 1035346 - RNA, 19 nt, Homo sapiens
  misc_RNA (1)...(19): siRNA sense strand
gagaagcucuauaaaugua

SEQ ID NO: 1035347 - RNA, 19 nt, Homo sapiens
  misc_RNA (1)...(19): siRNA sense strand
gagaagcccuauaaaugua

SEQ ID NO: 1035348 - RNA, 19 nt, Homo sapiens
  misc_RNA (1)...(19): siRNA sense strand
gugagaagcucuauaaaug

SEQ ID NO: 1035349 - RNA, 19 nt, Homo sapiens
  misc_RNA (1)...(19): siRNA sense strand
acucagagcucaucccuua

SEQ ID NO: 1035350 - RNA, 19 nt, Homo sapiens
  misc_RNA (1)...(19): siRNA sense strand
gagagaagcccuauaaaug

SEQ ID NO: 1035351 - RNA, 19 nt, Homo sapiens
  misc_RNA (1)...(19): siRNA sense strand
gagagaaaccuuauaaaug

SEQ ID NO: 1035352 - RNA, 19 nt, Homo sapiens
  misc_RNA (1)...(19): siRNA sense strand
cgaaaacacucaaaucuua

SEQ ID NO: 1035353 - RNA, 19 nt, Homo sapiens
  misc_RNA (1)...(19): siRNA sense strand
gagagaaaccuuauaaaug

SEQ ID NO: 1035354 - RNA, 19 nt, Homo sapiens
  misc_RNA (1)...(19): siRNA sense strand
cgaugucgaucauuucuua

SEQ ID NO: 1035355 - RNA, 19 nt, Homo sapiens
  misc_RNA (1)...(19): siRNA sense strand
gguaaagccuucauucaga

SEQ ID NO: 1035356 - RNA, 19 nt, Homo sapiens
  misc_RNA (1)...(19): siRNA sense strand
gagagaaacccuauaaaug

SEQ ID NO: 1035357 - RNA, 19 nt, Homo sapiens
  misc_RNA (1)...(19): siRNA sense strand
gagcccaucucuuauuaaa

SEQ ID NO: 1035358 - RNA, 19 nt, Homo sapiens
  misc_RNA (1)...(19): siRNA sense strand
gaagagagagacauuagaa

SEQ ID NO: 1035359 - RNA, 19 nt, Homo sapiens
  misc_RNA (1)...(19): siRNA sense strand
ggagagaaaccuuauaaau

SEQ ID NO: 1035360 - RNA, 19 nt, Homo sapiens
  misc_RNA (1)...(19): siRNA sense strand
ggagagaaaccuuauaaau

SEQ ID NO: 1035361 - RNA, 19 nt, Homo sapiens
  misc_RNA (1)...(19): siRNA sense strand
ggagagaaacccuauaaau

SEQ ID NO: 1035362 - RNA, 19 nt, Homo sapiens
  misc_RNA (1)...(19): siRNA sense strand
caacaucagagaacucaua

SEQ ID NO: 1035363 - RNA, 19 nt, Homo sapiens
  misc_RNA (1)...(19): siRNA sense strand
gcucaucucuuacugaaca

SEQ ID NO: 1035364 - RNA, 19 nt, Homo sapiens
  misc_RNA (1)...(19): siRNA sense strand
ggagagaagcccuauaaau

SEQ ID NO: 1035365 - RNA, 19 nt, Homo sapiens
  misc_RNA (1)...(19): siRNA sense strand
caaaguaaauguccaacuc

SEQ ID NO: 1035366 - RNA, 19 nt, Homo sapiens
  misc_RNA (1)...(19): siRNA sense strand
gcccaucucuuauuaaaca

SEQ ID NO: 1035367 - RNA, 19 nt, Homo sapiens
  misc_RNA (1)...(19): siRNA sense strand
ggaaggcauucaaucagaa

SEQ ID NO: 1035368 - RNA, 19 nt, Homo sapiens
  misc_RNA (1)...(19): siRNA sense strand
ccauaaaugugacgaaugu

SEQ ID NO: 1035369 - RNA, 19 nt, Homo sapiens
  misc_RNA (1)...(19): siRNA sense strand
gaggaugaauaccaagauu

SEQ ID NO: 1035370 - RNA, 19 nt, Homo sapiens
  misc_RNA (1)...(19): siRNA sense strand
agagaaaccuuauaaaugc

SEQ ID NO: 1035371 - RNA, 19 nt, Homo sapiens
  misc_RNA (1)...(19): siRNA sense strand
agagaaaccuuauaaaugc

SEQ ID NO: 1035372 - RNA, 19 nt, Homo sapiens
  misc_RNA (1)...(19): siRNA sense strand
gaauaacuuucauccacaa

SEQ ID NO: 1035373 - RNA, 19 nt, Homo sapiens
  misc_RNA (1)...(19): siRNA sense strand
ggagcaggaugucuguaaa

SEQ ID NO: 1035374 - RNA, 19 nt, Homo sapiens
  misc_RNA (1)...(19): siRNA sense strand
gggaaggcauucaaucaga

SEQ ID NO: 1035375 - RNA, 19 nt, Homo sapiens
  misc_RNA (1)...(19): siRNA sense strand
ccaagaggaugaauaccaa

SEQ ID NO: 1035376 - RNA, 19 nt, Homo sapiens
  misc_RNA (1)...(19): siRNA sense strand
gcucaucccuuacccaaca

SEQ ID NO: 1035377 - RNA, 19 nt, Homo sapiens
  misc_RNA (1)...(19): siRNA sense strand
gaagagagucugcaucagu

SEQ ID NO: 1035378 - RNA, 19 nt, Homo sapiens
  misc_RNA (1)...(19): siRNA sense strand
agacauaguucaguccuuu

SEQ ID NO: 1035379 - RNA, 19 nt, Homo sapiens
  misc_RNA (1)...(19): siRNA sense strand
ugagaagccuuaugagugu

SEQ ID NO: 1035380 - RNA, 19 nt, Homo sapiens
  misc_RNA (1)...(19): siRNA sense strand
ggagagacccuacaaaugc

SEQ ID NO: 1035381 - RNA, 19 nt, Homo sapiens
  misc_RNA (1)...(19): siRNA sense strand
caucagggauaguaguaaa

SEQ ID NO: 1035382 - RNA, 19 nt, Homo sapiens
  misc_RNA (1)...(19): siRNA sense strand
gaacauuacagaauucaca

SEQ ID NO: 1035383 - RNA, 19 nt, Homo sapiens
  misc_RNA (1)...(19): siRNA sense strand
auacacaccuuauucauca

SEQ ID NO: 1035384 - RNA, 19 nt, Homo sapiens
  misc_RNA (1)...(19): siRNA sense strand
agagaaacccuauaaaugu

SEQ ID NO: 1035385 - RNA, 19 nt, Homo sapiens
  misc_RNA (1)...(19): siRNA sense strand
gugagaagccuuacauaug

SEQ ID NO: 1035386 - RNA, 19 nt, Homo sapiens
  misc_RNA (1)...(19): siRNA sense strand
ccaagauucuacauuugaa

SEQ ID NO: 1035387 - RNA, 19 nt, Homo sapiens
  misc_RNA (1)...(19): siRNA sense strand
ugagaagccuuacauaugc

SEQ ID NO: 1035388 - RNA, 19 nt, Homo sapiens
  misc_RNA (1)...(19): siRNA sense strand
aaacaccagcgaauucaua

SEQ ID NO: 1035389 - RNA, 19 nt, Homo sapiens
  misc_RNA (1)...(19): siRNA sense strand
gaauguggcucuucuuuuc

SEQ ID NO: 1035390 - RNA, 19 nt, Homo sapiens
  misc_RNA (1)...(19): siRNA sense strand
gagagacccuacacaugug

SEQ ID NO: 1035391 - RNA, 19 nt, Homo sapiens
  misc_RNA (1)...(19): siRNA sense strand
ggugagaagcucuauaaau

SEQ ID NO: 1035392 - RNA, 19 nt, Homo sapiens
  misc_RNA (1)...(19): siRNA sense strand
ggcaaagcguuuacucaga

SEQ ID NO: 1035393 - RNA, 19 nt, Homo sapiens
  misc_RNA (1)...(19): siRNA sense strand
acucaaaucuuacgcaaca

SEQ ID NO: 1035394 - RNA, 19 nt, Homo sapiens
  misc_RNA (1)...(19): siRNA sense strand
ggagagagacccuacacau

SEQ ID NO: 1035395 - RNA, 19 nt, Homo sapiens
  misc_RNA (1)...(19): siRNA sense strand
ucagagcauuugccuuauu

SEQ ID NO: 1035396 - RNA, 19 nt, Homo sapiens
  misc_RNA (1)...(19): siRNA sense strand
caucagagaauucauagug

SEQ ID NO: 1035397 - RNA, 19 nt, Homo sapiens
  misc_RNA (1)...(19): siRNA sense strand
gagagagacccuacacaug

SEQ ID NO: 1035398 - RNA, 19 nt, Homo sapiens
  misc_RNA (1)...(19): siRNA sense strand
gagaaaaccuuccgcaagu

SEQ ID NO: 1035399 - RNA, 19 nt, Homo sapiens
  misc_RNA (1)...(19): siRNA sense strand
uagcucaucucuuacugaa

SEQ ID NO: 1035400 - RNA, 19 nt, Homo sapiens
  misc_RNA (1)...(19): siRNA sense strand
gaagcccuauaaauguaaa

SEQ ID NO: 1035401 - RNA, 19 nt, Homo sapiens
  misc_RNA (1)...(19): siRNA sense strand
ggugagaagccuuacauau

SEQ ID NO: 1035402 - RNA, 19 nt, Homo sapiens
  misc_RNA (1)...(19): siRNA sense strand
cagcaucagagaauucaua

SEQ ID NO: 1035403 - RNA, 19 nt, Homo sapiens
  misc_RNA (1)...(19): siRNA sense strand
gaauguggcaaagcguuua

SEQ ID NO: 1035404 - RNA, 19 nt, Homo sapiens
  misc_RNA (1)...(19): siRNA sense strand
cacuaaacaucagagaaua

SEQ ID NO: 1035405 - RNA, 19 nt, Homo sapiens
  misc_RNA (1)...(19): siRNA sense strand
gaacaucauagaacucaca

SEQ ID NO: 1035406 - RNA, 19 nt, Homo sapiens
  misc_RNA (1)...(19): siRNA sense strand
auucagagcauuugccuua

SEQ ID NO: 1035407 - RNA, 19 nt, Homo sapiens
  misc_RNA (1)...(19): siRNA sense strand
gggagagacccuacaaaug

SEQ ID NO: 1035408 - RNA, 19 nt, Homo sapiens
  misc_RNA (1)...(19): siRNA sense strand
ggagugaaaccauauggau

SEQ ID NO: 1035409 - RNA, 19 nt, Homo sapiens
  misc_RNA (1)...(19): siRNA sense strand
gaaaguucuucagacauag

SEQ ID NO: 1035410 - RNA, 19 nt, Homo sapiens
  misc_RNA (1)...(19): siRNA sense strand
guggaaaguucuucagaca

SEQ ID NO: 1035411 - RNA, 19 nt, Homo sapiens
  misc_RNA (1)...(19): siRNA sense strand
gagagacccuacaaaugca

SEQ ID NO: 1035412 - RNA, 19 nt, Homo sapiens
  misc_RNA (1)...(19): siRNA sense strand
ucacuaaacaucagagaau

SEQ ID NO: 1035413 - RNA, 19 nt, Homo sapiens
  misc_RNA (1)...(19): siRNA sense strand
cgcaaucacucacaucuca

SEQ ID NO: 1035414 - RNA, 19 nt, Homo sapiens
  misc_RNA (1)...(19): siRNA sense strand
caggaugucuguaaaauug

SEQ ID NO: 1035415 - RNA, 19 nt, Homo sapiens
  misc_RNA (1)...(19): siRNA sense strand
cagagcauuugccuuauuc

SEQ ID NO: 1035416 - RNA, 19 nt, Homo sapiens
  misc_RNA (1)...(19): siRNA sense strand
guggagagaaacccuauaa

SEQ ID NO: 1035417 - RNA, 19 nt, Homo sapiens
  misc_RNA (1)...(19): siRNA sense strand
agagagacauuagaagaga

SEQ ID NO: 1035418 - RNA, 19 nt, Homo sapiens
  misc_RNA (1)...(19): siRNA sense strand
ucacucacaucucacugaa

SEQ ID NO: 1035419 - RNA, 19 nt, Homo sapiens
  misc_RNA (1)...(19): siRNA sense strand
caacaucaaagaauucaca

SEQ ID NO: 1035420 - RNA, 19 nt, Homo sapiens
  misc_RNA (1)...(19): siRNA sense strand
ggauaguaguaaagagguu

SEQ ID NO: 1035421 - RNA, 19 nt, Homo sapiens
  misc_RNA (1)...(19): siRNA sense strand
gagaaaccuuauaaaugca

SEQ ID NO: 1035422 - RNA, 19 nt, Homo sapiens
  misc_RNA (1)...(19): siRNA sense strand
agagaagcccuauaaaugu

SEQ ID NO: 1035423 - RNA, 19 nt, Homo sapiens
  misc_RNA (1)...(19): siRNA sense strand
gagaaaccuuauaaaugca

SEQ ID NO: 1035424 - RNA, 19 nt, Homo sapiens
  misc_RNA (1)...(19): siRNA sense strand
gaacaccagagaauucaca

SEQ ID NO: 1035425 - RNA, 19 nt, Homo sapiens
  misc_RNA (1)...(19): siRNA sense strand
uaccaagauucuacauuug

SEQ ID NO: 1035426 - RNA, 19 nt, Homo sapiens
  misc_RNA (1)...(19): siRNA sense strand
gagaagccuuaugagugua

SEQ ID NO: 1035427 - RNA, 19 nt, Homo sapiens
  misc_RNA (1)...(19): siRNA sense strand
gaagcucuauaaauguagu

SEQ ID NO: 1035428 - RNA, 19 nt, Homo sapiens
  misc_RNA (1)...(19): siRNA sense strand
cuacaaaugcagugaaugu

SEQ ID NO: 1035429 - RNA, 19 nt, Homo sapiens
  misc_RNA (1)...(19): siRNA sense strand
gcgaauucauacuggagaa

SEQ ID NO: 1035430 - RNA, 19 nt, Homo sapiens
  misc_RNA (1)...(19): siRNA sense strand
gugggaaacaaguaauaua

SEQ ID NO: 1035431 - RNA, 19 nt, Homo sapiens
  misc_RNA (1)...(19): siRNA sense strand
gcaaguaugcacaccuuag

SEQ ID NO: 1035432 - RNA, 19 nt, Homo sapiens
  misc_RNA (1)...(19): siRNA sense strand
caacaucagagaauucaca

SEQ ID NO: 1035433 - RNA, 19 nt, Homo sapiens
  misc_RNA (1)...(19): siRNA sense strand
agagagacccuacacaugu

SEQ ID NO: 1035434 - RNA, 19 nt, Homo sapiens
  misc_RNA (1)...(19): siRNA sense strand
caucagagaacucauacug

SEQ ID NO: 1035435 - RNA, 19 nt, Homo sapiens
  misc_RNA (1)...(19): siRNA sense strand
cuauaaauguagugagugu

SEQ ID NO: 1035436 - RNA, 19 nt, Homo sapiens
  misc_RNA (1)...(19): siRNA sense strand
aaucagaauacacaccuua

SEQ ID NO: 1035437 - RNA, 19 nt, Homo sapiens
  misc_RNA (1)...(19): siRNA sense strand
ucacugaacaccagagaau

SEQ ID NO: 1035438 - RNA, 19 nt, Homo sapiens
  misc_RNA (1)...(19): siRNA sense strand
guaguucauuccuuguuca

SEQ ID NO: 1035439 - RNA, 19 nt, Homo sapiens
  misc_RNA (1)...(19): siRNA sense strand
agagagagacauuagaaga

SEQ ID NO: 1035440 - RNA, 19 nt, Homo sapiens
  misc_RNA (1)...(19): siRNA sense strand
acucacaucucacugaaca

SEQ ID NO: 1035441 - RNA, 19 nt, Homo sapiens
  misc_RNA (1)...(19): siRNA sense strand
gugaauguggcucuucuuu

SEQ ID NO: 1035442 - RNA, 19 nt, Homo sapiens
  misc_RNA (1)...(19): siRNA sense strand
gcacagacaugauggaaua

SEQ ID NO: 1035443 - RNA, 19 nt, Homo sapiens
  misc_RNA (1)...(19): siRNA sense strand
gaagaucggucugaaauug

SEQ ID NO: 1035444 - RNA, 19 nt, Homo sapiens
  misc_RNA (1)...(19): siRNA sense strand
gaagaauuaugcauacuga

SEQ ID NO: 1035445 - RNA, 19 nt, Homo sapiens
  misc_RNA (1)...(19): siRNA sense strand
gaauaaagacugagcacua

SEQ ID NO: 1035446 - RNA, 19 nt, Homo sapiens
  misc_RNA (1)...(19): siRNA sense strand
ggacaagcgucggauagua

SEQ ID NO: 1035447 - RNA, 19 nt, Homo sapiens
  misc_RNA (1)...(19): siRNA sense strand
gaaauuagagucuguggaa

SEQ ID NO: 1035448 - RNA, 19 nt, Homo sapiens
  misc_RNA (1)...(19): siRNA sense strand
gaaacagauugacauaaug

SEQ ID NO: 1035449 - RNA, 19 nt, Homo sapiens
  misc_RNA (1)...(19): siRNA sense strand
aagcagagauuaagaaguu

SEQ ID NO: 1035450 - RNA, 19 nt, Homo sapiens
  misc_RNA (1)...(19): siRNA sense strand
guaaacagcugagccaaga

SEQ ID NO: 1035451 - RNA, 19 nt, Homo sapiens
  misc_RNA (1)...(19): siRNA sense strand
gacaggaucuuuaaaccaa

SEQ ID NO: 1035452 - RNA, 19 nt, Homo sapiens
  misc_RNA (1)...(19): siRNA sense strand
ugaagaaacuacaugaaga

SEQ ID NO: 1035453 - RNA, 19 nt, Homo sapiens
  misc_RNA (1)...(19): siRNA sense strand
ucuagaaacuugcuugaaa

SEQ ID NO: 1035454 - RNA, 19 nt, Homo sapiens
  misc_RNA (1)...(19): siRNA sense strand
ggaaggcucuggcugaaca

SEQ ID NO: 1035455 - RNA, 19 nt, Homo sapiens
  misc_RNA (1)...(19): siRNA sense strand
gaagaaacuacaugaagaa

SEQ ID NO: 1035456 - RNA, 19 nt, Homo sapiens
  misc_RNA (1)...(19): siRNA sense strand
ggaagcacauaacaaugaa

SEQ ID NO: 1035457 - RNA, 19 nt, Homo sapiens
  misc_RNA (1)...(19): siRNA sense strand
ggucugaaauugagagguu

SEQ ID NO: 1035458 - RNA, 19 nt, Homo sapiens
  misc_RNA (1)...(19): siRNA sense strand
ggaauuggguuuacaugag

SEQ ID NO: 1035459 - RNA, 19 nt, Homo sapiens
  misc_RNA (1)...(19): siRNA sense strand
gaguaugaaugaccaagaa

SEQ ID NO: 1035460 - RNA, 19 nt, Homo sapiens
  misc_RNA (1)...(19): siRNA sense strand
gcgcuuggaugcccauauu

SEQ ID NO: 1035461 - RNA, 19 nt, Homo sapiens
  misc_RNA (1)...(19): siRNA sense strand
ggagauuucuacucagaug

SEQ ID NO: 1035462 - RNA, 19 nt, Homo sapiens
  misc_RNA (1)...(19): siRNA sense strand
gagaugaccauggaauaua

SEQ ID NO: 1035463 - RNA, 19 nt, Homo sapiens
  misc_RNA (1)...(19): siRNA sense strand
gaaaauccgugaacaggaa

SEQ ID NO: 1035464 - RNA, 19 nt, Homo sapiens
  misc_RNA (1)...(19): siRNA sense strand
acaaagcaguagagcauaa

SEQ ID NO: 1035465 - RNA, 19 nt, Homo sapiens
  misc_RNA (1)...(19): siRNA sense strand
ggaaaucucccaucuaacu

SEQ ID NO: 1035466 - RNA, 19 nt, Homo sapiens
  misc_RNA (1)...(19): siRNA sense strand
gaauacaaagcagagauua

SEQ ID NO: 1035467 - RNA, 19 nt, Homo sapiens
  misc_RNA (1)...(19): siRNA sense strand
uacaggagcucaugaaaca

SEQ ID NO: 1035468 - RNA, 19 nt, Homo sapiens
  misc_RNA (1)...(19): siRNA sense strand
uucaauagcuaccagauuu

SEQ ID NO: 1035469 - RNA, 19 nt, Homo sapiens
  misc_RNA (1)...(19): siRNA sense strand
uaaggagguuggaauguug

SEQ ID NO: 1035470 - RNA, 19 nt, Homo sapiens
  misc_RNA (1)...(19): siRNA sense strand
aaggagaaguuacaagaaa

SEQ ID NO: 1035471 - RNA, 19 nt, Homo sapiens
  misc_RNA (1)...(19): siRNA sense strand
ggaacuuucuagccaauca

SEQ ID NO: 1035472 - RNA, 19 nt, Homo sapiens
  misc_RNA (1)...(19): siRNA sense strand
caacaacuacagaaagauu

SEQ ID NO: 1035473 - RNA, 19 nt, Homo sapiens
  misc_RNA (1)...(19): siRNA sense strand
gaaguugaaagaacagauu

SEQ ID NO: 1035474 - RNA, 19 nt, Homo sapiens
  misc_RNA (1)...(19): siRNA sense strand
gcagguagaagaacaugaa

SEQ ID NO: 1035475 - RNA, 19 nt, Homo sapiens
  misc_RNA (1)...(19): siRNA sense strand
gauggaagcacauaacaau

SEQ ID NO: 1035476 - RNA, 19 nt, Homo sapiens
  misc_RNA (1)...(19): siRNA sense strand
gcaacuaacacucaacaug

SEQ ID NO: 1035477 - RNA, 19 nt, Homo sapiens
  misc_RNA (1)...(19): siRNA sense strand
gcaaaugagggaauucaga

SEQ ID NO: 1035478 - RNA, 19 nt, Homo sapiens
  misc_RNA (1)...(19): siRNA sense strand
cuucagcgcuagauacaaa

SEQ ID NO: 1035479 - RNA, 19 nt, Homo sapiens
  misc_RNA (1)...(19): siRNA sense strand
agaugaccauggaauauaa

SEQ ID NO: 1035480 - RNA, 19 nt, Homo sapiens
  misc_RNA (1)...(19): siRNA sense strand
gaacaaucagagauaauuc

SEQ ID NO: 1035481 - RNA, 19 nt, Homo sapiens
  misc_RNA (1)...(19): siRNA sense strand
cugaaauggugaugaaauu

SEQ ID NO: 1035482 - RNA, 19 nt, Homo sapiens
  misc_RNA (1)...(19): siRNA sense strand
auucaacacuuaagcagua

SEQ ID NO: 1035483 - RNA, 19 nt, Homo sapiens
  misc_RNA (1)...(19): siRNA sense strand
gaaugaccaagaagaguuu

SEQ ID NO: 1035484 - RNA, 19 nt, Homo sapiens
  misc_RNA (1)...(19): siRNA sense strand
gaauuaugcauacugaaga

SEQ ID NO: 1035485 - RNA, 19 nt, Homo sapiens
  misc_RNA (1)...(19): siRNA sense strand
ccaagaagaguuuauaucu

SEQ ID NO: 1035486 - RNA, 19 nt, Homo sapiens
  misc_RNA (1)...(19): siRNA sense strand
caaaaugacaggaucuuua

SEQ ID NO: 1035487 - RNA, 19 nt, Homo sapiens
  misc_RNA (1)...(19): siRNA sense strand
gcaaaaggcagaagacaaa

SEQ ID NO: 1035488 - RNA, 19 nt, Homo sapiens
  misc_RNA (1)...(19): siRNA sense strand
gaaauucaacacuuaagca

SEQ ID NO: 1035489 - RNA, 19 nt, Homo sapiens
  misc_RNA (1)...(19): siRNA sense strand
gggaagaucggucugaaau

SEQ ID NO: 1035490 - RNA, 19 nt, Homo sapiens
  misc_RNA (1)...(19): siRNA sense strand
gaaauugagagguuaacug

SEQ ID NO: 1035491 - RNA, 19 nt, Homo sapiens
  misc_RNA (1)...(19): siRNA sense strand
gaacuacaggagcucauga

SEQ ID NO: 1035492 - RNA, 19 nt, Homo sapiens
  misc_RNA (1)...(19): siRNA sense strand
gaaggaaugaagauggaaa

SEQ ID NO: 1035493 - RNA, 19 nt, Homo sapiens
  misc_RNA (1)...(19): siRNA sense strand
acauaaugguggcucauaa

SEQ ID NO: 1035494 - RNA, 19 nt, Homo sapiens
  misc_RNA (1)...(19): siRNA sense strand
agaggugacuugucuugaa

SEQ ID NO: 1035495 - RNA, 19 nt, Homo sapiens
  misc_RNA (1)...(19): siRNA sense strand
ggaguuacaucagcgagau

SEQ ID NO: 1035496 - RNA, 19 nt, Homo sapiens
  misc_RNA (1)...(19): siRNA sense strand
gacacuaucugugccaaug

SEQ ID NO: 1035497 - RNA, 19 nt, Homo sapiens
  misc_RNA (1)...(19): siRNA sense strand
cgagauaucacuauugcuu

SEQ ID NO: 1035498 - RNA, 19 nt, Homo sapiens
  misc_RNA (1)...(19): siRNA sense strand
gcacuagaaggaaugaaga

SEQ ID NO: 1035499 - RNA, 19 nt, Homo sapiens
  misc_RNA (1)...(19): siRNA sense strand
gcacauaacaaugaauaca

SEQ ID NO: 1035500 - RNA, 19 nt, Homo sapiens
  misc_RNA (1)...(19): siRNA sense strand
ggaagaucggucugaaauu

SEQ ID NO: 1035501 - RNA, 19 nt, Homo sapiens
  misc_RNA (1)...(19): siRNA sense strand
caaaacagaucuucauucu

SEQ ID NO: 1035502 - RNA, 19 nt, Homo sapiens
  misc_RNA (1)...(19): siRNA sense strand
cacaugcucuagaaacuug

SEQ ID NO: 1035503 - RNA, 19 nt, Homo sapiens
  misc_RNA (1)...(19): siRNA sense strand
gaaauggugaugaaauugg

SEQ ID NO: 1035504 - RNA, 19 nt, Homo sapiens
  misc_RNA (1)...(19): siRNA sense strand
uagaaggaaugaagaugga

SEQ ID NO: 1035505 - RNA, 19 nt, Homo sapiens
  misc_RNA (1)...(19): siRNA sense strand
cagcugagccaagaacuaa

SEQ ID NO: 1035506 - RNA, 19 nt, Homo sapiens
  misc_RNA (1)...(19): siRNA sense strand
gcagaggugacuugucuug

SEQ ID NO: 1035507 - RNA, 19 nt, Homo sapiens
  misc_RNA (1)...(19): siRNA sense strand
gagccaagaacuaauggaa

SEQ ID NO: 1035508 - RNA, 19 nt, Homo sapiens
  misc_RNA (1)...(19): siRNA sense strand
guucaagaauacagaguuc

SEQ ID NO: 1035509 - RNA, 19 nt, Homo sapiens
  misc_RNA (1)...(19): siRNA sense strand
caugaagaauuaugcauac

SEQ ID NO: 1035510 - RNA, 19 nt, Homo sapiens
  misc_RNA (1)...(19): siRNA sense strand
ucagcgagauaucacuauu

SEQ ID NO: 1035511 - RNA, 19 nt, Homo sapiens
  misc_RNA (1)...(19): siRNA sense strand
gccaagaacuaauggaaaa

SEQ ID NO: 1035512 - RNA, 19 nt, Homo sapiens
  misc_RNA (1)...(19): siRNA sense strand
caugaaacagauugacaua

SEQ ID NO: 1035513 - RNA, 19 nt, Homo sapiens
  misc_RNA (1)...(19): siRNA sense strand
ggaauuccgucagaaaucg

SEQ ID NO: 1035514 - RNA, 19 nt, Homo sapiens
  misc_RNA (1)...(19): siRNA sense strand
aauauaagcaggaguugaa

SEQ ID NO: 1035515 - RNA, 19 nt, Homo sapiens
  misc_RNA (1)...(19): siRNA sense strand
gagacaauucacagccuua

SEQ ID NO: 1035516 - RNA, 19 nt, Homo sapiens
  misc_RNA (1)...(19): siRNA sense strand
ggcagaagacaaagcagua

SEQ ID NO: 1035517 - RNA, 19 nt, Homo sapiens
  misc_RNA (1)...(19): siRNA sense strand
gaggugacuugucuugaag

SEQ ID NO: 1035518 - RNA, 19 nt, Homo sapiens
  misc_RNA (1)...(19): siRNA sense strand
gaauauaagcaggaguuga

SEQ ID NO: 1035519 - RNA, 19 nt, Homo sapiens
  misc_RNA (1)...(19): siRNA sense strand
ggaugcccauauugaagaa

SEQ ID NO: 1035520 - RNA, 19 nt, Homo sapiens
  misc_RNA (1)...(19): siRNA sense strand
ugucugagaguaugaauga

SEQ ID NO: 1035521 - RNA, 19 nt, Homo sapiens
  misc_RNA (1)...(19): siRNA sense strand
ccaggucuuugacuuccua

SEQ ID NO: 1035522 - RNA, 19 nt, Homo sapiens
  misc_RNA (1)...(19): siRNA sense strand
gacaagcgucggauaguau

SEQ ID NO: 1035523 - RNA, 19 nt, Homo sapiens
  misc_RNA (1)...(19): siRNA sense strand
cuacagaaagauuugauga

SEQ ID NO: 1035524 - RNA, 19 nt, Homo sapiens
  misc_RNA (1)...(19): siRNA sense strand
gaaggcaguuuggaaucug

SEQ ID NO: 1035525 - RNA, 19 nt, Homo sapiens
  misc_RNA (1)...(19): siRNA sense strand
uaaaggcaacuaacacuca

SEQ ID NO: 1035526 - RNA, 19 nt, Homo sapiens
  misc_RNA (1)...(19): siRNA sense strand
auaaggagguuggaauguu

SEQ ID NO: 1035527 - RNA, 19 nt, Homo sapiens
  misc_RNA (1)...(19): siRNA sense strand
gaaaagacagugagacaau

SEQ ID NO: 1035528 - RNA, 19 nt, Homo sapiens
  misc_RNA (1)...(19): siRNA sense strand
ggaaggacguacacaugcu

SEQ ID NO: 1035529 - RNA, 19 nt, Homo sapiens
  misc_RNA (1)...(19): siRNA sense strand
uggaagcacauaacaauga

SEQ ID NO: 1035530 - RNA, 19 nt, Homo sapiens
  misc_RNA (1)...(19): siRNA sense strand
gaagagaagcuaugaaaag

SEQ ID NO: 1035531 - RNA, 19 nt, Homo sapiens
  misc_RNA (1)...(19): siRNA sense strand
gcagagauuaagaaguuga

SEQ ID NO: 1035532 - RNA, 19 nt, Homo sapiens
  misc_RNA (1)...(19): siRNA sense strand
ugaccaagaagaguuuaua

SEQ ID NO: 1035533 - RNA, 19 nt, Homo sapiens
  misc_RNA (1)...(19): siRNA sense strand
gaggaauuccgucagaaau

SEQ ID NO: 1035534 - RNA, 19 nt, Homo sapiens
  misc_RNA (1)...(19): siRNA sense strand
gaccaagaagaguuuauau

SEQ ID NO: 1035535 - RNA, 19 nt, Homo sapiens
  misc_RNA (1)...(19): siRNA sense strand
gacauaaugguggcucaua

SEQ ID NO: 1035536 - RNA, 19 nt, Homo sapiens
  misc_RNA (1)...(19): siRNA sense strand
acagugugcucucccaguu

SEQ ID NO: 1035537 - RNA, 19 nt, Homo sapiens
  misc_RNA (1)...(19): siRNA sense strand
aggcagcucuucagucuca

SEQ ID NO: 1035538 - RNA, 19 nt, Homo sapiens
  misc_RNA (1)...(19): siRNA sense strand
caugaggccagaauacaaa

SEQ ID NO: 1035539 - RNA, 19 nt, Homo sapiens
  misc_RNA (1)...(19): siRNA sense strand
agacaaagcaguagagcau

SEQ ID NO: 1035540 - RNA, 19 nt, Homo sapiens
  misc_RNA (1)...(19): siRNA sense strand
acaaagcagagauuaagaa

SEQ ID NO: 1035541 - RNA, 19 nt, Homo sapiens
  misc_RNA (1)...(19): siRNA sense strand
augaagaacugaagaggau

SEQ ID NO: 1035542 - RNA, 19 nt, Homo sapiens
  misc_RNA (1)...(19): siRNA sense strand
gaaccagacucuuccaaug

SEQ ID NO: 1035543 - RNA, 19 nt, Homo sapiens
  misc_RNA (1)...(19): siRNA sense strand
ggaaucaccagcucaagaa

SEQ ID NO: 1035544 - RNA, 19 nt, Homo sapiens
  misc_RNA (1)...(19): siRNA sense strand
ggacagucuuccagcagaa

SEQ ID NO: 1035545 - RNA, 19 nt, Homo sapiens
  misc_RNA (1)...(19): siRNA sense strand
gccagggucucucagugua

SEQ ID NO: 1035546 - RNA, 19 nt, Homo sapiens
  misc_RNA (1)...(19): siRNA sense strand
caaacaggccucuccuaga

SEQ ID NO: 1035547 - RNA, 19 nt, Homo sapiens
  misc_RNA (1)...(19): siRNA sense strand
aaacugaaccagacucuuc

SEQ ID NO: 1035548 - RNA, 19 nt, Homo sapiens
  misc_RNA (1)...(19): siRNA sense strand
guacaaagucacaguccuu

SEQ ID NO: 1035549 - RNA, 19 nt, Homo sapiens
  misc_RNA (1)...(19): siRNA sense strand
ugccugagaugaagagaga

SEQ ID NO: 1035550 - RNA, 19 nt, Homo sapiens
  misc_RNA (1)...(19): siRNA sense strand
gaaaagacuucccauucca

SEQ ID NO: 1035551 - RNA, 19 nt, Homo sapiens
  misc_RNA (1)...(19): siRNA sense strand
gaaucaccagcucaagaaa

SEQ ID NO: 1035552 - RNA, 19 nt, Homo sapiens
  misc_RNA (1)...(19): siRNA sense strand
ccagaaacacacccagguu

SEQ ID NO: 1035553 - RNA, 19 nt, Homo sapiens
  misc_RNA (1)...(19): siRNA sense strand
ccaaauacgagugggaaga

SEQ ID NO: 1035554 - RNA, 19 nt, Homo sapiens
  misc_RNA (1)...(19): siRNA sense strand
cuuugacccugagaaguua

SEQ ID NO: 1035555 - RNA, 19 nt, Homo sapiens
  misc_RNA (1)...(19): siRNA sense strand
uuagggagaugccagaaac

SEQ ID NO: 1035556 - RNA, 19 nt, Homo sapiens
  misc_RNA (1)...(19): siRNA sense strand
gguuagugguacaaaguca

SEQ ID NO: 1035557 - RNA, 19 nt, Homo sapiens
  misc_RNA (1)...(19): siRNA sense strand
ccauugcugaucuggguua

SEQ ID NO: 1035558 - RNA, 19 nt, Homo sapiens
  misc_RNA (1)...(19): siRNA sense strand
gagcaggauggcagaggaa

SEQ ID NO: 1035559 - RNA, 19 nt, Homo sapiens
  misc_RNA (1)...(19): siRNA sense strand
caggauggcagaggaauca

SEQ ID NO: 1035560 - RNA, 19 nt, Homo sapiens
  misc_RNA (1)...(19): siRNA sense strand
ucuuugacccugagaaguu

SEQ ID NO: 1035561 - RNA, 19 nt, Homo sapiens
  misc_RNA (1)...(19): siRNA sense strand
agacuucccauuccagugu

SEQ ID NO: 1035562 - RNA, 19 nt, Homo sapiens
  misc_RNA (1)...(19): siRNA sense strand
caaauacgagugggaagag

SEQ ID NO: 1035563 - RNA, 19 nt, Homo sapiens
  misc_RNA (1)...(19): siRNA sense strand
acgcuugccuuugucuuug

SEQ ID NO: 1035564 - RNA, 19 nt, Homo sapiens
  misc_RNA (1)...(19): siRNA sense strand
ugaaccagacucuuccaau

SEQ ID NO: 1035565 - RNA, 19 nt, Homo sapiens
  misc_RNA (1)...(19): siRNA sense strand
guuagggagaugccagaaa

SEQ ID NO: 1035566 - RNA, 19 nt, Homo sapiens
  misc_RNA (1)...(19): siRNA sense strand
aaauacgagugggaagaga

SEQ ID NO: 1035567 - RNA, 19 nt, Homo sapiens
  misc_RNA (1)...(19): siRNA sense strand
gggagaugccagaaacaca

SEQ ID NO: 1035568 - RNA, 19 nt, Homo sapiens
  misc_RNA (1)...(19): siRNA sense strand
cagguuagugguacaaagu

SEQ ID NO: 1035569 - RNA, 19 nt, Homo sapiens
  misc_RNA (1)...(19): siRNA sense strand
ggccagggucucucagugu

SEQ ID NO: 1035570 - RNA, 19 nt, Homo sapiens
  misc_RNA (1)...(19): siRNA sense strand
guccuugugccuucagaaa

SEQ ID NO: 1035571 - RNA, 19 nt, Homo sapiens
  misc_RNA (1)...(19): siRNA sense strand
ggguuaagcuuugcaaauu

SEQ ID NO: 1035572 - RNA, 19 nt, Homo sapiens
  misc_RNA (1)...(19): siRNA sense strand
aaauuuggcuucccaggua

SEQ ID NO: 1035573 - RNA, 19 nt, Homo sapiens
  misc_RNA (1)...(19): siRNA sense strand
guaagcaaccucccacuuu

SEQ ID NO: 1035574 - RNA, 19 nt, Homo sapiens
  misc_RNA (1)...(19): siRNA sense strand
gguuaagcuuugcaaauuu

SEQ ID NO: 1035575 - RNA, 19 nt, Homo sapiens
  misc_RNA (1)...(19): siRNA sense strand
uaagcaaccucccacuuug

SEQ ID NO: 1035576 - RNA, 19 nt, Homo sapiens
  misc_RNA (1)...(19): siRNA sense strand
ggacuccucugcucaccuu

SEQ ID NO: 1035577 - RNA, 19 nt, Homo sapiens
  misc_RNA (1)...(19): siRNA sense strand
guuaagcuuugcaaauuug

SEQ ID NO: 1035578 - RNA, 19 nt, Homo sapiens
  misc_RNA (1)...(19): siRNA sense strand
gcuauacaccaacagcuua

SEQ ID NO: 1035579 - RNA, 19 nt, Homo sapiens
  misc_RNA (1)...(19): siRNA sense strand
ucaccuuaguccuugauuu

SEQ ID NO: 1035580 - RNA, 19 nt, Homo sapiens
  misc_RNA (1)...(19): siRNA sense strand
uuauucugcucccgacuua

SEQ ID NO: 1035581 - RNA, 19 nt, Homo sapiens
  misc_RNA (1)...(19): siRNA sense strand
ccacuuggcagaacugaug

SEQ ID NO: 1035582 - RNA, 19 nt, Homo sapiens
  misc_RNA (1)...(19): siRNA sense strand
gaggauuggguuaagcuuu

SEQ ID NO: 1035583 - RNA, 19 nt, Homo sapiens
  misc_RNA (1)...(19): siRNA sense strand
aggauuggguuaagcuuug

SEQ ID NO: 1035584 - RNA, 19 nt, Homo sapiens
  misc_RNA (1)...(19): siRNA sense strand
ccucccacuuugaaacuaa

SEQ ID NO: 1035585 - RNA, 19 nt, Homo sapiens
  misc_RNA (1)...(19): siRNA sense strand
accaacagcuuauucuaca

SEQ ID NO: 1035586 - RNA, 19 nt, Homo sapiens
  misc_RNA (1)...(19): siRNA sense strand
ccaacagcuuauucuacaa

SEQ ID NO: 1035587 - RNA, 19 nt, Homo sapiens
  misc_RNA (1)...(19): siRNA sense strand
cgaccccgcucacguguaa

SEQ ID NO: 1035588 - RNA, 19 nt, Homo sapiens
  misc_RNA (1)...(19): siRNA sense strand
acgcugcucugacccaaga

SEQ ID NO: 1035589 - RNA, 19 nt, Homo sapiens
  misc_RNA (1)...(19): siRNA sense strand
caacagcuuauucuacaag

SEQ ID NO: 1035590 - RNA, 19 nt, Homo sapiens
  misc_RNA (1)...(19): siRNA sense strand
ccaagacgcgggagagaag

SEQ ID NO: 1035591 - RNA, 19 nt, Homo sapiens
  misc_RNA (1)...(19): siRNA sense strand
cgaggaggauuggguuaag

SEQ ID NO: 1035592 - RNA, 19 nt, Homo sapiens
  misc_RNA (1)...(19): siRNA sense strand
caccuuaguccuugauuuc

SEQ ID NO: 1035593 - RNA, 19 nt, Homo sapiens
  misc_RNA (1)...(19): siRNA sense strand
gcaaccucccacuuugaaa

SEQ ID NO: 1035594 - RNA, 19 nt, Homo sapiens
  misc_RNA (1)...(19): siRNA sense strand
gcacccacuuggcagaacu

SEQ ID NO: 1035595 - RNA, 19 nt, Homo sapiens
  misc_RNA (1)...(19): siRNA sense strand
acaccaacagcuuauucua

SEQ ID NO: 1035596 - RNA, 19 nt, Homo sapiens
  misc_RNA (1)...(19): siRNA sense strand
cuuaguccuugauuucgaa

SEQ ID NO: 1035597 - RNA, 19 nt, Homo sapiens
  misc_RNA (1)...(19): siRNA sense strand
aagcaaccucccacuuuga

SEQ ID NO: 1035598 - RNA, 19 nt, Homo sapiens
  misc_RNA (1)...(19): siRNA sense strand
caaccucccacuuugaaac

SEQ ID NO: 1035599 - RNA, 19 nt, Homo sapiens
  misc_RNA (1)...(19): siRNA sense strand
gcucagaucuguccucuua

SEQ ID NO: 1035600 - RNA, 19 nt, Homo sapiens
  misc_RNA (1)...(19): siRNA sense strand
ggacacagaauaaagucua

SEQ ID NO: 1035601 - RNA, 19 nt, Homo sapiens
  misc_RNA (1)...(19): siRNA sense strand
gaucuguccucuuauccaa

SEQ ID NO: 1035602 - RNA, 19 nt, Homo sapiens
  misc_RNA (1)...(19): siRNA sense strand
cuauuaaucuucucaguca

SEQ ID NO: 1035603 - RNA, 19 nt, Homo sapiens
  misc_RNA (1)...(19): siRNA sense strand
aaaccuagaccuauaaguu

SEQ ID NO: 1035604 - RNA, 19 nt, Homo sapiens
  misc_RNA (1)...(19): siRNA sense strand
gcugauucaugcauuucua

SEQ ID NO: 1035605 - RNA, 19 nt, Homo sapiens
  misc_RNA (1)...(19): siRNA sense strand
auacaucucucucuugcuu

SEQ ID NO: 1035606 - RNA, 19 nt, Homo sapiens
  misc_RNA (1)...(19): siRNA sense strand
gaauaaagucuagcuucuu

SEQ ID NO: 1035607 - RNA, 19 nt, Homo sapiens
  misc_RNA (1)...(19): siRNA sense strand
ucaauauucuccuaaaugc

SEQ ID NO: 1035608 - RNA, 19 nt, Homo sapiens
  misc_RNA (1)...(19): siRNA sense strand
caauccagcucuucacagu

SEQ ID NO: 1035609 - RNA, 19 nt, Homo sapiens
  misc_RNA (1)...(19): siRNA sense strand
ucagaucuguccucuuauc

SEQ ID NO: 1035610 - RNA, 19 nt, Homo sapiens
  misc_RNA (1)...(19): siRNA sense strand
acaaauuccucacucaucu

SEQ ID NO: 1035611 - RNA, 19 nt, Homo sapiens
  misc_RNA (1)...(19): siRNA sense strand
cuacacuucuggcaucaug

SEQ ID NO: 1035612 - RNA, 19 nt, Homo sapiens
  misc_RNA (1)...(19): siRNA sense strand
accuagaccuauaaguuua

SEQ ID NO: 1035613 - RNA, 19 nt, Homo sapiens
  misc_RNA (1)...(19): siRNA sense strand
ccuaguggacacagaauaa

SEQ ID NO: 1035614 - RNA, 19 nt, Homo sapiens
  misc_RNA (1)...(19): siRNA sense strand
acaucucucucuugcuuaa

SEQ ID NO: 1035615 - RNA, 19 nt, Homo sapiens
  misc_RNA (1)...(19): siRNA sense strand
aaccuagaccuauaaguuu

SEQ ID NO: 1035616 - RNA, 19 nt, Homo sapiens
  misc_RNA (1)...(19): siRNA sense strand
uauccaagcuuuuccaaga

SEQ ID NO: 1035617 - RNA, 19 nt, Homo sapiens
  misc_RNA (1)...(19): siRNA sense strand
uuuaguaccugaaucucuu

SEQ ID NO: 1035618 - RNA, 19 nt, Homo sapiens
  misc_RNA (1)...(19): siRNA sense strand
ucuccuaaaugcuguggaa

SEQ ID NO: 1035619 - RNA, 19 nt, Homo sapiens
  misc_RNA (1)...(19): siRNA sense strand
ccucaguuauucccuagug

SEQ ID NO: 1035620 - RNA, 19 nt, Homo sapiens
  misc_RNA (1)...(19): siRNA sense strand
gacacagaauaaagucuag

SEQ ID NO: 1035621 - RNA, 19 nt, Homo sapiens
  misc_RNA (1)...(19): siRNA sense strand
uugcagaagcucccaguuu

SEQ ID NO: 1035622 - RNA, 19 nt, Homo sapiens
  misc_RNA (1)...(19): siRNA sense strand
ugucuaugcaggauucuaa

SEQ ID NO: 1035623 - RNA, 19 nt, Homo sapiens
  misc_RNA (1)...(19): siRNA sense strand
uaaguuuaguaccugaauc

SEQ ID NO: 1035624 - RNA, 19 nt, Homo sapiens
  misc_RNA (1)...(19): siRNA sense strand
ucuccuagcuacacuucug

SEQ ID NO: 1035625 - RNA, 19 nt, Homo sapiens
  misc_RNA (1)...(19): siRNA sense strand
ugcagaagcucccaguuuu

SEQ ID NO: 1035626 - RNA, 19 nt, Homo sapiens
  misc_RNA (1)...(19): siRNA sense strand
uauauacaucucucucuug

SEQ ID NO: 1035627 - RNA, 19 nt, Homo sapiens
  misc_RNA (1)...(19): siRNA sense strand
ucagauguuuagcucagau

SEQ ID NO: 1035628 - RNA, 19 nt, Homo sapiens
  misc_RNA (1)...(19): siRNA sense strand
cauguuacacccuacaauc

SEQ ID NO: 1035629 - RNA, 19 nt, Homo sapiens
  misc_RNA (1)...(19): siRNA sense strand
uggaaccucugucuaugca

SEQ ID NO: 1035630 - RNA, 19 nt, Homo sapiens
  misc_RNA (1)...(19): siRNA sense strand
ccucacucaucuugcagaa

SEQ ID NO: 1035631 - RNA, 19 nt, Homo sapiens
  misc_RNA (1)...(19): siRNA sense strand
ccacaaauuccucacucau

SEQ ID NO: 1035632 - RNA, 19 nt, Homo sapiens
  misc_RNA (1)...(19): siRNA sense strand
uccaagagucuccuagcua

SEQ ID NO: 1035633 - RNA, 19 nt, Homo sapiens
  misc_RNA (1)...(19): siRNA sense strand
gcucccaguuuucaauauu

SEQ ID NO: 1035634 - RNA, 19 nt, Homo sapiens
  misc_RNA (1)...(19): siRNA sense strand
caaauuccucacucaucuu

SEQ ID NO: 1035635 - RNA, 19 nt, Homo sapiens
  misc_RNA (1)...(19): siRNA sense strand
uguggaaccucugucuaug

SEQ ID NO: 1035636 - RNA, 19 nt, Homo sapiens
  misc_RNA (1)...(19): siRNA sense strand
cuucucagucagauguuua

SEQ ID NO: 1035637 - RNA, 19 nt, Homo sapiens
  misc_RNA (1)...(19): siRNA sense strand
cuucuggcaucauguuaca

SEQ ID NO: 1035638 - RNA, 19 nt, Homo sapiens
  misc_RNA (1)...(19): siRNA sense strand
gaaaccuagaccuauaagu

SEQ ID NO: 1035639 - RNA, 19 nt, Homo sapiens
  misc_RNA (1)...(19): siRNA sense strand
guccucuuauccaagcuuu

SEQ ID NO: 1035640 - RNA, 19 nt, Homo sapiens
  misc_RNA (1)...(19): siRNA sense strand
gcuguggaaccucugucua

SEQ ID NO: 1035641 - RNA, 19 nt, Homo sapiens
  misc_RNA (1)...(19): siRNA sense strand
cacaaauuccucacucauc

SEQ ID NO: 1035642 - RNA, 19 nt, Homo sapiens
  misc_RNA (1)...(19): siRNA sense strand
ggaauugccuuugucauuu

SEQ ID NO: 1035643 - RNA, 19 nt, Homo sapiens
  misc_RNA (1)...(19): siRNA sense strand
ggacucaguucuuuguguu

SEQ ID NO: 1035644 - RNA, 19 nt, Homo sapiens
  misc_RNA (1)...(19): siRNA sense strand
gcugguggcugcgguuaua

SEQ ID NO: 1035645 - RNA, 19 nt, Homo sapiens
  misc_RNA (1)...(19): siRNA sense strand
gggaauugccuuugucauu

SEQ ID NO: 1035646 - RNA, 19 nt, Homo sapiens
  misc_RNA (1)...(19): siRNA sense strand
guccauagguucuaauucu

SEQ ID NO: 1035647 - RNA, 19 nt, Homo sapiens
  misc_RNA (1)...(19): siRNA sense strand
agugacugcuggcaaguua

SEQ ID NO: 1035648 - RNA, 19 nt, Homo sapiens
  misc_RNA (1)...(19): siRNA sense strand
gguuaccuccuaaaucuaa

SEQ ID NO: 1035649 - RNA, 19 nt, Homo sapiens
  misc_RNA (1)...(19): siRNA sense strand
uuacagaaacugcugcaaa

SEQ ID NO: 1035650 - RNA, 19 nt, Homo sapiens
  misc_RNA (1)...(19): siRNA sense strand
gaauugccuuugucauuuu

SEQ ID NO: 1035651 - RNA, 19 nt, Homo sapiens
  misc_RNA (1)...(19): siRNA sense strand
ccacuaguguuacagaaac

SEQ ID NO: 1035652 - RNA, 19 nt, Homo sapiens
  misc_RNA (1)...(19): siRNA sense strand
gaccaaaaguccauagguu

SEQ ID NO: 1035653 - RNA, 19 nt, Homo sapiens
  misc_RNA (1)...(19): siRNA sense strand
gcagcuaucauaagggaau

SEQ ID NO: 1035654 - RNA, 19 nt, Homo sapiens
  misc_RNA (1)...(19): siRNA sense strand
ccgcaggccuuucuuucug

SEQ ID NO: 1035655 - RNA, 19 nt, Homo sapiens
  misc_RNA (1)...(19): siRNA sense strand
uacagaaacugcugcaaac

SEQ ID NO: 1035656 - RNA, 19 nt, Homo sapiens
  misc_RNA (1)...(19): siRNA sense strand
ccacccagaggcucaguuu

SEQ ID NO: 1035657 - RNA, 19 nt, Homo sapiens
  misc_RNA (1)...(19): siRNA sense strand
uuaagaaccuagggaaucu

SEQ ID NO: 1035658 - RNA, 19 nt, Homo sapiens
  misc_RNA (1)...(19): siRNA sense strand
cauauccacuaguguuaca

SEQ ID NO: 1035659 - RNA, 19 nt, Homo sapiens
  misc_RNA (1)...(19): siRNA sense strand
gaaccuagggaaucuccau

SEQ ID NO: 1035660 - RNA, 19 nt, Homo sapiens
  misc_RNA (1)...(19): siRNA sense strand
uccauagguucuaauucua

SEQ ID NO: 1035661 - RNA, 19 nt, Homo sapiens
  misc_RNA (1)...(19): siRNA sense strand
uccgaggacucaguucuuu

SEQ ID NO: 1035662 - RNA, 19 nt, Homo sapiens
  misc_RNA (1)...(19): siRNA sense strand
aauucuagcugugacacua

SEQ ID NO: 1035663 - RNA, 19 nt, Homo sapiens
  misc_RNA (1)...(19): siRNA sense strand
gggguuaccuccuaaaucu

SEQ ID NO: 1035664 - RNA, 19 nt, Homo sapiens
  misc_RNA (1)...(19): siRNA sense strand
cgaggacucaguucuuugu

SEQ ID NO: 1035665 - RNA, 19 nt, Homo sapiens
  misc_RNA (1)...(19): siRNA sense strand
cuccucagcagcuaucaua

SEQ ID NO: 1035666 - RNA, 19 nt, Homo sapiens
  misc_RNA (1)...(19): siRNA sense strand
ccaccgcaggccuuucuuu

SEQ ID NO: 1035667 - RNA, 19 nt, Homo sapiens
  misc_RNA (1)...(19): siRNA sense strand
auccucaacucgugaagaa

SEQ ID NO: 1035668 - RNA, 19 nt, Homo sapiens
  misc_RNA (1)...(19): siRNA sense strand
guucuaauucuagcuguga

SEQ ID NO: 1035669 - RNA, 19 nt, Homo sapiens
  misc_RNA (1)...(19): siRNA sense strand
cagcuaucauaagggaauu

SEQ ID NO: 1035670 - RNA, 19 nt, Homo sapiens
  misc_RNA (1)...(19): siRNA sense strand
uuucauauccacuaguguu

SEQ ID NO: 1035671 - RNA, 19 nt, Homo sapiens
  misc_RNA (1)...(19): siRNA sense strand
acacggccaccaucaccua

SEQ ID NO: 1035672 - RNA, 19 nt, Homo sapiens
  misc_RNA (1)...(19): siRNA sense strand
ccauagguucuaauucuag

SEQ ID NO: 1035673 - RNA, 19 nt, Homo sapiens
  misc_RNA (1)...(19): siRNA sense strand
ccucaacucgugaagaaag

SEQ ID NO: 1035674 - RNA, 19 nt, Homo sapiens
  misc_RNA (1)...(19): siRNA sense strand
aaaaguccauagguucuaa

SEQ ID NO: 1035675 - RNA, 19 nt, Homo sapiens
  misc_RNA (1)...(19): siRNA sense strand
cagaaacugcugcaaacca

SEQ ID NO: 1035676 - RNA, 19 nt, Homo sapiens
  misc_RNA (1)...(19): siRNA sense strand
ccuguaaguuuaagaaccu

SEQ ID NO: 1035677 - RNA, 19 nt, Homo sapiens
  misc_RNA (1)...(19): siRNA sense strand
ggccugagcuggagaguug

SEQ ID NO: 1035678 - RNA, 19 nt, Homo sapiens
  misc_RNA (1)...(19): siRNA sense strand
gcacucagcucaaauacac

SEQ ID NO: 1035679 - RNA, 19 nt, Homo sapiens
  misc_RNA (1)...(19): siRNA sense strand
ggacaggaaucugaauuuc

SEQ ID NO: 1035680 - RNA, 19 nt, Homo sapiens
  misc_RNA (1)...(19): siRNA sense strand
acacacaccuguugccauu

SEQ ID NO: 1035681 - RNA, 19 nt, Homo sapiens
  misc_RNA (1)...(19): siRNA sense strand
gaucacaucugaccaagcu

SEQ ID NO: 1035682 - RNA, 19 nt, Homo sapiens
  misc_RNA (1)...(19): siRNA sense strand
ggaauuaggcaaauaugga

SEQ ID NO: 1035683 - RNA, 19 nt, Homo sapiens
  misc_RNA (1)...(19): siRNA sense strand
ggaagagccacaagacaaa

SEQ ID NO: 1035684 - RNA, 19 nt, Homo sapiens
  misc_RNA (1)...(19): siRNA sense strand
gaauuucuguguuuggaau

SEQ ID NO: 1035685 - RNA, 19 nt, Homo sapiens
  misc_RNA (1)...(19): siRNA sense strand
ggucaaagucaaccaaauu

SEQ ID NO: 1035686 - RNA, 19 nt, Homo sapiens
  misc_RNA (1)...(19): siRNA sense strand
caaauacacacaccuguug

SEQ ID NO: 1035687 - RNA, 19 nt, Homo sapiens
  misc_RNA (1)...(19): siRNA sense strand
ucaaccagcuggaggcauu

SEQ ID NO: 1035688 - RNA, 19 nt, Homo sapiens
  misc_RNA (1)...(19): siRNA sense strand
ucaaggcacucagcucaaa

SEQ ID NO: 1035689 - RNA, 19 nt, Homo sapiens
  misc_RNA (1)...(19): siRNA sense strand
gaaucugaauuucuguguu

SEQ ID NO: 1035690 - RNA, 19 nt, Homo sapiens
  misc_RNA (1)...(19): siRNA sense strand
cauuauagagcuggaauua

SEQ ID NO: 1035691 - RNA, 19 nt, Homo sapiens
  misc_RNA (1)...(19): siRNA sense strand
gcaaauauggacaggaauc

SEQ ID NO: 1035692 - RNA, 19 nt, Homo sapiens
  misc_RNA (1)...(19): siRNA sense strand
acaggaaucugaauuucug

SEQ ID NO: 1035693 - RNA, 19 nt, Homo sapiens
  misc_RNA (1)...(19): siRNA sense strand
uuauagagcuggaauuagg

SEQ ID NO: 1035694 - RNA, 19 nt, Homo sapiens
  misc_RNA (1)...(19): siRNA sense strand
aggcaaauauggacaggaa

SEQ ID NO: 1035695 - RNA, 19 nt, Homo sapiens
  misc_RNA (1)...(19): siRNA sense strand
gagaguugauggcaagucu

SEQ ID NO: 1035696 - RNA, 19 nt, Homo sapiens
  misc_RNA (1)...(19): siRNA sense strand
gagcuggaauuaggcaaau

SEQ ID NO: 1035697 - RNA, 19 nt, Homo sapiens
  misc_RNA (1)...(19): siRNA sense strand
acacaccuguugccauuau

SEQ ID NO: 1035698 - RNA, 19 nt, Homo sapiens
  misc_RNA (1)...(19): siRNA sense strand
aaggugggaucacaucuga

SEQ ID NO: 1035699 - RNA, 19 nt, Homo sapiens
  misc_RNA (1)...(19): siRNA sense strand
aaagucaaccaaauucuga

SEQ ID NO: 1035700 - RNA, 19 nt, Homo sapiens
  misc_RNA (1)...(19): siRNA sense strand
cugcagacauggauuucaa

SEQ ID NO: 1035701 - RNA, 19 nt, Homo sapiens
  misc_RNA (1)...(19): siRNA sense strand
ugucagagguagaagaaag

SEQ ID NO: 1035702 - RNA, 19 nt, Homo sapiens
  misc_RNA (1)...(19): siRNA sense strand
gaagacgcugucagaggua

SEQ ID NO: 1035703 - RNA, 19 nt, Homo sapiens
  misc_RNA (1)...(19): siRNA sense strand
gauggcaagucucagucaa

SEQ ID NO: 1035704 - RNA, 19 nt, Homo sapiens
  misc_RNA (1)...(19): siRNA sense strand
ucaaauacacacaccuguu

SEQ ID NO: 1035705 - RNA, 19 nt, Homo sapiens
  misc_RNA (1)...(19): siRNA sense strand
caaagucaaccaaauucug

SEQ ID NO: 1035706 - RNA, 19 nt, Homo sapiens
  misc_RNA (1)...(19): siRNA sense strand
cuacggagccagcuauauc

SEQ ID NO: 1035707 - RNA, 19 nt, Homo sapiens
  misc_RNA (1)...(19): siRNA sense strand
uggaagagccacaagacaa

SEQ ID NO: 1035708 - RNA, 19 nt, Homo sapiens
  misc_RNA (1)...(19): siRNA sense strand
gcugucagagguagaagaa

SEQ ID NO: 1035709 - RNA, 19 nt, Homo sapiens
  misc_RNA (1)...(19): siRNA sense strand
gcuggaauuaggcaaauau

SEQ ID NO: 1035710 - RNA, 19 nt, Homo sapiens
  misc_RNA (1)...(19): siRNA sense strand
ggaaucugaauuucugugu

SEQ ID NO: 1035711 - RNA, 19 nt, Homo sapiens
  misc_RNA (1)...(19): siRNA sense strand
ugagcgggcugcugaaugc

SEQ ID NO: 1035712 - RNA, 19 nt, Homo sapiens
  misc_RNA (1)...(19): siRNA sense strand
aagcugcugucauuuccaa

SEQ ID NO: 1035713 - RNA, 19 nt, Homo sapiens
  misc_RNA (1)...(19): siRNA sense strand
aaagcaaggugggaucaca

SEQ ID NO: 1035714 - RNA, 19 nt, Homo sapiens
  misc_RNA (1)...(19): siRNA sense strand
gaggucaaagucaaccaaa

SEQ ID NO: 1035715 - RNA, 19 nt, Homo sapiens
  misc_RNA (1)...(19): siRNA sense strand
aauauggacaggaaucuga

SEQ ID NO: 1035716 - RNA, 19 nt, Homo sapiens
  misc_RNA (1)...(19): siRNA sense strand
ucaaccaaauucugaagac

SEQ ID NO: 1035717 - RNA, 19 nt, Homo sapiens
  misc_RNA (1)...(19): siRNA sense strand
uggacaggaaucugaauuu

SEQ ID NO: 1035718 - RNA, 19 nt, Homo sapiens
  misc_RNA (1)...(19): siRNA sense strand
gagguagaagaaaguauca

SEQ ID NO: 1035719 - RNA, 19 nt, Homo sapiens
  misc_RNA (1)...(19): siRNA sense strand
gacaggaaucugaauuucu

SEQ ID NO: 1035720 - RNA, 19 nt, Homo sapiens
  misc_RNA (1)...(19): siRNA sense strand
gaguugauggcaagucuca

SEQ ID NO: 1035721 - RNA, 19 nt, Homo sapiens
  misc_RNA (1)...(19): siRNA sense strand
ccaagcugcugucauuucc

SEQ ID NO: 1035722 - RNA, 19 nt, Homo sapiens
  misc_RNA (1)...(19): siRNA sense strand
gucaaagucaaccaaauuc

SEQ ID NO: 1035723 - RNA, 19 nt, Homo sapiens
  misc_RNA (1)...(19): siRNA sense strand
gggauucuuaagucuauug

SEQ ID NO: 1035724 - RNA, 19 nt, Homo sapiens
  misc_RNA (1)...(19): siRNA sense strand
aaggcacucagcucaaaua

SEQ ID NO: 1035725 - RNA, 19 nt, Homo sapiens
  misc_RNA (1)...(19): siRNA sense strand
cacaccuguugccauuaua

SEQ ID NO: 1035726 - RNA, 19 nt, Homo sapiens
  misc_RNA (1)...(19): siRNA sense strand
caucacagaggagcugcua

SEQ ID NO: 1035727 - RNA, 19 nt, Homo sapiens
  misc_RNA (1)...(19): siRNA sense strand
gaccaagcugcugucauuu

SEQ ID NO: 1035728 - RNA, 19 nt, Homo sapiens
  misc_RNA (1)...(19): siRNA sense strand
ccagcuggaggcauucuug

SEQ ID NO: 1035729 - RNA, 19 nt, Homo sapiens
  misc_RNA (1)...(19): siRNA sense strand
ucagagguagaagaaagua

SEQ ID NO: 1035730 - RNA, 19 nt, Homo sapiens
  misc_RNA (1)...(19): siRNA sense strand
caaggugggaucacaucug

SEQ ID NO: 1035731 - RNA, 19 nt, Homo sapiens
  misc_RNA (1)...(19): siRNA sense strand
cugaauuucuguguuugga

SEQ ID NO: 1035732 - RNA, 19 nt, Homo sapiens
  misc_RNA (1)...(19): siRNA sense strand
gaacagacaccugguauua

SEQ ID NO: 1035733 - RNA, 19 nt, Homo sapiens
  misc_RNA (1)...(19): siRNA sense strand
gauaggaacucuuuauugu

SEQ ID NO: 1035734 - RNA, 19 nt, Homo sapiens
  misc_RNA (1)...(19): siRNA sense strand
gaaagaauacagucacaua

SEQ ID NO: 1035735 - RNA, 19 nt, Homo sapiens
  misc_RNA (1)...(19): siRNA sense strand
gaaauacauuccuguguug

SEQ ID NO: 1035736 - RNA, 19 nt, Homo sapiens
  misc_RNA (1)...(19): siRNA sense strand
gaagaaagaaugcauguug

SEQ ID NO: 1035737 - RNA, 19 nt, Homo sapiens
  misc_RNA (1)...(19): siRNA sense strand
gaaaagaucuuccgcaaau

SEQ ID NO: 1035738 - RNA, 19 nt, Homo sapiens
  misc_RNA (1)...(19): siRNA sense strand
gcauaucgcugagauuauu

SEQ ID NO: 1035739 - RNA, 19 nt, Homo sapiens
  misc_RNA (1)...(19): siRNA sense strand
ucaagaauguguccaguuu

SEQ ID NO: 1035740 - RNA, 19 nt, Homo sapiens
  misc_RNA (1)...(19): siRNA sense strand
gaaugucagugcuauugua

SEQ ID NO: 1035741 - RNA, 19 nt, Homo sapiens
  misc_RNA (1)...(19): siRNA sense strand
gagauuauaggauggaaua

SEQ ID NO: 1035742 - RNA, 19 nt, Homo sapiens
  misc_RNA (1)...(19): siRNA sense strand
gcaaaucuguggaauucug

SEQ ID NO: 1035743 - RNA, 19 nt, Homo sapiens
  misc_RNA (1)...(19): siRNA sense strand
gaauguggcucauguucug

SEQ ID NO: 1035744 - RNA, 19 nt, Homo sapiens
  misc_RNA (1)...(19): siRNA sense strand
agaauacagucacauauga

SEQ ID NO: 1035745 - RNA, 19 nt, Homo sapiens
  misc_RNA (1)...(19): siRNA sense strand
agaaauacauuccuguguu

SEQ ID NO: 1035746 - RNA, 19 nt, Homo sapiens
  misc_RNA (1)...(19): siRNA sense strand
uaaggcagcuauagaauac

SEQ ID NO: 1035747 - RNA, 19 nt, Homo sapiens
  misc_RNA (1)...(19): siRNA sense strand
caaagaagccauugguuuc

SEQ ID NO: 1035748 - RNA, 19 nt, Homo sapiens
  misc_RNA (1)...(19): siRNA sense strand
ccagacagcuccugaagag

SEQ ID NO: 1035749 - RNA, 19 nt, Homo sapiens
  misc_RNA (1)...(19): siRNA sense strand
gaaugcauguuggaaagaa

SEQ ID NO: 1035750 - RNA, 19 nt, Homo sapiens
  misc_RNA (1)...(19): siRNA sense strand
caauagagaugaugaagcu

SEQ ID NO: 1035751 - RNA, 19 nt, Homo sapiens
  misc_RNA (1)...(19): siRNA sense strand
ccgcaaaucuguggaauuc

SEQ ID NO: 1035752 - RNA, 19 nt, Homo sapiens
  misc_RNA (1)...(19): siRNA sense strand
uaccaucucugcauuguga

SEQ ID NO: 1035753 - RNA, 19 nt, Homo sapiens
  misc_RNA (1)...(19): siRNA sense strand
gaaaacaugucaaaacaca

SEQ ID NO: 1035754 - RNA, 19 nt, Homo sapiens
  misc_RNA (1)...(19): siRNA sense strand
gcuauagaauaccaacuga

SEQ ID NO: 1035755 - RNA, 19 nt, Homo sapiens
  misc_RNA (1)...(19): siRNA sense strand
cagaggaguugaugaggaa

SEQ ID NO: 1035756 - RNA, 19 nt, Homo sapiens
  misc_RNA (1)...(19): siRNA sense strand
acagacaccugguauuaug

SEQ ID NO: 1035757 - RNA, 19 nt, Homo sapiens
  misc_RNA (1)...(19): siRNA sense strand
acaaagaagccauugguuu

SEQ ID NO: 1035758 - RNA, 19 nt, Homo sapiens
  misc_RNA (1)...(19): siRNA sense strand
caaccuggcuuuggccuau

SEQ ID NO: 1035759 - RNA, 19 nt, Homo sapiens
  misc_RNA (1)...(19): siRNA sense strand
augaaaccauggagaaaua

SEQ ID NO: 1035760 - RNA, 19 nt, Homo sapiens
  misc_RNA (1)...(19): siRNA sense strand
gaaugaauaugaugaaacc

SEQ ID NO: 1035761 - RNA, 19 nt, Homo sapiens
  misc_RNA (1)...(19): siRNA sense strand
gcagauguccuggcagaaa

SEQ ID NO: 1035762 - RNA, 19 nt, Homo sapiens
  misc_RNA (1)...(19): siRNA sense strand
gaaagaaugcauguuggaa

SEQ ID NO: 1035763 - RNA, 19 nt, Homo sapiens
  misc_RNA (1)...(19): siRNA sense strand
cuuggaaccuuacaacaaa

SEQ ID NO: 1035764 - RNA, 19 nt, Homo sapiens
  misc_RNA (1)...(19): siRNA sense strand
gugauaguguuauucaaga

SEQ ID NO: 1035765 - RNA, 19 nt, Homo sapiens
  misc_RNA (1)...(19): siRNA sense strand
aagcauaucgcugagauua

SEQ ID NO: 1035766 - RNA, 19 nt, Homo sapiens
  misc_RNA (1)...(19): siRNA sense strand
uagagcagcugccgaguag

SEQ ID NO: 1035767 - RNA, 19 nt, Homo sapiens
  misc_RNA (1)...(19): siRNA sense strand
caugauguguggaaguuga

SEQ ID NO: 1035768 - RNA, 19 nt, Homo sapiens
  misc_RNA (1)...(19): siRNA sense strand
gcaagcugcuaucaaguac

SEQ ID NO: 1035769 - RNA, 19 nt, Homo sapiens
  misc_RNA (1)...(19): siRNA sense strand
gcaagacacaauagagaug

SEQ ID NO: 1035770 - RNA, 19 nt, Homo sapiens
  misc_RNA (1)...(19): siRNA sense strand
gucaagaagcauuaugaua

SEQ ID NO: 1035771 - RNA, 19 nt, Homo sapiens
  misc_RNA (1)...(19): siRNA sense strand
ggaauucuguaacgaccau

SEQ ID NO: 1035772 - RNA, 19 nt, Homo sapiens
  misc_RNA (1)...(19): siRNA sense strand
aaaaggcagugaaugaaua

SEQ ID NO: 1035773 - RNA, 19 nt, Homo sapiens
  misc_RNA (1)...(19): siRNA sense strand
gcauugauguucgcagugu

SEQ ID NO: 1035774 - RNA, 19 nt, Homo sapiens
  misc_RNA (1)...(19): siRNA sense strand
uuugguauuucucgaguua

SEQ ID NO: 1035775 - RNA, 19 nt, Homo sapiens
  misc_RNA (1)...(19): siRNA sense strand
ggaagcaagacacaauaga

SEQ ID NO: 1035776 - RNA, 19 nt, Homo sapiens
  misc_RNA (1)...(19): siRNA sense strand
uagaauaccaacugagaaa

SEQ ID NO: 1035777 - RNA, 19 nt, Homo sapiens
  misc_RNA (1)...(19): siRNA sense strand
guagagcagcugccgagua

SEQ ID NO: 1035778 - RNA, 19 nt, Homo sapiens
  misc_RNA (1)...(19): siRNA sense strand
uuaaggcagcuauagaaua

SEQ ID NO: 1035779 - RNA, 19 nt, Homo sapiens
  misc_RNA (1)...(19): siRNA sense strand
cuagaacacugugaacuuc

SEQ ID NO: 1035780 - RNA, 19 nt, Homo sapiens
  misc_RNA (1)...(19): siRNA sense strand
caaauacaaagaagccauu

SEQ ID NO: 1035781 - RNA, 19 nt, Homo sapiens
  misc_RNA (1)...(19): siRNA sense strand
caagaagcccucacugaca

SEQ ID NO: 1035782 - RNA, 19 nt, Homo sapiens
  misc_RNA (1)...(19): siRNA sense strand
gaagcaagacacaauagag

SEQ ID NO: 1035783 - RNA, 19 nt, Homo sapiens
  misc_RNA (1)...(19): siRNA sense strand
gaacuucauggcagaaaca

SEQ ID NO: 1035784 - RNA, 19 nt, Homo sapiens
  misc_RNA (1)...(19): siRNA sense strand
ugaagaagcagaggaguug

SEQ ID NO: 1035785 - RNA, 19 nt, Homo sapiens
  misc_RNA (1)...(19): siRNA sense strand
cacccuaucucuaugacuu

SEQ ID NO: 1035786 - RNA, 19 nt, Homo sapiens
  misc_RNA (1)...(19): siRNA sense strand
gaauguguccaguuucuag

SEQ ID NO: 1035787 - RNA, 19 nt, Homo sapiens
  misc_RNA (1)...(19): siRNA sense strand
ggaacagacaccugguauu

SEQ ID NO: 1035788 - RNA, 19 nt, Homo sapiens
  misc_RNA (1)...(19): siRNA sense strand
gagaaauacauuccugugu

SEQ ID NO: 1035789 - RNA, 19 nt, Homo sapiens
  misc_RNA (1)...(19): siRNA sense strand
ugaagcauaucgcugagau

SEQ ID NO: 1035790 - RNA, 19 nt, Homo sapiens
  misc_RNA (1)...(19): siRNA sense strand
ucaaaagcuuggaaccuua

SEQ ID NO: 1035791 - RNA, 19 nt, Homo sapiens
  misc_RNA (1)...(19): siRNA sense strand
ugauaggaacucuuuauug

SEQ ID NO: 1035792 - RNA, 19 nt, Homo sapiens
  misc_RNA (1)...(19): siRNA sense strand
ggugauaggaacucuuuau

SEQ ID NO: 1035793 - RNA, 19 nt, Homo sapiens
  misc_RNA (1)...(19): siRNA sense strand
gaugaaaccauggagaaau

SEQ ID NO: 1035794 - RNA, 19 nt, Homo sapiens
  misc_RNA (1)...(19): siRNA sense strand
ccacugagggcauugaugu

SEQ ID NO: 1035795 - RNA, 19 nt, Homo sapiens
  misc_RNA (1)...(19): siRNA sense strand
ccucacacccuaucucuau

SEQ ID NO: 1035796 - RNA, 19 nt, Homo sapiens
  misc_RNA (1)...(19): siRNA sense strand
aaagaaugcauguuggaaa

SEQ ID NO: 1035797 - RNA, 19 nt, Homo sapiens
  misc_RNA (1)...(19): siRNA sense strand
ggaagaagaaagaaugcau

SEQ ID NO: 1035798 - RNA, 19 nt, Homo sapiens
  misc_RNA (1)...(19): siRNA sense strand
gaugcuuccuguccuuguu

SEQ ID NO: 1035799 - RNA, 19 nt, Homo sapiens
  misc_RNA (1)...(19): siRNA sense strand
ggaaauuaugacuuuggua

SEQ ID NO: 1035800 - RNA, 19 nt, Homo sapiens
  misc_RNA (1)...(19): siRNA sense strand
uaugauaacauccugaaug

SEQ ID NO: 1035801 - RNA, 19 nt, Homo sapiens
  misc_RNA (1)...(19): siRNA sense strand
uauagaauaccaacugaga

SEQ ID NO: 1035802 - RNA, 19 nt, Homo sapiens
  misc_RNA (1)...(19): siRNA sense strand
cauaccugcuguuauugaa

SEQ ID NO: 1035803 - RNA, 19 nt, Homo sapiens
  misc_RNA (1)...(19): siRNA sense strand
caccugguauuaugccaaa

SEQ ID NO: 1035804 - RNA, 19 nt, Homo sapiens
  misc_RNA (1)...(19): siRNA sense strand
gcuuggaaccuuacaacaa

SEQ ID NO: 1035805 - RNA, 19 nt, Homo sapiens
  misc_RNA (1)...(19): siRNA sense strand
cauugugaauuuggugaua

SEQ ID NO: 1035806 - RNA, 19 nt, Homo sapiens
  misc_RNA (1)...(19): siRNA sense strand
gcagcucucuuaugaugac

SEQ ID NO: 1035807 - RNA, 19 nt, Homo sapiens
  misc_RNA (1)...(19): siRNA sense strand
aauaccaacugagaaacua

SEQ ID NO: 1035808 - RNA, 19 nt, Homo sapiens
  misc_RNA (1)...(19): siRNA sense strand
caggaagcaagacacaaua

SEQ ID NO: 1035809 - RNA, 19 nt, Homo sapiens
  misc_RNA (1)...(19): siRNA sense strand
aaagaugcuuccuguccuu

SEQ ID NO: 1035810 - RNA, 19 nt, Homo sapiens
  misc_RNA (1)...(19): siRNA sense strand
ccaaaggaaauuaugacuu

SEQ ID NO: 1035811 - RNA, 19 nt, Homo sapiens
  misc_RNA (1)...(19): siRNA sense strand
ggcagugaaugaauaugau

SEQ ID NO: 1035812 - RNA, 19 nt, Homo sapiens
  misc_RNA (1)...(19): siRNA sense strand
ccugcaagcugcuaucaag

SEQ ID NO: 1035813 - RNA, 19 nt, Homo sapiens
  misc_RNA (1)...(19): siRNA sense strand
aagaaugcauguuggaaag

SEQ ID NO: 1035814 - RNA, 19 nt, Homo sapiens
  misc_RNA (1)...(19): siRNA sense strand
gugauaggaacucuuuauu

SEQ ID NO: 1035815 - RNA, 19 nt, Homo sapiens
  misc_RNA (1)...(19): siRNA sense strand
ugaggaagauugaaaagga

SEQ ID NO: 1035816 - RNA, 19 nt, Homo sapiens
  misc_RNA (1)...(19): siRNA sense strand
caagacacaauagagauga

SEQ ID NO: 1035817 - RNA, 19 nt, Homo sapiens
  misc_RNA (1)...(19): siRNA sense strand
ccauagucaagaagcauua

SEQ ID NO: 1035818 - RNA, 19 nt, Homo sapiens
  misc_RNA (1)...(19): siRNA sense strand
gaaguugaauguggcucau

SEQ ID NO: 1035819 - RNA, 19 nt, Homo sapiens
  misc_RNA (1)...(19): siRNA sense strand
aagaagcccucacugacau

SEQ ID NO: 1035820 - RNA, 19 nt, Homo sapiens
  misc_RNA (1)...(19): siRNA sense strand
ugagaccgauggccagauc

SEQ ID NO: 1035821 - RNA, 19 nt, Homo sapiens
  misc_RNA (1)...(19): siRNA sense strand
gggaacagacaccugguau

SEQ ID NO: 1035822 - RNA, 19 nt, Homo sapiens
  misc_RNA (1)...(19): siRNA sense strand
gaguugaugaggaagauug

SEQ ID NO: 1035823 - RNA, 19 nt, Homo sapiens
  misc_RNA (1)...(19): siRNA sense strand
uaaucucuguguuuccuau

SEQ ID NO: 1035824 - RNA, 19 nt, Homo sapiens
  misc_RNA (1)...(19): siRNA sense strand
cuacacaaccaggcacuaa

SEQ ID NO: 1035825 - RNA, 19 nt, Homo sapiens
  misc_RNA (1)...(19): siRNA sense strand
gaagaguuggacccuguga

SEQ ID NO: 1035826 - RNA, 19 nt, Homo sapiens
  misc_RNA (1)...(19): siRNA sense strand
uggcuaaucucuguguuuc

SEQ ID NO: 1035827 - RNA, 19 nt, Homo sapiens
  misc_RNA (1)...(19): siRNA sense strand
gaauaccaacugagaaacu

SEQ ID NO: 1035828 - RNA, 19 nt, Homo sapiens
  misc_RNA (1)...(19): siRNA sense strand
ucucuguguuuccuauauu

SEQ ID NO: 1035829 - RNA, 19 nt, Homo sapiens
  misc_RNA (1)...(19): siRNA sense strand
gcagugaaugaauaugaug

SEQ ID NO: 1035830 - RNA, 19 nt, Homo sapiens
  misc_RNA (1)...(19): siRNA sense strand
guacaggaagcaagacaca

SEQ ID NO: 1035831 - RNA, 19 nt, Homo sapiens
  misc_RNA (1)...(19): siRNA sense strand
aagaauacagucacauaug

SEQ ID NO: 1035832 - RNA, 19 nt, Homo sapiens
  misc_RNA (1)...(19): siRNA sense strand
gcagagagcgugagaaguu

SEQ ID NO: 1035833 - RNA, 19 nt, Homo sapiens
  misc_RNA (1)...(19): siRNA sense strand
gcaagggguuuguauauau

SEQ ID NO: 1035834 - RNA, 19 nt, Homo sapiens
  misc_RNA (1)...(19): siRNA sense strand
gaaacuaccuacccaucag

SEQ ID NO: 1035835 - RNA, 19 nt, Homo sapiens
  misc_RNA (1)...(19): siRNA sense strand
gcccaucuauuucaagugu

SEQ ID NO: 1035836 - RNA, 19 nt, Homo sapiens
  misc_RNA (1)...(19): siRNA sense strand
auucaucacuccagaagaa

SEQ ID NO: 1035837 - RNA, 19 nt, Homo sapiens
  misc_RNA (1)...(19): siRNA sense strand
cuauccagcccaucuauuu

SEQ ID NO: 1035838 - RNA, 19 nt, Homo sapiens
  misc_RNA (1)...(19): siRNA sense strand
gaaguucugcagauguaug

SEQ ID NO: 1035839 - RNA, 19 nt, Homo sapiens
  misc_RNA (1)...(19): siRNA sense strand
guauauauucacagaguug

SEQ ID NO: 1035840 - RNA, 19 nt, Homo sapiens
  misc_RNA (1)...(19): siRNA sense strand
caagggguuuguauauauu

SEQ ID NO: 1035841 - RNA, 19 nt, Homo sapiens
  misc_RNA (1)...(19): siRNA sense strand
cagcccaucuauuucaagu

SEQ ID NO: 1035842 - RNA, 19 nt, Homo sapiens
  misc_RNA (1)...(19): siRNA sense strand
cagagagcgugagaaguuc

SEQ ID NO: 1035843 - RNA, 19 nt, Homo sapiens
  misc_RNA (1)...(19): siRNA sense strand
gggcgcuucucuuuauuuu

SEQ ID NO: 1035844 - RNA, 19 nt, Homo sapiens
  misc_RNA (1)...(19): siRNA sense strand
ggguuuguauauauucaca

SEQ ID NO: 1035845 - RNA, 19 nt, Homo sapiens
  misc_RNA (1)...(19): siRNA sense strand
ccaucuauuucaaguguac

SEQ ID NO: 1035846 - RNA, 19 nt, Homo sapiens
  misc_RNA (1)...(19): siRNA sense strand
guauccaucaccaucguuu

SEQ ID NO: 1035847 - RNA, 19 nt, Homo sapiens
  misc_RNA (1)...(19): siRNA sense strand
gcuauccagcccaucuauu

SEQ ID NO: 1035848 - RNA, 19 nt, Homo sapiens
  misc_RNA (1)...(19): siRNA sense strand
agaaacuaccuacccauca

SEQ ID NO: 1035849 - RNA, 19 nt, Homo sapiens
  misc_RNA (1)...(19): siRNA sense strand
cgacuccgacuccucuuca

SEQ ID NO: 1035850 - RNA, 19 nt, Homo sapiens
  misc_RNA (1)...(19): siRNA sense strand
acagucacgucgcagaagu

SEQ ID NO: 1035851 - RNA, 19 nt, Homo sapiens
  misc_RNA (1)...(19): siRNA sense strand
aagcagagagcgugagaag

SEQ ID NO: 1035852 - RNA, 19 nt, Homo sapiens
  misc_RNA (1)...(19): siRNA sense strand
gaacagagacgccaguuua

SEQ ID NO: 1035853 - RNA, 19 nt, Homo sapiens
  misc_RNA (1)...(19): siRNA sense strand
gcagagcucucagaagaua

SEQ ID NO: 1035854 - RNA, 19 nt, Homo sapiens
  misc_RNA (1)...(19): siRNA sense strand
gaucugaguuaccaaauau

SEQ ID NO: 1035855 - RNA, 19 nt, Homo sapiens
  misc_RNA (1)...(19): siRNA sense strand
gaacugguuuaaauccuaa

SEQ ID NO: 1035856 - RNA, 19 nt, Homo sapiens
  misc_RNA (1)...(19): siRNA sense strand
cauaagcguuguauuguaa

SEQ ID NO: 1035857 - RNA, 19 nt, Homo sapiens
  misc_RNA (1)...(19): siRNA sense strand
gaaagcaauucagcaguuu

SEQ ID NO: 1035858 - RNA, 19 nt, Homo sapiens
  misc_RNA (1)...(19): siRNA sense strand
ggaacugguuuaaauccua

SEQ ID NO: 1035859 - RNA, 19 nt, Homo sapiens
  misc_RNA (1)...(19): siRNA sense strand
caacaguacucggucuaua

SEQ ID NO: 1035860 - RNA, 19 nt, Homo sapiens
  misc_RNA (1)...(19): siRNA sense strand
uaacauaaaugcagcuaca

SEQ ID NO: 1035861 - RNA, 19 nt, Homo sapiens
  misc_RNA (1)...(19): siRNA sense strand
caaaguauggcaagaaauu

SEQ ID NO: 1035862 - RNA, 19 nt, Homo sapiens
  misc_RNA (1)...(19): siRNA sense strand
gcagguagcaucuaaagga

SEQ ID NO: 1035863 - RNA, 19 nt, Homo sapiens
  misc_RNA (1)...(19): siRNA sense strand
guauaucacuuuccaguca

SEQ ID NO: 1035864 - RNA, 19 nt, Homo sapiens
  misc_RNA (1)...(19): siRNA sense strand
aaagugagaccaagucaua

SEQ ID NO: 1035865 - RNA, 19 nt, Homo sapiens
  misc_RNA (1)...(19): siRNA sense strand
gaaauugcuccuggaaaua

SEQ ID NO: 1035866 - RNA, 19 nt, Homo sapiens
  misc_RNA (1)...(19): siRNA sense strand
gaucaguucaucccaauuu

SEQ ID NO: 1035867 - RNA, 19 nt, Homo sapiens
  misc_RNA (1)...(19): siRNA sense strand
gaaugguuaucgauuaaug

SEQ ID NO: 1035868 - RNA, 19 nt, Homo sapiens
  misc_RNA (1)...(19): siRNA sense strand
gagcaaacuuaccuucaga

SEQ ID NO: 1035869 - RNA, 19 nt, Homo sapiens
  misc_RNA (1)...(19): siRNA sense strand
gagaauaggaugucugaug

SEQ ID NO: 1035870 - RNA, 19 nt, Homo sapiens
  misc_RNA (1)...(19): siRNA sense strand
uagaggaagugaaagguuu

SEQ ID NO: 1035871 - RNA, 19 nt, Homo sapiens
  misc_RNA (1)...(19): siRNA sense strand
uuaaaggugucuacaaaga

SEQ ID NO: 1035872 - RNA, 19 nt, Homo sapiens
  misc_RNA (1)...(19): siRNA sense strand
agaaauugcuccuggaaau

SEQ ID NO: 1035873 - RNA, 19 nt, Homo sapiens
  misc_RNA (1)...(19): siRNA sense strand
gguuaucgauuaauggauu

SEQ ID NO: 1035874 - RNA, 19 nt, Homo sapiens
  misc_RNA (1)...(19): siRNA sense strand
gugauaagcugugaguuug

SEQ ID NO: 1035875 - RNA, 19 nt, Homo sapiens
  misc_RNA (1)...(19): siRNA sense strand
gaaaccacaagaaauacua

SEQ ID NO: 1035876 - RNA, 19 nt, Homo sapiens
  misc_RNA (1)...(19): siRNA sense strand
aaaggugucuacaaagaaa

SEQ ID NO: 1035877 - RNA, 19 nt, Homo sapiens
  misc_RNA (1)...(19): siRNA sense strand
aagaaugucugaagaaaca

SEQ ID NO: 1035878 - RNA, 19 nt, Homo sapiens
  misc_RNA (1)...(19): siRNA sense strand
gaaagcucuuggcaugaaa

SEQ ID NO: 1035879 - RNA, 19 nt, Homo sapiens
  misc_RNA (1)...(19): siRNA sense strand
aauagcaacugguauauca

SEQ ID NO: 1035880 - RNA, 19 nt, Homo sapiens
  misc_RNA (1)...(19): siRNA sense strand
ucauaagcguuguauugua

SEQ ID NO: 1035881 - RNA, 19 nt, Homo sapiens
  misc_RNA (1)...(19): siRNA sense strand
uacagacccugaucuaauu

SEQ ID NO: 1035882 - RNA, 19 nt, Homo sapiens
  misc_RNA (1)...(19): siRNA sense strand
gaagaucugaguuaccaaa

SEQ ID NO: 1035883 - RNA, 19 nt, Homo sapiens
  misc_RNA (1)...(19): siRNA sense strand
ugaaagcucuuggcaugaa

SEQ ID NO: 1035884 - RNA, 19 nt, Homo sapiens
  misc_RNA (1)...(19): siRNA sense strand
gcuucaccauguaauaaua

SEQ ID NO: 1035885 - RNA, 19 nt, Homo sapiens
  misc_RNA (1)...(19): siRNA sense strand
ucagaaggauggucucaau

SEQ ID NO: 1035886 - RNA, 19 nt, Homo sapiens
  misc_RNA (1)...(19): siRNA sense strand
cugcugagcuuacugcauu

SEQ ID NO: 1035887 - RNA, 19 nt, Homo sapiens
  misc_RNA (1)...(19): siRNA sense strand
agaaagcaauucagcaguu

SEQ ID NO: 1035888 - RNA, 19 nt, Homo sapiens
  misc_RNA (1)...(19): siRNA sense strand
ccaaauauaugauguuucc

SEQ ID NO: 1035889 - RNA, 19 nt, Homo sapiens
  misc_RNA (1)...(19): siRNA sense strand
uguuaaaggugucuacaaa

SEQ ID NO: 1035890 - RNA, 19 nt, Homo sapiens
  misc_RNA (1)...(19): siRNA sense strand
caagggcuaguaaggauua

SEQ ID NO: 1035891 - RNA, 19 nt, Homo sapiens
  misc_RNA (1)...(19): siRNA sense strand
caauggagcuccugagaac

SEQ ID NO: 1035892 - RNA, 19 nt, Homo sapiens
  misc_RNA (1)...(19): siRNA sense strand
gcaagaaaaggaucuaaua

SEQ ID NO: 1035893 - RNA, 19 nt, Homo sapiens
  misc_RNA (1)...(19): siRNA sense strand
agaauaggaugucugaugu

SEQ ID NO: 1035894 - RNA, 19 nt, Homo sapiens
  misc_RNA (1)...(19): siRNA sense strand
gaugucugauguuguuaaa

SEQ ID NO: 1035895 - RNA, 19 nt, Homo sapiens
  misc_RNA (1)...(19): siRNA sense strand
uaggaugucugauguuguu

SEQ ID NO: 1035896 - RNA, 19 nt, Homo sapiens
  misc_RNA (1)...(19): siRNA sense strand
gaagaguugacaauuaguu

SEQ ID NO: 1035897 - RNA, 19 nt, Homo sapiens
  misc_RNA (1)...(19): siRNA sense strand
aauagaagauuccucuguu

SEQ ID NO: 1035898 - RNA, 19 nt, Homo sapiens
  misc_RNA (1)...(19): siRNA sense strand
augcagagcucucagaaga

SEQ ID NO: 1035899 - RNA, 19 nt, Homo sapiens
  misc_RNA (1)...(19): siRNA sense strand
aaacaaaugcugcugcuau

SEQ ID NO: 1035900 - RNA, 19 nt, Homo sapiens
  misc_RNA (1)...(19): siRNA sense strand
caacugguauaucacuuuc

SEQ ID NO: 1035901 - RNA, 19 nt, Homo sapiens
  misc_RNA (1)...(19): siRNA sense strand
cacaauagcaacugguaua

SEQ ID NO: 1035902 - RNA, 19 nt, Homo sapiens
  misc_RNA (1)...(19): siRNA sense strand
ggaaguucaucaagaaugc

SEQ ID NO: 1035903 - RNA, 19 nt, Homo sapiens
  misc_RNA (1)...(19): siRNA sense strand
gcaacugguauaucacuuu

SEQ ID NO: 1035904 - RNA, 19 nt, Homo sapiens
  misc_RNA (1)...(19): siRNA sense strand
ggacaguugaacagauaua

SEQ ID NO: 1035905 - RNA, 19 nt, Homo sapiens
  misc_RNA (1)...(19): siRNA sense strand
ugagaacuccguugagaaa

SEQ ID NO: 1035906 - RNA, 19 nt, Homo sapiens
  misc_RNA (1)...(19): siRNA sense strand
gaagacgacgagaagauga

SEQ ID NO: 1035907 - RNA, 19 nt, Homo sapiens
  misc_RNA (1)...(19): siRNA sense strand
ggagcaaacuuaccuucag

SEQ ID NO: 1035908 - RNA, 19 nt, Homo sapiens
  misc_RNA (1)...(19): siRNA sense strand
ccuggaaguucaucaagaa

SEQ ID NO: 1035909 - RNA, 19 nt, Homo sapiens
  misc_RNA (1)...(19): siRNA sense strand
gaaauacuacaggcauuga

SEQ ID NO: 1035910 - RNA, 19 nt, Homo sapiens
  misc_RNA (1)...(19): siRNA sense strand
cuacaggcauugaagaauc

SEQ ID NO: 1035911 - RNA, 19 nt, Homo sapiens
  misc_RNA (1)...(19): siRNA sense strand
gaucuuuacuugauaucuc

SEQ ID NO: 1035912 - RNA, 19 nt, Homo sapiens
  misc_RNA (1)...(19): siRNA sense strand
ccacccagaucaccaaagu

SEQ ID NO: 1035913 - RNA, 19 nt, Homo sapiens
  misc_RNA (1)...(19): siRNA sense strand
aagcacaacucagcaagaa

SEQ ID NO: 1035914 - RNA, 19 nt, Homo sapiens
  misc_RNA (1)...(19): siRNA sense strand
cagaugagcagacagaaug

SEQ ID NO: 1035915 - RNA, 19 nt, Homo sapiens
  misc_RNA (1)...(19): siRNA sense strand
ggcaucaggagcaaacuua

SEQ ID NO: 1035916 - RNA, 19 nt, Homo sapiens
  misc_RNA (1)...(19): siRNA sense strand
caaaugcugcugcuaugaa

SEQ ID NO: 1035917 - RNA, 19 nt, Homo sapiens
  misc_RNA (1)...(19): siRNA sense strand
cuccaaauccuacaccuua

SEQ ID NO: 1035918 - RNA, 19 nt, Homo sapiens
  misc_RNA (1)...(19): siRNA sense strand
ccaaagugauaagcuguga

SEQ ID NO: 1035919 - RNA, 19 nt, Homo sapiens
  misc_RNA (1)...(19): siRNA sense strand
agaucugaguuaccaaaua

SEQ ID NO: 1035920 - RNA, 19 nt, Homo sapiens
  misc_RNA (1)...(19): siRNA sense strand
aaaggauaaugaagaguug

SEQ ID NO: 1035921 - RNA, 19 nt, Homo sapiens
  misc_RNA (1)...(19): siRNA sense strand
caaaggcuccaacaccaaa

SEQ ID NO: 1035922 - RNA, 19 nt, Homo sapiens
  misc_RNA (1)...(19): siRNA sense strand
gcaagccaauuaugguaag

SEQ ID NO: 1035923 - RNA, 19 nt, Homo sapiens
  misc_RNA (1)...(19): siRNA sense strand
cuacagacccugaucuaau

SEQ ID NO: 1035924 - RNA, 19 nt, Homo sapiens
  misc_RNA (1)...(19): siRNA sense strand
gguacaaguugaugagaag

SEQ ID NO: 1035925 - RNA, 19 nt, Homo sapiens
  misc_RNA (1)...(19): siRNA sense strand
gcccagcaacucaauauga

SEQ ID NO: 1035926 - RNA, 19 nt, Homo sapiens
  misc_RNA (1)...(19): siRNA sense strand
gauggacaguugaacagau

SEQ ID NO: 1035927 - RNA, 19 nt, Homo sapiens
  misc_RNA (1)...(19): siRNA sense strand
ggaagugaaagguuuguuc

SEQ ID NO: 1035928 - RNA, 19 nt, Homo sapiens
  misc_RNA (1)...(19): siRNA sense strand
uuagagagauuccugaaac

SEQ ID NO: 1035929 - RNA, 19 nt, Homo sapiens
  misc_RNA (1)...(19): siRNA sense strand
caacaccaauagaggaagu

SEQ ID NO: 1035930 - RNA, 19 nt, Homo sapiens
  misc_RNA (1)...(19): siRNA sense strand
guaauggcaaagagcaaua

SEQ ID NO: 1035931 - RNA, 19 nt, Homo sapiens
  misc_RNA (1)...(19): siRNA sense strand
uuaauucgccaggaucuua

SEQ ID NO: 1035932 - RNA, 19 nt, Homo sapiens
  misc_RNA (1)...(19): siRNA sense strand
gggcaagccaauuauggua

SEQ ID NO: 1035933 - RNA, 19 nt, Homo sapiens
  misc_RNA (1)...(19): siRNA sense strand
uggagcagguagcaucuaa

SEQ ID NO: 1035934 - RNA, 19 nt, Homo sapiens
  misc_RNA (1)...(19): siRNA sense strand
agacgccaguuuagccaua

SEQ ID NO: 1035935 - RNA, 19 nt, Homo sapiens
  misc_RNA (1)...(19): siRNA sense strand
guuaaguuaugcugaagug

SEQ ID NO: 1035936 - RNA, 19 nt, Homo sapiens
  misc_RNA (1)...(19): siRNA sense strand
gaaggauggucucaaucag

SEQ ID NO: 1035937 - RNA, 19 nt, Homo sapiens
  misc_RNA (1)...(19): siRNA sense strand
gaaaacugccccaaaguga

SEQ ID NO: 1035938 - RNA, 19 nt, Homo sapiens
  misc_RNA (1)...(19): siRNA sense strand
ugagaagggugagaaagug

SEQ ID NO: 1035939 - RNA, 19 nt, Homo sapiens
  misc_RNA (1)...(19): siRNA sense strand
agucauaagcguuguauug

SEQ ID NO: 1035940 - RNA, 19 nt, Homo sapiens
  misc_RNA (1)...(19): siRNA sense strand
ggaacagagacgccaguuu

SEQ ID NO: 1035941 - RNA, 19 nt, Homo sapiens
  misc_RNA (1)...(19): siRNA sense strand
ccugagaacuccguugaga

SEQ ID NO: 1035942 - RNA, 19 nt, Homo sapiens
  misc_RNA (1)...(19): siRNA sense strand
gcucucagaagauauaugu

SEQ ID NO: 1035943 - RNA, 19 nt, Homo sapiens
  misc_RNA (1)...(19): siRNA sense strand
uuucagggcaagccaauua

SEQ ID NO: 1035944 - RNA, 19 nt, Homo sapiens
  misc_RNA (1)...(19): siRNA sense strand
agacacagaugcacaacag

SEQ ID NO: 1035945 - RNA, 19 nt, Homo sapiens
  misc_RNA (1)...(19): siRNA sense strand
gauaagcugugaguuugca

SEQ ID NO: 1035946 - RNA, 19 nt, Homo sapiens
  misc_RNA (1)...(19): siRNA sense strand
cagguagcaucuaaaggaa

SEQ ID NO: 1035947 - RNA, 19 nt, Homo sapiens
  misc_RNA (1)...(19): siRNA sense strand
gcacaacucagcaagaaaa

SEQ ID NO: 1035948 - RNA, 19 nt, Homo sapiens
  misc_RNA (1)...(19): siRNA sense strand
uaaaggugucuacaaagaa

SEQ ID NO: 1035949 - RNA, 19 nt, Homo sapiens
  misc_RNA (1)...(19): siRNA sense strand
aauaggaugucugauguug

SEQ ID NO: 1035950 - RNA, 19 nt, Homo sapiens
  misc_RNA (1)...(19): siRNA sense strand
uauauaauccucaccaaca

SEQ ID NO: 1035951 - RNA, 19 nt, Homo sapiens
  misc_RNA (1)...(19): siRNA sense strand
caagaaauugcuccuggaa

SEQ ID NO: 1035952 - RNA, 19 nt, Homo sapiens
  misc_RNA (1)...(19): siRNA sense strand
ggagguauaucuuggguua

SEQ ID NO: 1035953 - RNA, 19 nt, Homo sapiens
  misc_RNA (1)...(19): siRNA sense strand
ccaaacauguaucucaaua

SEQ ID NO: 1035954 - RNA, 19 nt, Homo sapiens
  misc_RNA (1)...(19): siRNA sense strand
uaaauaguguggccaauga

SEQ ID NO: 1035955 - RNA, 19 nt, Homo sapiens
  misc_RNA (1)...(19): siRNA sense strand
caacaacuauucaccaaau

SEQ ID NO: 1035956 - RNA, 19 nt, Homo sapiens
  misc_RNA (1)...(19): siRNA sense strand
aaacagagaugcaggauac

SEQ ID NO: 1035957 - RNA, 19 nt, Homo sapiens
  misc_RNA (1)...(19): siRNA sense strand
ugaaagugaucaagaaaga

SEQ ID NO: 1035958 - RNA, 19 nt, Homo sapiens
  misc_RNA (1)...(19): siRNA sense strand
guaaagaggugcaaaagaa

SEQ ID NO: 1035959 - RNA, 19 nt, Homo sapiens
  misc_RNA (1)...(19): siRNA sense strand
caaaagaagucuaccaaaa

SEQ ID NO: 1035960 - RNA, 19 nt, Homo sapiens
  misc_RNA (1)...(19): siRNA sense strand
aagagaagcugaagauaau

SEQ ID NO: 1035961 - RNA, 19 nt, Homo sapiens
  misc_RNA (1)...(19): siRNA sense strand
aaagagaagcugaagauaa

SEQ ID NO: 1035962 - RNA, 19 nt, Homo sapiens
  misc_RNA (1)...(19): siRNA sense strand
ggauuacuaugaaguucua

SEQ ID NO: 1035963 - RNA, 19 nt, Homo sapiens
  misc_RNA (1)...(19): siRNA sense strand
cuacauaucuguuacaacu

SEQ ID NO: 1035964 - RNA, 19 nt, Homo sapiens
  misc_RNA (1)...(19): siRNA sense strand
gaacacagucauucaacaa

SEQ ID NO: 1035965 - RNA, 19 nt, Homo sapiens
  misc_RNA (1)...(19): siRNA sense strand
gaaagagaagcugaagaua

SEQ ID NO: 1035966 - RNA, 19 nt, Homo sapiens
  misc_RNA (1)...(19): siRNA sense strand
aaacgggacauuuaugaua

SEQ ID NO: 1035967 - RNA, 19 nt, Homo sapiens
  misc_RNA (1)...(19): siRNA sense strand
ugauaaauauggcacagaa

SEQ ID NO: 1035968 - RNA, 19 nt, Homo sapiens
  misc_RNA (1)...(19): siRNA sense strand
ucucacagcuccaaacaug

SEQ ID NO: 1035969 - RNA, 19 nt, Homo sapiens
  misc_RNA (1)...(19): siRNA sense strand
uuaaauggcacccugauaa

SEQ ID NO: 1035970 - RNA, 19 nt, Homo sapiens
  misc_RNA (1)...(19): siRNA sense strand
gccagugaauauccaauuu

SEQ ID NO: 1035971 - RNA, 19 nt, Homo sapiens
  misc_RNA (1)...(19): siRNA sense strand
uaaagaagaagcagagaga

SEQ ID NO: 1035972 - RNA, 19 nt, Homo sapiens
  misc_RNA (1)...(19): siRNA sense strand
gaaacagagaugcaggaua

SEQ ID NO: 1035973 - RNA, 19 nt, Homo sapiens
  misc_RNA (1)...(19): siRNA sense strand
gaugagaaacgggacauuu

SEQ ID NO: 1035974 - RNA, 19 nt, Homo sapiens
  misc_RNA (1)...(19): siRNA sense strand
gaaugcagcuggagaacac

SEQ ID NO: 1035975 - RNA, 19 nt, Homo sapiens
  misc_RNA (1)...(19): siRNA sense strand
ggaaacagaaacagagaug

SEQ ID NO: 1035976 - RNA, 19 nt, Homo sapiens
  misc_RNA (1)...(19): siRNA sense strand
gacaacuacauaucuguua

SEQ ID NO: 1035977 - RNA, 19 nt, Homo sapiens
  misc_RNA (1)...(19): siRNA sense strand
ucacagcuccaaacaugua

SEQ ID NO: 1035978 - RNA, 19 nt, Homo sapiens
  misc_RNA (1)...(19): siRNA sense strand
uaaauggcacccugauaaa

SEQ ID NO: 1035979 - RNA, 19 nt, Homo sapiens
  misc_RNA (1)...(19): siRNA sense strand
ggagaacacagucauucaa

SEQ ID NO: 1035980 - RNA, 19 nt, Homo sapiens
  misc_RNA (1)...(19): siRNA sense strand
ugaagauaauggagaguug

SEQ ID NO: 1035981 - RNA, 19 nt, Homo sapiens
  misc_RNA (1)...(19): siRNA sense strand
agaaguagcugaggcauac

SEQ ID NO: 1035982 - RNA, 19 nt, Homo sapiens
  misc_RNA (1)...(19): siRNA sense strand
ggacaacuacauaucuguu

SEQ ID NO: 1035983 - RNA, 19 nt, Homo sapiens
  misc_RNA (1)...(19): siRNA sense strand
uguuacaacuucagacaaa

SEQ ID NO: 1035984 - RNA, 19 nt, Homo sapiens
  misc_RNA (1)...(19): siRNA sense strand
gaaguucuaggacugcaaa

SEQ ID NO: 1035985 - RNA, 19 nt, Homo sapiens
  misc_RNA (1)...(19): siRNA sense strand
aaacggagguggaagucau

SEQ ID NO: 1035986 - RNA, 19 nt, Homo sapiens
  misc_RNA (1)...(19): siRNA sense strand
gaagauaauggagaguuga

SEQ ID NO: 1035987 - RNA, 19 nt, Homo sapiens
  misc_RNA (1)...(19): siRNA sense strand
uaucuuggguuaccagcaa

SEQ ID NO: 1035988 - RNA, 19 nt, Homo sapiens
  misc_RNA (1)...(19): siRNA sense strand
uacgagguauuaucaaaug

SEQ ID NO: 1035989 - RNA, 19 nt, Homo sapiens
  misc_RNA (1)...(19): siRNA sense strand
agaaagagaagcugaagau

SEQ ID NO: 1035990 - RNA, 19 nt, Homo sapiens
  misc_RNA (1)...(19): siRNA sense strand
gaaacgggacauuuaugau

SEQ ID NO: 1035991 - RNA, 19 nt, Homo sapiens
  misc_RNA (1)...(19): siRNA sense strand
gagaaacgggacauuuaug

SEQ ID NO: 1035992 - RNA, 19 nt, Homo sapiens
  misc_RNA (1)...(19): siRNA sense strand
cacagucauucaacaacua

SEQ ID NO: 1035993 - RNA, 19 nt, Homo sapiens
  misc_RNA (1)...(19): siRNA sense strand
agaaacgggacauuuauga

SEQ ID NO: 1035994 - RNA, 19 nt, Homo sapiens
  misc_RNA (1)...(19): siRNA sense strand
acauaucuguuacaacuuc

SEQ ID NO: 1035995 - RNA, 19 nt, Homo sapiens
  misc_RNA (1)...(19): siRNA sense strand
cagagaugcaggauacuuu

SEQ ID NO: 1035996 - RNA, 19 nt, Homo sapiens
  misc_RNA (1)...(19): siRNA sense strand
ugagaaacgggacauuuau

SEQ ID NO: 1035997 - RNA, 19 nt, Homo sapiens
  misc_RNA (1)...(19): siRNA sense strand
auacuuucguggacaauga

SEQ ID NO: 1035998 - RNA, 19 nt, Homo sapiens
  misc_RNA (1)...(19): siRNA sense strand
gagagaaaauucaaagaag

SEQ ID NO: 1035999 - RNA, 19 nt, Homo sapiens
  misc_RNA (1)...(19): siRNA sense strand
guaaauaguguggccaaug

SEQ ID NO: 1036000 - RNA, 19 nt, Homo sapiens
  misc_RNA (1)...(19): siRNA sense strand
ggacugcaaagauaugcuu

SEQ ID NO: 1036001 - RNA, 19 nt, Homo sapiens
  misc_RNA (1)...(19): siRNA sense strand
gcuccaaacauguaucuca

SEQ ID NO: 1036002 - RNA, 19 nt, Homo sapiens
  misc_RNA (1)...(19): siRNA sense strand
gaugagggagguauaucuu

SEQ ID NO: 1036003 - RNA, 19 nt, Homo sapiens
  misc_RNA (1)...(19): siRNA sense strand
augagaaacgggacauuua

SEQ ID NO: 1036004 - RNA, 19 nt, Homo sapiens
  misc_RNA (1)...(19): siRNA sense strand
cuucauaugauacaggaua

SEQ ID NO: 1036005 - RNA, 19 nt, Homo sapiens
  misc_RNA (1)...(19): siRNA sense strand
aaagugaucaagaaagaga

SEQ ID NO: 1036006 - RNA, 19 nt, Homo sapiens
  misc_RNA (1)...(19): siRNA sense strand
aagaagaagcagagagaaa

SEQ ID NO: 1036007 - RNA, 19 nt, Homo sapiens
  misc_RNA (1)...(19): siRNA sense strand
aaagaaugcagcuggagaa

SEQ ID NO: 1036008 - RNA, 19 nt, Homo sapiens
  misc_RNA (1)...(19): siRNA sense strand
ggauuaaacggagguggaa

SEQ ID NO: 1036009 - RNA, 19 nt, Homo sapiens
  misc_RNA (1)...(19): siRNA sense strand
uucuaggacugcaaagaua

SEQ ID NO: 1036010 - RNA, 19 nt, Homo sapiens
  misc_RNA (1)...(19): siRNA sense strand
gauggacaacuacauaucu

SEQ ID NO: 1036011 - RNA, 19 nt, Homo sapiens
  misc_RNA (1)...(19): siRNA sense strand
ggaagcuccuauggaaaca

SEQ ID NO: 1036012 - RNA, 19 nt, Homo sapiens
  misc_RNA (1)...(19): siRNA sense strand
ucaugaaagggauccauuu

SEQ ID NO: 1036013 - RNA, 19 nt, Homo sapiens
  misc_RNA (1)...(19): siRNA sense strand
ggccuuacuucuuucucuu

SEQ ID NO: 1036014 - RNA, 19 nt, Homo sapiens
  misc_RNA (1)...(19): siRNA sense strand
uaaauauggcacagaagga

SEQ ID NO: 1036015 - RNA, 19 nt, Homo sapiens
  misc_RNA (1)...(19): siRNA sense strand
gggauggacaacuacauau

SEQ ID NO: 1036016 - RNA, 19 nt, Homo sapiens
  misc_RNA (1)...(19): siRNA sense strand
uugaggaccuguuaaaucg

SEQ ID NO: 1036017 - RNA, 19 nt, Homo sapiens
  misc_RNA (1)...(19): siRNA sense strand
gaguacggcuucacauucc

SEQ ID NO: 1036018 - RNA, 19 nt, Homo sapiens
  misc_RNA (1)...(19): siRNA sense strand
ugaguacggcuucacauuc

SEQ ID NO: 1036019 - RNA, 19 nt, Homo sapiens
  misc_RNA (1)...(19): siRNA sense strand
caacuauucaccaaauucu

SEQ ID NO: 1036020 - RNA, 19 nt, Homo sapiens
  misc_RNA (1)...(19): siRNA sense strand
agaacacagucauucaaca

SEQ ID NO: 1036021 - RNA, 19 nt, Homo sapiens
  misc_RNA (1)...(19): siRNA sense strand
gagaagcugaagauaaugg

SEQ ID NO: 1036022 - RNA, 19 nt, Homo sapiens
  misc_RNA (1)...(19): siRNA sense strand
guucuaggacugcaaagau

SEQ ID NO: 1036023 - RNA, 19 nt, Homo sapiens
  misc_RNA (1)...(19): siRNA sense strand
ucaagaaagagaagcugaa

SEQ ID NO: 1036024 - RNA, 19 nt, Homo sapiens
  misc_RNA (1)...(19): siRNA sense strand
ugggauggacaacuacaua

SEQ ID NO: 1036025 - RNA, 19 nt, Homo sapiens
  misc_RNA (1)...(19): siRNA sense strand
aaacagaaacagagaugca

SEQ ID NO: 1036026 - RNA, 19 nt, Homo sapiens
  misc_RNA (1)...(19): siRNA sense strand
ccauaagccagaugauguu

SEQ ID NO: 1036027 - RNA, 19 nt, Homo sapiens
  misc_RNA (1)...(19): siRNA sense strand
gggcaugaaggccuuacuu

SEQ ID NO: 1036028 - RNA, 19 nt, Homo sapiens
  misc_RNA (1)...(19): siRNA sense strand
caaauucucacagcuccaa

SEQ ID NO: 1036029 - RNA, 19 nt, Homo sapiens
  misc_RNA (1)...(19): siRNA sense strand
gauaauggagaguugacau

SEQ ID NO: 1036030 - RNA, 19 nt, Homo sapiens
  misc_RNA (1)...(19): siRNA sense strand
ggauggacaacuacauauc

SEQ ID NO: 1036031 - RNA, 19 nt, Homo sapiens
  misc_RNA (1)...(19): siRNA sense strand
gaaugugaguacggcuuca

SEQ ID NO: 1036032 - RNA, 19 nt, Homo sapiens
  misc_RNA (1)...(19): siRNA sense strand
gcaaaagaagucuaccaaa

SEQ ID NO: 1036033 - RNA, 19 nt, Homo sapiens
  misc_RNA (1)...(19): siRNA sense strand
caaugaugagggagguaua

SEQ ID NO: 1036034 - RNA, 19 nt, Homo sapiens
  misc_RNA (1)...(19): siRNA sense strand
gagaacacagucauucaac

SEQ ID NO: 1036035 - RNA, 19 nt, Homo sapiens
  misc_RNA (1)...(19): siRNA sense strand
cuccaaacauguaucucaa

SEQ ID NO: 1036036 - RNA, 19 nt, Homo sapiens
  misc_RNA (1)...(19): siRNA sense strand
aagcuccuauggaaacaga

SEQ ID NO: 1036037 - RNA, 19 nt, Homo sapiens
  misc_RNA (1)...(19): siRNA sense strand
aauauacuuucguggacaa

SEQ ID NO: 1036038 - RNA, 19 nt, Homo sapiens
  misc_RNA (1)...(19): siRNA sense strand
auauggcacagaaggauua

SEQ ID NO: 1036039 - RNA, 19 nt, Homo sapiens
  misc_RNA (1)...(19): siRNA sense strand
caacuacauaucuguuaca

SEQ ID NO: 1036040 - RNA, 19 nt, Homo sapiens
  misc_RNA (1)...(19): siRNA sense strand
gcuccuauggaaacagaaa

SEQ ID NO: 1036041 - RNA, 19 nt, Homo sapiens
  misc_RNA (1)...(19): siRNA sense strand
gguggauuacuaugaaguu

SEQ ID NO: 1036042 - RNA, 19 nt, Homo sapiens
  misc_RNA (1)...(19): siRNA sense strand
acacagucauucaacaacu

SEQ ID NO: 1036043 - RNA, 19 nt, Homo sapiens
  misc_RNA (1)...(19): siRNA sense strand
aaucguuaauggcagaaau

SEQ ID NO: 1036044 - RNA, 19 nt, Homo sapiens
  misc_RNA (1)...(19): siRNA sense strand
gauacaggauauacaucac

SEQ ID NO: 1036045 - RNA, 19 nt, Homo sapiens
  misc_RNA (1)...(19): siRNA sense strand
ucaaagagggugguaagag

SEQ ID NO: 1036046 - RNA, 19 nt, Homo sapiens
  misc_RNA (1)...(19): siRNA sense strand
caagaaagagaagcugaag

SEQ ID NO: 1036047 - RNA, 19 nt, Homo sapiens
  misc_RNA (1)...(19): siRNA sense strand
acaacuacauaucuguuac

SEQ ID NO: 1036048 - RNA, 19 nt, Homo sapiens
  misc_RNA (1)...(19): siRNA sense strand
aagaaguagcugaggcaua

SEQ ID NO: 1036049 - RNA, 19 nt, Homo sapiens
  misc_RNA (1)...(19): siRNA sense strand
caaugaagagggcuuugca

SEQ ID NO: 1036050 - RNA, 19 nt, Homo sapiens
  misc_RNA (1)...(19): siRNA sense strand
guggauuacuaugaaguuc

SEQ ID NO: 1036051 - RNA, 19 nt, Homo sapiens
  misc_RNA (1)...(19): siRNA sense strand
cuuaaauggcacccugaua

SEQ ID NO: 1036052 - RNA, 19 nt, Homo sapiens
  misc_RNA (1)...(19): siRNA sense strand
ggaguaagauguccaaaga

SEQ ID NO: 1036053 - RNA, 19 nt, Homo sapiens
  misc_RNA (1)...(19): siRNA sense strand
gaaagaagaguaugacaaa

SEQ ID NO: 1036054 - RNA, 19 nt, Homo sapiens
  misc_RNA (1)...(19): siRNA sense strand
caaacaaacuucaggauau

SEQ ID NO: 1036055 - RNA, 19 nt, Homo sapiens
  misc_RNA (1)...(19): siRNA sense strand
ugucagaaaugcauaguuu

SEQ ID NO: 1036056 - RNA, 19 nt, Homo sapiens
  misc_RNA (1)...(19): siRNA sense strand
ggaagacgacaaucuauga

SEQ ID NO: 1036057 - RNA, 19 nt, Homo sapiens
  misc_RNA (1)...(19): siRNA sense strand
gcaaccgucucacagcuaa

SEQ ID NO: 1036058 - RNA, 19 nt, Homo sapiens
  misc_RNA (1)...(19): siRNA sense strand
gcacaacccuaccugaaag

SEQ ID NO: 1036059 - RNA, 19 nt, Homo sapiens
  misc_RNA (1)...(19): siRNA sense strand
caaaggacaucaucagaag

SEQ ID NO: 1036060 - RNA, 19 nt, Homo sapiens
  misc_RNA (1)...(19): siRNA sense strand
agaagaauguuucaugcua

SEQ ID NO: 1036061 - RNA, 19 nt, Homo sapiens
  misc_RNA (1)...(19): siRNA sense strand
gagauaagcuucgacucuu

SEQ ID NO: 1036062 - RNA, 19 nt, Homo sapiens
  misc_RNA (1)...(19): siRNA sense strand
aaaggagaaugccacaaua

SEQ ID NO: 1036063 - RNA, 19 nt, Homo sapiens
  misc_RNA (1)...(19): siRNA sense strand
ggaauaaucccaucuaaaa

SEQ ID NO: 1036064 - RNA, 19 nt, Homo sapiens
  misc_RNA (1)...(19): siRNA sense strand
caaagaagaauguuucaug

SEQ ID NO: 1036065 - RNA, 19 nt, Homo sapiens
  misc_RNA (1)...(19): siRNA sense strand
gaacagagucagcauccaa

SEQ ID NO: 1036066 - RNA, 19 nt, Homo sapiens
  misc_RNA (1)...(19): siRNA sense strand
gcaguuccuucaccaagaa

SEQ ID NO: 1036067 - RNA, 19 nt, Homo sapiens
  misc_RNA (1)...(19): siRNA sense strand
gagcaaagaagaauguuuc
